United States Patent Application Publication US 2018/0305689 A1 - sequence listing, part 123

SEQ ID NO: 1789457 - RNA, 19 nt, Artificial Sequence
  Description of Artificial Sequence: Synthetic oligonucleotide
  Sense strand starting at position 495 of SEQ ID NO: 1563020
guaucugugggcaggaguu

SEQ ID NO: 1789458 - RNA, 19 nt, Artificial Sequence
  Description of Artificial Sequence: Synthetic oligonucleotide
  Antisense strand to SEQ ID NO: 1789457
aacuccugcccacagauac

SEQ ID NO: 1789459 - RNA, 19 nt, Artificial Sequence
  Description of Artificial Sequence: Synthetic oligonucleotide
  Sense strand starting at position 647 of SEQ ID NO: 1563020
guuccaggguccuugugau

SEQ ID NO: 1789460 - RNA, 19 nt, Artificial Sequence
  Description of Artificial Sequence: Synthetic oligonucleotide
  Antisense strand to SEQ ID NO: 1789459
aucacaaggacccuggaac

SEQ ID NO: 1789461 - RNA, 19 nt, Artificial Sequence
  Description of Artificial Sequence: Synthetic oligonucleotide
  Sense strand starting at position 651 of SEQ ID NO: 1563020
caggguccuugugauggaa

SEQ ID NO: 1789462 - RNA, 19 nt, Artificial Sequence
  Description of Artificial Sequence: Synthetic oligonucleotide
  Antisense strand to SEQ ID NO: 1789461
uuccaucacaaggacccug

SEQ ID NO: 1789463 - RNA, 19 nt, Artificial Sequence
  Description of Artificial Sequence: Synthetic oligonucleotide
  Sense strand starting at position 1576 of SEQ ID NO: 1563020
gguggagguuuguugauga

SEQ ID NO: 1789464 - RNA, 19 nt, Artificial Sequence
  Description of Artificial Sequence: Synthetic oligonucleotide
  Antisense strand to SEQ ID NO: 1789463
ucaucaacaaaccuccacc

SEQ ID NO: 1789465 - RNA, 19 nt, Artificial Sequence
  Description of Artificial Sequence: Synthetic oligonucleotide
  Sense strand starting at position 1580 of SEQ ID NO: 1563020
gagguuuguugaugauaag

SEQ ID NO: 1789466 - RNA, 19 nt, Artificial Sequence
  Description of Artificial Sequence: Synthetic oligonucleotide
  Antisense strand to SEQ ID NO: 1789465
cuuaucaucaacaaaccuc

SEQ ID NO: 1789467 - RNA, 19 nt, Artificial Sequence
  Description of Artificial Sequence: Synthetic oligonucleotide
  Sense strand starting at position 1583 of SEQ ID NO: 1563020
guuuguugaugauaaggaa

SEQ ID NO: 1789468 - RNA, 19 nt, Artificial Sequence
  Description of Artificial Sequence: Synthetic oligonucleotide
  Antisense strand to SEQ ID NO: 1789467
uuccuuaucaucaacaaac

SEQ ID NO: 1789469 - RNA, 19 nt, Artificial Sequence
  Description of Artificial Sequence: Synthetic oligonucleotide
  Sense strand starting at position 1586 of SEQ ID NO: 1563020
uguugaugauaaggaagaa

SEQ ID NO: 1789470 - RNA, 19 nt, Artificial Sequence
  Description of Artificial Sequence: Synthetic oligonucleotide
  Antisense strand to SEQ ID NO: 1789469
uucuuccuuaucaucaaca

SEQ ID NO: 1789471 - RNA, 19 nt, Artificial Sequence
  Description of Artificial Sequence: Synthetic oligonucleotide
  Sense strand starting at position 1832 of SEQ ID NO: 1563020
gggcucguccuuaggaagu

SEQ ID NO: 1789472 - RNA, 19 nt, Artificial Sequence
  Description of Artificial Sequence: Synthetic oligonucleotide
  Antisense strand to SEQ ID NO: 1789471
acuuccuaaggacgagccc

SEQ ID NO: 1789473 - RNA, 19 nt, Artificial Sequence
  Description of Artificial Sequence: Synthetic oligonucleotide
  Sense strand starting at position 2210 of SEQ ID NO: 1563020
gaggcuuaucuugggcuua

SEQ ID NO: 1789474 - RNA, 19 nt, Artificial Sequence
  Description of Artificial Sequence: Synthetic oligonucleotide
  Antisense strand to SEQ ID NO: 1789473
uaagcccaagauaagccuc

SEQ ID NO: 1789475 - RNA, 19 nt, Artificial Sequence
  Description of Artificial Sequence: Synthetic oligonucleotide
  Sense strand starting at position 2212 of SEQ ID NO: 1563020
ggcuuaucuugggcuuagu

SEQ ID NO: 1789476 - RNA, 19 nt, Artificial Sequence
  Description of Artificial Sequence: Synthetic oligonucleotide
  Antisense strand to SEQ ID NO: 1789475
acuaagcccaagauaagcc

SEQ ID NO: 1789477 - RNA, 19 nt, Artificial Sequence
  Description of Artificial Sequence: Synthetic oligonucleotide
  Sense strand starting at position 2563 of SEQ ID NO: 1563020
agggaucccucugagaagu

SEQ ID NO: 1789478 - RNA, 19 nt, Artificial Sequence
  Description of Artificial Sequence: Synthetic oligonucleotide
  Antisense strand to SEQ ID NO: 1789477
acuucucagagggaucccu

SEQ ID NO: 1789479 - RNA, 19 nt, Artificial Sequence
  Description of Artificial Sequence: Synthetic oligonucleotide
  Sense strand starting at position 2718 of SEQ ID NO: 1563020
guaggucuuagaggcauuu

SEQ ID NO: 1789480 - RNA, 19 nt, Artificial Sequence
  Description of Artificial Sequence: Synthetic oligonucleotide
  Antisense strand to SEQ ID NO: 1789479
aaaugccucuaagaccuac

SEQ ID NO: 1789481 - RNA, 19 nt, Artificial Sequence
  Description of Artificial Sequence: Synthetic oligonucleotide
  Sense strand starting at position 2811 of SEQ ID NO: 1563020
uaguccugauugucacgaa

SEQ ID NO: 1789482 - RNA, 19 nt, Artificial Sequence
  Description of Artificial Sequence: Synthetic oligonucleotide
  Antisense strand to SEQ ID NO: 1789481
uucgugacaaucaggacua

SEQ ID NO: 1789483 - RNA, 19 nt, Artificial Sequence
  Description of Artificial Sequence: Synthetic oligonucleotide
  Sense strand starting at position 2979 of SEQ ID NO: 1563020
cgcagugcuguucucuuaa

SEQ ID NO: 1789484 - RNA, 19 nt, Artificial Sequence
  Description of Artificial Sequence: Synthetic oligonucleotide
  Antisense strand to SEQ ID NO: 1789483
uuaagagaacagcacugcg

SEQ ID NO: 1789485 - RNA, 19 nt, Artificial Sequence
  Description of Artificial Sequence: Synthetic oligonucleotide
  Sense strand starting at position 3035 of SEQ ID NO: 1563020
ggguguauguggguuaugu

SEQ ID NO: 1789486 - RNA, 19 nt, Artificial Sequence
  Description of Artificial Sequence: Synthetic oligonucleotide
  Antisense strand to SEQ ID NO: 1789485
acauaacccacauacaccc

SEQ ID NO: 1789487 - RNA, 19 nt, Artificial Sequence
  Description of Artificial Sequence: Synthetic oligonucleotide
  Sense strand starting at position 3037 of SEQ ID NO: 1563020
guguauguggguuauguaa

SEQ ID NO: 1789488 - RNA, 19 nt, Artificial Sequence
  Description of Artificial Sequence: Synthetic oligonucleotide
  Antisense strand to SEQ ID NO: 1789487
uuacauaacccacauacac

SEQ ID NO: 1789489 - RNA, 19 nt, Artificial Sequence
  Description of Artificial Sequence: Synthetic oligonucleotide
  Sense strand starting at position 3176 of SEQ ID NO: 1563020
aggccucaugcuugggaaa

SEQ ID NO: 1789490 - RNA, 19 nt, Artificial Sequence
  Description of Artificial Sequence: Synthetic oligonucleotide
  Antisense strand to SEQ ID NO: 1789489
uuucccaagcaugaggccu

SEQ ID NO: 1789491 - RNA, 19 nt, Artificial Sequence
  Description of Artificial Sequence: Synthetic oligonucleotide
  Sense strand starting at position 3370 of SEQ ID NO: 1563020
cucggagcccagugaauua

SEQ ID NO: 1789492 - RNA, 19 nt, Artificial Sequence
  Description of Artificial Sequence: Synthetic oligonucleotide
  Antisense strand to SEQ ID NO: 1789491
uaauucacugggcuccgag

SEQ ID NO: 1789493 - RNA, 19 nt, Artificial Sequence
  Description of Artificial Sequence: Synthetic oligonucleotide
  Sense strand starting at position 3386 of SEQ ID NO: 1563020
uuaggaguuugauaagggu

SEQ ID NO: 1789494 - RNA, 19 nt, Artificial Sequence
  Description of Artificial Sequence: Synthetic oligonucleotide
  Antisense strand to SEQ ID NO: 1789493
acccuuaucaaacuccuaa

SEQ ID NO: 1789495 - RNA, 19 nt, Artificial Sequence
  Description of Artificial Sequence: Synthetic oligonucleotide
  Sense strand starting at position 3543 of SEQ ID NO: 1563020
gugagcugucuuuguucga

SEQ ID NO: 1789496 - RNA, 19 nt, Artificial Sequence
  Description of Artificial Sequence: Synthetic oligonucleotide
  Antisense strand to SEQ ID NO: 1789495
ucgaacaaagacagcucac

SEQ ID NO: 1789497 - RNA, 19 nt, Artificial Sequence
  Description of Artificial Sequence: Synthetic oligonucleotide
  Sense strand starting at position 3544 of SEQ ID NO: 1563020
ugagcugucuuuguucgaa

SEQ ID NO: 1789498 - RNA, 19 nt, Artificial Sequence
  Description of Artificial Sequence: Synthetic oligonucleotide
  Antisense strand to SEQ ID NO: 1789497
uucgaacaaagacagcuca

SEQ ID NO: 1789499 - RNA, 19 nt, Artificial Sequence
  Description of Artificial Sequence: Synthetic oligonucleotide
  Sense strand starting at position 3546 of SEQ ID NO: 1563020
agcugucuuuguucgaaau

SEQ ID NO: 1789500 - RNA, 19 nt, Artificial Sequence
  Description of Artificial Sequence: Synthetic oligonucleotide
  Antisense strand to SEQ ID NO: 1789499
auuucgaacaaagacagcu

SEQ ID NO: 1789501 - RNA, 19 nt, Artificial Sequence
  Description of Artificial Sequence: Synthetic oligonucleotide
  Sense strand starting at position 3547 of SEQ ID NO: 1563020
gcugucuuuguucgaaaua

SEQ ID NO: 1789502 - RNA, 19 nt, Artificial Sequence
  Description of Artificial Sequence: Synthetic oligonucleotide
  Antisense strand to SEQ ID NO: 1789501
uauuucgaacaaagacagc

SEQ ID NO: 1789503 - RNA, 19 nt, Artificial Sequence
  Description of Artificial Sequence: Synthetic oligonucleotide
  Sense strand starting at position 3552 of SEQ ID NO: 1563020
cuuuguucgaaauacaggu

SEQ ID NO: 1789504 - RNA, 19 nt, Artificial Sequence
  Description of Artificial Sequence: Synthetic oligonucleotide
  Antisense strand to SEQ ID NO: 1789503
accuguauuucgaacaaag

SEQ ID NO: 1789505 - RNA, 19 nt, Artificial Sequence
  Description of Artificial Sequence: Synthetic oligonucleotide
  Sense strand starting at position 3573 of SEQ ID NO: 1563020
acggcaaucaugugauuaa

SEQ ID NO: 1789506 - RNA, 19 nt, Artificial Sequence
  Description of Artificial Sequence: Synthetic oligonucleotide
  Antisense strand to SEQ ID NO: 1789505
uuaaucacaugauugccgu

SEQ ID NO: 1789507 - RNA, 19 nt, Artificial Sequence
  Description of Artificial Sequence: Synthetic oligonucleotide
  Sense strand starting at position 3576 of SEQ ID NO: 1563020
gcaaucaugugauuaacac

SEQ ID NO: 1789508 - RNA, 19 nt, Artificial Sequence
  Description of Artificial Sequence: Synthetic oligonucleotide
  Antisense strand to SEQ ID NO: 1789507
guguuaaucacaugauugc

SEQ ID NO: 1789509 - RNA, 19 nt, Artificial Sequence
  Description of Artificial Sequence: Synthetic oligonucleotide
  Sense strand starting at position 3807 of SEQ ID NO: 1563020
cucaguuccuccucuuuga

SEQ ID NO: 1789510 - RNA, 19 nt, Artificial Sequence
  Description of Artificial Sequence: Synthetic oligonucleotide
  Antisense strand to SEQ ID NO: 1789509
ucaaagaggaggaacugag

SEQ ID NO: 1789511 - RNA, 19 nt, Artificial Sequence
  Description of Artificial Sequence: Synthetic oligonucleotide
  Sense strand starting at position 3811 of SEQ ID NO: 1563020
guuccuccucuuugaggaa

SEQ ID NO: 1789512 - RNA, 19 nt, Artificial Sequence
  Description of Artificial Sequence: Synthetic oligonucleotide
  Antisense strand to SEQ ID NO: 1789511
uuccucaaagaggaggaac

SEQ ID NO: 1789513 - RNA, 19 nt, Artificial Sequence
  Description of Artificial Sequence: Synthetic oligonucleotide
  Sense strand starting at position 3812 of SEQ ID NO: 1563020
uuccuccucuuugaggaaa

SEQ ID NO: 1789514 - RNA, 19 nt, Artificial Sequence
  Description of Artificial Sequence: Synthetic oligonucleotide
  Antisense strand to SEQ ID NO: 1789513
uuuccucaaagaggaggaa

SEQ ID NO: 1789515 - RNA, 19 nt, Artificial Sequence
  Description of Artificial Sequence: Synthetic oligonucleotide
  Sense strand starting at position 3853 of SEQ ID NO: 1563020
gucugugacuggccugaga

SEQ ID NO: 1789516 - RNA, 19 nt, Artificial Sequence
  Description of Artificial Sequence: Synthetic oligonucleotide
  Antisense strand to SEQ ID NO: 1789515
ucucaggccagucacagac

SEQ ID NO: 1789517 - RNA, 19 nt, Artificial Sequence
  Description of Artificial Sequence: Synthetic oligonucleotide
  Sense strand starting at position 417 of SEQ ID NO: 1563021
ggagcucggccuuguuaua

SEQ ID NO: 1789518 - RNA, 19 nt, Artificial Sequence
  Description of Artificial Sequence: Synthetic oligonucleotide
  Antisense strand to SEQ ID NO: 1789517
uauaacaaggccgagcucc

SEQ ID NO: 1789519 - RNA, 19 nt, Artificial Sequence
  Description of Artificial Sequence: Synthetic oligonucleotide
  Sense strand starting at position 819 of SEQ ID NO: 1563021
gacugcuguugucuacaaa

SEQ ID NO: 1789520 - RNA, 19 nt, Artificial Sequence
  Description of Artificial Sequence: Synthetic oligonucleotide
  Antisense strand to SEQ ID NO: 1789519
uuuguagacaacagcaguc

SEQ ID NO: 1789521 - RNA, 19 nt, Artificial Sequence
  Description of Artificial Sequence: Synthetic oligonucleotide
  Sense strand starting at position 900 of SEQ ID NO: 1563021
aaaggcuuguaucuguuau

SEQ ID NO: 1789522 - RNA, 19 nt, Artificial Sequence
  Description of Artificial Sequence: Synthetic oligonucleotide
  Antisense strand to SEQ ID NO: 1789521
auaacagauacaagccuuu

SEQ ID NO: 1789523 - RNA, 19 nt, Artificial Sequence
  Description of Artificial Sequence: Synthetic oligonucleotide
  Sense strand starting at position 902 of SEQ ID NO: 1563021
aggcuuguaucuguuauaa

SEQ ID NO: 1789524 - RNA, 19 nt, Artificial Sequence
  Description of Artificial Sequence: Synthetic oligonucleotide
  Antisense strand to SEQ ID NO: 1789523
uuauaacagauacaagccu

SEQ ID NO: 1789525 - RNA, 19 nt, Artificial Sequence
  Description of Artificial Sequence: Synthetic oligonucleotide
  Sense strand starting at position 912 of SEQ ID NO: 1563021
cuguuauaagcuugggaaa

SEQ ID NO: 1789526 - RNA, 19 nt, Artificial Sequence
  Description of Artificial Sequence: Synthetic oligonucleotide
  Antisense strand to SEQ ID NO: 1789525
uuucccaagcuuauaacag

SEQ ID NO: 1789527 - RNA, 19 nt, Artificial Sequence
  Description of Artificial Sequence: Synthetic oligonucleotide
  Sense strand starting at position 913 of SEQ ID NO: 1563021
uguuauaagcuugggaaau

SEQ ID NO: 1789528 - RNA, 19 nt, Artificial Sequence
  Description of Artificial Sequence: Synthetic oligonucleotide
  Antisense strand to SEQ ID NO: 1789527
auuucccaagcuuauaaca

SEQ ID NO: 1789529 - RNA, 19 nt, Artificial Sequence
  Description of Artificial Sequence: Synthetic oligonucleotide
  Sense strand starting at position 915 of SEQ ID NO: 1563021
uuauaagcuugggaaauau

SEQ ID NO: 1789530 - RNA, 19 nt, Artificial Sequence
  Description of Artificial Sequence: Synthetic oligonucleotide
  Antisense strand to SEQ ID NO: 1789529
auauuucccaagcuuauaa

SEQ ID NO: 1789531 - RNA, 19 nt, Artificial Sequence
  Description of Artificial Sequence: Synthetic oligonucleotide
  Sense strand starting at position 925 of SEQ ID NO: 1563021
gggaaauauuaucauggcu

SEQ ID NO: 1789532 - RNA, 19 nt, Artificial Sequence
  Description of Artificial Sequence: Synthetic oligonucleotide
  Antisense strand to SEQ ID NO: 1789531
agccaugauaauauuuccc

SEQ ID NO: 1789533 - RNA, 19 nt, Artificial Sequence
  Description of Artificial Sequence: Synthetic oligonucleotide
  Sense strand starting at position 930 of SEQ ID NO: 1563021
auauuaucauggcuuaaga

SEQ ID NO: 1789534 - RNA, 19 nt, Artificial Sequence
  Description of Artificial Sequence: Synthetic oligonucleotide
  Antisense strand to SEQ ID NO: 1789533
ucuuaagccaugauaauau

SEQ ID NO: 1789535 - RNA, 19 nt, Artificial Sequence
  Description of Artificial Sequence: Synthetic oligonucleotide
  Sense strand starting at position 992 of SEQ ID NO: 1563021
ggcuguucacgggaaucuu

SEQ ID NO: 1789536 - RNA, 19 nt, Artificial Sequence
  Description of Artificial Sequence: Synthetic oligonucleotide
  Antisense strand to SEQ ID NO: 1789535
aagauucccgugaacagcc

SEQ ID NO: 1789537 - RNA, 19 nt, Artificial Sequence
  Description of Artificial Sequence: Synthetic oligonucleotide
  Sense strand starting at position 1074 of SEQ ID NO: 1563021
uuugaaugaucacagaauu

SEQ ID NO: 1789538 - RNA, 19 nt, Artificial Sequence
  Description of Artificial Sequence: Synthetic oligonucleotide
  Antisense strand to SEQ ID NO: 1789537
aauucugugaucauucaaa

SEQ ID NO: 1789539 - RNA, 19 nt, Artificial Sequence
  Description of Artificial Sequence: Synthetic oligonucleotide
  Sense strand starting at position 1098 of SEQ ID NO: 1563021
guguucuguaaaugggcua

SEQ ID NO: 1789540 - RNA, 19 nt, Artificial Sequence
  Description of Artificial Sequence: Synthetic oligonucleotide
  Antisense strand to SEQ ID NO: 1789539
uagcccauuuacagaacac

SEQ ID NO: 1789541 - RNA, 19 nt, Artificial Sequence
  Description of Artificial Sequence: Synthetic oligonucleotide
  Sense strand starting at position 1175 of SEQ ID NO: 1563021
cgacuaugaugucuuagac

SEQ ID NO: 1789542 - RNA, 19 nt, Artificial Sequence
  Description of Artificial Sequence: Synthetic oligonucleotide
  Antisense strand to SEQ ID NO: 1789541
gucuaagacaucauagucg

SEQ ID NO: 1789543 - RNA, 19 nt, Artificial Sequence
  Description of Artificial Sequence: Synthetic oligonucleotide
  Sense strand starting at position 1190 of SEQ ID NO: 1563021
agacuuaacuacuuaaggu

SEQ ID NO: 1789544 - RNA, 19 nt, Artificial Sequence
  Description of Artificial Sequence: Synthetic oligonucleotide
  Antisense strand to SEQ ID NO: 1789543
accuuaaguaguuaagucu

SEQ ID NO: 1789545 - RNA, 19 nt, Artificial Sequence
  Description of Artificial Sequence: Synthetic oligonucleotide
  Sense strand starting at position 1281 of SEQ ID NO: 1563021
ugcaauuaaccacgucuca

SEQ ID NO: 1789546 - RNA, 19 nt, Artificial Sequence
  Description of Artificial Sequence: Synthetic oligonucleotide
  Antisense strand to SEQ ID NO: 1789545
ugagacgugguuaauugca

SEQ ID NO: 1789547 - RNA, 19 nt, Artificial Sequence
  Description of Artificial Sequence: Synthetic oligonucleotide
  Sense strand starting at position 1286 of SEQ ID NO: 1563021
uuaaccacgucucaagaaa

SEQ ID NO: 1789548 - RNA, 19 nt, Artificial Sequence
  Description of Artificial Sequence: Synthetic oligonucleotide
  Antisense strand to SEQ ID NO: 1789547
uuucuugagacgugguuaa

SEQ ID NO: 1789549 - RNA, 19 nt, Artificial Sequence
  Description of Artificial Sequence: Synthetic oligonucleotide
  Sense strand starting at position 2270 of SEQ ID NO: 1563021
gcggaaugaugcucagagu

SEQ ID NO: 1789550 - RNA, 19 nt, Artificial Sequence
  Description of Artificial Sequence: Synthetic oligonucleotide
  Antisense strand to SEQ ID NO: 1789549
acucugagcaucauuccgc

SEQ ID NO: 1789551 - RNA, 19 nt, Artificial Sequence
  Description of Artificial Sequence: Synthetic oligonucleotide
  Sense strand starting at position 2271 of SEQ ID NO: 1563021
cggaaugaugcucagaguc

SEQ ID NO: 1789552 - RNA, 19 nt, Artificial Sequence
  Description of Artificial Sequence: Synthetic oligonucleotide
  Antisense strand to SEQ ID NO: 1789551
gacucugagcaucauuccg

SEQ ID NO: 1789553 - RNA, 19 nt, Artificial Sequence
  Description of Artificial Sequence: Synthetic oligonucleotide
  Sense strand starting at position 2304 of SEQ ID NO: 1563021
guucuccucagcguguuua

SEQ ID NO: 1789554 - RNA, 19 nt, Artificial Sequence
  Description of Artificial Sequence: Synthetic oligonucleotide
  Antisense strand to SEQ ID NO: 1789553
uaaacacgcugaggagaac

SEQ ID NO: 1789555 - RNA, 19 nt, Artificial Sequence
  Description of Artificial Sequence: Synthetic oligonucleotide
  Sense strand starting at position 2315 of SEQ ID NO: 1563021
cguguuuaccgugugccaa

SEQ ID NO: 1789556 - RNA, 19 nt, Artificial Sequence
  Description of Artificial Sequence: Synthetic oligonucleotide
  Antisense strand to SEQ ID NO: 1789555
uuggcacacgguaaacacg

SEQ ID NO: 1789557 - RNA, 19 nt, Artificial Sequence
  Description of Artificial Sequence: Synthetic oligonucleotide
  Sense strand starting at position 2333 of SEQ ID NO: 1563021
aggacugugcuaugcauga

SEQ ID NO: 1789558 - RNA, 19 nt, Artificial Sequence
  Description of Artificial Sequence: Synthetic oligonucleotide
  Antisense strand to SEQ ID NO: 1789557
ucaugcauagcacaguccu

SEQ ID NO: 1789559 - RNA, 19 nt, Artificial Sequence
  Description of Artificial Sequence: Synthetic oligonucleotide
  Sense strand starting at position 2337 of SEQ ID NO: 1563021
cugugcuaugcaugagcca

SEQ ID NO: 1789560 - RNA, 19 nt, Artificial Sequence
  Description of Artificial Sequence: Synthetic oligonucleotide
  Antisense strand to SEQ ID NO: 1789559
uggcucaugcauagcacag

SEQ ID NO: 1789561 - RNA, 19 nt, Artificial Sequence
  Description of Artificial Sequence: Synthetic oligonucleotide
  Sense strand starting at position 2391 of SEQ ID NO: 1563021
uggcacucccgguacauaa

SEQ ID NO: 1789562 - RNA, 19 nt, Artificial Sequence
  Description of Artificial Sequence: Synthetic oligonucleotide
  Antisense strand to SEQ ID NO: 1789561
uuauguaccgggagugcca

SEQ ID NO: 1789563 - RNA, 19 nt, Artificial Sequence
  Description of Artificial Sequence: Synthetic oligonucleotide
  Sense strand starting at position 2424 of SEQ ID NO: 1563021
agaauaagcgagcaacaua

SEQ ID NO: 1789564 - RNA, 19 nt, Artificial Sequence
  Description of Artificial Sequence: Synthetic oligonucleotide
  Antisense strand to SEQ ID NO: 1789563
uauguugcucgcuuauucu

SEQ ID NO: 1789565 - RNA, 19 nt, Artificial Sequence
  Description of Artificial Sequence: Synthetic oligonucleotide
  Sense strand starting at position 2431 of SEQ ID NO: 1563021
gcgagcaacauauauguau

SEQ ID NO: 1789566 - RNA, 19 nt, Artificial Sequence
  Description of Artificial Sequence: Synthetic oligonucleotide
  Antisense strand to SEQ ID NO: 1789565
auacauauauguugcucgc

SEQ ID NO: 1789567 - RNA, 19 nt, Artificial Sequence
  Description of Artificial Sequence: Synthetic oligonucleotide
  Sense strand starting at position 2684 of SEQ ID NO: 1563021
gaaugcugaugccuaagaa

SEQ ID NO: 1789568 - RNA, 19 nt, Artificial Sequence
  Description of Artificial Sequence: Synthetic oligonucleotide
  Antisense strand to SEQ ID NO: 1789567
uucuuaggcaucagcauuc

SEQ ID NO: 1789569 - RNA, 19 nt, Artificial Sequence
  Description of Artificial Sequence: Synthetic oligonucleotide
  Sense strand starting at position 2745 of SEQ ID NO: 1563021
cacgguggucaagaaggau

SEQ ID NO: 1789570 - RNA, 19 nt, Artificial Sequence
  Description of Artificial Sequence: Synthetic oligonucleotide
  Antisense strand to SEQ ID NO: 1789569
auccuucuugaccaccgug

SEQ ID NO: 1789571 - RNA, 19 nt, Artificial Sequence
  Description of Artificial Sequence: Synthetic oligonucleotide
  Sense strand starting at position 3123 of SEQ ID NO: 1563021
ucauguagucccgaggcua

SEQ ID NO: 1789572 - RNA, 19 nt, Artificial Sequence
  Description of Artificial Sequence: Synthetic oligonucleotide
  Antisense strand to SEQ ID NO: 1789571
uagccucgggacuacauga

SEQ ID NO: 1789573 - RNA, 19 nt, Artificial Sequence
  Description of Artificial Sequence: Synthetic oligonucleotide
  Sense strand starting at position 3135 of SEQ ID NO: 1563021
gaggcuacuacgugaagga

SEQ ID NO: 1789574 - RNA, 19 nt, Artificial Sequence
  Description of Artificial Sequence: Synthetic oligonucleotide
  Antisense strand to SEQ ID NO: 1789573
uccuucacguaguagccuc

SEQ ID NO: 1789575 - RNA, 19 nt, Artificial Sequence
  Description of Artificial Sequence: Synthetic oligonucleotide
  Sense strand starting at position 3433 of SEQ ID NO: 1563021
aggcaaauuuggucgugga

SEQ ID NO: 1789576 - RNA, 19 nt, Artificial Sequence
  Description of Artificial Sequence: Synthetic oligonucleotide
  Antisense strand to SEQ ID NO: 1789575
uccacgaccaaauuugccu

SEQ ID NO: 1789577 - RNA, 19 nt, Artificial Sequence
  Description of Artificial Sequence: Synthetic oligonucleotide
  Sense strand starting at position 3434 of SEQ ID NO: 1563021
ggcaaauuuggucguggac

SEQ ID NO: 1789578 - RNA, 19 nt, Artificial Sequence
  Description of Artificial Sequence: Synthetic oligonucleotide
  Antisense strand to SEQ ID NO: 1789577
guccacgaccaaauuugcc

SEQ ID NO: 1789579 - RNA, 19 nt, Artificial Sequence
  Description of Artificial Sequence: Synthetic oligonucleotide
  Sense strand starting at position 3436 of SEQ ID NO: 1563021
caaauuuggucguggacac

SEQ ID NO: 1789580 - RNA, 19 nt, Artificial Sequence
  Description of Artificial Sequence: Synthetic oligonucleotide
  Antisense strand to SEQ ID NO: 1789579
guguccacgaccaaauuug

SEQ ID NO: 1789581 - RNA, 19 nt, Artificial Sequence
  Description of Artificial Sequence: Synthetic oligonucleotide
  Sense strand starting at position 3457 of SEQ ID NO: 1563021
ucagccaccucaguagaau

SEQ ID NO: 1789582 - RNA, 19 nt, Artificial Sequence
  Description of Artificial Sequence: Synthetic oligonucleotide
  Antisense strand to SEQ ID NO: 1789581
auucuacugagguggcuga

SEQ ID NO: 1789583 - RNA, 19 nt, Artificial Sequence
  Description of Artificial Sequence: Synthetic oligonucleotide
  Sense strand starting at position 3663 of SEQ ID NO: 1563021
caacuuggucgugauacau

SEQ ID NO: 1789584 - RNA, 19 nt, Artificial Sequence
  Description of Artificial Sequence: Synthetic oligonucleotide
  Antisense strand to SEQ ID NO: 1789583
auguaucacgaccaaguug

SEQ ID NO: 1789585 - RNA, 19 nt, Artificial Sequence
  Description of Artificial Sequence: Synthetic oligonucleotide
  Sense strand starting at position 3669 of SEQ ID NO: 1563021
ggucgugauacauguuuaa

SEQ ID NO: 1789586 - RNA, 19 nt, Artificial Sequence
  Description of Artificial Sequence: Synthetic oligonucleotide
  Antisense strand to SEQ ID NO: 1789585
uuaaacauguaucacgacc

SEQ ID NO: 1789587 - RNA, 19 nt, Artificial Sequence
  Description of Artificial Sequence: Synthetic oligonucleotide
  Sense strand starting at position 3673 of SEQ ID NO: 1563021
gugauacauguuuaaucca

SEQ ID NO: 1789588 - RNA, 19 nt, Artificial Sequence
  Description of Artificial Sequence: Synthetic oligonucleotide
  Antisense strand to SEQ ID NO: 1789587
uggauuaaacauguaucac

SEQ ID NO: 1789589 - RNA, 19 nt, Artificial Sequence
  Description of Artificial Sequence: Synthetic oligonucleotide
  Sense strand starting at position 3742 of SEQ ID NO: 1563021
auaagaaguuaguccauac

SEQ ID NO: 1789590 - RNA, 19 nt, Artificial Sequence
  Description of Artificial Sequence: Synthetic oligonucleotide
  Antisense strand to SEQ ID NO: 1789589
guauggacuaacuucuuau

SEQ ID NO: 1789591 - RNA, 19 nt, Artificial Sequence
  Description of Artificial Sequence: Synthetic oligonucleotide
  Sense strand starting at position 3765 of SEQ ID NO: 1563021
gccuccuuguacuauuuau

SEQ ID NO: 1789592 - RNA, 19 nt, Artificial Sequence
  Description of Artificial Sequence: Synthetic oligonucleotide
  Antisense strand to SEQ ID NO: 1789591
auaaauaguacaaggaggc

SEQ ID NO: 1789593 - RNA, 19 nt, Artificial Sequence
  Description of Artificial Sequence: Synthetic oligonucleotide
  Sense strand starting at position 3852 of SEQ ID NO: 1563021
cugaaagauuaucuaggcu

SEQ ID NO: 1789594 - RNA, 19 nt, Artificial Sequence
  Description of Artificial Sequence: Synthetic oligonucleotide
  Antisense strand to SEQ ID NO: 1789593
agccuagauaaucuuucag

SEQ ID NO: 1789595 - RNA, 19 nt, Artificial Sequence
  Description of Artificial Sequence: Synthetic oligonucleotide
  Sense strand starting at position 3877 of SEQ ID NO: 1563021
uguggccuacgcuuguaaa

SEQ ID NO: 1789596 - RNA, 19 nt, Artificial Sequence
  Description of Artificial Sequence: Synthetic oligonucleotide
  Antisense strand to SEQ ID NO: 1789595
uuuacaagcguaggccaca

SEQ ID NO: 1789597 - RNA, 19 nt, Artificial Sequence
  Description of Artificial Sequence: Synthetic oligonucleotide
  Sense strand starting at position 167 of SEQ ID NO: 1563022
uauggauucccaggaaguu

SEQ ID NO: 1789598 - RNA, 19 nt, Artificial Sequence
  Description of Artificial Sequence: Synthetic oligonucleotide
  Antisense strand to SEQ ID NO: 1789597
aacuuccugggaauccaua

SEQ ID NO: 1789599 - RNA, 19 nt, Artificial Sequence
  Description of Artificial Sequence: Synthetic oligonucleotide
  Sense strand starting at position 232 of SEQ ID NO: 1563022
cccaacugucuguggauaa

SEQ ID NO: 1789600 - RNA, 19 nt, Artificial Sequence
  Description of Artificial Sequence: Synthetic oligonucleotide
  Antisense strand to SEQ ID NO: 1789599
uuauccacagacaguuggg

SEQ ID NO: 1789601 - RNA, 19 nt, Artificial Sequence
  Description of Artificial Sequence: Synthetic oligonucleotide
  Sense strand starting at position 400 of SEQ ID NO: 1563022
gaaggugaaucaccugagu

SEQ ID NO: 1789602 - RNA, 19 nt, Artificial Sequence
  Description of Artificial Sequence: Synthetic oligonucleotide
  Antisense strand to SEQ ID NO: 1789601
acucaggugauucaccuuc

SEQ ID NO: 1789603 - RNA, 19 nt, Artificial Sequence
  Description of Artificial Sequence: Synthetic oligonucleotide
  Sense strand starting at position 690 of SEQ ID NO: 1563022
aguuucuaacuagaagucu

SEQ ID NO: 1789604 - RNA, 19 nt, Artificial Sequence
  Description of Artificial Sequence: Synthetic oligonucleotide
  Antisense strand to SEQ ID NO: 1789603
agacuucuaguuagaaacu

SEQ ID NO: 1789605 - RNA, 19 nt, Artificial Sequence
  Description of Artificial Sequence: Synthetic oligonucleotide
  Sense strand starting at position 696 of SEQ ID NO: 1563022
uaacuagaagucugugauc

SEQ ID NO: 1789606 - RNA, 19 nt, Artificial Sequence
  Description of Artificial Sequence: Synthetic oligonucleotide
  Antisense strand to SEQ ID NO: 1789605
gaucacagacuucuaguua

SEQ ID NO: 1789607 - RNA, 19 nt, Artificial Sequence
  Description of Artificial Sequence: Synthetic oligonucleotide
  Sense strand starting at position 698 of SEQ ID NO: 1563022
acuagaagucugugaucau

SEQ ID NO: 1789608 - RNA, 19 nt, Artificial Sequence
  Description of Artificial Sequence: Synthetic oligonucleotide
  Antisense strand to SEQ ID NO: 1789607
augaucacagacuucuagu

SEQ ID NO: 1789609 - RNA, 19 nt, Artificial Sequence
  Description of Artificial Sequence: Synthetic oligonucleotide
  Sense strand starting at position 722 of SEQ ID NO: 1563022
ccugccuguccuuaagagu

SEQ ID NO: 1789610 - RNA, 19 nt, Artificial Sequence
  Description of Artificial Sequence: Synthetic oligonucleotide
  Antisense strand to SEQ ID NO: 1789609
acucuuaaggacaggcagg

SEQ ID NO: 1789611 - RNA, 19 nt, Artificial Sequence
  Description of Artificial Sequence: Synthetic oligonucleotide
  Sense strand starting at position 781 of SEQ ID NO: 1563022
ggaugaggguguuuguaug

SEQ ID NO: 1789612 - RNA, 19 nt, Artificial Sequence
  Description of Artificial Sequence: Synthetic oligonucleotide
  Antisense strand to SEQ ID NO: 1789611
cauacaaacacccucaucc

SEQ ID NO: 1789613 - RNA, 19 nt, Artificial Sequence
  Description of Artificial Sequence: Synthetic oligonucleotide
  Sense strand starting at position 817 of SEQ ID NO: 1563022
ugcuuuagcuuccugauuu

SEQ ID NO: 1789614 - RNA, 19 nt, Artificial Sequence
  Description of Artificial Sequence: Synthetic oligonucleotide
  Antisense strand to SEQ ID NO: 1789613
aaaucaggaagcuaaagca

SEQ ID NO: 1789615 - RNA, 19 nt, Artificial Sequence
  Description of Artificial Sequence: Synthetic oligonucleotide
  Sense strand starting at position 838 of SEQ ID NO: 1563022
uuggaucuaugaguauaua

SEQ ID NO: 1789616 - RNA, 19 nt, Artificial Sequence
  Description of Artificial Sequence: Synthetic oligonucleotide
  Antisense strand to SEQ ID NO: 1789615
uauauacucauagauccaa

SEQ ID NO: 1789617 - RNA, 19 nt, Artificial Sequence
  Description of Artificial Sequence: Synthetic oligonucleotide
  Sense strand starting at position 861 of SEQ ID NO: 1563022
ccaucaaauuuggauggau

SEQ ID NO: 1789618 - RNA, 19 nt, Artificial Sequence
  Description of Artificial Sequence: Synthetic oligonucleotide
  Antisense strand to SEQ ID NO: 1789617
auccauccaaauuugaugg

SEQ ID NO: 1789619 - RNA, 19 nt, Artificial Sequence
  Description of Artificial Sequence: Synthetic oligonucleotide
  Sense strand starting at position 1351 of SEQ ID NO: 1563022
cucuguuacucauuaugga

SEQ ID NO: 1789620 - RNA, 19 nt, Artificial Sequence
  Description of Artificial Sequence: Synthetic oligonucleotide
  Antisense strand to SEQ ID NO: 1789619
uccauaaugaguaacagag

SEQ ID NO: 1789621 - RNA, 19 nt, Artificial Sequence
  Description of Artificial Sequence: Synthetic oligonucleotide
  Sense strand starting at position 1991 of SEQ ID NO: 1563022
aguacacuacuguauuagu

SEQ ID NO: 1789622 - RNA, 19 nt, Artificial Sequence
  Description of Artificial Sequence: Synthetic oligonucleotide
  Antisense strand to SEQ ID NO: 1789621
acuaauacaguaguguacu

SEQ ID NO: 1789623 - RNA, 19 nt, Artificial Sequence
  Description of Artificial Sequence: Synthetic oligonucleotide
  Sense strand starting at position 2009 of SEQ ID NO: 1563022
uuaccuaugcugcaugaca

SEQ ID NO: 1789624 - RNA, 19 nt, Artificial Sequence
  Description of Artificial Sequence: Synthetic oligonucleotide
  Antisense strand to SEQ ID NO: 1789623
ugucaugcagcauagguaa

SEQ ID NO: 1789625 - RNA, 19 nt, Artificial Sequence
  Description of Artificial Sequence: Synthetic oligonucleotide
  Sense strand starting at position 2011 of SEQ ID NO: 1563022
accuaugcugcaugacaaa

SEQ ID NO: 1789626 - RNA, 19 nt, Artificial Sequence
  Description of Artificial Sequence: Synthetic oligonucleotide
  Antisense strand to SEQ ID NO: 1789625
uuugucaugcagcauaggu

SEQ ID NO: 1789627 - RNA, 19 nt, Artificial Sequence
  Description of Artificial Sequence: Synthetic oligonucleotide
  Sense strand starting at position 2078 of SEQ ID NO: 1563022
guuucugugggucagaaag

SEQ ID NO: 1789628 - RNA, 19 nt, Artificial Sequence
  Description of Artificial Sequence: Synthetic oligonucleotide
  Antisense strand to SEQ ID NO: 1789627
cuuucugacccacagaaac

SEQ ID NO: 1789629 - RNA, 19 nt, Artificial Sequence
  Description of Artificial Sequence: Synthetic oligonucleotide
  Sense strand starting at position 2159 of SEQ ID NO: 1563022
ugcaguuaucucgaggauc

SEQ ID NO: 1789630 - RNA, 19 nt, Artificial Sequence
  Description of Artificial Sequence: Synthetic oligonucleotide
  Antisense strand to SEQ ID NO: 1789629
gauccucgagauaacugca

SEQ ID NO: 1789631 - RNA, 19 nt, Artificial Sequence
  Description of Artificial Sequence: Synthetic oligonucleotide
  Sense strand starting at position 2161 of SEQ ID NO: 1563022
caguuaucucgaggaucga

SEQ ID NO: 1789632 - RNA, 19 nt, Artificial Sequence
  Description of Artificial Sequence: Synthetic oligonucleotide
  Antisense strand to SEQ ID NO: 1789631
ucgauccucgagauaacug

SEQ ID NO: 1789633 - RNA, 19 nt, Artificial Sequence
  Description of Artificial Sequence: Synthetic oligonucleotide
  Sense strand starting at position 2162 of SEQ ID NO: 1563022
aguuaucucgaggaucgaa

SEQ ID NO: 1789634 - RNA, 19 nt, Artificial Sequence
  Description of Artificial Sequence: Synthetic oligonucleotide
  Antisense strand to SEQ ID NO: 1789633
uucgauccucgagauaacu

SEQ ID NO: 1789635 - RNA, 19 nt, Artificial Sequence
  Description of Artificial Sequence: Synthetic oligonucleotide
  Sense strand starting at position 2174 of SEQ ID NO: 1563022
gaucgaagaucugcuucca

SEQ ID NO: 1789636 - RNA, 19 nt, Artificial Sequence
  Description of Artificial Sequence: Synthetic oligonucleotide
  Antisense strand to SEQ ID NO: 1789635
uggaagcagaucuucgauc

SEQ ID NO: 1789637 - RNA, 19 nt, Artificial Sequence
  Description of Artificial Sequence: Synthetic oligonucleotide
  Sense strand starting at position 2287 of SEQ ID NO: 1563022
cugggauucccuggaguag

SEQ ID NO: 1789638 - RNA, 19 nt, Artificial Sequence
  Description of Artificial Sequence: Synthetic oligonucleotide
  Antisense strand to SEQ ID NO: 1789637
cuacuccagggaaucccag

SEQ ID NO: 1789639 - RNA, 19 nt, Artificial Sequence
  Description of Artificial Sequence: Synthetic oligonucleotide
  Sense strand starting at position 2579 of SEQ ID NO: 1563022
acggcagaucuagaauacu

SEQ ID NO: 1789640 - RNA, 19 nt, Artificial Sequence
  Description of Artificial Sequence: Synthetic oligonucleotide
  Antisense strand to SEQ ID NO: 1789639
aguauucuagaucugccgu

SEQ ID NO: 1789641 - RNA, 19 nt, Artificial Sequence
  Description of Artificial Sequence: Synthetic oligonucleotide
  Sense strand starting at position 2595 of SEQ ID NO: 1563022
acuauuuacucugagggua

SEQ ID NO: 1789642 - RNA, 19 nt, Artificial Sequence
  Description of Artificial Sequence: Synthetic oligonucleotide
  Antisense strand to SEQ ID NO: 1789641
uacccucagaguaaauagu

SEQ ID NO: 1789643 - RNA, 19 nt, Artificial Sequence
  Description of Artificial Sequence: Synthetic oligonucleotide
  Sense strand starting at position 2739 of SEQ ID NO: 1563022
agaaguguuugugugauag

SEQ ID NO: 1789644 - RNA, 19 nt, Artificial Sequence
  Description of Artificial Sequence: Synthetic oligonucleotide
  Antisense strand to SEQ ID NO: 1789643
cuaucacacaaacacuucu

SEQ ID NO: 1789645 - RNA, 19 nt, Artificial Sequence
  Description of Artificial Sequence: Synthetic oligonucleotide
  Sense strand starting at position 2758 of SEQ ID NO: 1563022
cucccuguuccuggaaauu

SEQ ID NO: 1789646 - RNA, 19 nt, Artificial Sequence
  Description of Artificial Sequence: Synthetic oligonucleotide
  Antisense strand to SEQ ID NO: 1789645
aauuuccaggaacagggag

SEQ ID NO: 1789647 - RNA, 19 nt, Artificial Sequence
  Description of Artificial Sequence: Synthetic oligonucleotide
  Sense strand starting at position 2767 of SEQ ID NO: 1563022
ccuggaaauuguuccugga

SEQ ID NO: 1789648 - RNA, 19 nt, Artificial Sequence
  Description of Artificial Sequence: Synthetic oligonucleotide
  Antisense strand to SEQ ID NO: 1789647
uccaggaacaauuuccagg

SEQ ID NO: 1789649 - RNA, 19 nt, Artificial Sequence
  Description of Artificial Sequence: Synthetic oligonucleotide
  Sense strand starting at position 2769 of SEQ ID NO: 1563022
uggaaauuguuccuggaaa

SEQ ID NO: 1789650 - RNA, 19 nt, Artificial Sequence
  Description of Artificial Sequence: Synthetic oligonucleotide
  Antisense strand to SEQ ID NO: 1789649
uuuccaggaacaauuucca

SEQ ID NO: 1789651 - RNA, 19 nt, Artificial Sequence
  Description of Artificial Sequence: Synthetic oligonucleotide
  Sense strand starting at position 2848 of SEQ ID NO: 1563022
gcagguugguauucaggaa

SEQ ID NO: 1789652 - RNA, 19 nt, Artificial Sequence
  Description of Artificial Sequence: Synthetic oligonucleotide
  Antisense strand to SEQ ID NO: 1789651
uuccugaauaccaaccugc

SEQ ID NO: 1789653 - RNA, 19 nt, Artificial Sequence
  Description of Artificial Sequence: Synthetic oligonucleotide
  Sense strand starting at position 2875 of SEQ ID NO: 1563022
aagggaugccuacgcagau

SEQ ID NO: 1789654 - RNA, 19 nt, Artificial Sequence
  Description of Artificial Sequence: Synthetic oligonucleotide
  Antisense strand to SEQ ID NO: 1789653
aucugcguaggcaucccuu

SEQ ID NO: 1789655 - RNA, 19 nt, Artificial Sequence
  Description of Artificial Sequence: Synthetic oligonucleotide
  Sense strand starting at position 2876 of SEQ ID NO: 1563022
agggaugccuacgcagauu

SEQ ID NO: 1789656 - RNA, 19 nt, Artificial Sequence
  Description of Artificial Sequence: Synthetic oligonucleotide
  Antisense strand to SEQ ID NO: 1789655
aaucugcguaggcaucccu

SEQ ID NO: 1789657 - RNA, 19 nt, Artificial Sequence
  Description of Artificial Sequence: Synthetic oligonucleotide
  Sense strand starting at position 2973 of SEQ ID NO: 1563022
guugauuugugucuacuca

SEQ ID NO: 1789658 - RNA, 19 nt, Artificial Sequence
  Description of Artificial Sequence: Synthetic oligonucleotide
  Antisense strand to SEQ ID NO: 1789657
ugaguagacacaaaucaac

SEQ ID NO: 1789659 - RNA, 19 nt, Artificial Sequence
  Description of Artificial Sequence: Synthetic oligonucleotide
  Sense strand starting at position 3121 of SEQ ID NO: 1563022
gaucacaguuacguacaau

SEQ ID NO: 1789660 - RNA, 19 nt, Artificial Sequence
  Description of Artificial Sequence: Synthetic oligonucleotide
  Antisense strand to SEQ ID NO: 1789659
auuguacguaacugugauc

SEQ ID NO: 1789661 - RNA, 19 nt, Artificial Sequence
  Description of Artificial Sequence: Synthetic oligonucleotide
  Sense strand starting at position 3299 of SEQ ID NO: 1563022
cagagauuaugguuuacca

SEQ ID NO: 1789662 - RNA, 19 nt, Artificial Sequence
  Description of Artificial Sequence: Synthetic oligonucleotide
  Antisense strand to SEQ ID NO: 1789661
ugguaaaccauaaucucug

SEQ ID NO: 1789663 - RNA, 19 nt, Artificial Sequence
  Description of Artificial Sequence: Synthetic oligonucleotide
  Sense strand starting at position 3303 of SEQ ID NO: 1563022
gauuaugguuuaccaggau

SEQ ID NO: 1789664 - RNA, 19 nt, Artificial Sequence
  Description of Artificial Sequence: Synthetic oligonucleotide
  Antisense strand to SEQ ID NO: 1789663
auccugguaaaccauaauc

SEQ ID NO: 1789665 - RNA, 19 nt, Artificial Sequence
  Description of Artificial Sequence: Synthetic oligonucleotide
  Sense strand starting at position 3378 of SEQ ID NO: 1563022
agguuugagacgcacugua

SEQ ID NO: 1789666 - RNA, 19 nt, Artificial Sequence
  Description of Artificial Sequence: Synthetic oligonucleotide
  Antisense strand to SEQ ID NO: 1789665
uacagugcgucucaaaccu

SEQ ID NO: 1789667 - RNA, 19 nt, Artificial Sequence
  Description of Artificial Sequence: Synthetic oligonucleotide
  Sense strand starting at position 3393 of SEQ ID NO: 1563022
uguacuaacuaaucaugua

SEQ ID NO: 1789668 - RNA, 19 nt, Artificial Sequence
  Description of Artificial Sequence: Synthetic oligonucleotide
  Antisense strand to SEQ ID NO: 1789667
uacaugauuaguuaguaca

SEQ ID NO: 1789669 - RNA, 19 nt, Artificial Sequence
  Description of Artificial Sequence: Synthetic oligonucleotide
  Sense strand starting at position 3423 of SEQ ID NO: 1563022
cugaauguagcucauaagu

SEQ ID NO: 1789670 - RNA, 19 nt, Artificial Sequence
  Description of Artificial Sequence: Synthetic oligonucleotide
  Antisense strand to SEQ ID NO: 1789669
acuuaugagcuacauucag

SEQ ID NO: 1789671 - RNA, 19 nt, Artificial Sequence
  Description of Artificial Sequence: Synthetic oligonucleotide
  Sense strand starting at position 3429 of SEQ ID NO: 1563022
guagcucauaaguauuagu

SEQ ID NO: 1789672 - RNA, 19 nt, Artificial Sequence
  Description of Artificial Sequence: Synthetic oligonucleotide
  Antisense strand to SEQ ID NO: 1789671
acuaauacuuaugagcuac

SEQ ID NO: 1789673 - RNA, 19 nt, Artificial Sequence
  Description of Artificial Sequence: Synthetic oligonucleotide
  Sense strand starting at position 3968 of SEQ ID NO: 1563022
aggucauuaaauuggugga

SEQ ID NO: 1789674 - RNA, 19 nt, Artificial Sequence
  Description of Artificial Sequence: Synthetic oligonucleotide
  Antisense strand to SEQ ID NO: 1789673
uccaccaauuuaaugaccu

SEQ ID NO: 1789675 - RNA, 19 nt, Artificial Sequence
  Description of Artificial Sequence: Synthetic oligonucleotide
  Sense strand starting at position 3969 of SEQ ID NO: 1563022
ggucauuaaauugguggaa

SEQ ID NO: 1789676 - RNA, 19 nt, Artificial Sequence
  Description of Artificial Sequence: Synthetic oligonucleotide
  Antisense strand to SEQ ID NO: 1789675
uuccaccaauuuaaugacc

SEQ ID NO: 1789677 - RNA, 19 nt, Artificial Sequence
  Description of Artificial Sequence: Synthetic oligonucleotide
  Sense strand starting at position 131 of SEQ ID NO: 1563023
guauaacaguucucucuac

SEQ ID NO: 1789678 - RNA, 19 nt, Artificial Sequence
  Description of Artificial Sequence: Synthetic oligonucleotide
  Antisense strand to SEQ ID NO: 1789677
guagagagaacuguuauac

SEQ ID NO: 1789679 - RNA, 19 nt, Artificial Sequence
  Description of Artificial Sequence: Synthetic oligonucleotide
  Sense strand starting at position 181 of SEQ ID NO: 1563023
uaacguguauaacuguuua

SEQ ID NO: 1789680 - RNA, 19 nt, Artificial Sequence
  Description of Artificial Sequence: Synthetic oligonucleotide
  Antisense strand to SEQ ID NO: 1789679
uaaacaguuauacacguua

SEQ ID NO: 1789681 - RNA, 19 nt, Artificial Sequence
  Description of Artificial Sequence: Synthetic oligonucleotide
  Sense strand starting at position 185 of SEQ ID NO: 1563023
guguauaacuguuuaacac

SEQ ID NO: 1789682 - RNA, 19 nt, Artificial Sequence
  Description of Artificial Sequence: Synthetic oligonucleotide
  Antisense strand to SEQ ID NO: 1789681
guguuaaacaguuauacac

SEQ ID NO: 1789683 - RNA, 19 nt, Artificial Sequence
  Description of Artificial Sequence: Synthetic oligonucleotide
  Sense strand starting at position 312 of SEQ ID NO: 1563023
agcaaagagucugugguua

SEQ ID NO: 1789684 - RNA, 19 nt, Artificial Sequence
  Description of Artificial Sequence: Synthetic oligonucleotide
  Antisense strand to SEQ ID NO: 1789683
uaaccacagacucuuugcu

SEQ ID NO: 1789685 - RNA, 19 nt, Artificial Sequence
  Description of Artificial Sequence: Synthetic oligonucleotide
  Sense strand starting at position 316 of SEQ ID NO: 1563023
aagagucugugguuagaac

SEQ ID NO: 1789686 - RNA, 19 nt, Artificial Sequence
  Description of Artificial Sequence: Synthetic oligonucleotide
  Antisense strand to SEQ ID NO: 1789685
guucuaaccacagacucuu

SEQ ID NO: 1789687 - RNA, 19 nt, Artificial Sequence
  Description of Artificial Sequence: Synthetic oligonucleotide
  Sense strand starting at position 317 of SEQ ID NO: 1563023
agagucugugguuagaacu

SEQ ID NO: 1789688 - RNA, 19 nt, Artificial Sequence
  Description of Artificial Sequence: Synthetic oligonucleotide
  Antisense strand to SEQ ID NO: 1789687
aguucuaaccacagacucu

SEQ ID NO: 1789689 - RNA, 19 nt, Artificial Sequence
  Description of Artificial Sequence: Synthetic oligonucleotide
  Sense strand starting at position 486 of SEQ ID NO: 1563023
agagaaucuucugcugcuu

SEQ ID NO: 1789690 - RNA, 19 nt, Artificial Sequence
  Description of Artificial Sequence: Synthetic oligonucleotide
  Antisense strand to SEQ ID NO: 1789689
aagcagcagaagauucucu

SEQ ID NO: 1789691 - RNA, 19 nt, Artificial Sequence
  Description of Artificial Sequence: Synthetic oligonucleotide
  Sense strand starting at position 528 of SEQ ID NO: 1563023
ggauguagccaucauacau

SEQ ID NO: 1789692 - RNA, 19 nt, Artificial Sequence
  Description of Artificial Sequence: Synthetic oligonucleotide
  Antisense strand to SEQ ID NO: 1789691
auguaugauggcuacaucc

SEQ ID NO: 1789693 - RNA, 19 nt, Artificial Sequence
  Description of Artificial Sequence: Synthetic oligonucleotide
  Sense strand starting at position 560 of SEQ ID NO: 1563023
uagugagauccuggacaug

SEQ ID NO: 1789694 - RNA, 19 nt, Artificial Sequence
  Description of Artificial Sequence: Synthetic oligonucleotide
  Antisense strand to SEQ ID NO: 1789693
cauguccaggaucucacua

SEQ ID NO: 1789695 - RNA, 19 nt, Artificial Sequence
  Description of Artificial Sequence: Synthetic oligonucleotide
  Sense strand starting at position 644 of SEQ ID NO: 1563023
ggccuuagauaagucaaca

SEQ ID NO: 1789696 - RNA, 19 nt, Artificial Sequence
  Description of Artificial Sequence: Synthetic oligonucleotide
  Antisense strand to SEQ ID NO: 1789695
uguugacuuaucuaaggcc

SEQ ID NO: 1789697 - RNA, 19 nt, Artificial Sequence
  Description of Artificial Sequence: Synthetic oligonucleotide
  Sense strand starting at position 780 of SEQ ID NO: 1563023
gagugcaacuauccaguua

SEQ ID NO: 1789698 - RNA, 19 nt, Artificial Sequence
  Description of Artificial Sequence: Synthetic oligonucleotide
  Antisense strand to SEQ ID NO: 1789697
uaacuggauaguugcacuc

SEQ ID NO: 1789699 - RNA, 19 nt, Artificial Sequence
  Description of Artificial Sequence: Synthetic oligonucleotide
  Sense strand starting at position 802 of SEQ ID NO: 1563023
agauuacuagccuagucaa

SEQ ID NO: 1789700 - RNA, 19 nt, Artificial Sequence
  Description of Artificial Sequence: Synthetic oligonucleotide
  Antisense strand to SEQ ID NO: 1789699
uugacuaggcuaguaaucu

SEQ ID NO: 1789701 - RNA, 19 nt, Artificial Sequence
  Description of Artificial Sequence: Synthetic oligonucleotide
  Sense strand starting at position 820 of SEQ ID NO: 1563023
acuggacucuuucuugaaa

SEQ ID NO: 1789702 - RNA, 19 nt, Artificial Sequence
  Description of Artificial Sequence: Synthetic oligonucleotide
  Antisense strand to SEQ ID NO: 1789701
uuucaagaaagaguccagu

SEQ ID NO: 1789703 - RNA, 19 nt, Artificial Sequence
  Description of Artificial Sequence: Synthetic oligonucleotide
  Sense strand starting at position 821 of SEQ ID NO: 1563023
cuggacucuuucuugaaag

SEQ ID NO: 1789704 - RNA, 19 nt, Artificial Sequence
  Description of Artificial Sequence: Synthetic oligonucleotide
  Antisense strand to SEQ ID NO: 1789703
cuuucaagaaagaguccag

SEQ ID NO: 1789705 - RNA, 19 nt, Artificial Sequence
  Description of Artificial Sequence: Synthetic oligonucleotide
  Sense strand starting at position 1120 of SEQ ID NO: 1563023
ggucuccaucccggagaga

SEQ ID NO: 1789706 - RNA, 19 nt, Artificial Sequence
  Description of Artificial Sequence: Synthetic oligonucleotide
  Antisense strand to SEQ ID NO: 1789705
ucucuccgggauggagacc

SEQ ID NO: 1789707 - RNA, 19 nt, Artificial Sequence
  Description of Artificial Sequence: Synthetic oligonucleotide
  Sense strand starting at position 1121 of SEQ ID NO: 1563023
gucuccaucccggagagau

SEQ ID NO: 1789708 - RNA, 19 nt, Artificial Sequence
  Description of Artificial Sequence: Synthetic oligonucleotide
  Antisense strand to SEQ ID NO: 1789707
aucucuccgggauggagac

SEQ ID NO: 1789709 - RNA, 19 nt, Artificial Sequence
  Description of Artificial Sequence: Synthetic oligonucleotide
  Sense strand starting at position 1133 of SEQ ID NO: 1563023
gagagauguguccacacuc

SEQ ID NO: 1789710 - RNA, 19 nt, Artificial Sequence
  Description of Artificial Sequence: Synthetic oligonucleotide
  Antisense strand to SEQ ID NO: 1789709
gaguguggacacaucucuc

SEQ ID NO: 1789711 - RNA, 19 nt, Artificial Sequence
  Description of Artificial Sequence: Synthetic oligonucleotide
  Sense strand starting at position 2104 of SEQ ID NO: 1563023
ggugauggcgcgucaucga

SEQ ID NO: 1789712 - RNA, 19 nt, Artificial Sequence
  Description of Artificial Sequence: Synthetic oligonucleotide
  Antisense strand to SEQ ID NO: 1789711
ucgaugacgcgccaucacc

SEQ ID NO: 1789713 - RNA, 19 nt, Artificial Sequence
  Description of Artificial Sequence: Synthetic oligonucleotide
  Sense strand starting at position 2185 of SEQ ID NO: 1563023
guagccguccggucaucau

SEQ ID NO: 1789714 - RNA, 19 nt, Artificial Sequence
  Description of Artificial Sequence: Synthetic oligonucleotide
  Antisense strand to SEQ ID NO: 1789713
augaugaccggacggcuac

SEQ ID NO: 1789715 - RNA, 19 nt, Artificial Sequence
  Description of Artificial Sequence: Synthetic oligonucleotide
  Sense strand starting at position 2763 of SEQ ID NO: 1563023
gcagcuggucguguuguaa

SEQ ID NO: 1789716 - RNA, 19 nt, Artificial Sequence
  Description of Artificial Sequence: Synthetic oligonucleotide
  Antisense strand to SEQ ID NO: 1789715
uuacaacacgaccagcugc

SEQ ID NO: 1789717 - RNA, 19 nt, Artificial Sequence
  Description of Artificial Sequence: Synthetic oligonucleotide
  Sense strand starting at position 2766 of SEQ ID NO: 1563023
gcuggucguguuguaaacu

SEQ ID NO: 1789718 - RNA, 19 nt, Artificial Sequence
  Description of Artificial Sequence: Synthetic oligonucleotide
  Antisense strand to SEQ ID NO: 1789717
aguuuacaacacgaccagc

SEQ ID NO: 1789719 - RNA, 19 nt, Artificial Sequence
  Description of Artificial Sequence: Synthetic oligonucleotide
  Sense strand starting at position 2778 of SEQ ID NO: 1563023
guaaacuucuaggaauuua

SEQ ID NO: 1789720 - RNA, 19 nt, Artificial Sequence
  Description of Artificial Sequence: Synthetic oligonucleotide
  Antisense strand to SEQ ID NO: 1789719
uaaauuccuagaaguuuac

SEQ ID NO: 1789721 - RNA, 19 nt, Artificial Sequence
  Description of Artificial Sequence: Synthetic oligonucleotide
  Sense strand starting at position 2892 of SEQ ID NO: 1563023
ggaauaccaugggaucauu

SEQ ID NO: 1789722 - RNA, 19 nt, Artificial Sequence
  Description of Artificial Sequence: Synthetic oligonucleotide
  Antisense strand to SEQ ID NO: 1789721
aaugaucccaugguauucc

SEQ ID NO: 1789723 - RNA, 19 nt, Artificial Sequence
  Description of Artificial Sequence: Synthetic oligonucleotide
  Sense strand starting at position 3016 of SEQ ID NO: 1563023
guugcuuagugaucaauaa

SEQ ID NO: 1789724 - RNA, 19 nt, Artificial Sequence
  Description of Artificial Sequence: Synthetic oligonucleotide
  Antisense strand to SEQ ID NO: 1789723
uuauugaucacuaagcaac

SEQ ID NO: 1789725 - RNA, 19 nt, Artificial Sequence
  Description of Artificial Sequence: Synthetic oligonucleotide
  Sense strand starting at position 3017 of SEQ ID NO: 1563023
uugcuuagugaucaauaau

SEQ ID NO: 1789726 - RNA, 19 nt, Artificial Sequence
  Description of Artificial Sequence: Synthetic oligonucleotide
  Antisense strand to SEQ ID NO: 1789725
auuauugaucacuaagcaa

SEQ ID NO: 1789727 - RNA, 19 nt, Artificial Sequence
  Description of Artificial Sequence: Synthetic oligonucleotide
  Sense strand starting at position 3083 of SEQ ID NO: 1563023
cacugugaccuuggguuaa

SEQ ID NO: 1789728 - RNA, 19 nt, Artificial Sequence
  Description of Artificial Sequence: Synthetic oligonucleotide
  Antisense strand to SEQ ID NO: 1789727
uuaacccaaggucacagug

SEQ ID NO: 1789729 - RNA, 19 nt, Artificial Sequence
  Description of Artificial Sequence: Synthetic oligonucleotide
  Sense strand starting at position 3087 of SEQ ID NO: 1563023
gugaccuuggguuaauugu

SEQ ID NO: 1789730 - RNA, 19 nt, Artificial Sequence
  Description of Artificial Sequence: Synthetic oligonucleotide
  Antisense strand to SEQ ID NO: 1789729
acaauuaacccaaggucac

SEQ ID NO: 1789731 - RNA, 19 nt, Artificial Sequence
  Description of Artificial Sequence: Synthetic oligonucleotide
  Sense strand starting at position 3093 of SEQ ID NO: 1563023
uuggguuaauuguucuaag

SEQ ID NO: 1789732 - RNA, 19 nt, Artificial Sequence
  Description of Artificial Sequence: Synthetic oligonucleotide
  Antisense strand to SEQ ID NO: 1789731
cuuagaacaauuaacccaa

SEQ ID NO: 1789733 - RNA, 19 nt, Artificial Sequence
  Description of Artificial Sequence: Synthetic oligonucleotide
  Sense strand starting at position 3103 of SEQ ID NO: 1563023
uguucuaagccucaguuua

SEQ ID NO: 1789734 - RNA, 19 nt, Artificial Sequence
  Description of Artificial Sequence: Synthetic oligonucleotide
  Antisense strand to SEQ ID NO: 1789733
uaaacugaggcuuagaaca

SEQ ID NO: 1789735 - RNA, 19 nt, Artificial Sequence
  Description of Artificial Sequence: Synthetic oligonucleotide
  Sense strand starting at position 3114 of SEQ ID NO: 1563023
ucaguuuagucaucucuaa

SEQ ID NO: 1789736 - RNA, 19 nt, Artificial Sequence
  Description of Artificial Sequence: Synthetic oligonucleotide
  Antisense strand to SEQ ID NO: 1789735
uuagagaugacuaaacuga

SEQ ID NO: 1789737 - RNA, 19 nt, Artificial Sequence
  Description of Artificial Sequence: Synthetic oligonucleotide
  Sense strand starting at position 3156 of SEQ ID NO: 1563023
cauagcugugguuaaguga

SEQ ID NO: 1789738 - RNA, 19 nt, Artificial Sequence
  Description of Artificial Sequence: Synthetic oligonucleotide
  Antisense strand to SEQ ID NO: 1789737
ucacuuaaccacagcuaug

SEQ ID NO: 1789739 - RNA, 19 nt, Artificial Sequence
  Description of Artificial Sequence: Synthetic oligonucleotide
  Sense strand starting at position 3159 of SEQ ID NO: 1563023
agcugugguuaagugagau

SEQ ID NO: 1789740 - RNA, 19 nt, Artificial Sequence
  Description of Artificial Sequence: Synthetic oligonucleotide
  Antisense strand to SEQ ID NO: 1789739
aucucacuuaaccacagcu

SEQ ID NO: 1789741 - RNA, 19 nt, Artificial Sequence
  Description of Artificial Sequence: Synthetic oligonucleotide
  Sense strand starting at position 3172 of SEQ ID NO: 1563023
ugagauuauuugcacauuc

SEQ ID NO: 1789742 - RNA, 19 nt, Artificial Sequence
  Description of Artificial Sequence: Synthetic oligonucleotide
  Antisense strand to SEQ ID NO: 1789741
gaaugugcaaauaaucuca

SEQ ID NO: 1789743 - RNA, 19 nt, Artificial Sequence
  Description of Artificial Sequence: Synthetic oligonucleotide
  Sense strand starting at position 3325 of SEQ ID NO: 1563023
ugguacaagugaucaagga

SEQ ID NO: 1789744 - RNA, 19 nt, Artificial Sequence
  Description of Artificial Sequence: Synthetic oligonucleotide
  Antisense strand to SEQ ID NO: 1789743
uccuugaucacuuguacca

SEQ ID NO: 1789745 - RNA, 19 nt, Artificial Sequence
  Description of Artificial Sequence: Synthetic oligonucleotide
  Sense strand starting at position 3345 of SEQ ID NO: 1563023
agguaauggaugugaugaa

SEQ ID NO: 1789746 - RNA, 19 nt, Artificial Sequence
  Description of Artificial Sequence: Synthetic oligonucleotide
  Antisense strand to SEQ ID NO: 1789745
uucaucacauccauuaccu

SEQ ID NO: 1789747 - RNA, 19 nt, Artificial Sequence
  Description of Artificial Sequence: Synthetic oligonucleotide
  Sense strand starting at position 3390 of SEQ ID NO: 1563023
ucaagaagccucugaagaa

SEQ ID NO: 1789748 - RNA, 19 nt, Artificial Sequence
  Description of Artificial Sequence: Synthetic oligonucleotide
  Antisense strand to SEQ ID NO: 1789747
uucuucagaggcuucuuga

SEQ ID NO: 1789749 - RNA, 19 nt, Artificial Sequence
  Description of Artificial Sequence: Synthetic oligonucleotide
  Sense strand starting at position 3408 of SEQ ID NO: 1563023
agugacauuuaagaugaaa

SEQ ID NO: 1789750 - RNA, 19 nt, Artificial Sequence
  Description of Artificial Sequence: Synthetic oligonucleotide
  Antisense strand to SEQ ID NO: 1789749
uuucaucuuaaaugucacu

SEQ ID NO: 1789751 - RNA, 19 nt, Artificial Sequence
  Description of Artificial Sequence: Synthetic oligonucleotide
  Sense strand starting at position 3527 of SEQ ID NO: 1563023
gcauaagcuuuggcauaca

SEQ ID NO: 1789752 - RNA, 19 nt, Artificial Sequence
  Description of Artificial Sequence: Synthetic oligonucleotide
  Antisense strand to SEQ ID NO: 1789751
uguaugccaaagcuuaugc

SEQ ID NO: 1789753 - RNA, 19 nt, Artificial Sequence
  Description of Artificial Sequence: Synthetic oligonucleotide
  Sense strand starting at position 3530 of SEQ ID NO: 1563023
uaagcuuuggcauacagua

SEQ ID NO: 1789754 - RNA, 19 nt, Artificial Sequence
  Description of Artificial Sequence: Synthetic oligonucleotide
  Antisense strand to SEQ ID NO: 1789753
uacuguaugccaaagcuua

SEQ ID NO: 1789755 - RNA, 19 nt, Artificial Sequence
  Description of Artificial Sequence: Synthetic oligonucleotide
  Sense strand starting at position 3759 of SEQ ID NO: 1563023
ccagcuaaccgguaggaga

SEQ ID NO: 1789756 - RNA, 19 nt, Artificial Sequence
  Description of Artificial Sequence: Synthetic oligonucleotide
  Antisense strand to SEQ ID NO: 1789755
ucuccuaccgguuagcugg

SEQ ID NO: 1789757 - RNA, 19 nt, Artificial Sequence
  Description of Artificial Sequence: Synthetic oligonucleotide
  Sense strand starting at position 14 of SEQ ID NO: 1563024
ugaauauguccagagccag

SEQ ID NO: 1789758 - RNA, 19 nt, Artificial Sequence
  Description of Artificial Sequence: Synthetic oligonucleotide
  Antisense strand to SEQ ID NO: 1789757
cuggcucuggacauauuca

SEQ ID NO: 1789759 - RNA, 19 nt, Artificial Sequence
  Description of Artificial Sequence: Synthetic oligonucleotide
  Sense strand starting at position 83 of SEQ ID NO: 1563024
gguccuugauucccagaga

SEQ ID NO: 1789760 - RNA, 19 nt, Artificial Sequence
  Description of Artificial Sequence: Synthetic oligonucleotide
  Antisense strand to SEQ ID NO: 1789759
ucucugggaaucaaggacc

SEQ ID NO: 1789761 - RNA, 19 nt, Artificial Sequence
  Description of Artificial Sequence: Synthetic oligonucleotide
  Sense strand starting at position 154 of SEQ ID NO: 1563024
ucaauaaaugguuguuaag

SEQ ID NO: 1789762 - RNA, 19 nt, Artificial Sequence
  Description of Artificial Sequence: Synthetic oligonucleotide
  Antisense strand to SEQ ID NO: 1789761
cuuaacaaccauuuauuga

SEQ ID NO: 1789763 - RNA, 19 nt, Artificial Sequence
  Description of Artificial Sequence: Synthetic oligonucleotide
  Sense strand starting at position 156 of SEQ ID NO: 1563024
aauaaaugguuguuaagug

SEQ ID NO: 1789764 - RNA, 19 nt, Artificial Sequence
  Description of Artificial Sequence: Synthetic oligonucleotide
  Antisense strand to SEQ ID NO: 1789763
cacuuaacaaccauuuauu

SEQ ID NO: 1789765 - RNA, 19 nt, Artificial Sequence
  Description of Artificial Sequence: Synthetic oligonucleotide
  Sense strand starting at position 423 of SEQ ID NO: 1563024
gaaagucaacagugaauua

SEQ ID NO: 1789766 - RNA, 19 nt, Artificial Sequence
  Description of Artificial Sequence: Synthetic oligonucleotide
  Antisense strand to SEQ ID NO: 1789765
uaauucacuguugacuuuc

SEQ ID NO: 1789767 - RNA, 19 nt, Artificial Sequence
  Description of Artificial Sequence: Synthetic oligonucleotide
  Sense strand starting at position 542 of SEQ ID NO: 1563024
acguuucucacagagggua

SEQ ID NO: 1789768 - RNA, 19 nt, Artificial Sequence
  Description of Artificial Sequence: Synthetic oligonucleotide
  Antisense strand to SEQ ID NO: 1789767
uacccucugugagaaacgu

SEQ ID NO: 1789769 - RNA, 19 nt, Artificial Sequence
  Description of Artificial Sequence: Synthetic oligonucleotide
  Sense strand starting at position 731 of SEQ ID NO: 1563024
gacagugucaagggauaug

SEQ ID NO: 1789770 - RNA, 19 nt, Artificial Sequence
  Description of Artificial Sequence: Synthetic oligonucleotide
  Antisense strand to SEQ ID NO: 1789769
cauaucccuugacacuguc

SEQ ID NO: 1789771 - RNA, 19 nt, Artificial Sequence
  Description of Artificial Sequence: Synthetic oligonucleotide
  Sense strand starting at position 850 of SEQ ID NO: 1563024
ccaaauggucagcaacuuu

SEQ ID NO: 1789772 - RNA, 19 nt, Artificial Sequence
  Description of Artificial Sequence: Synthetic oligonucleotide
  Antisense strand to SEQ ID NO: 1789771
aaaguugcugaccauuugg

SEQ ID NO: 1789773 - RNA, 19 nt, Artificial Sequence
  Description of Artificial Sequence: Synthetic oligonucleotide
  Sense strand starting at position 877 of SEQ ID NO: 1563024
agguaaacucugggacauu

SEQ ID NO: 1789774 - RNA, 19 nt, Artificial Sequence
  Description of Artificial Sequence: Synthetic oligonucleotide
  Antisense strand to SEQ ID NO: 1789773
aaugucccagaguuuaccu

SEQ ID NO: 1789775 - RNA, 19 nt, Artificial Sequence
  Description of Artificial Sequence: Synthetic oligonucleotide
  Sense strand starting at position 1124 of SEQ ID NO: 1563024
gagcaagguaugugagaau

SEQ ID NO: 1789776 - RNA, 19 nt, Artificial Sequence
  Description of Artificial Sequence: Synthetic oligonucleotide
  Antisense strand to SEQ ID NO: 1789775
auucucacauaccuugcuc

SEQ ID NO: 1789777 - RNA, 19 nt, Artificial Sequence
  Description of Artificial Sequence: Synthetic oligonucleotide
  Sense strand starting at position 1137 of SEQ ID NO: 1563024
gagaaucugggcugggaua

SEQ ID NO: 1789778 - RNA, 19 nt, Artificial Sequence
  Description of Artificial Sequence: Synthetic oligonucleotide
  Antisense strand to SEQ ID NO: 1789777
uaucccagcccagauucuc

SEQ ID NO: 1789779 - RNA, 19 nt, Artificial Sequence
  Description of Artificial Sequence: Synthetic oligonucleotide
  Sense strand starting at position 1138 of SEQ ID NO: 1563024
agaaucugggcugggauaa

SEQ ID NO: 1789780 - RNA, 19 nt, Artificial Sequence
  Description of Artificial Sequence: Synthetic oligonucleotide
  Antisense strand to SEQ ID NO: 1789779
uuaucccagcccagauucu

SEQ ID NO: 1789781 - RNA, 19 nt, Artificial Sequence
  Description of Artificial Sequence: Synthetic oligonucleotide
  Sense strand starting at position 1211 of SEQ ID NO: 1563024
uuugaaaucugguuccaca

SEQ ID NO: 1789782 - RNA, 19 nt, Artificial Sequence
  Description of Artificial Sequence: Synthetic oligonucleotide
  Antisense strand to SEQ ID NO: 1789781
uguggaaccagauuucaaa

SEQ ID NO: 1789783 - RNA, 19 nt, Artificial Sequence
  Description of Artificial Sequence: Synthetic oligonucleotide
  Sense strand starting at position 1246 of SEQ ID NO: 1563024
uugagaaucagugagcuac

SEQ ID NO: 1789784 - RNA, 19 nt, Artificial Sequence
  Description of Artificial Sequence: Synthetic oligonucleotide
  Antisense strand to SEQ ID NO: 1789783
guagcucacugauucucaa

SEQ ID NO: 1789785 - RNA, 19 nt, Artificial Sequence
  Description of Artificial Sequence: Synthetic oligonucleotide
  Sense strand starting at position 1291 of SEQ ID NO: 1563024
uaacauaaaguguguagaa

SEQ ID NO: 1789786 - RNA, 19 nt, Artificial Sequence
  Description of Artificial Sequence: Synthetic oligonucleotide
  Antisense strand to SEQ ID NO: 1789785
uucuacacacuuuauguua

SEQ ID NO: 1789787 - RNA, 19 nt, Artificial Sequence
  Description of Artificial Sequence: Synthetic oligonucleotide
  Sense strand starting at position 1292 of SEQ ID NO: 1563024
aacauaaaguguguagaau

SEQ ID NO: 1789788 - RNA, 19 nt, Artificial Sequence
  Description of Artificial Sequence: Synthetic oligonucleotide
  Antisense strand to SEQ ID NO: 1789787
auucuacacacuuuauguu

SEQ ID NO: 1789789 - RNA, 19 nt, Artificial Sequence
  Description of Artificial Sequence: Synthetic oligonucleotide
  Sense strand starting at position 1298 of SEQ ID NO: 1563024
aaguguguagaaugauuaa

SEQ ID NO: 1789790 - RNA, 19 nt, Artificial Sequence
  Description of Artificial Sequence: Synthetic oligonucleotide
  Antisense strand to SEQ ID NO: 1789789
uuaaucauucuacacacuu

SEQ ID NO: 1789791 - RNA, 19 nt, Artificial Sequence
  Description of Artificial Sequence: Synthetic oligonucleotide
  Sense strand starting at position 1398 of SEQ ID NO: 1563024
auaucaacaucggcauaau

SEQ ID NO: 1789792 - RNA, 19 nt, Artificial Sequence
  Description of Artificial Sequence: Synthetic oligonucleotide
  Antisense strand to SEQ ID NO: 1789791
auuaugccgauguugauau

SEQ ID NO: 1789793 - RNA, 19 nt, Artificial Sequence
  Description of Artificial Sequence: Synthetic oligonucleotide
  Sense strand starting at position 1401 of SEQ ID NO: 1563024
ucaacaucggcauaauauu

SEQ ID NO: 1789794 - RNA, 19 nt, Artificial Sequence
  Description of Artificial Sequence: Synthetic oligonucleotide
  Antisense strand to SEQ ID NO: 1789793
aauauuaugccgauguuga

SEQ ID NO: 1789795 - RNA, 19 nt, Artificial Sequence
  Description of Artificial Sequence: Synthetic oligonucleotide
  Sense strand starting at position 1721 of SEQ ID NO: 1563024
gggagacuguggcucagaa

SEQ ID NO: 1789796 - RNA, 19 nt, Artificial Sequence
  Description of Artificial Sequence: Synthetic oligonucleotide
  Antisense strand to SEQ ID NO: 1789795
uucugagccacagucuccc

SEQ ID NO: 1789797 - RNA, 19 nt, Artificial Sequence
  Description of Artificial Sequence: Synthetic oligonucleotide
  Sense strand starting at position 1723 of SEQ ID NO: 1563024
gagacuguggcucagaauu

SEQ ID NO: 1789798 - RNA, 19 nt, Artificial Sequence
  Description of Artificial Sequence: Synthetic oligonucleotide
  Antisense strand to SEQ ID NO: 1789797
aauucugagccacagucuc

SEQ ID NO: 1789799 - RNA, 19 nt, Artificial Sequence
  Description of Artificial Sequence: Synthetic oligonucleotide
  Sense strand starting at position 2627 of SEQ ID NO: 1563024
cccaguccucugggaacaa

SEQ ID NO: 1789800 - RNA, 19 nt, Artificial Sequence
  Description of Artificial Sequence: Synthetic oligonucleotide
  Antisense strand to SEQ ID NO: 1789799
uuguucccagaggacuggg

SEQ ID NO: 1789801 - RNA, 19 nt, Artificial Sequence
  Description of Artificial Sequence: Synthetic oligonucleotide
  Sense strand starting at position 2722 of SEQ ID NO: 1563024
cauagaauacaaugagugu

SEQ ID NO: 1789802 - RNA, 19 nt, Artificial Sequence
  Description of Artificial Sequence: Synthetic oligonucleotide
  Antisense strand to SEQ ID NO: 1789801
acacucauuguauucuaug

SEQ ID NO: 1789803 - RNA, 19 nt, Artificial Sequence
  Description of Artificial Sequence: Synthetic oligonucleotide
  Sense strand starting at position 2868 of SEQ ID NO: 1563024
gcagaauggugagcaaaca

SEQ ID NO: 1789804 - RNA, 19 nt, Artificial Sequence
  Description of Artificial Sequence: Synthetic oligonucleotide
  Antisense strand to SEQ ID NO: 1789803
uguuugcucaccauucugc

SEQ ID NO: 1789805 - RNA, 19 nt, Artificial Sequence
  Description of Artificial Sequence: Synthetic oligonucleotide
  Sense strand starting at position 2905 of SEQ ID NO: 1563024
aagcauuaagcuuggagaa

SEQ ID NO: 1789806 - RNA, 19 nt, Artificial Sequence
  Description of Artificial Sequence: Synthetic oligonucleotide
  Antisense strand to SEQ ID NO: 1789805
uucuccaagcuuaaugcuu

SEQ ID NO: 1789807 - RNA, 19 nt, Artificial Sequence
  Description of Artificial Sequence: Synthetic oligonucleotide
  Sense strand starting at position 2906 of SEQ ID NO: 1563024
agcauuaagcuuggagaaa

SEQ ID NO: 1789808 - RNA, 19 nt, Artificial Sequence
  Description of Artificial Sequence: Synthetic oligonucleotide
  Antisense strand to SEQ ID NO: 1789807
uuucuccaagcuuaaugcu

SEQ ID NO: 1789809 - RNA, 19 nt, Artificial Sequence
  Description of Artificial Sequence: Synthetic oligonucleotide
  Sense strand starting at position 2957 of SEQ ID NO: 1563024
ugaccaagagguugucaca

SEQ ID NO: 1789810 - RNA, 19 nt, Artificial Sequence
  Description of Artificial Sequence: Synthetic oligonucleotide
  Antisense strand to SEQ ID NO: 1789809
ugugacaaccucuugguca

SEQ ID NO: 1789811 - RNA, 19 nt, Artificial Sequence
  Description of Artificial Sequence: Synthetic oligonucleotide
  Sense strand starting at position 2964 of SEQ ID NO: 1563024
gagguugucacauggaaga

SEQ ID NO: 1789812 - RNA, 19 nt, Artificial Sequence
  Description of Artificial Sequence: Synthetic oligonucleotide
  Antisense strand to SEQ ID NO: 1789811
ucuuccaugugacaaccuc

SEQ ID NO: 1789813 - RNA, 19 nt, Artificial Sequence
  Description of Artificial Sequence: Synthetic oligonucleotide
  Sense strand starting at position 3127 of SEQ ID NO: 1563024
agagacagccaagguaauu

SEQ ID NO: 1789814 - RNA, 19 nt, Artificial Sequence
  Description of Artificial Sequence: Synthetic oligonucleotide
  Antisense strand to SEQ ID NO: 1789813
aauuaccuuggcugucucu

SEQ ID NO: 1789815 - RNA, 19 nt, Artificial Sequence
  Description of Artificial Sequence: Synthetic oligonucleotide
  Sense strand starting at position 3200 of SEQ ID NO: 1563024
cugaaauuccgugauacac

SEQ ID NO: 1789816 - RNA, 19 nt, Artificial Sequence
  Description of Artificial Sequence: Synthetic oligonucleotide
  Antisense strand to SEQ ID NO: 1789815
guguaucacggaauuucag

SEQ ID NO: 1789817 - RNA, 19 nt, Artificial Sequence
  Description of Artificial Sequence: Synthetic oligonucleotide
  Sense strand starting at position 3333 of SEQ ID NO: 1563024
agaugacaguuccuuaauu

SEQ ID NO: 1789818 - RNA, 19 nt, Artificial Sequence
  Description of Artificial Sequence: Synthetic oligonucleotide
  Antisense strand to SEQ ID NO: 1789817
aauuaaggaacugucaucu

SEQ ID NO: 1789819 - RNA, 19 nt, Artificial Sequence
  Description of Artificial Sequence: Synthetic oligonucleotide
  Sense strand starting at position 3372 of SEQ ID NO: 1563024
gcaacugguuuauuuguau

SEQ ID NO: 1789820 - RNA, 19 nt, Artificial Sequence
  Description of Artificial Sequence: Synthetic oligonucleotide
  Antisense strand to SEQ ID NO: 1789819
auacaaauaaaccaguugc

SEQ ID NO: 1789821 - RNA, 19 nt, Artificial Sequence
  Description of Artificial Sequence: Synthetic oligonucleotide
  Sense strand starting at position 3378 of SEQ ID NO: 1563024
gguuuauuuguauagcugu

SEQ ID NO: 1789822 - RNA, 19 nt, Artificial Sequence
  Description of Artificial Sequence: Synthetic oligonucleotide
  Antisense strand to SEQ ID NO: 1789821
acagcuauacaaauaaacc

SEQ ID NO: 1789823 - RNA, 19 nt, Artificial Sequence
  Description of Artificial Sequence: Synthetic oligonucleotide
  Sense strand starting at position 3464 of SEQ ID NO: 1563024
uuaacuguucgagaaacua

SEQ ID NO: 1789824 - RNA, 19 nt, Artificial Sequence
  Description of Artificial Sequence: Synthetic oligonucleotide
  Antisense strand to SEQ ID NO: 1789823
uaguuucucgaacaguuaa

SEQ ID NO: 1789825 - RNA, 19 nt, Artificial Sequence
  Description of Artificial Sequence: Synthetic oligonucleotide
  Sense strand starting at position 3656 of SEQ ID NO: 1563024
ugauguuugaacuggaaac

SEQ ID NO: 1789826 - RNA, 19 nt, Artificial Sequence
  Description of Artificial Sequence: Synthetic oligonucleotide
  Antisense strand to SEQ ID NO: 1789825
guuuccaguucaaacauca

SEQ ID NO: 1789827 - RNA, 19 nt, Artificial Sequence
  Description of Artificial Sequence: Synthetic oligonucleotide
  Sense strand starting at position 3698 of SEQ ID NO: 1563024
ucaggauggguuugaacua

SEQ ID NO: 1789828 - RNA, 19 nt, Artificial Sequence
  Description of Artificial Sequence: Synthetic oligonucleotide
  Antisense strand to SEQ ID NO: 1789827
uaguucaaacccauccuga

SEQ ID NO: 1789829 - RNA, 19 nt, Artificial Sequence
  Description of Artificial Sequence: Synthetic oligonucleotide
  Sense strand starting at position 3769 of SEQ ID NO: 1563024
uuggcuuuccuggagagga

SEQ ID NO: 1789830 - RNA, 19 nt, Artificial Sequence
  Description of Artificial Sequence: Synthetic oligonucleotide
  Antisense strand to SEQ ID NO: 1789829
uccucuccaggaaagccaa

SEQ ID NO: 1789831 - RNA, 19 nt, Artificial Sequence
  Description of Artificial Sequence: Synthetic oligonucleotide
  Sense strand starting at position 3860 of SEQ ID NO: 1563024
cuaggauucucuguuauag

SEQ ID NO: 1789832 - RNA, 19 nt, Artificial Sequence
  Description of Artificial Sequence: Synthetic oligonucleotide
  Antisense strand to SEQ ID NO: 1789831
cuauaacagagaauccuag

SEQ ID NO: 1789833 - RNA, 19 nt, Artificial Sequence
  Description of Artificial Sequence: Synthetic oligonucleotide
  Sense strand starting at position 3889 of SEQ ID NO: 1563024
aguuguaagaggcauggaa

SEQ ID NO: 1789834 - RNA, 19 nt, Artificial Sequence
  Description of Artificial Sequence: Synthetic oligonucleotide
  Antisense strand to SEQ ID NO: 1789833
uuccaugccucuuacaacu

SEQ ID NO: 1789835 - RNA, 19 nt, Artificial Sequence
  Description of Artificial Sequence: Synthetic oligonucleotide
  Sense strand starting at position 3891 of SEQ ID NO: 1563024
uuguaagaggcauggaaau

SEQ ID NO: 1789836 - RNA, 19 nt, Artificial Sequence
  Description of Artificial Sequence: Synthetic oligonucleotide
  Antisense strand to SEQ ID NO: 1789835
auuuccaugccucuuacaa

SEQ ID NO: 1789837 - RNA, 19 nt, Artificial Sequence
  Description of Artificial Sequence: Synthetic oligonucleotide
  Sense strand starting at position 199 of SEQ ID NO: 1563025
gcuggaauccugugcauga

SEQ ID NO: 1789838 - RNA, 19 nt, Artificial Sequence
  Description of Artificial Sequence: Synthetic oligonucleotide
  Antisense strand to SEQ ID NO: 1789837
ucaugcacaggauuccagc

SEQ ID NO: 1789839 - RNA, 19 nt, Artificial Sequence
  Description of Artificial Sequence: Synthetic oligonucleotide
  Sense strand starting at position 200 of SEQ ID NO: 1563025
cuggaauccugugcaugau

SEQ ID NO: 1789840 - RNA, 19 nt, Artificial Sequence
  Description of Artificial Sequence: Synthetic oligonucleotide
  Antisense strand to SEQ ID NO: 1789839
aucaugcacaggauuccag

SEQ ID NO: 1789841 - RNA, 19 nt, Artificial Sequence
  Description of Artificial Sequence: Synthetic oligonucleotide
  Sense strand starting at position 203 of SEQ ID NO: 1563025
gaauccugugcaugaucua

SEQ ID NO: 1789842 - RNA, 19 nt, Artificial Sequence
  Description of Artificial Sequence: Synthetic oligonucleotide
  Antisense strand to SEQ ID NO: 1789841
uagaucaugcacaggauuc

SEQ ID NO: 1789843 - RNA, 19 nt, Artificial Sequence
  Description of Artificial Sequence: Synthetic oligonucleotide
  Sense strand starting at position 206 of SEQ ID NO: 1563025
uccugugcaugaucuaguu

SEQ ID NO: 1789844 - RNA, 19 nt, Artificial Sequence
  Description of Artificial Sequence: Synthetic oligonucleotide
  Antisense strand to SEQ ID NO: 1789843
aacuagaucaugcacagga

SEQ ID NO: 1789845 - RNA, 19 nt, Artificial Sequence
  Description of Artificial Sequence: Synthetic oligonucleotide
  Sense strand starting at position 258 of SEQ ID NO: 1563025
cugguuuaucuuuggcaca

SEQ ID NO: 1789846 - RNA, 19 nt, Artificial Sequence
  Description of Artificial Sequence: Synthetic oligonucleotide
  Antisense strand to SEQ ID NO: 1789845
ugugccaaagauaaaccag

SEQ ID NO: 1789847 - RNA, 19 nt, Artificial Sequence
  Description of Artificial Sequence: Synthetic oligonucleotide
  Sense strand starting at position 260 of SEQ ID NO: 1563025
gguuuaucuuuggcacaag

SEQ ID NO: 1789848 - RNA, 19 nt, Artificial Sequence
  Description of Artificial Sequence: Synthetic oligonucleotide
  Antisense strand to SEQ ID NO: 1789847
cuugugccaaagauaaacc

SEQ ID NO: 1789849 - RNA, 19 nt, Artificial Sequence
  Description of Artificial Sequence: Synthetic oligonucleotide
  Sense strand starting at position 271 of SEQ ID NO: 1563025
ggcacaagcuugccugaaa

SEQ ID NO: 1789850 - RNA, 19 nt, Artificial Sequence
  Description of Artificial Sequence: Synthetic oligonucleotide
  Antisense strand to SEQ ID NO: 1789849
uuucaggcaagcuugugcc

SEQ ID NO: 1789851 - RNA, 19 nt, Artificial Sequence
  Description of Artificial Sequence: Synthetic oligonucleotide
  Sense strand starting at position 274 of SEQ ID NO: 1563025
acaagcuugccugaaagcu

SEQ ID NO: 1789852 - RNA, 19 nt, Artificial Sequence
  Description of Artificial Sequence: Synthetic oligonucleotide
  Antisense strand to SEQ ID NO: 1789851
agcuuucaggcaagcuugu

SEQ ID NO: 1789853 - RNA, 19 nt, Artificial Sequence
  Description of Artificial Sequence: Synthetic oligonucleotide
  Sense strand starting at position 295 of SEQ ID NO: 1563025
gggcggacuccuuggagga

SEQ ID NO: 1789854 - RNA, 19 nt, Artificial Sequence
  Description of Artificial Sequence: Synthetic oligonucleotide
  Antisense strand to SEQ ID NO: 1789853
uccuccaaggaguccgccc

SEQ ID NO: 1789855 - RNA, 19 nt, Artificial Sequence
  Description of Artificial Sequence: Synthetic oligonucleotide
  Sense strand starting at position 500 of SEQ ID NO: 1563025
ccagaacagccauaaaugu

SEQ ID NO: 1789856 - RNA, 19 nt, Artificial Sequence
  Description of Artificial Sequence: Synthetic oligonucleotide
  Antisense strand to SEQ ID NO: 1789855
acauuuauggcuguucugg

SEQ ID NO: 1789857 - RNA, 19 nt, Artificial Sequence
  Description of Artificial Sequence: Synthetic oligonucleotide
  Sense strand starting at position 657 of SEQ ID NO: 1563025
gguugaguaagcugcaaag

SEQ ID NO: 1789858 - RNA, 19 nt, Artificial Sequence
  Description of Artificial Sequence: Synthetic oligonucleotide
  Antisense strand to SEQ ID NO: 1789857
cuuugcagcuuacucaacc

SEQ ID NO: 1789859 - RNA, 19 nt, Artificial Sequence
  Description of Artificial Sequence: Synthetic oligonucleotide
  Sense strand starting at position 788 of SEQ ID NO: 1563025
gaucaaaggccaugacagu

SEQ ID NO: 1789860 - RNA, 19 nt, Artificial Sequence
  Description of Artificial Sequence: Synthetic oligonucleotide
  Antisense strand to SEQ ID NO: 1789859
acugucauggccuuugauc

SEQ ID NO: 1789861 - RNA, 19 nt, Artificial Sequence
  Description of Artificial Sequence: Synthetic oligonucleotide
  Sense strand starting at position 798 of SEQ ID NO: 1563025
caugacaguccugaauagu

SEQ ID NO: 1789862 - RNA, 19 nt, Artificial Sequence
  Description of Artificial Sequence: Synthetic oligonucleotide
  Antisense strand to SEQ ID NO: 1789861
acuauucaggacugucaug

SEQ ID NO: 1789863 - RNA, 19 nt, Artificial Sequence
  Description of Artificial Sequence: Synthetic oligonucleotide
  Sense strand starting at position 933 of SEQ ID NO: 1563025
gccugaucccaggagcaca

SEQ ID NO: 1789864 - RNA, 19 nt, Artificial Sequence
  Description of Artificial Sequence: Synthetic oligonucleotide
  Antisense strand to SEQ ID NO: 1789863
ugugcuccugggaucaggc

SEQ ID NO: 1789865 - RNA, 19 nt, Artificial Sequence
  Description of Artificial Sequence: Synthetic oligonucleotide
  Sense strand starting at position 1051 of SEQ ID NO: 1563025
aguuucgucauauggaaga

SEQ ID NO: 1789866 - RNA, 19 nt, Artificial Sequence
  Description of Artificial Sequence: Synthetic oligonucleotide
  Antisense strand to SEQ ID NO: 1789865
ucuuccauaugacgaaacu

SEQ ID NO: 1789867 - RNA, 19 nt, Artificial Sequence
  Description of Artificial Sequence: Synthetic oligonucleotide
  Sense strand starting at position 1053 of SEQ ID NO: 1563025
uuucgucauauggaagaca

SEQ ID NO: 1789868 - RNA, 19 nt, Artificial Sequence
  Description of Artificial Sequence: Synthetic oligonucleotide
  Antisense strand to SEQ ID NO: 1789867
ugucuuccauaugacgaaa

SEQ ID NO: 1789869 - RNA, 19 nt, Artificial Sequence
  Description of Artificial Sequence: Synthetic oligonucleotide
  Sense strand starting at position 1091 of SEQ ID NO: 1563025
guuguuugcagagauuaaa

SEQ ID NO: 1789870 - RNA, 19 nt, Artificial Sequence
  Description of Artificial Sequence: Synthetic oligonucleotide
  Antisense strand to SEQ ID NO: 1789869
uuuaaucucugcaaacaac

SEQ ID NO: 1789871 - RNA, 19 nt, Artificial Sequence
  Description of Artificial Sequence: Synthetic oligonucleotide
  Sense strand starting at position 1230 of SEQ ID NO: 1563025
cugugauuccgagauccua

SEQ ID NO: 1789872 - RNA, 19 nt, Artificial Sequence
  Description of Artificial Sequence: Synthetic oligonucleotide
  Antisense strand to SEQ ID NO: 1789871
uaggaucucggaaucacag

SEQ ID NO: 1789873 - RNA, 19 nt, Artificial Sequence
  Description of Artificial Sequence: Synthetic oligonucleotide
  Sense strand starting at position 1248 of SEQ ID NO: 1563025
agaaucauggcacgagauu

SEQ ID NO: 1789874 - RNA, 19 nt, Artificial Sequence
  Description of Artificial Sequence: Synthetic oligonucleotide
  Antisense strand to SEQ ID NO: 1789873
aaucucgugccaugauucu

SEQ ID NO: 1789875 - RNA, 19 nt, Artificial Sequence
  Description of Artificial Sequence: Synthetic oligonucleotide
  Sense strand starting at position 1249 of SEQ ID NO: 1563025
gaaucauggcacgagauuc

SEQ ID NO: 1789876 - RNA, 19 nt, Artificial Sequence
  Description of Artificial Sequence: Synthetic oligonucleotide
  Antisense strand to SEQ ID NO: 1789875
gaaucucgugccaugauuc

SEQ ID NO: 1789877 - RNA, 19 nt, Artificial Sequence
  Description of Artificial Sequence: Synthetic oligonucleotide
  Sense strand starting at position 1924 of SEQ ID NO: 1563025
ugaugagagaugcgugaca

SEQ ID NO: 1789878 - RNA, 19 nt, Artificial Sequence
  Description of Artificial Sequence: Synthetic oligonucleotide
  Antisense strand to SEQ ID NO: 1789877
ugucacgcaucucucauca

SEQ ID NO: 1789879 - RNA, 19 nt, Artificial Sequence
  Description of Artificial Sequence: Synthetic oligonucleotide
  Sense strand starting at position 2264 of SEQ ID NO: 1563025
agagaagaaugugcucagu

SEQ ID NO: 1789880 - RNA, 19 nt, Artificial Sequence
  Description of Artificial Sequence: Synthetic oligonucleotide
  Antisense strand to SEQ ID NO: 1789879
acugagcacauucuucucu

SEQ ID NO: 1789881 - RNA, 19 nt, Artificial Sequence
  Description of Artificial Sequence: Synthetic oligonucleotide
  Sense strand starting at position 2267 of SEQ ID NO: 1563025
gaagaaugugcucagugcu

SEQ ID NO: 1789882 - RNA, 19 nt, Artificial Sequence
  Description of Artificial Sequence: Synthetic oligonucleotide
  Antisense strand to SEQ ID NO: 1789881
agcacugagcacauucuuc

SEQ ID NO: 1789883 - RNA, 19 nt, Artificial Sequence
  Description of Artificial Sequence: Synthetic oligonucleotide
  Sense strand starting at position 2476 of SEQ ID NO: 1563025
gucauuaguccugggauug

SEQ ID NO: 1789884 - RNA, 19 nt, Artificial Sequence
  Description of Artificial Sequence: Synthetic oligonucleotide
  Antisense strand to SEQ ID NO: 1789883
caaucccaggacuaaugac

SEQ ID NO: 1789885 - RNA, 19 nt, Artificial Sequence
  Description of Artificial Sequence: Synthetic oligonucleotide
  Sense strand starting at position 2491 of SEQ ID NO: 1563025
auugguuacaucuggagag

SEQ ID NO: 1789886 - RNA, 19 nt, Artificial Sequence
  Description of Artificial Sequence: Synthetic oligonucleotide
  Antisense strand to SEQ ID NO: 1789885
cucuccagauguaaccaau

SEQ ID NO: 1789887 - RNA, 19 nt, Artificial Sequence
  Description of Artificial Sequence: Synthetic oligonucleotide
  Sense strand starting at position 2575 of SEQ ID NO: 1563025
aucauugugcagugagaaa

SEQ ID NO: 1789888 - RNA, 19 nt, Artificial Sequence
  Description of Artificial Sequence: Synthetic oligonucleotide
  Antisense strand to SEQ ID NO: 1789887
uuucucacugcacaaugau

SEQ ID NO: 1789889 - RNA, 19 nt, Artificial Sequence
  Description of Artificial Sequence: Synthetic oligonucleotide
  Sense strand starting at position 2641 of SEQ ID NO: 1563025
aauaauugaggccaguauu

SEQ ID NO: 1789890 - RNA, 19 nt, Artificial Sequence
  Description of Artificial Sequence: Synthetic oligonucleotide
  Antisense strand to SEQ ID NO: 1789889
aauacuggccucaauuauu

SEQ ID NO: 1789891 - RNA, 19 nt, Artificial Sequence
  Description of Artificial Sequence: Synthetic oligonucleotide
  Sense strand starting at position 2671 of SEQ ID NO: 1563025
guccacucaugagaagaau

SEQ ID NO: 1789892 - RNA, 19 nt, Artificial Sequence
  Description of Artificial Sequence: Synthetic oligonucleotide
  Antisense strand to SEQ ID NO: 1789891
auucuucucaugaguggac

SEQ ID NO: 1789893 - RNA, 19 nt, Artificial Sequence
  Description of Artificial Sequence: Synthetic oligonucleotide
  Sense strand starting at position 2720 of SEQ ID NO: 1563025
uuaauuggaguuuagaguu

SEQ ID NO: 1789894 - RNA, 19 nt, Artificial Sequence
  Description of Artificial Sequence: Synthetic oligonucleotide
  Antisense strand to SEQ ID NO: 1789893
aacucuaaacuccaauuaa

SEQ ID NO: 1789895 - RNA, 19 nt, Artificial Sequence
  Description of Artificial Sequence: Synthetic oligonucleotide
  Sense strand starting at position 2726 of SEQ ID NO: 1563025
ggaguuuagaguuaguguu

SEQ ID NO: 1789896 - RNA, 19 nt, Artificial Sequence
  Description of Artificial Sequence: Synthetic oligonucleotide
  Antisense strand to SEQ ID NO: 1789895
aacacuaacucuaaacucc

SEQ ID NO: 1789897 - RNA, 19 nt, Artificial Sequence
  Description of Artificial Sequence: Synthetic oligonucleotide
  Sense strand starting at position 2843 of SEQ ID NO: 1563025
uuuacugaucuuuggucua

SEQ ID NO: 1789898 - RNA, 19 nt, Artificial Sequence
  Description of Artificial Sequence: Synthetic oligonucleotide
  Antisense strand to SEQ ID NO: 1789897
uagaccaaagaucaguaaa

SEQ ID NO: 1789899 - RNA, 19 nt, Artificial Sequence
  Description of Artificial Sequence: Synthetic oligonucleotide
  Sense strand starting at position 2845 of SEQ ID NO: 1563025
uacugaucuuuggucuaag

SEQ ID NO: 1789900 - RNA, 19 nt, Artificial Sequence
  Description of Artificial Sequence: Synthetic oligonucleotide
  Antisense strand to SEQ ID NO: 1789899
cuuagaccaaagaucagua

SEQ ID NO: 1789901 - RNA, 19 nt, Artificial Sequence
  Description of Artificial Sequence: Synthetic oligonucleotide
  Sense strand starting at position 2846 of SEQ ID NO: 1563025
acugaucuuuggucuaaga

SEQ ID NO: 1789902 - RNA, 19 nt, Artificial Sequence
  Description of Artificial Sequence: Synthetic oligonucleotide
  Antisense strand to SEQ ID NO: 1789901
ucuuagaccaaagaucagu

SEQ ID NO: 1789903 - RNA, 19 nt, Artificial Sequence
  Description of Artificial Sequence: Synthetic oligonucleotide
  Sense strand starting at position 3079 of SEQ ID NO: 1563025
ccuccuuugucacuaggua

SEQ ID NO: 1789904 - RNA, 19 nt, Artificial Sequence
  Description of Artificial Sequence: Synthetic oligonucleotide
  Antisense strand to SEQ ID NO: 1789903
uaccuagugacaaaggagg

SEQ ID NO: 1789905 - RNA, 19 nt, Artificial Sequence
  Description of Artificial Sequence: Synthetic oligonucleotide
  Sense strand starting at position 3121 of SEQ ID NO: 1563025
guugaaugcauccagaggu

SEQ ID NO: 1789906 - RNA, 19 nt, Artificial Sequence
  Description of Artificial Sequence: Synthetic oligonucleotide
  Antisense strand to SEQ ID NO: 1789905
accucuggaugcauucaac

SEQ ID NO: 1789907 - RNA, 19 nt, Artificial Sequence
  Description of Artificial Sequence: Synthetic oligonucleotide
  Sense strand starting at position 3283 of SEQ ID NO: 1563025
guacaaguucaugaggugu

SEQ ID NO: 1789908 - RNA, 19 nt, Artificial Sequence
  Description of Artificial Sequence: Synthetic oligonucleotide
  Antisense strand to SEQ ID NO: 1789907
acaccucaugaacuuguac

SEQ ID NO: 1789909 - RNA, 19 nt, Artificial Sequence
  Description of Artificial Sequence: Synthetic oligonucleotide
  Sense strand starting at position 3667 of SEQ ID NO: 1563025
gguucuugcgaagguuaaa

SEQ ID NO: 1789910 - RNA, 19 nt, Artificial Sequence
  Description of Artificial Sequence: Synthetic oligonucleotide
  Antisense strand to SEQ ID NO: 1789909
uuuaaccuucgcaagaacc

SEQ ID NO: 1789911 - RNA, 19 nt, Artificial Sequence
  Description of Artificial Sequence: Synthetic oligonucleotide
  Sense strand starting at position 3688 of SEQ ID NO: 1563025
agugaaugcucaucagugu

SEQ ID NO: 1789912 - RNA, 19 nt, Artificial Sequence
  Description of Artificial Sequence: Synthetic oligonucleotide
  Antisense strand to SEQ ID NO: 1789911
acacugaugagcauucacu

SEQ ID NO: 1789913 - RNA, 19 nt, Artificial Sequence
  Description of Artificial Sequence: Synthetic oligonucleotide
  Sense strand starting at position 3839 of SEQ ID NO: 1563025
accacucuggcauauugau

SEQ ID NO: 1789914 - RNA, 19 nt, Artificial Sequence
  Description of Artificial Sequence: Synthetic oligonucleotide
  Antisense strand to SEQ ID NO: 1789913
aucaauaugccagaguggu

SEQ ID NO: 1789915 - RNA, 19 nt, Artificial Sequence
  Description of Artificial Sequence: Synthetic oligonucleotide
  Sense strand starting at position 3848 of SEQ ID NO: 1563025
gcauauugauuucucugca

SEQ ID NO: 1789916 - RNA, 19 nt, Artificial Sequence
  Description of Artificial Sequence: Synthetic oligonucleotide
  Antisense strand to SEQ ID NO: 1789915
ugcagagaaaucaauaugc

SEQ ID NO: 1789917 - RNA, 19 nt, Artificial Sequence
  Description of Artificial Sequence: Synthetic oligonucleotide
  Sense strand starting at position 149 of SEQ ID NO: 1563026
gcacgagcucugccucagu

SEQ ID NO: 1789918 - RNA, 19 nt, Artificial Sequence
  Description of Artificial Sequence: Synthetic oligonucleotide
  Antisense strand to SEQ ID NO: 1789917
acugaggcagagcucgugc

SEQ ID NO: 1789919 - RNA, 19 nt, Artificial Sequence
  Description of Artificial Sequence: Synthetic oligonucleotide
  Sense strand starting at position 165 of SEQ ID NO: 1563026
agugucaggcaucaaauga

SEQ ID NO: 1789920 - RNA, 19 nt, Artificial Sequence
  Description of Artificial Sequence: Synthetic oligonucleotide
  Antisense strand to SEQ ID NO: 1789919
ucauuugaugccugacacu

SEQ ID NO: 1789921 - RNA, 19 nt, Artificial Sequence
  Description of Artificial Sequence: Synthetic oligonucleotide
  Sense strand starting at position 371 of SEQ ID NO: 1563026
cuuggauucucccugcaga

SEQ ID NO: 1789922 - RNA, 19 nt, Artificial Sequence
  Description of Artificial Sequence: Synthetic oligonucleotide
  Antisense strand to SEQ ID NO: 1789921
ucugcagggagaauccaag

SEQ ID NO: 1789923 - RNA, 19 nt, Artificial Sequence
  Description of Artificial Sequence: Synthetic oligonucleotide
  Sense strand starting at position 372 of SEQ ID NO: 1563026
uuggauucucccugcagaa

SEQ ID NO: 1789924 - RNA, 19 nt, Artificial Sequence
  Description of Artificial Sequence: Synthetic oligonucleotide
  Antisense strand to SEQ ID NO: 1789923
uucugcagggagaauccaa

SEQ ID NO: 1789925 - RNA, 19 nt, Artificial Sequence
  Description of Artificial Sequence: Synthetic oligonucleotide
  Sense strand starting at position 404 of SEQ ID NO: 1563026
agauaaaucucucagagga

SEQ ID NO: 1789926 - RNA, 19 nt, Artificial Sequence
  Description of Artificial Sequence: Synthetic oligonucleotide
  Antisense strand to SEQ ID NO: 1789925
uccucugagagauuuaucu

SEQ ID NO: 1789927 - RNA, 19 nt, Artificial Sequence
  Description of Artificial Sequence: Synthetic oligonucleotide
  Sense strand starting at position 406 of SEQ ID NO: 1563026
auaaaucucucagaggaga

SEQ ID NO: 1789928 - RNA, 19 nt, Artificial Sequence
  Description of Artificial Sequence: Synthetic oligonucleotide
  Antisense strand to SEQ ID NO: 1789927
ucuccucugagagauuuau

SEQ ID NO: 1789929 - RNA, 19 nt, Artificial Sequence
  Description of Artificial Sequence: Synthetic oligonucleotide
  Sense strand starting at position 495 of SEQ ID NO: 1563026
gcccuauauggaugucacu

SEQ ID NO: 1789930 - RNA, 19 nt, Artificial Sequence
  Description of Artificial Sequence: Synthetic oligonucleotide
  Antisense strand to SEQ ID NO: 1789929
agugacauccauauagggc

SEQ ID NO: 1789931 - RNA, 19 nt, Artificial Sequence
  Description of Artificial Sequence: Synthetic oligonucleotide
  Sense strand starting at position 501 of SEQ ID NO: 1563026
uauggaugucacuguugau

SEQ ID NO: 1789932 - RNA, 19 nt, Artificial Sequence
  Description of Artificial Sequence: Synthetic oligonucleotide
  Antisense strand to SEQ ID NO: 1789931
aucaacagugacauccaua

SEQ ID NO: 1789933 - RNA, 19 nt, Artificial Sequence
  Description of Artificial Sequence: Synthetic oligonucleotide
  Sense strand starting at position 735 of SEQ ID NO: 1563026
gauucugagccugggucau

SEQ ID NO: 1789934 - RNA, 19 nt, Artificial Sequence
  Description of Artificial Sequence: Synthetic oligonucleotide
  Antisense strand to SEQ ID NO: 1789933
augacccaggcucagaauc

SEQ ID NO: 1789935 - RNA, 19 nt, Artificial Sequence
  Description of Artificial Sequence: Synthetic oligonucleotide
  Sense strand starting at position 940 of SEQ ID NO: 1563026
uaugauguccuacgaggga

SEQ ID NO: 1789936 - RNA, 19 nt, Artificial Sequence
  Description of Artificial Sequence: Synthetic oligonucleotide
  Antisense strand to SEQ ID NO: 1789935
ucccucguaggacaucaua

SEQ ID NO: 1789937 - RNA, 19 nt, Artificial Sequence
  Description of Artificial Sequence: Synthetic oligonucleotide
  Sense strand starting at position 1039 of SEQ ID NO: 1563026
ucuggaaagaucuguagug

SEQ ID NO: 1789938 - RNA, 19 nt, Artificial Sequence
  Description of Artificial Sequence: Synthetic oligonucleotide
  Antisense strand to SEQ ID NO: 1789937
cacuacagaucuuuccaga

SEQ ID NO: 1789939 - RNA, 19 nt, Artificial Sequence
  Description of Artificial Sequence: Synthetic oligonucleotide
  Sense strand starting at position 1040 of SEQ ID NO: 1563026
cuggaaagaucuguaguga

SEQ ID NO: 1789940 - RNA, 19 nt, Artificial Sequence
  Description of Artificial Sequence: Synthetic oligonucleotide
  Antisense strand to SEQ ID NO: 1789939
ucacuacagaucuuuccag

SEQ ID NO: 1789941 - RNA, 19 nt, Artificial Sequence
  Description of Artificial Sequence: Synthetic oligonucleotide
  Sense strand starting at position 1160 of SEQ ID NO: 1563026
ggcuuugagcuaugaggau

SEQ ID NO: 1789942 - RNA, 19 nt, Artificial Sequence
  Description of Artificial Sequence: Synthetic oligonucleotide
  Antisense strand to SEQ ID NO: 1789941
auccucauagcucaaagcc

SEQ ID NO: 1789943 - RNA, 19 nt, Artificial Sequence
  Description of Artificial Sequence: Synthetic oligonucleotide
  Sense strand starting at position 1249 of SEQ ID NO: 1563026
aucuuacagccauaggauu

SEQ ID NO: 1789944 - RNA, 19 nt, Artificial Sequence
  Description of Artificial Sequence: Synthetic oligonucleotide
  Antisense strand to SEQ ID NO: 1789943
aauccuauggcuguaagau

SEQ ID NO: 1789945 - RNA, 19 nt, Artificial Sequence
  Description of Artificial Sequence: Synthetic oligonucleotide
  Sense strand starting at position 1273 of SEQ ID NO: 1563026
cucaguauccuugaaucag

SEQ ID NO: 1789946 - RNA, 19 nt, Artificial Sequence
  Description of Artificial Sequence: Synthetic oligonucleotide
  Antisense strand to SEQ ID NO: 1789945
cugauucaaggauacugag

SEQ ID NO: 1789947 - RNA, 19 nt, Artificial Sequence
  Description of Artificial Sequence: Synthetic oligonucleotide
  Sense strand starting at position 1297 of SEQ ID NO: 1563026
guuagaauuccagaaugcu

SEQ ID NO: 1789948 - RNA, 19 nt, Artificial Sequence
  Description of Artificial Sequence: Synthetic oligonucleotide
  Antisense strand to SEQ ID NO: 1789947
agcauucuggaauucuaac

SEQ ID NO: 1789949 - RNA, 19 nt, Artificial Sequence
  Description of Artificial Sequence: Synthetic oligonucleotide
  Sense strand starting at position 1315 of SEQ ID NO: 1563026
uagaaugaguccuucuuag

SEQ ID NO: 1789950 - RNA, 19 nt, Artificial Sequence
  Description of Artificial Sequence: Synthetic oligonucleotide
  Antisense strand to SEQ ID NO: 1789949
cuaagaaggacucauucua

SEQ ID NO: 1789951 - RNA, 19 nt, Artificial Sequence
  Description of Artificial Sequence: Synthetic oligonucleotide
  Sense strand starting at position 1326 of SEQ ID NO: 1563026
cuucuuagaccuggaauug

SEQ ID NO: 1789952 - RNA, 19 nt, Artificial Sequence
  Description of Artificial Sequence: Synthetic oligonucleotide
  Antisense strand to SEQ ID NO: 1789951
caauuccaggucuaagaag

SEQ ID NO: 1789953 - RNA, 19 nt, Artificial Sequence
  Description of Artificial Sequence: Synthetic oligonucleotide
  Sense strand starting at position 1327 of SEQ ID NO: 1563026
uucuuagaccuggaauugu

SEQ ID NO: 1789954 - RNA, 19 nt, Artificial Sequence
  Description of Artificial Sequence: Synthetic oligonucleotide
  Antisense strand to SEQ ID NO: 1789953
acaauuccaggucuaagaa

SEQ ID NO: 1789955 - RNA, 19 nt, Artificial Sequence
  Description of Artificial Sequence: Synthetic oligonucleotide
  Sense strand starting at position 1419 of SEQ ID NO: 1563026
gugcacagauccucuuuau

SEQ ID NO: 1789956 - RNA, 19 nt, Artificial Sequence
  Description of Artificial Sequence: Synthetic oligonucleotide
  Antisense strand to SEQ ID NO: 1789955
auaaagaggaucugugcac

SEQ ID NO: 1789957 - RNA, 19 nt, Artificial Sequence
  Description of Artificial Sequence: Synthetic oligonucleotide
  Sense strand starting at position 1887 of SEQ ID NO: 1563026
cuggaauccugugcaugau

SEQ ID NO: 1789958 - RNA, 19 nt, Artificial Sequence
  Description of Artificial Sequence: Synthetic oligonucleotide
  Antisense strand to SEQ ID NO: 1789957
aucaugcacaggauuccag

SEQ ID NO: 1789959 - RNA, 19 nt, Artificial Sequence
  Description of Artificial Sequence: Synthetic oligonucleotide
  Sense strand starting at position 1890 of SEQ ID NO: 1563026
gaauccugugcaugaucua

SEQ ID NO: 1789960 - RNA, 19 nt, Artificial Sequence
  Description of Artificial Sequence: Synthetic oligonucleotide
  Antisense strand to SEQ ID NO: 1789959
uagaucaugcacaggauuc

SEQ ID NO: 1789961 - RNA, 19 nt, Artificial Sequence
  Description of Artificial Sequence: Synthetic oligonucleotide
  Sense strand starting at position 1947 of SEQ ID NO: 1563026
gguuuaucuuuggcacaag

SEQ ID NO: 1789962 - RNA, 19 nt, Artificial Sequence
  Description of Artificial Sequence: Synthetic oligonucleotide
  Antisense strand to SEQ ID NO: 1789961
cuugugccaaagauaaacc

SEQ ID NO: 1789963 - RNA, 19 nt, Artificial Sequence
  Description of Artificial Sequence: Synthetic oligonucleotide
  Sense strand starting at position 1958 of SEQ ID NO: 1563026
ggcacaagcuugccugaaa

SEQ ID NO: 1789964 - RNA, 19 nt, Artificial Sequence
  Description of Artificial Sequence: Synthetic oligonucleotide
  Antisense strand to SEQ ID NO: 1789963
uuucaggcaagcuugugcc

SEQ ID NO: 1789965 - RNA, 19 nt, Artificial Sequence
  Description of Artificial Sequence: Synthetic oligonucleotide
  Sense strand starting at position 1961 of SEQ ID NO: 1563026
acaagcuugccugaaagcu

SEQ ID NO: 1789966 - RNA, 19 nt, Artificial Sequence
  Description of Artificial Sequence: Synthetic oligonucleotide
  Antisense strand to SEQ ID NO: 1789965
agcuuucaggcaagcuugu

SEQ ID NO: 1789967 - RNA, 19 nt, Artificial Sequence
  Description of Artificial Sequence: Synthetic oligonucleotide
  Sense strand starting at position 1982 of SEQ ID NO: 1563026
gggcggacuccuuggagga

SEQ ID NO: 1789968 - RNA, 19 nt, Artificial Sequence
  Description of Artificial Sequence: Synthetic oligonucleotide
  Antisense strand to SEQ ID NO: 1789967
uccuccaaggaguccgccc

SEQ ID NO: 1789969 - RNA, 19 nt, Artificial Sequence
  Description of Artificial Sequence: Synthetic oligonucleotide
  Sense strand starting at position 2187 of SEQ ID NO: 1563026
ccagaacagccauaaaugu

SEQ ID NO: 1789970 - RNA, 19 nt, Artificial Sequence
  Description of Artificial Sequence: Synthetic oligonucleotide
  Antisense strand to SEQ ID NO: 1789969
acauuuauggcuguucugg

SEQ ID NO: 1789971 - RNA, 19 nt, Artificial Sequence
  Description of Artificial Sequence: Synthetic oligonucleotide
  Sense strand starting at position 2344 of SEQ ID NO: 1563026
gguugaguaagcugcaaag

SEQ ID NO: 1789972 - RNA, 19 nt, Artificial Sequence
  Description of Artificial Sequence: Synthetic oligonucleotide
  Antisense strand to SEQ ID NO: 1789971
cuuugcagcuuacucaacc

SEQ ID NO: 1789973 - RNA, 19 nt, Artificial Sequence
  Description of Artificial Sequence: Synthetic oligonucleotide
  Sense strand starting at position 2475 of SEQ ID NO: 1563026
gaucaaaggccaugacagu

SEQ ID NO: 1789974 - RNA, 19 nt, Artificial Sequence
  Description of Artificial Sequence: Synthetic oligonucleotide
  Antisense strand to SEQ ID NO: 1789973
acugucauggccuuugauc

SEQ ID NO: 1789975 - RNA, 19 nt, Artificial Sequence
  Description of Artificial Sequence: Synthetic oligonucleotide
  Sense strand starting at position 2485 of SEQ ID NO: 1563026
caugacaguccugaauagu

SEQ ID NO: 1789976 - RNA, 19 nt, Artificial Sequence
  Description of Artificial Sequence: Synthetic oligonucleotide
  Antisense strand to SEQ ID NO: 1789975
acuauucaggacugucaug

SEQ ID NO: 1789977 - RNA, 19 nt, Artificial Sequence
  Description of Artificial Sequence: Synthetic oligonucleotide
  Sense strand starting at position 2620 of SEQ ID NO: 1563026
gccugaucccaggagcaca

SEQ ID NO: 1789978 - RNA, 19 nt, Artificial Sequence
  Description of Artificial Sequence: Synthetic oligonucleotide
  Antisense strand to SEQ ID NO: 1789977
ugugcuccugggaucaggc

SEQ ID NO: 1789979 - RNA, 19 nt, Artificial Sequence
  Description of Artificial Sequence: Synthetic oligonucleotide
  Sense strand starting at position 2738 of SEQ ID NO: 1563026
aguuucgucauauggaaga

SEQ ID NO: 1789980 - RNA, 19 nt, Artificial Sequence
  Description of Artificial Sequence: Synthetic oligonucleotide
  Antisense strand to SEQ ID NO: 1789979
ucuuccauaugacgaaacu

SEQ ID NO: 1789981 - RNA, 19 nt, Artificial Sequence
  Description of Artificial Sequence: Synthetic oligonucleotide
  Sense strand starting at position 2740 of SEQ ID NO: 1563026
uuucgucauauggaagaca

SEQ ID NO: 1789982 - RNA, 19 nt, Artificial Sequence
  Description of Artificial Sequence: Synthetic oligonucleotide
  Antisense strand to SEQ ID NO: 1789981
ugucuuccauaugacgaaa

SEQ ID NO: 1789983 - RNA, 19 nt, Artificial Sequence
  Description of Artificial Sequence: Synthetic oligonucleotide
  Sense strand starting at position 2778 of SEQ ID NO: 1563026
guuguuugcagagauuaaa

SEQ ID NO: 1789984 - RNA, 19 nt, Artificial Sequence
  Description of Artificial Sequence: Synthetic oligonucleotide
  Antisense strand to SEQ ID NO: 1789983
uuuaaucucugcaaacaac

SEQ ID NO: 1789985 - RNA, 19 nt, Artificial Sequence
  Description of Artificial Sequence: Synthetic oligonucleotide
  Sense strand starting at position 2917 of SEQ ID NO: 1563026
cugugauuccgagauccua

SEQ ID NO: 1789986 - RNA, 19 nt, Artificial Sequence
  Description of Artificial Sequence: Synthetic oligonucleotide
  Antisense strand to SEQ ID NO: 1789985
uaggaucucggaaucacag

SEQ ID NO: 1789987 - RNA, 19 nt, Artificial Sequence
  Description of Artificial Sequence: Synthetic oligonucleotide
  Sense strand starting at position 2935 of SEQ ID NO: 1563026
agaaucauggcacgagauu

SEQ ID NO: 1789988 - RNA, 19 nt, Artificial Sequence
  Description of Artificial Sequence: Synthetic oligonucleotide
  Antisense strand to SEQ ID NO: 1789987
aaucucgugccaugauucu

SEQ ID NO: 1789989 - RNA, 19 nt, Artificial Sequence
  Description of Artificial Sequence: Synthetic oligonucleotide
  Sense strand starting at position 2936 of SEQ ID NO: 1563026
gaaucauggcacgagauuc

SEQ ID NO: 1789990 - RNA, 19 nt, Artificial Sequence
  Description of Artificial Sequence: Synthetic oligonucleotide
  Antisense strand to SEQ ID NO: 1789989
gaaucucgugccaugauuc

SEQ ID NO: 1789991 - RNA, 19 nt, Artificial Sequence
  Description of Artificial Sequence: Synthetic oligonucleotide
  Sense strand starting at position 3611 of SEQ ID NO: 1563026
ugaugagagaugcgugaca

SEQ ID NO: 1789992 - RNA, 19 nt, Artificial Sequence
  Description of Artificial Sequence: Synthetic oligonucleotide
  Antisense strand to SEQ ID NO: 1789991
ugucacgcaucucucauca

SEQ ID NO: 1789993 - RNA, 19 nt, Artificial Sequence
  Description of Artificial Sequence: Synthetic oligonucleotide
  Sense strand starting at position 3951 of SEQ ID NO: 1563026
agagaagaaugugcucagu

SEQ ID NO: 1789994 - RNA, 19 nt, Artificial Sequence
  Description of Artificial Sequence: Synthetic oligonucleotide
  Antisense strand to SEQ ID NO: 1789993
acugagcacauucuucucu

SEQ ID NO: 1789995 - RNA, 19 nt, Artificial Sequence
  Description of Artificial Sequence: Synthetic oligonucleotide
  Sense strand starting at position 3954 of SEQ ID NO: 1563026
gaagaaugugcucagugcu

SEQ ID NO: 1789996 - RNA, 19 nt, Artificial Sequence
  Description of Artificial Sequence: Synthetic oligonucleotide
  Antisense strand to SEQ ID NO: 1789995
agcacugagcacauucuuc

SEQ ID NO: 1789997 - RNA, 19 nt, Artificial Sequence
  Description of Artificial Sequence: Synthetic oligonucleotide
  Sense strand starting at position 84 of SEQ ID NO: 1563027
uccuuagaaccagauuguu

SEQ ID NO: 1789998 - RNA, 19 nt, Artificial Sequence
  Description of Artificial Sequence: Synthetic oligonucleotide
  Antisense strand to SEQ ID NO: 1789997
aacaaucugguucuaagga

SEQ ID NO: 1789999 - RNA, 19 nt, Artificial Sequence
  Description of Artificial Sequence: Synthetic oligonucleotide
  Sense strand starting at position 89 of SEQ ID NO: 1563027
agaaccagauuguuguuaa

SEQ ID NO: 1790000 - RNA, 19 nt, Artificial Sequence
  Description of Artificial Sequence: Synthetic oligonucleotide
  Antisense strand to SEQ ID NO: 1789999
uuaacaacaaucugguucu

SEQ ID NO: 1790001 - RNA, 19 nt, Artificial Sequence
  Description of Artificial Sequence: Synthetic oligonucleotide
  Sense strand starting at position 92 of SEQ ID NO: 1563027
accagauuguuguuaagaa

SEQ ID NO: 1790002 - RNA, 19 nt, Artificial Sequence
  Description of Artificial Sequence: Synthetic oligonucleotide
  Antisense strand to SEQ ID NO: 1790001
uucuuaacaacaaucuggu

SEQ ID NO: 1790003 - RNA, 19 nt, Artificial Sequence
  Description of Artificial Sequence: Synthetic oligonucleotide
  Sense strand starting at position 107 of SEQ ID NO: 1563027
agaaauauucuuugagcua

SEQ ID NO: 1790004 - RNA, 19 nt, Artificial Sequence
  Description of Artificial Sequence: Synthetic oligonucleotide
  Antisense strand to SEQ ID NO: 1790003
uagcucaaagaauauuucu

SEQ ID NO: 1790005 - RNA, 19 nt, Artificial Sequence
  Description of Artificial Sequence: Synthetic oligonucleotide
  Sense strand starting at position 126 of SEQ ID NO: 1563027
uuugguaaucaugagcuca

SEQ ID NO: 1790006 - RNA, 19 nt, Artificial Sequence
  Description of Artificial Sequence: Synthetic oligonucleotide
  Antisense strand to SEQ ID NO: 1790005
ugagcucaugauuaccaaa

SEQ ID NO: 1790007 - RNA, 19 nt, Artificial Sequence
  Description of Artificial Sequence: Synthetic oligonucleotide
  Sense strand starting at position 495 of SEQ ID NO: 1563027
ucugcauaguugcuauuua

SEQ ID NO: 1790008 - RNA, 19 nt, Artificial Sequence
  Description of Artificial Sequence: Synthetic oligonucleotide
  Antisense strand to SEQ ID NO: 1790007
uaaauagcaacuaugcaga

SEQ ID NO: 1790009 - RNA, 19 nt, Artificial Sequence
  Description of Artificial Sequence: Synthetic oligonucleotide
  Sense strand starting at position 505 of SEQ ID NO: 1563027
ugcuauuuaucccuguuua

SEQ ID NO: 1790010 - RNA, 19 nt, Artificial Sequence
  Description of Artificial Sequence: Synthetic oligonucleotide
  Antisense strand to SEQ ID NO: 1790009
uaaacagggauaaauagca

SEQ ID NO: 1790011 - RNA, 19 nt, Artificial Sequence
  Description of Artificial Sequence: Synthetic oligonucleotide
  Sense strand starting at position 506 of SEQ ID NO: 1563027
gcuauuuaucccuguuuag

SEQ ID NO: 1790012 - RNA, 19 nt, Artificial Sequence
  Description of Artificial Sequence: Synthetic oligonucleotide
  Antisense strand to SEQ ID NO: 1790011
cuaaacagggauaaauagc

SEQ ID NO: 1790013 - RNA, 19 nt, Artificial Sequence
  Description of Artificial Sequence: Synthetic oligonucleotide
  Sense strand starting at position 524 of SEQ ID NO: 1563027
gugcaauuuguaugucauc

SEQ ID NO: 1790014 - RNA, 19 nt, Artificial Sequence
  Description of Artificial Sequence: Synthetic oligonucleotide
  Antisense strand to SEQ ID NO: 1790013
gaugacauacaaauugcac

SEQ ID NO: 1790015 - RNA, 19 nt, Artificial Sequence
  Description of Artificial Sequence: Synthetic oligonucleotide
  Sense strand starting at position 586 of SEQ ID NO: 1563027
agggaagacuucccuguca

SEQ ID NO: 1790016 - RNA, 19 nt, Artificial Sequence
  Description of Artificial Sequence: Synthetic oligonucleotide
  Antisense strand to SEQ ID NO: 1790015
ugacagggaagucuucccu

SEQ ID NO: 1790017 - RNA, 19 nt, Artificial Sequence
  Description of Artificial Sequence: Synthetic oligonucleotide
  Sense strand starting at position 588 of SEQ ID NO: 1563027
ggaagacuucccugucacu

SEQ ID NO: 1790018 - RNA, 19 nt, Artificial Sequence
  Description of Artificial Sequence: Synthetic oligonucleotide
  Antisense strand to SEQ ID NO: 1790017
agugacagggaagucuucc

SEQ ID NO: 1790019 - RNA, 19 nt, Artificial Sequence
  Description of Artificial Sequence: Synthetic oligonucleotide
  Sense strand starting at position 764 of SEQ ID NO: 1563027
cgaaguacucuacaguuaa

SEQ ID NO: 1790020 - RNA, 19 nt, Artificial Sequence
  Description of Artificial Sequence: Synthetic oligonucleotide
  Antisense strand to SEQ ID NO: 1790019
uuaacuguagaguacuucg

SEQ ID NO: 1790021 - RNA, 19 nt, Artificial Sequence
  Description of Artificial Sequence: Synthetic oligonucleotide
  Sense strand starting at position 803 of SEQ ID NO: 1563027
ggaaacaugccaggccuua

SEQ ID NO: 1790022 - RNA, 19 nt, Artificial Sequence
  Description of Artificial Sequence: Synthetic oligonucleotide
  Antisense strand to SEQ ID NO: 1790021
uaaggccuggcauguuucc

SEQ ID NO: 1790023 - RNA, 19 nt, Artificial Sequence
  Description of Artificial Sequence: Synthetic oligonucleotide
  Sense strand starting at position 841 of SEQ ID NO: 1563027
cguguuuggagugauaaca

SEQ ID NO: 1790024 - RNA, 19 nt, Artificial Sequence
  Description of Artificial Sequence: Synthetic oligonucleotide
  Antisense strand to SEQ ID NO: 1790023
uguuaucacuccaaacacg

SEQ ID NO: 1790025 - RNA, 19 nt, Artificial Sequence
  Description of Artificial Sequence: Synthetic oligonucleotide
  Sense strand starting at position 849 of SEQ ID NO: 1563027
gagugauaacacugccaag

SEQ ID NO: 1790026 - RNA, 19 nt, Artificial Sequence
  Description of Artificial Sequence: Synthetic oligonucleotide
  Antisense strand to SEQ ID NO: 1790025
cuuggcaguguuaucacuc

SEQ ID NO: 1790027 - RNA, 19 nt, Artificial Sequence
  Description of Artificial Sequence: Synthetic oligonucleotide
  Sense strand starting at position 863 of SEQ ID NO: 1563027
ccaaguaacggagguauaa

SEQ ID NO: 1790028 - RNA, 19 nt, Artificial Sequence
  Description of Artificial Sequence: Synthetic oligonucleotide
  Antisense strand to SEQ ID NO: 1790027
uuauaccuccguuacuugg

SEQ ID NO: 1790029 - RNA, 19 nt, Artificial Sequence
  Description of Artificial Sequence: Synthetic oligonucleotide
  Sense strand starting at position 873 of SEQ ID NO: 1563027
gagguauaauaagugauuc

SEQ ID NO: 1790030 - RNA, 19 nt, Artificial Sequence
  Description of Artificial Sequence: Synthetic oligonucleotide
  Antisense strand to SEQ ID NO: 1790029
gaaucacuuauuauaccuc

SEQ ID NO: 1790031 - RNA, 19 nt, Artificial Sequence
  Description of Artificial Sequence: Synthetic oligonucleotide
  Sense strand starting at position 915 of SEQ ID NO: 1563027
cuacaaacgcuguaaggua

SEQ ID NO: 1790032 - RNA, 19 nt, Artificial Sequence
  Description of Artificial Sequence: Synthetic oligonucleotide
  Antisense strand to SEQ ID NO: 1790031
uaccuuacagcguuuguag

SEQ ID NO: 1790033 - RNA, 19 nt, Artificial Sequence
  Description of Artificial Sequence: Synthetic oligonucleotide
  Sense strand starting at position 1005 of SEQ ID NO: 1563027
uuauuauaacacgacguaa

SEQ ID NO: 1790034 - RNA, 19 nt, Artificial Sequence
  Description of Artificial Sequence: Synthetic oligonucleotide
  Antisense strand to SEQ ID NO: 1790033
uuacgucguguuauaauaa

SEQ ID NO: 1790035 - RNA, 19 nt, Artificial Sequence
  Description of Artificial Sequence: Synthetic oligonucleotide
  Sense strand starting at position 1022 of SEQ ID NO: 1563027
aaaggaauagugcguaaag

SEQ ID NO: 1790036 - RNA, 19 nt, Artificial Sequence
  Description of Artificial Sequence: Synthetic oligonucleotide
  Antisense strand to SEQ ID NO: 1790035
cuuuacgcacuauuccuuu

SEQ ID NO: 1790037 - RNA, 19 nt, Artificial Sequence
  Description of Artificial Sequence: Synthetic oligonucleotide
  Sense strand starting at position 1024 of SEQ ID NO: 1563027
aggaauagugcguaaagga

SEQ ID NO: 1790038 - RNA, 19 nt, Artificial Sequence
  Description of Artificial Sequence: Synthetic oligonucleotide
  Antisense strand to SEQ ID NO: 1790037
uccuuuacgcacuauuccu

SEQ ID NO: 1790039 - RNA, 19 nt, Artificial Sequence
  Description of Artificial Sequence: Synthetic oligonucleotide
  Sense strand starting at position 1298 of SEQ ID NO: 1563027
cccuuucccgggcaaagaa

SEQ ID NO: 1790040 - RNA, 19 nt, Artificial Sequence
  Description of Artificial Sequence: Synthetic oligonucleotide
  Antisense strand to SEQ ID NO: 1790039
uucuuugcccgggaaaggg

SEQ ID NO: 1790041 - RNA, 19 nt, Artificial Sequence
  Description of Artificial Sequence: Synthetic oligonucleotide
  Sense strand starting at position 1746 of SEQ ID NO: 1563027
uagaaucuucuagaagcgu

SEQ ID NO: 1790042 - RNA, 19 nt, Artificial Sequence
  Description of Artificial Sequence: Synthetic oligonucleotide
  Antisense strand to SEQ ID NO: 1790041
acgcuucuagaagauucua

SEQ ID NO: 1790043 - RNA, 19 nt, Artificial Sequence
  Description of Artificial Sequence: Synthetic oligonucleotide
  Sense strand starting at position 2236 of SEQ ID NO: 1563027
agguuagacucuucuccca

SEQ ID NO: 1790044 - RNA, 19 nt, Artificial Sequence
  Description of Artificial Sequence: Synthetic oligonucleotide
  Antisense strand to SEQ ID NO: 1790043
ugggagaagagucuaaccu

SEQ ID NO: 1790045 - RNA, 19 nt, Artificial Sequence
  Description of Artificial Sequence: Synthetic oligonucleotide
  Sense strand starting at position 2411 of SEQ ID NO: 1563027
guguguucucuaccguuga

SEQ ID NO: 1790046 - RNA, 19 nt, Artificial Sequence
  Description of Artificial Sequence: Synthetic oligonucleotide
  Antisense strand to SEQ ID NO: 1790045
ucaacgguagagaacacac

SEQ ID NO: 1790047 - RNA, 19 nt, Artificial Sequence
  Description of Artificial Sequence: Synthetic oligonucleotide
  Sense strand starting at position 2561 of SEQ ID NO: 1563027
guagcucuuguuucuguua

SEQ ID NO: 1790048 - RNA, 19 nt, Artificial Sequence
  Description of Artificial Sequence: Synthetic oligonucleotide
  Antisense strand to SEQ ID NO: 1790047
uaacagaaacaagagcuac

SEQ ID NO: 1790049 - RNA, 19 nt, Artificial Sequence
  Description of Artificial Sequence: Synthetic oligonucleotide
  Sense strand starting at position 2574 of SEQ ID NO: 1563027
cuguuaggcgugagagcuu

SEQ ID NO: 1790050 - RNA, 19 nt, Artificial Sequence
  Description of Artificial Sequence: Synthetic oligonucleotide
  Antisense strand to SEQ ID NO: 1790049
aagcucucacgccuaacag

SEQ ID NO: 1790051 - RNA, 19 nt, Artificial Sequence
  Description of Artificial Sequence: Synthetic oligonucleotide
  Sense strand starting at position 2585 of SEQ ID NO: 1563027
gagagcuugcuccagaaua

SEQ ID NO: 1790052 - RNA, 19 nt, Artificial Sequence
  Description of Artificial Sequence: Synthetic oligonucleotide
  Antisense strand to SEQ ID NO: 1790051
uauucuggagcaagcucuc

SEQ ID NO: 1790053 - RNA, 19 nt, Artificial Sequence
  Description of Artificial Sequence: Synthetic oligonucleotide
  Sense strand starting at position 2609 of SEQ ID NO: 1563027
gaagcauguuuaguaacaa

SEQ ID NO: 1790054 - RNA, 19 nt, Artificial Sequence
  Description of Artificial Sequence: Synthetic oligonucleotide
  Antisense strand to SEQ ID NO: 1790053
uuguuacuaaacaugcuuc

SEQ ID NO: 1790055 - RNA, 19 nt, Artificial Sequence
  Description of Artificial Sequence: Synthetic oligonucleotide
  Sense strand starting at position 2643 of SEQ ID NO: 1563027
ccucuuaggagagguaacu

SEQ ID NO: 1790056 - RNA, 19 nt, Artificial Sequence
  Description of Artificial Sequence: Synthetic oligonucleotide
  Antisense strand to SEQ ID NO: 1790055
aguuaccucuccuaagagg

SEQ ID NO: 1790057 - RNA, 19 nt, Artificial Sequence
  Description of Artificial Sequence: Synthetic oligonucleotide
  Sense strand starting at position 2652 of SEQ ID NO: 1563027
agagguaacuguuucgaaa

SEQ ID NO: 1790058 - RNA, 19 nt, Artificial Sequence
  Description of Artificial Sequence: Synthetic oligonucleotide
  Antisense strand to SEQ ID NO: 1790057
uuucgaaacaguuaccucu

SEQ ID NO: 1790059 - RNA, 19 nt, Artificial Sequence
  Description of Artificial Sequence: Synthetic oligonucleotide
  Sense strand starting at position 2830 of SEQ ID NO: 1563027
cugccauuggaucguauuu

SEQ ID NO: 1790060 - RNA, 19 nt, Artificial Sequence
  Description of Artificial Sequence: Synthetic oligonucleotide
  Antisense strand to SEQ ID NO: 1790059
aaauacgauccaauggcag

SEQ ID NO: 1790061 - RNA, 19 nt, Artificial Sequence
  Description of Artificial Sequence: Synthetic oligonucleotide
  Sense strand starting at position 2864 of SEQ ID NO: 1563027
auauaugaacaauguguga

SEQ ID NO: 1790062 - RNA, 19 nt, Artificial Sequence
  Description of Artificial Sequence: Synthetic oligonucleotide
  Antisense strand to SEQ ID NO: 1790061
ucacacauuguucauauau

SEQ ID NO: 1790063 - RNA, 19 nt, Artificial Sequence
  Description of Artificial Sequence: Synthetic oligonucleotide
  Sense strand starting at position 2875 of SEQ ID NO: 1563027
augugugaaccagaacgua

SEQ ID NO: 1790064 - RNA, 19 nt, Artificial Sequence
  Description of Artificial Sequence: Synthetic oligonucleotide
  Antisense strand to SEQ ID NO: 1790063
uacguucugguucacacau

SEQ ID NO: 1790065 - RNA, 19 nt, Artificial Sequence
  Description of Artificial Sequence: Synthetic oligonucleotide
  Sense strand starting at position 2959 of SEQ ID NO: 1563027
auggaauguuaauuacauc

SEQ ID NO: 1790066 - RNA, 19 nt, Artificial Sequence
  Description of Artificial Sequence: Synthetic oligonucleotide
  Antisense strand to SEQ ID NO: 1790065
gauguaauuaacauuccau

SEQ ID NO: 1790067 - RNA, 19 nt, Artificial Sequence
  Description of Artificial Sequence: Synthetic oligonucleotide
  Sense strand starting at position 3058 of SEQ ID NO: 1563027
agacaacucuccgugggau

SEQ ID NO: 1790068 - RNA, 19 nt, Artificial Sequence
  Description of Artificial Sequence: Synthetic oligonucleotide
  Antisense strand to SEQ ID NO: 1790067
aucccacggagaguugucu

SEQ ID NO: 1790069 - RNA, 19 nt, Artificial Sequence
  Description of Artificial Sequence: Synthetic oligonucleotide
  Sense strand starting at position 3484 of SEQ ID NO: 1563027
cguugcaaucguuuaguau

SEQ ID NO: 1790070 - RNA, 19 nt, Artificial Sequence
  Description of Artificial Sequence: Synthetic oligonucleotide
  Antisense strand to SEQ ID NO: 1790069
auacuaaacgauugcaacg

SEQ ID NO: 1790071 - RNA, 19 nt, Artificial Sequence
  Description of Artificial Sequence: Synthetic oligonucleotide
  Sense strand starting at position 3495 of SEQ ID NO: 1563027
uuuaguauggcuggagaag

SEQ ID NO: 1790072 - RNA, 19 nt, Artificial Sequence
  Description of Artificial Sequence: Synthetic oligonucleotide
  Antisense strand to SEQ ID NO: 1790071
cuucuccagccauacuaaa

SEQ ID NO: 1790073 - RNA, 19 nt, Artificial Sequence
  Description of Artificial Sequence: Synthetic oligonucleotide
  Sense strand starting at position 3835 of SEQ ID NO: 1563027
uuugaaagauguucucaaa

SEQ ID NO: 1790074 - RNA, 19 nt, Artificial Sequence
  Description of Artificial Sequence: Synthetic oligonucleotide
  Antisense strand to SEQ ID NO: 1790073
uuugagaacaucuuucaaa

SEQ ID NO: 1790075 - RNA, 19 nt, Artificial Sequence
  Description of Artificial Sequence: Synthetic oligonucleotide
  Sense strand starting at position 3878 of SEQ ID NO: 1563027
augauucugugaucaaaua

SEQ ID NO: 1790076 - RNA, 19 nt, Artificial Sequence
  Description of Artificial Sequence: Synthetic oligonucleotide
  Antisense strand to SEQ ID NO: 1790075
uauuugaucacagaaucau

SEQ ID NO: 1790077 - RNA, 19 nt, Artificial Sequence
  Description of Artificial Sequence: Synthetic oligonucleotide
  Sense strand starting at position 17 of SEQ ID NO: 1563028
accacagcucaaugggauu

SEQ ID NO: 1790078 - RNA, 19 nt, Artificial Sequence
  Description of Artificial Sequence: Synthetic oligonucleotide
  Antisense strand to SEQ ID NO: 1790077
aaucccauugagcuguggu

SEQ ID NO: 1790079 - RNA, 19 nt, Artificial Sequence
  Description of Artificial Sequence: Synthetic oligonucleotide
  Sense strand starting at position 106 of SEQ ID NO: 1563028
gaagccagguucuuaaugu

SEQ ID NO: 1790080 - RNA, 19 nt, Artificial Sequence
  Description of Artificial Sequence: Synthetic oligonucleotide
  Antisense strand to SEQ ID NO: 1790079
acauuaagaaccuggcuuc

SEQ ID NO: 1790081 - RNA, 19 nt, Artificial Sequence
  Description of Artificial Sequence: Synthetic oligonucleotide
  Sense strand starting at position 114 of SEQ ID NO: 1563028
guucuuaauguguaagcac

SEQ ID NO: 1790082 - RNA, 19 nt, Artificial Sequence
  Description of Artificial Sequence: Synthetic oligonucleotide
  Antisense strand to SEQ ID NO: 1790081
gugcuuacacauuaagaac

SEQ ID NO: 1790083 - RNA, 19 nt, Artificial Sequence
  Description of Artificial Sequence: Synthetic oligonucleotide
  Sense strand starting at position 222 of SEQ ID NO: 1563028
gccucagagaagugacaca

SEQ ID NO: 1790084 - RNA, 19 nt, Artificial Sequence
  Description of Artificial Sequence: Synthetic oligonucleotide
  Antisense strand to SEQ ID NO: 1790083
ugugucacuucucugaggc

SEQ ID NO: 1790085 - RNA, 19 nt, Artificial Sequence
  Description of Artificial Sequence: Synthetic oligonucleotide
  Sense strand starting at position 475 of SEQ ID NO: 1563028
guaagagucccucacagau

SEQ ID NO: 1790086 - RNA, 19 nt, Artificial Sequence
  Description of Artificial Sequence: Synthetic oligonucleotide
  Antisense strand to SEQ ID NO: 1790085
aucugugagggacucuuac

SEQ ID NO: 1790087 - RNA, 19 nt, Artificial Sequence
  Description of Artificial Sequence: Synthetic oligonucleotide
  Sense strand starting at position 488 of SEQ ID NO: 1563028
acagauuaacagcgauaga

SEQ ID NO: 1790088 - RNA, 19 nt, Artificial Sequence
  Description of Artificial Sequence: Synthetic oligonucleotide
  Antisense strand to SEQ ID NO: 1790087
ucuaucgcuguuaaucugu

SEQ ID NO: 1790089 - RNA, 19 nt, Artificial Sequence
  Description of Artificial Sequence: Synthetic oligonucleotide
  Sense strand starting at position 524 of SEQ ID NO: 1563028
cuuaaugaguggccacaga

SEQ ID NO: 1790090 - RNA, 19 nt, Artificial Sequence
  Description of Artificial Sequence: Synthetic oligonucleotide
  Antisense strand to SEQ ID NO: 1790089
ucuguggccacucauuaag

SEQ ID NO: 1790091 - RNA, 19 nt, Artificial Sequence
  Description of Artificial Sequence: Synthetic oligonucleotide
  Sense strand starting at position 599 of SEQ ID NO: 1563028
acuggcaugugcucaagau

SEQ ID NO: 1790092 - RNA, 19 nt, Artificial Sequence
  Description of Artificial Sequence: Synthetic oligonucleotide
  Antisense strand to SEQ ID NO: 1790091
aucuugagcacaugccagu

SEQ ID NO: 1790093 - RNA, 19 nt, Artificial Sequence
  Description of Artificial Sequence: Synthetic oligonucleotide
  Sense strand starting at position 600 of SEQ ID NO: 1563028
cuggcaugugcucaagaua

SEQ ID NO: 1790094 - RNA, 19 nt, Artificial Sequence
  Description of Artificial Sequence: Synthetic oligonucleotide
  Antisense strand to SEQ ID NO: 1790093
uaucuugagcacaugccag

SEQ ID NO: 1790095 - RNA, 19 nt, Artificial Sequence
  Description of Artificial Sequence: Synthetic oligonucleotide
  Sense strand starting at position 603 of SEQ ID NO: 1563028
gcaugugcucaagauagca

SEQ ID NO: 1790096 - RNA, 19 nt, Artificial Sequence
  Description of Artificial Sequence: Synthetic oligonucleotide
  Antisense strand to SEQ ID NO: 1790095
ugcuaucuugagcacaugc

SEQ ID NO: 1790097 - RNA, 19 nt, Artificial Sequence
  Description of Artificial Sequence: Synthetic oligonucleotide
  Sense strand starting at position 632 of SEQ ID NO: 1563028
cgcucuguucuccaaccaa

SEQ ID NO: 1790098 - RNA, 19 nt, Artificial Sequence
  Description of Artificial Sequence: Synthetic oligonucleotide
  Antisense strand to SEQ ID NO: 1790097
uugguuggagaacagagcg

SEQ ID NO: 1790099 - RNA, 19 nt, Artificial Sequence
  Description of Artificial Sequence: Synthetic oligonucleotide
  Sense strand starting at position 821 of SEQ ID NO: 1563028
cugugauugccucaaauac

SEQ ID NO: 1790100 - RNA, 19 nt, Artificial Sequence
  Description of Artificial Sequence: Synthetic oligonucleotide
  Antisense strand to SEQ ID NO: 1790099
guauuugaggcaaucacag

SEQ ID NO: 1790101 - RNA, 19 nt, Artificial Sequence
  Description of Artificial Sequence: Synthetic oligonucleotide
  Sense strand starting at position 953 of SEQ ID NO: 1563028
agaccagccuagcuuuaau

SEQ ID NO: 1790102 - RNA, 19 nt, Artificial Sequence
  Description of Artificial Sequence: Synthetic oligonucleotide
  Antisense strand to SEQ ID NO: 1790101
auuaaagcuaggcuggucu

SEQ ID NO: 1790103 - RNA, 19 nt, Artificial Sequence
  Description of Artificial Sequence: Synthetic oligonucleotide
  Sense strand starting at position 1043 of SEQ ID NO: 1563028
gacuguaaagugggaauga

SEQ ID NO: 1790104 - RNA, 19 nt, Artificial Sequence
  Description of Artificial Sequence: Synthetic oligonucleotide
  Antisense strand to SEQ ID NO: 1790103
ucauucccacuuuacaguc

SEQ ID NO: 1790105 - RNA, 19 nt, Artificial Sequence
  Description of Artificial Sequence: Synthetic oligonucleotide
  Sense strand starting at position 1101 of SEQ ID NO: 1563028
ucagcuaaugcugggaaau

SEQ ID NO: 1790106 - RNA, 19 nt, Artificial Sequence
  Description of Artificial Sequence: Synthetic oligonucleotide
  Antisense strand to SEQ ID NO: 1790105
auuucccagcauuagcuga

SEQ ID NO: 1790107 - RNA, 19 nt, Artificial Sequence
  Description of Artificial Sequence: Synthetic oligonucleotide
  Sense strand starting at position 1102 of SEQ ID NO: 1563028
cagcuaaugcugggaaaug

SEQ ID NO: 1790108 - RNA, 19 nt, Artificial Sequence
  Description of Artificial Sequence: Synthetic oligonucleotide
  Antisense strand to SEQ ID NO: 1790107
cauuucccagcauuagcug

SEQ ID NO: 1790109 - RNA, 19 nt, Artificial Sequence
  Description of Artificial Sequence: Synthetic oligonucleotide
  Sense strand starting at position 1294 of SEQ ID NO: 1563028
aggugaacaccaggacuuu

SEQ ID NO: 1790110 - RNA, 19 nt, Artificial Sequence
  Description of Artificial Sequence: Synthetic oligonucleotide
  Antisense strand to SEQ ID NO: 1790109
aaaguccugguguucaccu

SEQ ID NO: 1790111 - RNA, 19 nt, Artificial Sequence
  Description of Artificial Sequence: Synthetic oligonucleotide
  Sense strand starting at position 1351 of SEQ ID NO: 1563028
gguugagugaccuguccaa

SEQ ID NO: 1790112 - RNA, 19 nt, Artificial Sequence
  Description of Artificial Sequence: Synthetic oligonucleotide
  Antisense strand to SEQ ID NO: 1790111
uuggacaggucacucaacc

SEQ ID NO: 1790113 - RNA, 19 nt, Artificial Sequence
  Description of Artificial Sequence: Synthetic oligonucleotide
  Sense strand starting at position 1479 of SEQ ID NO: 1563028
cccgaaggucucugaccuu

SEQ ID NO: 1790114 - RNA, 19 nt, Artificial Sequence
  Description of Artificial Sequence: Synthetic oligonucleotide
  Antisense strand to SEQ ID NO: 1790113
aaggucagagaccuucggg

SEQ ID NO: 1790115 - RNA, 19 nt, Artificial Sequence
  Description of Artificial Sequence: Synthetic oligonucleotide
  Sense strand starting at position 2265 of SEQ ID NO: 1563028
aacacagacgcaugagaua

SEQ ID NO: 1790116 - RNA, 19 nt, Artificial Sequence
  Description of Artificial Sequence: Synthetic oligonucleotide
  Antisense strand to SEQ ID NO: 1790115
uaucucaugcgucuguguu

SEQ ID NO: 1790117 - RNA, 19 nt, Artificial Sequence
  Description of Artificial Sequence: Synthetic oligonucleotide
  Sense strand starting at position 2276 of SEQ ID NO: 1563028
augagauacccuggcugga

SEQ ID NO: 1790118 - RNA, 19 nt, Artificial Sequence
  Description of Artificial Sequence: Synthetic oligonucleotide
  Antisense strand to SEQ ID NO: 1790117
uccagccaggguaucucau

SEQ ID NO: 1790119 - RNA, 19 nt, Artificial Sequence
  Description of Artificial Sequence: Synthetic oligonucleotide
  Sense strand starting at position 2414 of SEQ ID NO: 1563028
uggagcuuacauugguaaa

SEQ ID NO: 1790120 - RNA, 19 nt, Artificial Sequence
  Description of Artificial Sequence: Synthetic oligonucleotide
  Antisense strand to SEQ ID NO: 1790119
uuuaccaauguaagcucca

SEQ ID NO: 1790121 - RNA, 19 nt, Artificial Sequence
  Description of Artificial Sequence: Synthetic oligonucleotide
  Sense strand starting at position 2415 of SEQ ID NO: 1563028
ggagcuuacauugguaaau

SEQ ID NO: 1790122 - RNA, 19 nt, Artificial Sequence
  Description of Artificial Sequence: Synthetic oligonucleotide
  Antisense strand to SEQ ID NO: 1790121
auuuaccaauguaagcucc

SEQ ID NO: 1790123 - RNA, 19 nt, Artificial Sequence
  Description of Artificial Sequence: Synthetic oligonucleotide
  Sense strand starting at position 3082 of SEQ ID NO: 1563028
cuuaauaucccaugaguag

SEQ ID NO: 1790124 - RNA, 19 nt, Artificial Sequence
  Description of Artificial Sequence: Synthetic oligonucleotide
  Antisense strand to SEQ ID NO: 1790123
cuacucaugggauauuaag

SEQ ID NO: 1790125 - RNA, 19 nt, Artificial Sequence
  Description of Artificial Sequence: Synthetic oligonucleotide
  Sense strand starting at position 3178 of SEQ ID NO: 1563028
gcacuucuugugcaaacua

SEQ ID NO: 1790126 - RNA, 19 nt, Artificial Sequence
  Description of Artificial Sequence: Synthetic oligonucleotide
  Antisense strand to SEQ ID NO: 1790125
uaguuugcacaagaagugc

SEQ ID NO: 1790127 - RNA, 19 nt, Artificial Sequence
  Description of Artificial Sequence: Synthetic oligonucleotide
  Sense strand starting at position 3193 of SEQ ID NO: 1563028
acuauaauuugagagcaac

SEQ ID NO: 1790128 - RNA, 19 nt, Artificial Sequence
  Description of Artificial Sequence: Synthetic oligonucleotide
  Antisense strand to SEQ ID NO: 1790127
guugcucucaaauuauagu

SEQ ID NO: 1790129 - RNA, 19 nt, Artificial Sequence
  Description of Artificial Sequence: Synthetic oligonucleotide
  Sense strand starting at position 3209 of SEQ ID NO: 1563028
aaccgaguucuagagaucu

SEQ ID NO: 1790130 - RNA, 19 nt, Artificial Sequence
  Description of Artificial Sequence: Synthetic oligonucleotide
  Antisense strand to SEQ ID NO: 1790129
agaucucuagaacucgguu

SEQ ID NO: 1790131 - RNA, 19 nt, Artificial Sequence
  Description of Artificial Sequence: Synthetic oligonucleotide
  Sense strand starting at position 3211 of SEQ ID NO: 1563028
ccgaguucuagagaucuca

SEQ ID NO: 1790132 - RNA, 19 nt, Artificial Sequence
  Description of Artificial Sequence: Synthetic oligonucleotide
  Antisense strand to SEQ ID NO: 1790131
ugagaucucuagaacucgg

SEQ ID NO: 1790133 - RNA, 19 nt, Artificial Sequence
  Description of Artificial Sequence: Synthetic oligonucleotide
  Sense strand starting at position 3219 of SEQ ID NO: 1563028
uagagaucucagugcaacc

SEQ ID NO: 1790134 - RNA, 19 nt, Artificial Sequence
  Description of Artificial Sequence: Synthetic oligonucleotide
  Antisense strand to SEQ ID NO: 1790133
gguugcacugagaucucua

SEQ ID NO: 1790135 - RNA, 19 nt, Artificial Sequence
  Description of Artificial Sequence: Synthetic oligonucleotide
  Sense strand starting at position 3345 of SEQ ID NO: 1563028
caucaucagcuguguaaag

SEQ ID NO: 1790136 - RNA, 19 nt, Artificial Sequence
  Description of Artificial Sequence: Synthetic oligonucleotide
  Antisense strand to SEQ ID NO: 1790135
cuuuacacagcugaugaug

SEQ ID NO: 1790137 - RNA, 19 nt, Artificial Sequence
  Description of Artificial Sequence: Synthetic oligonucleotide
  Sense strand starting at position 3347 of SEQ ID NO: 1563028
ucaucagcuguguaaagga

SEQ ID NO: 1790138 - RNA, 19 nt, Artificial Sequence
  Description of Artificial Sequence: Synthetic oligonucleotide
  Antisense strand to SEQ ID NO: 1790137
uccuuuacacagcugauga

SEQ ID NO: 1790139 - RNA, 19 nt, Artificial Sequence
  Description of Artificial Sequence: Synthetic oligonucleotide
  Sense strand starting at position 3385 of SEQ ID NO: 1563028
uaaguaguguagccaggaa

SEQ ID NO: 1790140 - RNA, 19 nt, Artificial Sequence
  Description of Artificial Sequence: Synthetic oligonucleotide
  Antisense strand to SEQ ID NO: 1790139
uuccuggcuacacuacuua

SEQ ID NO: 1790141 - RNA, 19 nt, Artificial Sequence
  Description of Artificial Sequence: Synthetic oligonucleotide
  Sense strand starting at position 3476 of SEQ ID NO: 1563028
cuuacuguagagugagaca

SEQ ID NO: 1790142 - RNA, 19 nt, Artificial Sequence
  Description of Artificial Sequence: Synthetic oligonucleotide
  Antisense strand to SEQ ID NO: 1790141
ugucucacucuacaguaag

SEQ ID NO: 1790143 - RNA, 19 nt, Artificial Sequence
  Description of Artificial Sequence: Synthetic oligonucleotide
  Sense strand starting at position 3727 of SEQ ID NO: 1563028
ugauguuucaggugagggu

SEQ ID NO: 1790144 - RNA, 19 nt, Artificial Sequence
  Description of Artificial Sequence: Synthetic oligonucleotide
  Antisense strand to SEQ ID NO: 1790143
acccucaccugaaacauca

SEQ ID NO: 1790145 - RNA, 19 nt, Artificial Sequence
  Description of Artificial Sequence: Synthetic oligonucleotide
  Sense strand starting at position 3728 of SEQ ID NO: 1563028
gauguuucaggugaggguu

SEQ ID NO: 1790146 - RNA, 19 nt, Artificial Sequence
  Description of Artificial Sequence: Synthetic oligonucleotide
  Antisense strand to SEQ ID NO: 1790145
aacccucaccugaaacauc

SEQ ID NO: 1790147 - RNA, 19 nt, Artificial Sequence
  Description of Artificial Sequence: Synthetic oligonucleotide
  Sense strand starting at position 3736 of SEQ ID NO: 1563028
aggugaggguucucacugu

SEQ ID NO: 1790148 - RNA, 19 nt, Artificial Sequence
  Description of Artificial Sequence: Synthetic oligonucleotide
  Antisense strand to SEQ ID NO: 1790147
acagugagaacccucaccu

SEQ ID NO: 1790149 - RNA, 19 nt, Artificial Sequence
  Description of Artificial Sequence: Synthetic oligonucleotide
  Sense strand starting at position 3740 of SEQ ID NO: 1563028
gaggguucucacuguggga

SEQ ID NO: 1790150 - RNA, 19 nt, Artificial Sequence
  Description of Artificial Sequence: Synthetic oligonucleotide
  Antisense strand to SEQ ID NO: 1790149
ucccacagugagaacccuc

SEQ ID NO: 1790151 - RNA, 19 nt, Artificial Sequence
  Description of Artificial Sequence: Synthetic oligonucleotide
  Sense strand starting at position 3805 of SEQ ID NO: 1563028
augguauuggauuggaauu

SEQ ID NO: 1790152 - RNA, 19 nt, Artificial Sequence
  Description of Artificial Sequence: Synthetic oligonucleotide
  Antisense strand to SEQ ID NO: 1790151
aauuccaauccaauaccau

SEQ ID NO: 1790153 - RNA, 19 nt, Artificial Sequence
  Description of Artificial Sequence: Synthetic oligonucleotide
  Sense strand starting at position 3825 of SEQ ID NO: 1563028
gagguauugacaugaguuu

SEQ ID NO: 1790154 - RNA, 19 nt, Artificial Sequence
  Description of Artificial Sequence: Synthetic oligonucleotide
  Antisense strand to SEQ ID NO: 1790153
aaacucaugucaauaccuc

SEQ ID NO: 1790155 - RNA, 19 nt, Artificial Sequence
  Description of Artificial Sequence: Synthetic oligonucleotide
  Sense strand starting at position 3927 of SEQ ID NO: 1563028
ugcccagaucuuugcuaaa

SEQ ID NO: 1790156 - RNA, 19 nt, Artificial Sequence
  Description of Artificial Sequence: Synthetic oligonucleotide
  Antisense strand to SEQ ID NO: 1790155
uuuagcaaagaucugggca

SEQ ID NO: 1790157 - RNA, 19 nt, Artificial Sequence
  Description of Artificial Sequence: Synthetic oligonucleotide
  Sense strand starting at position 118 of SEQ ID NO: 1563029
gguagcauucugugacaug

SEQ ID NO: 1790158 - RNA, 19 nt, Artificial Sequence
  Description of Artificial Sequence: Synthetic oligonucleotide
  Antisense strand to SEQ ID NO: 1790157
caugucacagaaugcuacc

SEQ ID NO: 1790159 - RNA, 19 nt, Artificial Sequence
  Description of Artificial Sequence: Synthetic oligonucleotide
  Sense strand starting at position 136 of SEQ ID NO: 1563029
gaggaagauuaaugaacca

SEQ ID NO: 1790160 - RNA, 19 nt, Artificial Sequence
  Description of Artificial Sequence: Synthetic oligonucleotide
  Antisense strand to SEQ ID NO: 1790159
ugguucauuaaucuuccuc

SEQ ID NO: 1790161 - RNA, 19 nt, Artificial Sequence
  Description of Artificial Sequence: Synthetic oligonucleotide
  Sense strand starting at position 286 of SEQ ID NO: 1563029
ucuaauauuccugguugau

SEQ ID NO: 1790162 - RNA, 19 nt, Artificial Sequence
  Description of Artificial Sequence: Synthetic oligonucleotide
  Antisense strand to SEQ ID NO: 1790161
aucaaccaggaauauuaga

SEQ ID NO: 1790163 - RNA, 19 nt, Artificial Sequence
  Description of Artificial Sequence: Synthetic oligonucleotide
  Sense strand starting at position 295 of SEQ ID NO: 1563029
ccugguugauacuuaaaug

SEQ ID NO: 1790164 - RNA, 19 nt, Artificial Sequence
  Description of Artificial Sequence: Synthetic oligonucleotide
  Antisense strand to SEQ ID NO: 1790163
cauuuaaguaucaaccagg

SEQ ID NO: 1790165 - RNA, 19 nt, Artificial Sequence
  Description of Artificial Sequence: Synthetic oligonucleotide
  Sense strand starting at position 325 of SEQ ID NO: 1563029
ggguuguguggugaguaua

SEQ ID NO: 1790166 - RNA, 19 nt, Artificial Sequence
  Description of Artificial Sequence: Synthetic oligonucleotide
  Antisense strand to SEQ ID NO: 1790165
uauacucaccacacaaccc

SEQ ID NO: 1790167 - RNA, 19 nt, Artificial Sequence
  Description of Artificial Sequence: Synthetic oligonucleotide
  Sense strand starting at position 326 of SEQ ID NO: 1563029
gguuguguggugaguauag

SEQ ID NO: 1790168 - RNA, 19 nt, Artificial Sequence
  Description of Artificial Sequence: Synthetic oligonucleotide
  Antisense strand to SEQ ID NO: 1790167
cuauacucaccacacaacc

SEQ ID NO: 1790169 - RNA, 19 nt, Artificial Sequence
  Description of Artificial Sequence: Synthetic oligonucleotide
  Sense strand starting at position 327 of SEQ ID NO: 1563029
guuguguggugaguauaga

SEQ ID NO: 1790170 - RNA, 19 nt, Artificial Sequence
  Description of Artificial Sequence: Synthetic oligonucleotide
  Antisense strand to SEQ ID NO: 1790169
ucuauacucaccacacaac

SEQ ID NO: 1790171 - RNA, 19 nt, Artificial Sequence
  Description of Artificial Sequence: Synthetic oligonucleotide
  Sense strand starting at position 328 of SEQ ID NO: 1563029
uuguguggugaguauagaa

SEQ ID NO: 1790172 - RNA, 19 nt, Artificial Sequence
  Description of Artificial Sequence: Synthetic oligonucleotide
  Antisense strand to SEQ ID NO: 1790171
uucuauacucaccacacaa

SEQ ID NO: 1790173 - RNA, 19 nt, Artificial Sequence
  Description of Artificial Sequence: Synthetic oligonucleotide
  Sense strand starting at position 330 of SEQ ID NO: 1563029
guguggugaguauagaagu

SEQ ID NO: 1790174 - RNA, 19 nt, Artificial Sequence
  Description of Artificial Sequence: Synthetic oligonucleotide
  Antisense strand to SEQ ID NO: 1790173
acuucuauacucaccacac

SEQ ID NO: 1790175 - RNA, 19 nt, Artificial Sequence
  Description of Artificial Sequence: Synthetic oligonucleotide
  Sense strand starting at position 750 of SEQ ID NO: 1563029
acuaaauauucugauggag

SEQ ID NO: 1790176 - RNA, 19 nt, Artificial Sequence
  Description of Artificial Sequence: Synthetic oligonucleotide
  Antisense strand to SEQ ID NO: 1790175
cuccaucagaauauuuagu

SEQ ID NO: 1790177 - RNA, 19 nt, Artificial Sequence
  Description of Artificial Sequence: Synthetic oligonucleotide
  Sense strand starting at position 753 of SEQ ID NO: 1563029
aaauauucugauggagguu

SEQ ID NO: 1790178 - RNA, 19 nt, Artificial Sequence
  Description of Artificial Sequence: Synthetic oligonucleotide
  Antisense strand to SEQ ID NO: 1790177
aaccuccaucagaauauuu

SEQ ID NO: 1790179 - RNA, 19 nt, Artificial Sequence
  Description of Artificial Sequence: Synthetic oligonucleotide
  Sense strand starting at position 870 of SEQ ID NO: 1563029
acaguuuaccauugagucu

SEQ ID NO: 1790180 - RNA, 19 nt, Artificial Sequence
  Description of Artificial Sequence: Synthetic oligonucleotide
  Antisense strand to SEQ ID NO: 1790179
agacucaaugguaaacugu

SEQ ID NO: 1790181 - RNA, 19 nt, Artificial Sequence
  Description of Artificial Sequence: Synthetic oligonucleotide
  Sense strand starting at position 876 of SEQ ID NO: 1563029
uaccauugagucuggguuu

SEQ ID NO: 1790182 - RNA, 19 nt, Artificial Sequence
  Description of Artificial Sequence: Synthetic oligonucleotide
  Antisense strand to SEQ ID NO: 1790181
aaacccagacucaauggua

SEQ ID NO: 1790183 - RNA, 19 nt, Artificial Sequence
  Description of Artificial Sequence: Synthetic oligonucleotide
  Sense strand starting at position 942 of SEQ ID NO: 1563029
gccucugggagcugaaauc

SEQ ID NO: 1790184 - RNA, 19 nt, Artificial Sequence
  Description of Artificial Sequence: Synthetic oligonucleotide
  Antisense strand to SEQ ID NO: 1790183
gauuucagcucccagaggc

SEQ ID NO: 1790185 - RNA, 19 nt, Artificial Sequence
  Description of Artificial Sequence: Synthetic oligonucleotide
  Sense strand starting at position 1020 of SEQ ID NO: 1563029
aggaaacgcucaucggaaa

SEQ ID NO: 1790186 - RNA, 19 nt, Artificial Sequence
  Description of Artificial Sequence: Synthetic oligonucleotide
  Antisense strand to SEQ ID NO: 1790185
uuuccgaugagcguuuccu

SEQ ID NO: 1790187 - RNA, 19 nt, Artificial Sequence
  Description of Artificial Sequence: Synthetic oligonucleotide
  Sense strand starting at position 1064 of SEQ ID NO: 1563029
gcgacuuccuuucucaauu

SEQ ID NO: 1790188 - RNA, 19 nt, Artificial Sequence
  Description of Artificial Sequence: Synthetic oligonucleotide
  Antisense strand to SEQ ID NO: 1790187
aauugagaaaggaagucgc

SEQ ID NO: 1790189 - RNA, 19 nt, Artificial Sequence
  Description of Artificial Sequence: Synthetic oligonucleotide
  Sense strand starting at position 1138 of SEQ ID NO: 1563029
gggcaucuuccucgugaca

SEQ ID NO: 1790190 - RNA, 19 nt, Artificial Sequence
  Description of Artificial Sequence: Synthetic oligonucleotide
  Antisense strand to SEQ ID NO: 1790189
ugucacgaggaagaugccc

SEQ ID NO: 1790191 - RNA, 19 nt, Artificial Sequence
  Description of Artificial Sequence: Synthetic oligonucleotide
  Sense strand starting at position 1244 of SEQ ID NO: 1563029
aggccaaaccugcagaaau

SEQ ID NO: 1790192 - RNA, 19 nt, Artificial Sequence
  Description of Artificial Sequence: Synthetic oligonucleotide
  Antisense strand to SEQ ID NO: 1790191
auuucugcagguuuggccu

SEQ ID NO: 1790193 - RNA, 19 nt, Artificial Sequence
  Description of Artificial Sequence: Synthetic oligonucleotide
  Sense strand starting at position 2479 of SEQ ID NO: 1563029
aaggaaacagguugcuaau

SEQ ID NO: 1790194 - RNA, 19 nt, Artificial Sequence
  Description of Artificial Sequence: Synthetic oligonucleotide
  Antisense strand to SEQ ID NO: 1790193
auuagcaaccuguuuccuu

SEQ ID NO: 1790195 - RNA, 19 nt, Artificial Sequence
  Description of Artificial Sequence: Synthetic oligonucleotide
  Sense strand starting at position 2625 of SEQ ID NO: 1563029
acgagaucucacuauguuu

SEQ ID NO: 1790196 - RNA, 19 nt, Artificial Sequence
  Description of Artificial Sequence: Synthetic oligonucleotide
  Antisense strand to SEQ ID NO: 1790195
aaacauagugagaucucgu

SEQ ID NO: 1790197 - RNA, 19 nt, Artificial Sequence
  Description of Artificial Sequence: Synthetic oligonucleotide
  Sense strand starting at position 2769 of SEQ ID NO: 1563029
gcacuugagcugugggaag

SEQ ID NO: 1790198 - RNA, 19 nt, Artificial Sequence
  Description of Artificial Sequence: Synthetic oligonucleotide
  Antisense strand to SEQ ID NO: 1790197
cuucccacagcucaagugc

SEQ ID NO: 1790199 - RNA, 19 nt, Artificial Sequence
  Description of Artificial Sequence: Synthetic oligonucleotide
  Sense strand starting at position 2827 of SEQ ID NO: 1563029
ggaacgagugcucagcguu

SEQ ID NO: 1790200 - RNA, 19 nt, Artificial Sequence
  Description of Artificial Sequence: Synthetic oligonucleotide
  Antisense strand to SEQ ID NO: 1790199
aacgcugagcacucguucc

SEQ ID NO: 1790201 - RNA, 19 nt, Artificial Sequence
  Description of Artificial Sequence: Synthetic oligonucleotide
  Sense strand starting at position 2832 of SEQ ID NO: 1563029
gagugcucagcguuugagu

SEQ ID NO: 1790202 - RNA, 19 nt, Artificial Sequence
  Description of Artificial Sequence: Synthetic oligonucleotide
  Antisense strand to SEQ ID NO: 1790201
acucaaacgcugagcacuc

SEQ ID NO: 1790203 - RNA, 19 nt, Artificial Sequence
  Description of Artificial Sequence: Synthetic oligonucleotide
  Sense strand starting at position 2833 of SEQ ID NO: 1563029
agugcucagcguuugagua

SEQ ID NO: 1790204 - RNA, 19 nt, Artificial Sequence
  Description of Artificial Sequence: Synthetic oligonucleotide
  Antisense strand to SEQ ID NO: 1790203
uacucaaacgcugagcacu

SEQ ID NO: 1790205 - RNA, 19 nt, Artificial Sequence
  Description of Artificial Sequence: Synthetic oligonucleotide
  Sense strand starting at position 2931 of SEQ ID NO: 1563029
ggaugaaucucuuucugug

SEQ ID NO: 1790206 - RNA, 19 nt, Artificial Sequence
  Description of Artificial Sequence: Synthetic oligonucleotide
  Antisense strand to SEQ ID NO: 1790205
cacagaaagagauucaucc

SEQ ID NO: 1790207 - RNA, 19 nt, Artificial Sequence
  Description of Artificial Sequence: Synthetic oligonucleotide
  Sense strand starting at position 3144 of SEQ ID NO: 1563029
uccauugccugcucuggaa

SEQ ID NO: 1790208 - RNA, 19 nt, Artificial Sequence
  Description of Artificial Sequence: Synthetic oligonucleotide
  Antisense strand to SEQ ID NO: 1790207
uuccagagcaggcaaugga

SEQ ID NO: 1790209 - RNA, 19 nt, Artificial Sequence
  Description of Artificial Sequence: Synthetic oligonucleotide
  Sense strand starting at position 3233 of SEQ ID NO: 1563029
acugcaagcucuuugagga

SEQ ID NO: 1790210 - RNA, 19 nt, Artificial Sequence
  Description of Artificial Sequence: Synthetic oligonucleotide
  Antisense strand to SEQ ID NO: 1790209
uccucaaagagcuugcagu

SEQ ID NO: 1790211 - RNA, 19 nt, Artificial Sequence
  Description of Artificial Sequence: Synthetic oligonucleotide
  Sense strand starting at position 3294 of SEQ ID NO: 1563029
gucugagugucugcuggau

SEQ ID NO: 1790212 - RNA, 19 nt, Artificial Sequence
  Description of Artificial Sequence: Synthetic oligonucleotide
  Antisense strand to SEQ ID NO: 1790211
auccagcagacacucagac

SEQ ID NO: 1790213 - RNA, 19 nt, Artificial Sequence
  Description of Artificial Sequence: Synthetic oligonucleotide
  Sense strand starting at position 3397 of SEQ ID NO: 1563029
ugcgcaacuccagaauucu

SEQ ID NO: 1790214 - RNA, 19 nt, Artificial Sequence
  Description of Artificial Sequence: Synthetic oligonucleotide
  Antisense strand to SEQ ID NO: 1790213
agaauucuggaguugcgca

SEQ ID NO: 1790215 - RNA, 19 nt, Artificial Sequence
  Description of Artificial Sequence: Synthetic oligonucleotide
  Sense strand starting at position 3550 of SEQ ID NO: 1563029
ggaugugcugaguggauau

SEQ ID NO: 1790216 - RNA, 19 nt, Artificial Sequence
  Description of Artificial Sequence: Synthetic oligonucleotide
  Antisense strand to SEQ ID NO: 1790215
auauccacucagcacaucc

SEQ ID NO: 1790217 - RNA, 19 nt, Artificial Sequence
  Description of Artificial Sequence: Synthetic oligonucleotide
  Sense strand starting at position 3643 of SEQ ID NO: 1563029
gcagaauaauggucgcuac

SEQ ID NO: 1790218 - RNA, 19 nt, Artificial Sequence
  Description of Artificial Sequence: Synthetic oligonucleotide
  Antisense strand to SEQ ID NO: 1790217
guagcgaccauuauucugc

SEQ ID NO: 1790219 - RNA, 19 nt, Artificial Sequence
  Description of Artificial Sequence: Synthetic oligonucleotide
  Sense strand starting at position 3644 of SEQ ID NO: 1563029
cagaauaauggucgcuaca

SEQ ID NO: 1790220 - RNA, 19 nt, Artificial Sequence
  Description of Artificial Sequence: Synthetic oligonucleotide
  Antisense strand to SEQ ID NO: 1790219
uguagcgaccauuauucug

SEQ ID NO: 1790221 - RNA, 19 nt, Artificial Sequence
  Description of Artificial Sequence: Synthetic oligonucleotide
  Sense strand starting at position 3647 of SEQ ID NO: 1563029
aauaauggucgcuacagga

SEQ ID NO: 1790222 - RNA, 19 nt, Artificial Sequence
  Description of Artificial Sequence: Synthetic oligonucleotide
  Antisense strand to SEQ ID NO: 1790221
uccuguagcgaccauuauu

SEQ ID NO: 1790223 - RNA, 19 nt, Artificial Sequence
  Description of Artificial Sequence: Synthetic oligonucleotide
  Sense strand starting at position 3669 of SEQ ID NO: 1563029
cgguacuaaugcuuggaau

SEQ ID NO: 1790224 - RNA, 19 nt, Artificial Sequence
  Description of Artificial Sequence: Synthetic oligonucleotide
  Antisense strand to SEQ ID NO: 1790223
auuccaagcauuaguaccg

SEQ ID NO: 1790225 - RNA, 19 nt, Artificial Sequence
  Description of Artificial Sequence: Synthetic oligonucleotide
  Sense strand starting at position 3670 of SEQ ID NO: 1563029
gguacuaaugcuuggaauc

SEQ ID NO: 1790226 - RNA, 19 nt, Artificial Sequence
  Description of Artificial Sequence: Synthetic oligonucleotide
  Antisense strand to SEQ ID NO: 1790225
gauuccaagcauuaguacc

SEQ ID NO: 1790227 - RNA, 19 nt, Artificial Sequence
  Description of Artificial Sequence: Synthetic oligonucleotide
  Sense strand starting at position 3671 of SEQ ID NO: 1563029
guacuaaugcuuggaaucu

SEQ ID NO: 1790228 - RNA, 19 nt, Artificial Sequence
  Description of Artificial Sequence: Synthetic oligonucleotide
  Antisense strand to SEQ ID NO: 1790227
agauuccaagcauuaguac

SEQ ID NO: 1790229 - RNA, 19 nt, Artificial Sequence
  Description of Artificial Sequence: Synthetic oligonucleotide
  Sense strand starting at position 3682 of SEQ ID NO: 1563029
uggaaucugugacuguuau

SEQ ID NO: 1790230 - RNA, 19 nt, Artificial Sequence
  Description of Artificial Sequence: Synthetic oligonucleotide
  Antisense strand to SEQ ID NO: 1790229
auaacagucacagauucca

SEQ ID NO: 1790231 - RNA, 19 nt, Artificial Sequence
  Description of Artificial Sequence: Synthetic oligonucleotide
  Sense strand starting at position 3683 of SEQ ID NO: 1563029
ggaaucugugacuguuauc

SEQ ID NO: 1790232 - RNA, 19 nt, Artificial Sequence
  Description of Artificial Sequence: Synthetic oligonucleotide
  Antisense strand to SEQ ID NO: 1790231
gauaacagucacagauucc

SEQ ID NO: 1790233 - RNA, 19 nt, Artificial Sequence
  Description of Artificial Sequence: Synthetic oligonucleotide
  Sense strand starting at position 3688 of SEQ ID NO: 1563029
cugugacuguuaucuacau

SEQ ID NO: 1790234 - RNA, 19 nt, Artificial Sequence
  Description of Artificial Sequence: Synthetic oligonucleotide
  Antisense strand to SEQ ID NO: 1790233
auguagauaacagucacag

SEQ ID NO: 1790235 - RNA, 19 nt, Artificial Sequence
  Description of Artificial Sequence: Synthetic oligonucleotide
  Sense strand starting at position 3705 of SEQ ID NO: 1563029
augcaaagacuuugcagau

SEQ ID NO: 1790236 - RNA, 19 nt, Artificial Sequence
  Description of Artificial Sequence: Synthetic oligonucleotide
  Antisense strand to SEQ ID NO: 1790235
aucugcaaagucuuugcau

SEQ ID NO: 1790237 - RNA, 19 nt, Artificial Sequence
  Description of Artificial Sequence: Synthetic oligonucleotide
  Sense strand starting at position 172 of SEQ ID NO: 1563030
cugccacaucuugguaaga

SEQ ID NO: 1790238 - RNA, 19 nt, Artificial Sequence
  Description of Artificial Sequence: Synthetic oligonucleotide
  Antisense strand to SEQ ID NO: 1790237
ucuuaccaagauguggcag

SEQ ID NO: 1790239 - RNA, 19 nt, Artificial Sequence
  Description of Artificial Sequence: Synthetic oligonucleotide
  Sense strand starting at position 173 of SEQ ID NO: 1563030
ugccacaucuugguaagau

SEQ ID NO: 1790240 - RNA, 19 nt, Artificial Sequence
  Description of Artificial Sequence: Synthetic oligonucleotide
  Antisense strand to SEQ ID NO: 1790239
aucuuaccaagauguggca

SEQ ID NO: 1790241 - RNA, 19 nt, Artificial Sequence
  Description of Artificial Sequence: Synthetic oligonucleotide
  Sense strand starting at position 182 of SEQ ID NO: 1563030
uugguaagaugaugauaaa

SEQ ID NO: 1790242 - RNA, 19 nt, Artificial Sequence
  Description of Artificial Sequence: Synthetic oligonucleotide
  Antisense strand to SEQ ID NO: 1790241
uuuaucaucaucuuaccaa

SEQ ID NO: 1790243 - RNA, 19 nt, Artificial Sequence
  Description of Artificial Sequence: Synthetic oligonucleotide
  Sense strand starting at position 254 of SEQ ID NO: 1563030
gaagcaagguagguaucau

SEQ ID NO: 1790244 - RNA, 19 nt, Artificial Sequence
  Description of Artificial Sequence: Synthetic oligonucleotide
  Antisense strand to SEQ ID NO: 1790243
augauaccuaccuugcuuc

SEQ ID NO: 1790245 - RNA, 19 nt, Artificial Sequence
  Description of Artificial Sequence: Synthetic oligonucleotide
  Sense strand starting at position 313 of SEQ ID NO: 1563030
uggguaacuuguccacagu

SEQ ID NO: 1790246 - RNA, 19 nt, Artificial Sequence
  Description of Artificial Sequence: Synthetic oligonucleotide
  Antisense strand to SEQ ID NO: 1790245
acuguggacaaguuaccca

SEQ ID NO: 1790247 - RNA, 19 nt, Artificial Sequence
  Description of Artificial Sequence: Synthetic oligonucleotide
  Sense strand starting at position 392 of SEQ ID NO: 1563030
gggucuuucuacucaggca

SEQ ID NO: 1790248 - RNA, 19 nt, Artificial Sequence
  Description of Artificial Sequence: Synthetic oligonucleotide
  Antisense strand to SEQ ID NO: 1790247
ugccugaguagaaagaccc

SEQ ID NO: 1790249 - RNA, 19 nt, Artificial Sequence
  Description of Artificial Sequence: Synthetic oligonucleotide
  Sense strand starting at position 399 of SEQ ID NO: 1563030
ucuacucaggcauaaaguu

SEQ ID NO: 1790250 - RNA, 19 nt, Artificial Sequence
  Description of Artificial Sequence: Synthetic oligonucleotide
  Antisense strand to SEQ ID NO: 1790249
aacuuuaugccugaguaga

SEQ ID NO: 1790251 - RNA, 19 nt, Artificial Sequence
  Description of Artificial Sequence: Synthetic oligonucleotide
  Sense strand starting at position 429 of SEQ ID NO: 1563030
ucaggaauguauugaagau

SEQ ID NO: 1790252 - RNA, 19 nt, Artificial Sequence
  Description of Artificial Sequence: Synthetic oligonucleotide
  Antisense strand to SEQ ID NO: 1790251
aucuucaauacauuccuga

SEQ ID NO: 1790253 - RNA, 19 nt, Artificial Sequence
  Description of Artificial Sequence: Synthetic oligonucleotide
  Sense strand starting at position 441 of SEQ ID NO: 1563030
ugaagauucuaguugugug

SEQ ID NO: 1790254 - RNA, 19 nt, Artificial Sequence
  Description of Artificial Sequence: Synthetic oligonucleotide
  Antisense strand to SEQ ID NO: 1790253
cacacaacuagaaucuuca

SEQ ID NO: 1790255 - RNA, 19 nt, Artificial Sequence
  Description of Artificial Sequence: Synthetic oligonucleotide
  Sense strand starting at position 442 of SEQ ID NO: 1563030
gaagauucuaguugugugu

SEQ ID NO: 1790256 - RNA, 19 nt, Artificial Sequence
  Description of Artificial Sequence: Synthetic oligonucleotide
  Antisense strand to SEQ ID NO: 1790255
acacacaacuagaaucuuc

SEQ ID NO: 1790257 - RNA, 19 nt, Artificial Sequence
  Description of Artificial Sequence: Synthetic oligonucleotide
  Sense strand starting at position 458 of SEQ ID NO: 1563030
uguccucagcuagaaucuu

SEQ ID NO: 1790258 - RNA, 19 nt, Artificial Sequence
  Description of Artificial Sequence: Synthetic oligonucleotide
  Antisense strand to SEQ ID NO: 1790257
aagauucuagcugaggaca

SEQ ID NO: 1790259 - RNA, 19 nt, Artificial Sequence
  Description of Artificial Sequence: Synthetic oligonucleotide
  Sense strand starting at position 675 of SEQ ID NO: 1563030
gguagcauucugugacaug

SEQ ID NO: 1790260 - RNA, 19 nt, Artificial Sequence
  Description of Artificial Sequence: Synthetic oligonucleotide
  Antisense strand to SEQ ID NO: 1790259
caugucacagaaugcuacc

SEQ ID NO: 1790261 - RNA, 19 nt, Artificial Sequence
  Description of Artificial Sequence: Synthetic oligonucleotide
  Sense strand starting at position 693 of SEQ ID NO: 1563030
gaggaagauuaaugaacca

SEQ ID NO: 1790262 - RNA, 19 nt, Artificial Sequence
  Description of Artificial Sequence: Synthetic oligonucleotide
  Antisense strand to SEQ ID NO: 1790261
ugguucauuaaucuuccuc

SEQ ID NO: 1790263 - RNA, 19 nt, Artificial Sequence
  Description of Artificial Sequence: Synthetic oligonucleotide
  Sense strand starting at position 843 of SEQ ID NO: 1563030
ucuaauauuccugguugau

SEQ ID NO: 1790264 - RNA, 19 nt, Artificial Sequence
  Description of Artificial Sequence: Synthetic oligonucleotide
  Antisense strand to SEQ ID NO: 1790263
aucaaccaggaauauuaga

SEQ ID NO: 1790265 - RNA, 19 nt, Artificial Sequence
  Description of Artificial Sequence: Synthetic oligonucleotide
  Sense strand starting at position 852 of SEQ ID NO: 1563030
ccugguugauacuuaaaug

SEQ ID NO: 1790266 - RNA, 19 nt, Artificial Sequence
  Description of Artificial Sequence: Synthetic oligonucleotide
  Antisense strand to SEQ ID NO: 1790265
cauuuaaguaucaaccagg

SEQ ID NO: 1790267 - RNA, 19 nt, Artificial Sequence
  Description of Artificial Sequence: Synthetic oligonucleotide
  Sense strand starting at position 882 of SEQ ID NO: 1563030
ggguuguguggugaguaua

SEQ ID NO: 1790268 - RNA, 19 nt, Artificial Sequence
  Description of Artificial Sequence: Synthetic oligonucleotide
  Antisense strand to SEQ ID NO: 1790267
uauacucaccacacaaccc

SEQ ID NO: 1790269 - RNA, 19 nt, Artificial Sequence
  Description of Artificial Sequence: Synthetic oligonucleotide
  Sense strand starting at position 883 of SEQ ID NO: 1563030
gguuguguggugaguauag

SEQ ID NO: 1790270 - RNA, 19 nt, Artificial Sequence
  Description of Artificial Sequence: Synthetic oligonucleotide
  Antisense strand to SEQ ID NO: 1790269
cuauacucaccacacaacc

SEQ ID NO: 1790271 - RNA, 19 nt, Artificial Sequence
  Description of Artificial Sequence: Synthetic oligonucleotide
  Sense strand starting at position 884 of SEQ ID NO: 1563030
guuguguggugaguauaga

SEQ ID NO: 1790272 - RNA, 19 nt, Artificial Sequence
  Description of Artificial Sequence: Synthetic oligonucleotide
  Antisense strand to SEQ ID NO: 1790271
ucuauacucaccacacaac

SEQ ID NO: 1790273 - RNA, 19 nt, Artificial Sequence
  Description of Artificial Sequence: Synthetic oligonucleotide
  Sense strand starting at position 885 of SEQ ID NO: 1563030
uuguguggugaguauagaa

SEQ ID NO: 1790274 - RNA, 19 nt, Artificial Sequence
  Description of Artificial Sequence: Synthetic oligonucleotide
  Antisense strand to SEQ ID NO: 1790273
uucuauacucaccacacaa

SEQ ID NO: 1790275 - RNA, 19 nt, Artificial Sequence
  Description of Artificial Sequence: Synthetic oligonucleotide
  Sense strand starting at position 887 of SEQ ID NO: 1563030
guguggugaguauagaagu

SEQ ID NO: 1790276 - RNA, 19 nt, Artificial Sequence
  Description of Artificial Sequence: Synthetic oligonucleotide
  Antisense strand to SEQ ID NO: 1790275
acuucuauacucaccacac

SEQ ID NO: 1790277 - RNA, 19 nt, Artificial Sequence
  Description of Artificial Sequence: Synthetic oligonucleotide
  Sense strand starting at position 1307 of SEQ ID NO: 1563030
acuaaauauucugauggag

SEQ ID NO: 1790278 - RNA, 19 nt, Artificial Sequence
  Description of Artificial Sequence: Synthetic oligonucleotide
  Antisense strand to SEQ ID NO: 1790277
cuccaucagaauauuuagu

SEQ ID NO: 1790279 - RNA, 19 nt, Artificial Sequence
  Description of Artificial Sequence: Synthetic oligonucleotide
  Sense strand starting at position 1310 of SEQ ID NO: 1563030
aaauauucugauggagguu

SEQ ID NO: 1790280 - RNA, 19 nt, Artificial Sequence
  Description of Artificial Sequence: Synthetic oligonucleotide
  Antisense strand to SEQ ID NO: 1790279
aaccuccaucagaauauuu

SEQ ID NO: 1790281 - RNA, 19 nt, Artificial Sequence
  Description of Artificial Sequence: Synthetic oligonucleotide
  Sense strand starting at position 1427 of SEQ ID NO: 1563030
acaguuuaccauugagucu

SEQ ID NO: 1790282 - RNA, 19 nt, Artificial Sequence
  Description of Artificial Sequence: Synthetic oligonucleotide
  Antisense strand to SEQ ID NO: 1790281
agacucaaugguaaacugu

SEQ ID NO: 1790283 - RNA, 19 nt, Artificial Sequence
  Description of Artificial Sequence: Synthetic oligonucleotide
  Sense strand starting at position 1433 of SEQ ID NO: 1563030
uaccauugagucuggguuu

SEQ ID NO: 1790284 - RNA, 19 nt, Artificial Sequence
  Description of Artificial Sequence: Synthetic oligonucleotide
  Antisense strand to SEQ ID NO: 1790283
aaacccagacucaauggua

SEQ ID NO: 1790285 - RNA, 19 nt, Artificial Sequence
  Description of Artificial Sequence: Synthetic oligonucleotide
  Sense strand starting at position 1499 of SEQ ID NO: 1563030
gccucugggagcugaaauc

SEQ ID NO: 1790286 - RNA, 19 nt, Artificial Sequence
  Description of Artificial Sequence: Synthetic oligonucleotide
  Antisense strand to SEQ ID NO: 1790285
gauuucagcucccagaggc

SEQ ID NO: 1790287 - RNA, 19 nt, Artificial Sequence
  Description of Artificial Sequence: Synthetic oligonucleotide
  Sense strand starting at position 1577 of SEQ ID NO: 1563030
aggaaacgcucaucggaaa

SEQ ID NO: 1790288 - RNA, 19 nt, Artificial Sequence
  Description of Artificial Sequence: Synthetic oligonucleotide
  Antisense strand to SEQ ID NO: 1790287
uuuccgaugagcguuuccu

SEQ ID NO: 1790289 - RNA, 19 nt, Artificial Sequence
  Description of Artificial Sequence: Synthetic oligonucleotide
  Sense strand starting at position 1621 of SEQ ID NO: 1563030
gcgacuuccuuucucaauu

SEQ ID NO: 1790290 - RNA, 19 nt, Artificial Sequence
  Description of Artificial Sequence: Synthetic oligonucleotide
  Antisense strand to SEQ ID NO: 1790289
aauugagaaaggaagucgc

SEQ ID NO: 1790291 - RNA, 19 nt, Artificial Sequence
  Description of Artificial Sequence: Synthetic oligonucleotide
  Sense strand starting at position 1695 of SEQ ID NO: 1563030
gggcaucuuccucgugaca

SEQ ID NO: 1790292 - RNA, 19 nt, Artificial Sequence
  Description of Artificial Sequence: Synthetic oligonucleotide
  Antisense strand to SEQ ID NO: 1790291
ugucacgaggaagaugccc

SEQ ID NO: 1790293 - RNA, 19 nt, Artificial Sequence
  Description of Artificial Sequence: Synthetic oligonucleotide
  Sense strand starting at position 1801 of SEQ ID NO: 1563030
aggccaaaccugcagaaau

SEQ ID NO: 1790294 - RNA, 19 nt, Artificial Sequence
  Description of Artificial Sequence: Synthetic oligonucleotide
  Antisense strand to SEQ ID NO: 1790293
auuucugcagguuuggccu

SEQ ID NO: 1790295 - RNA, 19 nt, Artificial Sequence
  Description of Artificial Sequence: Synthetic oligonucleotide
  Sense strand starting at position 3036 of SEQ ID NO: 1563030
aaggaaacagguugcuaau

SEQ ID NO: 1790296 - RNA, 19 nt, Artificial Sequence
  Description of Artificial Sequence: Synthetic oligonucleotide
  Antisense strand to SEQ ID NO: 1790295
auuagcaaccuguuuccuu

SEQ ID NO: 1790297 - RNA, 19 nt, Artificial Sequence
  Description of Artificial Sequence: Synthetic oligonucleotide
  Sense strand starting at position 3182 of SEQ ID NO: 1563030
acgagaucucacuauguuu

SEQ ID NO: 1790298 - RNA, 19 nt, Artificial Sequence
  Description of Artificial Sequence: Synthetic oligonucleotide
  Antisense strand to SEQ ID NO: 1790297
aaacauagugagaucucgu

SEQ ID NO: 1790299 - RNA, 19 nt, Artificial Sequence
  Description of Artificial Sequence: Synthetic oligonucleotide
  Sense strand starting at position 3326 of SEQ ID NO: 1563030
gcacuugagcugugggaag

SEQ ID NO: 1790300 - RNA, 19 nt, Artificial Sequence
  Description of Artificial Sequence: Synthetic oligonucleotide
  Antisense strand to SEQ ID NO: 1790299
cuucccacagcucaagugc

SEQ ID NO: 1790301 - RNA, 19 nt, Artificial Sequence
  Description of Artificial Sequence: Synthetic oligonucleotide
  Sense strand starting at position 3384 of SEQ ID NO: 1563030
ggaacgagugcucagcguu

SEQ ID NO: 1790302 - RNA, 19 nt, Artificial Sequence
  Description of Artificial Sequence: Synthetic oligonucleotide
  Antisense strand to SEQ ID NO: 1790301
aacgcugagcacucguucc

SEQ ID NO: 1790303 - RNA, 19 nt, Artificial Sequence
  Description of Artificial Sequence: Synthetic oligonucleotide
  Sense strand starting at position 3389 of SEQ ID NO: 1563030
gagugcucagcguuugagu

SEQ ID NO: 1790304 - RNA, 19 nt, Artificial Sequence
  Description of Artificial Sequence: Synthetic oligonucleotide
  Antisense strand to SEQ ID NO: 1790303
acucaaacgcugagcacuc

SEQ ID NO: 1790305 - RNA, 19 nt, Artificial Sequence
  Description of Artificial Sequence: Synthetic oligonucleotide
  Sense strand starting at position 3390 of SEQ ID NO: 1563030
agugcucagcguuugagua

SEQ ID NO: 1790306 - RNA, 19 nt, Artificial Sequence
  Description of Artificial Sequence: Synthetic oligonucleotide
  Antisense strand to SEQ ID NO: 1790305
uacucaaacgcugagcacu

SEQ ID NO: 1790307 - RNA, 19 nt, Artificial Sequence
  Description of Artificial Sequence: Synthetic oligonucleotide
  Sense strand starting at position 3488 of SEQ ID NO: 1563030
ggaugaaucucuuucugug

SEQ ID NO: 1790308 - RNA, 19 nt, Artificial Sequence
  Description of Artificial Sequence: Synthetic oligonucleotide
  Antisense strand to SEQ ID NO: 1790307
cacagaaagagauucaucc

SEQ ID NO: 1790309 - RNA, 19 nt, Artificial Sequence
  Description of Artificial Sequence: Synthetic oligonucleotide
  Sense strand starting at position 3701 of SEQ ID NO: 1563030
uccauugccugcucuggaa

SEQ ID NO: 1790310 - RNA, 19 nt, Artificial Sequence
  Description of Artificial Sequence: Synthetic oligonucleotide
  Antisense strand to SEQ ID NO: 1790309
uuccagagcaggcaaugga

SEQ ID NO: 1790311 - RNA, 19 nt, Artificial Sequence
  Description of Artificial Sequence: Synthetic oligonucleotide
  Sense strand starting at position 3790 of SEQ ID NO: 1563030
acugcaagcucuuugagga

SEQ ID NO: 1790312 - RNA, 19 nt, Artificial Sequence
  Description of Artificial Sequence: Synthetic oligonucleotide
  Antisense strand to SEQ ID NO: 1790311
uccucaaagagcuugcagu

SEQ ID NO: 1790313 - RNA, 19 nt, Artificial Sequence
  Description of Artificial Sequence: Synthetic oligonucleotide
  Sense strand starting at position 3851 of SEQ ID NO: 1563030
gucugagugucugcuggau

SEQ ID NO: 1790314 - RNA, 19 nt, Artificial Sequence
  Description of Artificial Sequence: Synthetic oligonucleotide
  Antisense strand to SEQ ID NO: 1790313
auccagcagacacucagac

SEQ ID NO: 1790315 - RNA, 19 nt, Artificial Sequence
  Description of Artificial Sequence: Synthetic oligonucleotide
  Sense strand starting at position 3954 of SEQ ID NO: 1563030
ugcgcaacuccagaauucu

SEQ ID NO: 1790316 - RNA, 19 nt, Artificial Sequence
  Description of Artificial Sequence: Synthetic oligonucleotide
  Antisense strand to SEQ ID NO: 1790315
agaauucuggaguugcgca

SEQ ID NO: 1790317 - RNA, 19 nt, Artificial Sequence
  Description of Artificial Sequence: Synthetic oligonucleotide
  Sense strand starting at position 600 of SEQ ID NO: 1563031
ugggaugaaucuuagcaca

SEQ ID NO: 1790318 - RNA, 19 nt, Artificial Sequence
  Description of Artificial Sequence: Synthetic oligonucleotide
  Antisense strand to SEQ ID NO: 1790317
ugugcuaagauucauccca

SEQ ID NO: 1790319 - RNA, 19 nt, Artificial Sequence
  Description of Artificial Sequence: Synthetic oligonucleotide
  Sense strand starting at position 602 of SEQ ID NO: 1563031
ggaugaaucuuagcacaga

SEQ ID NO: 1790320 - RNA, 19 nt, Artificial Sequence
  Description of Artificial Sequence: Synthetic oligonucleotide
  Antisense strand to SEQ ID NO: 1790319
ucugugcuaagauucaucc

SEQ ID NO: 1790321 - RNA, 19 nt, Artificial Sequence
  Description of Artificial Sequence: Synthetic oligonucleotide
  Sense strand starting at position 846 of SEQ ID NO: 1563031
cccugaagccugcagaaga

SEQ ID NO: 1790322 - RNA, 19 nt, Artificial Sequence
  Description of Artificial Sequence: Synthetic oligonucleotide
  Antisense strand to SEQ ID NO: 1790321
ucuucugcaggcuucaggg

SEQ ID NO: 1790323 - RNA, 19 nt, Artificial Sequence
  Description of Artificial Sequence: Synthetic oligonucleotide
  Sense strand starting at position 895 of SEQ ID NO: 1563031
ggauauggcugccaagagu

SEQ ID NO: 1790324 - RNA, 19 nt, Artificial Sequence
  Description of Artificial Sequence: Synthetic oligonucleotide
  Antisense strand to SEQ ID NO: 1790323
acucuuggcagccauaucc

SEQ ID NO: 1790325 - RNA, 19 nt, Artificial Sequence
  Description of Artificial Sequence: Synthetic oligonucleotide
  Sense strand starting at position 904 of SEQ ID NO: 1563031
ugccaagagucucauuuga

SEQ ID NO: 1790326 - RNA, 19 nt, Artificial Sequence
  Description of Artificial Sequence: Synthetic oligonucleotide
  Antisense strand to SEQ ID NO: 1790325
ucaaaugagacucuuggca

SEQ ID NO: 1790327 - RNA, 19 nt, Artificial Sequence
  Description of Artificial Sequence: Synthetic oligonucleotide
  Sense strand starting at position 1144 of SEQ ID NO: 1563031
ucuccuaugggccauaaga

SEQ ID NO: 1790328 - RNA, 19 nt, Artificial Sequence
  Description of Artificial Sequence: Synthetic oligonucleotide
  Antisense strand to SEQ ID NO: 1790327
ucuuauggcccauaggaga

SEQ ID NO: 1790329 - RNA, 19 nt, Artificial Sequence
  Description of Artificial Sequence: Synthetic oligonucleotide
  Sense strand starting at position 1374 of SEQ ID NO: 1563031
auaaauauguacuggccaa

SEQ ID NO: 1790330 - RNA, 19 nt, Artificial Sequence
  Description of Artificial Sequence: Synthetic oligonucleotide
  Antisense strand to SEQ ID NO: 1790329
uuggccaguacauauuuau

SEQ ID NO: 1790331 - RNA, 19 nt, Artificial Sequence
  Description of Artificial Sequence: Synthetic oligonucleotide
  Sense strand starting at position 1378 of SEQ ID NO: 1563031
auauguacuggccaaggau

SEQ ID NO: 1790332 - RNA, 19 nt, Artificial Sequence
  Description of Artificial Sequence: Synthetic oligonucleotide
  Antisense strand to SEQ ID NO: 1790331
auccuuggccaguacauau

SEQ ID NO: 1790333 - RNA, 19 nt, Artificial Sequence
  Description of Artificial Sequence: Synthetic oligonucleotide
  Sense strand starting at position 1427 of SEQ ID NO: 1563031
ccgagagaugcuugcaagu

SEQ ID NO: 1790334 - RNA, 19 nt, Artificial Sequence
  Description of Artificial Sequence: Synthetic oligonucleotide
  Antisense strand to SEQ ID NO: 1790333
acuugcaagcaucucucgg

SEQ ID NO: 1790335 - RNA, 19 nt, Artificial Sequence
  Description of Artificial Sequence: Synthetic oligonucleotide
  Sense strand starting at position 1429 of SEQ ID NO: 1563031
gagagaugcuugcaaguga

SEQ ID NO: 1790336 - RNA, 19 nt, Artificial Sequence
  Description of Artificial Sequence: Synthetic oligonucleotide
  Antisense strand to SEQ ID NO: 1790335
ucacuugcaagcaucucuc

SEQ ID NO: 1790337 - RNA, 19 nt, Artificial Sequence
  Description of Artificial Sequence: Synthetic oligonucleotide
  Sense strand starting at position 1434 of SEQ ID NO: 1563031
augcuugcaagugagauaa

SEQ ID NO: 1790338 - RNA, 19 nt, Artificial Sequence
  Description of Artificial Sequence: Synthetic oligonucleotide
  Antisense strand to SEQ ID NO: 1790337
uuaucucacuugcaagcau

SEQ ID NO: 1790339 - RNA, 19 nt, Artificial Sequence
  Description of Artificial Sequence: Synthetic oligonucleotide
  Sense strand starting at position 1436 of SEQ ID NO: 1563031
gcuugcaagugagauaagu

SEQ ID NO: 1790340 - RNA, 19 nt, Artificial Sequence
  Description of Artificial Sequence: Synthetic oligonucleotide
  Antisense strand to SEQ ID NO: 1790339
acuuaucucacuugcaagc

SEQ ID NO: 1790341 - RNA, 19 nt, Artificial Sequence
  Description of Artificial Sequence: Synthetic oligonucleotide
  Sense strand starting at position 1535 of SEQ ID NO: 1563031
ucccuagacuuuccuggau

SEQ ID NO: 1790342 - RNA, 19 nt, Artificial Sequence
  Description of Artificial Sequence: Synthetic oligonucleotide
  Antisense strand to SEQ ID NO: 1790341
auccaggaaagucuaggga

SEQ ID NO: 1790343 - RNA, 19 nt, Artificial Sequence
  Description of Artificial Sequence: Synthetic oligonucleotide
  Sense strand starting at position 1537 of SEQ ID NO: 1563031
ccuagacuuuccuggauuc

SEQ ID NO: 1790344 - RNA, 19 nt, Artificial Sequence
  Description of Artificial Sequence: Synthetic oligonucleotide
  Antisense strand to SEQ ID NO: 1790343
gaauccaggaaagucuagg

SEQ ID NO: 1790345 - RNA, 19 nt, Artificial Sequence
  Description of Artificial Sequence: Synthetic oligonucleotide
  Sense strand starting at position 2487 of SEQ ID NO: 1563031
aggagcuguuugggucaga

SEQ ID NO: 1790346 - RNA, 19 nt, Artificial Sequence
  Description of Artificial Sequence: Synthetic oligonucleotide
  Antisense strand to SEQ ID NO: 1790345
ucugacccaaacagcuccu

SEQ ID NO: 1790347 - RNA, 19 nt, Artificial Sequence
  Description of Artificial Sequence: Synthetic oligonucleotide
  Sense strand starting at position 2682 of SEQ ID NO: 1563031
uaauccugccgcuaagagu

SEQ ID NO: 1790348 - RNA, 19 nt, Artificial Sequence
  Description of Artificial Sequence: Synthetic oligonucleotide
  Antisense strand to SEQ ID NO: 1790347
acucuuagcggcaggauua

SEQ ID NO: 1790349 - RNA, 19 nt, Artificial Sequence
  Description of Artificial Sequence: Synthetic oligonucleotide
  Sense strand starting at position 2689 of SEQ ID NO: 1563031
gccgcuaagaguuugcaua

SEQ ID NO: 1790350 - RNA, 19 nt, Artificial Sequence
  Description of Artificial Sequence: Synthetic oligonucleotide
  Antisense strand to SEQ ID NO: 1790349
uaugcaaacucuuagcggc

SEQ ID NO: 1790351 - RNA, 19 nt, Artificial Sequence
  Description of Artificial Sequence: Synthetic oligonucleotide
  Sense strand starting at position 2690 of SEQ ID NO: 1563031
ccgcuaagaguuugcauaa

SEQ ID NO: 1790352 - RNA, 19 nt, Artificial Sequence
  Description of Artificial Sequence: Synthetic oligonucleotide
  Antisense strand to SEQ ID NO: 1790351
uuaugcaaacucuuagcgg

SEQ ID NO: 1790353 - RNA, 19 nt, Artificial Sequence
  Description of Artificial Sequence: Synthetic oligonucleotide
  Sense strand starting at position 2691 of SEQ ID NO: 1563031
cgcuaagaguuugcauaau

SEQ ID NO: 1790354 - RNA, 19 nt, Artificial Sequence
  Description of Artificial Sequence: Synthetic oligonucleotide
  Antisense strand to SEQ ID NO: 1790353
auuaugcaaacucuuagcg

SEQ ID NO: 1790355 - RNA, 19 nt, Artificial Sequence
  Description of Artificial Sequence: Synthetic oligonucleotide
  Sense strand starting at position 3437 of SEQ ID NO: 1563031
gaaguugcucccuacagca

SEQ ID NO: 1790356 - RNA, 19 nt, Artificial Sequence
  Description of Artificial Sequence: Synthetic oligonucleotide
  Antisense strand to SEQ ID NO: 1790355
ugcuguagggagcaacuuc

SEQ ID NO: 1790357 - RNA, 19 nt, Artificial Sequence
  Description of Artificial Sequence: Synthetic oligonucleotide
  Sense strand starting at position 3475 of SEQ ID NO: 1563031
cgagguguccguccuccua

SEQ ID NO: 1790358 - RNA, 19 nt, Artificial Sequence
  Description of Artificial Sequence: Synthetic oligonucleotide
  Antisense strand to SEQ ID NO: 1790357
uaggaggacggacaccucg

SEQ ID NO: 1790359 - RNA, 19 nt, Artificial Sequence
  Description of Artificial Sequence: Synthetic oligonucleotide
  Sense strand starting at position 3477 of SEQ ID NO: 1563031
agguguccguccuccuaua

SEQ ID NO: 1790360 - RNA, 19 nt, Artificial Sequence
  Description of Artificial Sequence: Synthetic oligonucleotide
  Antisense strand to SEQ ID NO: 1790359
uauaggaggacggacaccu

SEQ ID NO: 1790361 - RNA, 19 nt, Artificial Sequence
  Description of Artificial Sequence: Synthetic oligonucleotide
  Sense strand starting at position 3532 of SEQ ID NO: 1563031
gagacaguucccgggaacu

SEQ ID NO: 1790362 - RNA, 19 nt, Artificial Sequence
  Description of Artificial Sequence: Synthetic oligonucleotide
  Antisense strand to SEQ ID NO: 1790361
aguucccgggaacugucuc

SEQ ID NO: 1790363 - RNA, 19 nt, Artificial Sequence
  Description of Artificial Sequence: Synthetic oligonucleotide
  Sense strand starting at position 3600 of SEQ ID NO: 1563031
gcgcgugucuggagacaau

SEQ ID NO: 1790364 - RNA, 19 nt, Artificial Sequence
  Description of Artificial Sequence: Synthetic oligonucleotide
  Antisense strand to SEQ ID NO: 1790363
auugucuccagacacgcgc

SEQ ID NO: 1790365 - RNA, 19 nt, Artificial Sequence
  Description of Artificial Sequence: Synthetic oligonucleotide
  Sense strand starting at position 3683 of SEQ ID NO: 1563031
gggcgucagcugaguaacu

SEQ ID NO: 1790366 - RNA, 19 nt, Artificial Sequence
  Description of Artificial Sequence: Synthetic oligonucleotide
  Antisense strand to SEQ ID NO: 1790365
aguuacucagcugacgccc

SEQ ID NO: 1790367 - RNA, 19 nt, Artificial Sequence
  Description of Artificial Sequence: Synthetic oligonucleotide
  Sense strand starting at position 44 of SEQ ID NO: 1563032
acagacauucuugguuuga

SEQ ID NO: 1790368 - RNA, 19 nt, Artificial Sequence
  Description of Artificial Sequence: Synthetic oligonucleotide
  Antisense strand to SEQ ID NO: 1790367
ucaaaccaagaaugucugu

SEQ ID NO: 1790369 - RNA, 19 nt, Artificial Sequence
  Description of Artificial Sequence: Synthetic oligonucleotide
  Sense strand starting at position 45 of SEQ ID NO: 1563032
cagacauucuugguuugag

SEQ ID NO: 1790370 - RNA, 19 nt, Artificial Sequence
  Description of Artificial Sequence: Synthetic oligonucleotide
  Antisense strand to SEQ ID NO: 1790369
cucaaaccaagaaugucug

SEQ ID NO: 1790371 - RNA, 19 nt, Artificial Sequence
  Description of Artificial Sequence: Synthetic oligonucleotide
  Sense strand starting at position 248 of SEQ ID NO: 1563032
caaguaugagaguggcuua

SEQ ID NO: 1790372 - RNA, 19 nt, Artificial Sequence
  Description of Artificial Sequence: Synthetic oligonucleotide
  Antisense strand to SEQ ID NO: 1790371
uaagccacucucauacuug

SEQ ID NO: 1790373 - RNA, 19 nt, Artificial Sequence
  Description of Artificial Sequence: Synthetic oligonucleotide
  Sense strand starting at position 363 of SEQ ID NO: 1563032
agagcaugagacugcuaga

SEQ ID NO: 1790374 - RNA, 19 nt, Artificial Sequence
  Description of Artificial Sequence: Synthetic oligonucleotide
  Antisense strand to SEQ ID NO: 1790373
ucuagcagucucaugcucu

SEQ ID NO: 1790375 - RNA, 19 nt, Artificial Sequence
  Description of Artificial Sequence: Synthetic oligonucleotide
  Sense strand starting at position 501 of SEQ ID NO: 1563032
cggcauuucuugccuaaug

SEQ ID NO: 1790376 - RNA, 19 nt, Artificial Sequence
  Description of Artificial Sequence: Synthetic oligonucleotide
  Antisense strand to SEQ ID NO: 1790375
cauuaggcaagaaaugccg

SEQ ID NO: 1790377 - RNA, 19 nt, Artificial Sequence
  Description of Artificial Sequence: Synthetic oligonucleotide
  Sense strand starting at position 502 of SEQ ID NO: 1563032
ggcauuucuugccuaauga

SEQ ID NO: 1790378 - RNA, 19 nt, Artificial Sequence
  Description of Artificial Sequence: Synthetic oligonucleotide
  Antisense strand to SEQ ID NO: 1790377
ucauuaggcaagaaaugcc

SEQ ID NO: 1790379 - RNA, 19 nt, Artificial Sequence
  Description of Artificial Sequence: Synthetic oligonucleotide
  Sense strand starting at position 687 of SEQ ID NO: 1563032
guaucacuuuaggugugaa

SEQ ID NO: 1790380 - RNA, 19 nt, Artificial Sequence
  Description of Artificial Sequence: Synthetic oligonucleotide
  Antisense strand to SEQ ID NO: 1790379
uucacaccuaaagugauac

SEQ ID NO: 1790381 - RNA, 19 nt, Artificial Sequence
  Description of Artificial Sequence: Synthetic oligonucleotide
  Sense strand starting at position 690 of SEQ ID NO: 1563032
ucacuuuaggugugaagga

SEQ ID NO: 1790382 - RNA, 19 nt, Artificial Sequence
  Description of Artificial Sequence: Synthetic oligonucleotide
  Antisense strand to SEQ ID NO: 1790381
uccuucacaccuaaaguga

SEQ ID NO: 1790383 - RNA, 19 nt, Artificial Sequence
  Description of Artificial Sequence: Synthetic oligonucleotide
  Sense strand starting at position 741 of SEQ ID NO: 1563032
guuuguggucugagugucu

SEQ ID NO: 1790384 - RNA, 19 nt, Artificial Sequence
  Description of Artificial Sequence: Synthetic oligonucleotide
  Antisense strand to SEQ ID NO: 1790383
agacacucagaccacaaac

SEQ ID NO: 1790385 - RNA, 19 nt, Artificial Sequence
  Description of Artificial Sequence: Synthetic oligonucleotide
  Sense strand starting at position 789 of SEQ ID NO: 1563032
cugggaucccucugagaac

SEQ ID NO: 1790386 - RNA, 19 nt, Artificial Sequence
  Description of Artificial Sequence: Synthetic oligonucleotide
  Antisense strand to SEQ ID NO: 1790385
guucucagagggaucccag

SEQ ID NO: 1790387 - RNA, 19 nt, Artificial Sequence
  Description of Artificial Sequence: Synthetic oligonucleotide
  Sense strand starting at position 827 of SEQ ID NO: 1563032
gagggaugcuuggugcaga

SEQ ID NO: 1790388 - RNA, 19 nt, Artificial Sequence
  Description of Artificial Sequence: Synthetic oligonucleotide
  Antisense strand to SEQ ID NO: 1790387
ucugcaccaagcaucccuc

SEQ ID NO: 1790389 - RNA, 19 nt, Artificial Sequence
  Description of Artificial Sequence: Synthetic oligonucleotide
  Sense strand starting at position 830 of SEQ ID NO: 1563032
ggaugcuuggugcagagau

SEQ ID NO: 1790390 - RNA, 19 nt, Artificial Sequence
  Description of Artificial Sequence: Synthetic oligonucleotide
  Antisense strand to SEQ ID NO: 1790389
aucucugcaccaagcaucc

SEQ ID NO: 1790391 - RNA, 19 nt, Artificial Sequence
  Description of Artificial Sequence: Synthetic oligonucleotide
  Sense strand starting at position 883 of SEQ ID NO: 1563032
agggaaugcaccugugaug

SEQ ID NO: 1790392 - RNA, 19 nt, Artificial Sequence
  Description of Artificial Sequence: Synthetic oligonucleotide
  Antisense strand to SEQ ID NO: 1790391
caucacaggugcauucccu

SEQ ID NO: 1790393 - RNA, 19 nt, Artificial Sequence
  Description of Artificial Sequence: Synthetic oligonucleotide
  Sense strand starting at position 890 of SEQ ID NO: 1563032
gcaccugugaugugggaga

SEQ ID NO: 1790394 - RNA, 19 nt, Artificial Sequence
  Description of Artificial Sequence: Synthetic oligonucleotide
  Antisense strand to SEQ ID NO: 1790393
ucucccacaucacaggugc

SEQ ID NO: 1790395 - RNA, 19 nt, Artificial Sequence
  Description of Artificial Sequence: Synthetic oligonucleotide
  Sense strand starting at position 892 of SEQ ID NO: 1563032
accugugaugugggagaga

SEQ ID NO: 1790396 - RNA, 19 nt, Artificial Sequence
  Description of Artificial Sequence: Synthetic oligonucleotide
  Antisense strand to SEQ ID NO: 1790395
ucucucccacaucacaggu

SEQ ID NO: 1790397 - RNA, 19 nt, Artificial Sequence
  Description of Artificial Sequence: Synthetic oligonucleotide
  Sense strand starting at position 895 of SEQ ID NO: 1563032
ugugaugugggagagaagu

SEQ ID NO: 1790398 - RNA, 19 nt, Artificial Sequence
  Description of Artificial Sequence: Synthetic oligonucleotide
  Antisense strand to SEQ ID NO: 1790397
acuucucucccacaucaca

SEQ ID NO: 1790399 - RNA, 19 nt, Artificial Sequence
  Description of Artificial Sequence: Synthetic oligonucleotide
  Sense strand starting at position 905 of SEQ ID NO: 1563032
gagagaagucuuggaguug

SEQ ID NO: 1790400 - RNA, 19 nt, Artificial Sequence
  Description of Artificial Sequence: Synthetic oligonucleotide
  Antisense strand to SEQ ID NO: 1790399
caacuccaagacuucucuc

SEQ ID NO: 1790401 - RNA, 19 nt, Artificial Sequence
  Description of Artificial Sequence: Synthetic oligonucleotide
  Sense strand starting at position 917 of SEQ ID NO: 1563032
ggaguugggcuaugaagag

SEQ ID NO: 1790402 - RNA, 19 nt, Artificial Sequence
  Description of Artificial Sequence: Synthetic oligonucleotide
  Antisense strand to SEQ ID NO: 1790401
cucuucauagcccaacucc

SEQ ID NO: 1790403 - RNA, 19 nt, Artificial Sequence
  Description of Artificial Sequence: Synthetic oligonucleotide
  Sense strand starting at position 1031 of SEQ ID NO: 1563032
ggcaggugugaggguaaga

SEQ ID NO: 1790404 - RNA, 19 nt, Artificial Sequence
  Description of Artificial Sequence: Synthetic oligonucleotide
  Antisense strand to SEQ ID NO: 1790403
ucuuacccucacaccugcc

SEQ ID NO: 1790405 - RNA, 19 nt, Artificial Sequence
  Description of Artificial Sequence: Synthetic oligonucleotide
  Sense strand starting at position 1111 of SEQ ID NO: 1563032
gugugaggacauggagauu

SEQ ID NO: 1790406 - RNA, 19 nt, Artificial Sequence
  Description of Artificial Sequence: Synthetic oligonucleotide
  Antisense strand to SEQ ID NO: 1790405
aaucuccauguccucacac

SEQ ID NO: 1790407 - RNA, 19 nt, Artificial Sequence
  Description of Artificial Sequence: Synthetic oligonucleotide
  Sense strand starting at position 1827 of SEQ ID NO: 1563032
uggaguugggucgaaguca

SEQ ID NO: 1790408 - RNA, 19 nt, Artificial Sequence
  Description of Artificial Sequence: Synthetic oligonucleotide
  Antisense strand to SEQ ID NO: 1790407
ugacuucgacccaacucca

SEQ ID NO: 1790409 - RNA, 19 nt, Artificial Sequence
  Description of Artificial Sequence: Synthetic oligonucleotide
  Sense strand starting at position 2200 of SEQ ID NO: 1563032
gggagaauccugcggagau

SEQ ID NO: 1790410 - RNA, 19 nt, Artificial Sequence
  Description of Artificial Sequence: Synthetic oligonucleotide
  Antisense strand to SEQ ID NO: 1790409
aucuccgcaggauucuccc

SEQ ID NO: 1790411 - RNA, 19 nt, Artificial Sequence
  Description of Artificial Sequence: Synthetic oligonucleotide
  Sense strand starting at position 2255 of SEQ ID NO: 1563032
ccuucuugagcuuaaggau

SEQ ID NO: 1790412 - RNA, 19 nt, Artificial Sequence
  Description of Artificial Sequence: Synthetic oligonucleotide
  Antisense strand to SEQ ID NO: 1790411
auccuuaagcucaagaagg

SEQ ID NO: 1790413 - RNA, 19 nt, Artificial Sequence
  Description of Artificial Sequence: Synthetic oligonucleotide
  Sense strand starting at position 2400 of SEQ ID NO: 1563032
ucauguguggcggacauua

SEQ ID NO: 1790414 - RNA, 19 nt, Artificial Sequence
  Description of Artificial Sequence: Synthetic oligonucleotide
  Antisense strand to SEQ ID NO: 1790413
uaauguccgccacacauga

SEQ ID NO: 1790415 - RNA, 19 nt, Artificial Sequence
  Description of Artificial Sequence: Synthetic oligonucleotide
  Sense strand starting at position 2427 of SEQ ID NO: 1563032
guaucuuacagaggaggca

SEQ ID NO: 1790416 - RNA, 19 nt, Artificial Sequence
  Description of Artificial Sequence: Synthetic oligonucleotide
  Antisense strand to SEQ ID NO: 1790415
ugccuccucuguaagauac

SEQ ID NO: 1790417 - RNA, 19 nt, Artificial Sequence
  Description of Artificial Sequence: Synthetic oligonucleotide
  Sense strand starting at position 2675 of SEQ ID NO: 1563032
aggcgaguggcagaguuaa

SEQ ID NO: 1790418 - RNA, 19 nt, Artificial Sequence
  Description of Artificial Sequence: Synthetic oligonucleotide
  Antisense strand to SEQ ID NO: 1790417
uuaacucugccacucgccu

SEQ ID NO: 1790419 - RNA, 19 nt, Artificial Sequence
  Description of Artificial Sequence: Synthetic oligonucleotide
  Sense strand starting at position 2788 of SEQ ID NO: 1563032
cuugacagggcuugguaau

SEQ ID NO: 1790420 - RNA, 19 nt, Artificial Sequence
  Description of Artificial Sequence: Synthetic oligonucleotide
  Antisense strand to SEQ ID NO: 1790419
auuaccaagcccugucaag

SEQ ID NO: 1790421 - RNA, 19 nt, Artificial Sequence
  Description of Artificial Sequence: Synthetic oligonucleotide
  Sense strand starting at position 2878 of SEQ ID NO: 1563032
gggagaagcuagcuuggaa

SEQ ID NO: 1790422 - RNA, 19 nt, Artificial Sequence
  Description of Artificial Sequence: Synthetic oligonucleotide
  Antisense strand to SEQ ID NO: 1790421
uuccaagcuagcuucuccc

SEQ ID NO: 1790423 - RNA, 19 nt, Artificial Sequence
  Description of Artificial Sequence: Synthetic oligonucleotide
  Sense strand starting at position 2914 of SEQ ID NO: 1563032
aacaccuuguguuugagaa

SEQ ID NO: 1790424 - RNA, 19 nt, Artificial Sequence
  Description of Artificial Sequence: Synthetic oligonucleotide
  Antisense strand to SEQ ID NO: 1790423
uucucaaacacaagguguu

SEQ ID NO: 1790425 - RNA, 19 nt, Artificial Sequence
  Description of Artificial Sequence: Synthetic oligonucleotide
  Sense strand starting at position 2915 of SEQ ID NO: 1563032
acaccuuguguuugagaau

SEQ ID NO: 1790426 - RNA, 19 nt, Artificial Sequence
  Description of Artificial Sequence: Synthetic oligonucleotide
  Antisense strand to SEQ ID NO: 1790425
auucucaaacacaaggugu

SEQ ID NO: 1790427 - RNA, 19 nt, Artificial Sequence
  Description of Artificial Sequence: Synthetic oligonucleotide
  Sense strand starting at position 2967 of SEQ ID NO: 1563032
cagggauucugauucuuag

SEQ ID NO: 1790428 - RNA, 19 nt, Artificial Sequence
  Description of Artificial Sequence: Synthetic oligonucleotide
  Antisense strand to SEQ ID NO: 1790427
cuaagaaucagaaucccug

SEQ ID NO: 1790429 - RNA, 19 nt, Artificial Sequence
  Description of Artificial Sequence: Synthetic oligonucleotide
  Sense strand starting at position 3046 of SEQ ID NO: 1563032
gugagcauucgcuuguuua

SEQ ID NO: 1790430 - RNA, 19 nt, Artificial Sequence
  Description of Artificial Sequence: Synthetic oligonucleotide
  Antisense strand to SEQ ID NO: 1790429
uaaacaagcgaaugcucac

SEQ ID NO: 1790431 - RNA, 19 nt, Artificial Sequence
  Description of Artificial Sequence: Synthetic oligonucleotide
  Sense strand starting at position 3048 of SEQ ID NO: 1563032
gagcauucgcuuguuuauu

SEQ ID NO: 1790432 - RNA, 19 nt, Artificial Sequence
  Description of Artificial Sequence: Synthetic oligonucleotide
  Antisense strand to SEQ ID NO: 1790431
aauaaacaagcgaaugcuc

SEQ ID NO: 1790433 - RNA, 19 nt, Artificial Sequence
  Description of Artificial Sequence: Synthetic oligonucleotide
  Sense strand starting at position 3557 of SEQ ID NO: 1563032
uaauucugauggcuaagga

SEQ ID NO: 1790434 - RNA, 19 nt, Artificial Sequence
  Description of Artificial Sequence: Synthetic oligonucleotide
  Antisense strand to SEQ ID NO: 1790433
uccuuagccaucagaauua

SEQ ID NO: 1790435 - RNA, 19 nt, Artificial Sequence
  Description of Artificial Sequence: Synthetic oligonucleotide
  Sense strand starting at position 3577 of SEQ ID NO: 1563032
gacagcuuccgagagagua

SEQ ID NO: 1790436 - RNA, 19 nt, Artificial Sequence
  Description of Artificial Sequence: Synthetic oligonucleotide
  Antisense strand to SEQ ID NO: 1790435
uacucucucggaagcuguc

SEQ ID NO: 1790437 - RNA, 19 nt, Artificial Sequence
  Description of Artificial Sequence: Synthetic oligonucleotide
  Sense strand starting at position 3813 of SEQ ID NO: 1563032
ccaugaagcccaggaagau

SEQ ID NO: 1790438 - RNA, 19 nt, Artificial Sequence
  Description of Artificial Sequence: Synthetic oligonucleotide
  Antisense strand to SEQ ID NO: 1790437
aucuuccugggcuucaugg

SEQ ID NO: 1790439 - RNA, 19 nt, Artificial Sequence
  Description of Artificial Sequence: Synthetic oligonucleotide
  Sense strand starting at position 3868 of SEQ ID NO: 1563032
accaacugucacuaaaugu

SEQ ID NO: 1790440 - RNA, 19 nt, Artificial Sequence
  Description of Artificial Sequence: Synthetic oligonucleotide
  Antisense strand to SEQ ID NO: 1790439
acauuuagugacaguuggu

SEQ ID NO: 1790441 - RNA, 19 nt, Artificial Sequence
  Description of Artificial Sequence: Synthetic oligonucleotide
  Sense strand starting at position 3967 of SEQ ID NO: 1563032
agggaaaugcuguguauca

SEQ ID NO: 1790442 - RNA, 19 nt, Artificial Sequence
  Description of Artificial Sequence: Synthetic oligonucleotide
  Antisense strand to SEQ ID NO: 1790441
ugauacacagcauuucccu

SEQ ID NO: 1790443 - RNA, 19 nt, Artificial Sequence
  Description of Artificial Sequence: Synthetic oligonucleotide
  Sense strand starting at position 3968 of SEQ ID NO: 1563032
gggaaaugcuguguaucac

SEQ ID NO: 1790444 - RNA, 19 nt, Artificial Sequence
  Description of Artificial Sequence: Synthetic oligonucleotide
  Antisense strand to SEQ ID NO: 1790443
gugauacacagcauuuccc

SEQ ID NO: 1790445 - RNA, 19 nt, Artificial Sequence
  Description of Artificial Sequence: Synthetic oligonucleotide
  Sense strand starting at position 3969 of SEQ ID NO: 1563032
ggaaaugcuguguaucacu

SEQ ID NO: 1790446 - RNA, 19 nt, Artificial Sequence
  Description of Artificial Sequence: Synthetic oligonucleotide
  Antisense strand to SEQ ID NO: 1790445
agugauacacagcauuucc

SEQ ID NO: 1790447 - RNA, 19 nt, Artificial Sequence
  Description of Artificial Sequence: Synthetic oligonucleotide
  Sense strand starting at position 52 of SEQ ID NO: 1563033
ccaggugagucccuaguca

SEQ ID NO: 1790448 - RNA, 19 nt, Artificial Sequence
  Description of Artificial Sequence: Synthetic oligonucleotide
  Antisense strand to SEQ ID NO: 1790447
ugacuagggacucaccugg

SEQ ID NO: 1790449 - RNA, 19 nt, Artificial Sequence
  Description of Artificial Sequence: Synthetic oligonucleotide
  Sense strand starting at position 56 of SEQ ID NO: 1563033
gugagucccuagucaggaa

SEQ ID NO: 1790450 - RNA, 19 nt, Artificial Sequence
  Description of Artificial Sequence: Synthetic oligonucleotide
  Antisense strand to SEQ ID NO: 1790449
uuccugacuagggacucac

SEQ ID NO: 1790451 - RNA, 19 nt, Artificial Sequence
  Description of Artificial Sequence: Synthetic oligonucleotide
  Sense strand starting at position 164 of SEQ ID NO: 1563033
cuuugucucaugggaggga

SEQ ID NO: 1790452 - RNA, 19 nt, Artificial Sequence
  Description of Artificial Sequence: Synthetic oligonucleotide
  Antisense strand to SEQ ID NO: 1790451
ucccucccaugagacaaag

SEQ ID NO: 1790453 - RNA, 19 nt, Artificial Sequence
  Description of Artificial Sequence: Synthetic oligonucleotide
  Sense strand starting at position 168 of SEQ ID NO: 1563033
gucucaugggagggauuga

SEQ ID NO: 1790454 - RNA, 19 nt, Artificial Sequence
  Description of Artificial Sequence: Synthetic oligonucleotide
  Antisense strand to SEQ ID NO: 1790453
ucaaucccucccaugagac

SEQ ID NO: 1790455 - RNA, 19 nt, Artificial Sequence
  Description of Artificial Sequence: Synthetic oligonucleotide
  Sense strand starting at position 345 of SEQ ID NO: 1563033
ucaugaagguugcuaaugu

SEQ ID NO: 1790456 - RNA, 19 nt, Artificial Sequence
  Description of Artificial Sequence: Synthetic oligonucleotide
  Antisense strand to SEQ ID NO: 1790455
acauuagcaaccuucauga

SEQ ID NO: 1790457 - RNA, 19 nt, Artificial Sequence
  Description of Artificial Sequence: Synthetic oligonucleotide
  Sense strand starting at position 393 of SEQ ID NO: 1563033
uggucugauuucccagcga

SEQ ID NO: 1790458 - RNA, 19 nt, Artificial Sequence
  Description of Artificial Sequence: Synthetic oligonucleotide
  Antisense strand to SEQ ID NO: 1790457
ucgcugggaaaucagacca

SEQ ID NO: 1790459 - RNA, 19 nt, Artificial Sequence
  Description of Artificial Sequence: Synthetic oligonucleotide
  Sense strand starting at position 465 of SEQ ID NO: 1563033
gagacuggaucucugugaa

SEQ ID NO: 1790460 - RNA, 19 nt, Artificial Sequence
  Description of Artificial Sequence: Synthetic oligonucleotide
  Antisense strand to SEQ ID NO: 1790459
uucacagagauccagucuc

SEQ ID NO: 1790461 - RNA, 19 nt, Artificial Sequence
  Description of Artificial Sequence: Synthetic oligonucleotide
  Sense strand starting at position 468 of SEQ ID NO: 1563033
acuggaucucugugaaaca

SEQ ID NO: 1790462 - RNA, 19 nt, Artificial Sequence
  Description of Artificial Sequence: Synthetic oligonucleotide
  Antisense strand to SEQ ID NO: 1790461
uguuucacagagauccagu

SEQ ID NO: 1790463 - RNA, 19 nt, Artificial Sequence
  Description of Artificial Sequence: Synthetic oligonucleotide
  Sense strand starting at position 978 of SEQ ID NO: 1563033
uuaucugcuguagaauuau

SEQ ID NO: 1790464 - RNA, 19 nt, Artificial Sequence
  Description of Artificial Sequence: Synthetic oligonucleotide
  Antisense strand to SEQ ID NO: 1790463
auaauucuacagcagauaa

SEQ ID NO: 1790465 - RNA, 19 nt, Artificial Sequence
  Description of Artificial Sequence: Synthetic oligonucleotide
  Sense strand starting at position 984 of SEQ ID NO: 1563033
gcuguagaauuaucugaug

SEQ ID NO: 1790466 - RNA, 19 nt, Artificial Sequence
  Description of Artificial Sequence: Synthetic oligonucleotide
  Antisense strand to SEQ ID NO: 1790465
caucagauaauucuacagc

SEQ ID NO: 1790467 - RNA, 19 nt, Artificial Sequence
  Description of Artificial Sequence: Synthetic oligonucleotide
  Sense strand starting at position 986 of SEQ ID NO: 1563033
uguagaauuaucugaugug

SEQ ID NO: 1790468 - RNA, 19 nt, Artificial Sequence
  Description of Artificial Sequence: Synthetic oligonucleotide
  Antisense strand to SEQ ID NO: 1790467
cacaucagauaauucuaca

SEQ ID NO: 1790469 - RNA, 19 nt, Artificial Sequence
  Description of Artificial Sequence: Synthetic oligonucleotide
  Sense strand starting at position 1062 of SEQ ID NO: 1563033
uggaauuccugcucccuau

SEQ ID NO: 1790470 - RNA, 19 nt, Artificial Sequence
  Description of Artificial Sequence: Synthetic oligonucleotide
  Antisense strand to SEQ ID NO: 1790469
auagggagcaggaauucca

SEQ ID NO: 1790471 - RNA, 19 nt, Artificial Sequence
  Description of Artificial Sequence: Synthetic oligonucleotide
  Sense strand starting at position 1318 of SEQ ID NO: 1563033
caaguaagugcuggauaga

SEQ ID NO: 1790472 - RNA, 19 nt, Artificial Sequence
  Description of Artificial Sequence: Synthetic oligonucleotide
  Antisense strand to SEQ ID NO: 1790471
ucuauccagcacuuacuug

SEQ ID NO: 1790473 - RNA, 19 nt, Artificial Sequence
  Description of Artificial Sequence: Synthetic oligonucleotide
  Sense strand starting at position 1319 of SEQ ID NO: 1563033
aaguaagugcuggauagau

SEQ ID NO: 1790474 - RNA, 19 nt, Artificial Sequence
  Description of Artificial Sequence: Synthetic oligonucleotide
  Antisense strand to SEQ ID NO: 1790473
aucuauccagcacuuacuu

SEQ ID NO: 1790475 - RNA, 19 nt, Artificial Sequence
  Description of Artificial Sequence: Synthetic oligonucleotide
  Sense strand starting at position 1321 of SEQ ID NO: 1563033
guaagugcuggauagauac

SEQ ID NO: 1790476 - RNA, 19 nt, Artificial Sequence
  Description of Artificial Sequence: Synthetic oligonucleotide
  Antisense strand to SEQ ID NO: 1790475
guaucuauccagcacuuac

SEQ ID NO: 1790477 - RNA, 19 nt, Artificial Sequence
  Description of Artificial Sequence: Synthetic oligonucleotide
  Sense strand starting at position 1385 of SEQ ID NO: 1563033
ggaaaccacucugaaauuu

SEQ ID NO: 1790478 - RNA, 19 nt, Artificial Sequence
  Description of Artificial Sequence: Synthetic oligonucleotide
  Antisense strand to SEQ ID NO: 1790477
aaauuucagagugguuucc

SEQ ID NO: 1790479 - RNA, 19 nt, Artificial Sequence
  Description of Artificial Sequence: Synthetic oligonucleotide
  Sense strand starting at position 1430 of SEQ ID NO: 1563033
ucggaaauggcaugacaaa

SEQ ID NO: 1790480 - RNA, 19 nt, Artificial Sequence
  Description of Artificial Sequence: Synthetic oligonucleotide
  Antisense strand to SEQ ID NO: 1790479
uuugucaugccauuuccga

SEQ ID NO: 1790481 - RNA, 19 nt, Artificial Sequence
  Description of Artificial Sequence: Synthetic oligonucleotide
  Sense strand starting at position 2154 of SEQ ID NO: 1563033
agggaaaguugcuucuaga

SEQ ID NO: 1790482 - RNA, 19 nt, Artificial Sequence
  Description of Artificial Sequence: Synthetic oligonucleotide
  Antisense strand to SEQ ID NO: 1790481
ucuagaagcaacuuucccu

SEQ ID NO: 1790483 - RNA, 19 nt, Artificial Sequence
  Description of Artificial Sequence: Synthetic oligonucleotide
  Sense strand starting at position 2196 of SEQ ID NO: 1563033
gagcccaguuagcuaauaa

SEQ ID NO: 1790484 - RNA, 19 nt, Artificial Sequence
  Description of Artificial Sequence: Synthetic oligonucleotide
  Antisense strand to SEQ ID NO: 1790483
uuauuagcuaacugggcuc

SEQ ID NO: 1790485 - RNA, 19 nt, Artificial Sequence
  Description of Artificial Sequence: Synthetic oligonucleotide
  Sense strand starting at position 2208 of SEQ ID NO: 1563033
cuaauaauucuggguccca

SEQ ID NO: 1790486 - RNA, 19 nt, Artificial Sequence
  Description of Artificial Sequence: Synthetic oligonucleotide
  Antisense strand to SEQ ID NO: 1790485
ugggacccagaauuauuag

SEQ ID NO: 1790487 - RNA, 19 nt, Artificial Sequence
  Description of Artificial Sequence: Synthetic oligonucleotide
  Sense strand starting at position 2260 of SEQ ID NO: 1563033
aaugcaguguccuuggaau

SEQ ID NO: 1790488 - RNA, 19 nt, Artificial Sequence
  Description of Artificial Sequence: Synthetic oligonucleotide
  Antisense strand to SEQ ID NO: 1790487
auuccaaggacacugcauu

SEQ ID NO: 1790489 - RNA, 19 nt, Artificial Sequence
  Description of Artificial Sequence: Synthetic oligonucleotide
  Sense strand starting at position 2350 of SEQ ID NO: 1563033
ggaaaugucccagguugug

SEQ ID NO: 1790490 - RNA, 19 nt, Artificial Sequence
  Description of Artificial Sequence: Synthetic oligonucleotide
  Antisense strand to SEQ ID NO: 1790489
cacaaccugggacauuucc

SEQ ID NO: 1790491 - RNA, 19 nt, Artificial Sequence
  Description of Artificial Sequence: Synthetic oligonucleotide
  Sense strand starting at position 2833 of SEQ ID NO: 1563033
gcuugugauauuggauacu

SEQ ID NO: 1790492 - RNA, 19 nt, Artificial Sequence
  Description of Artificial Sequence: Synthetic oligonucleotide
  Antisense strand to SEQ ID NO: 1790491
aguauccaauaucacaagc

SEQ ID NO: 1790493 - RNA, 19 nt, Artificial Sequence
  Description of Artificial Sequence: Synthetic oligonucleotide
  Sense strand starting at position 2862 of SEQ ID NO: 1563033
aaacgauuccagggcugaa

SEQ ID NO: 1790494 - RNA, 19 nt, Artificial Sequence
  Description of Artificial Sequence: Synthetic oligonucleotide
  Antisense strand to SEQ ID NO: 1790493
uucagcccuggaaucguuu

SEQ ID NO: 1790495 - RNA, 19 nt, Artificial Sequence
  Description of Artificial Sequence: Synthetic oligonucleotide
  Sense strand starting at position 2992 of SEQ ID NO: 1563033
gguagacuaguguggaauc

SEQ ID NO: 1790496 - RNA, 19 nt, Artificial Sequence
  Description of Artificial Sequence: Synthetic oligonucleotide
  Antisense strand to SEQ ID NO: 1790495
gauuccacacuagucuacc

SEQ ID NO: 1790497 - RNA, 19 nt, Artificial Sequence
  Description of Artificial Sequence: Synthetic oligonucleotide
  Sense strand starting at position 3208 of SEQ ID NO: 1563033
gaugcuaugguuuaaauau

SEQ ID NO: 1790498 - RNA, 19 nt, Artificial Sequence
  Description of Artificial Sequence: Synthetic oligonucleotide
  Antisense strand to SEQ ID NO: 1790497
auauuuaaaccauagcauc

SEQ ID NO: 1790499 - RNA, 19 nt, Artificial Sequence
  Description of Artificial Sequence: Synthetic oligonucleotide
  Sense strand starting at position 3479 of SEQ ID NO: 1563033
cugugauauucuguuauau

SEQ ID NO: 1790500 - RNA, 19 nt, Artificial Sequence
  Description of Artificial Sequence: Synthetic oligonucleotide
  Antisense strand to SEQ ID NO: 1790499
auauaacagaauaucacag

SEQ ID NO: 1790501 - RNA, 19 nt, Artificial Sequence
  Description of Artificial Sequence: Synthetic oligonucleotide
  Sense strand starting at position 3488 of SEQ ID NO: 1563033
ucuguuauauuggcacaaa

SEQ ID NO: 1790502 - RNA, 19 nt, Artificial Sequence
  Description of Artificial Sequence: Synthetic oligonucleotide
  Antisense strand to SEQ ID NO: 1790501
uuugugccaauauaacaga

SEQ ID NO: 1790503 - RNA, 19 nt, Artificial Sequence
  Description of Artificial Sequence: Synthetic oligonucleotide
  Sense strand starting at position 3587 of SEQ ID NO: 1563033
ugguacuauuuccaagauc

SEQ ID NO: 1790504 - RNA, 19 nt, Artificial Sequence
  Description of Artificial Sequence: Synthetic oligonucleotide
  Antisense strand to SEQ ID NO: 1790503
gaucuuggaaauaguacca

SEQ ID NO: 1790505 - RNA, 19 nt, Artificial Sequence
  Description of Artificial Sequence: Synthetic oligonucleotide
  Sense strand starting at position 3596 of SEQ ID NO: 1563033
uuccaagaucgggaagguu

SEQ ID NO: 1790506 - RNA, 19 nt, Artificial Sequence
  Description of Artificial Sequence: Synthetic oligonucleotide
  Antisense strand to SEQ ID NO: 1790505
aaccuucccgaucuuggaa

SEQ ID NO: 1790507 - RNA, 19 nt, Artificial Sequence
  Description of Artificial Sequence: Synthetic oligonucleotide
  Sense strand starting at position 3604 of SEQ ID NO: 1563033
ucgggaagguucuuaccca

SEQ ID NO: 1790508 - RNA, 19 nt, Artificial Sequence
  Description of Artificial Sequence: Synthetic oligonucleotide
  Antisense strand to SEQ ID NO: 1790507
uggguaagaaccuucccga

SEQ ID NO: 1790509 - RNA, 19 nt, Artificial Sequence
  Description of Artificial Sequence: Synthetic oligonucleotide
  Sense strand starting at position 3608 of SEQ ID NO: 1563033
gaagguucuuacccagcau

SEQ ID NO: 1790510 - RNA, 19 nt, Artificial Sequence
  Description of Artificial Sequence: Synthetic oligonucleotide
  Antisense strand to SEQ ID NO: 1790509
augcuggguaagaaccuuc

SEQ ID NO: 1790511 - RNA, 19 nt, Artificial Sequence
  Description of Artificial Sequence: Synthetic oligonucleotide
  Sense strand starting at position 3645 of SEQ ID NO: 1563033
gcguuaguacaugaucuca

SEQ ID NO: 1790512 - RNA, 19 nt, Artificial Sequence
  Description of Artificial Sequence: Synthetic oligonucleotide
  Antisense strand to SEQ ID NO: 1790511
ugagaucauguacuaacgc

SEQ ID NO: 1790513 - RNA, 19 nt, Artificial Sequence
  Description of Artificial Sequence: Synthetic oligonucleotide
  Sense strand starting at position 3647 of SEQ ID NO: 1563033
guuaguacaugaucucagu

SEQ ID NO: 1790514 - RNA, 19 nt, Artificial Sequence
  Description of Artificial Sequence: Synthetic oligonucleotide
  Antisense strand to SEQ ID NO: 1790513
acugagaucauguacuaac

SEQ ID NO: 1790515 - RNA, 19 nt, Artificial Sequence
  Description of Artificial Sequence: Synthetic oligonucleotide
  Sense strand starting at position 3676 of SEQ ID NO: 1563033
gagugacucuaaccucagu

SEQ ID NO: 1790516 - RNA, 19 nt, Artificial Sequence
  Description of Artificial Sequence: Synthetic oligonucleotide
  Antisense strand to SEQ ID NO: 1790515
acugagguuagagucacuc

SEQ ID NO: 1790517 - RNA, 19 nt, Artificial Sequence
  Description of Artificial Sequence: Synthetic oligonucleotide
  Sense strand starting at position 3750 of SEQ ID NO: 1563033
cggguagucauguacuaag

SEQ ID NO: 1790518 - RNA, 19 nt, Artificial Sequence
  Description of Artificial Sequence: Synthetic oligonucleotide
  Antisense strand to SEQ ID NO: 1790517
cuuaguacaugacuacccg

SEQ ID NO: 1790519 - RNA, 19 nt, Artificial Sequence
  Description of Artificial Sequence: Synthetic oligonucleotide
  Sense strand starting at position 3757 of SEQ ID NO: 1563033
ucauguacuaagugagguu

SEQ ID NO: 1790520 - RNA, 19 nt, Artificial Sequence
  Description of Artificial Sequence: Synthetic oligonucleotide
  Antisense strand to SEQ ID NO: 1790519
aaccucacuuaguacauga

SEQ ID NO: 1790521 - RNA, 19 nt, Artificial Sequence
  Description of Artificial Sequence: Synthetic oligonucleotide
  Sense strand starting at position 3769 of SEQ ID NO: 1563033
ugagguuggcaggguauaa

SEQ ID NO: 1790522 - RNA, 19 nt, Artificial Sequence
  Description of Artificial Sequence: Synthetic oligonucleotide
  Antisense strand to SEQ ID NO: 1790521
uuauacccugccaaccuca

SEQ ID NO: 1790523 - RNA, 19 nt, Artificial Sequence
  Description of Artificial Sequence: Synthetic oligonucleotide
  Sense strand starting at position 3807 of SEQ ID NO: 1563033
uugugacagacugagguau

SEQ ID NO: 1790524 - RNA, 19 nt, Artificial Sequence
  Description of Artificial Sequence: Synthetic oligonucleotide
  Antisense strand to SEQ ID NO: 1790523
auaccucagucugucacaa

SEQ ID NO: 1790525 - RNA, 19 nt, Artificial Sequence
  Description of Artificial Sequence: Synthetic oligonucleotide
  Sense strand starting at position 3874 of SEQ ID NO: 1563033
gccauaugugaauggagac

SEQ ID NO: 1790526 - RNA, 19 nt, Artificial Sequence
  Description of Artificial Sequence: Synthetic oligonucleotide
  Antisense strand to SEQ ID NO: 1790525
gucuccauucacauauggc

SEQ ID NO: 1790527 - RNA, 19 nt, Artificial Sequence
  Description of Artificial Sequence: Synthetic oligonucleotide
  Sense strand starting at position 459 of SEQ ID NO: 1563034
guaugaguccacugucaga

SEQ ID NO: 1790528 - RNA, 19 nt, Artificial Sequence
  Description of Artificial Sequence: Synthetic oligonucleotide
  Antisense strand to SEQ ID NO: 1790527
ucugacaguggacucauac

SEQ ID NO: 1790529 - RNA, 19 nt, Artificial Sequence
  Description of Artificial Sequence: Synthetic oligonucleotide
  Sense strand starting at position 561 of SEQ ID NO: 1563034
auuucuaugucuccagcua

SEQ ID NO: 1790530 - RNA, 19 nt, Artificial Sequence
  Description of Artificial Sequence: Synthetic oligonucleotide
  Antisense strand to SEQ ID NO: 1790529
uagcuggagacauagaaau

SEQ ID NO: 1790531 - RNA, 19 nt, Artificial Sequence
  Description of Artificial Sequence: Synthetic oligonucleotide
  Sense strand starting at position 605 of SEQ ID NO: 1563034
guaccaaacagcugggaua

SEQ ID NO: 1790532 - RNA, 19 nt, Artificial Sequence
  Description of Artificial Sequence: Synthetic oligonucleotide
  Antisense strand to SEQ ID NO: 1790531
uaucccagcuguuugguac

SEQ ID NO: 1790533 - RNA, 19 nt, Artificial Sequence
  Description of Artificial Sequence: Synthetic oligonucleotide
  Sense strand starting at position 618 of SEQ ID NO: 1563034
gggauagacuuauucucca

SEQ ID NO: 1790534 - RNA, 19 nt, Artificial Sequence
  Description of Artificial Sequence: Synthetic oligonucleotide
  Antisense strand to SEQ ID NO: 1790533
uggagaauaagucuauccc

SEQ ID NO: 1790535 - RNA, 19 nt, Artificial Sequence
  Description of Artificial Sequence: Synthetic oligonucleotide
  Sense strand starting at position 704 of SEQ ID NO: 1563034
cgaaucagugcucaguaaa

SEQ ID NO: 1790536 - RNA, 19 nt, Artificial Sequence
  Description of Artificial Sequence: Synthetic oligonucleotide
  Antisense strand to SEQ ID NO: 1790535
uuuacugagcacugauucg

SEQ ID NO: 1790537 - RNA, 19 nt, Artificial Sequence
  Description of Artificial Sequence: Synthetic oligonucleotide
  Sense strand starting at position 707 of SEQ ID NO: 1563034
aucagugcucaguaaacua

SEQ ID NO: 1790538 - RNA, 19 nt, Artificial Sequence
  Description of Artificial Sequence: Synthetic oligonucleotide
  Antisense strand to SEQ ID NO: 1790537
uaguuuacugagcacugau

SEQ ID NO: 1790539 - RNA, 19 nt, Artificial Sequence
  Description of Artificial Sequence: Synthetic oligonucleotide
  Sense strand starting at position 717 of SEQ ID NO: 1563034
aguaaacuaccuggugaau

SEQ ID NO: 1790540 - RNA, 19 nt, Artificial Sequence
  Description of Artificial Sequence: Synthetic oligonucleotide
  Antisense strand to SEQ ID NO: 1790539
auucaccagguaguuuacu

SEQ ID NO: 1790541 - RNA, 19 nt, Artificial Sequence
  Description of Artificial Sequence: Synthetic oligonucleotide
  Sense strand starting at position 732 of SEQ ID NO: 1563034
gaaugacugcuacagugau

SEQ ID NO: 1790542 - RNA, 19 nt, Artificial Sequence
  Description of Artificial Sequence: Synthetic oligonucleotide
  Antisense strand to SEQ ID NO: 1790541
aucacuguagcagucauuc

SEQ ID NO: 1790543 - RNA, 19 nt, Artificial Sequence
  Description of Artificial Sequence: Synthetic oligonucleotide
  Sense strand starting at position 746 of SEQ ID NO: 1563034
gugaucuugacacagguau

SEQ ID NO: 1790544 - RNA, 19 nt, Artificial Sequence
  Description of Artificial Sequence: Synthetic oligonucleotide
  Antisense strand to SEQ ID NO: 1790543
auaccugugucaagaucac

SEQ ID NO: 1790545 - RNA, 19 nt, Artificial Sequence
  Description of Artificial Sequence: Synthetic oligonucleotide
  Sense strand starting at position 827 of SEQ ID NO: 1563034
ggucauuucugcccaccuu

SEQ ID NO: 1790546 - RNA, 19 nt, Artificial Sequence
  Description of Artificial Sequence: Synthetic oligonucleotide
  Antisense strand to SEQ ID NO: 1790545
aaggugggcagaaaugacc

SEQ ID NO: 1790547 - RNA, 19 nt, Artificial Sequence
  Description of Artificial Sequence: Synthetic oligonucleotide
  Sense strand starting at position 920 of SEQ ID NO: 1563034
gaucccaagguuugggaua

SEQ ID NO: 1790548 - RNA, 19 nt, Artificial Sequence
  Description of Artificial Sequence: Synthetic oligonucleotide
  Antisense strand to SEQ ID NO: 1790547
uaucccaaaccuugggauc

SEQ ID NO: 1790549 - RNA, 19 nt, Artificial Sequence
  Description of Artificial Sequence: Synthetic oligonucleotide
  Sense strand starting at position 934 of SEQ ID NO: 1563034
ggauaaggacuguggacuu

SEQ ID NO: 1790550 - RNA, 19 nt, Artificial Sequence
  Description of Artificial Sequence: Synthetic oligonucleotide
  Antisense strand to SEQ ID NO: 1790549
aaguccacaguccuuaucc

SEQ ID NO: 1790551 - RNA, 19 nt, Artificial Sequence
  Description of Artificial Sequence: Synthetic oligonucleotide
  Sense strand starting at position 1014 of SEQ ID NO: 1563034
acagguuaaucugccaagu

SEQ ID NO: 1790552 - RNA, 19 nt, Artificial Sequence
  Description of Artificial Sequence: Synthetic oligonucleotide
  Antisense strand to SEQ ID NO: 1790551
acuuggcagauuaaccugu

SEQ ID NO: 1790553 - RNA, 19 nt, Artificial Sequence
  Description of Artificial Sequence: Synthetic oligonucleotide
  Sense strand starting at position 1028 of SEQ ID NO: 1563034
caaguacugccagacguau

SEQ ID NO: 1790554 - RNA, 19 nt, Artificial Sequence
  Description of Artificial Sequence: Synthetic oligonucleotide
  Antisense strand to SEQ ID NO: 1790553
auacgucuggcaguacuug

SEQ ID NO: 1790555 - RNA, 19 nt, Artificial Sequence
  Description of Artificial Sequence: Synthetic oligonucleotide
  Sense strand starting at position 1030 of SEQ ID NO: 1563034
aguacugccagacguauuu

SEQ ID NO: 1790556 - RNA, 19 nt, Artificial Sequence
  Description of Artificial Sequence: Synthetic oligonucleotide
  Antisense strand to SEQ ID NO: 1790555
aaauacgucuggcaguacu

SEQ ID NO: 1790557 - RNA, 19 nt, Artificial Sequence
  Description of Artificial Sequence: Synthetic oligonucleotide
  Sense strand starting at position 1535 of SEQ ID NO: 1563034
cuguaugggcaucaucgau

SEQ ID NO: 1790558 - RNA, 19 nt, Artificial Sequence
  Description of Artificial Sequence: Synthetic oligonucleotide
  Antisense strand to SEQ ID NO: 1790557
aucgaugaugcccauacag

SEQ ID NO: 1790559 - RNA, 19 nt, Artificial Sequence
  Description of Artificial Sequence: Synthetic oligonucleotide
  Sense strand starting at position 1563 of SEQ ID NO: 1563034
gauccugggucuuugaaca

SEQ ID NO: 1790560 - RNA, 19 nt, Artificial Sequence
  Description of Artificial Sequence: Synthetic oligonucleotide
  Antisense strand to SEQ ID NO: 1790559
uguucaaagacccaggauc

SEQ ID NO: 1790561 - RNA, 19 nt, Artificial Sequence
  Description of Artificial Sequence: Synthetic oligonucleotide
  Sense strand starting at position 1818 of SEQ ID NO: 1563034
gagacgucgccggaggaaa

SEQ ID NO: 1790562 - RNA, 19 nt, Artificial Sequence
  Description of Artificial Sequence: Synthetic oligonucleotide
  Antisense strand to SEQ ID NO: 1790561
uuuccuccggcgacgucuc

SEQ ID NO: 1790563 - RNA, 19 nt, Artificial Sequence
  Description of Artificial Sequence: Synthetic oligonucleotide
  Sense strand starting at position 1832 of SEQ ID NO: 1563034
ggaaauucauggcugugga

SEQ ID NO: 1790564 - RNA, 19 nt, Artificial Sequence
  Description of Artificial Sequence: Synthetic oligonucleotide
  Antisense strand to SEQ ID NO: 1790563
uccacagccaugaauuucc

SEQ ID NO: 1790565 - RNA, 19 nt, Artificial Sequence
  Description of Artificial Sequence: Synthetic oligonucleotide
  Sense strand starting at position 1930 of SEQ ID NO: 1563034
guaggacuuuagccagaag

SEQ ID NO: 1790566 - RNA, 19 nt, Artificial Sequence
  Description of Artificial Sequence: Synthetic oligonucleotide
  Antisense strand to SEQ ID NO: 1790565
cuucuggcuaaaguccuac

SEQ ID NO: 1790567 - RNA, 19 nt, Artificial Sequence
  Description of Artificial Sequence: Synthetic oligonucleotide
  Sense strand starting at position 2122 of SEQ ID NO: 1563034
aaaggaauuuggcaacaug

SEQ ID NO: 1790568 - RNA, 19 nt, Artificial Sequence
  Description of Artificial Sequence: Synthetic oligonucleotide
  Antisense strand to SEQ ID NO: 1790567
cauguugccaaauuccuuu

SEQ ID NO: 1790569 - RNA, 19 nt, Artificial Sequence
  Description of Artificial Sequence: Synthetic oligonucleotide
  Sense strand starting at position 2140 of SEQ ID NO: 1563034
guauuaagaggauagcuuu

SEQ ID NO: 1790570 - RNA, 19 nt, Artificial Sequence
  Description of Artificial Sequence: Synthetic oligonucleotide
  Antisense strand to SEQ ID NO: 1790569
aaagcuauccucuuaauac

SEQ ID NO: 1790571 - RNA, 19 nt, Artificial Sequence
  Description of Artificial Sequence: Synthetic oligonucleotide
  Sense strand starting at position 2261 of SEQ ID NO: 1563034
uagcgaaauacugggaagu

SEQ ID NO: 1790572 - RNA, 19 nt, Artificial Sequence
  Description of Artificial Sequence: Synthetic oligonucleotide
  Antisense strand to SEQ ID NO: 1790571
acuucccaguauuucgcua

SEQ ID NO: 1790573 - RNA, 19 nt, Artificial Sequence
  Description of Artificial Sequence: Synthetic oligonucleotide
  Sense strand starting at position 2262 of SEQ ID NO: 1563034
agcgaaauacugggaagua

SEQ ID NO: 1790574 - RNA, 19 nt, Artificial Sequence
  Description of Artificial Sequence: Synthetic oligonucleotide
  Antisense strand to SEQ ID NO: 1790573
uacuucccaguauuucgcu

SEQ ID NO: 1790575 - RNA, 19 nt, Artificial Sequence
  Description of Artificial Sequence: Synthetic oligonucleotide
  Sense strand starting at position 2509 of SEQ ID NO: 1563034
aguguuaacagugauuaua

SEQ ID NO: 1790576 - RNA, 19 nt, Artificial Sequence
  Description of Artificial Sequence: Synthetic oligonucleotide
  Antisense strand to SEQ ID NO: 1790575
uauaaucacuguuaacacu

SEQ ID NO: 1790577 - RNA, 19 nt, Artificial Sequence
  Description of Artificial Sequence: Synthetic oligonucleotide
  Sense strand starting at position 2591 of SEQ ID NO: 1563034
uuucuagagugcuuauuac

SEQ ID NO: 1790578 - RNA, 19 nt, Artificial Sequence
  Description of Artificial Sequence: Synthetic oligonucleotide
  Antisense strand to SEQ ID NO: 1790577
guaauaagcacucuagaaa

SEQ ID NO: 1790579 - RNA, 19 nt, Artificial Sequence
  Description of Artificial Sequence: Synthetic oligonucleotide
  Sense strand starting at position 2597 of SEQ ID NO: 1563034
gagugcuuauuacuaugga

SEQ ID NO: 1790580 - RNA, 19 nt, Artificial Sequence
  Description of Artificial Sequence: Synthetic oligonucleotide
  Antisense strand to SEQ ID NO: 1790579
uccauaguaauaagcacuc

SEQ ID NO: 1790581 - RNA, 19 nt, Artificial Sequence
  Description of Artificial Sequence: Synthetic oligonucleotide
  Sense strand starting at position 2662 of SEQ ID NO: 1563034
ugaauaugaugcuucggaa

SEQ ID NO: 1790582 - RNA, 19 nt, Artificial Sequence
  Description of Artificial Sequence: Synthetic oligonucleotide
  Antisense strand to SEQ ID NO: 1790581
uuccgaagcaucauauuca

SEQ ID NO: 1790583 - RNA, 19 nt, Artificial Sequence
  Description of Artificial Sequence: Synthetic oligonucleotide
  Sense strand starting at position 2684 of SEQ ID NO: 1563034
agcccuuugggagguaauu

SEQ ID NO: 1790584 - RNA, 19 nt, Artificial Sequence
  Description of Artificial Sequence: Synthetic oligonucleotide
  Antisense strand to SEQ ID NO: 1790583
aauuaccucccaaagggcu

SEQ ID NO: 1790585 - RNA, 19 nt, Artificial Sequence
  Description of Artificial Sequence: Synthetic oligonucleotide
  Sense strand starting at position 2911 of SEQ ID NO: 1563034
guaccuguuguuuaacuca

SEQ ID NO: 1790586 - RNA, 19 nt, Artificial Sequence
  Description of Artificial Sequence: Synthetic oligonucleotide
  Antisense strand to SEQ ID NO: 1790585
ugaguuaaacaacagguac

SEQ ID NO: 1790587 - RNA, 19 nt, Artificial Sequence
  Description of Artificial Sequence: Synthetic oligonucleotide
  Sense strand starting at position 2945 of SEQ ID NO: 1563034
uuuguuaugucagcacaag

SEQ ID NO: 1790588 - RNA, 19 nt, Artificial Sequence
  Description of Artificial Sequence: Synthetic oligonucleotide
  Antisense strand to SEQ ID NO: 1790587
cuugugcugacauaacaaa

SEQ ID NO: 1790589 - RNA, 19 nt, Artificial Sequence
  Description of Artificial Sequence: Synthetic oligonucleotide
  Sense strand starting at position 3446 of SEQ ID NO: 1563034
gauugaaaugcacaguucu

SEQ ID NO: 1790590 - RNA, 19 nt, Artificial Sequence
  Description of Artificial Sequence: Synthetic oligonucleotide
  Antisense strand to SEQ ID NO: 1790589
agaacugugcauuucaauc

SEQ ID NO: 1790591 - RNA, 19 nt, Artificial Sequence
  Description of Artificial Sequence: Synthetic oligonucleotide
  Sense strand starting at position 3452 of SEQ ID NO: 1563034
aaugcacaguucuuaggua

SEQ ID NO: 1790592 - RNA, 19 nt, Artificial Sequence
  Description of Artificial Sequence: Synthetic oligonucleotide
  Antisense strand to SEQ ID NO: 1790591
uaccuaagaacugugcauu

SEQ ID NO: 1790593 - RNA, 19 nt, Artificial Sequence
  Description of Artificial Sequence: Synthetic oligonucleotide
  Sense strand starting at position 3467 of SEQ ID NO: 1563034
gguauacacuucuuugagu

SEQ ID NO: 1790594 - RNA, 19 nt, Artificial Sequence
  Description of Artificial Sequence: Synthetic oligonucleotide
  Antisense strand to SEQ ID NO: 1790593
acucaaagaaguguauacc

SEQ ID NO: 1790595 - RNA, 19 nt, Artificial Sequence
  Description of Artificial Sequence: Synthetic oligonucleotide
  Sense strand starting at position 3468 of SEQ ID NO: 1563034
guauacacuucuuugaguu

SEQ ID NO: 1790596 - RNA, 19 nt, Artificial Sequence
  Description of Artificial Sequence: Synthetic oligonucleotide
  Antisense strand to SEQ ID NO: 1790595
aacucaaagaaguguauac

SEQ ID NO: 1790597 - RNA, 19 nt, Artificial Sequence
  Description of Artificial Sequence: Synthetic oligonucleotide
  Sense strand starting at position 3581 of SEQ ID NO: 1563034
ggcaaauacucuucugaug

SEQ ID NO: 1790598 - RNA, 19 nt, Artificial Sequence
  Description of Artificial Sequence: Synthetic oligonucleotide
  Antisense strand to SEQ ID NO: 1790597
caucagaagaguauuugcc

SEQ ID NO: 1790599 - RNA, 19 nt, Artificial Sequence
  Description of Artificial Sequence: Synthetic oligonucleotide
  Sense strand starting at position 3690 of SEQ ID NO: 1563034
augguucugagaugcaaua

SEQ ID NO: 1790600 - RNA, 19 nt, Artificial Sequence
  Description of Artificial Sequence: Synthetic oligonucleotide
  Antisense strand to SEQ ID NO: 1790599
uauugcaucucagaaccau

SEQ ID NO: 1790601 - RNA, 19 nt, Artificial Sequence
  Description of Artificial Sequence: Synthetic oligonucleotide
  Sense strand starting at position 3692 of SEQ ID NO: 1563034
gguucugagaugcaauaug

SEQ ID NO: 1790602 - RNA, 19 nt, Artificial Sequence
  Description of Artificial Sequence: Synthetic oligonucleotide
  Antisense strand to SEQ ID NO: 1790601
cauauugcaucucagaacc

SEQ ID NO: 1790603 - RNA, 19 nt, Artificial Sequence
  Description of Artificial Sequence: Synthetic oligonucleotide
  Sense strand starting at position 3697 of SEQ ID NO: 1563034
ugagaugcaauauguugua

SEQ ID NO: 1790604 - RNA, 19 nt, Artificial Sequence
  Description of Artificial Sequence: Synthetic oligonucleotide
  Antisense strand to SEQ ID NO: 1790603
uacaacauauugcaucuca

SEQ ID NO: 1790605 - RNA, 19 nt, Artificial Sequence
  Description of Artificial Sequence: Synthetic oligonucleotide
  Sense strand starting at position 3704 of SEQ ID NO: 1563034
caauauguuguauagcagu

SEQ ID NO: 1790606 - RNA, 19 nt, Artificial Sequence
  Description of Artificial Sequence: Synthetic oligonucleotide
  Antisense strand to SEQ ID NO: 1790605
acugcuauacaacauauug

SEQ ID NO: 1790607 - RNA, 19 nt, Artificial Sequence
  Description of Artificial Sequence: Synthetic oligonucleotide
  Sense strand starting at position 17 of SEQ ID NO: 1563035
ccuggaugugcauauguau

SEQ ID NO: 1790608 - RNA, 19 nt, Artificial Sequence
  Description of Artificial Sequence: Synthetic oligonucleotide
  Antisense strand to SEQ ID NO: 1790607
auacauaugcacauccagg

SEQ ID NO: 1790609 - RNA, 19 nt, Artificial Sequence
  Description of Artificial Sequence: Synthetic oligonucleotide
  Sense strand starting at position 20 of SEQ ID NO: 1563035
ggaugugcauauguauaaa

SEQ ID NO: 1790610 - RNA, 19 nt, Artificial Sequence
  Description of Artificial Sequence: Synthetic oligonucleotide
  Antisense strand to SEQ ID NO: 1790609
uuuauacauaugcacaucc

SEQ ID NO: 1790611 - RNA, 19 nt, Artificial Sequence
  Description of Artificial Sequence: Synthetic oligonucleotide
  Sense strand starting at position 162 of SEQ ID NO: 1563035
gacuguggcuucccgagaa

SEQ ID NO: 1790612 - RNA, 19 nt, Artificial Sequence
  Description of Artificial Sequence: Synthetic oligonucleotide
  Antisense strand to SEQ ID NO: 1790611
uucucgggaagccacaguc

SEQ ID NO: 1790613 - RNA, 19 nt, Artificial Sequence
  Description of Artificial Sequence: Synthetic oligonucleotide
  Sense strand starting at position 166 of SEQ ID NO: 1563035
guggcuucccgagaacaag

SEQ ID NO: 1790614 - RNA, 19 nt, Artificial Sequence
  Description of Artificial Sequence: Synthetic oligonucleotide
  Antisense strand to SEQ ID NO: 1790613
cuuguucucgggaagccac

SEQ ID NO: 1790615 - RNA, 19 nt, Artificial Sequence
  Description of Artificial Sequence: Synthetic oligonucleotide
  Sense strand starting at position 534 of SEQ ID NO: 1563035
gggcuuuccugcccucaaa

SEQ ID NO: 1790616 - RNA, 19 nt, Artificial Sequence
  Description of Artificial Sequence: Synthetic oligonucleotide
  Antisense strand to SEQ ID NO: 1790615
uuugagggcaggaaagccc

SEQ ID NO: 1790617 - RNA, 19 nt, Artificial Sequence
  Description of Artificial Sequence: Synthetic oligonucleotide
  Sense strand starting at position 565 of SEQ ID NO: 1563035
gacggcauuugagaagaaa

SEQ ID NO: 1790618 - RNA, 19 nt, Artificial Sequence
  Description of Artificial Sequence: Synthetic oligonucleotide
  Antisense strand to SEQ ID NO: 1790617
uuucuucucaaaugccguc

SEQ ID NO: 1790619 - RNA, 19 nt, Artificial Sequence
  Description of Artificial Sequence: Synthetic oligonucleotide
  Sense strand starting at position 797 of SEQ ID NO: 1563035
gugggaguuucugggauac

SEQ ID NO: 1790620 - RNA, 19 nt, Artificial Sequence
  Description of Artificial Sequence: Synthetic oligonucleotide
  Antisense strand to SEQ ID NO: 1790619
guaucccagaaacucccac

SEQ ID NO: 1790621 - RNA, 19 nt, Artificial Sequence
  Description of Artificial Sequence: Synthetic oligonucleotide
  Sense strand starting at position 799 of SEQ ID NO: 1563035
gggaguuucugggauacag

SEQ ID NO: 1790622 - RNA, 19 nt, Artificial Sequence
  Description of Artificial Sequence: Synthetic oligonucleotide
  Antisense strand to SEQ ID NO: 1790621
cuguaucccagaaacuccc

SEQ ID NO: 1790623 - RNA, 19 nt, Artificial Sequence
  Description of Artificial Sequence: Synthetic oligonucleotide
  Sense strand starting at position 867 of SEQ ID NO: 1563035
ggcuucuuuccaugaggug

SEQ ID NO: 1790624 - RNA, 19 nt, Artificial Sequence
  Description of Artificial Sequence: Synthetic oligonucleotide
  Antisense strand to SEQ ID NO: 1790623
caccucauggaaagaagcc

SEQ ID NO: 1790625 - RNA, 19 nt, Artificial Sequence
  Description of Artificial Sequence: Synthetic oligonucleotide
  Sense strand starting at position 1100 of SEQ ID NO: 1563035
guguuaccgguucaugaaa

SEQ ID NO: 1790626 - RNA, 19 nt, Artificial Sequence
  Description of Artificial Sequence: Synthetic oligonucleotide
  Antisense strand to SEQ ID NO: 1790625
uuucaugaaccgguaacac

SEQ ID NO: 1790627 - RNA, 19 nt, Artificial Sequence
  Description of Artificial Sequence: Synthetic oligonucleotide
  Sense strand starting at position 1102 of SEQ ID NO: 1563035
guuaccgguucaugaaaug

SEQ ID NO: 1790628 - RNA, 19 nt, Artificial Sequence
  Description of Artificial Sequence: Synthetic oligonucleotide
  Antisense strand to SEQ ID NO: 1790627
cauuucaugaaccgguaac

SEQ ID NO: 1790629 - RNA, 19 nt, Artificial Sequence
  Description of Artificial Sequence: Synthetic oligonucleotide
  Sense strand starting at position 1151 of SEQ ID NO: 1563035
cgcccaccuugucuauaaa

SEQ ID NO: 1790630 - RNA, 19 nt, Artificial Sequence
  Description of Artificial Sequence: Synthetic oligonucleotide
  Antisense strand to SEQ ID NO: 1790629
uuuauagacaaggugggcg

SEQ ID NO: 1790631 - RNA, 19 nt, Artificial Sequence
  Description of Artificial Sequence: Synthetic oligonucleotide
  Sense strand starting at position 1223 of SEQ ID NO: 1563035
guccucauuucucgagaac

SEQ ID NO: 1790632 - RNA, 19 nt, Artificial Sequence
  Description of Artificial Sequence: Synthetic oligonucleotide
  Antisense strand to SEQ ID NO: 1790631
guucucgagaaaugaggac

SEQ ID NO: 1790633 - RNA, 19 nt, Artificial Sequence
  Description of Artificial Sequence: Synthetic oligonucleotide
  Sense strand starting at position 1285 of SEQ ID NO: 1563035
aggcaguucccggguggaa

SEQ ID NO: 1790634 - RNA, 19 nt, Artificial Sequence
  Description of Artificial Sequence: Synthetic oligonucleotide
  Antisense strand to SEQ ID NO: 1790633
uuccacccgggaacugccu

SEQ ID NO: 1790635 - RNA, 19 nt, Artificial Sequence
  Description of Artificial Sequence: Synthetic oligonucleotide
  Sense strand starting at position 1287 of SEQ ID NO: 1563035
gcaguucccggguggaaga

SEQ ID NO: 1790636 - RNA, 19 nt, Artificial Sequence
  Description of Artificial Sequence: Synthetic oligonucleotide
  Antisense strand to SEQ ID NO: 1790635
ucuuccacccgggaacugc

SEQ ID NO: 1790637 - RNA, 19 nt, Artificial Sequence
  Description of Artificial Sequence: Synthetic oligonucleotide
  Sense strand starting at position 1309 of SEQ ID NO: 1563035
guacucaguucccgacuca

SEQ ID NO: 1790638 - RNA, 19 nt, Artificial Sequence
  Description of Artificial Sequence: Synthetic oligonucleotide
  Antisense strand to SEQ ID NO: 1790637
ugagucgggaacugaguac

SEQ ID NO: 1790639 - RNA, 19 nt, Artificial Sequence
  Description of Artificial Sequence: Synthetic oligonucleotide
  Sense strand starting at position 2178 of SEQ ID NO: 1563035
cggugaccucuuugcaaag

SEQ ID NO: 1790640 - RNA, 19 nt, Artificial Sequence
  Description of Artificial Sequence: Synthetic oligonucleotide
  Antisense strand to SEQ ID NO: 1790639
cuuugcaaagaggucaccg

SEQ ID NO: 1790641 - RNA, 19 nt, Artificial Sequence
  Description of Artificial Sequence: Synthetic oligonucleotide
  Sense strand starting at position 2179 of SEQ ID NO: 1563035
ggugaccucuuugcaaagu

SEQ ID NO: 1790642 - RNA, 19 nt, Artificial Sequence
  Description of Artificial Sequence: Synthetic oligonucleotide
  Antisense strand to SEQ ID NO: 1790641
acuuugcaaagaggucacc

SEQ ID NO: 1790643 - RNA, 19 nt, Artificial Sequence
  Description of Artificial Sequence: Synthetic oligonucleotide
  Sense strand starting at position 2317 of SEQ ID NO: 1563035
gcuugauuuguuuggcugu

SEQ ID NO: 1790644 - RNA, 19 nt, Artificial Sequence
  Description of Artificial Sequence: Synthetic oligonucleotide
  Antisense strand to SEQ ID NO: 1790643
acagccaaacaaaucaagc

SEQ ID NO: 1790645 - RNA, 19 nt, Artificial Sequence
  Description of Artificial Sequence: Synthetic oligonucleotide
  Sense strand starting at position 2330 of SEQ ID NO: 1563035
ggcuguuuccugccacuuu

SEQ ID NO: 1790646 - RNA, 19 nt, Artificial Sequence
  Description of Artificial Sequence: Synthetic oligonucleotide
  Antisense strand to SEQ ID NO: 1790645
aaaguggcaggaaacagcc

SEQ ID NO: 1790647 - RNA, 19 nt, Artificial Sequence
  Description of Artificial Sequence: Synthetic oligonucleotide
  Sense strand starting at position 2427 of SEQ ID NO: 1563035
augaauauuucucgaauga

SEQ ID NO: 1790648 - RNA, 19 nt, Artificial Sequence
  Description of Artificial Sequence: Synthetic oligonucleotide
  Antisense strand to SEQ ID NO: 1790647
ucauucgagaaauauucau

SEQ ID NO: 1790649 - RNA, 19 nt, Artificial Sequence
  Description of Artificial Sequence: Synthetic oligonucleotide
  Sense strand starting at position 2665 of SEQ ID NO: 1563035
gcaauuaauuacgcaauca

SEQ ID NO: 1790650 - RNA, 19 nt, Artificial Sequence
  Description of Artificial Sequence: Synthetic oligonucleotide
  Antisense strand to SEQ ID NO: 1790649
ugauugcguaauuaauugc

SEQ ID NO: 1790651 - RNA, 19 nt, Artificial Sequence
  Description of Artificial Sequence: Synthetic oligonucleotide
  Sense strand starting at position 2729 of SEQ ID NO: 1563035
ccagguguugucuaacuua

SEQ ID NO: 1790652 - RNA, 19 nt, Artificial Sequence
  Description of Artificial Sequence: Synthetic oligonucleotide
  Antisense strand to SEQ ID NO: 1790651
uaaguuagacaacaccugg

SEQ ID NO: 1790653 - RNA, 19 nt, Artificial Sequence
  Description of Artificial Sequence: Synthetic oligonucleotide
  Sense strand starting at position 2732 of SEQ ID NO: 1563035
gguguugucuaacuuauuc

SEQ ID NO: 1790654 - RNA, 19 nt, Artificial Sequence
  Description of Artificial Sequence: Synthetic oligonucleotide
  Antisense strand to SEQ ID NO: 1790653
gaauaaguuagacaacacc

SEQ ID NO: 1790655 - RNA, 19 nt, Artificial Sequence
  Description of Artificial Sequence: Synthetic oligonucleotide
  Sense strand starting at position 2828 of SEQ ID NO: 1563035
gggcuagaccuccagguuu

SEQ ID NO: 1790656 - RNA, 19 nt, Artificial Sequence
  Description of Artificial Sequence: Synthetic oligonucleotide
  Antisense strand to SEQ ID NO: 1790655
aaaccuggaggucuagccc

SEQ ID NO: 1790657 - RNA, 19 nt, Artificial Sequence
  Description of Artificial Sequence: Synthetic oligonucleotide
  Sense strand starting at position 3023 of SEQ ID NO: 1563035
cugccauucugugaugaca

SEQ ID NO: 1790658 - RNA, 19 nt, Artificial Sequence
  Description of Artificial Sequence: Synthetic oligonucleotide
  Antisense strand to SEQ ID NO: 1790657
ugucaucacagaauggcag

SEQ ID NO: 1790659 - RNA, 19 nt, Artificial Sequence
  Description of Artificial Sequence: Synthetic oligonucleotide
  Sense strand starting at position 3046 of SEQ ID NO: 1563035
acaacaucuguguggagga

SEQ ID NO: 1790660 - RNA, 19 nt, Artificial Sequence
  Description of Artificial Sequence: Synthetic oligonucleotide
  Antisense strand to SEQ ID NO: 1790659
uccuccacacagauguugu

SEQ ID NO: 1790661 - RNA, 19 nt, Artificial Sequence
  Description of Artificial Sequence: Synthetic oligonucleotide
  Sense strand starting at position 3047 of SEQ ID NO: 1563035
caacaucuguguggaggaa

SEQ ID NO: 1790662 - RNA, 19 nt, Artificial Sequence
  Description of Artificial Sequence: Synthetic oligonucleotide
  Antisense strand to SEQ ID NO: 1790661
uuccuccacacagauguug

SEQ ID NO: 1790663 - RNA, 19 nt, Artificial Sequence
  Description of Artificial Sequence: Synthetic oligonucleotide
  Sense strand starting at position 3077 of SEQ ID NO: 1563035
gccugagggugcuccuuau

SEQ ID NO: 1790664 - RNA, 19 nt, Artificial Sequence
  Description of Artificial Sequence: Synthetic oligonucleotide
  Antisense strand to SEQ ID NO: 1790663
auaaggagcacccucaggc

SEQ ID NO: 1790665 - RNA, 19 nt, Artificial Sequence
  Description of Artificial Sequence: Synthetic oligonucleotide
  Sense strand starting at position 3105 of SEQ ID NO: 1563035
auagucaauguccaucuua

SEQ ID NO: 1790666 - RNA, 19 nt, Artificial Sequence
  Description of Artificial Sequence: Synthetic oligonucleotide
  Antisense strand to SEQ ID NO: 1790665
uaagauggacauugacuau

SEQ ID NO: 1790667 - RNA, 19 nt, Artificial Sequence
  Description of Artificial Sequence: Synthetic oligonucleotide
  Sense strand starting at position 3123 of SEQ ID NO: 1563035
aggcucagcugauuguuua

SEQ ID NO: 1790668 - RNA, 19 nt, Artificial Sequence
  Description of Artificial Sequence: Synthetic oligonucleotide
  Antisense strand to SEQ ID NO: 1790667
uaaacaaucagcugagccu

SEQ ID NO: 1790669 - RNA, 19 nt, Artificial Sequence
  Description of Artificial Sequence: Synthetic oligonucleotide
  Sense strand starting at position 3130 of SEQ ID NO: 1563035
gcugauuguuuagucucua

SEQ ID NO: 1790670 - RNA, 19 nt, Artificial Sequence
  Description of Artificial Sequence: Synthetic oligonucleotide
  Antisense strand to SEQ ID NO: 1790669
uagagacuaaacaaucagc

SEQ ID NO: 1790671 - RNA, 19 nt, Artificial Sequence
  Description of Artificial Sequence: Synthetic oligonucleotide
  Sense strand starting at position 3201 of SEQ ID NO: 1563035
cuuauaaggugucuacuau

SEQ ID NO: 1790672 - RNA, 19 nt, Artificial Sequence
  Description of Artificial Sequence: Synthetic oligonucleotide
  Antisense strand to SEQ ID NO: 1790671
auaguagacaccuuauaag

SEQ ID NO: 1790673 - RNA, 19 nt, Artificial Sequence
  Description of Artificial Sequence: Synthetic oligonucleotide
  Sense strand starting at position 3202 of SEQ ID NO: 1563035
uuauaaggugucuacuaug

SEQ ID NO: 1790674 - RNA, 19 nt, Artificial Sequence
  Description of Artificial Sequence: Synthetic oligonucleotide
  Antisense strand to SEQ ID NO: 1790673
cauaguagacaccuuauaa

SEQ ID NO: 1790675 - RNA, 19 nt, Artificial Sequence
  Description of Artificial Sequence: Synthetic oligonucleotide
  Sense strand starting at position 3205 of SEQ ID NO: 1563035
uaaggugucuacuaugacu

SEQ ID NO: 1790676 - RNA, 19 nt, Artificial Sequence
  Description of Artificial Sequence: Synthetic oligonucleotide
  Antisense strand to SEQ ID NO: 1790675
agucauaguagacaccuua

SEQ ID NO: 1790677 - RNA, 19 nt, Artificial Sequence
  Description of Artificial Sequence: Synthetic oligonucleotide
  Sense strand starting at position 3207 of SEQ ID NO: 1563035
aggugucuacuaugacuau

SEQ ID NO: 1790678 - RNA, 19 nt, Artificial Sequence
  Description of Artificial Sequence: Synthetic oligonucleotide
  Antisense strand to SEQ ID NO: 1790677
auagucauaguagacaccu

SEQ ID NO: 1790679 - RNA, 19 nt, Artificial Sequence
  Description of Artificial Sequence: Synthetic oligonucleotide
  Sense strand starting at position 3208 of SEQ ID NO: 1563035
ggugucuacuaugacuaua

SEQ ID NO: 1790680 - RNA, 19 nt, Artificial Sequence
  Description of Artificial Sequence: Synthetic oligonucleotide
  Antisense strand to SEQ ID NO: 1790679
uauagucauaguagacacc

SEQ ID NO: 1790681 - RNA, 19 nt, Artificial Sequence
  Description of Artificial Sequence: Synthetic oligonucleotide
  Sense strand starting at position 3210 of SEQ ID NO: 1563035
ugucuacuaugacuauaua

SEQ ID NO: 1790682 - RNA, 19 nt, Artificial Sequence
  Description of Artificial Sequence: Synthetic oligonucleotide
  Antisense strand to SEQ ID NO: 1790681
uauauagucauaguagaca

SEQ ID NO: 1790683 - RNA, 19 nt, Artificial Sequence
  Description of Artificial Sequence: Synthetic oligonucleotide
  Sense strand starting at position 3665 of SEQ ID NO: 1563035
aaacgauagucugggagaa

SEQ ID NO: 1790684 - RNA, 19 nt, Artificial Sequence
  Description of Artificial Sequence: Synthetic oligonucleotide
  Antisense strand to SEQ ID NO: 1790683
uucucccagacuaucguuu

SEQ ID NO: 1790685 - RNA, 19 nt, Artificial Sequence
  Description of Artificial Sequence: Synthetic oligonucleotide
  Sense strand starting at position 3725 of SEQ ID NO: 1563035
uaaagaacguucgaacuca

SEQ ID NO: 1790686 - RNA, 19 nt, Artificial Sequence
  Description of Artificial Sequence: Synthetic oligonucleotide
  Antisense strand to SEQ ID NO: 1790685
ugaguucgaacguucuuua

SEQ ID NO: 1790687 - RNA, 19 nt, Artificial Sequence
  Description of Artificial Sequence: Synthetic oligonucleotide
  Sense strand starting at position 397 of SEQ ID NO: 1563036
agagccgucgccugcaaau

SEQ ID NO: 1790688 - RNA, 19 nt, Artificial Sequence
  Description of Artificial Sequence: Synthetic oligonucleotide
  Antisense strand to SEQ ID NO: 1790687
auuugcaggcgacggcucu

SEQ ID NO: 1790689 - RNA, 19 nt, Artificial Sequence
  Description of Artificial Sequence: Synthetic oligonucleotide
  Sense strand starting at position 546 of SEQ ID NO: 1563036
cucugugucaaggguuuaa

SEQ ID NO: 1790690 - RNA, 19 nt, Artificial Sequence
  Description of Artificial Sequence: Synthetic oligonucleotide
  Antisense strand to SEQ ID NO: 1790689
uuaaacccuugacacagag

SEQ ID NO: 1790691 - RNA, 19 nt, Artificial Sequence
  Description of Artificial Sequence: Synthetic oligonucleotide
  Sense strand starting at position 690 of SEQ ID NO: 1563036
ccugcugugugcccagaaa

SEQ ID NO: 1790692 - RNA, 19 nt, Artificial Sequence
  Description of Artificial Sequence: Synthetic oligonucleotide
  Antisense strand to SEQ ID NO: 1790691
uuucugggcacacagcagg

SEQ ID NO: 1790693 - RNA, 19 nt, Artificial Sequence
  Description of Artificial Sequence: Synthetic oligonucleotide
  Sense strand starting at position 701 of SEQ ID NO: 1563036
cccagaaauguaugcucuu

SEQ ID NO: 1790694 - RNA, 19 nt, Artificial Sequence
  Description of Artificial Sequence: Synthetic oligonucleotide
  Antisense strand to SEQ ID NO: 1790693
aagagcauacauuucuggg

SEQ ID NO: 1790695 - RNA, 19 nt, Artificial Sequence
  Description of Artificial Sequence: Synthetic oligonucleotide
  Sense strand starting at position 801 of SEQ ID NO: 1563036
ggaguugaggcuugaaccu

SEQ ID NO: 1790696 - RNA, 19 nt, Artificial Sequence
  Description of Artificial Sequence: Synthetic oligonucleotide
  Antisense strand to SEQ ID NO: 1790695
agguucaagccucaacucc

SEQ ID NO: 1790697 - RNA, 19 nt, Artificial Sequence
  Description of Artificial Sequence: Synthetic oligonucleotide
  Sense strand starting at position 819 of SEQ ID NO: 1563036
ugagucucucuggauccaa

SEQ ID NO: 1790698 - RNA, 19 nt, Artificial Sequence
  Description of Artificial Sequence: Synthetic oligonucleotide
  Antisense strand to SEQ ID NO: 1790697
uuggauccagagagacuca

SEQ ID NO: 1790699 - RNA, 19 nt, Artificial Sequence
  Description of Artificial Sequence: Synthetic oligonucleotide
  Sense strand starting at position 1135 of SEQ ID NO: 1563036
acaagcuucccucgagcua

SEQ ID NO: 1790700 - RNA, 19 nt, Artificial Sequence
  Description of Artificial Sequence: Synthetic oligonucleotide
  Antisense strand to SEQ ID NO: 1790699
uagcucgagggaagcuugu

SEQ ID NO: 1790701 - RNA, 19 nt, Artificial Sequence
  Description of Artificial Sequence: Synthetic oligonucleotide
  Sense strand starting at position 1263 of SEQ ID NO: 1563036
ggcgcuugguggagaucua

SEQ ID NO: 1790702 - RNA, 19 nt, Artificial Sequence
  Description of Artificial Sequence: Synthetic oligonucleotide
  Antisense strand to SEQ ID NO: 1790701
uagaucuccaccaagcgcc

SEQ ID NO: 1790703 - RNA, 19 nt, Artificial Sequence
  Description of Artificial Sequence: Synthetic oligonucleotide
  Sense strand starting at position 1264 of SEQ ID NO: 1563036
gcgcuugguggagaucuau

SEQ ID NO: 1790704 - RNA, 19 nt, Artificial Sequence
  Description of Artificial Sequence: Synthetic oligonucleotide
  Antisense strand to SEQ ID NO: 1790703
auagaucuccaccaagcgc

SEQ ID NO: 1790705 - RNA, 19 nt, Artificial Sequence
  Description of Artificial Sequence: Synthetic oligonucleotide
  Sense strand starting at position 1270 of SEQ ID NO: 1563036
gguggagaucuaugucaaa

SEQ ID NO: 1790706 - RNA, 19 nt, Artificial Sequence
  Description of Artificial Sequence: Synthetic oligonucleotide
  Antisense strand to SEQ ID NO: 1790705
uuugacauagaucuccacc

SEQ ID NO: 1790707 - RNA, 19 nt, Artificial Sequence
  Description of Artificial Sequence: Synthetic oligonucleotide
  Sense strand starting at position 1273 of SEQ ID NO: 1563036
ggagaucuaugucaaacuc

SEQ ID NO: 1790708 - RNA, 19 nt, Artificial Sequence
  Description of Artificial Sequence: Synthetic oligonucleotide
  Antisense strand to SEQ ID NO: 1790707
gaguuugacauagaucucc

SEQ ID NO: 1790709 - RNA, 19 nt, Artificial Sequence
  Description of Artificial Sequence: Synthetic oligonucleotide
  Sense strand starting at position 1548 of SEQ ID NO: 1563036
ucugaacgcugcugggaua

SEQ ID NO: 1790710 - RNA, 19 nt, Artificial Sequence
  Description of Artificial Sequence: Synthetic oligonucleotide
  Antisense strand to SEQ ID NO: 1790709
uaucccagcagcguucaga

SEQ ID NO: 1790711 - RNA, 19 nt, Artificial Sequence
  Description of Artificial Sequence: Synthetic oligonucleotide
  Sense strand starting at position 1786 of SEQ ID NO: 1563036
gucuuauacuuagagcauu

SEQ ID NO: 1790712 - RNA, 19 nt, Artificial Sequence
  Description of Artificial Sequence: Synthetic oligonucleotide
  Antisense strand to SEQ ID NO: 1790711
aaugcucuaaguauaagac

SEQ ID NO: 1790713 - RNA, 19 nt, Artificial Sequence
  Description of Artificial Sequence: Synthetic oligonucleotide
  Sense strand starting at position 2166 of SEQ ID NO: 1563036
ggcugagaucacuguaacg

SEQ ID NO: 1790714 - RNA, 19 nt, Artificial Sequence
  Description of Artificial Sequence: Synthetic oligonucleotide
  Antisense strand to SEQ ID NO: 1790713
cguuacagugaucucagcc

SEQ ID NO: 1790715 - RNA, 19 nt, Artificial Sequence
  Description of Artificial Sequence: Synthetic oligonucleotide
  Sense strand starting at position 2168 of SEQ ID NO: 1563036
cugagaucacuguaacgcu

SEQ ID NO: 1790716 - RNA, 19 nt, Artificial Sequence
  Description of Artificial Sequence: Synthetic oligonucleotide
  Antisense strand to SEQ ID NO: 1790715
agcguuacagugaucucag

SEQ ID NO: 1790717 - RNA, 19 nt, Artificial Sequence
  Description of Artificial Sequence: Synthetic oligonucleotide
  Sense strand starting at position 2547 of SEQ ID NO: 1563036
cuagaauggcccugagguc

SEQ ID NO: 1790718 - RNA, 19 nt, Artificial Sequence
  Description of Artificial Sequence: Synthetic oligonucleotide
  Antisense strand to SEQ ID NO: 1790717
gaccucagggccauucuag

SEQ ID NO: 1790719 - RNA, 19 nt, Artificial Sequence
  Description of Artificial Sequence: Synthetic oligonucleotide
  Sense strand starting at position 2886 of SEQ ID NO: 1563036
ggucuagacucuuggauug

SEQ ID NO: 1790720 - RNA, 19 nt, Artificial Sequence
  Description of Artificial Sequence: Synthetic oligonucleotide
  Antisense strand to SEQ ID NO: 1790719
caauccaagagucuagacc

SEQ ID NO: 1790721 - RNA, 19 nt, Artificial Sequence
  Description of Artificial Sequence: Synthetic oligonucleotide
  Sense strand starting at position 2888 of SEQ ID NO: 1563036
ucuagacucuuggauugau

SEQ ID NO: 1790722 - RNA, 19 nt, Artificial Sequence
  Description of Artificial Sequence: Synthetic oligonucleotide
  Antisense strand to SEQ ID NO: 1790721
aucaauccaagagucuaga

SEQ ID NO: 1790723 - RNA, 19 nt, Artificial Sequence
  Description of Artificial Sequence: Synthetic oligonucleotide
  Sense strand starting at position 3064 of SEQ ID NO: 1563036
gccuguauuucuccagauc

SEQ ID NO: 1790724 - RNA, 19 nt, Artificial Sequence
  Description of Artificial Sequence: Synthetic oligonucleotide
  Antisense strand to SEQ ID NO: 1790723
gaucuggagaaauacaggc

SEQ ID NO: 1790725 - RNA, 19 nt, Artificial Sequence
  Description of Artificial Sequence: Synthetic oligonucleotide
  Sense strand starting at position 3169 of SEQ ID NO: 1563036
gguauucuccagugccuca

SEQ ID NO: 1790726 - RNA, 19 nt, Artificial Sequence
  Description of Artificial Sequence: Synthetic oligonucleotide
  Antisense strand to SEQ ID NO: 1790725
ugaggcacuggagaauacc

SEQ ID NO: 1790727 - RNA, 19 nt, Artificial Sequence
  Description of Artificial Sequence: Synthetic oligonucleotide
  Sense strand starting at position 3311 of SEQ ID NO: 1563036
caagucugauagucagaga

SEQ ID NO: 1790728 - RNA, 19 nt, Artificial Sequence
  Description of Artificial Sequence: Synthetic oligonucleotide
  Antisense strand to SEQ ID NO: 1790727
ucucugacuaucagacuug

SEQ ID NO: 1790729 - RNA, 19 nt, Artificial Sequence
  Description of Artificial Sequence: Synthetic oligonucleotide
  Sense strand starting at position 3544 of SEQ ID NO: 1563036
gcggucacacuuugagaaa

SEQ ID NO: 1790730 - RNA, 19 nt, Artificial Sequence
  Description of Artificial Sequence: Synthetic oligonucleotide
  Antisense strand to SEQ ID NO: 1790729
uuucucaaagugugaccgc

SEQ ID NO: 1790731 - RNA, 19 nt, Artificial Sequence
  Description of Artificial Sequence: Synthetic oligonucleotide
  Sense strand starting at position 3545 of SEQ ID NO: 1563036
cggucacacuuugagaaau

SEQ ID NO: 1790732 - RNA, 19 nt, Artificial Sequence
  Description of Artificial Sequence: Synthetic oligonucleotide
  Antisense strand to SEQ ID NO: 1790731
auuucucaaagugugaccg

SEQ ID NO: 1790733 - RNA, 19 nt, Artificial Sequence
  Description of Artificial Sequence: Synthetic oligonucleotide
  Sense strand starting at position 3802 of SEQ ID NO: 1563036
ggcguaaucuccgcaagcu

SEQ ID NO: 1790734 - RNA, 19 nt, Artificial Sequence
  Description of Artificial Sequence: Synthetic oligonucleotide
  Antisense strand to SEQ ID NO: 1790733
agcuugcggagauuacgcc

SEQ ID NO: 1790735 - RNA, 19 nt, Artificial Sequence
  Description of Artificial Sequence: Synthetic oligonucleotide
  Sense strand starting at position 3803 of SEQ ID NO: 1563036
gcguaaucuccgcaagcug

SEQ ID NO: 1790736 - RNA, 19 nt, Artificial Sequence
  Description of Artificial Sequence: Synthetic oligonucleotide
  Antisense strand to SEQ ID NO: 1790735
cagcuugcggagauuacgc

SEQ ID NO: 1790737 - RNA, 19 nt, Artificial Sequence
  Description of Artificial Sequence: Synthetic oligonucleotide
  Sense strand starting at position 3964 of SEQ ID NO: 1563036
cucuccucuggcugaguaa

SEQ ID NO: 1790738 - RNA, 19 nt, Artificial Sequence
  Description of Artificial Sequence: Synthetic oligonucleotide
  Antisense strand to SEQ ID NO: 1790737
uuacucagccagaggagag

SEQ ID NO: 1790739 - RNA, 19 nt, Artificial Sequence
  Description of Artificial Sequence: Synthetic oligonucleotide
  Sense strand starting at position 30 of SEQ ID NO: 1563037
gaugcaauguguuuaaagc

SEQ ID NO: 1790740 - RNA, 19 nt, Artificial Sequence
  Description of Artificial Sequence: Synthetic oligonucleotide
  Antisense strand to SEQ ID NO: 1790739
gcuuuaaacacauugcauc

SEQ ID NO: 1790741 - RNA, 19 nt, Artificial Sequence
  Description of Artificial Sequence: Synthetic oligonucleotide
  Sense strand starting at position 31 of SEQ ID NO: 1563037
augcaauguguuuaaagcu

SEQ ID NO: 1790742 - RNA, 19 nt, Artificial Sequence
  Description of Artificial Sequence: Synthetic oligonucleotide
  Antisense strand to SEQ ID NO: 1790741
agcuuuaaacacauugcau

SEQ ID NO: 1790743 - RNA, 19 nt, Artificial Sequence
  Description of Artificial Sequence: Synthetic oligonucleotide
  Sense strand starting at position 114 of SEQ ID NO: 1563037
uggccuucugccuaacaca

SEQ ID NO: 1790744 - RNA, 19 nt, Artificial Sequence
  Description of Artificial Sequence: Synthetic oligonucleotide
  Antisense strand to SEQ ID NO: 1790743
uguguuaggcagaaggcca

SEQ ID NO: 1790745 - RNA, 19 nt, Artificial Sequence
  Description of Artificial Sequence: Synthetic oligonucleotide
  Sense strand starting at position 135 of SEQ ID NO: 1563037
ucccuuugguuccaucaca

SEQ ID NO: 1790746 - RNA, 19 nt, Artificial Sequence
  Description of Artificial Sequence: Synthetic oligonucleotide
  Antisense strand to SEQ ID NO: 1790745
ugugauggaaccaaaggga

SEQ ID NO: 1790747 - RNA, 19 nt, Artificial Sequence
  Description of Artificial Sequence: Synthetic oligonucleotide
  Sense strand starting at position 203 of SEQ ID NO: 1563037
gcugcucucuucucagcaa

SEQ ID NO: 1790748 - RNA, 19 nt, Artificial Sequence
  Description of Artificial Sequence: Synthetic oligonucleotide
  Antisense strand to SEQ ID NO: 1790747
uugcugagaagagagcagc

SEQ ID NO: 1790749 - RNA, 19 nt, Artificial Sequence
  Description of Artificial Sequence: Synthetic oligonucleotide
  Sense strand starting at position 283 of SEQ ID NO: 1563037
cccaaaugcuaacuagagu

SEQ ID NO: 1790750 - RNA, 19 nt, Artificial Sequence
  Description of Artificial Sequence: Synthetic oligonucleotide
  Antisense strand to SEQ ID NO: 1790749
acucuaguuagcauuuggg

SEQ ID NO: 1790751 - RNA, 19 nt, Artificial Sequence
  Description of Artificial Sequence: Synthetic oligonucleotide
  Sense strand starting at position 391 of SEQ ID NO: 1563037
agacgugcccagcaguaau

SEQ ID NO: 1790752 - RNA, 19 nt, Artificial Sequence
  Description of Artificial Sequence: Synthetic oligonucleotide
  Antisense strand to SEQ ID NO: 1790751
auuacugcugggcacgucu

SEQ ID NO: 1790753 - RNA, 19 nt, Artificial Sequence
  Description of Artificial Sequence: Synthetic oligonucleotide
  Sense strand starting at position 394 of SEQ ID NO: 1563037
cgugcccagcaguaauaaa

SEQ ID NO: 1790754 - RNA, 19 nt, Artificial Sequence
  Description of Artificial Sequence: Synthetic oligonucleotide
  Antisense strand to SEQ ID NO: 1790753
uuuauuacugcugggcacg

SEQ ID NO: 1790755 - RNA, 19 nt, Artificial Sequence
  Description of Artificial Sequence: Synthetic oligonucleotide
  Sense strand starting at position 474 of SEQ ID NO: 1563037
cugugcuccugggagaaua

SEQ ID NO: 1790756 - RNA, 19 nt, Artificial Sequence
  Description of Artificial Sequence: Synthetic oligonucleotide
  Antisense strand to SEQ ID NO: 1790755
uauucucccaggagcacag

SEQ ID NO: 1790757 - RNA, 19 nt, Artificial Sequence
  Description of Artificial Sequence: Synthetic oligonucleotide
  Sense strand starting at position 476 of SEQ ID NO: 1563037
gugcuccugggagaauaau

SEQ ID NO: 1790758 - RNA, 19 nt, Artificial Sequence
  Description of Artificial Sequence: Synthetic oligonucleotide
  Antisense strand to SEQ ID NO: 1790757
auuauucucccaggagcac

SEQ ID NO: 1790759 - RNA, 19 nt, Artificial Sequence
  Description of Artificial Sequence: Synthetic oligonucleotide
  Sense strand starting at position 510 of SEQ ID NO: 1563037
ccagguuaucccugagcca

SEQ ID NO: 1790760 - RNA, 19 nt, Artificial Sequence
  Description of Artificial Sequence: Synthetic oligonucleotide
  Antisense strand to SEQ ID NO: 1790759
uggcucagggauaaccugg

SEQ ID NO: 1790761 - RNA, 19 nt, Artificial Sequence
  Description of Artificial Sequence: Synthetic oligonucleotide
  Sense strand starting at position 511 of SEQ ID NO: 1563037
cagguuaucccugagccaa

SEQ ID NO: 1790762 - RNA, 19 nt, Artificial Sequence
  Description of Artificial Sequence: Synthetic oligonucleotide
  Antisense strand to SEQ ID NO: 1790761
uuggcucagggauaaccug

SEQ ID NO: 1790763 - RNA, 19 nt, Artificial Sequence
  Description of Artificial Sequence: Synthetic oligonucleotide
  Sense strand starting at position 513 of SEQ ID NO: 1563037
gguuaucccugagccaaug

SEQ ID NO: 1790764 - RNA, 19 nt, Artificial Sequence
  Description of Artificial Sequence: Synthetic oligonucleotide
  Antisense strand to SEQ ID NO: 1790763
cauuggcucagggauaacc

SEQ ID NO: 1790765 - RNA, 19 nt, Artificial Sequence
  Description of Artificial Sequence: Synthetic oligonucleotide
  Sense strand starting at position 603 of SEQ ID NO: 1563037
uguauuuauugagugccca

SEQ ID NO: 1790766 - RNA, 19 nt, Artificial Sequence
  Description of Artificial Sequence: Synthetic oligonucleotide
  Antisense strand to SEQ ID NO: 1790765
ugggcacucaauaaauaca

SEQ ID NO: 1790767 - RNA, 19 nt, Artificial Sequence
  Description of Artificial Sequence: Synthetic oligonucleotide
  Sense strand starting at position 619 of SEQ ID NO: 1563037
ccagcacauggugauagau

SEQ ID NO: 1790768 - RNA, 19 nt, Artificial Sequence
  Description of Artificial Sequence: Synthetic oligonucleotide
  Antisense strand to SEQ ID NO: 1790767
aucuaucaccaugugcugg

SEQ ID NO: 1790769 - RNA, 19 nt, Artificial Sequence
  Description of Artificial Sequence: Synthetic oligonucleotide
  Sense strand starting at position 621 of SEQ ID NO: 1563037
agcacauggugauagauaa

SEQ ID NO: 1790770 - RNA, 19 nt, Artificial Sequence
  Description of Artificial Sequence: Synthetic oligonucleotide
  Antisense strand to SEQ ID NO: 1790769
uuaucuaucaccaugugcu

SEQ ID NO: 1790771 - RNA, 19 nt, Artificial Sequence
  Description of Artificial Sequence: Synthetic oligonucleotide
  Sense strand starting at position 682 of SEQ ID NO: 1563037
caaggaguuuacuuucguu

SEQ ID NO: 1790772 - RNA, 19 nt, Artificial Sequence
  Description of Artificial Sequence: Synthetic oligonucleotide
  Antisense strand to SEQ ID NO: 1790771
aacgaaaguaaacuccuug

SEQ ID NO: 1790773 - RNA, 19 nt, Artificial Sequence
  Description of Artificial Sequence: Synthetic oligonucleotide
  Sense strand starting at position 998 of SEQ ID NO: 1563037
ggcggaguuuacuuucuag

SEQ ID NO: 1790774 - RNA, 19 nt, Artificial Sequence
  Description of Artificial Sequence: Synthetic oligonucleotide
  Antisense strand to SEQ ID NO: 1790773
cuagaaaguaaacuccgcc

SEQ ID NO: 1790775 - RNA, 19 nt, Artificial Sequence
  Description of Artificial Sequence: Synthetic oligonucleotide
  Sense strand starting at position 1001 of SEQ ID NO: 1563037
ggaguuuacuuucuaguac

SEQ ID NO: 1790776 - RNA, 19 nt, Artificial Sequence
  Description of Artificial Sequence: Synthetic oligonucleotide
  Antisense strand to SEQ ID NO: 1790775
guacuagaaaguaaacucc

SEQ ID NO: 1790777 - RNA, 19 nt, Artificial Sequence
  Description of Artificial Sequence: Synthetic oligonucleotide
  Sense strand starting at position 1005 of SEQ ID NO: 1563037
uuuacuuucuaguacagga

SEQ ID NO: 1790778 - RNA, 19 nt, Artificial Sequence
  Description of Artificial Sequence: Synthetic oligonucleotide
  Antisense strand to SEQ ID NO: 1790777
uccuguacuagaaaguaaa

SEQ ID NO: 1790779 - RNA, 19 nt, Artificial Sequence
  Description of Artificial Sequence: Synthetic oligonucleotide
  Sense strand starting at position 1131 of SEQ ID NO: 1563037
gugcaucuaugugcacaua

SEQ ID NO: 1790780 - RNA, 19 nt, Artificial Sequence
  Description of Artificial Sequence: Synthetic oligonucleotide
  Antisense strand to SEQ ID NO: 1790779
uaugugcacauagaugcac

SEQ ID NO: 1790781 - RNA, 19 nt, Artificial Sequence
  Description of Artificial Sequence: Synthetic oligonucleotide
  Sense strand starting at position 1244 of SEQ ID NO: 1563037
gcgcucucgccuuaggaga

SEQ ID NO: 1790782 - RNA, 19 nt, Artificial Sequence
  Description of Artificial Sequence: Synthetic oligonucleotide
  Antisense strand to SEQ ID NO: 1790781
ucuccuaaggcgagagcgc

SEQ ID NO: 1790783 - RNA, 19 nt, Artificial Sequence
  Description of Artificial Sequence: Synthetic oligonucleotide
  Sense strand starting at position 1324 of SEQ ID NO: 1563037
acuggucauuccuuuagua

SEQ ID NO: 1790784 - RNA, 19 nt, Artificial Sequence
  Description of Artificial Sequence: Synthetic oligonucleotide
  Antisense strand to SEQ ID NO: 1790783
uacuaaaggaaugaccagu

SEQ ID NO: 1790785 - RNA, 19 nt, Artificial Sequence
  Description of Artificial Sequence: Synthetic oligonucleotide
  Sense strand starting at position 1326 of SEQ ID NO: 1563037
uggucauuccuuuaguaca

SEQ ID NO: 1790786 - RNA, 19 nt, Artificial Sequence
  Description of Artificial Sequence: Synthetic oligonucleotide
  Antisense strand to SEQ ID NO: 1790785
uguacuaaaggaaugacca

SEQ ID NO: 1790787 - RNA, 19 nt, Artificial Sequence
  Description of Artificial Sequence: Synthetic oligonucleotide
  Sense strand starting at position 1405 of SEQ ID NO: 1563037
guaccauuuguguggccuu

SEQ ID NO: 1790788 - RNA, 19 nt, Artificial Sequence
  Description of Artificial Sequence: Synthetic oligonucleotide
  Antisense strand to SEQ ID NO: 1790787
aaggccacacaaaugguac

SEQ ID NO: 1790789 - RNA, 19 nt, Artificial Sequence
  Description of Artificial Sequence: Synthetic oligonucleotide
  Sense strand starting at position 1441 of SEQ ID NO: 1563037
agugucucagucugucaaa

SEQ ID NO: 1790790 - RNA, 19 nt, Artificial Sequence
  Description of Artificial Sequence: Synthetic oligonucleotide
  Antisense strand to SEQ ID NO: 1790789
uuugacagacugagacacu

SEQ ID NO: 1790791 - RNA, 19 nt, Artificial Sequence
  Description of Artificial Sequence: Synthetic oligonucleotide
  Sense strand starting at position 1442 of SEQ ID NO: 1563037
gugucucagucugucaaau

SEQ ID NO: 1790792 - RNA, 19 nt, Artificial Sequence
  Description of Artificial Sequence: Synthetic oligonucleotide
  Antisense strand to SEQ ID NO: 1790791
auuugacagacugagacac

SEQ ID NO: 1790793 - RNA, 19 nt, Artificial Sequence
  Description of Artificial Sequence: Synthetic oligonucleotide
  Sense strand starting at position 1444 of SEQ ID NO: 1563037
gucucagucugucaaauag

SEQ ID NO: 1790794 - RNA, 19 nt, Artificial Sequence
  Description of Artificial Sequence: Synthetic oligonucleotide
  Antisense strand to SEQ ID NO: 1790793
cuauuugacagacugagac

SEQ ID NO: 1790795 - RNA, 19 nt, Artificial Sequence
  Description of Artificial Sequence: Synthetic oligonucleotide
  Sense strand starting at position 1573 of SEQ ID NO: 1563037
uguuauuaucauugcacgu

SEQ ID NO: 1790796 - RNA, 19 nt, Artificial Sequence
  Description of Artificial Sequence: Synthetic oligonucleotide
  Antisense strand to SEQ ID NO: 1790795
acgugcaaugauaauaaca

SEQ ID NO: 1790797 - RNA, 19 nt, Artificial Sequence
  Description of Artificial Sequence: Synthetic oligonucleotide
  Sense strand starting at position 2459 of SEQ ID NO: 1563037
ucuugaacuccugaggguu

SEQ ID NO: 1790798 - RNA, 19 nt, Artificial Sequence
  Description of Artificial Sequence: Synthetic oligonucleotide
  Antisense strand to SEQ ID NO: 1790797
aacccucaggaguucaaga

SEQ ID NO: 1790799 - RNA, 19 nt, Artificial Sequence
  Description of Artificial Sequence: Synthetic oligonucleotide
  Sense strand starting at position 2467 of SEQ ID NO: 1563037
uccugaggguucuuuguga

SEQ ID NO: 1790800 - RNA, 19 nt, Artificial Sequence
  Description of Artificial Sequence: Synthetic oligonucleotide
  Antisense strand to SEQ ID NO: 1790799
ucacaaagaacccucagga

SEQ ID NO: 1790801 - RNA, 19 nt, Artificial Sequence
  Description of Artificial Sequence: Synthetic oligonucleotide
  Sense strand starting at position 2471 of SEQ ID NO: 1563037
gaggguucuuugugaacac

SEQ ID NO: 1790802 - RNA, 19 nt, Artificial Sequence
  Description of Artificial Sequence: Synthetic oligonucleotide
  Antisense strand to SEQ ID NO: 1790801
guguucacaaagaacccuc

SEQ ID NO: 1790803 - RNA, 19 nt, Artificial Sequence
  Description of Artificial Sequence: Synthetic oligonucleotide
  Sense strand starting at position 2472 of SEQ ID NO: 1563037
aggguucuuugugaacaca

SEQ ID NO: 1790804 - RNA, 19 nt, Artificial Sequence
  Description of Artificial Sequence: Synthetic oligonucleotide
  Antisense strand to SEQ ID NO: 1790803
uguguucacaaagaacccu

SEQ ID NO: 1790805 - RNA, 19 nt, Artificial Sequence
  Description of Artificial Sequence: Synthetic oligonucleotide
  Sense strand starting at position 2475 of SEQ ID NO: 1563037
guucuuugugaacacaguu

SEQ ID NO: 1790806 - RNA, 19 nt, Artificial Sequence
  Description of Artificial Sequence: Synthetic oligonucleotide
  Antisense strand to SEQ ID NO: 1790805
aacuguguucacaaagaac

SEQ ID NO: 1790807 - RNA, 19 nt, Artificial Sequence
  Description of Artificial Sequence: Synthetic oligonucleotide
  Sense strand starting at position 2522 of SEQ ID NO: 1563037
gcaaaugcuaccuagguga

SEQ ID NO: 1790808 - RNA, 19 nt, Artificial Sequence
  Description of Artificial Sequence: Synthetic oligonucleotide
  Antisense strand to SEQ ID NO: 1790807
ucaccuagguagcauuugc

SEQ ID NO: 1790809 - RNA, 19 nt, Artificial Sequence
  Description of Artificial Sequence: Synthetic oligonucleotide
  Sense strand starting at position 2976 of SEQ ID NO: 1563037
ggacaacauuuauguauau

SEQ ID NO: 1790810 - RNA, 19 nt, Artificial Sequence
  Description of Artificial Sequence: Synthetic oligonucleotide
  Antisense strand to SEQ ID NO: 1790809
auauacauaaauguugucc

SEQ ID NO: 1790811 - RNA, 19 nt, Artificial Sequence
  Description of Artificial Sequence: Synthetic oligonucleotide
  Sense strand starting at position 3412 of SEQ ID NO: 1563037
ggaguuuauucaucuggag

SEQ ID NO: 1790812 - RNA, 19 nt, Artificial Sequence
  Description of Artificial Sequence: Synthetic oligonucleotide
  Antisense strand to SEQ ID NO: 1790811
cuccagaugaauaaacucc

SEQ ID NO: 1790813 - RNA, 19 nt, Artificial Sequence
  Description of Artificial Sequence: Synthetic oligonucleotide
  Sense strand starting at position 3438 of SEQ ID NO: 1563037
ggaaguuguugccuucuaa

SEQ ID NO: 1790814 - RNA, 19 nt, Artificial Sequence
  Description of Artificial Sequence: Synthetic oligonucleotide
  Antisense strand to SEQ ID NO: 1790813
uuagaaggcaacaacuucc

SEQ ID NO: 1790815 - RNA, 19 nt, Artificial Sequence
  Description of Artificial Sequence: Synthetic oligonucleotide
  Sense strand starting at position 3473 of SEQ ID NO: 1563037
gucccauugguagagagau

SEQ ID NO: 1790816 - RNA, 19 nt, Artificial Sequence
  Description of Artificial Sequence: Synthetic oligonucleotide
  Antisense strand to SEQ ID NO: 1790815
aucucucuaccaaugggac

SEQ ID NO: 1790817 - RNA, 19 nt, Artificial Sequence
  Description of Artificial Sequence: Synthetic oligonucleotide
  Sense strand starting at position 3479 of SEQ ID NO: 1563037
uugguagagagauguuuga

SEQ ID NO: 1790818 - RNA, 19 nt, Artificial Sequence
  Description of Artificial Sequence: Synthetic oligonucleotide
  Antisense strand to SEQ ID NO: 1790817
ucaaacaucucucuaccaa

SEQ ID NO: 1790819 - RNA, 19 nt, Artificial Sequence
  Description of Artificial Sequence: Synthetic oligonucleotide
  Sense strand starting at position 265 of SEQ ID NO: 1563038
cugaguccuguuugaauug

SEQ ID NO: 1790820 - RNA, 19 nt, Artificial Sequence
  Description of Artificial Sequence: Synthetic oligonucleotide
  Antisense strand to SEQ ID NO: 1790819
caauucaaacaggacucag

SEQ ID NO: 1790821 - RNA, 19 nt, Artificial Sequence
  Description of Artificial Sequence: Synthetic oligonucleotide
  Sense strand starting at position 384 of SEQ ID NO: 1563038
gagguagucucacuugcac

SEQ ID NO: 1790822 - RNA, 19 nt, Artificial Sequence
  Description of Artificial Sequence: Synthetic oligonucleotide
  Antisense strand to SEQ ID NO: 1790821
gugcaagugagacuaccuc

SEQ ID NO: 1790823 - RNA, 19 nt, Artificial Sequence
  Description of Artificial Sequence: Synthetic oligonucleotide
  Sense strand starting at position 493 of SEQ ID NO: 1563038
cuaugagguaacugugaga

SEQ ID NO: 1790824 - RNA, 19 nt, Artificial Sequence
  Description of Artificial Sequence: Synthetic oligonucleotide
  Antisense strand to SEQ ID NO: 1790823
ucucacaguuaccucauag

SEQ ID NO: 1790825 - RNA, 19 nt, Artificial Sequence
  Description of Artificial Sequence: Synthetic oligonucleotide
  Sense strand starting at position 496 of SEQ ID NO: 1563038
ugagguaacugugagaaga

SEQ ID NO: 1790826 - RNA, 19 nt, Artificial Sequence
  Description of Artificial Sequence: Synthetic oligonucleotide
  Antisense strand to SEQ ID NO: 1790825
ucuucucacaguuaccuca

SEQ ID NO: 1790827 - RNA, 19 nt, Artificial Sequence
  Description of Artificial Sequence: Synthetic oligonucleotide
  Sense strand starting at position 535 of SEQ ID NO: 1563038
guccaauggccuugaagag

SEQ ID NO: 1790828 - RNA, 19 nt, Artificial Sequence
  Description of Artificial Sequence: Synthetic oligonucleotide
  Antisense strand to SEQ ID NO: 1790827
cucuucaaggccauuggac

SEQ ID NO: 1790829 - RNA, 19 nt, Artificial Sequence
  Description of Artificial Sequence: Synthetic oligonucleotide
  Sense strand starting at position 629 of SEQ ID NO: 1563038
gccagaaugucaccauggu

SEQ ID NO: 1790830 - RNA, 19 nt, Artificial Sequence
  Description of Artificial Sequence: Synthetic oligonucleotide
  Antisense strand to SEQ ID NO: 1790829
accauggugacauucuggc

SEQ ID NO: 1790831 - RNA, 19 nt, Artificial Sequence
  Description of Artificial Sequence: Synthetic oligonucleotide
  Sense strand starting at position 664 of SEQ ID NO: 1563038
acagcuaccugguuuguga

SEQ ID NO: 1790832 - RNA, 19 nt, Artificial Sequence
  Description of Artificial Sequence: Synthetic oligonucleotide
  Antisense strand to SEQ ID NO: 1790831
ucacaaaccagguagcugu

SEQ ID NO: 1790833 - RNA, 19 nt, Artificial Sequence
  Description of Artificial Sequence: Synthetic oligonucleotide
  Sense strand starting at position 778 of SEQ ID NO: 1563038
gcuccaaucgauugauagu

SEQ ID NO: 1790834 - RNA, 19 nt, Artificial Sequence
  Description of Artificial Sequence: Synthetic oligonucleotide
  Antisense strand to SEQ ID NO: 1790833
acuaucaaucgauuggagc

SEQ ID NO: 1790835 - RNA, 19 nt, Artificial Sequence
  Description of Artificial Sequence: Synthetic oligonucleotide
  Sense strand starting at position 873 of SEQ ID NO: 1563038
agcagugaguucuugccuu

SEQ ID NO: 1790836 - RNA, 19 nt, Artificial Sequence
  Description of Artificial Sequence: Synthetic oligonucleotide
  Antisense strand to SEQ ID NO: 1790835
aaggcaagaacucacugcu

SEQ ID NO: 1790837 - RNA, 19 nt, Artificial Sequence
  Description of Artificial Sequence: Synthetic oligonucleotide
  Sense strand starting at position 879 of SEQ ID NO: 1563038
gaguucuugccuugggcca

SEQ ID NO: 1790838 - RNA, 19 nt, Artificial Sequence
  Description of Artificial Sequence: Synthetic oligonucleotide
  Antisense strand to SEQ ID NO: 1790837
uggcccaaggcaagaacuc

SEQ ID NO: 1790839 - RNA, 19 nt, Artificial Sequence
  Description of Artificial Sequence: Synthetic oligonucleotide
  Sense strand starting at position 947 of SEQ ID NO: 1563038
cucccaauauggguggaua

SEQ ID NO: 1790840 - RNA, 19 nt, Artificial Sequence
  Description of Artificial Sequence: Synthetic oligonucleotide
  Antisense strand to SEQ ID NO: 1790839
uauccacccauauugggag

SEQ ID NO: 1790841 - RNA, 19 nt, Artificial Sequence
  Description of Artificial Sequence: Synthetic oligonucleotide
  Sense strand starting at position 948 of SEQ ID NO: 1563038
ucccaauauggguggauaa

SEQ ID NO: 1790842 - RNA, 19 nt, Artificial Sequence
  Description of Artificial Sequence: Synthetic oligonucleotide
  Antisense strand to SEQ ID NO: 1790841
uuauccacccauauuggga

SEQ ID NO: 1790843 - RNA, 19 nt, Artificial Sequence
  Description of Artificial Sequence: Synthetic oligonucleotide
  Sense strand starting at position 1066 of SEQ ID NO: 1563038
uggucaucuccaggugcau

SEQ ID NO: 1790844 - RNA, 19 nt, Artificial Sequence
  Description of Artificial Sequence: Synthetic oligonucleotide
  Antisense strand to SEQ ID NO: 1790843
augcaccuggagaugacca

SEQ ID NO: 1790845 - RNA, 19 nt, Artificial Sequence
  Description of Artificial Sequence: Synthetic oligonucleotide
  Sense strand starting at position 1243 of SEQ ID NO: 1563038
caugucaggugcucuuaau

SEQ ID NO: 1790846 - RNA, 19 nt, Artificial Sequence
  Description of Artificial Sequence: Synthetic oligonucleotide
  Antisense strand to SEQ ID NO: 1790845
auuaagagcaccugacaug

SEQ ID NO: 1790847 - RNA, 19 nt, Artificial Sequence
  Description of Artificial Sequence: Synthetic oligonucleotide
  Sense strand starting at position 1254 of SEQ ID NO: 1563038
cucuuaaucuggcaaggaa

SEQ ID NO: 1790848 - RNA, 19 nt, Artificial Sequence
  Description of Artificial Sequence: Synthetic oligonucleotide
  Antisense strand to SEQ ID NO: 1790847
uuccuugccagauuaagag

SEQ ID NO: 1790849 - RNA, 19 nt, Artificial Sequence
  Description of Artificial Sequence: Synthetic oligonucleotide
  Sense strand starting at position 1269 of SEQ ID NO: 1563038
ggaaauguaaccuacguga

SEQ ID NO: 1790850 - RNA, 19 nt, Artificial Sequence
  Description of Artificial Sequence: Synthetic oligonucleotide
  Antisense strand to SEQ ID NO: 1790849
ucacguagguuacauuucc

SEQ ID NO: 1790851 - RNA, 19 nt, Artificial Sequence
  Description of Artificial Sequence: Synthetic oligonucleotide
  Sense strand starting at position 1271 of SEQ ID NO: 1563038
aaauguaaccuacgugaau

SEQ ID NO: 1790852 - RNA, 19 nt, Artificial Sequence
  Description of Artificial Sequence: Synthetic oligonucleotide
  Antisense strand to SEQ ID NO: 1790851
auucacguagguuacauuu

SEQ ID NO: 1790853 - RNA, 19 nt, Artificial Sequence
  Description of Artificial Sequence: Synthetic oligonucleotide
  Sense strand starting at position 1272 of SEQ ID NO: 1563038
aauguaaccuacgugaauc

SEQ ID NO: 1790854 - RNA, 19 nt, Artificial Sequence
  Description of Artificial Sequence: Synthetic oligonucleotide
  Antisense strand to SEQ ID NO: 1790853
gauucacguagguuacauu

SEQ ID NO: 1790855 - RNA, 19 nt, Artificial Sequence
  Description of Artificial Sequence: Synthetic oligonucleotide
  Sense strand starting at position 1540 of SEQ ID NO: 1563038
cuuccugcccucggaaaua

SEQ ID NO: 1790856 - RNA, 19 nt, Artificial Sequence
  Description of Artificial Sequence: Synthetic oligonucleotide
  Antisense strand to SEQ ID NO: 1790855
uauuuccgagggcaggaag

SEQ ID NO: 1790857 - RNA, 19 nt, Artificial Sequence
  Description of Artificial Sequence: Synthetic oligonucleotide
  Sense strand starting at position 1636 of SEQ ID NO: 1563038
gucagacgacuguguucaa

SEQ ID NO: 1790858 - RNA, 19 nt, Artificial Sequence
  Description of Artificial Sequence: Synthetic oligonucleotide
  Antisense strand to SEQ ID NO: 1790857
uugaacacagucgucugac

SEQ ID NO: 1790859 - RNA, 19 nt, Artificial Sequence
  Description of Artificial Sequence: Synthetic oligonucleotide
  Sense strand starting at position 1639 of SEQ ID NO: 1563038
agacgacuguguucaagca

SEQ ID NO: 1790860 - RNA, 19 nt, Artificial Sequence
  Description of Artificial Sequence: Synthetic oligonucleotide
  Antisense strand to SEQ ID NO: 1790859
ugcuugaacacagucgucu

SEQ ID NO: 1790861 - RNA, 19 nt, Artificial Sequence
  Description of Artificial Sequence: Synthetic oligonucleotide
  Sense strand starting at position 1722 of SEQ ID NO: 1563038
gcggcuugcgugaagaaua

SEQ ID NO: 1790862 - RNA, 19 nt, Artificial Sequence
  Description of Artificial Sequence: Synthetic oligonucleotide
  Antisense strand to SEQ ID NO: 1790861
uauucuucacgcaagccgc

SEQ ID NO: 1790863 - RNA, 19 nt, Artificial Sequence
  Description of Artificial Sequence: Synthetic oligonucleotide
  Sense strand starting at position 1727 of SEQ ID NO: 1563038
uugcgugaagaauacaauu

SEQ ID NO: 1790864 - RNA, 19 nt, Artificial Sequence
  Description of Artificial Sequence: Synthetic oligonucleotide
  Antisense strand to SEQ ID NO: 1790863
aauuguauucuucacgcaa

SEQ ID NO: 1790865 - RNA, 19 nt, Artificial Sequence
  Description of Artificial Sequence: Synthetic oligonucleotide
  Sense strand starting at position 2104 of SEQ ID NO: 1563038
ucucucgaccaaugggaaa

SEQ ID NO: 1790866 - RNA, 19 nt, Artificial Sequence
  Description of Artificial Sequence: Synthetic oligonucleotide
  Antisense strand to SEQ ID NO: 1790865
uuucccauuggucgagaga

SEQ ID NO: 1790867 - RNA, 19 nt, Artificial Sequence
  Description of Artificial Sequence: Synthetic oligonucleotide
  Sense strand starting at position 2529 of SEQ ID NO: 1563038
guccuaucccuggagucga

SEQ ID NO: 1790868 - RNA, 19 nt, Artificial Sequence
  Description of Artificial Sequence: Synthetic oligonucleotide
  Antisense strand to SEQ ID NO: 1790867
ucgacuccagggauaggac

SEQ ID NO: 1790869 - RNA, 19 nt, Artificial Sequence
  Description of Artificial Sequence: Synthetic oligonucleotide
  Sense strand starting at position 3024 of SEQ ID NO: 1563038
gagggagacugcucgguuu

SEQ ID NO: 1790870 - RNA, 19 nt, Artificial Sequence
  Description of Artificial Sequence: Synthetic oligonucleotide
  Antisense strand to SEQ ID NO: 1790869
aaaccgagcagucucccuc

SEQ ID NO: 1790871 - RNA, 19 nt, Artificial Sequence
  Description of Artificial Sequence: Synthetic oligonucleotide
  Sense strand starting at position 3068 of SEQ ID NO: 1563038
gccugagagcuccagccua

SEQ ID NO: 1790872 - RNA, 19 nt, Artificial Sequence
  Description of Artificial Sequence: Synthetic oligonucleotide
  Antisense strand to SEQ ID NO: 1790871
uaggcuggagcucucaggc

SEQ ID NO: 1790873 - RNA, 19 nt, Artificial Sequence
  Description of Artificial Sequence: Synthetic oligonucleotide
  Sense strand starting at position 3103 of SEQ ID NO: 1563038
auuaaauauuggcugcuua

SEQ ID NO: 1790874 - RNA, 19 nt, Artificial Sequence
  Description of Artificial Sequence: Synthetic oligonucleotide
  Antisense strand to SEQ ID NO: 1790873
uaagcagccaauauuuaau

SEQ ID NO: 1790875 - RNA, 19 nt, Artificial Sequence
  Description of Artificial Sequence: Synthetic oligonucleotide
  Sense strand starting at position 3130 of SEQ ID NO: 1563038
caccguuucuuagcuaugu

SEQ ID NO: 1790876 - RNA, 19 nt, Artificial Sequence
  Description of Artificial Sequence: Synthetic oligonucleotide
  Antisense strand to SEQ ID NO: 1790875
acauagcuaagaaacggug

SEQ ID NO: 1790877 - RNA, 19 nt, Artificial Sequence
  Description of Artificial Sequence: Synthetic oligonucleotide
  Sense strand starting at position 3132 of SEQ ID NO: 1563038
ccguuucuuagcuaugugu

SEQ ID NO: 1790878 - RNA, 19 nt, Artificial Sequence
  Description of Artificial Sequence: Synthetic oligonucleotide
  Antisense strand to SEQ ID NO: 1790877
acacauagcuaagaaacgg

SEQ ID NO: 1790879 - RNA, 19 nt, Artificial Sequence
  Description of Artificial Sequence: Synthetic oligonucleotide
  Sense strand starting at position 3134 of SEQ ID NO: 1563038
guuucuuagcuauguguaa

SEQ ID NO: 1790880 - RNA, 19 nt, Artificial Sequence
  Description of Artificial Sequence: Synthetic oligonucleotide
  Antisense strand to SEQ ID NO: 1790879
uuacacauagcuaagaaac

SEQ ID NO: 1790881 - RNA, 19 nt, Artificial Sequence
  Description of Artificial Sequence: Synthetic oligonucleotide
  Sense strand starting at position 3135 of SEQ ID NO: 1563038
uuucuuagcuauguguaau

SEQ ID NO: 1790882 - RNA, 19 nt, Artificial Sequence
  Description of Artificial Sequence: Synthetic oligonucleotide
  Antisense strand to SEQ ID NO: 1790881
auuacacauagcuaagaaa

SEQ ID NO: 1790883 - RNA, 19 nt, Artificial Sequence
  Description of Artificial Sequence: Synthetic oligonucleotide
  Sense strand starting at position 3138 of SEQ ID NO: 1563038
cuuagcuauguguaaugua

SEQ ID NO: 1790884 - RNA, 19 nt, Artificial Sequence
  Description of Artificial Sequence: Synthetic oligonucleotide
  Antisense strand to SEQ ID NO: 1790883
uacauuacacauagcuaag

SEQ ID NO: 1790885 - RNA, 19 nt, Artificial Sequence
  Description of Artificial Sequence: Synthetic oligonucleotide
  Sense strand starting at position 3277 of SEQ ID NO: 1563038
gucuaauaaccucagguga

SEQ ID NO: 1790886 - RNA, 19 nt, Artificial Sequence
  Description of Artificial Sequence: Synthetic oligonucleotide
  Antisense strand to SEQ ID NO: 1790885
ucaccugagguuauuagac

SEQ ID NO: 1790887 - RNA, 19 nt, Artificial Sequence
  Description of Artificial Sequence: Synthetic oligonucleotide
  Sense strand starting at position 3484 of SEQ ID NO: 1563038
gcagguguuaccuaucuug

SEQ ID NO: 1790888 - RNA, 19 nt, Artificial Sequence
  Description of Artificial Sequence: Synthetic oligonucleotide
  Antisense strand to SEQ ID NO: 1790887
caagauagguaacaccugc

SEQ ID NO: 1790889 - RNA, 19 nt, Artificial Sequence
  Description of Artificial Sequence: Synthetic oligonucleotide
  Sense strand starting at position 3487 of SEQ ID NO: 1563038
gguguuaccuaucuuguac

SEQ ID NO: 1790890 - RNA, 19 nt, Artificial Sequence
  Description of Artificial Sequence: Synthetic oligonucleotide
  Antisense strand to SEQ ID NO: 1790889
guacaagauagguaacacc

SEQ ID NO: 1790891 - RNA, 19 nt, Artificial Sequence
  Description of Artificial Sequence: Synthetic oligonucleotide
  Sense strand starting at position 3599 of SEQ ID NO: 1563038
gcaggugauccaggccuua

SEQ ID NO: 1790892 - RNA, 19 nt, Artificial Sequence
  Description of Artificial Sequence: Synthetic oligonucleotide
  Antisense strand to SEQ ID NO: 1790891
uaaggccuggaucaccugc

SEQ ID NO: 1790893 - RNA, 19 nt, Artificial Sequence
  Description of Artificial Sequence: Synthetic oligonucleotide
  Sense strand starting at position 3604 of SEQ ID NO: 1563038
ugauccaggccuuagauca

SEQ ID NO: 1790894 - RNA, 19 nt, Artificial Sequence
  Description of Artificial Sequence: Synthetic oligonucleotide
  Antisense strand to SEQ ID NO: 1790893
ugaucuaaggccuggauca

SEQ ID NO: 1790895 - RNA, 19 nt, Artificial Sequence
  Description of Artificial Sequence: Synthetic oligonucleotide
  Sense strand starting at position 3642 of SEQ ID NO: 1563038
gcgugucugggaaggcauu

SEQ ID NO: 1790896 - RNA, 19 nt, Artificial Sequence
  Description of Artificial Sequence: Synthetic oligonucleotide
  Antisense strand to SEQ ID NO: 1790895
aaugccuucccagacacgc

SEQ ID NO: 1790897 - RNA, 19 nt, Artificial Sequence
  Description of Artificial Sequence: Synthetic oligonucleotide
  Sense strand starting at position 3898 of SEQ ID NO: 1563038
aagguuccuccugggagaa

SEQ ID NO: 1790898 - RNA, 19 nt, Artificial Sequence
  Description of Artificial Sequence: Synthetic oligonucleotide
  Antisense strand to SEQ ID NO: 1790897
uucucccaggaggaaccuu

SEQ ID NO: 1790899 - RNA, 19 nt, Artificial Sequence
  Description of Artificial Sequence: Synthetic oligonucleotide
  Sense strand starting at position 186 of SEQ ID NO: 1563039
augcaucuggagugucaau

SEQ ID NO: 1790900 - RNA, 19 nt, Artificial Sequence
  Description of Artificial Sequence: Synthetic oligonucleotide
  Antisense strand to SEQ ID NO: 1790899
auugacacuccagaugcau

SEQ ID NO: 1790901 - RNA, 19 nt, Artificial Sequence
  Description of Artificial Sequence: Synthetic oligonucleotide
  Sense strand starting at position 195 of SEQ ID NO: 1563039
gagugucaaugacaagcau

SEQ ID NO: 1790902 - RNA, 19 nt, Artificial Sequence
  Description of Artificial Sequence: Synthetic oligonucleotide
  Antisense strand to SEQ ID NO: 1790901
augcuugucauugacacuc

SEQ ID NO: 1790903 - RNA, 19 nt, Artificial Sequence
  Description of Artificial Sequence: Synthetic oligonucleotide
  Sense strand starting at position 213 of SEQ ID NO: 1563039
uggcccuacuucgagaagu

SEQ ID NO: 1790904 - RNA, 19 nt, Artificial Sequence
  Description of Artificial Sequence: Synthetic oligonucleotide
  Antisense strand to SEQ ID NO: 1790903
acuucucgaaguagggcca

SEQ ID NO: 1790905 - RNA, 19 nt, Artificial Sequence
  Description of Artificial Sequence: Synthetic oligonucleotide
  Sense strand starting at position 215 of SEQ ID NO: 1563039
gcccuacuucgagaagucu

SEQ ID NO: 1790906 - RNA, 19 nt, Artificial Sequence
  Description of Artificial Sequence: Synthetic oligonucleotide
  Antisense strand to SEQ ID NO: 1790905
agacuucucgaaguagggc

SEQ ID NO: 1790907 - RNA, 19 nt, Artificial Sequence
  Description of Artificial Sequence: Synthetic oligonucleotide
  Sense strand starting at position 224 of SEQ ID NO: 1563039
cgagaagucuucccagccu

SEQ ID NO: 1790908 - RNA, 19 nt, Artificial Sequence
  Description of Artificial Sequence: Synthetic oligonucleotide
  Antisense strand to SEQ ID NO: 1790907
aggcugggaagacuucucg

SEQ ID NO: 1790909 - RNA, 19 nt, Artificial Sequence
  Description of Artificial Sequence: Synthetic oligonucleotide
  Sense strand starting at position 251 of SEQ ID NO: 1563039
cgggccauuucucuccaga

SEQ ID NO: 1790910 - RNA, 19 nt, Artificial Sequence
  Description of Artificial Sequence: Synthetic oligonucleotide
  Antisense strand to SEQ ID NO: 1790909
ucuggagagaaauggcccg

SEQ ID NO: 1790911 - RNA, 19 nt, Artificial Sequence
  Description of Artificial Sequence: Synthetic oligonucleotide
  Sense strand starting at position 389 of SEQ ID NO: 1563039
ggaucaaguucccaggaca

SEQ ID NO: 1790912 - RNA, 19 nt, Artificial Sequence
  Description of Artificial Sequence: Synthetic oligonucleotide
  Antisense strand to SEQ ID NO: 1790911
uguccugggaacuugaucc

SEQ ID NO: 1790913 - RNA, 19 nt, Artificial Sequence
  Description of Artificial Sequence: Synthetic oligonucleotide
  Sense strand starting at position 674 of SEQ ID NO: 1563039
cuaggauccugugggaaca

SEQ ID NO: 1790914 - RNA, 19 nt, Artificial Sequence
  Description of Artificial Sequence: Synthetic oligonucleotide
  Antisense strand to SEQ ID NO: 1790913
uguucccacaggauccuag

SEQ ID NO: 1790915 - RNA, 19 nt, Artificial Sequence
  Description of Artificial Sequence: Synthetic oligonucleotide
  Sense strand starting at position 697 of SEQ ID NO: 1563039
cucugcuguguccaucuaa

SEQ ID NO: 1790916 - RNA, 19 nt, Artificial Sequence
  Description of Artificial Sequence: Synthetic oligonucleotide
  Antisense strand to SEQ ID NO: 1790915
uuagauggacacagcagag

SEQ ID NO: 1790917 - RNA, 19 nt, Artificial Sequence
  Description of Artificial Sequence: Synthetic oligonucleotide
  Sense strand starting at position 777 of SEQ ID NO: 1563039
cagggacacuccuaagaga

SEQ ID NO: 1790918 - RNA, 19 nt, Artificial Sequence
  Description of Artificial Sequence: Synthetic oligonucleotide
  Antisense strand to SEQ ID NO: 1790917
ucucuuaggagugucccug

SEQ ID NO: 1790919 - RNA, 19 nt, Artificial Sequence
  Description of Artificial Sequence: Synthetic oligonucleotide
  Sense strand starting at position 863 of SEQ ID NO: 1563039
gccaccuuagccugaguuu

SEQ ID NO: 1790920 - RNA, 19 nt, Artificial Sequence
  Description of Artificial Sequence: Synthetic oligonucleotide
  Antisense strand to SEQ ID NO: 1790919
aaacucaggcuaagguggc

SEQ ID NO: 1790921 - RNA, 19 nt, Artificial Sequence
  Description of Artificial Sequence: Synthetic oligonucleotide
  Sense strand starting at position 954 of SEQ ID NO: 1563039
gagaaagccuuccaaagag

SEQ ID NO: 1790922 - RNA, 19 nt, Artificial Sequence
  Description of Artificial Sequence: Synthetic oligonucleotide
  Antisense strand to SEQ ID NO: 1790921
cucuuuggaaggcuuucuc

SEQ ID NO: 1790923 - RNA, 19 nt, Artificial Sequence
  Description of Artificial Sequence: Synthetic oligonucleotide
  Sense strand starting at position 987 of SEQ ID NO: 1563039
ccuuauagcugccgucaca

SEQ ID NO: 1790924 - RNA, 19 nt, Artificial Sequence
  Description of Artificial Sequence: Synthetic oligonucleotide
  Antisense strand to SEQ ID NO: 1790923
ugugacggcagcuauaagg

SEQ ID NO: 1790925 - RNA, 19 nt, Artificial Sequence
  Description of Artificial Sequence: Synthetic oligonucleotide
  Sense strand starting at position 1001 of SEQ ID NO: 1563039
ucacaucugccucauggaa

SEQ ID NO: 1790926 - RNA, 19 nt, Artificial Sequence
  Description of Artificial Sequence: Synthetic oligonucleotide
  Antisense strand to SEQ ID NO: 1790925
uuccaugaggcagauguga

SEQ ID NO: 1790927 - RNA, 19 nt, Artificial Sequence
  Description of Artificial Sequence: Synthetic oligonucleotide
  Sense strand starting at position 1003 of SEQ ID NO: 1563039
acaucugccucauggaaga

SEQ ID NO: 1790928 - RNA, 19 nt, Artificial Sequence
  Description of Artificial Sequence: Synthetic oligonucleotide
  Antisense strand to SEQ ID NO: 1790927
ucuuccaugaggcagaugu

SEQ ID NO: 1790929 - RNA, 19 nt, Artificial Sequence
  Description of Artificial Sequence: Synthetic oligonucleotide
  Sense strand starting at position 1109 of SEQ ID NO: 1563039
augugacauuccugaagag

SEQ ID NO: 1790930 - RNA, 19 nt, Artificial Sequence
  Description of Artificial Sequence: Synthetic oligonucleotide
  Antisense strand to SEQ ID NO: 1790929
cucuucaggaaugucacau

SEQ ID NO: 1790931 - RNA, 19 nt, Artificial Sequence
  Description of Artificial Sequence: Synthetic oligonucleotide
  Sense strand starting at position 1148 of SEQ ID NO: 1563039
ggacuuguccaagggcaga

SEQ ID NO: 1790932 - RNA, 19 nt, Artificial Sequence
  Description of Artificial Sequence: Synthetic oligonucleotide
  Antisense strand to SEQ ID NO: 1790931
ucugcccuuggacaagucc

SEQ ID NO: 1790933 - RNA, 19 nt, Artificial Sequence
  Description of Artificial Sequence: Synthetic oligonucleotide
  Sense strand starting at position 2163 of SEQ ID NO: 1563039
gcgucugagcgcuuccuga

SEQ ID NO: 1790934 - RNA, 19 nt, Artificial Sequence
  Description of Artificial Sequence: Synthetic oligonucleotide
  Antisense strand to SEQ ID NO: 1790933
ucaggaagcgcucagacgc

SEQ ID NO: 1790935 - RNA, 19 nt, Artificial Sequence
  Description of Artificial Sequence: Synthetic oligonucleotide
  Sense strand starting at position 2165 of SEQ ID NO: 1563039
gucugagcgcuuccugauc

SEQ ID NO: 1790936 - RNA, 19 nt, Artificial Sequence
  Description of Artificial Sequence: Synthetic oligonucleotide
  Antisense strand to SEQ ID NO: 1790935
gaucaggaagcgcucagac

SEQ ID NO: 1790937 - RNA, 19 nt, Artificial Sequence
  Description of Artificial Sequence: Synthetic oligonucleotide
  Sense strand starting at position 2450 of SEQ ID NO: 1563039
gcucuuuccucccugaugu

SEQ ID NO: 1790938 - RNA, 19 nt, Artificial Sequence
  Description of Artificial Sequence: Synthetic oligonucleotide
  Antisense strand to SEQ ID NO: 1790937
acaucagggaggaaagagc

SEQ ID NO: 1790939 - RNA, 19 nt, Artificial Sequence
  Description of Artificial Sequence: Synthetic oligonucleotide
  Sense strand starting at position 2460 of SEQ ID NO: 1563039
cccugaugucccugccauu

SEQ ID NO: 1790940 - RNA, 19 nt, Artificial Sequence
  Description of Artificial Sequence: Synthetic oligonucleotide
  Antisense strand to SEQ ID NO: 1790939
aauggcagggacaucaggg

SEQ ID NO: 1790941 - RNA, 19 nt, Artificial Sequence
  Description of Artificial Sequence: Synthetic oligonucleotide
  Sense strand starting at position 2725 of SEQ ID NO: 1563039
gccuauguggcagaaaggu

SEQ ID NO: 1790942 - RNA, 19 nt, Artificial Sequence
  Description of Artificial Sequence: Synthetic oligonucleotide
  Antisense strand to SEQ ID NO: 1790941
accuuucugccacauaggc

SEQ ID NO: 1790943 - RNA, 19 nt, Artificial Sequence
  Description of Artificial Sequence: Synthetic oligonucleotide
  Sense strand starting at position 2825 of SEQ ID NO: 1563039
ggauaaugauaauguguaa

SEQ ID NO: 1790944 - RNA, 19 nt, Artificial Sequence
  Description of Artificial Sequence: Synthetic oligonucleotide
  Antisense strand to SEQ ID NO: 1790943
uuacacauuaucauuaucc

SEQ ID NO: 1790945 - RNA, 19 nt, Artificial Sequence
  Description of Artificial Sequence: Synthetic oligonucleotide
  Sense strand starting at position 2829 of SEQ ID NO: 1563039
aaugauaauguguaaagca

SEQ ID NO: 1790946 - RNA, 19 nt, Artificial Sequence
  Description of Artificial Sequence: Synthetic oligonucleotide
  Antisense strand to SEQ ID NO: 1790945
ugcuuuacacauuaucauu

SEQ ID NO: 1790947 - RNA, 19 nt, Artificial Sequence
  Description of Artificial Sequence: Synthetic oligonucleotide
  Sense strand starting at position 2906 of SEQ ID NO: 1563039
ugagacuuggagcaguuau

SEQ ID NO: 1790948 - RNA, 19 nt, Artificial Sequence
  Description of Artificial Sequence: Synthetic oligonucleotide
  Antisense strand to SEQ ID NO: 1790947
auaacugcuccaagucuca

SEQ ID NO: 1790949 - RNA, 19 nt, Artificial Sequence
  Description of Artificial Sequence: Synthetic oligonucleotide
  Sense strand starting at position 3115 of SEQ ID NO: 1563039
uugcuaucuuaucuguguu

SEQ ID NO: 1790950 - RNA, 19 nt, Artificial Sequence
  Description of Artificial Sequence: Synthetic oligonucleotide
  Antisense strand to SEQ ID NO: 1790949
aacacagauaagauagcaa

SEQ ID NO: 1790951 - RNA, 19 nt, Artificial Sequence
  Description of Artificial Sequence: Synthetic oligonucleotide
  Sense strand starting at position 3210 of SEQ ID NO: 1563039
gccagacaugguugucucu

SEQ ID NO: 1790952 - RNA, 19 nt, Artificial Sequence
  Description of Artificial Sequence: Synthetic oligonucleotide
  Antisense strand to SEQ ID NO: 1790951
agagacaaccaugucuggc

SEQ ID NO: 1790953 - RNA, 19 nt, Artificial Sequence
  Description of Artificial Sequence: Synthetic oligonucleotide
  Sense strand starting at position 3433 of SEQ ID NO: 1563039
cuggacaugaguugaccaa

SEQ ID NO: 1790954 - RNA, 19 nt, Artificial Sequence
  Description of Artificial Sequence: Synthetic oligonucleotide
  Antisense strand to SEQ ID NO: 1790953
uuggucaacucauguccag

SEQ ID NO: 1790955 - RNA, 19 nt, Artificial Sequence
  Description of Artificial Sequence: Synthetic oligonucleotide
  Sense strand starting at position 3489 of SEQ ID NO: 1563039
gucagauggugguuugcau

SEQ ID NO: 1790956 - RNA, 19 nt, Artificial Sequence
  Description of Artificial Sequence: Synthetic oligonucleotide
  Antisense strand to SEQ ID NO: 1790955
augcaaaccaccaucugac

SEQ ID NO: 1790957 - RNA, 19 nt, Artificial Sequence
  Description of Artificial Sequence: Synthetic oligonucleotide
  Sense strand starting at position 3503 of SEQ ID NO: 1563039
ugcauccuguucugucaua

SEQ ID NO: 1790958 - RNA, 19 nt, Artificial Sequence
  Description of Artificial Sequence: Synthetic oligonucleotide
  Antisense strand to SEQ ID NO: 1790957
uaugacagaacaggaugca

SEQ ID NO: 1790959 - RNA, 19 nt, Artificial Sequence
  Description of Artificial Sequence: Synthetic oligonucleotide
  Sense strand starting at position 3596 of SEQ ID NO: 1563039
ucuucuuugucaccacuga

SEQ ID NO: 1790960 - RNA, 19 nt, Artificial Sequence
  Description of Artificial Sequence: Synthetic oligonucleotide
  Antisense strand to SEQ ID NO: 1790959
ucaguggugacaaagaaga

SEQ ID NO: 1790961 - RNA, 19 nt, Artificial Sequence
  Description of Artificial Sequence: Synthetic oligonucleotide
  Sense strand starting at position 3657 of SEQ ID NO: 1563039
ggcagaugaaaugggucua

SEQ ID NO: 1790962 - RNA, 19 nt, Artificial Sequence
  Description of Artificial Sequence: Synthetic oligonucleotide
  Antisense strand to SEQ ID NO: 1790961
uagacccauuucaucugcc

SEQ ID NO: 1790963 - RNA, 19 nt, Artificial Sequence
  Description of Artificial Sequence: Synthetic oligonucleotide
  Sense strand starting at position 36 of SEQ ID NO: 1563040
gggaacuccuuuccuagau

SEQ ID NO: 1790964 - RNA, 19 nt, Artificial Sequence
  Description of Artificial Sequence: Synthetic oligonucleotide
  Antisense strand to SEQ ID NO: 1790963
aucuaggaaaggaguuccc

SEQ ID NO: 1790965 - RNA, 19 nt, Artificial Sequence
  Description of Artificial Sequence: Synthetic oligonucleotide
  Sense strand starting at position 78 of SEQ ID NO: 1563040
guccuaaucccaggugacu

SEQ ID NO: 1790966 - RNA, 19 nt, Artificial Sequence
  Description of Artificial Sequence: Synthetic oligonucleotide
  Antisense strand to SEQ ID NO: 1790965
agucaccugggauuaggac

SEQ ID NO: 1790967 - RNA, 19 nt, Artificial Sequence
  Description of Artificial Sequence: Synthetic oligonucleotide
  Sense strand starting at position 87 of SEQ ID NO: 1563040
ccaggugacugcuccucaa

SEQ ID NO: 1790968 - RNA, 19 nt, Artificial Sequence
  Description of Artificial Sequence: Synthetic oligonucleotide
  Antisense strand to SEQ ID NO: 1790967
uugaggagcagucaccugg

SEQ ID NO: 1790969 - RNA, 19 nt, Artificial Sequence
  Description of Artificial Sequence: Synthetic oligonucleotide
  Sense strand starting at position 336 of SEQ ID NO: 1563040
uggugaauaagaggcuuua

SEQ ID NO: 1790970 - RNA, 19 nt, Artificial Sequence
  Description of Artificial Sequence: Synthetic oligonucleotide
  Antisense strand to SEQ ID NO: 1790969
uaaagccucuuauucacca

SEQ ID NO: 1790971 - RNA, 19 nt, Artificial Sequence
  Description of Artificial Sequence: Synthetic oligonucleotide
  Sense strand starting at position 444 of SEQ ID NO: 1563040
aaucucaauuggucagaga

SEQ ID NO: 1790972 - RNA, 19 nt, Artificial Sequence
  Description of Artificial Sequence: Synthetic oligonucleotide
  Antisense strand to SEQ ID NO: 1790971
ucucugaccaauugagauu

SEQ ID NO: 1790973 - RNA, 19 nt, Artificial Sequence
  Description of Artificial Sequence: Synthetic oligonucleotide
  Sense strand starting at position 470 of SEQ ID NO: 1563040
aaaggauauucucuggagu

SEQ ID NO: 1790974 - RNA, 19 nt, Artificial Sequence
  Description of Artificial Sequence: Synthetic oligonucleotide
  Antisense strand to SEQ ID NO: 1790973
acuccagagaauauccuuu

SEQ ID NO: 1790975 - RNA, 19 nt, Artificial Sequence
  Description of Artificial Sequence: Synthetic oligonucleotide
  Sense strand starting at position 471 of SEQ ID NO: 1563040
aaggauauucucuggagua

SEQ ID NO: 1790976 - RNA, 19 nt, Artificial Sequence
  Description of Artificial Sequence: Synthetic oligonucleotide
  Antisense strand to SEQ ID NO: 1790975
uacuccagagaauauccuu

SEQ ID NO: 1790977 - RNA, 19 nt, Artificial Sequence
  Description of Artificial Sequence: Synthetic oligonucleotide
  Sense strand starting at position 509 of SEQ ID NO: 1563040
ggagcuccuacuggugauu

SEQ ID NO: 1790978 - RNA, 19 nt, Artificial Sequence
  Description of Artificial Sequence: Synthetic oligonucleotide
  Antisense strand to SEQ ID NO: 1790977
aaucaccaguaggagcucc

SEQ ID NO: 1790979 - RNA, 19 nt, Artificial Sequence
  Description of Artificial Sequence: Synthetic oligonucleotide
  Sense strand starting at position 549 of SEQ ID NO: 1563040
gagggagucuugucaguuc

SEQ ID NO: 1790980 - RNA, 19 nt, Artificial Sequence
  Description of Artificial Sequence: Synthetic oligonucleotide
  Antisense strand to SEQ ID NO: 1790979
gaacugacaagacucccuc

SEQ ID NO: 1790981 - RNA, 19 nt, Artificial Sequence
  Description of Artificial Sequence: Synthetic oligonucleotide
  Sense strand starting at position 615 of SEQ ID NO: 1563040
ggguauggaguccaucuuu

SEQ ID NO: 1790982 - RNA, 19 nt, Artificial Sequence
  Description of Artificial Sequence: Synthetic oligonucleotide
  Antisense strand to SEQ ID NO: 1790981
aaagauggacuccauaccc

SEQ ID NO: 1790983 - RNA, 19 nt, Artificial Sequence
  Description of Artificial Sequence: Synthetic oligonucleotide
  Sense strand starting at position 620 of SEQ ID NO: 1563040
uggaguccaucuuuccuaa

SEQ ID NO: 1790984 - RNA, 19 nt, Artificial Sequence
  Description of Artificial Sequence: Synthetic oligonucleotide
  Antisense strand to SEQ ID NO: 1790983
uuaggaaagauggacucca

SEQ ID NO: 1790985 - RNA, 19 nt, Artificial Sequence
  Description of Artificial Sequence: Synthetic oligonucleotide
  Sense strand starting at position 772 of SEQ ID NO: 1563040
gggugcucucgggauagga

SEQ ID NO: 1790986 - RNA, 19 nt, Artificial Sequence
  Description of Artificial Sequence: Synthetic oligonucleotide
  Antisense strand to SEQ ID NO: 1790985
uccuaucccgagagcaccc

SEQ ID NO: 1790987 - RNA, 19 nt, Artificial Sequence
  Description of Artificial Sequence: Synthetic oligonucleotide
  Sense strand starting at position 1115 of SEQ ID NO: 1563040
ggaggugaccaaugucugu

SEQ ID NO: 1790988 - RNA, 19 nt, Artificial Sequence
  Description of Artificial Sequence: Synthetic oligonucleotide
  Antisense strand to SEQ ID NO: 1790987
acagacauuggucaccucc

SEQ ID NO: 1790989 - RNA, 19 nt, Artificial Sequence
  Description of Artificial Sequence: Synthetic oligonucleotide
  Sense strand starting at position 1145 of SEQ ID NO: 1563040
ucuguaugccucgaggaaa

SEQ ID NO: 1790990 - RNA, 19 nt, Artificial Sequence
  Description of Artificial Sequence: Synthetic oligonucleotide
  Antisense strand to SEQ ID NO: 1790989
uuuccucgaggcauacaga

SEQ ID NO: 1790991 - RNA, 19 nt, Artificial Sequence
  Description of Artificial Sequence: Synthetic oligonucleotide
  Sense strand starting at position 1290 of SEQ ID NO: 1563040
gauggagaaugagugucua

SEQ ID NO: 1790992 - RNA, 19 nt, Artificial Sequence
  Description of Artificial Sequence: Synthetic oligonucleotide
  Antisense strand to SEQ ID NO: 1790991
uagacacucauucuccauc

SEQ ID NO: 1790993 - RNA, 19 nt, Artificial Sequence
  Description of Artificial Sequence: Synthetic oligonucleotide
  Sense strand starting at position 1294 of SEQ ID NO: 1563040
gagaaugagugucuaugga

SEQ ID NO: 1790994 - RNA, 19 nt, Artificial Sequence
  Description of Artificial Sequence: Synthetic oligonucleotide
  Antisense strand to SEQ ID NO: 1790993
uccauagacacucauucuc

SEQ ID NO: 1790995 - RNA, 19 nt, Artificial Sequence
  Description of Artificial Sequence: Synthetic oligonucleotide
  Sense strand starting at position 2270 of SEQ ID NO: 1563040
cagggcuuccuccauggau

SEQ ID NO: 1790996 - RNA, 19 nt, Artificial Sequence
  Description of Artificial Sequence: Synthetic oligonucleotide
  Antisense strand to SEQ ID NO: 1790995
auccauggaggaagcccug

SEQ ID NO: 1790997 - RNA, 19 nt, Artificial Sequence
  Description of Artificial Sequence: Synthetic oligonucleotide
  Sense strand starting at position 2272 of SEQ ID NO: 1563040
gggcuuccuccauggauuc

SEQ ID NO: 1790998 - RNA, 19 nt, Artificial Sequence
  Description of Artificial Sequence: Synthetic oligonucleotide
  Antisense strand to SEQ ID NO: 1790997
gaauccauggaggaagccc

SEQ ID NO: 1790999 - RNA, 19 nt, Artificial Sequence
  Description of Artificial Sequence: Synthetic oligonucleotide
  Sense strand starting at position 2472 of SEQ ID NO: 1563040
uuuaaauuaccucgugaga

SEQ ID NO: 1791000 - RNA, 19 nt, Artificial Sequence
  Description of Artificial Sequence: Synthetic oligonucleotide
  Antisense strand to SEQ ID NO: 1790999
ucucacgagguaauuuaaa

SEQ ID NO: 1791001 - RNA, 19 nt, Artificial Sequence
  Description of Artificial Sequence: Synthetic oligonucleotide
  Sense strand starting at position 2475 of SEQ ID NO: 1563040
aaauuaccucgugagaccu

SEQ ID NO: 1791002 - RNA, 19 nt, Artificial Sequence
  Description of Artificial Sequence: Synthetic oligonucleotide
  Antisense strand to SEQ ID NO: 1791001
aggucucacgagguaauuu

SEQ ID NO: 1791003 - RNA, 19 nt, Artificial Sequence
  Description of Artificial Sequence: Synthetic oligonucleotide
  Sense strand starting at position 2609 of SEQ ID NO: 1563040
guuuaaaguguacaaugau

SEQ ID NO: 1791004 - RNA, 19 nt, Artificial Sequence
  Description of Artificial Sequence: Synthetic oligonucleotide
  Antisense strand to SEQ ID NO: 1791003
aucauuguacacuuuaaac

SEQ ID NO: 1791005 - RNA, 19 nt, Artificial Sequence
  Description of Artificial Sequence: Synthetic oligonucleotide
  Sense strand starting at position 2842 of SEQ ID NO: 1563040
cuggauucuuucucuugaa

SEQ ID NO: 1791006 - RNA, 19 nt, Artificial Sequence
  Description of Artificial Sequence: Synthetic oligonucleotide
  Antisense strand to SEQ ID NO: 1791005
uucaagagaaagaauccag

SEQ ID NO: 1791007 - RNA, 19 nt, Artificial Sequence
  Description of Artificial Sequence: Synthetic oligonucleotide
  Sense strand starting at position 2843 of SEQ ID NO: 1563040
uggauucuuucucuugaac

SEQ ID NO: 1791008 - RNA, 19 nt, Artificial Sequence
  Description of Artificial Sequence: Synthetic oligonucleotide
  Antisense strand to SEQ ID NO: 1791007
guucaagagaaagaaucca

SEQ ID NO: 1791009 - RNA, 19 nt, Artificial Sequence
  Description of Artificial Sequence: Synthetic oligonucleotide
  Sense strand starting at position 3002 of SEQ ID NO: 1563040
cugggacuauaccagauuu

SEQ ID NO: 1791010 - RNA, 19 nt, Artificial Sequence
  Description of Artificial Sequence: Synthetic oligonucleotide
  Antisense strand to SEQ ID NO: 1791009
aaaucugguauagucccag

SEQ ID NO: 1791011 - RNA, 19 nt, Artificial Sequence
  Description of Artificial Sequence: Synthetic oligonucleotide
  Sense strand starting at position 3043 of SEQ ID NO: 1563040
ggucauucgcguguuucua

SEQ ID NO: 1791012 - RNA, 19 nt, Artificial Sequence
  Description of Artificial Sequence: Synthetic oligonucleotide
  Antisense strand to SEQ ID NO: 1791011
uagaaacacgcgaaugacc

SEQ ID NO: 1791013 - RNA, 19 nt, Artificial Sequence
  Description of Artificial Sequence: Synthetic oligonucleotide
  Sense strand starting at position 3133 of SEQ ID NO: 1563040
acauuucucuuggauagau

SEQ ID NO: 1791014 - RNA, 19 nt, Artificial Sequence
  Description of Artificial Sequence: Synthetic oligonucleotide
  Antisense strand to SEQ ID NO: 1791013
aucuauccaagagaaaugu

SEQ ID NO: 1791015 - RNA, 19 nt, Artificial Sequence
  Description of Artificial Sequence: Synthetic oligonucleotide
  Sense strand starting at position 3218 of SEQ ID NO: 1563040
uuccaaauugguugcaaca

SEQ ID NO: 1791016 - RNA, 19 nt, Artificial Sequence
  Description of Artificial Sequence: Synthetic oligonucleotide
  Antisense strand to SEQ ID NO: 1791015
uguugcaaccaauuuggaa

SEQ ID NO: 1791017 - RNA, 19 nt, Artificial Sequence
  Description of Artificial Sequence: Synthetic oligonucleotide
  Sense strand starting at position 3242 of SEQ ID NO: 1563040
uguaaucucuuagcaauga

SEQ ID NO: 1791018 - RNA, 19 nt, Artificial Sequence
  Description of Artificial Sequence: Synthetic oligonucleotide
  Antisense strand to SEQ ID NO: 1791017
ucauugcuaagagauuaca

SEQ ID NO: 1791019 - RNA, 19 nt, Artificial Sequence
  Description of Artificial Sequence: Synthetic oligonucleotide
  Sense strand starting at position 3246 of SEQ ID NO: 1563040
aucucuuagcaaugaggua

SEQ ID NO: 1791020 - RNA, 19 nt, Artificial Sequence
  Description of Artificial Sequence: Synthetic oligonucleotide
  Antisense strand to SEQ ID NO: 1791019
uaccucauugcuaagagau

SEQ ID NO: 1791021 - RNA, 19 nt, Artificial Sequence
  Description of Artificial Sequence: Synthetic oligonucleotide
  Sense strand starting at position 3261 of SEQ ID NO: 1563040
gguauacaccauuauuagu

SEQ ID NO: 1791022 - RNA, 19 nt, Artificial Sequence
  Description of Artificial Sequence: Synthetic oligonucleotide
  Antisense strand to SEQ ID NO: 1791021
acuaauaaugguguauacc

SEQ ID NO: 1791023 - RNA, 19 nt, Artificial Sequence
  Description of Artificial Sequence: Synthetic oligonucleotide
  Sense strand starting at position 3329 of SEQ ID NO: 1563040
cagaauuagcugugaauau

SEQ ID NO: 1791024 - RNA, 19 nt, Artificial Sequence
  Description of Artificial Sequence: Synthetic oligonucleotide
  Antisense strand to SEQ ID NO: 1791023
auauucacagcuaauucug

SEQ ID NO: 1791025 - RNA, 19 nt, Artificial Sequence
  Description of Artificial Sequence: Synthetic oligonucleotide
  Sense strand starting at position 3338 of SEQ ID NO: 1563040
cugugaauauagccaggau

SEQ ID NO: 1791026 - RNA, 19 nt, Artificial Sequence
  Description of Artificial Sequence: Synthetic oligonucleotide
  Antisense strand to SEQ ID NO: 1791025
auccuggcuauauucacag

SEQ ID NO: 1791027 - RNA, 19 nt, Artificial Sequence
  Description of Artificial Sequence: Synthetic oligonucleotide
  Sense strand starting at position 3339 of SEQ ID NO: 1563040
ugugaauauagccaggauu

SEQ ID NO: 1791028 - RNA, 19 nt, Artificial Sequence
  Description of Artificial Sequence: Synthetic oligonucleotide
  Antisense strand to SEQ ID NO: 1791027
aauccuggcuauauucaca

SEQ ID NO: 1791029 - RNA, 19 nt, Artificial Sequence
  Description of Artificial Sequence: Synthetic oligonucleotide
  Sense strand starting at position 3378 of SEQ ID NO: 1563040
ugccuauauuuggagggau

SEQ ID NO: 1791030 - RNA, 19 nt, Artificial Sequence
  Description of Artificial Sequence: Synthetic oligonucleotide
  Antisense strand to SEQ ID NO: 1791029
aucccuccaaauauaggca

SEQ ID NO: 1791031 - RNA, 19 nt, Artificial Sequence
  Description of Artificial Sequence: Synthetic oligonucleotide
  Sense strand starting at position 3443 of SEQ ID NO: 1563040
gacccuagagauugucaac

SEQ ID NO: 1791032 - RNA, 19 nt, Artificial Sequence
  Description of Artificial Sequence: Synthetic oligonucleotide
  Antisense strand to SEQ ID NO: 1791031
guugacaaucucuaggguc

SEQ ID NO: 1791033 - RNA, 19 nt, Artificial Sequence
  Description of Artificial Sequence: Synthetic oligonucleotide
  Sense strand starting at position 3454 of SEQ ID NO: 1563040
uugucaacucuuggaucua

SEQ ID NO: 1791034 - RNA, 19 nt, Artificial Sequence
  Description of Artificial Sequence: Synthetic oligonucleotide
  Antisense strand to SEQ ID NO: 1791033
uagauccaagaguugacaa

SEQ ID NO: 1791035 - RNA, 19 nt, Artificial Sequence
  Description of Artificial Sequence: Synthetic oligonucleotide
  Sense strand starting at position 3498 of SEQ ID NO: 1563040
ugucuaguacuuuaugguu

SEQ ID NO: 1791036 - RNA, 19 nt, Artificial Sequence
  Description of Artificial Sequence: Synthetic oligonucleotide
  Antisense strand to SEQ ID NO: 1791035
aaccauaaaguacuagaca

SEQ ID NO: 1791037 - RNA, 19 nt, Artificial Sequence
  Description of Artificial Sequence: Synthetic oligonucleotide
  Sense strand starting at position 3512 of SEQ ID NO: 1563040
ugguuuacaagucacagua

SEQ ID NO: 1791038 - RNA, 19 nt, Artificial Sequence
  Description of Artificial Sequence: Synthetic oligonucleotide
  Antisense strand to SEQ ID NO: 1791037
uacugugacuuguaaacca

SEQ ID NO: 1791039 - RNA, 19 nt, Artificial Sequence
  Description of Artificial Sequence: Synthetic oligonucleotide
  Sense strand starting at position 3527 of SEQ ID NO: 1563040
aguauauugucaucugaca

SEQ ID NO: 1791040 - RNA, 19 nt, Artificial Sequence
  Description of Artificial Sequence: Synthetic oligonucleotide
  Antisense strand to SEQ ID NO: 1791039
ugucagaugacaauauacu

SEQ ID NO: 1791041 - RNA, 19 nt, Artificial Sequence
  Description of Artificial Sequence: Synthetic oligonucleotide
  Sense strand starting at position 3810 of SEQ ID NO: 1563040
gucuuaaacccucagucua

SEQ ID NO: 1791042 - RNA, 19 nt, Artificial Sequence
  Description of Artificial Sequence: Synthetic oligonucleotide
  Antisense strand to SEQ ID NO: 1791041
uagacugaggguuuaagac

SEQ ID NO: 1791043 - RNA, 19 nt, Artificial Sequence
  Description of Artificial Sequence: Synthetic oligonucleotide
  Sense strand starting at position 30 of SEQ ID NO: 1563041
uaguuuccagauggacaua

SEQ ID NO: 1791044 - RNA, 19 nt, Artificial Sequence
  Description of Artificial Sequence: Synthetic oligonucleotide
  Antisense strand to SEQ ID NO: 1791043
uauguccaucuggaaacua

SEQ ID NO: 1791045 - RNA, 19 nt, Artificial Sequence
  Description of Artificial Sequence: Synthetic oligonucleotide
  Sense strand starting at position 257 of SEQ ID NO: 1563041
ucuuauguucuacagcauu

SEQ ID NO: 1791046 - RNA, 19 nt, Artificial Sequence
  Description of Artificial Sequence: Synthetic oligonucleotide
  Antisense strand to SEQ ID NO: 1791045
aaugcuguagaacauaaga

SEQ ID NO: 1791047 - RNA, 19 nt, Artificial Sequence
  Description of Artificial Sequence: Synthetic oligonucleotide
  Sense strand starting at position 908 of SEQ ID NO: 1563041
uguguuuaugaaugauucu

SEQ ID NO: 1791048 - RNA, 19 nt, Artificial Sequence
  Description of Artificial Sequence: Synthetic oligonucleotide
  Antisense strand to SEQ ID NO: 1791047
agaaucauucauaaacaca

SEQ ID NO: 1791049 - RNA, 19 nt, Artificial Sequence
  Description of Artificial Sequence: Synthetic oligonucleotide
  Sense strand starting at position 911 of SEQ ID NO: 1563041
guuuaugaaugauucuacu

SEQ ID NO: 1791050 - RNA, 19 nt, Artificial Sequence
  Description of Artificial Sequence: Synthetic oligonucleotide
  Antisense strand to SEQ ID NO: 1791049
aguagaaucauucauaaac

SEQ ID NO: 1791051 - RNA, 19 nt, Artificial Sequence
  Description of Artificial Sequence: Synthetic oligonucleotide
  Sense strand starting at position 929 of SEQ ID NO: 1563041
ucagacuuaucuucguaac

SEQ ID NO: 1791052 - RNA, 19 nt, Artificial Sequence
  Description of Artificial Sequence: Synthetic oligonucleotide
  Antisense strand to SEQ ID NO: 1791051
guuacgaagauaagucuga

SEQ ID NO: 1791053 - RNA, 19 nt, Artificial Sequence
  Description of Artificial Sequence: Synthetic oligonucleotide
  Sense strand starting at position 931 of SEQ ID NO: 1563041
agacuuaucuucguaacac

SEQ ID NO: 1791054 - RNA, 19 nt, Artificial Sequence
  Description of Artificial Sequence: Synthetic oligonucleotide
  Antisense strand to SEQ ID NO: 1791053
guguuacgaagauaagucu

SEQ ID NO: 1791055 - RNA, 19 nt, Artificial Sequence
  Description of Artificial Sequence: Synthetic oligonucleotide
  Sense strand starting at position 999 of SEQ ID NO: 1563041
uucugaaaucuugacguuu

SEQ ID NO: 1791056 - RNA, 19 nt, Artificial Sequence
  Description of Artificial Sequence: Synthetic oligonucleotide
  Antisense strand to SEQ ID NO: 1791055
aaacgucaagauuucagaa

SEQ ID NO: 1791057 - RNA, 19 nt, Artificial Sequence
  Description of Artificial Sequence: Synthetic oligonucleotide
  Sense strand starting at position 1005 of SEQ ID NO: 1563041
aaucuugacguuugcuuau

SEQ ID NO: 1791058 - RNA, 19 nt, Artificial Sequence
  Description of Artificial Sequence: Synthetic oligonucleotide
  Antisense strand to SEQ ID NO: 1791057
auaagcaaacgucaagauu

SEQ ID NO: 1791059 - RNA, 19 nt, Artificial Sequence
  Description of Artificial Sequence: Synthetic oligonucleotide
  Sense strand starting at position 1072 of SEQ ID NO: 1563041
cguaaugucucauucccua

SEQ ID NO: 1791060 - RNA, 19 nt, Artificial Sequence
  Description of Artificial Sequence: Synthetic oligonucleotide
  Antisense strand to SEQ ID NO: 1791059
uagggaaugagacauuacg

SEQ ID NO: 1791061 - RNA, 19 nt, Artificial Sequence
  Description of Artificial Sequence: Synthetic oligonucleotide
  Sense strand starting at position 1173 of SEQ ID NO: 1563041
ggucauuccagccgaagaa

SEQ ID NO: 1791062 - RNA, 19 nt, Artificial Sequence
  Description of Artificial Sequence: Synthetic oligonucleotide
  Antisense strand to SEQ ID NO: 1791061
uucuucggcuggaaugacc

SEQ ID NO: 1791063 - RNA, 19 nt, Artificial Sequence
  Description of Artificial Sequence: Synthetic oligonucleotide
  Sense strand starting at position 1174 of SEQ ID NO: 1563041
gucauuccagccgaagaaa

SEQ ID NO: 1791064 - RNA, 19 nt, Artificial Sequence
  Description of Artificial Sequence: Synthetic oligonucleotide
  Antisense strand to SEQ ID NO: 1791063
uuucuucggcuggaaugac

SEQ ID NO: 1791065 - RNA, 19 nt, Artificial Sequence
  Description of Artificial Sequence: Synthetic oligonucleotide
  Sense strand starting at position 1288 of SEQ ID NO: 1563041
gggaaacucuaguccucuu

SEQ ID NO: 1791066 - RNA, 19 nt, Artificial Sequence
  Description of Artificial Sequence: Synthetic oligonucleotide
  Antisense strand to SEQ ID NO: 1791065
aagaggacuagaguuuccc

SEQ ID NO: 1791067 - RNA, 19 nt, Artificial Sequence
  Description of Artificial Sequence: Synthetic oligonucleotide
  Sense strand starting at position 1305 of SEQ ID NO: 1563041
uucuaugcucaaggcaaga

SEQ ID NO: 1791068 - RNA, 19 nt, Artificial Sequence
  Description of Artificial Sequence: Synthetic oligonucleotide
  Antisense strand to SEQ ID NO: 1791067
ucuugccuugagcauagaa

SEQ ID NO: 1791069 - RNA, 19 nt, Artificial Sequence
  Description of Artificial Sequence: Synthetic oligonucleotide
  Sense strand starting at position 1348 of SEQ ID NO: 1563041
gcaaaucaagugggucaaa

SEQ ID NO: 1791070 - RNA, 19 nt, Artificial Sequence
  Description of Artificial Sequence: Synthetic oligonucleotide
  Antisense strand to SEQ ID NO: 1791069
uuugacccacuugauuugc

SEQ ID NO: 1791071 - RNA, 19 nt, Artificial Sequence
  Description of Artificial Sequence: Synthetic oligonucleotide
  Sense strand starting at position 2204 of SEQ ID NO: 1563041
ucgagcuccucauuuccaa

SEQ ID NO: 1791072 - RNA, 19 nt, Artificial Sequence
  Description of Artificial Sequence: Synthetic oligonucleotide
  Antisense strand to SEQ ID NO: 1791071
uuggaaaugaggagcucga

SEQ ID NO: 1791073 - RNA, 19 nt, Artificial Sequence
  Description of Artificial Sequence: Synthetic oligonucleotide
  Sense strand starting at position 2366 of SEQ ID NO: 1563041
cugagugacgaucagcaaa

SEQ ID NO: 1791074 - RNA, 19 nt, Artificial Sequence
  Description of Artificial Sequence: Synthetic oligonucleotide
  Antisense strand to SEQ ID NO: 1791073
uuugcugaucgucacucag

SEQ ID NO: 1791075 - RNA, 19 nt, Artificial Sequence
  Description of Artificial Sequence: Synthetic oligonucleotide
  Sense strand starting at position 2368 of SEQ ID NO: 1563041
gagugacgaucagcaaaua

SEQ ID NO: 1791076 - RNA, 19 nt, Artificial Sequence
  Description of Artificial Sequence: Synthetic oligonucleotide
  Antisense strand to SEQ ID NO: 1791075
uauuugcugaucgucacuc

SEQ ID NO: 1791077 - RNA, 19 nt, Artificial Sequence
  Description of Artificial Sequence: Synthetic oligonucleotide
  Sense strand starting at position 2380 of SEQ ID NO: 1563041
gcaaauacucaguggacga

SEQ ID NO: 1791078 - RNA, 19 nt, Artificial Sequence
  Description of Artificial Sequence: Synthetic oligonucleotide
  Antisense strand to SEQ ID NO: 1791077
ucguccacugaguauuugc

SEQ ID NO: 1791079 - RNA, 19 nt, Artificial Sequence
  Description of Artificial Sequence: Synthetic oligonucleotide
  Sense strand starting at position 2384 of SEQ ID NO: 1563041
auacucaguggacgaaaua

SEQ ID NO: 1791080 - RNA, 19 nt, Artificial Sequence
  Description of Artificial Sequence: Synthetic oligonucleotide
  Antisense strand to SEQ ID NO: 1791079
uauuucguccacugaguau

SEQ ID NO: 1791081 - RNA, 19 nt, Artificial Sequence
  Description of Artificial Sequence: Synthetic oligonucleotide
  Sense strand starting at position 2438 of SEQ ID NO: 1563041
agcguauucgaagagauga

SEQ ID NO: 1791082 - RNA, 19 nt, Artificial Sequence
  Description of Artificial Sequence: Synthetic oligonucleotide
  Antisense strand to SEQ ID NO: 1791081
ucaucucuucgaauacgcu

SEQ ID NO: 1791083 - RNA, 19 nt, Artificial Sequence
  Description of Artificial Sequence: Synthetic oligonucleotide
  Sense strand starting at position 2440 of SEQ ID NO: 1563041
cguauucgaagagaugaga

SEQ ID NO: 1791084 - RNA, 19 nt, Artificial Sequence
  Description of Artificial Sequence: Synthetic oligonucleotide
  Antisense strand to SEQ ID NO: 1791083
ucucaucucuucgaauacg

SEQ ID NO: 1791085 - RNA, 19 nt, Artificial Sequence
  Description of Artificial Sequence: Synthetic oligonucleotide
  Sense strand starting at position 2466 of SEQ ID NO: 1563041
gggauuaggccaggcuuga

SEQ ID NO: 1791086 - RNA, 19 nt, Artificial Sequence
  Description of Artificial Sequence: Synthetic oligonucleotide
  Antisense strand to SEQ ID NO: 1791085
ucaagccuggccuaauccc

SEQ ID NO: 1791087 - RNA, 19 nt, Artificial Sequence
  Description of Artificial Sequence: Synthetic oligonucleotide
  Sense strand starting at position 2487 of SEQ ID NO: 1563041
ggaagaaugguuugagcac

SEQ ID NO: 1791088 - RNA, 19 nt, Artificial Sequence
  Description of Artificial Sequence: Synthetic oligonucleotide
  Antisense strand to SEQ ID NO: 1791087
gugcucaaaccauucuucc

SEQ ID NO: 1791089 - RNA, 19 nt, Artificial Sequence
  Description of Artificial Sequence: Synthetic oligonucleotide
  Sense strand starting at position 2550 of SEQ ID NO: 1563041
cggcuaucacgugcuugaa

SEQ ID NO: 1791090 - RNA, 19 nt, Artificial Sequence
  Description of Artificial Sequence: Synthetic oligonucleotide
  Antisense strand to SEQ ID NO: 1791089
uucaagcacgugauagccg

SEQ ID NO: 1791091 - RNA, 19 nt, Artificial Sequence
  Description of Artificial Sequence: Synthetic oligonucleotide
  Sense strand starting at position 2585 of SEQ ID NO: 1563041
gugagaugcgcuuuacgug

SEQ ID NO: 1791092 - RNA, 19 nt, Artificial Sequence
  Description of Artificial Sequence: Synthetic oligonucleotide
  Antisense strand to SEQ ID NO: 1791091
cacguaaagcgcaucucac

SEQ ID NO: 1791093 - RNA, 19 nt, Artificial Sequence
  Description of Artificial Sequence: Synthetic oligonucleotide
  Sense strand starting at position 2616 of SEQ ID NO: 1563041
uuccaaagacgucguauaa

SEQ ID NO: 1791094 - RNA, 19 nt, Artificial Sequence
  Description of Artificial Sequence: Synthetic oligonucleotide
  Antisense strand to SEQ ID NO: 1791093
uuauacgacgucuuuggaa

SEQ ID NO: 1791095 - RNA, 19 nt, Artificial Sequence
  Description of Artificial Sequence: Synthetic oligonucleotide
  Sense strand starting at position 2651 of SEQ ID NO: 1563041
uuugcauguuagguaacau

SEQ ID NO: 1791096 - RNA, 19 nt, Artificial Sequence
  Description of Artificial Sequence: Synthetic oligonucleotide
  Antisense strand to SEQ ID NO: 1791095
auguuaccuaacaugcaaa

SEQ ID NO: 1791097 - RNA, 19 nt, Artificial Sequence
  Description of Artificial Sequence: Synthetic oligonucleotide
  Sense strand starting at position 2877 of SEQ ID NO: 1563041
acacguuaugacuagaucu

SEQ ID NO: 1791098 - RNA, 19 nt, Artificial Sequence
  Description of Artificial Sequence: Synthetic oligonucleotide
  Antisense strand to SEQ ID NO: 1791097
agaucuagucauaacgugu

SEQ ID NO: 1791099 - RNA, 19 nt, Artificial Sequence
  Description of Artificial Sequence: Synthetic oligonucleotide
  Sense strand starting at position 2879 of SEQ ID NO: 1563041
acguuaugacuagaucuuu

SEQ ID NO: 1791100 - RNA, 19 nt, Artificial Sequence
  Description of Artificial Sequence: Synthetic oligonucleotide
  Antisense strand to SEQ ID NO: 1791099
aaagaucuagucauaacgu

SEQ ID NO: 1791101 - RNA, 19 nt, Artificial Sequence
  Description of Artificial Sequence: Synthetic oligonucleotide
  Sense strand starting at position 2978 of SEQ ID NO: 1563041
ugcuucuuagaccaaagau

SEQ ID NO: 1791102 - RNA, 19 nt, Artificial Sequence
  Description of Artificial Sequence: Synthetic oligonucleotide
  Antisense strand to SEQ ID NO: 1791101
aucuuuggucuaagaagca

SEQ ID NO: 1791103 - RNA, 19 nt, Artificial Sequence
  Description of Artificial Sequence: Synthetic oligonucleotide
  Sense strand starting at position 3023 of SEQ ID NO: 1563041
acuggagcuuuaguguauu

SEQ ID NO: 1791104 - RNA, 19 nt, Artificial Sequence
  Description of Artificial Sequence: Synthetic oligonucleotide
  Antisense strand to SEQ ID NO: 1791103
aauacacuaaagcuccagu

SEQ ID NO: 1791105 - RNA, 19 nt, Artificial Sequence
  Description of Artificial Sequence: Synthetic oligonucleotide
  Sense strand starting at position 3263 of SEQ ID NO: 1563041
uugacuuaguacuuacuau

SEQ ID NO: 1791106 - RNA, 19 nt, Artificial Sequence
  Description of Artificial Sequence: Synthetic oligonucleotide
  Antisense strand to SEQ ID NO: 1791105
auaguaaguacuaagucaa

SEQ ID NO: 1791107 - RNA, 19 nt, Artificial Sequence
  Description of Artificial Sequence: Synthetic oligonucleotide
  Sense strand starting at position 3289 of SEQ ID NO: 1563041
gcguccuacucuccuagaa

SEQ ID NO: 1791108 - RNA, 19 nt, Artificial Sequence
  Description of Artificial Sequence: Synthetic oligonucleotide
  Antisense strand to SEQ ID NO: 1791107
uucuaggagaguaggacgc

SEQ ID NO: 1791109 - RNA, 19 nt, Artificial Sequence
  Description of Artificial Sequence: Synthetic oligonucleotide
  Sense strand starting at position 3432 of SEQ ID NO: 1563041
ggcuuauugcaagaaccag

SEQ ID NO: 1791110 - RNA, 19 nt, Artificial Sequence
  Description of Artificial Sequence: Synthetic oligonucleotide
  Antisense strand to SEQ ID NO: 1791109
cugguucuugcaauaagcc

SEQ ID NO: 1791111 - RNA, 19 nt, Artificial Sequence
  Description of Artificial Sequence: Synthetic oligonucleotide
  Sense strand starting at position 3465 of SEQ ID NO: 1563041
gcaggauuaaccugaugga

SEQ ID NO: 1791112 - RNA, 19 nt, Artificial Sequence
  Description of Artificial Sequence: Synthetic oligonucleotide
  Antisense strand to SEQ ID NO: 1791111
uccaucagguuaauccugc

SEQ ID NO: 1791113 - RNA, 19 nt, Artificial Sequence
  Description of Artificial Sequence: Synthetic oligonucleotide
  Sense strand starting at position 3532 of SEQ ID NO: 1563041
agcacuuagugacugguua

SEQ ID NO: 1791114 - RNA, 19 nt, Artificial Sequence
  Description of Artificial Sequence: Synthetic oligonucleotide
  Antisense strand to SEQ ID NO: 1791113
uaaccagucacuaagugcu

SEQ ID NO: 1791115 - RNA, 19 nt, Artificial Sequence
  Description of Artificial Sequence: Synthetic oligonucleotide
  Sense strand starting at position 3552 of SEQ ID NO: 1563041
accuuagauccgggugcuu

SEQ ID NO: 1791116 - RNA, 19 nt, Artificial Sequence
  Description of Artificial Sequence: Synthetic oligonucleotide
  Antisense strand to SEQ ID NO: 1791115
aagcacccggaucuaaggu

SEQ ID NO: 1791117 - RNA, 19 nt, Artificial Sequence
  Description of Artificial Sequence: Synthetic oligonucleotide
  Sense strand starting at position 3623 of SEQ ID NO: 1563041
ggcugagauugacuugaag

SEQ ID NO: 1791118 - RNA, 19 nt, Artificial Sequence
  Description of Artificial Sequence: Synthetic oligonucleotide
  Antisense strand to SEQ ID NO: 1791117
cuucaagucaaucucagcc

SEQ ID NO: 1791119 - RNA, 19 nt, Artificial Sequence
  Description of Artificial Sequence: Synthetic oligonucleotide
  Sense strand starting at position 3748 of SEQ ID NO: 1563041
gauguuggagucuacauau

SEQ ID NO: 1791120 - RNA, 19 nt, Artificial Sequence
  Description of Artificial Sequence: Synthetic oligonucleotide
  Antisense strand to SEQ ID NO: 1791119
auauguagacuccaacauc

SEQ ID NO: 1791121 - RNA, 19 nt, Artificial Sequence
  Description of Artificial Sequence: Synthetic oligonucleotide
  Sense strand starting at position 3839 of SEQ ID NO: 1563041
acaaguauugagcagcaau

SEQ ID NO: 1791122 - RNA, 19 nt, Artificial Sequence
  Description of Artificial Sequence: Synthetic oligonucleotide
  Antisense strand to SEQ ID NO: 1791121
auugcugcucaauacuugu

SEQ ID NO: 1791123 - RNA, 19 nt, Artificial Sequence
  Description of Artificial Sequence: Synthetic oligonucleotide
  Sense strand starting at position 27 of SEQ ID NO: 1563042
gugcacgugugugaaugau

SEQ ID NO: 1791124 - RNA, 19 nt, Artificial Sequence
  Description of Artificial Sequence: Synthetic oligonucleotide
  Antisense strand to SEQ ID NO: 1791123
aucauucacacacgugcac

SEQ ID NO: 1791125 - RNA, 19 nt, Artificial Sequence
  Description of Artificial Sequence: Synthetic oligonucleotide
  Sense strand starting at position 31 of SEQ ID NO: 1563042
acgugugugaaugauuaag

SEQ ID NO: 1791126 - RNA, 19 nt, Artificial Sequence
  Description of Artificial Sequence: Synthetic oligonucleotide
  Antisense strand to SEQ ID NO: 1791125
cuuaaucauucacacacgu

SEQ ID NO: 1791127 - RNA, 19 nt, Artificial Sequence
  Description of Artificial Sequence: Synthetic oligonucleotide
  Sense strand starting at position 33 of SEQ ID NO: 1563042
gugugugaaugauuaagca

SEQ ID NO: 1791128 - RNA, 19 nt, Artificial Sequence
  Description of Artificial Sequence: Synthetic oligonucleotide
  Antisense strand to SEQ ID NO: 1791127
ugcuuaaucauucacacac

SEQ ID NO: 1791129 - RNA, 19 nt, Artificial Sequence
  Description of Artificial Sequence: Synthetic oligonucleotide
  Sense strand starting at position 59 of SEQ ID NO: 1563042
gguacaccguaucuuugaa

SEQ ID NO: 1791130 - RNA, 19 nt, Artificial Sequence
  Description of Artificial Sequence: Synthetic oligonucleotide
  Antisense strand to SEQ ID NO: 1791129
uucaaagauacgguguacc

SEQ ID NO: 1791131 - RNA, 19 nt, Artificial Sequence
  Description of Artificial Sequence: Synthetic oligonucleotide
  Sense strand starting at position 63 of SEQ ID NO: 1563042
caccguaucuuugaaggaa

SEQ ID NO: 1791132 - RNA, 19 nt, Artificial Sequence
  Description of Artificial Sequence: Synthetic oligonucleotide
  Antisense strand to SEQ ID NO: 1791131
uuccuucaaagauacggug

SEQ ID NO: 1791133 - RNA, 19 nt, Artificial Sequence
  Description of Artificial Sequence: Synthetic oligonucleotide
  Sense strand starting at position 66 of SEQ ID NO: 1563042
cguaucuuugaaggaauua

SEQ ID NO: 1791134 - RNA, 19 nt, Artificial Sequence
  Description of Artificial Sequence: Synthetic oligonucleotide
  Antisense strand to SEQ ID NO: 1791133
uaauuccuucaaagauacg

SEQ ID NO: 1791135 - RNA, 19 nt, Artificial Sequence
  Description of Artificial Sequence: Synthetic oligonucleotide
  Sense strand starting at position 78 of SEQ ID NO: 1563042
ggaauuaacuuccaagaac

SEQ ID NO: 1791136 - RNA, 19 nt, Artificial Sequence
  Description of Artificial Sequence: Synthetic oligonucleotide
  Antisense strand to SEQ ID NO: 1791135
guucuuggaaguuaauucc

SEQ ID NO: 1791137 - RNA, 19 nt, Artificial Sequence
  Description of Artificial Sequence: Synthetic oligonucleotide
  Sense strand starting at position 99 of SEQ ID NO: 1563042
agcacauucucucacgaca

SEQ ID NO: 1791138 - RNA, 19 nt, Artificial Sequence
  Description of Artificial Sequence: Synthetic oligonucleotide
  Antisense strand to SEQ ID NO: 1791137
ugucgugagagaaugugcu

SEQ ID NO: 1791139 - RNA, 19 nt, Artificial Sequence
  Description of Artificial Sequence: Synthetic oligonucleotide
  Sense strand starting at position 286 of SEQ ID NO: 1563042
agagauuaauucuaagaga

SEQ ID NO: 1791140 - RNA, 19 nt, Artificial Sequence
  Description of Artificial Sequence: Synthetic oligonucleotide
  Antisense strand to SEQ ID NO: 1791139
ucucuuagaauuaaucucu

SEQ ID NO: 1791141 - RNA, 19 nt, Artificial Sequence
  Description of Artificial Sequence: Synthetic oligonucleotide
  Sense strand starting at position 530 of SEQ ID NO: 1563042
aacugugguugucucugaa

SEQ ID NO: 1791142 - RNA, 19 nt, Artificial Sequence
  Description of Artificial Sequence: Synthetic oligonucleotide
  Antisense strand to SEQ ID NO: 1791141
uucagagacaaccacaguu

SEQ ID NO: 1791143 - RNA, 19 nt, Artificial Sequence
  Description of Artificial Sequence: Synthetic oligonucleotide
  Sense strand starting at position 533 of SEQ ID NO: 1563042
ugugguugucucugaaccu

SEQ ID NO: 1791144 - RNA, 19 nt, Artificial Sequence
  Description of Artificial Sequence: Synthetic oligonucleotide
  Antisense strand to SEQ ID NO: 1791143
agguucagagacaaccaca

SEQ ID NO: 1791145 - RNA, 19 nt, Artificial Sequence
  Description of Artificial Sequence: Synthetic oligonucleotide
  Sense strand starting at position 534 of SEQ ID NO: 1563042
gugguugucucugaaccuu

SEQ ID NO: 1791146 - RNA, 19 nt, Artificial Sequence
  Description of Artificial Sequence: Synthetic oligonucleotide
  Antisense strand to SEQ ID NO: 1791145
aagguucagagacaaccac

SEQ ID NO: 1791147 - RNA, 19 nt, Artificial Sequence
  Description of Artificial Sequence: Synthetic oligonucleotide
  Sense strand starting at position 566 of SEQ ID NO: 1563042
ucccuuccguauucggaaa

SEQ ID NO: 1791148 - RNA, 19 nt, Artificial Sequence
  Description of Artificial Sequence: Synthetic oligonucleotide
  Antisense strand to SEQ ID NO: 1791147
uuuccgaauacggaaggga

SEQ ID NO: 1791149 - RNA, 19 nt, Artificial Sequence
  Description of Artificial Sequence: Synthetic oligonucleotide
  Sense strand starting at position 568 of SEQ ID NO: 1563042
ccuuccguauucggaaaga

SEQ ID NO: 1791150 - RNA, 19 nt, Artificial Sequence
  Description of Artificial Sequence: Synthetic oligonucleotide
  Antisense strand to SEQ ID NO: 1791149
ucuuuccgaauacggaagg

SEQ ID NO: 1791151 - RNA, 19 nt, Artificial Sequence
  Description of Artificial Sequence: Synthetic oligonucleotide
  Sense strand starting at position 876 of SEQ ID NO: 1563042
ucgccucaucuaggugaaa

SEQ ID NO: 1791152 - RNA, 19 nt, Artificial Sequence
  Description of Artificial Sequence: Synthetic oligonucleotide
  Antisense strand to SEQ ID NO: 1791151
uuucaccuagaugaggcga

SEQ ID NO: 1791153 - RNA, 19 nt, Artificial Sequence
  Description of Artificial Sequence: Synthetic oligonucleotide
  Sense strand starting at position 877 of SEQ ID NO: 1563042
cgccucaucuaggugaaag

SEQ ID NO: 1791154 - RNA, 19 nt, Artificial Sequence
  Description of Artificial Sequence: Synthetic oligonucleotide
  Antisense strand to SEQ ID NO: 1791153
cuuucaccuagaugaggcg

SEQ ID NO: 1791155 - RNA, 19 nt, Artificial Sequence
  Description of Artificial Sequence: Synthetic oligonucleotide
  Sense strand starting at position 878 of SEQ ID NO: 1563042
gccucaucuaggugaaagc

SEQ ID NO: 1791156 - RNA, 19 nt, Artificial Sequence
  Description of Artificial Sequence: Synthetic oligonucleotide
  Antisense strand to SEQ ID NO: 1791155
gcuuucaccuagaugaggc

SEQ ID NO: 1791157 - RNA, 19 nt, Artificial Sequence
  Description of Artificial Sequence: Synthetic oligonucleotide
  Sense strand starting at position 1490 of SEQ ID NO: 1563042
uuccauguuuaucaccaga

SEQ ID NO: 1791158 - RNA, 19 nt, Artificial Sequence
  Description of Artificial Sequence: Synthetic oligonucleotide
  Antisense strand to SEQ ID NO: 1791157
ucuggugauaaacauggaa

SEQ ID NO: 1791159 - RNA, 19 nt, Artificial Sequence
  Description of Artificial Sequence: Synthetic oligonucleotide
  Sense strand starting at position 1640 of SEQ ID NO: 1563042
ugccucuugucugcaaaga

SEQ ID NO: 1791160 - RNA, 19 nt, Artificial Sequence
  Description of Artificial Sequence: Synthetic oligonucleotide
  Antisense strand to SEQ ID NO: 1791159
ucuuugcagacaagaggca

SEQ ID NO: 1791161 - RNA, 19 nt, Artificial Sequence
  Description of Artificial Sequence: Synthetic oligonucleotide
  Sense strand starting at position 1641 of SEQ ID NO: 1563042
gccucuugucugcaaagag

SEQ ID NO: 1791162 - RNA, 19 nt, Artificial Sequence
  Description of Artificial Sequence: Synthetic oligonucleotide
  Antisense strand to SEQ ID NO: 1791161
cucuuugcagacaagaggc

SEQ ID NO: 1791163 - RNA, 19 nt, Artificial Sequence
  Description of Artificial Sequence: Synthetic oligonucleotide
  Sense strand starting at position 1989 of SEQ ID NO: 1563042
ggcacagacuucuaagguu

SEQ ID NO: 1791164 - RNA, 19 nt, Artificial Sequence
  Description of Artificial Sequence: Synthetic oligonucleotide
  Antisense strand to SEQ ID NO: 1791163
aaccuuagaagucugugcc

SEQ ID NO: 1791165 - RNA, 19 nt, Artificial Sequence
  Description of Artificial Sequence: Synthetic oligonucleotide
  Sense strand starting at position 2053 of SEQ ID NO: 1563042
uagcucagcuucugaguuu

SEQ ID NO: 1791166 - RNA, 19 nt, Artificial Sequence
  Description of Artificial Sequence: Synthetic oligonucleotide
  Antisense strand to SEQ ID NO: 1791165
aaacucagaagcugagcua

SEQ ID NO: 1791167 - RNA, 19 nt, Artificial Sequence
  Description of Artificial Sequence: Synthetic oligonucleotide
  Sense strand starting at position 2060 of SEQ ID NO: 1563042
gcuucugaguuuccucauu

SEQ ID NO: 1791168 - RNA, 19 nt, Artificial Sequence
  Description of Artificial Sequence: Synthetic oligonucleotide
  Antisense strand to SEQ ID NO: 1791167
aaugaggaaacucagaagc

SEQ ID NO: 1791169 - RNA, 19 nt, Artificial Sequence
  Description of Artificial Sequence: Synthetic oligonucleotide
  Sense strand starting at position 2119 of SEQ ID NO: 1563042
gaggacuacacgugugguu

SEQ ID NO: 1791170 - RNA, 19 nt, Artificial Sequence
  Description of Artificial Sequence: Synthetic oligonucleotide
  Antisense strand to SEQ ID NO: 1791169
aaccacacguguaguccuc

SEQ ID NO: 1791171 - RNA, 19 nt, Artificial Sequence
  Description of Artificial Sequence: Synthetic oligonucleotide
  Sense strand starting at position 2126 of SEQ ID NO: 1563042
acacgugugguugcaugua

SEQ ID NO: 1791172 - RNA, 19 nt, Artificial Sequence
  Description of Artificial Sequence: Synthetic oligonucleotide
  Antisense strand to SEQ ID NO: 1791171
uacaugcaaccacacgugu

SEQ ID NO: 1791173 - RNA, 19 nt, Artificial Sequence
  Description of Artificial Sequence: Synthetic oligonucleotide
  Sense strand starting at position 2128 of SEQ ID NO: 1563042
acgugugguugcauguaca

SEQ ID NO: 1791174 - RNA, 19 nt, Artificial Sequence
  Description of Artificial Sequence: Synthetic oligonucleotide
  Antisense strand to SEQ ID NO: 1791173
uguacaugcaaccacacgu

SEQ ID NO: 1791175 - RNA, 19 nt, Artificial Sequence
  Description of Artificial Sequence: Synthetic oligonucleotide
  Sense strand starting at position 2647 of SEQ ID NO: 1563042
ggccaagcacggugacauu

SEQ ID NO: 1791176 - RNA, 19 nt, Artificial Sequence
  Description of Artificial Sequence: Synthetic oligonucleotide
  Antisense strand to SEQ ID NO: 1791175
aaugucaccgugcuuggcc

SEQ ID NO: 1791177 - RNA, 19 nt, Artificial Sequence
  Description of Artificial Sequence: Synthetic oligonucleotide
  Sense strand starting at position 2870 of SEQ ID NO: 1563042
gagcacugcccuuguccua

SEQ ID NO: 1791178 - RNA, 19 nt, Artificial Sequence
  Description of Artificial Sequence: Synthetic oligonucleotide
  Antisense strand to SEQ ID NO: 1791177
uaggacaagggcagugcuc

SEQ ID NO: 1791179 - RNA, 19 nt, Artificial Sequence
  Description of Artificial Sequence: Synthetic oligonucleotide
  Sense strand starting at position 3933 of SEQ ID NO: 1563042
cgcagagaccucgaugaga

SEQ ID NO: 1791180 - RNA, 19 nt, Artificial Sequence
  Description of Artificial Sequence: Synthetic oligonucleotide
  Antisense strand to SEQ ID NO: 1791179
ucucaucgaggucucugcg

SEQ ID NO: 1791181 - RNA, 19 nt, Artificial Sequence
  Description of Artificial Sequence: Synthetic oligonucleotide
  Sense strand starting at position 3935 of SEQ ID NO: 1563042
cagagaccucgaugagauu

SEQ ID NO: 1791182 - RNA, 19 nt, Artificial Sequence
  Description of Artificial Sequence: Synthetic oligonucleotide
  Antisense strand to SEQ ID NO: 1791181
aaucucaucgaggucucug

SEQ ID NO: 1791183 - RNA, 19 nt, Artificial Sequence
  Description of Artificial Sequence: Synthetic oligonucleotide
  Sense strand starting at position 3956 of SEQ ID NO: 1563042
agacaacaauucuggguaa

SEQ ID NO: 1791184 - RNA, 19 nt, Artificial Sequence
  Description of Artificial Sequence: Synthetic oligonucleotide
  Antisense strand to SEQ ID NO: 1791183
uuacccagaauuguugucu

SEQ ID NO: 1791185 - RNA, 19 nt, Artificial Sequence
  Description of Artificial Sequence: Synthetic oligonucleotide
  Sense strand starting at position 3959 of SEQ ID NO: 1563042
caacaauucuggguaaagu

SEQ ID NO: 1791186 - RNA, 19 nt, Artificial Sequence
  Description of Artificial Sequence: Synthetic oligonucleotide
  Antisense strand to SEQ ID NO: 1791185
acuuuacccagaauuguug

SEQ ID NO: 1791187 - RNA, 19 nt, Artificial Sequence
  Description of Artificial Sequence: Synthetic oligonucleotide
  Sense strand starting at position 670 of SEQ ID NO: 1563043
gggugaguauacgaauagu

SEQ ID NO: 1791188 - RNA, 19 nt, Artificial Sequence
  Description of Artificial Sequence: Synthetic oligonucleotide
  Antisense strand to SEQ ID NO: 1791187
acuauucguauacucaccc

SEQ ID NO: 1791189 - RNA, 19 nt, Artificial Sequence
  Description of Artificial Sequence: Synthetic oligonucleotide
  Sense strand starting at position 673 of SEQ ID NO: 1563043
ugaguauacgaauagugcu

SEQ ID NO: 1791190 - RNA, 19 nt, Artificial Sequence
  Description of Artificial Sequence: Synthetic oligonucleotide
  Antisense strand to SEQ ID NO: 1791189
agcacuauucguauacuca

SEQ ID NO: 1791191 - RNA, 19 nt, Artificial Sequence
  Description of Artificial Sequence: Synthetic oligonucleotide
  Sense strand starting at position 778 of SEQ ID NO: 1563043
cuuugugggccaugucaga

SEQ ID NO: 1791192 - RNA, 19 nt, Artificial Sequence
  Description of Artificial Sequence: Synthetic oligonucleotide
  Antisense strand to SEQ ID NO: 1791191
ucugacauggcccacaaag

SEQ ID NO: 1791193 - RNA, 19 nt, Artificial Sequence
  Description of Artificial Sequence: Synthetic oligonucleotide
  Sense strand starting at position 798 of SEQ ID NO: 1563043
aagggaagcuguccuuagu

SEQ ID NO: 1791194 - RNA, 19 nt, Artificial Sequence
  Description of Artificial Sequence: Synthetic oligonucleotide
  Antisense strand to SEQ ID NO: 1791193
acuaaggacagcuucccuu

SEQ ID NO: 1791195 - RNA, 19 nt, Artificial Sequence
  Description of Artificial Sequence: Synthetic oligonucleotide
  Sense strand starting at position 801 of SEQ ID NO: 1563043
ggaagcuguccuuagugca

SEQ ID NO: 1791196 - RNA, 19 nt, Artificial Sequence
  Description of Artificial Sequence: Synthetic oligonucleotide
  Antisense strand to SEQ ID NO: 1791195
ugcacuaaggacagcuucc

SEQ ID NO: 1791197 - RNA, 19 nt, Artificial Sequence
  Description of Artificial Sequence: Synthetic oligonucleotide
  Sense strand starting at position 834 of SEQ ID NO: 1563043
aguagucauucugggccau

SEQ ID NO: 1791198 - RNA, 19 nt, Artificial Sequence
  Description of Artificial Sequence: Synthetic oligonucleotide
  Antisense strand to SEQ ID NO: 1791197
auggcccagaaugacuacu

SEQ ID NO: 1791199 - RNA, 19 nt, Artificial Sequence
  Description of Artificial Sequence: Synthetic oligonucleotide
  Sense strand starting at position 836 of SEQ ID NO: 1563043
uagucauucugggccauga

SEQ ID NO: 1791200 - RNA, 19 nt, Artificial Sequence
  Description of Artificial Sequence: Synthetic oligonucleotide
  Antisense strand to SEQ ID NO: 1791199
ucauggcccagaaugacua

SEQ ID NO: 1791201 - RNA, 19 nt, Artificial Sequence
  Description of Artificial Sequence: Synthetic oligonucleotide
  Sense strand starting at position 838 of SEQ ID NO: 1563043
gucauucugggccaugaca

SEQ ID NO: 1791202 - RNA, 19 nt, Artificial Sequence
  Description of Artificial Sequence: Synthetic oligonucleotide
  Antisense strand to SEQ ID NO: 1791201
ugucauggcccagaaugac

SEQ ID NO: 1791203 - RNA, 19 nt, Artificial Sequence
  Description of Artificial Sequence: Synthetic oligonucleotide
  Sense strand starting at position 864 of SEQ ID NO: 1563043
ugacuuaugucucucagug

SEQ ID NO: 1791204 - RNA, 19 nt, Artificial Sequence
  Description of Artificial Sequence: Synthetic oligonucleotide
  Antisense strand to SEQ ID NO: 1791203
cacugagagacauaaguca

SEQ ID NO: 1791205 - RNA, 19 nt, Artificial Sequence
  Description of Artificial Sequence: Synthetic oligonucleotide
  Sense strand starting at position 900 of SEQ ID NO: 1563043
ggacaaguccagugaggag

SEQ ID NO: 1791206 - RNA, 19 nt, Artificial Sequence
  Description of Artificial Sequence: Synthetic oligonucleotide
  Antisense strand to SEQ ID NO: 1791205
cuccucacuggacuugucc

SEQ ID NO: 1791207 - RNA, 19 nt, Artificial Sequence
  Description of Artificial Sequence: Synthetic oligonucleotide
  Sense strand starting at position 1059 of SEQ ID NO: 1563043
uugguaguguugcaggaga

SEQ ID NO: 1791208 - RNA, 19 nt, Artificial Sequence
  Description of Artificial Sequence: Synthetic oligonucleotide
  Antisense strand to SEQ ID NO: 1791207
ucuccugcaacacuaccaa

SEQ ID NO: 1791209 - RNA, 19 nt, Artificial Sequence
  Description of Artificial Sequence: Synthetic oligonucleotide
  Sense strand starting at position 1176 of SEQ ID NO: 1563043
caagcuuguguccugugua

SEQ ID NO: 1791210 - RNA, 19 nt, Artificial Sequence
  Description of Artificial Sequence: Synthetic oligonucleotide
  Antisense strand to SEQ ID NO: 1791209
uacacaggacacaagcuug

SEQ ID NO: 1791211 - RNA, 19 nt, Artificial Sequence
  Description of Artificial Sequence: Synthetic oligonucleotide
  Sense strand starting at position 1179 of SEQ ID NO: 1563043
gcuuguguccuguguacau

SEQ ID NO: 1791212 - RNA, 19 nt, Artificial Sequence
  Description of Artificial Sequence: Synthetic oligonucleotide
  Antisense strand to SEQ ID NO: 1791211
auguacacaggacacaagc

SEQ ID NO: 1791213 - RNA, 19 nt, Artificial Sequence
  Description of Artificial Sequence: Synthetic oligonucleotide
  Sense strand starting at position 1303 of SEQ ID NO: 1563043
gggucagccgcucaaggau

SEQ ID NO: 1791214 - RNA, 19 nt, Artificial Sequence
  Description of Artificial Sequence: Synthetic oligonucleotide
  Antisense strand to SEQ ID NO: 1791213
auccuugagcggcugaccc

SEQ ID NO: 1791215 - RNA, 19 nt, Artificial Sequence
  Description of Artificial Sequence: Synthetic oligonucleotide
  Sense strand starting at position 1339 of SEQ ID NO: 1563043
gaccucugugccugagguu

SEQ ID NO: 1791216 - RNA, 19 nt, Artificial Sequence
  Description of Artificial Sequence: Synthetic oligonucleotide
  Antisense strand to SEQ ID NO: 1791215
aaccucaggcacagagguc

SEQ ID NO: 1791217 - RNA, 19 nt, Artificial Sequence
  Description of Artificial Sequence: Synthetic oligonucleotide
  Sense strand starting at position 1621 of SEQ ID NO: 1563043
ccaggagcccucggcuaaa

SEQ ID NO: 1791218 - RNA, 19 nt, Artificial Sequence
  Description of Artificial Sequence: Synthetic oligonucleotide
  Antisense strand to SEQ ID NO: 1791217
uuuagccgagggcuccugg

SEQ ID NO: 1791219 - RNA, 19 nt, Artificial Sequence
  Description of Artificial Sequence: Synthetic oligonucleotide
  Sense strand starting at position 2380 of SEQ ID NO: 1563043
aguccagugugcugagacu

SEQ ID NO: 1791220 - RNA, 19 nt, Artificial Sequence
  Description of Artificial Sequence: Synthetic oligonucleotide
  Antisense strand to SEQ ID NO: 1791219
agucucagcacacuggacu

SEQ ID NO: 1791221 - RNA, 19 nt, Artificial Sequence
  Description of Artificial Sequence: Synthetic oligonucleotide
  Sense strand starting at position 2415 of SEQ ID NO: 1563043
cuucguaguugugggugaa

SEQ ID NO: 1791222 - RNA, 19 nt, Artificial Sequence
  Description of Artificial Sequence: Synthetic oligonucleotide
  Antisense strand to SEQ ID NO: 1791221
uucacccacaacuacgaag

SEQ ID NO: 1791223 - RNA, 19 nt, Artificial Sequence
  Description of Artificial Sequence: Synthetic oligonucleotide
  Sense strand starting at position 2416 of SEQ ID NO: 1563043
uucguaguugugggugaag

SEQ ID NO: 1791224 - RNA, 19 nt, Artificial Sequence
  Description of Artificial Sequence: Synthetic oligonucleotide
  Antisense strand to SEQ ID NO: 1791223
cuucacccacaacuacgaa

SEQ ID NO: 1791225 - RNA, 19 nt, Artificial Sequence
  Description of Artificial Sequence: Synthetic oligonucleotide
  Sense strand starting at position 2418 of SEQ ID NO: 1563043
cguaguugugggugaagca

SEQ ID NO: 1791226 - RNA, 19 nt, Artificial Sequence
  Description of Artificial Sequence: Synthetic oligonucleotide
  Antisense strand to SEQ ID NO: 1791225
ugcuucacccacaacuacg

SEQ ID NO: 1791227 - RNA, 19 nt, Artificial Sequence
  Description of Artificial Sequence: Synthetic oligonucleotide
  Sense strand starting at position 2419 of SEQ ID NO: 1563043
guaguugugggugaagcaa

SEQ ID NO: 1791228 - RNA, 19 nt, Artificial Sequence
  Description of Artificial Sequence: Synthetic oligonucleotide
  Antisense strand to SEQ ID NO: 1791227
uugcuucacccacaacuac

SEQ ID NO: 1791229 - RNA, 19 nt, Artificial Sequence
  Description of Artificial Sequence: Synthetic oligonucleotide
  Sense strand starting at position 2486 of SEQ ID NO: 1563043
gagaauuguggccgcccau

SEQ ID NO: 1791230 - RNA, 19 nt, Artificial Sequence
  Description of Artificial Sequence: Synthetic oligonucleotide
  Antisense strand to SEQ ID NO: 1791229
augggcggccacaauucuc

SEQ ID NO: 1791231 - RNA, 19 nt, Artificial Sequence
  Description of Artificial Sequence: Synthetic oligonucleotide
  Sense strand starting at position 2704 of SEQ ID NO: 1563043
gacaguauaccaggaucuu

SEQ ID NO: 1791232 - RNA, 19 nt, Artificial Sequence
  Description of Artificial Sequence: Synthetic oligonucleotide
  Antisense strand to SEQ ID NO: 1791231
aagauccugguauacuguc

SEQ ID NO: 1791233 - RNA, 19 nt, Artificial Sequence
  Description of Artificial Sequence: Synthetic oligonucleotide
  Sense strand starting at position 2730 of SEQ ID NO: 1563043
ggcuguguuucccaggcaa

SEQ ID NO: 1791234 - RNA, 19 nt, Artificial Sequence
  Description of Artificial Sequence: Synthetic oligonucleotide
  Antisense strand to SEQ ID NO: 1791233
uugccugggaaacacagcc

SEQ ID NO: 1791235 - RNA, 19 nt, Artificial Sequence
  Description of Artificial Sequence: Synthetic oligonucleotide
  Sense strand starting at position 2732 of SEQ ID NO: 1563043
cuguguuucccaggcaagu

SEQ ID NO: 1791236 - RNA, 19 nt, Artificial Sequence
  Description of Artificial Sequence: Synthetic oligonucleotide
  Antisense strand to SEQ ID NO: 1791235
acuugccugggaaacacag

SEQ ID NO: 1791237 - RNA, 19 nt, Artificial Sequence
  Description of Artificial Sequence: Synthetic oligonucleotide
  Sense strand starting at position 2759 of SEQ ID NO: 1563043
cagcauuggucccaggcua

SEQ ID NO: 1791238 - RNA, 19 nt, Artificial Sequence
  Description of Artificial Sequence: Synthetic oligonucleotide
  Antisense strand to SEQ ID NO: 1791237
uagccugggaccaaugcug

SEQ ID NO: 1791239 - RNA, 19 nt, Artificial Sequence
  Description of Artificial Sequence: Synthetic oligonucleotide
  Sense strand starting at position 2839 of SEQ ID NO: 1563043
uccucuaggccucagagua

SEQ ID NO: 1791240 - RNA, 19 nt, Artificial Sequence
  Description of Artificial Sequence: Synthetic oligonucleotide
  Antisense strand to SEQ ID NO: 1791239
uacucugaggccuagagga

SEQ ID NO: 1791241 - RNA, 19 nt, Artificial Sequence
  Description of Artificial Sequence: Synthetic oligonucleotide
  Sense strand starting at position 3595 of SEQ ID NO: 1563043
ggcgggugcugaguuagaa

SEQ ID NO: 1791242 - RNA, 19 nt, Artificial Sequence
  Description of Artificial Sequence: Synthetic oligonucleotide
  Antisense strand to SEQ ID NO: 1791241
uucuaacucagcacccgcc

SEQ ID NO: 1791243 - RNA, 19 nt, Artificial Sequence
  Description of Artificial Sequence: Synthetic oligonucleotide
  Sense strand starting at position 3951 of SEQ ID NO: 1563043
acguguucuccuugguguu

SEQ ID NO: 1791244 - RNA, 19 nt, Artificial Sequence
  Description of Artificial Sequence: Synthetic oligonucleotide
  Antisense strand to SEQ ID NO: 1791243
aacaccaaggagaacacgu

SEQ ID NO: 1791245 - RNA, 19 nt, Artificial Sequence
  Description of Artificial Sequence: Synthetic oligonucleotide
  Sense strand starting at position 126 of SEQ ID NO: 1563044
cauggcuucccgggagaca

SEQ ID NO: 1791246 - RNA, 19 nt, Artificial Sequence
  Description of Artificial Sequence: Synthetic oligonucleotide
  Antisense strand to SEQ ID NO: 1791245
ugucucccgggaagccaug

SEQ ID NO: 1791247 - RNA, 19 nt, Artificial Sequence
  Description of Artificial Sequence: Synthetic oligonucleotide
  Sense strand starting at position 127 of SEQ ID NO: 1563044
auggcuucccgggagacaa

SEQ ID NO: 1791248 - RNA, 19 nt, Artificial Sequence
  Description of Artificial Sequence: Synthetic oligonucleotide
  Antisense strand to SEQ ID NO: 1791247
uugucucccgggaagccau

SEQ ID NO: 1791249 - RNA, 19 nt, Artificial Sequence
  Description of Artificial Sequence: Synthetic oligonucleotide
  Sense strand starting at position 477 of SEQ ID NO: 1563044
aucugcuuucuuggaagau

SEQ ID NO: 1791250 - RNA, 19 nt, Artificial Sequence
  Description of Artificial Sequence: Synthetic oligonucleotide
  Antisense strand to SEQ ID NO: 1791249
aucuuccaagaaagcagau

SEQ ID NO: 1791251 - RNA, 19 nt, Artificial Sequence
  Description of Artificial Sequence: Synthetic oligonucleotide
  Sense strand starting at position 674 of SEQ ID NO: 1563044
gagaauuaggacugggcau

SEQ ID NO: 1791252 - RNA, 19 nt, Artificial Sequence
  Description of Artificial Sequence: Synthetic oligonucleotide
  Antisense strand to SEQ ID NO: 1791251
augcccaguccuaauucuc

SEQ ID NO: 1791253 - RNA, 19 nt, Artificial Sequence
  Description of Artificial Sequence: Synthetic oligonucleotide
  Sense strand starting at position 872 of SEQ ID NO: 1563044
ugaaguucuggugaaacug

SEQ ID NO: 1791254 - RNA, 19 nt, Artificial Sequence
  Description of Artificial Sequence: Synthetic oligonucleotide
  Antisense strand to SEQ ID NO: 1791253
caguuucaccagaacuuca

SEQ ID NO: 1791255 - RNA, 19 nt, Artificial Sequence
  Description of Artificial Sequence: Synthetic oligonucleotide
  Sense strand starting at position 966 of SEQ ID NO: 1563044
guuaguauacugcaucaca

SEQ ID NO: 1791256 - RNA, 19 nt, Artificial Sequence
  Description of Artificial Sequence: Synthetic oligonucleotide
  Antisense strand to SEQ ID NO: 1791255
ugugaugcaguauacuaac

SEQ ID NO: 1791257 - RNA, 19 nt, Artificial Sequence
  Description of Artificial Sequence: Synthetic oligonucleotide
  Sense strand starting at position 1098 of SEQ ID NO: 1563044
auuggauuguguuccauaa

SEQ ID NO: 1791258 - RNA, 19 nt, Artificial Sequence
  Description of Artificial Sequence: Synthetic oligonucleotide
  Antisense strand to SEQ ID NO: 1791257
uuauggaacacaauccaau

SEQ ID NO: 1791259 - RNA, 19 nt, Artificial Sequence
  Description of Artificial Sequence: Synthetic oligonucleotide
  Sense strand starting at position 1102 of SEQ ID NO: 1563044
gauuguguuccauaagccu

SEQ ID NO: 1791260 - RNA, 19 nt, Artificial Sequence
  Description of Artificial Sequence: Synthetic oligonucleotide
  Antisense strand to SEQ ID NO: 1791259
aggcuuauggaacacaauc

SEQ ID NO: 1791261 - RNA, 19 nt, Artificial Sequence
  Description of Artificial Sequence: Synthetic oligonucleotide
  Sense strand starting at position 1246 of SEQ ID NO: 1563044
gaagcagaagacugauagu

SEQ ID NO: 1791262 - RNA, 19 nt, Artificial Sequence
  Description of Artificial Sequence: Synthetic oligonucleotide
  Antisense strand to SEQ ID NO: 1791261
acuaucagucuucugcuuc

SEQ ID NO: 1791263 - RNA, 19 nt, Artificial Sequence
  Description of Artificial Sequence: Synthetic oligonucleotide
  Sense strand starting at position 1256 of SEQ ID NO: 1563044
acugauaguguuggccaaa

SEQ ID NO: 1791264 - RNA, 19 nt, Artificial Sequence
  Description of Artificial Sequence: Synthetic oligonucleotide
  Antisense strand to SEQ ID NO: 1791263
uuuggccaacacuaucagu

SEQ ID NO: 1791265 - RNA, 19 nt, Artificial Sequence
  Description of Artificial Sequence: Synthetic oligonucleotide
  Sense strand starting at position 1259 of SEQ ID NO: 1563044
gauaguguuggccaaacug

SEQ ID NO: 1791266 - RNA, 19 nt, Artificial Sequence
  Description of Artificial Sequence: Synthetic oligonucleotide
  Antisense strand to SEQ ID NO: 1791265
caguuuggccaacacuauc

SEQ ID NO: 1791267 - RNA, 19 nt, Artificial Sequence
  Description of Artificial Sequence: Synthetic oligonucleotide
  Sense strand starting at position 1387 of SEQ ID NO: 1563044
ggcugaugggacugguaaa

SEQ ID NO: 1791268 - RNA, 19 nt, Artificial Sequence
  Description of Artificial Sequence: Synthetic oligonucleotide
  Antisense strand to SEQ ID NO: 1791267
uuuaccagucccaucagcc

SEQ ID NO: 1791269 - RNA, 19 nt, Artificial Sequence
  Description of Artificial Sequence: Synthetic oligonucleotide
  Sense strand starting at position 1388 of SEQ ID NO: 1563044
gcugaugggacugguaaag

SEQ ID NO: 1791270 - RNA, 19 nt, Artificial Sequence
  Description of Artificial Sequence: Synthetic oligonucleotide
  Antisense strand to SEQ ID NO: 1791269
cuuuaccagucccaucagc

SEQ ID NO: 1791271 - RNA, 19 nt, Artificial Sequence
  Description of Artificial Sequence: Synthetic oligonucleotide
  Sense strand starting at position 1468 of SEQ ID NO: 1563044
ugagcacucccuggagaga

SEQ ID NO: 1791272 - RNA, 19 nt, Artificial Sequence
  Description of Artificial Sequence: Synthetic oligonucleotide
  Antisense strand to SEQ ID NO: 1791271
ucucuccagggagugcuca

SEQ ID NO: 1791273 - RNA, 19 nt, Artificial Sequence
  Description of Artificial Sequence: Synthetic oligonucleotide
  Sense strand starting at position 1481 of SEQ ID NO: 1563044
gagagaaaggcccagugua

SEQ ID NO: 1791274 - RNA, 19 nt, Artificial Sequence
  Description of Artificial Sequence: Synthetic oligonucleotide
  Antisense strand to SEQ ID NO: 1791273
uacacugggccuuucucuc

SEQ ID NO: 1791275 - RNA, 19 nt, Artificial Sequence
  Description of Artificial Sequence: Synthetic oligonucleotide
  Sense strand starting at position 1676 of SEQ ID NO: 1563044
cuuuguugccugccaugua

SEQ ID NO: 1791276 - RNA, 19 nt, Artificial Sequence
  Description of Artificial Sequence: Synthetic oligonucleotide
  Antisense strand to SEQ ID NO: 1791275
uacauggcaggcaacaaag

SEQ ID NO: 1791277 - RNA, 19 nt, Artificial Sequence
  Description of Artificial Sequence: Synthetic oligonucleotide
  Sense strand starting at position 1680 of SEQ ID NO: 1563044
guugccugccauguaguaa

SEQ ID NO: 1791278 - RNA, 19 nt, Artificial Sequence
  Description of Artificial Sequence: Synthetic oligonucleotide
  Antisense strand to SEQ ID NO: 1791277
uuacuacauggcaggcaac

SEQ ID NO: 1791279 - RNA, 19 nt, Artificial Sequence
  Description of Artificial Sequence: Synthetic oligonucleotide
  Sense strand starting at position 1875 of SEQ ID NO: 1563044
gaacucuucuagccgggau

SEQ ID NO: 1791280 - RNA, 19 nt, Artificial Sequence
  Description of Artificial Sequence: Synthetic oligonucleotide
  Antisense strand to SEQ ID NO: 1791279
aucccggcuagaagaguuc

SEQ ID NO: 1791281 - RNA, 19 nt, Artificial Sequence
  Description of Artificial Sequence: Synthetic oligonucleotide
  Sense strand starting at position 2099 of SEQ ID NO: 1563044
agaugaagcugacugguuu

SEQ ID NO: 1791282 - RNA, 19 nt, Artificial Sequence
  Description of Artificial Sequence: Synthetic oligonucleotide
  Antisense strand to SEQ ID NO: 1791281
aaaccagucagcuucaucu

SEQ ID NO: 1791283 - RNA, 19 nt, Artificial Sequence
  Description of Artificial Sequence: Synthetic oligonucleotide
  Sense strand starting at position 2103 of SEQ ID NO: 1563044
gaagcugacugguuugaau

SEQ ID NO: 1791284 - RNA, 19 nt, Artificial Sequence
  Description of Artificial Sequence: Synthetic oligonucleotide
  Antisense strand to SEQ ID NO: 1791283
auucaaaccagucagcuuc

SEQ ID NO: 1791285 - RNA, 19 nt, Artificial Sequence
  Description of Artificial Sequence: Synthetic oligonucleotide
  Sense strand starting at position 2923 of SEQ ID NO: 1563044
cauguauuagggugaucac

SEQ ID NO: 1791286 - RNA, 19 nt, Artificial Sequence
  Description of Artificial Sequence: Synthetic oligonucleotide
  Antisense strand to SEQ ID NO: 1791285
gugaucacccuaauacaug

SEQ ID NO: 1791287 - RNA, 19 nt, Artificial Sequence
  Description of Artificial Sequence: Synthetic oligonucleotide
  Sense strand starting at position 2924 of SEQ ID NO: 1563044
auguauuagggugaucacu

SEQ ID NO: 1791288 - RNA, 19 nt, Artificial Sequence
  Description of Artificial Sequence: Synthetic oligonucleotide
  Antisense strand to SEQ ID NO: 1791287
agugaucacccuaauacau

SEQ ID NO: 1791289 - RNA, 19 nt, Artificial Sequence
  Description of Artificial Sequence: Synthetic oligonucleotide
  Sense strand starting at position 2926 of SEQ ID NO: 1563044
guauuagggugaucacuga

SEQ ID NO: 1791290 - RNA, 19 nt, Artificial Sequence
  Description of Artificial Sequence: Synthetic oligonucleotide
  Antisense strand to SEQ ID NO: 1791289
ucagugaucacccuaauac

SEQ ID NO: 1791291 - RNA, 19 nt, Artificial Sequence
  Description of Artificial Sequence: Synthetic oligonucleotide
  Sense strand starting at position 2930 of SEQ ID NO: 1563044
uagggugaucacugaacug

SEQ ID NO: 1791292 - RNA, 19 nt, Artificial Sequence
  Description of Artificial Sequence: Synthetic oligonucleotide
  Antisense strand to SEQ ID NO: 1791291
caguucagugaucacccua

SEQ ID NO: 1791293 - RNA, 19 nt, Artificial Sequence
  Description of Artificial Sequence: Synthetic oligonucleotide
  Sense strand starting at position 3217 of SEQ ID NO: 1563044
gacuuaagccagugaauag

SEQ ID NO: 1791294 - RNA, 19 nt, Artificial Sequence
  Description of Artificial Sequence: Synthetic oligonucleotide
  Antisense strand to SEQ ID NO: 1791293
cuauucacuggcuuaaguc

SEQ ID NO: 1791295 - RNA, 19 nt, Artificial Sequence
  Description of Artificial Sequence: Synthetic oligonucleotide
  Sense strand starting at position 3227 of SEQ ID NO: 1563044
agugaauagcagugacuau

SEQ ID NO: 1791296 - RNA, 19 nt, Artificial Sequence
  Description of Artificial Sequence: Synthetic oligonucleotide
  Antisense strand to SEQ ID NO: 1791295
auagucacugcuauucacu

SEQ ID NO: 1791297 - RNA, 19 nt, Artificial Sequence
  Description of Artificial Sequence: Synthetic oligonucleotide
  Sense strand starting at position 3228 of SEQ ID NO: 1563044
gugaauagcagugacuauu

SEQ ID NO: 1791298 - RNA, 19 nt, Artificial Sequence
  Description of Artificial Sequence: Synthetic oligonucleotide
  Antisense strand to SEQ ID NO: 1791297
aauagucacugcuauucac

SEQ ID NO: 1791299 - RNA, 19 nt, Artificial Sequence
  Description of Artificial Sequence: Synthetic oligonucleotide
  Sense strand starting at position 3237 of SEQ ID NO: 1563044
agugacuauucuuccagau

SEQ ID NO: 1791300 - RNA, 19 nt, Artificial Sequence
  Description of Artificial Sequence: Synthetic oligonucleotide
  Antisense strand to SEQ ID NO: 1791299
aucuggaagaauagucacu

SEQ ID NO: 1791301 - RNA, 19 nt, Artificial Sequence
  Description of Artificial Sequence: Synthetic oligonucleotide
  Sense strand starting at position 3263 of SEQ ID NO: 1563044
ggagguuuccaagaaguuc

SEQ ID NO: 1791302 - RNA, 19 nt, Artificial Sequence
  Description of Artificial Sequence: Synthetic oligonucleotide
  Antisense strand to SEQ ID NO: 1791301
gaacuucuuggaaaccucc

SEQ ID NO: 1791303 - RNA, 19 nt, Artificial Sequence
  Description of Artificial Sequence: Synthetic oligonucleotide
  Sense strand starting at position 3336 of SEQ ID NO: 1563044
guuauuacuggccauuacu

SEQ ID NO: 1791304 - RNA, 19 nt, Artificial Sequence
  Description of Artificial Sequence: Synthetic oligonucleotide
  Antisense strand to SEQ ID NO: 1791303
aguaauggccaguaauaac

SEQ ID NO: 1791305 - RNA, 19 nt, Artificial Sequence
  Description of Artificial Sequence: Synthetic oligonucleotide
  Sense strand starting at position 3344 of SEQ ID NO: 1563044
uggccauuacuaugaaaga

SEQ ID NO: 1791306 - RNA, 19 nt, Artificial Sequence
  Description of Artificial Sequence: Synthetic oligonucleotide
  Antisense strand to SEQ ID NO: 1791305
ucuuucauaguaauggcca

SEQ ID NO: 1791307 - RNA, 19 nt, Artificial Sequence
  Description of Artificial Sequence: Synthetic oligonucleotide
  Sense strand starting at position 3445 of SEQ ID NO: 1563044
aaguuaucugacugagcca

SEQ ID NO: 1791308 - RNA, 19 nt, Artificial Sequence
  Description of Artificial Sequence: Synthetic oligonucleotide
  Antisense strand to SEQ ID NO: 1791307
uggcucagucagauaacuu

SEQ ID NO: 1791309 - RNA, 19 nt, Artificial Sequence
  Description of Artificial Sequence: Synthetic oligonucleotide
  Sense strand starting at position 3566 of SEQ ID NO: 1563044
gccaaauugcuccaaguga

SEQ ID NO: 1791310 - RNA, 19 nt, Artificial Sequence
  Description of Artificial Sequence: Synthetic oligonucleotide
  Antisense strand to SEQ ID NO: 1791309
ucacuuggagcaauuuggc

SEQ ID NO: 1791311 - RNA, 19 nt, Artificial Sequence
  Description of Artificial Sequence: Synthetic oligonucleotide
  Sense strand starting at position 3631 of SEQ ID NO: 1563044
gguaaagugagguguaaua

SEQ ID NO: 1791312 - RNA, 19 nt, Artificial Sequence
  Description of Artificial Sequence: Synthetic oligonucleotide
  Antisense strand to SEQ ID NO: 1791311
uauuacaccucacuuuacc

SEQ ID NO: 1791313 - RNA, 19 nt, Artificial Sequence
  Description of Artificial Sequence: Synthetic oligonucleotide
  Sense strand starting at position 3638 of SEQ ID NO: 1563044
ugagguguaauagacaguu

SEQ ID NO: 1791314 - RNA, 19 nt, Artificial Sequence
  Description of Artificial Sequence: Synthetic oligonucleotide
  Antisense strand to SEQ ID NO: 1791313
aacugucuauuacaccuca

SEQ ID NO: 1791315 - RNA, 19 nt, Artificial Sequence
  Description of Artificial Sequence: Synthetic oligonucleotide
  Sense strand starting at position 3640 of SEQ ID NO: 1563044
agguguaauagacaguuua

SEQ ID NO: 1791316 - RNA, 19 nt, Artificial Sequence
  Description of Artificial Sequence: Synthetic oligonucleotide
  Antisense strand to SEQ ID NO: 1791315
uaaacugucuauuacaccu

SEQ ID NO: 1791317 - RNA, 19 nt, Artificial Sequence
  Description of Artificial Sequence: Synthetic oligonucleotide
  Sense strand starting at position 3662 of SEQ ID NO: 1563044
uaguuacaaugguuuauga

SEQ ID NO: 1791318 - RNA, 19 nt, Artificial Sequence
  Description of Artificial Sequence: Synthetic oligonucleotide
  Antisense strand to SEQ ID NO: 1791317
ucauaaaccauuguaacua

SEQ ID NO: 1791319 - RNA, 19 nt, Artificial Sequence
  Description of Artificial Sequence: Synthetic oligonucleotide
  Sense strand starting at position 3752 of SEQ ID NO: 1563044
aaagguaagucagauuuau

SEQ ID NO: 1791320 - RNA, 19 nt, Artificial Sequence
  Description of Artificial Sequence: Synthetic oligonucleotide
  Antisense strand to SEQ ID NO: 1791319
auaaaucugacuuaccuuu

SEQ ID NO: 1791321 - RNA, 19 nt, Artificial Sequence
  Description of Artificial Sequence: Synthetic oligonucleotide
  Sense strand starting at position 3795 of SEQ ID NO: 1563044
ccaccucauucuuugggaa

SEQ ID NO: 1791322 - RNA, 19 nt, Artificial Sequence
  Description of Artificial Sequence: Synthetic oligonucleotide
  Antisense strand to SEQ ID NO: 1791321
uucccaaagaaugaggugg

SEQ ID NO: 1791323 - RNA, 19 nt, Artificial Sequence
  Description of Artificial Sequence: Synthetic oligonucleotide
  Sense strand starting at position 3807 of SEQ ID NO: 1563044
uugggaaacuggucucaaa

SEQ ID NO: 1791324 - RNA, 19 nt, Artificial Sequence
  Description of Artificial Sequence: Synthetic oligonucleotide
  Antisense strand to SEQ ID NO: 1791323
uuugagaccaguuucccaa

SEQ ID NO: 1791325 - RNA, 19 nt, Artificial Sequence
  Description of Artificial Sequence: Synthetic oligonucleotide
  Sense strand starting at position 12 of SEQ ID NO: 1563045
gagcuuuaaacugggagag

SEQ ID NO: 1791326 - RNA, 19 nt, Artificial Sequence
  Description of Artificial Sequence: Synthetic oligonucleotide
  Antisense strand to SEQ ID NO: 1791325
cucucccaguuuaaagcuc

SEQ ID NO: 1791327 - RNA, 19 nt, Artificial Sequence
  Description of Artificial Sequence: Synthetic oligonucleotide
  Sense strand starting at position 40 of SEQ ID NO: 1563045
ugggauccuuccuuguacu

SEQ ID NO: 1791328 - RNA, 19 nt, Artificial Sequence
  Description of Artificial Sequence: Synthetic oligonucleotide
  Antisense strand to SEQ ID NO: 1791327
aguacaaggaaggauccca

SEQ ID NO: 1791329 - RNA, 19 nt, Artificial Sequence
  Description of Artificial Sequence: Synthetic oligonucleotide
  Sense strand starting at position 41 of SEQ ID NO: 1563045
gggauccuuccuuguacua

SEQ ID NO: 1791330 - RNA, 19 nt, Artificial Sequence
  Description of Artificial Sequence: Synthetic oligonucleotide
  Antisense strand to SEQ ID NO: 1791329
uaguacaaggaaggauccc

SEQ ID NO: 1791331 - RNA, 19 nt, Artificial Sequence
  Description of Artificial Sequence: Synthetic oligonucleotide
  Sense strand starting at position 110 of SEQ ID NO: 1563045
gaaugaggcugggugcaau

SEQ ID NO: 1791332 - RNA, 19 nt, Artificial Sequence
  Description of Artificial Sequence: Synthetic oligonucleotide
  Antisense strand to SEQ ID NO: 1791331
auugcacccagccucauuc

SEQ ID NO: 1791333 - RNA, 19 nt, Artificial Sequence
  Description of Artificial Sequence: Synthetic oligonucleotide
  Sense strand starting at position 121 of SEQ ID NO: 1563045
ggugcaauuaagugacuca

SEQ ID NO: 1791334 - RNA, 19 nt, Artificial Sequence
  Description of Artificial Sequence: Synthetic oligonucleotide
  Antisense strand to SEQ ID NO: 1791333
ugagucacuuaauugcacc

SEQ ID NO: 1791335 - RNA, 19 nt, Artificial Sequence
  Description of Artificial Sequence: Synthetic oligonucleotide
  Sense strand starting at position 128 of SEQ ID NO: 1563045
uuaagugacucagugcaga

SEQ ID NO: 1791336 - RNA, 19 nt, Artificial Sequence
  Description of Artificial Sequence: Synthetic oligonucleotide
  Antisense strand to SEQ ID NO: 1791335
ucugcacugagucacuuaa

SEQ ID NO: 1791337 - RNA, 19 nt, Artificial Sequence
  Description of Artificial Sequence: Synthetic oligonucleotide
  Sense strand starting at position 131 of SEQ ID NO: 1563045
agugacucagugcagauau

SEQ ID NO: 1791338 - RNA, 19 nt, Artificial Sequence
  Description of Artificial Sequence: Synthetic oligonucleotide
  Antisense strand to SEQ ID NO: 1791337
auaucugcacugagucacu

SEQ ID NO: 1791339 - RNA, 19 nt, Artificial Sequence
  Description of Artificial Sequence: Synthetic oligonucleotide
  Sense strand starting at position 272 of SEQ ID NO: 1563045
gcugguugaacccagaacu

SEQ ID NO: 1791340 - RNA, 19 nt, Artificial Sequence
  Description of Artificial Sequence: Synthetic oligonucleotide
  Antisense strand to SEQ ID NO: 1791339
aguucuggguucaaccagc

SEQ ID NO: 1791341 - RNA, 19 nt, Artificial Sequence
  Description of Artificial Sequence: Synthetic oligonucleotide
  Sense strand starting at position 374 of SEQ ID NO: 1563045
agaugagaggcuuggaguu

SEQ ID NO: 1791342 - RNA, 19 nt, Artificial Sequence
  Description of Artificial Sequence: Synthetic oligonucleotide
  Antisense strand to SEQ ID NO: 1791341
aacuccaagccucucaucu

SEQ ID NO: 1791343 - RNA, 19 nt, Artificial Sequence
  Description of Artificial Sequence: Synthetic oligonucleotide
  Sense strand starting at position 1012 of SEQ ID NO: 1563045
aggagacugugcuccaaga

SEQ ID NO: 1791344 - RNA, 19 nt, Artificial Sequence
  Description of Artificial Sequence: Synthetic oligonucleotide
  Antisense strand to SEQ ID NO: 1791343
ucuuggagcacagucuccu

SEQ ID NO: 1791345 - RNA, 19 nt, Artificial Sequence
  Description of Artificial Sequence: Synthetic oligonucleotide
  Sense strand starting at position 1387 of SEQ ID NO: 1563045
agggauuagacuugucuca

SEQ ID NO: 1791346 - RNA, 19 nt, Artificial Sequence
  Description of Artificial Sequence: Synthetic oligonucleotide
  Antisense strand to SEQ ID NO: 1791345
ugagacaagucuaaucccu

SEQ ID NO: 1791347 - RNA, 19 nt, Artificial Sequence
  Description of Artificial Sequence: Synthetic oligonucleotide
  Sense strand starting at position 1389 of SEQ ID NO: 1563045
ggauuagacuugucucaug

SEQ ID NO: 1791348 - RNA, 19 nt, Artificial Sequence
  Description of Artificial Sequence: Synthetic oligonucleotide
  Antisense strand to SEQ ID NO: 1791347
caugagacaagucuaaucc

SEQ ID NO: 1791349 - RNA, 19 nt, Artificial Sequence
  Description of Artificial Sequence: Synthetic oligonucleotide
  Sense strand starting at position 1456 of SEQ ID NO: 1563045
ucaguaugcgcugaaugaa

SEQ ID NO: 1791350 - RNA, 19 nt, Artificial Sequence
  Description of Artificial Sequence: Synthetic oligonucleotide
  Antisense strand to SEQ ID NO: 1791349
uucauucagcgcauacuga

SEQ ID NO: 1791351 - RNA, 19 nt, Artificial Sequence
  Description of Artificial Sequence: Synthetic oligonucleotide
  Sense strand starting at position 1465 of SEQ ID NO: 1563045
gcugaaugaaugugugaac

SEQ ID NO: 1791352 - RNA, 19 nt, Artificial Sequence
  Description of Artificial Sequence: Synthetic oligonucleotide
  Antisense strand to SEQ ID NO: 1791351
guucacacauucauucagc

SEQ ID NO: 1791353 - RNA, 19 nt, Artificial Sequence
  Description of Artificial Sequence: Synthetic oligonucleotide
  Sense strand starting at position 1476 of SEQ ID NO: 1563045
gugugaacgaaugacugaa

SEQ ID NO: 1791354 - RNA, 19 nt, Artificial Sequence
  Description of Artificial Sequence: Synthetic oligonucleotide
  Antisense strand to SEQ ID NO: 1791353
uucagucauucguucacac

SEQ ID NO: 1791355 - RNA, 19 nt, Artificial Sequence
  Description of Artificial Sequence: Synthetic oligonucleotide
  Sense strand starting at position 1478 of SEQ ID NO: 1563045
gugaacgaaugacugaauu

SEQ ID NO: 1791356 - RNA, 19 nt, Artificial Sequence
  Description of Artificial Sequence: Synthetic oligonucleotide
  Antisense strand to SEQ ID NO: 1791355
aauucagucauucguucac

SEQ ID NO: 1791357 - RNA, 19 nt, Artificial Sequence
  Description of Artificial Sequence: Synthetic oligonucleotide
  Sense strand starting at position 1499 of SEQ ID NO: 1563045
cggagaucuugucugguga

SEQ ID NO: 1791358 - RNA, 19 nt, Artificial Sequence
  Description of Artificial Sequence: Synthetic oligonucleotide
  Antisense strand to SEQ ID NO: 1791357
ucaccagacaagaucuccg

SEQ ID NO: 1791359 - RNA, 19 nt, Artificial Sequence
  Description of Artificial Sequence: Synthetic oligonucleotide
  Sense strand starting at position 1500 of SEQ ID NO: 1563045
ggagaucuugucuggugag

SEQ ID NO: 1791360 - RNA, 19 nt, Artificial Sequence
  Description of Artificial Sequence: Synthetic oligonucleotide
  Antisense strand to SEQ ID NO: 1791359
cucaccagacaagaucucc

SEQ ID NO: 1791361 - RNA, 19 nt, Artificial Sequence
  Description of Artificial Sequence: Synthetic oligonucleotide
  Sense strand starting at position 1537 of SEQ ID NO: 1563045
aucacaauaggauguguua

SEQ ID NO: 1791362 - RNA, 19 nt, Artificial Sequence
  Description of Artificial Sequence: Synthetic oligonucleotide
  Antisense strand to SEQ ID NO: 1791361
uaacacauccuauugugau

SEQ ID NO: 1791363 - RNA, 19 nt, Artificial Sequence
  Description of Artificial Sequence: Synthetic oligonucleotide
  Sense strand starting at position 1540 of SEQ ID NO: 1563045
acaauaggauguguuaaau

SEQ ID NO: 1791364 - RNA, 19 nt, Artificial Sequence
  Description of Artificial Sequence: Synthetic oligonucleotide
  Antisense strand to SEQ ID NO: 1791363
auuuaacacauccuauugu

SEQ ID NO: 1791365 - RNA, 19 nt, Artificial Sequence
  Description of Artificial Sequence: Synthetic oligonucleotide
  Sense strand starting at position 1665 of SEQ ID NO: 1563045
acaggauagaggcgaguua

SEQ ID NO: 1791366 - RNA, 19 nt, Artificial Sequence
  Description of Artificial Sequence: Synthetic oligonucleotide
  Antisense strand to SEQ ID NO: 1791365
uaacucgccucuauccugu

SEQ ID NO: 1791367 - RNA, 19 nt, Artificial Sequence
  Description of Artificial Sequence: Synthetic oligonucleotide
  Sense strand starting at position 1674 of SEQ ID NO: 1563045
aggcgaguuacucaccaca

SEQ ID NO: 1791368 - RNA, 19 nt, Artificial Sequence
  Description of Artificial Sequence: Synthetic oligonucleotide
  Antisense strand to SEQ ID NO: 1791367
uguggugaguaacucgccu

SEQ ID NO: 1791369 - RNA, 19 nt, Artificial Sequence
  Description of Artificial Sequence: Synthetic oligonucleotide
  Sense strand starting at position 1676 of SEQ ID NO: 1563045
gcgaguuacucaccacaca

SEQ ID NO: 1791370 - RNA, 19 nt, Artificial Sequence
  Description of Artificial Sequence: Synthetic oligonucleotide
  Antisense strand to SEQ ID NO: 1791369
uguguggugaguaacucgc

SEQ ID NO: 1791371 - RNA, 19 nt, Artificial Sequence
  Description of Artificial Sequence: Synthetic oligonucleotide
  Sense strand starting at position 1677 of SEQ ID NO: 1563045
cgaguuacucaccacacau

SEQ ID NO: 1791372 - RNA, 19 nt, Artificial Sequence
  Description of Artificial Sequence: Synthetic oligonucleotide
  Antisense strand to SEQ ID NO: 1791371
auguguggugaguaacucg

SEQ ID NO: 1791373 - RNA, 19 nt, Artificial Sequence
  Description of Artificial Sequence: Synthetic oligonucleotide
  Sense strand starting at position 2037 of SEQ ID NO: 1563045
gugagacaucuugaggcca

SEQ ID NO: 1791374 - RNA, 19 nt, Artificial Sequence
  Description of Artificial Sequence: Synthetic oligonucleotide
  Antisense strand to SEQ ID NO: 1791373
uggccucaagaugucucac

SEQ ID NO: 1791375 - RNA, 19 nt, Artificial Sequence
  Description of Artificial Sequence: Synthetic oligonucleotide
  Sense strand starting at position 2188 of SEQ ID NO: 1563045
cccgguacuccuuaccaaa

SEQ ID NO: 1791376 - RNA, 19 nt, Artificial Sequence
  Description of Artificial Sequence: Synthetic oligonucleotide
  Antisense strand to SEQ ID NO: 1791375
uuugguaaggaguaccggg

SEQ ID NO: 1791377 - RNA, 19 nt, Artificial Sequence
  Description of Artificial Sequence: Synthetic oligonucleotide
  Sense strand starting at position 2516 of SEQ ID NO: 1563045
guuaaagaaugggauuaag

SEQ ID NO: 1791378 - RNA, 19 nt, Artificial Sequence
  Description of Artificial Sequence: Synthetic oligonucleotide
  Antisense strand to SEQ ID NO: 1791377
cuuaaucccauucuuuaac

SEQ ID NO: 1791379 - RNA, 19 nt, Artificial Sequence
  Description of Artificial Sequence: Synthetic oligonucleotide
  Sense strand starting at position 2902 of SEQ ID NO: 1563045
uugccagaacucggaaagu

SEQ ID NO: 1791380 - RNA, 19 nt, Artificial Sequence
  Description of Artificial Sequence: Synthetic oligonucleotide
  Antisense strand to SEQ ID NO: 1791379
acuuuccgaguucuggcaa

SEQ ID NO: 1791381 - RNA, 19 nt, Artificial Sequence
  Description of Artificial Sequence: Synthetic oligonucleotide
  Sense strand starting at position 2911 of SEQ ID NO: 1563045
cucggaaaguaaccucaaa

SEQ ID NO: 1791382 - RNA, 19 nt, Artificial Sequence
  Description of Artificial Sequence: Synthetic oligonucleotide
  Antisense strand to SEQ ID NO: 1791381
uuugagguuacuuuccgag

SEQ ID NO: 1791383 - RNA, 19 nt, Artificial Sequence
  Description of Artificial Sequence: Synthetic oligonucleotide
  Sense strand starting at position 2989 of SEQ ID NO: 1563045
agaaucaauguauacgagu

SEQ ID NO: 1791384 - RNA, 19 nt, Artificial Sequence
  Description of Artificial Sequence: Synthetic oligonucleotide
  Antisense strand to SEQ ID NO: 1791383
acucguauacauugauucu

SEQ ID NO: 1791385 - RNA, 19 nt, Artificial Sequence
  Description of Artificial Sequence: Synthetic oligonucleotide
  Sense strand starting at position 2996 of SEQ ID NO: 1563045
auguauacgaguuaacuag

SEQ ID NO: 1791386 - RNA, 19 nt, Artificial Sequence
  Description of Artificial Sequence: Synthetic oligonucleotide
  Antisense strand to SEQ ID NO: 1791385
cuaguuaacucguauacau

SEQ ID NO: 1791387 - RNA, 19 nt, Artificial Sequence
  Description of Artificial Sequence: Synthetic oligonucleotide
  Sense strand starting at position 3000 of SEQ ID NO: 1563045
auacgaguuaacuaguggu

SEQ ID NO: 1791388 - RNA, 19 nt, Artificial Sequence
  Description of Artificial Sequence: Synthetic oligonucleotide
  Antisense strand to SEQ ID NO: 1791387
accacuaguuaacucguau

SEQ ID NO: 1791389 - RNA, 19 nt, Artificial Sequence
  Description of Artificial Sequence: Synthetic oligonucleotide
  Sense strand starting at position 3042 of SEQ ID NO: 1563045
acuuaaccucucgaguuua

SEQ ID NO: 1791390 - RNA, 19 nt, Artificial Sequence
  Description of Artificial Sequence: Synthetic oligonucleotide
  Antisense strand to SEQ ID NO: 1791389
uaaacucgagagguuaagu

SEQ ID NO: 1791391 - RNA, 19 nt, Artificial Sequence
  Description of Artificial Sequence: Synthetic oligonucleotide
  Sense strand starting at position 3065 of SEQ ID NO: 1563045
aguucuuccugugugagaa

SEQ ID NO: 1791392 - RNA, 19 nt, Artificial Sequence
  Description of Artificial Sequence: Synthetic oligonucleotide
  Antisense strand to SEQ ID NO: 1791391
uucucacacaggaagaacu

SEQ ID NO: 1791393 - RNA, 19 nt, Artificial Sequence
  Description of Artificial Sequence: Synthetic oligonucleotide
  Sense strand starting at position 3122 of SEQ ID NO: 1563045
agcucaauuugugaagaca

SEQ ID NO: 1791394 - RNA, 19 nt, Artificial Sequence
  Description of Artificial Sequence: Synthetic oligonucleotide
  Antisense strand to SEQ ID NO: 1791393
ugucuucacaaauugagcu

SEQ ID NO: 1791395 - RNA, 19 nt, Artificial Sequence
  Description of Artificial Sequence: Synthetic oligonucleotide
  Sense strand starting at position 3326 of SEQ ID NO: 1563045
augauagguuguccaguca

SEQ ID NO: 1791396 - RNA, 19 nt, Artificial Sequence
  Description of Artificial Sequence: Synthetic oligonucleotide
  Antisense strand to SEQ ID NO: 1791395
ugacuggacaaccuaucau

SEQ ID NO: 1791397 - RNA, 19 nt, Artificial Sequence
  Description of Artificial Sequence: Synthetic oligonucleotide
  Sense strand starting at position 3452 of SEQ ID NO: 1563045
gggagucauggugaagugu

SEQ ID NO: 1791398 - RNA, 19 nt, Artificial Sequence
  Description of Artificial Sequence: Synthetic oligonucleotide
  Antisense strand to SEQ ID NO: 1791397
acacuucaccaugacuccc

SEQ ID NO: 1791399 - RNA, 19 nt, Artificial Sequence
  Description of Artificial Sequence: Synthetic oligonucleotide
  Sense strand starting at position 3527 of SEQ ID NO: 1563045
gccuguuuccaguaacaac

SEQ ID NO: 1791400 - RNA, 19 nt, Artificial Sequence
  Description of Artificial Sequence: Synthetic oligonucleotide
  Antisense strand to SEQ ID NO: 1791399
guuguuacuggaaacaggc

SEQ ID NO: 1791401 - RNA, 19 nt, Artificial Sequence
  Description of Artificial Sequence: Synthetic oligonucleotide
  Sense strand starting at position 3644 of SEQ ID NO: 1563045
uccagagagucacuucuga

SEQ ID NO: 1791402 - RNA, 19 nt, Artificial Sequence
  Description of Artificial Sequence: Synthetic oligonucleotide
  Antisense strand to SEQ ID NO: 1791401
ucagaagugacucucugga

SEQ ID NO: 1791403 - RNA, 19 nt, Artificial Sequence
  Description of Artificial Sequence: Synthetic oligonucleotide
  Sense strand starting at position 3955 of SEQ ID NO: 1563045
ucagcuaaucuagaggcua

SEQ ID NO: 1791404 - RNA, 19 nt, Artificial Sequence
  Description of Artificial Sequence: Synthetic oligonucleotide
  Antisense strand to SEQ ID NO: 1791403
uagccucuagauuagcuga

SEQ ID NO: 1791405 - RNA, 19 nt, Artificial Sequence
  Description of Artificial Sequence: Synthetic oligonucleotide
  Sense strand starting at position 153 of SEQ ID NO: 1563046
ccuuguuauccucaucuga

SEQ ID NO: 1791406 - RNA, 19 nt, Artificial Sequence
  Description of Artificial Sequence: Synthetic oligonucleotide
  Antisense strand to SEQ ID NO: 1791405
ucagaugaggauaacaagg

SEQ ID NO: 1791407 - RNA, 19 nt, Artificial Sequence
  Description of Artificial Sequence: Synthetic oligonucleotide
  Sense strand starting at position 404 of SEQ ID NO: 1563046
gcuuguuugugggugugga

SEQ ID NO: 1791408 - RNA, 19 nt, Artificial Sequence
  Description of Artificial Sequence: Synthetic oligonucleotide
  Antisense strand to SEQ ID NO: 1791407
uccacacccacaaacaagc

SEQ ID NO: 1791409 - RNA, 19 nt, Artificial Sequence
  Description of Artificial Sequence: Synthetic oligonucleotide
  Sense strand starting at position 480 of SEQ ID NO: 1563046
ggcuucucauggugagcaa

SEQ ID NO: 1791410 - RNA, 19 nt, Artificial Sequence
  Description of Artificial Sequence: Synthetic oligonucleotide
  Antisense strand to SEQ ID NO: 1791409
uugcucaccaugagaagcc

SEQ ID NO: 1791411 - RNA, 19 nt, Artificial Sequence
  Description of Artificial Sequence: Synthetic oligonucleotide
  Sense strand starting at position 537 of SEQ ID NO: 1563046
cugugacacucuucucaga

SEQ ID NO: 1791412 - RNA, 19 nt, Artificial Sequence
  Description of Artificial Sequence: Synthetic oligonucleotide
  Antisense strand to SEQ ID NO: 1791411
ucugagaagagugucacag

SEQ ID NO: 1791413 - RNA, 19 nt, Artificial Sequence
  Description of Artificial Sequence: Synthetic oligonucleotide
  Sense strand starting at position 1034 of SEQ ID NO: 1563046
accucugacuucugggaac

SEQ ID NO: 1791414 - RNA, 19 nt, Artificial Sequence
  Description of Artificial Sequence: Synthetic oligonucleotide
  Antisense strand to SEQ ID NO: 1791413
guucccagaagucagaggu

SEQ ID NO: 1791415 - RNA, 19 nt, Artificial Sequence
  Description of Artificial Sequence: Synthetic oligonucleotide
  Sense strand starting at position 1036 of SEQ ID NO: 1563046
cucugacuucugggaacag

SEQ ID NO: 1791416 - RNA, 19 nt, Artificial Sequence
  Description of Artificial Sequence: Synthetic oligonucleotide
  Antisense strand to SEQ ID NO: 1791415
cuguucccagaagucagag

SEQ ID NO: 1791417 - RNA, 19 nt, Artificial Sequence
  Description of Artificial Sequence: Synthetic oligonucleotide
  Sense strand starting at position 1037 of SEQ ID NO: 1563046
ucugacuucugggaacaga

SEQ ID NO: 1791418 - RNA, 19 nt, Artificial Sequence
  Description of Artificial Sequence: Synthetic oligonucleotide
  Antisense strand to SEQ ID NO: 1791417
ucuguucccagaagucaga

SEQ ID NO: 1791419 - RNA, 19 nt, Artificial Sequence
  Description of Artificial Sequence: Synthetic oligonucleotide
  Sense strand starting at position 1076 of SEQ ID NO: 1563046
aucaguauucuccgccaaa

SEQ ID NO: 1791420 - RNA, 19 nt, Artificial Sequence
  Description of Artificial Sequence: Synthetic oligonucleotide
  Antisense strand to SEQ ID NO: 1791419
uuuggcggagaauacugau

SEQ ID NO: 1791421 - RNA, 19 nt, Artificial Sequence
  Description of Artificial Sequence: Synthetic oligonucleotide
  Sense strand starting at position 1077 of SEQ ID NO: 1563046
ucaguauucuccgccaaac

SEQ ID NO: 1791422 - RNA, 19 nt, Artificial Sequence
  Description of Artificial Sequence: Synthetic oligonucleotide
  Antisense strand to SEQ ID NO: 1791421
guuuggcggagaauacuga

SEQ ID NO: 1791423 - RNA, 19 nt, Artificial Sequence
  Description of Artificial Sequence: Synthetic oligonucleotide
  Sense strand starting at position 1079 of SEQ ID NO: 1563046
aguauucuccgccaaacua

SEQ ID NO: 1791424 - RNA, 19 nt, Artificial Sequence
  Description of Artificial Sequence: Synthetic oligonucleotide
  Antisense strand to SEQ ID NO: 1791423
uaguuuggcggagaauacu

SEQ ID NO: 1791425 - RNA, 19 nt, Artificial Sequence
  Description of Artificial Sequence: Synthetic oligonucleotide
  Sense strand starting at position 1205 of SEQ ID NO: 1563046
gugguauccuaggaacgca

SEQ ID NO: 1791426 - RNA, 19 nt, Artificial Sequence
  Description of Artificial Sequence: Synthetic oligonucleotide
  Antisense strand to SEQ ID NO: 1791425
ugcguuccuaggauaccac

SEQ ID NO: 1791427 - RNA, 19 nt, Artificial Sequence
  Description of Artificial Sequence: Synthetic oligonucleotide
  Sense strand starting at position 1238 of SEQ ID NO: 1563046
gugguccuguuacauaaca

SEQ ID NO: 1791428 - RNA, 19 nt, Artificial Sequence
  Description of Artificial Sequence: Synthetic oligonucleotide
  Antisense strand to SEQ ID NO: 1791427
uguuauguaacaggaccac

SEQ ID NO: 1791429 - RNA, 19 nt, Artificial Sequence
  Description of Artificial Sequence: Synthetic oligonucleotide
  Sense strand starting at position 1240 of SEQ ID NO: 1563046
gguccuguuacauaacagu

SEQ ID NO: 1791430 - RNA, 19 nt, Artificial Sequence
  Description of Artificial Sequence: Synthetic oligonucleotide
  Antisense strand to SEQ ID NO: 1791429
acuguuauguaacaggacc

SEQ ID NO: 1791431 - RNA, 19 nt, Artificial Sequence
  Description of Artificial Sequence: Synthetic oligonucleotide
  Sense strand starting at position 2083 of SEQ ID NO: 1563046
gcgccaauccucugacaga

SEQ ID NO: 1791432 - RNA, 19 nt, Artificial Sequence
  Description of Artificial Sequence: Synthetic oligonucleotide
  Antisense strand to SEQ ID NO: 1791431
ucugucagaggauuggcgc

SEQ ID NO: 1791433 - RNA, 19 nt, Artificial Sequence
  Description of Artificial Sequence: Synthetic oligonucleotide
  Sense strand starting at position 2103 of SEQ ID NO: 1563046
agcccagccuguuaucuaa

SEQ ID NO: 1791434 - RNA, 19 nt, Artificial Sequence
  Description of Artificial Sequence: Synthetic oligonucleotide
  Antisense strand to SEQ ID NO: 1791433
uuagauaacaggcugggcu

SEQ ID NO: 1791435 - RNA, 19 nt, Artificial Sequence
  Description of Artificial Sequence: Synthetic oligonucleotide
  Sense strand starting at position 2110 of SEQ ID NO: 1563046
ccuguuaucuaacuuugga

SEQ ID NO: 1791436 - RNA, 19 nt, Artificial Sequence
  Description of Artificial Sequence: Synthetic oligonucleotide
  Antisense strand to SEQ ID NO: 1791435
uccaaaguuagauaacagg

SEQ ID NO: 1791437 - RNA, 19 nt, Artificial Sequence
  Description of Artificial Sequence: Synthetic oligonucleotide
  Sense strand starting at position 2113 of SEQ ID NO: 1563046
guuaucuaacuuuggaaag

SEQ ID NO: 1791438 - RNA, 19 nt, Artificial Sequence
  Description of Artificial Sequence: Synthetic oligonucleotide
  Antisense strand to SEQ ID NO: 1791437
cuuuccaaaguuagauaac

SEQ ID NO: 1791439 - RNA, 19 nt, Artificial Sequence
  Description of Artificial Sequence: Synthetic oligonucleotide
  Sense strand starting at position 2356 of SEQ ID NO: 1563046
cagggaugcggucggacau

SEQ ID NO: 1791440 - RNA, 19 nt, Artificial Sequence
  Description of Artificial Sequence: Synthetic oligonucleotide
  Antisense strand to SEQ ID NO: 1791439
auguccgaccgcaucccug

SEQ ID NO: 1791441 - RNA, 19 nt, Artificial Sequence
  Description of Artificial Sequence: Synthetic oligonucleotide
  Sense strand starting at position 2431 of SEQ ID NO: 1563046
guguuuaugccaugcacac

SEQ ID NO: 1791442 - RNA, 19 nt, Artificial Sequence
  Description of Artificial Sequence: Synthetic oligonucleotide
  Antisense strand to SEQ ID NO: 1791441
gugugcauggcauaaacac

SEQ ID NO: 1791443 - RNA, 19 nt, Artificial Sequence
  Description of Artificial Sequence: Synthetic oligonucleotide
  Sense strand starting at position 2472 of SEQ ID NO: 1563046
guacauauggcaugcauaa

SEQ ID NO: 1791444 - RNA, 19 nt, Artificial Sequence
  Description of Artificial Sequence: Synthetic oligonucleotide
  Antisense strand to SEQ ID NO: 1791443
uuaugcaugccauauguac

SEQ ID NO: 1791445 - RNA, 19 nt, Artificial Sequence
  Description of Artificial Sequence: Synthetic oligonucleotide
  Sense strand starting at position 2651 of SEQ ID NO: 1563046
ucaggcuuguccuggauga

SEQ ID NO: 1791446 - RNA, 19 nt, Artificial Sequence
  Description of Artificial Sequence: Synthetic oligonucleotide
  Antisense strand to SEQ ID NO: 1791445
ucauccaggacaagccuga

SEQ ID NO: 1791447 - RNA, 19 nt, Artificial Sequence
  Description of Artificial Sequence: Synthetic oligonucleotide
  Sense strand starting at position 2655 of SEQ ID NO: 1563046
gcuuguccuggaugaggaa

SEQ ID NO: 1791448 - RNA, 19 nt, Artificial Sequence
  Description of Artificial Sequence: Synthetic oligonucleotide
  Antisense strand to SEQ ID NO: 1791447
uuccucauccaggacaagc

SEQ ID NO: 1791449 - RNA, 19 nt, Artificial Sequence
  Description of Artificial Sequence: Synthetic oligonucleotide
  Sense strand starting at position 2713 of SEQ ID NO: 1563046
uuggcuauuugcuguaguu

SEQ ID NO: 1791450 - RNA, 19 nt, Artificial Sequence
  Description of Artificial Sequence: Synthetic oligonucleotide
  Antisense strand to SEQ ID NO: 1791449
aacuacagcaaauagccaa

SEQ ID NO: 1791451 - RNA, 19 nt, Artificial Sequence
  Description of Artificial Sequence: Synthetic oligonucleotide
  Sense strand starting at position 2763 of SEQ ID NO: 1563046
cccugugguccuuggguua

SEQ ID NO: 1791452 - RNA, 19 nt, Artificial Sequence
  Description of Artificial Sequence: Synthetic oligonucleotide
  Antisense strand to SEQ ID NO: 1791451
uaacccaaggaccacaggg

SEQ ID NO: 1791453 - RNA, 19 nt, Artificial Sequence
  Description of Artificial Sequence: Synthetic oligonucleotide
  Sense strand starting at position 2770 of SEQ ID NO: 1563046
guccuuggguuacuugaau

SEQ ID NO: 1791454 - RNA, 19 nt, Artificial Sequence
  Description of Artificial Sequence: Synthetic oligonucleotide
  Antisense strand to SEQ ID NO: 1791453
auucaaguaacccaaggac

SEQ ID NO: 1791455 - RNA, 19 nt, Artificial Sequence
  Description of Artificial Sequence: Synthetic oligonucleotide
  Sense strand starting at position 2776 of SEQ ID NO: 1563046
ggguuacuugaauggguga

SEQ ID NO: 1791456 - RNA, 19 nt, Artificial Sequence
  Description of Artificial Sequence: Synthetic oligonucleotide
  Antisense strand to SEQ ID NO: 1791455
ucacccauucaaguaaccc

SEQ ID NO: 1791457 - RNA, 19 nt, Artificial Sequence
  Description of Artificial Sequence: Synthetic oligonucleotide
  Sense strand starting at position 2777 of SEQ ID NO: 1563046
gguuacuugaaugggugaa

SEQ ID NO: 1791458 - RNA, 19 nt, Artificial Sequence
  Description of Artificial Sequence: Synthetic oligonucleotide
  Antisense strand to SEQ ID NO: 1791457
uucacccauucaaguaacc

SEQ ID NO: 1791459 - RNA, 19 nt, Artificial Sequence
  Description of Artificial Sequence: Synthetic oligonucleotide
  Sense strand starting at position 2798 of SEQ ID NO: 1563046
aaagguucuggaugucaac

SEQ ID NO: 1791460 - RNA, 19 nt, Artificial Sequence
  Description of Artificial Sequence: Synthetic oligonucleotide
  Antisense strand to SEQ ID NO: 1791459
guugacauccagaaccuuu

SEQ ID NO: 1791461 - RNA, 19 nt, Artificial Sequence
  Description of Artificial Sequence: Synthetic oligonucleotide
  Sense strand starting at position 2883 of SEQ ID NO: 1563046
cguacauugcugugggauc

SEQ ID NO: 1791462 - RNA, 19 nt, Artificial Sequence
  Description of Artificial Sequence: Synthetic oligonucleotide
  Antisense strand to SEQ ID NO: 1791461
gaucccacagcaauguacg

SEQ ID NO: 1791463 - RNA, 19 nt, Artificial Sequence
  Description of Artificial Sequence: Synthetic oligonucleotide
  Sense strand starting at position 2884 of SEQ ID NO: 1563046
guacauugcugugggaucu

SEQ ID NO: 1791464 - RNA, 19 nt, Artificial Sequence
  Description of Artificial Sequence: Synthetic oligonucleotide
  Antisense strand to SEQ ID NO: 1791463
agaucccacagcaauguac

SEQ ID NO: 1791465 - RNA, 19 nt, Artificial Sequence
  Description of Artificial Sequence: Synthetic oligonucleotide
  Sense strand starting at position 2980 of SEQ ID NO: 1563046
cuaguucuauggcucugaa

SEQ ID NO: 1791466 - RNA, 19 nt, Artificial Sequence
  Description of Artificial Sequence: Synthetic oligonucleotide
  Antisense strand to SEQ ID NO: 1791465
uucagagccauagaacuag

SEQ ID NO: 1791467 - RNA, 19 nt, Artificial Sequence
  Description of Artificial Sequence: Synthetic oligonucleotide
  Sense strand starting at position 2983 of SEQ ID NO: 1563046
guucuauggcucugaagcu

SEQ ID NO: 1791468 - RNA, 19 nt, Artificial Sequence
  Description of Artificial Sequence: Synthetic oligonucleotide
  Antisense strand to SEQ ID NO: 1791467
agcuucagagccauagaac

SEQ ID NO: 1791469 - RNA, 19 nt, Artificial Sequence
  Description of Artificial Sequence: Synthetic oligonucleotide
  Sense strand starting at position 3002 of SEQ ID NO: 1563046
ccagaugggcugcaauaaa

SEQ ID NO: 1791470 - RNA, 19 nt, Artificial Sequence
  Description of Artificial Sequence: Synthetic oligonucleotide
  Antisense strand to SEQ ID NO: 1791469
uuuauugcagcccaucugg

SEQ ID NO: 1791471 - RNA, 19 nt, Artificial Sequence
  Description of Artificial Sequence: Synthetic oligonucleotide
  Sense strand starting at position 3119 of SEQ ID NO: 1563046
gccucauccuuacaaguag

SEQ ID NO: 1791472 - RNA, 19 nt, Artificial Sequence
  Description of Artificial Sequence: Synthetic oligonucleotide
  Antisense strand to SEQ ID NO: 1791471
cuacuuguaaggaugaggc

SEQ ID NO: 1791473 - RNA, 19 nt, Artificial Sequence
  Description of Artificial Sequence: Synthetic oligonucleotide
  Sense strand starting at position 3259 of SEQ ID NO: 1563046
gauuaugggugugaacacu

SEQ ID NO: 1791474 - RNA, 19 nt, Artificial Sequence
  Description of Artificial Sequence: Synthetic oligonucleotide
  Antisense strand to SEQ ID NO: 1791473
aguguucacacccauaauc

SEQ ID NO: 1791475 - RNA, 19 nt, Artificial Sequence
  Description of Artificial Sequence: Synthetic oligonucleotide
  Sense strand starting at position 3285 of SEQ ID NO: 1563046
gccuguagcugguuucuaa

SEQ ID NO: 1791476 - RNA, 19 nt, Artificial Sequence
  Description of Artificial Sequence: Synthetic oligonucleotide
  Antisense strand to SEQ ID NO: 1791475
uuagaaaccagcuacaggc

SEQ ID NO: 1791477 - RNA, 19 nt, Artificial Sequence
  Description of Artificial Sequence: Synthetic oligonucleotide
  Sense strand starting at position 3527 of SEQ ID NO: 1563046
uccgauaagguuuguuuau

SEQ ID NO: 1791478 - RNA, 19 nt, Artificial Sequence
  Description of Artificial Sequence: Synthetic oligonucleotide
  Antisense strand to SEQ ID NO: 1791477
auaaacaaaccuuaucgga

SEQ ID NO: 1791479 - RNA, 19 nt, Artificial Sequence
  Description of Artificial Sequence: Synthetic oligonucleotide
  Sense strand starting at position 3528 of SEQ ID NO: 1563046
ccgauaagguuuguuuauu

SEQ ID NO: 1791480 - RNA, 19 nt, Artificial Sequence
  Description of Artificial Sequence: Synthetic oligonucleotide
  Antisense strand to SEQ ID NO: 1791479
aauaaacaaaccuuaucgg

SEQ ID NO: 1791481 - RNA, 19 nt, Artificial Sequence
  Description of Artificial Sequence: Synthetic oligonucleotide
  Sense strand starting at position 3529 of SEQ ID NO: 1563046
cgauaagguuuguuuauuu

SEQ ID NO: 1791482 - RNA, 19 nt, Artificial Sequence
  Description of Artificial Sequence: Synthetic oligonucleotide
  Antisense strand to SEQ ID NO: 1791481
aaauaaacaaaccuuaucg

SEQ ID NO: 1791483 - RNA, 19 nt, Artificial Sequence
  Description of Artificial Sequence: Synthetic oligonucleotide
  Sense strand starting at position 3965 of SEQ ID NO: 1563046
uuugcagaguuguauguuu

SEQ ID NO: 1791484 - RNA, 19 nt, Artificial Sequence
  Description of Artificial Sequence: Synthetic oligonucleotide
  Antisense strand to SEQ ID NO: 1791483
aaacauacaacucugcaaa

SEQ ID NO: 1791485 - RNA, 19 nt, Artificial Sequence
  Description of Artificial Sequence: Synthetic oligonucleotide
  Sense strand starting at position 16 of SEQ ID NO: 1563047
cugcucuccucccuugaga

SEQ ID NO: 1791486 - RNA, 19 nt, Artificial Sequence
  Description of Artificial Sequence: Synthetic oligonucleotide
  Antisense strand to SEQ ID NO: 1791485
ucucaagggaggagagcag

SEQ ID NO: 1791487 - RNA, 19 nt, Artificial Sequence
  Description of Artificial Sequence: Synthetic oligonucleotide
  Sense strand starting at position 18 of SEQ ID NO: 1563047
gcucuccucccuugagauc

SEQ ID NO: 1791488 - RNA, 19 nt, Artificial Sequence
  Description of Artificial Sequence: Synthetic oligonucleotide
  Antisense strand to SEQ ID NO: 1791487
gaucucaagggaggagagc

SEQ ID NO: 1791489 - RNA, 19 nt, Artificial Sequence
  Description of Artificial Sequence: Synthetic oligonucleotide
  Sense strand starting at position 404 of SEQ ID NO: 1563047
acccucuaggacuguuaau

SEQ ID NO: 1791490 - RNA, 19 nt, Artificial Sequence
  Description of Artificial Sequence: Synthetic oligonucleotide
  Antisense strand to SEQ ID NO: 1791489
auuaacaguccuagagggu

SEQ ID NO: 1791491 - RNA, 19 nt, Artificial Sequence
  Description of Artificial Sequence: Synthetic oligonucleotide
  Sense strand starting at position 447 of SEQ ID NO: 1563047
uugcgagcacucuacgaau

SEQ ID NO: 1791492 - RNA, 19 nt, Artificial Sequence
  Description of Artificial Sequence: Synthetic oligonucleotide
  Antisense strand to SEQ ID NO: 1791491
auucguagagugcucgcaa

SEQ ID NO: 1791493 - RNA, 19 nt, Artificial Sequence
  Description of Artificial Sequence: Synthetic oligonucleotide
  Sense strand starting at position 460 of SEQ ID NO: 1563047
acgaauaucggguagaauu

SEQ ID NO: 1791494 - RNA, 19 nt, Artificial Sequence
  Description of Artificial Sequence: Synthetic oligonucleotide
  Antisense strand to SEQ ID NO: 1791493
aauucuacccgauauucgu

SEQ ID NO: 1791495 - RNA, 19 nt, Artificial Sequence
  Description of Artificial Sequence: Synthetic oligonucleotide
  Sense strand starting at position 468 of SEQ ID NO: 1563047
cggguagaauucuuguuau

SEQ ID NO: 1791496 - RNA, 19 nt, Artificial Sequence
  Description of Artificial Sequence: Synthetic oligonucleotide
  Antisense strand to SEQ ID NO: 1791495
auaacaagaauucuacccg

SEQ ID NO: 1791497 - RNA, 19 nt, Artificial Sequence
  Description of Artificial Sequence: Synthetic oligonucleotide
  Sense strand starting at position 471 of SEQ ID NO: 1563047
guagaauucuuguuaugga

SEQ ID NO: 1791498 - RNA, 19 nt, Artificial Sequence
  Description of Artificial Sequence: Synthetic oligonucleotide
  Antisense strand to SEQ ID NO: 1791497
uccauaacaagaauucuac

SEQ ID NO: 1791499 - RNA, 19 nt, Artificial Sequence
  Description of Artificial Sequence: Synthetic oligonucleotide
  Sense strand starting at position 476 of SEQ ID NO: 1563047
auucuuguuauggaugguu

SEQ ID NO: 1791500 - RNA, 19 nt, Artificial Sequence
  Description of Artificial Sequence: Synthetic oligonucleotide
  Antisense strand to SEQ ID NO: 1791499
aaccauccauaacaagaau

SEQ ID NO: 1791501 - RNA, 19 nt, Artificial Sequence
  Description of Artificial Sequence: Synthetic oligonucleotide
  Sense strand starting at position 478 of SEQ ID NO: 1563047
ucuuguuauggaugguuau

SEQ ID NO: 1791502 - RNA, 19 nt, Artificial Sequence
  Description of Artificial Sequence: Synthetic oligonucleotide
  Antisense strand to SEQ ID NO: 1791501
auaaccauccauaacaaga

SEQ ID NO: 1791503 - RNA, 19 nt, Artificial Sequence
  Description of Artificial Sequence: Synthetic oligonucleotide
  Sense strand starting at position 479 of SEQ ID NO: 1563047
cuuguuauggaugguuauu

SEQ ID NO: 1791504 - RNA, 19 nt, Artificial Sequence
  Description of Artificial Sequence: Synthetic oligonucleotide
  Antisense strand to SEQ ID NO: 1791503
aauaaccauccauaacaag

SEQ ID NO: 1791505 - RNA, 19 nt, Artificial Sequence
  Description of Artificial Sequence: Synthetic oligonucleotide
  Sense strand starting at position 488 of SEQ ID NO: 1563047
gaugguuauuaccugguaa

SEQ ID NO: 1791506 - RNA, 19 nt, Artificial Sequence
  Description of Artificial Sequence: Synthetic oligonucleotide
  Antisense strand to SEQ ID NO: 1791505
uuaccagguaauaaccauc

SEQ ID NO: 1791507 - RNA, 19 nt, Artificial Sequence
  Description of Artificial Sequence: Synthetic oligonucleotide
  Sense strand starting at position 490 of SEQ ID NO: 1563047
ugguuauuaccugguaauu

SEQ ID NO: 1791508 - RNA, 19 nt, Artificial Sequence
  Description of Artificial Sequence: Synthetic oligonucleotide
  Antisense strand to SEQ ID NO: 1791507
aauuaccagguaauaacca

SEQ ID NO: 1791509 - RNA, 19 nt, Artificial Sequence
  Description of Artificial Sequence: Synthetic oligonucleotide
  Sense strand starting at position 492 of SEQ ID NO: 1563047
guuauuaccugguaauuuc

SEQ ID NO: 1791510 - RNA, 19 nt, Artificial Sequence
  Description of Artificial Sequence: Synthetic oligonucleotide
  Antisense strand to SEQ ID NO: 1791509
gaaauuaccagguaauaac

SEQ ID NO: 1791511 - RNA, 19 nt, Artificial Sequence
  Description of Artificial Sequence: Synthetic oligonucleotide
  Sense strand starting at position 650 of SEQ ID NO: 1563047
accugaugugcugaagcua

SEQ ID NO: 1791512 - RNA, 19 nt, Artificial Sequence
  Description of Artificial Sequence: Synthetic oligonucleotide
  Antisense strand to SEQ ID NO: 1791511
uagcuucagcacaucaggu

SEQ ID NO: 1791513 - RNA, 19 nt, Artificial Sequence
  Description of Artificial Sequence: Synthetic oligonucleotide
  Sense strand starting at position 935 of SEQ ID NO: 1563047
gccagaccugcuuuccgua

SEQ ID NO: 1791514 - RNA, 19 nt, Artificial Sequence
  Description of Artificial Sequence: Synthetic oligonucleotide
  Antisense strand to SEQ ID NO: 1791513
uacggaaagcaggucuggc

SEQ ID NO: 1791515 - RNA, 19 nt, Artificial Sequence
  Description of Artificial Sequence: Synthetic oligonucleotide
  Sense strand starting at position 1063 of SEQ ID NO: 1563047
ggacucaucugacccucau

SEQ ID NO: 1791516 - RNA, 19 nt, Artificial Sequence
  Description of Artificial Sequence: Synthetic oligonucleotide
  Antisense strand to SEQ ID NO: 1791515
augagggucagaugagucc

SEQ ID NO: 1791517 - RNA, 19 nt, Artificial Sequence
  Description of Artificial Sequence: Synthetic oligonucleotide
  Sense strand starting at position 1261 of SEQ ID NO: 1563047
augacaguucgcuacccua

SEQ ID NO: 1791518 - RNA, 19 nt, Artificial Sequence
  Description of Artificial Sequence: Synthetic oligonucleotide
  Antisense strand to SEQ ID NO: 1791517
uaggguagcgaacugucau

SEQ ID NO: 1791519 - RNA, 19 nt, Artificial Sequence
  Description of Artificial Sequence: Synthetic oligonucleotide
  Sense strand starting at position 1288 of SEQ ID NO: 1563047
cuuccuaaacuuuggugua

SEQ ID NO: 1791520 - RNA, 19 nt, Artificial Sequence
  Description of Artificial Sequence: Synthetic oligonucleotide
  Antisense strand to SEQ ID NO: 1791519
uacaccaaaguuuaggaag

SEQ ID NO: 1791521 - RNA, 19 nt, Artificial Sequence
  Description of Artificial Sequence: Synthetic oligonucleotide
  Sense strand starting at position 1453 of SEQ ID NO: 1563047
ccuggagcgucauuuaagu

SEQ ID NO: 1791522 - RNA, 19 nt, Artificial Sequence
  Description of Artificial Sequence: Synthetic oligonucleotide
  Antisense strand to SEQ ID NO: 1791521
acuuaaaugacgcuccagg

SEQ ID NO: 1791523 - RNA, 19 nt, Artificial Sequence
  Description of Artificial Sequence: Synthetic oligonucleotide
  Sense strand starting at position 1466 of SEQ ID NO: 1563047
uuaagugacugcucccgau

SEQ ID NO: 1791524 - RNA, 19 nt, Artificial Sequence
  Description of Artificial Sequence: Synthetic oligonucleotide
  Antisense strand to SEQ ID NO: 1791523
aucgggagcagucacuuaa

SEQ ID NO: 1791525 - RNA, 19 nt, Artificial Sequence
  Description of Artificial Sequence: Synthetic oligonucleotide
  Sense strand starting at position 2041 of SEQ ID NO: 1563047
ccggcucuggcacauuaau

SEQ ID NO: 1791526 - RNA, 19 nt, Artificial Sequence
  Description of Artificial Sequence: Synthetic oligonucleotide
  Antisense strand to SEQ ID NO: 1791525
auuaaugugccagagccgg

SEQ ID NO: 1791527 - RNA, 19 nt, Artificial Sequence
  Description of Artificial Sequence: Synthetic oligonucleotide
  Sense strand starting at position 2916 of SEQ ID NO: 1563047
gcuuaugaccuugggaaag

SEQ ID NO: 1791528 - RNA, 19 nt, Artificial Sequence
  Description of Artificial Sequence: Synthetic oligonucleotide
  Antisense strand to SEQ ID NO: 1791527
cuuucccaaggucauaagc

SEQ ID NO: 1791529 - RNA, 19 nt, Artificial Sequence
  Description of Artificial Sequence: Synthetic oligonucleotide
  Sense strand starting at position 2972 of SEQ ID NO: 1563047
aaauuaagagguugggcua

SEQ ID NO: 1791530 - RNA, 19 nt, Artificial Sequence
  Description of Artificial Sequence: Synthetic oligonucleotide
  Antisense strand to SEQ ID NO: 1791529
uagcccaaccucuuaauuu

SEQ ID NO: 1791531 - RNA, 19 nt, Artificial Sequence
  Description of Artificial Sequence: Synthetic oligonucleotide
  Sense strand starting at position 2987 of SEQ ID NO: 1563047
gcuagagaaucuccacagu

SEQ ID NO: 1791532 - RNA, 19 nt, Artificial Sequence
  Description of Artificial Sequence: Synthetic oligonucleotide
  Antisense strand to SEQ ID NO: 1791531
acuguggagauucucuagc

SEQ ID NO: 1791533 - RNA, 19 nt, Artificial Sequence
  Description of Artificial Sequence: Synthetic oligonucleotide
  Sense strand starting at position 3143 of SEQ ID NO: 1563047
ccgggaguuccgcagaaau

SEQ ID NO: 1791534 - RNA, 19 nt, Artificial Sequence
  Description of Artificial Sequence: Synthetic oligonucleotide
  Antisense strand to SEQ ID NO: 1791533
auuucugcggaacucccgg

SEQ ID NO: 1791535 - RNA, 19 nt, Artificial Sequence
  Description of Artificial Sequence: Synthetic oligonucleotide
  Sense strand starting at position 3195 of SEQ ID NO: 1563047
auggaaagcugcuccuaaa

SEQ ID NO: 1791536 - RNA, 19 nt, Artificial Sequence
  Description of Artificial Sequence: Synthetic oligonucleotide
  Antisense strand to SEQ ID NO: 1791535
uuuaggagcagcuuuccau

SEQ ID NO: 1791537 - RNA, 19 nt, Artificial Sequence
  Description of Artificial Sequence: Synthetic oligonucleotide
  Sense strand starting at position 3226 of SEQ ID NO: 1563047
cuuuguaccucuuuauagu

SEQ ID NO: 1791538 - RNA, 19 nt, Artificial Sequence
  Description of Artificial Sequence: Synthetic oligonucleotide
  Antisense strand to SEQ ID NO: 1791537
acuauaaagagguacaaag

SEQ ID NO: 1791539 - RNA, 19 nt, Artificial Sequence
  Description of Artificial Sequence: Synthetic oligonucleotide
  Sense strand starting at position 3227 of SEQ ID NO: 1563047
uuuguaccucuuuauagua

SEQ ID NO: 1791540 - RNA, 19 nt, Artificial Sequence
  Description of Artificial Sequence: Synthetic oligonucleotide
  Antisense strand to SEQ ID NO: 1791539
uacuauaaagagguacaaa

SEQ ID NO: 1791541 - RNA, 19 nt, Artificial Sequence
  Description of Artificial Sequence: Synthetic oligonucleotide
  Sense strand starting at position 3306 of SEQ ID NO: 1563047
cagagagcuuggcuuguuu

SEQ ID NO: 1791542 - RNA, 19 nt, Artificial Sequence
  Description of Artificial Sequence: Synthetic oligonucleotide
  Antisense strand to SEQ ID NO: 1791541
aaacaagccaagcucucug

SEQ ID NO: 1791543 - RNA, 19 nt, Artificial Sequence
  Description of Artificial Sequence: Synthetic oligonucleotide
  Sense strand starting at position 3382 of SEQ ID NO: 1563047
uagugauaguccuugguuc

SEQ ID NO: 1791544 - RNA, 19 nt, Artificial Sequence
  Description of Artificial Sequence: Synthetic oligonucleotide
  Antisense strand to SEQ ID NO: 1791543
gaaccaaggacuaucacua

SEQ ID NO: 1791545 - RNA, 19 nt, Artificial Sequence
  Description of Artificial Sequence: Synthetic oligonucleotide
  Sense strand starting at position 3384 of SEQ ID NO: 1563047
gugauaguccuugguucag

SEQ ID NO: 1791546 - RNA, 19 nt, Artificial Sequence
  Description of Artificial Sequence: Synthetic oligonucleotide
  Antisense strand to SEQ ID NO: 1791545
cugaaccaaggacuaucac

SEQ ID NO: 1791547 - RNA, 19 nt, Artificial Sequence
  Description of Artificial Sequence: Synthetic oligonucleotide
  Sense strand starting at position 3442 of SEQ ID NO: 1563047
aguuaucaagcugaugcaa

SEQ ID NO: 1791548 - RNA, 19 nt, Artificial Sequence
  Description of Artificial Sequence: Synthetic oligonucleotide
  Antisense strand to SEQ ID NO: 1791547
uugcaucagcuugauaacu

SEQ ID NO: 1791549 - RNA, 19 nt, Artificial Sequence
  Description of Artificial Sequence: Synthetic oligonucleotide
  Sense strand starting at position 3576 of SEQ ID NO: 1563047
gcgaaacuccgacacuacu

SEQ ID NO: 1791550 - RNA, 19 nt, Artificial Sequence
  Description of Artificial Sequence: Synthetic oligonucleotide
  Antisense strand to SEQ ID NO: 1791549
aguagugucggaguuucgc

SEQ ID NO: 1791551 - RNA, 19 nt, Artificial Sequence
  Description of Artificial Sequence: Synthetic oligonucleotide
  Sense strand starting at position 3664 of SEQ ID NO: 1563047
gcacgagaaucgguuugaa

SEQ ID NO: 1791552 - RNA, 19 nt, Artificial Sequence
  Description of Artificial Sequence: Synthetic oligonucleotide
  Antisense strand to SEQ ID NO: 1791551
uucaaaccgauucucgugc

SEQ ID NO: 1791553 - RNA, 19 nt, Artificial Sequence
  Description of Artificial Sequence: Synthetic oligonucleotide
  Sense strand starting at position 3667 of SEQ ID NO: 1563047
cgagaaucgguuugaaccu

SEQ ID NO: 1791554 - RNA, 19 nt, Artificial Sequence
  Description of Artificial Sequence: Synthetic oligonucleotide
  Antisense strand to SEQ ID NO: 1791553
agguucaaaccgauucucg

SEQ ID NO: 1791555 - RNA, 19 nt, Artificial Sequence
  Description of Artificial Sequence: Synthetic oligonucleotide
  Sense strand starting at position 3866 of SEQ ID NO: 1563047
gugguagagacaggaugau

SEQ ID NO: 1791556 - RNA, 19 nt, Artificial Sequence
  Description of Artificial Sequence: Synthetic oligonucleotide
  Antisense strand to SEQ ID NO: 1791555
aucauccugucucuaccac

SEQ ID NO: 1791557 - RNA, 19 nt, Artificial Sequence
  Description of Artificial Sequence: Synthetic oligonucleotide
  Sense strand starting at position 3878 of SEQ ID NO: 1563047
ggaugauaggucugauucc

SEQ ID NO: 1791558 - RNA, 19 nt, Artificial Sequence
  Description of Artificial Sequence: Synthetic oligonucleotide
  Antisense strand to SEQ ID NO: 1791557
ggaaucagaccuaucaucc

SEQ ID NO: 1791559 - RNA, 19 nt, Artificial Sequence
  Description of Artificial Sequence: Synthetic oligonucleotide
  Sense strand starting at position 3921 of SEQ ID NO: 1563047
guaauugaaccucagucau

SEQ ID NO: 1791560 - RNA, 19 nt, Artificial Sequence
  Description of Artificial Sequence: Synthetic oligonucleotide
  Antisense strand to SEQ ID NO: 1791559
augacugagguucaauuac

SEQ ID NO: 1791561 - RNA, 19 nt, Artificial Sequence
  Description of Artificial Sequence: Synthetic oligonucleotide
  Sense strand starting at position 3944 of SEQ ID NO: 1563047
ugaaucugaugccucgauu

SEQ ID NO: 1791562 - RNA, 19 nt, Artificial Sequence
  Description of Artificial Sequence: Synthetic oligonucleotide
  Antisense strand to SEQ ID NO: 1791561
aaucgaggcaucagauuca

SEQ ID NO: 1791563 - RNA, 19 nt, Artificial Sequence
  Description of Artificial Sequence: Synthetic oligonucleotide
  Sense strand starting at position 3955 of SEQ ID NO: 1563047
ccucgauugcuuuaccuuu

SEQ ID NO: 1791564 - RNA, 19 nt, Artificial Sequence
  Description of Artificial Sequence: Synthetic oligonucleotide
  Antisense strand to SEQ ID NO: 1791563
aaagguaaagcaaucgagg

SEQ ID NO: 1791565 - RNA, 19 nt, Artificial Sequence
  Description of Artificial Sequence: Synthetic oligonucleotide
  Sense strand starting at position 8 of SEQ ID NO: 1563048
aguacuuaaugguucugaa

SEQ ID NO: 1791566 - RNA, 19 nt, Artificial Sequence
  Description of Artificial Sequence: Synthetic oligonucleotide
  Antisense strand to SEQ ID NO: 1791565
uucagaaccauuaaguacu

SEQ ID NO: 1791567 - RNA, 19 nt, Artificial Sequence
  Description of Artificial Sequence: Synthetic oligonucleotide
  Sense strand starting at position 27 of SEQ ID NO: 1563048
gucucauccuuuccagauc

SEQ ID NO: 1791568 - RNA, 19 nt, Artificial Sequence
  Description of Artificial Sequence: Synthetic oligonucleotide
  Antisense strand to SEQ ID NO: 1791567
gaucuggaaaggaugagac

SEQ ID NO: 1791569 - RNA, 19 nt, Artificial Sequence
  Description of Artificial Sequence: Synthetic oligonucleotide
  Sense strand starting at position 75 of SEQ ID NO: 1563048
ucagaaggcugucuggaaa

SEQ ID NO: 1791570 - RNA, 19 nt, Artificial Sequence
  Description of Artificial Sequence: Synthetic oligonucleotide
  Antisense strand to SEQ ID NO: 1791569
uuuccagacagccuucuga

SEQ ID NO: 1791571 - RNA, 19 nt, Artificial Sequence
  Description of Artificial Sequence: Synthetic oligonucleotide
  Sense strand starting at position 112 of SEQ ID NO: 1563048
cugugcgaccuguuguuaa

SEQ ID NO: 1791572 - RNA, 19 nt, Artificial Sequence
  Description of Artificial Sequence: Synthetic oligonucleotide
  Antisense strand to SEQ ID NO: 1791571
uuaacaacaggucgcacag

SEQ ID NO: 1791573 - RNA, 19 nt, Artificial Sequence
  Description of Artificial Sequence: Synthetic oligonucleotide
  Sense strand starting at position 154 of SEQ ID NO: 1563048
aggguauuacucugucaaa

SEQ ID NO: 1791574 - RNA, 19 nt, Artificial Sequence
  Description of Artificial Sequence: Synthetic oligonucleotide
  Antisense strand to SEQ ID NO: 1791573
uuugacagaguaauacccu

SEQ ID NO: 1791575 - RNA, 19 nt, Artificial Sequence
  Description of Artificial Sequence: Synthetic oligonucleotide
  Sense strand starting at position 155 of SEQ ID NO: 1563048
ggguauuacucugucaaac

SEQ ID NO: 1791576 - RNA, 19 nt, Artificial Sequence
  Description of Artificial Sequence: Synthetic oligonucleotide
  Antisense strand to SEQ ID NO: 1791575
guuugacagaguaauaccc

SEQ ID NO: 1791577 - RNA, 19 nt, Artificial Sequence
  Description of Artificial Sequence: Synthetic oligonucleotide
  Sense strand starting at position 524 of SEQ ID NO: 1563048
acauuuguguggcuggauu

SEQ ID NO: 1791578 - RNA, 19 nt, Artificial Sequence
  Description of Artificial Sequence: Synthetic oligonucleotide
  Antisense strand to SEQ ID NO: 1791577
aauccagccacacaaaugu

SEQ ID NO: 1791579 - RNA, 19 nt, Artificial Sequence
  Description of Artificial Sequence: Synthetic oligonucleotide
  Sense strand starting at position 590 of SEQ ID NO: 1563048
uuugaauaggaaugucacu

SEQ ID NO: 1791580 - RNA, 19 nt, Artificial Sequence
  Description of Artificial Sequence: Synthetic oligonucleotide
  Antisense strand to SEQ ID NO: 1791579
agugacauuccuauucaaa

SEQ ID NO: 1791581 - RNA, 19 nt, Artificial Sequence
  Description of Artificial Sequence: Synthetic oligonucleotide
  Sense strand starting at position 595 of SEQ ID NO: 1563048
auaggaaugucacuaguuc

SEQ ID NO: 1791582 - RNA, 19 nt, Artificial Sequence
  Description of Artificial Sequence: Synthetic oligonucleotide
  Antisense strand to SEQ ID NO: 1791581
gaacuagugacauuccuau

SEQ ID NO: 1791583 - RNA, 19 nt, Artificial Sequence
  Description of Artificial Sequence: Synthetic oligonucleotide
  Sense strand starting at position 596 of SEQ ID NO: 1563048
uaggaaugucacuaguucu

SEQ ID NO: 1791584 - RNA, 19 nt, Artificial Sequence
  Description of Artificial Sequence: Synthetic oligonucleotide
  Antisense strand to SEQ ID NO: 1791583
agaacuagugacauuccua

SEQ ID NO: 1791585 - RNA, 19 nt, Artificial Sequence
  Description of Artificial Sequence: Synthetic oligonucleotide
  Sense strand starting at position 627 of SEQ ID NO: 1563048
aucacaucacuguauguua

SEQ ID NO: 1791586 - RNA, 19 nt, Artificial Sequence
  Description of Artificial Sequence: Synthetic oligonucleotide
  Antisense strand to SEQ ID NO: 1791585
uaacauacagugaugugau

SEQ ID NO: 1791587 - RNA, 19 nt, Artificial Sequence
  Description of Artificial Sequence: Synthetic oligonucleotide
  Sense strand starting at position 647 of SEQ ID NO: 1563048
guguguucagggcaaauua

SEQ ID NO: 1791588 - RNA, 19 nt, Artificial Sequence
  Description of Artificial Sequence: Synthetic oligonucleotide
  Antisense strand to SEQ ID NO: 1791587
uaauuugcccugaacacac

SEQ ID NO: 1791589 - RNA, 19 nt, Artificial Sequence
  Description of Artificial Sequence: Synthetic oligonucleotide
  Sense strand starting at position 655 of SEQ ID NO: 1563048
agggcaaauuacuuaguuu

SEQ ID NO: 1791590 - RNA, 19 nt, Artificial Sequence
  Description of Artificial Sequence: Synthetic oligonucleotide
  Antisense strand to SEQ ID NO: 1791589
aaacuaaguaauuugcccu

SEQ ID NO: 1791591 - RNA, 19 nt, Artificial Sequence
  Description of Artificial Sequence: Synthetic oligonucleotide
  Sense strand starting at position 756 of SEQ ID NO: 1563048
gcugauuuauaugaccaga

SEQ ID NO: 1791592 - RNA, 19 nt, Artificial Sequence
  Description of Artificial Sequence: Synthetic oligonucleotide
  Antisense strand to SEQ ID NO: 1791591
ucuggucauauaaaucagc

SEQ ID NO: 1791593 - RNA, 19 nt, Artificial Sequence
  Description of Artificial Sequence: Synthetic oligonucleotide
  Sense strand starting at position 794 of SEQ ID NO: 1563048
gcuuuaauaggaugagaau

SEQ ID NO: 1791594 - RNA, 19 nt, Artificial Sequence
  Description of Artificial Sequence: Synthetic oligonucleotide
  Antisense strand to SEQ ID NO: 1791593
auucucauccuauuaaagc

SEQ ID NO: 1791595 - RNA, 19 nt, Artificial Sequence
  Description of Artificial Sequence: Synthetic oligonucleotide
  Sense strand starting at position 997 of SEQ ID NO: 1563048
ggauguugcauccaugaug

SEQ ID NO: 1791596 - RNA, 19 nt, Artificial Sequence
  Description of Artificial Sequence: Synthetic oligonucleotide
  Antisense strand to SEQ ID NO: 1791595
caucauggaugcaacaucc

SEQ ID NO: 1791597 - RNA, 19 nt, Artificial Sequence
  Description of Artificial Sequence: Synthetic oligonucleotide
  Sense strand starting at position 1000 of SEQ ID NO: 1563048
uguugcauccaugaugaac

SEQ ID NO: 1791598 - RNA, 19 nt, Artificial Sequence
  Description of Artificial Sequence: Synthetic oligonucleotide
  Antisense strand to SEQ ID NO: 1791597
guucaucauggaugcaaca

SEQ ID NO: 1791599 - RNA, 19 nt, Artificial Sequence
  Description of Artificial Sequence: Synthetic oligonucleotide
  Sense strand starting at position 1216 of SEQ ID NO: 1563048
cgagcuuugagaugagacu

SEQ ID NO: 1791600 - RNA, 19 nt, Artificial Sequence
  Description of Artificial Sequence: Synthetic oligonucleotide
  Antisense strand to SEQ ID NO: 1791599
agucucaucucaaagcucg

SEQ ID NO: 1791601 - RNA, 19 nt, Artificial Sequence
  Description of Artificial Sequence: Synthetic oligonucleotide
  Sense strand starting at position 1335 of SEQ ID NO: 1563048
uaguaaauguugucuuaag

SEQ ID NO: 1791602 - RNA, 19 nt, Artificial Sequence
  Description of Artificial Sequence: Synthetic oligonucleotide
  Antisense strand to SEQ ID NO: 1791601
cuuaagacaacauuuacua

SEQ ID NO: 1791603 - RNA, 19 nt, Artificial Sequence
  Description of Artificial Sequence: Synthetic oligonucleotide
  Sense strand starting at position 1471 of SEQ ID NO: 1563048
cggagacacuacuaauuua

SEQ ID NO: 1791604 - RNA, 19 nt, Artificial Sequence
  Description of Artificial Sequence: Synthetic oligonucleotide
  Antisense strand to SEQ ID NO: 1791603
uaaauuaguagugucuccg

SEQ ID NO: 1791605 - RNA, 19 nt, Artificial Sequence
  Description of Artificial Sequence: Synthetic oligonucleotide
  Sense strand starting at position 1588 of SEQ ID NO: 1563048
ucaaguuagcuccaaguuu

SEQ ID NO: 1791606 - RNA, 19 nt, Artificial Sequence
  Description of Artificial Sequence: Synthetic oligonucleotide
  Antisense strand to SEQ ID NO: 1791605
aaacuuggagcuaacuuga

SEQ ID NO: 1791607 - RNA, 19 nt, Artificial Sequence
  Description of Artificial Sequence: Synthetic oligonucleotide
  Sense strand starting at position 2043 of SEQ ID NO: 1563048
ugccauggugaucacuaua

SEQ ID NO: 1791608 - RNA, 19 nt, Artificial Sequence
  Description of Artificial Sequence: Synthetic oligonucleotide
  Antisense strand to SEQ ID NO: 1791607
uauagugaucaccauggca

SEQ ID NO: 1791609 - RNA, 19 nt, Artificial Sequence
  Description of Artificial Sequence: Synthetic oligonucleotide
  Sense strand starting at position 2302 of SEQ ID NO: 1563048
gaacuagcucuguguagga

SEQ ID NO: 1791610 - RNA, 19 nt, Artificial Sequence
  Description of Artificial Sequence: Synthetic oligonucleotide
  Antisense strand to SEQ ID NO: 1791609
uccuacacagagcuaguuc

SEQ ID NO: 1791611 - RNA, 19 nt, Artificial Sequence
  Description of Artificial Sequence: Synthetic oligonucleotide
  Sense strand starting at position 2304 of SEQ ID NO: 1563048
acuagcucuguguaggaaa

SEQ ID NO: 1791612 - RNA, 19 nt, Artificial Sequence
  Description of Artificial Sequence: Synthetic oligonucleotide
  Antisense strand to SEQ ID NO: 1791611
uuuccuacacagagcuagu

SEQ ID NO: 1791613 - RNA, 19 nt, Artificial Sequence
  Description of Artificial Sequence: Synthetic oligonucleotide
  Sense strand starting at position 2365 of SEQ ID NO: 1563048
gaaggaugccuaggaacuu

SEQ ID NO: 1791614 - RNA, 19 nt, Artificial Sequence
  Description of Artificial Sequence: Synthetic oligonucleotide
  Antisense strand to SEQ ID NO: 1791613
aaguuccuaggcauccuuc

SEQ ID NO: 1791615 - RNA, 19 nt, Artificial Sequence
  Description of Artificial Sequence: Synthetic oligonucleotide
  Sense strand starting at position 2405 of SEQ ID NO: 1563048
auauuaaaggcauggaugu

SEQ ID NO: 1791616 - RNA, 19 nt, Artificial Sequence
  Description of Artificial Sequence: Synthetic oligonucleotide
  Antisense strand to SEQ ID NO: 1791615
acauccaugccuuuaauau

SEQ ID NO: 1791617 - RNA, 19 nt, Artificial Sequence
  Description of Artificial Sequence: Synthetic oligonucleotide
  Sense strand starting at position 2421 of SEQ ID NO: 1563048
uguguauaacagcauaaau

SEQ ID NO: 1791618 - RNA, 19 nt, Artificial Sequence
  Description of Artificial Sequence: Synthetic oligonucleotide
  Antisense strand to SEQ ID NO: 1791617
auuuaugcuguuauacaca

SEQ ID NO: 1791619 - RNA, 19 nt, Artificial Sequence
  Description of Artificial Sequence: Synthetic oligonucleotide
  Sense strand starting at position 2423 of SEQ ID NO: 1563048
uguauaacagcauaaaugu

SEQ ID NO: 1791620 - RNA, 19 nt, Artificial Sequence
  Description of Artificial Sequence: Synthetic oligonucleotide
  Antisense strand to SEQ ID NO: 1791619
acauuuaugcuguuauaca

SEQ ID NO: 1791621 - RNA, 19 nt, Artificial Sequence
  Description of Artificial Sequence: Synthetic oligonucleotide
  Sense strand starting at position 2676 of SEQ ID NO: 1563048
uggacaaagaguggguaua

SEQ ID NO: 1791622 - RNA, 19 nt, Artificial Sequence
  Description of Artificial Sequence: Synthetic oligonucleotide
  Antisense strand to SEQ ID NO: 1791621
uauacccacucuuugucca

SEQ ID NO: 1791623 - RNA, 19 nt, Artificial Sequence
  Description of Artificial Sequence: Synthetic oligonucleotide
  Sense strand starting at position 2678 of SEQ ID NO: 1563048
gacaaagaguggguauagu

SEQ ID NO: 1791624 - RNA, 19 nt, Artificial Sequence
  Description of Artificial Sequence: Synthetic oligonucleotide
  Antisense strand to SEQ ID NO: 1791623
acuauacccacucuuuguc

SEQ ID NO: 1791625 - RNA, 19 nt, Artificial Sequence
  Description of Artificial Sequence: Synthetic oligonucleotide
  Sense strand starting at position 2780 of SEQ ID NO: 1563048
gggccugucacuuauuaga

SEQ ID NO: 1791626 - RNA, 19 nt, Artificial Sequence
  Description of Artificial Sequence: Synthetic oligonucleotide
  Antisense strand to SEQ ID NO: 1791625
ucuaauaagugacaggccc

SEQ ID NO: 1791627 - RNA, 19 nt, Artificial Sequence
  Description of Artificial Sequence: Synthetic oligonucleotide
  Sense strand starting at position 2782 of SEQ ID NO: 1563048
gccugucacuuauuagaua

SEQ ID NO: 1791628 - RNA, 19 nt, Artificial Sequence
  Description of Artificial Sequence: Synthetic oligonucleotide
  Antisense strand to SEQ ID NO: 1791627
uaucuaauaagugacaggc

SEQ ID NO: 1791629 - RNA, 19 nt, Artificial Sequence
  Description of Artificial Sequence: Synthetic oligonucleotide
  Sense strand starting at position 2808 of SEQ ID NO: 1563048
ggccaaguccuuuagcuga

SEQ ID NO: 1791630 - RNA, 19 nt, Artificial Sequence
  Description of Artificial Sequence: Synthetic oligonucleotide
  Antisense strand to SEQ ID NO: 1791629
ucagcuaaaggacuuggcc

SEQ ID NO: 1791631 - RNA, 19 nt, Artificial Sequence
  Description of Artificial Sequence: Synthetic oligonucleotide
  Sense strand starting at position 2870 of SEQ ID NO: 1563048
aagggugaugggcgaauaa

SEQ ID NO: 1791632 - RNA, 19 nt, Artificial Sequence
  Description of Artificial Sequence: Synthetic oligonucleotide
  Antisense strand to SEQ ID NO: 1791631
uuauucgcccaucacccuu

SEQ ID NO: 1791633 - RNA, 19 nt, Artificial Sequence
  Description of Artificial Sequence: Synthetic oligonucleotide
  Sense strand starting at position 3064 of SEQ ID NO: 1563048
gccuaaguauuaucuauug

SEQ ID NO: 1791634 - RNA, 19 nt, Artificial Sequence
  Description of Artificial Sequence: Synthetic oligonucleotide
  Antisense strand to SEQ ID NO: 1791633
caauagauaauacuuaggc

SEQ ID NO: 1791635 - RNA, 19 nt, Artificial Sequence
  Description of Artificial Sequence: Synthetic oligonucleotide
  Sense strand starting at position 3087 of SEQ ID NO: 1563048
acgacaaucuugccauaaa

SEQ ID NO: 1791636 - RNA, 19 nt, Artificial Sequence
  Description of Artificial Sequence: Synthetic oligonucleotide
  Antisense strand to SEQ ID NO: 1791635
uuuauggcaagauugucgu

SEQ ID NO: 1791637 - RNA, 19 nt, Artificial Sequence
  Description of Artificial Sequence: Synthetic oligonucleotide
  Sense strand starting at position 3254 of SEQ ID NO: 1563048
ggaagaauaugcuuccaag

SEQ ID NO: 1791638 - RNA, 19 nt, Artificial Sequence
  Description of Artificial Sequence: Synthetic oligonucleotide
  Antisense strand to SEQ ID NO: 1791637
cuuggaagcauauucuucc

SEQ ID NO: 1791639 - RNA, 19 nt, Artificial Sequence
  Description of Artificial Sequence: Synthetic oligonucleotide
  Sense strand starting at position 3461 of SEQ ID NO: 1563048
uguguaccauagucacaga

SEQ ID NO: 1791640 - RNA, 19 nt, Artificial Sequence
  Description of Artificial Sequence: Synthetic oligonucleotide
  Antisense strand to SEQ ID NO: 1791639
ucugugacuaugguacaca

SEQ ID NO: 1791641 - RNA, 19 nt, Artificial Sequence
  Description of Artificial Sequence: Synthetic oligonucleotide
  Sense strand starting at position 3621 of SEQ ID NO: 1563048
cucugacagucuucucacu

SEQ ID NO: 1791642 - RNA, 19 nt, Artificial Sequence
  Description of Artificial Sequence: Synthetic oligonucleotide
  Antisense strand to SEQ ID NO: 1791641
agugagaagacugucagag

SEQ ID NO: 1791643 - RNA, 19 nt, Artificial Sequence
  Description of Artificial Sequence: Synthetic oligonucleotide
  Sense strand starting at position 3623 of SEQ ID NO: 1563048
cugacagucuucucacuca

SEQ ID NO: 1791644 - RNA, 19 nt, Artificial Sequence
  Description of Artificial Sequence: Synthetic oligonucleotide
  Antisense strand to SEQ ID NO: 1791643
ugagugagaagacugucag

SEQ ID NO: 1791645 - RNA, 19 nt, Artificial Sequence
  Description of Artificial Sequence: Synthetic oligonucleotide
  Sense strand starting at position 56 of SEQ ID NO: 1563049
uguccuagucaauaucaua

SEQ ID NO: 1791646 - RNA, 19 nt, Artificial Sequence
  Description of Artificial Sequence: Synthetic oligonucleotide
  Antisense strand to SEQ ID NO: 1791645
uaugauauugacuaggaca

SEQ ID NO: 1791647 - RNA, 19 nt, Artificial Sequence
  Description of Artificial Sequence: Synthetic oligonucleotide
  Sense strand starting at position 133 of SEQ ID NO: 1563049
uguacauuauuaccuuaga

SEQ ID NO: 1791648 - RNA, 19 nt, Artificial Sequence
  Description of Artificial Sequence: Synthetic oligonucleotide
  Antisense strand to SEQ ID NO: 1791647
ucuaagguaauaauguaca

SEQ ID NO: 1791649 - RNA, 19 nt, Artificial Sequence
  Description of Artificial Sequence: Synthetic oligonucleotide
  Sense strand starting at position 315 of SEQ ID NO: 1563049
ugaauuucuucugaugaac

SEQ ID NO: 1791650 - RNA, 19 nt, Artificial Sequence
  Description of Artificial Sequence: Synthetic oligonucleotide
  Antisense strand to SEQ ID NO: 1791649
guucaucagaagaaauuca

SEQ ID NO: 1791651 - RNA, 19 nt, Artificial Sequence
  Description of Artificial Sequence: Synthetic oligonucleotide
  Sense strand starting at position 367 of SEQ ID NO: 1563049
auagucagauguccagaga

SEQ ID NO: 1791652 - RNA, 19 nt, Artificial Sequence
  Description of Artificial Sequence: Synthetic oligonucleotide
  Antisense strand to SEQ ID NO: 1791651
ucucuggacaucugacuau

SEQ ID NO: 1791653 - RNA, 19 nt, Artificial Sequence
  Description of Artificial Sequence: Synthetic oligonucleotide
  Sense strand starting at position 370 of SEQ ID NO: 1563049
gucagauguccagagauug

SEQ ID NO: 1791654 - RNA, 19 nt, Artificial Sequence
  Description of Artificial Sequence: Synthetic oligonucleotide
  Antisense strand to SEQ ID NO: 1791653
caaucucuggacaucugac

SEQ ID NO: 1791655 - RNA, 19 nt, Artificial Sequence
  Description of Artificial Sequence: Synthetic oligonucleotide
  Sense strand starting at position 375 of SEQ ID NO: 1563049
auguccagagauugauaua

SEQ ID NO: 1791656 - RNA, 19 nt, Artificial Sequence
  Description of Artificial Sequence: Synthetic oligonucleotide
  Antisense strand to SEQ ID NO: 1791655
uauaucaaucucuggacau

SEQ ID NO: 1791657 - RNA, 19 nt, Artificial Sequence
  Description of Artificial Sequence: Synthetic oligonucleotide
  Sense strand starting at position 508 of SEQ ID NO: 1563049
auaagugcucaagaaacga

SEQ ID NO: 1791658 - RNA, 19 nt, Artificial Sequence
  Description of Artificial Sequence: Synthetic oligonucleotide
  Antisense strand to SEQ ID NO: 1791657
ucguuucuugagcacuuau

SEQ ID NO: 1791659 - RNA, 19 nt, Artificial Sequence
  Description of Artificial Sequence: Synthetic oligonucleotide
  Sense strand starting at position 535 of SEQ ID NO: 1563049
acuuuagucccaugauuag

SEQ ID NO: 1791660 - RNA, 19 nt, Artificial Sequence
  Description of Artificial Sequence: Synthetic oligonucleotide
  Antisense strand to SEQ ID NO: 1791659
cuaaucaugggacuaaagu

SEQ ID NO: 1791661 - RNA, 19 nt, Artificial Sequence
  Description of Artificial Sequence: Synthetic oligonucleotide
  Sense strand starting at position 576 of SEQ ID NO: 1563049
guucucuagagcgacauaa

SEQ ID NO: 1791662 - RNA, 19 nt, Artificial Sequence
  Description of Artificial Sequence: Synthetic oligonucleotide
  Antisense strand to SEQ ID NO: 1791661
uuaugucgcucuagagaac

SEQ ID NO: 1791663 - RNA, 19 nt, Artificial Sequence
  Description of Artificial Sequence: Synthetic oligonucleotide
  Sense strand starting at position 578 of SEQ ID NO: 1563049
ucucuagagcgacauaacu

SEQ ID NO: 1791664 - RNA, 19 nt, Artificial Sequence
  Description of Artificial Sequence: Synthetic oligonucleotide
  Antisense strand to SEQ ID NO: 1791663
aguuaugucgcucuagaga

SEQ ID NO: 1791665 - RNA, 19 nt, Artificial Sequence
  Description of Artificial Sequence: Synthetic oligonucleotide
  Sense strand starting at position 624 of SEQ ID NO: 1563049
ggagcuuauuaacuauuaa

SEQ ID NO: 1791666 - RNA, 19 nt, Artificial Sequence
  Description of Artificial Sequence: Synthetic oligonucleotide
  Antisense strand to SEQ ID NO: 1791665
uuaauaguuaauaagcucc

SEQ ID NO: 1791667 - RNA, 19 nt, Artificial Sequence
  Description of Artificial Sequence: Synthetic oligonucleotide
  Sense strand starting at position 1038 of SEQ ID NO: 1563049
ggaguaaacuuagcaaagu

SEQ ID NO: 1791668 - RNA, 19 nt, Artificial Sequence
  Description of Artificial Sequence: Synthetic oligonucleotide
  Antisense strand to SEQ ID NO: 1791667
acuuugcuaaguuuacucc

SEQ ID NO: 1791669 - RNA, 19 nt, Artificial Sequence
  Description of Artificial Sequence: Synthetic oligonucleotide
  Sense strand starting at position 1047 of SEQ ID NO: 1563049
uuagcaaagugacuguaaa

SEQ ID NO: 1791670 - RNA, 19 nt, Artificial Sequence
  Description of Artificial Sequence: Synthetic oligonucleotide
  Antisense strand to SEQ ID NO: 1791669
uuuacagucacuuugcuaa

SEQ ID NO: 1791671 - RNA, 19 nt, Artificial Sequence
  Description of Artificial Sequence: Synthetic oligonucleotide
  Sense strand starting at position 1110 of SEQ ID NO: 1563049
ucagauacccaguguauga

SEQ ID NO: 1791672 - RNA, 19 nt, Artificial Sequence
  Description of Artificial Sequence: Synthetic oligonucleotide
  Antisense strand to SEQ ID NO: 1791671
ucauacacuggguaucuga

SEQ ID NO: 1791673 - RNA, 19 nt, Artificial Sequence
  Description of Artificial Sequence: Synthetic oligonucleotide
  Sense strand starting at position 1114 of SEQ ID NO: 1563049
auacccaguguaugagaau

SEQ ID NO: 1791674 - RNA, 19 nt, Artificial Sequence
  Description of Artificial Sequence: Synthetic oligonucleotide
  Antisense strand to SEQ ID NO: 1791673
auucucauacacuggguau

SEQ ID NO: 1791675 - RNA, 19 nt, Artificial Sequence
  Description of Artificial Sequence: Synthetic oligonucleotide
  Sense strand starting at position 1437 of SEQ ID NO: 1563049
gggcauaguaaaugguaau

SEQ ID NO: 1791676 - RNA, 19 nt, Artificial Sequence
  Description of Artificial Sequence: Synthetic oligonucleotide
  Antisense strand to SEQ ID NO: 1791675
auuaccauuuacuaugccc

SEQ ID NO: 1791677 - RNA, 19 nt, Artificial Sequence
  Description of Artificial Sequence: Synthetic oligonucleotide
  Sense strand starting at position 1438 of SEQ ID NO: 1563049
ggcauaguaaaugguaaua

SEQ ID NO: 1791678 - RNA, 19 nt, Artificial Sequence
  Description of Artificial Sequence: Synthetic oligonucleotide
  Antisense strand to SEQ ID NO: 1791677
uauuaccauuuacuaugcc

SEQ ID NO: 1791679 - RNA, 19 nt, Artificial Sequence
  Description of Artificial Sequence: Synthetic oligonucleotide
  Sense strand starting at position 1476 of SEQ ID NO: 1563049
uuaugaagccuuuaucagu

SEQ ID NO: 1791680 - RNA, 19 nt, Artificial Sequence
  Description of Artificial Sequence: Synthetic oligonucleotide
  Antisense strand to SEQ ID NO: 1791679
acugauaaaggcuucauaa

SEQ ID NO: 1791681 - RNA, 19 nt, Artificial Sequence
  Description of Artificial Sequence: Synthetic oligonucleotide
  Sense strand starting at position 1484 of SEQ ID NO: 1563049
ccuuuaucaguagaugcua

SEQ ID NO: 1791682 - RNA, 19 nt, Artificial Sequence
  Description of Artificial Sequence: Synthetic oligonucleotide
  Antisense strand to SEQ ID NO: 1791681
uagcaucuacugauaaagg

SEQ ID NO: 1791683 - RNA, 19 nt, Artificial Sequence
  Description of Artificial Sequence: Synthetic oligonucleotide
  Sense strand starting at position 1547 of SEQ ID NO: 1563049
aagacacuucugcaaggua

SEQ ID NO: 1791684 - RNA, 19 nt, Artificial Sequence
  Description of Artificial Sequence: Synthetic oligonucleotide
  Antisense strand to SEQ ID NO: 1791683
uaccuugcagaagugucuu

SEQ ID NO: 1791685 - RNA, 19 nt, Artificial Sequence
  Description of Artificial Sequence: Synthetic oligonucleotide
  Sense strand starting at position 1658 of SEQ ID NO: 1563049
ucaggagugcuagaaguca

SEQ ID NO: 1791686 - RNA, 19 nt, Artificial Sequence
  Description of Artificial Sequence: Synthetic oligonucleotide
  Antisense strand to SEQ ID NO: 1791685
ugacuucuagcacuccuga

SEQ ID NO: 1791687 - RNA, 19 nt, Artificial Sequence
  Description of Artificial Sequence: Synthetic oligonucleotide
  Sense strand starting at position 2027 of SEQ ID NO: 1563049
acguuagucgacagcggau

SEQ ID NO: 1791688 - RNA, 19 nt, Artificial Sequence
  Description of Artificial Sequence: Synthetic oligonucleotide
  Antisense strand to SEQ ID NO: 1791687
auccgcugucgacuaacgu

SEQ ID NO: 1791689 - RNA, 19 nt, Artificial Sequence
  Description of Artificial Sequence: Synthetic oligonucleotide
  Sense strand starting at position 2221 of SEQ ID NO: 1563049
ugaugacugguguggaauc

SEQ ID NO: 1791690 - RNA, 19 nt, Artificial Sequence
  Description of Artificial Sequence: Synthetic oligonucleotide
  Antisense strand to SEQ ID NO: 1791689
gauuccacaccagucauca

SEQ ID NO: 1791691 - RNA, 19 nt, Artificial Sequence
  Description of Artificial Sequence: Synthetic oligonucleotide
  Sense strand starting at position 2271 of SEQ ID NO: 1563049
ccacucugagauuguaaau

SEQ ID NO: 1791692 - RNA, 19 nt, Artificial Sequence
  Description of Artificial Sequence: Synthetic oligonucleotide
  Antisense strand to SEQ ID NO: 1791691
auuuacaaucucagagugg

SEQ ID NO: 1791693 - RNA, 19 nt, Artificial Sequence
  Description of Artificial Sequence: Synthetic oligonucleotide
  Sense strand starting at position 2307 of SEQ ID NO: 1563049
aggauuagcccauacggua

SEQ ID NO: 1791694 - RNA, 19 nt, Artificial Sequence
  Description of Artificial Sequence: Synthetic oligonucleotide
  Antisense strand to SEQ ID NO: 1791693
uaccguaugggcuaauccu

SEQ ID NO: 1791695 - RNA, 19 nt, Artificial Sequence
  Description of Artificial Sequence: Synthetic oligonucleotide
  Sense strand starting at position 2330 of SEQ ID NO: 1563049
ugguaaauacugugagaca

SEQ ID NO: 1791696 - RNA, 19 nt, Artificial Sequence
  Description of Artificial Sequence: Synthetic oligonucleotide
  Antisense strand to SEQ ID NO: 1791695
ugucucacaguauuuacca

SEQ ID NO: 1791697 - RNA, 19 nt, Artificial Sequence
  Description of Artificial Sequence: Synthetic oligonucleotide
  Sense strand starting at position 2387 of SEQ ID NO: 1563049
gaaggucaagacugugauu

SEQ ID NO: 1791698 - RNA, 19 nt, Artificial Sequence
  Description of Artificial Sequence: Synthetic oligonucleotide
  Antisense strand to SEQ ID NO: 1791697
aaucacagucuugaccuuc

SEQ ID NO: 1791699 - RNA, 19 nt, Artificial Sequence
  Description of Artificial Sequence: Synthetic oligonucleotide
  Sense strand starting at position 2517 of SEQ ID NO: 1563049
caaguauucucuccaggag

SEQ ID NO: 1791700 - RNA, 19 nt, Artificial Sequence
  Description of Artificial Sequence: Synthetic oligonucleotide
  Antisense strand to SEQ ID NO: 1791699
cuccuggagagaauacuug

SEQ ID NO: 1791701 - RNA, 19 nt, Artificial Sequence
  Description of Artificial Sequence: Synthetic oligonucleotide
  Sense strand starting at position 2771 of SEQ ID NO: 1563049
ugggcaagucauuacaucu

SEQ ID NO: 1791702 - RNA, 19 nt, Artificial Sequence
  Description of Artificial Sequence: Synthetic oligonucleotide
  Antisense strand to SEQ ID NO: 1791701
agauguaaugacuugccca

SEQ ID NO: 1791703 - RNA, 19 nt, Artificial Sequence
  Description of Artificial Sequence: Synthetic oligonucleotide
  Sense strand starting at position 3136 of SEQ ID NO: 1563049
cauaguauguacucaggaa

SEQ ID NO: 1791704 - RNA, 19 nt, Artificial Sequence
  Description of Artificial Sequence: Synthetic oligonucleotide
  Antisense strand to SEQ ID NO: 1791703
uuccugaguacauacuaug

SEQ ID NO: 1791705 - RNA, 19 nt, Artificial Sequence
  Description of Artificial Sequence: Synthetic oligonucleotide
  Sense strand starting at position 3463 of SEQ ID NO: 1563049
uggacugucauggaguagu

SEQ ID NO: 1791706 - RNA, 19 nt, Artificial Sequence
  Description of Artificial Sequence: Synthetic oligonucleotide
  Antisense strand to SEQ ID NO: 1791705
acuacuccaugacagucca

SEQ ID NO: 1791707 - RNA, 19 nt, Artificial Sequence
  Description of Artificial Sequence: Synthetic oligonucleotide
  Sense strand starting at position 3466 of SEQ ID NO: 1563049
acugucauggaguaguuaa

SEQ ID NO: 1791708 - RNA, 19 nt, Artificial Sequence
  Description of Artificial Sequence: Synthetic oligonucleotide
  Antisense strand to SEQ ID NO: 1791707
uuaacuacuccaugacagu

SEQ ID NO: 1791709 - RNA, 19 nt, Artificial Sequence
  Description of Artificial Sequence: Synthetic oligonucleotide
  Sense strand starting at position 3485 of SEQ ID NO: 1563049
gagugcaggcucugauuua

SEQ ID NO: 1791710 - RNA, 19 nt, Artificial Sequence
  Description of Artificial Sequence: Synthetic oligonucleotide
  Antisense strand to SEQ ID NO: 1791709
uaaaucagagccugcacuc

SEQ ID NO: 1791711 - RNA, 19 nt, Artificial Sequence
  Description of Artificial Sequence: Synthetic oligonucleotide
  Sense strand starting at position 3567 of SEQ ID NO: 1563049
cccugagaagauugcaaca

SEQ ID NO: 1791712 - RNA, 19 nt, Artificial Sequence
  Description of Artificial Sequence: Synthetic oligonucleotide
  Antisense strand to SEQ ID NO: 1791711
uguugcaaucuucucaggg

SEQ ID NO: 1791713 - RNA, 19 nt, Artificial Sequence
  Description of Artificial Sequence: Synthetic oligonucleotide
  Sense strand starting at position 3611 of SEQ ID NO: 1563049
gauccauaaccuggaugua

SEQ ID NO: 1791714 - RNA, 19 nt, Artificial Sequence
  Description of Artificial Sequence: Synthetic oligonucleotide
  Antisense strand to SEQ ID NO: 1791713
uacauccagguuauggauc

SEQ ID NO: 1791715 - RNA, 19 nt, Artificial Sequence
  Description of Artificial Sequence: Synthetic oligonucleotide
  Sense strand starting at position 3614 of SEQ ID NO: 1563049
ccauaaccuggauguaauc

SEQ ID NO: 1791716 - RNA, 19 nt, Artificial Sequence
  Description of Artificial Sequence: Synthetic oligonucleotide
  Antisense strand to SEQ ID NO: 1791715
gauuacauccagguuaugg

SEQ ID NO: 1791717 - RNA, 19 nt, Artificial Sequence
  Description of Artificial Sequence: Synthetic oligonucleotide
  Sense strand starting at position 3866 of SEQ ID NO: 1563049
gguaaugauguguccgugu

SEQ ID NO: 1791718 - RNA, 19 nt, Artificial Sequence
  Description of Artificial Sequence: Synthetic oligonucleotide
  Antisense strand to SEQ ID NO: 1791717
acacggacacaucauuacc

SEQ ID NO: 1791719 - RNA, 19 nt, Artificial Sequence
  Description of Artificial Sequence: Synthetic oligonucleotide
  Sense strand starting at position 3879 of SEQ ID NO: 1563049
ccguguuaauuuccugauu

SEQ ID NO: 1791720 - RNA, 19 nt, Artificial Sequence
  Description of Artificial Sequence: Synthetic oligonucleotide
  Antisense strand to SEQ ID NO: 1791719
aaucaggaaauuaacacgg

SEQ ID NO: 1791721 - RNA, 19 nt, Artificial Sequence
  Description of Artificial Sequence: Synthetic oligonucleotide
  Sense strand starting at position 3915 of SEQ ID NO: 1563049
aguuacaucagaggauguu

SEQ ID NO: 1791722 - RNA, 19 nt, Artificial Sequence
  Description of Artificial Sequence: Synthetic oligonucleotide
  Antisense strand to SEQ ID NO: 1791721
aacauccucugauguaacu

SEQ ID NO: 1791723 - RNA, 19 nt, Artificial Sequence
  Description of Artificial Sequence: Synthetic oligonucleotide
  Sense strand starting at position 3978 of SEQ ID NO: 1563049
gcaucaaauggucaccuua

SEQ ID NO: 1791724 - RNA, 19 nt, Artificial Sequence
  Description of Artificial Sequence: Synthetic oligonucleotide
  Antisense strand to SEQ ID NO: 1791723
uaaggugaccauuugaugc

SEQ ID NO: 1791725 - RNA, 19 nt, Artificial Sequence
  Description of Artificial Sequence: Synthetic oligonucleotide
  Sense strand starting at position 422 of SEQ ID NO: 1563050
gguucuguguagcaagaac

SEQ ID NO: 1791726 - RNA, 19 nt, Artificial Sequence
  Description of Artificial Sequence: Synthetic oligonucleotide
  Antisense strand to SEQ ID NO: 1791725
guucuugcuacacagaacc

SEQ ID NO: 1791727 - RNA, 19 nt, Artificial Sequence
  Description of Artificial Sequence: Synthetic oligonucleotide
  Sense strand starting at position 575 of SEQ ID NO: 1563050
guggguaacuguguccuuu

SEQ ID NO: 1791728 - RNA, 19 nt, Artificial Sequence
  Description of Artificial Sequence: Synthetic oligonucleotide
  Antisense strand to SEQ ID NO: 1791727
aaaggacacaguuacccac

SEQ ID NO: 1791729 - RNA, 19 nt, Artificial Sequence
  Description of Artificial Sequence: Synthetic oligonucleotide
  Sense strand starting at position 650 of SEQ ID NO: 1563050
ccuccuuuagccugugaua

SEQ ID NO: 1791730 - RNA, 19 nt, Artificial Sequence
  Description of Artificial Sequence: Synthetic oligonucleotide
  Antisense strand to SEQ ID NO: 1791729
uaucacaggcuaaaggagg

SEQ ID NO: 1791731 - RNA, 19 nt, Artificial Sequence
  Description of Artificial Sequence: Synthetic oligonucleotide
  Sense strand starting at position 652 of SEQ ID NO: 1563050
uccuuuagccugugauauc

SEQ ID NO: 1791732 - RNA, 19 nt, Artificial Sequence
  Description of Artificial Sequence: Synthetic oligonucleotide
  Antisense strand to SEQ ID NO: 1791731
gauaucacaggcuaaagga

SEQ ID NO: 1791733 - RNA, 19 nt, Artificial Sequence
  Description of Artificial Sequence: Synthetic oligonucleotide
  Sense strand starting at position 762 of SEQ ID NO: 1563050
gaaggcaucgugcaaacaa

SEQ ID NO: 1791734 - RNA, 19 nt, Artificial Sequence
  Description of Artificial Sequence: Synthetic oligonucleotide
  Antisense strand to SEQ ID NO: 1791733
uuguuugcacgaugccuuc

SEQ ID NO: 1791735 - RNA, 19 nt, Artificial Sequence
  Description of Artificial Sequence: Synthetic oligonucleotide
  Sense strand starting at position 897 of SEQ ID NO: 1563050
uucuuugauuuguggacuu

SEQ ID NO: 1791736 - RNA, 19 nt, Artificial Sequence
  Description of Artificial Sequence: Synthetic oligonucleotide
  Antisense strand to SEQ ID NO: 1791735
aaguccacaaaucaaagaa

SEQ ID NO: 1791737 - RNA, 19 nt, Artificial Sequence
  Description of Artificial Sequence: Synthetic oligonucleotide
  Sense strand starting at position 909 of SEQ ID NO: 1563050
uggacuugcuggcaagacu

SEQ ID NO: 1791738 - RNA, 19 nt, Artificial Sequence
  Description of Artificial Sequence: Synthetic oligonucleotide
  Antisense strand to SEQ ID NO: 1791737
agucuugccagcaagucca

SEQ ID NO: 1791739 - RNA, 19 nt, Artificial Sequence
  Description of Artificial Sequence: Synthetic oligonucleotide
  Sense strand starting at position 1169 of SEQ ID NO: 1563050
ccucaaaguguuuggagca

SEQ ID NO: 1791740 - RNA, 19 nt, Artificial Sequence
  Description of Artificial Sequence: Synthetic oligonucleotide
  Antisense strand to SEQ ID NO: 1791739
ugcuccaaacacuuugagg

SEQ ID NO: 1791741 - RNA, 19 nt, Artificial Sequence
  Description of Artificial Sequence: Synthetic oligonucleotide
  Sense strand starting at position 1174 of SEQ ID NO: 1563050
aaguguuuggagcagaagu

SEQ ID NO: 1791742 - RNA, 19 nt, Artificial Sequence
  Description of Artificial Sequence: Synthetic oligonucleotide
  Antisense strand to SEQ ID NO: 1791741
acuucugcuccaaacacuu

SEQ ID NO: 1791743 - RNA, 19 nt, Artificial Sequence
  Description of Artificial Sequence: Synthetic oligonucleotide
  Sense strand starting at position 1277 of SEQ ID NO: 1563050
gguuguccuucuugggaag

SEQ ID NO: 1791744 - RNA, 19 nt, Artificial Sequence
  Description of Artificial Sequence: Synthetic oligonucleotide
  Antisense strand to SEQ ID NO: 1791743
cuucccaagaaggacaacc

SEQ ID NO: 1791745 - RNA, 19 nt, Artificial Sequence
  Description of Artificial Sequence: Synthetic oligonucleotide
  Sense strand starting at position 1476 of SEQ ID NO: 1563050
gcaguuuccucagcgucau

SEQ ID NO: 1791746 - RNA, 19 nt, Artificial Sequence
  Description of Artificial Sequence: Synthetic oligonucleotide
  Antisense strand to SEQ ID NO: 1791745
augacgcugaggaaacugc

SEQ ID NO: 1791747 - RNA, 19 nt, Artificial Sequence
  Description of Artificial Sequence: Synthetic oligonucleotide
  Sense strand starting at position 1487 of SEQ ID NO: 1563050
agcgucaucuggcagguaa

SEQ ID NO: 1791748 - RNA, 19 nt, Artificial Sequence
  Description of Artificial Sequence: Synthetic oligonucleotide
  Antisense strand to SEQ ID NO: 1791747
uuaccugccagaugacgcu

SEQ ID NO: 1791749 - RNA, 19 nt, Artificial Sequence
  Description of Artificial Sequence: Synthetic oligonucleotide
  Sense strand starting at position 1489 of SEQ ID NO: 1563050
cgucaucuggcagguaaca

SEQ ID NO: 1791750 - RNA, 19 nt, Artificial Sequence
  Description of Artificial Sequence: Synthetic oligonucleotide
  Antisense strand to SEQ ID NO: 1791749
uguuaccugccagaugacg

SEQ ID NO: 1791751 - RNA, 19 nt, Artificial Sequence
  Description of Artificial Sequence: Synthetic oligonucleotide
  Sense strand starting at position 1612 of SEQ ID NO: 1563050
ccuccucaguaucugagaa

SEQ ID NO: 1791752 - RNA, 19 nt, Artificial Sequence
  Description of Artificial Sequence: Synthetic oligonucleotide
  Antisense strand to SEQ ID NO: 1791751
uucucagauacugaggagg

SEQ ID NO: 1791753 - RNA, 19 nt, Artificial Sequence
  Description of Artificial Sequence: Synthetic oligonucleotide
  Sense strand starting at position 1614 of SEQ ID NO: 1563050
uccucaguaucugagaaag

SEQ ID NO: 1791754 - RNA, 19 nt, Artificial Sequence
  Description of Artificial Sequence: Synthetic oligonucleotide
  Antisense strand to SEQ ID NO: 1791753
cuuucucagauacugagga

SEQ ID NO: 1791755 - RNA, 19 nt, Artificial Sequence
  Description of Artificial Sequence: Synthetic oligonucleotide
  Sense strand starting at position 2719 of SEQ ID NO: 1563050
uuagcucuccuagcguuau

SEQ ID NO: 1791756 - RNA, 19 nt, Artificial Sequence
  Description of Artificial Sequence: Synthetic oligonucleotide
  Antisense strand to SEQ ID NO: 1791755
auaacgcuaggagagcuaa

SEQ ID NO: 1791757 - RNA, 19 nt, Artificial Sequence
  Description of Artificial Sequence: Synthetic oligonucleotide
  Sense strand starting at position 3184 of SEQ ID NO: 1563050
ggcauuaucuguuaucuau

SEQ ID NO: 1791758 - RNA, 19 nt, Artificial Sequence
  Description of Artificial Sequence: Synthetic oligonucleotide
  Antisense strand to SEQ ID NO: 1791757
auagauaacagauaaugcc

SEQ ID NO: 1791759 - RNA, 19 nt, Artificial Sequence
  Description of Artificial Sequence: Synthetic oligonucleotide
  Sense strand starting at position 3187 of SEQ ID NO: 1563050
auuaucuguuaucuaucga

SEQ ID NO: 1791760 - RNA, 19 nt, Artificial Sequence
  Description of Artificial Sequence: Synthetic oligonucleotide
  Antisense strand to SEQ ID NO: 1791759
ucgauagauaacagauaau

SEQ ID NO: 1791761 - RNA, 19 nt, Artificial Sequence
  Description of Artificial Sequence: Synthetic oligonucleotide
  Sense strand starting at position 3191 of SEQ ID NO: 1563050
ucuguuaucuaucgacaau

SEQ ID NO: 1791762 - RNA, 19 nt, Artificial Sequence
  Description of Artificial Sequence: Synthetic oligonucleotide
  Antisense strand to SEQ ID NO: 1791761
auugucgauagauaacaga

SEQ ID NO: 1791763 - RNA, 19 nt, Artificial Sequence
  Description of Artificial Sequence: Synthetic oligonucleotide
  Sense strand starting at position 3194 of SEQ ID NO: 1563050
guuaucuaucgacaauuaa

SEQ ID NO: 1791764 - RNA, 19 nt, Artificial Sequence
  Description of Artificial Sequence: Synthetic oligonucleotide
  Antisense strand to SEQ ID NO: 1791763
uuaauugucgauagauaac

SEQ ID NO: 1791765 - RNA, 19 nt, Artificial Sequence
  Description of Artificial Sequence: Synthetic oligonucleotide
  Sense strand starting at position 3208 of SEQ ID NO: 1563050
auuaauauccuuugacgac

SEQ ID NO: 1791766 - RNA, 19 nt, Artificial Sequence
  Description of Artificial Sequence: Synthetic oligonucleotide
  Antisense strand to SEQ ID NO: 1791765
gucgucaaaggauauuaau

SEQ ID NO: 1791767 - RNA, 19 nt, Artificial Sequence
  Description of Artificial Sequence: Synthetic oligonucleotide
  Sense strand starting at position 3209 of SEQ ID NO: 1563050
uuaauauccuuugacgacu

SEQ ID NO: 1791768 - RNA, 19 nt, Artificial Sequence
  Description of Artificial Sequence: Synthetic oligonucleotide
  Antisense strand to SEQ ID NO: 1791767
agucgucaaaggauauuaa

SEQ ID NO: 1791769 - RNA, 19 nt, Artificial Sequence
  Description of Artificial Sequence: Synthetic oligonucleotide
  Sense strand starting at position 3400 of SEQ ID NO: 1563050
ugggauuaugggcauguaa

SEQ ID NO: 1791770 - RNA, 19 nt, Artificial Sequence
  Description of Artificial Sequence: Synthetic oligonucleotide
  Antisense strand to SEQ ID NO: 1791769
uuacaugcccauaauccca

SEQ ID NO: 1791771 - RNA, 19 nt, Artificial Sequence
  Description of Artificial Sequence: Synthetic oligonucleotide
  Sense strand starting at position 3402 of SEQ ID NO: 1563050
ggauuaugggcauguaaga

SEQ ID NO: 1791772 - RNA, 19 nt, Artificial Sequence
  Description of Artificial Sequence: Synthetic oligonucleotide
  Antisense strand to SEQ ID NO: 1791771
ucuuacaugcccauaaucc

SEQ ID NO: 1791773 - RNA, 19 nt, Artificial Sequence
  Description of Artificial Sequence: Synthetic oligonucleotide
  Sense strand starting at position 3559 of SEQ ID NO: 1563050
gaaugagaacccugucuug

SEQ ID NO: 1791774 - RNA, 19 nt, Artificial Sequence
  Description of Artificial Sequence: Synthetic oligonucleotide
  Antisense strand to SEQ ID NO: 1791773
caagacaggguucucauuc

SEQ ID NO: 1791775 - RNA, 19 nt, Artificial Sequence
  Description of Artificial Sequence: Synthetic oligonucleotide
  Sense strand starting at position 3564 of SEQ ID NO: 1563050
agaacccugucuugggaua

SEQ ID NO: 1791776 - RNA, 19 nt, Artificial Sequence
  Description of Artificial Sequence: Synthetic oligonucleotide
  Antisense strand to SEQ ID NO: 1791775
uaucccaagacaggguucu

SEQ ID NO: 1791777 - RNA, 19 nt, Artificial Sequence
  Description of Artificial Sequence: Synthetic oligonucleotide
  Sense strand starting at position 3565 of SEQ ID NO: 1563050
gaacccugucuugggauau

SEQ ID NO: 1791778 - RNA, 19 nt, Artificial Sequence
  Description of Artificial Sequence: Synthetic oligonucleotide
  Antisense strand to SEQ ID NO: 1791777
auaucccaagacaggguuc

SEQ ID NO: 1791779 - RNA, 19 nt, Artificial Sequence
  Description of Artificial Sequence: Synthetic oligonucleotide
  Sense strand starting at position 3566 of SEQ ID NO: 1563050
aacccugucuugggauaua

SEQ ID NO: 1791780 - RNA, 19 nt, Artificial Sequence
  Description of Artificial Sequence: Synthetic oligonucleotide
  Antisense strand to SEQ ID NO: 1791779
uauaucccaagacaggguu

SEQ ID NO: 1791781 - RNA, 19 nt, Artificial Sequence
  Description of Artificial Sequence: Synthetic oligonucleotide
  Sense strand starting at position 3626 of SEQ ID NO: 1563050
ugaguugaagucuauguau

SEQ ID NO: 1791782 - RNA, 19 nt, Artificial Sequence
  Description of Artificial Sequence: Synthetic oligonucleotide
  Antisense strand to SEQ ID NO: 1791781
auacauagacuucaacuca

SEQ ID NO: 1791783 - RNA, 19 nt, Artificial Sequence
  Description of Artificial Sequence: Synthetic oligonucleotide
  Sense strand starting at position 3898 of SEQ ID NO: 1563050
gugggagugcugccagcuu

SEQ ID NO: 1791784 - RNA, 19 nt, Artificial Sequence
  Description of Artificial Sequence: Synthetic oligonucleotide
  Antisense strand to SEQ ID NO: 1791783
aagcuggcagcacucccac

SEQ ID NO: 1791785 - RNA, 19 nt, Artificial Sequence
  Description of Artificial Sequence: Synthetic oligonucleotide
  Sense strand starting at position 3906 of SEQ ID NO: 1563050
gcugccagcuuucuguuua

SEQ ID NO: 1791786 - RNA, 19 nt, Artificial Sequence
  Description of Artificial Sequence: Synthetic oligonucleotide
  Antisense strand to SEQ ID NO: 1791785
uaaacagaaagcuggcagc

SEQ ID NO: 1791787 - RNA, 19 nt, Artificial Sequence
  Description of Artificial Sequence: Synthetic oligonucleotide
  Sense strand starting at position 3910 of SEQ ID NO: 1563050
ccagcuuucuguuuacugu

SEQ ID NO: 1791788 - RNA, 19 nt, Artificial Sequence
  Description of Artificial Sequence: Synthetic oligonucleotide
  Antisense strand to SEQ ID NO: 1791787
acaguaaacagaaagcugg

SEQ ID NO: 1791789 - RNA, 19 nt, Artificial Sequence
  Description of Artificial Sequence: Synthetic oligonucleotide
  Sense strand starting at position 3950 of SEQ ID NO: 1563050
gggucugucaccuacagga

SEQ ID NO: 1791790 - RNA, 19 nt, Artificial Sequence
  Description of Artificial Sequence: Synthetic oligonucleotide
  Antisense strand to SEQ ID NO: 1791789
uccuguaggugacagaccc

SEQ ID NO: 1791791 - RNA, 19 nt, Artificial Sequence
  Description of Artificial Sequence: Synthetic oligonucleotide
  Sense strand starting at position 3952 of SEQ ID NO: 1563050
gucugucaccuacaggaaa

SEQ ID NO: 1791792 - RNA, 19 nt, Artificial Sequence
  Description of Artificial Sequence: Synthetic oligonucleotide
  Antisense strand to SEQ ID NO: 1791791
uuuccuguaggugacagac

SEQ ID NO: 1791793 - RNA, 19 nt, Artificial Sequence
  Description of Artificial Sequence: Synthetic oligonucleotide
  Sense strand starting at position 1134 of SEQ ID NO: 1563051
uuguucuguacugagagaa

SEQ ID NO: 1791794 - RNA, 19 nt, Artificial Sequence
  Description of Artificial Sequence: Synthetic oligonucleotide
  Antisense strand to SEQ ID NO: 1791793
uucucucaguacagaacaa

SEQ ID NO: 1791795 - RNA, 19 nt, Artificial Sequence
  Description of Artificial Sequence: Synthetic oligonucleotide
  Sense strand starting at position 1517 of SEQ ID NO: 1563051
uuuaauaaacgguaguaga

SEQ ID NO: 1791796 - RNA, 19 nt, Artificial Sequence
  Description of Artificial Sequence: Synthetic oligonucleotide
  Antisense strand to SEQ ID NO: 1791795
ucuacuaccguuuauuaaa

SEQ ID NO: 1791797 - RNA, 19 nt, Artificial Sequence
  Description of Artificial Sequence: Synthetic oligonucleotide
  Sense strand starting at position 1527 of SEQ ID NO: 1563051
gguaguagaggugguaagu

SEQ ID NO: 1791798 - RNA, 19 nt, Artificial Sequence
  Description of Artificial Sequence: Synthetic oligonucleotide
  Antisense strand to SEQ ID NO: 1791797
acuuaccaccucuacuacc

SEQ ID NO: 1791799 - RNA, 19 nt, Artificial Sequence
  Description of Artificial Sequence: Synthetic oligonucleotide
  Sense strand starting at position 1573 of SEQ ID NO: 1563051
accugaaaggcuuaagugu

SEQ ID NO: 1791800 - RNA, 19 nt, Artificial Sequence
  Description of Artificial Sequence: Synthetic oligonucleotide
  Antisense strand to SEQ ID NO: 1791799
acacuuaagccuuucaggu

SEQ ID NO: 1791801 - RNA, 19 nt, Artificial Sequence
  Description of Artificial Sequence: Synthetic oligonucleotide
  Sense strand starting at position 1579 of SEQ ID NO: 1563051
aaggcuuaagugugggaaa

SEQ ID NO: 1791802 - RNA, 19 nt, Artificial Sequence
  Description of Artificial Sequence: Synthetic oligonucleotide
  Antisense strand to SEQ ID NO: 1791801
uuucccacacuuaagccuu

SEQ ID NO: 1791803 - RNA, 19 nt, Artificial Sequence
  Description of Artificial Sequence: Synthetic oligonucleotide
  Sense strand starting at position 1581 of SEQ ID NO: 1563051
ggcuuaagugugggaaauc

SEQ ID NO: 1791804 - RNA, 19 nt, Artificial Sequence
  Description of Artificial Sequence: Synthetic oligonucleotide
  Antisense strand to SEQ ID NO: 1791803
gauuucccacacuuaagcc

SEQ ID NO: 1791805 - RNA, 19 nt, Artificial Sequence
  Description of Artificial Sequence: Synthetic oligonucleotide
  Sense strand starting at position 1601 of SEQ ID NO: 1563051
ugacuuuggcaacacagua

SEQ ID NO: 1791806 - RNA, 19 nt, Artificial Sequence
  Description of Artificial Sequence: Synthetic oligonucleotide
  Antisense strand to SEQ ID NO: 1791805
uacuguguugccaaaguca

SEQ ID NO: 1791807 - RNA, 19 nt, Artificial Sequence
  Description of Artificial Sequence: Synthetic oligonucleotide
  Sense strand starting at position 1632 of SEQ ID NO: 1563051
caccgaagagcacgauaua

SEQ ID NO: 1791808 - RNA, 19 nt, Artificial Sequence
  Description of Artificial Sequence: Synthetic oligonucleotide
  Antisense strand to SEQ ID NO: 1791807
uauaucgugcucuucggug

SEQ ID NO: 1791809 - RNA, 19 nt, Artificial Sequence
  Description of Artificial Sequence: Synthetic oligonucleotide
  Sense strand starting at position 1633 of SEQ ID NO: 1563051
accgaagagcacgauauau

SEQ ID NO: 1791810 - RNA, 19 nt, Artificial Sequence
  Description of Artificial Sequence: Synthetic oligonucleotide
  Antisense strand to SEQ ID NO: 1791809
auauaucgugcucuucggu

SEQ ID NO: 1791811 - RNA, 19 nt, Artificial Sequence
  Description of Artificial Sequence: Synthetic oligonucleotide
  Sense strand starting at position 1635 of SEQ ID NO: 1563051
cgaagagcacgauauaugu

SEQ ID NO: 1791812 - RNA, 19 nt, Artificial Sequence
  Description of Artificial Sequence: Synthetic oligonucleotide
  Antisense strand to SEQ ID NO: 1791811
acauauaucgugcucuucg

SEQ ID NO: 1791813 - RNA, 19 nt, Artificial Sequence
  Description of Artificial Sequence: Synthetic oligonucleotide
  Sense strand starting at position 1641 of SEQ ID NO: 1563051
gcacgauauaugugagcug

SEQ ID NO: 1791814 - RNA, 19 nt, Artificial Sequence
  Description of Artificial Sequence: Synthetic oligonucleotide
  Antisense strand to SEQ ID NO: 1791813
cagcucacauauaucgugc

SEQ ID NO: 1791815 - RNA, 19 nt, Artificial Sequence
  Description of Artificial Sequence: Synthetic oligonucleotide
  Sense strand starting at position 1644 of SEQ ID NO: 1563051
cgauauaugugagcuguua

SEQ ID NO: 1791816 - RNA, 19 nt, Artificial Sequence
  Description of Artificial Sequence: Synthetic oligonucleotide
  Antisense strand to SEQ ID NO: 1791815
uaacagcucacauauaucg

SEQ ID NO: 1791817 - RNA, 19 nt, Artificial Sequence
  Description of Artificial Sequence: Synthetic oligonucleotide
  Sense strand starting at position 1717 of SEQ ID NO: 1563051
caacgugaagccugaggau

SEQ ID NO: 1791818 - RNA, 19 nt, Artificial Sequence
  Description of Artificial Sequence: Synthetic oligonucleotide
  Antisense strand to SEQ ID NO: 1791817
auccucaggcuucacguug

SEQ ID NO: 1791819 - RNA, 19 nt, Artificial Sequence
  Description of Artificial Sequence: Synthetic oligonucleotide
  Sense strand starting at position 2167 of SEQ ID NO: 1563051
ggcgcuccaccgaguaguu

SEQ ID NO: 1791820 - RNA, 19 nt, Artificial Sequence
  Description of Artificial Sequence: Synthetic oligonucleotide
  Antisense strand to SEQ ID NO: 1791819
aacuacucgguggagcgcc

SEQ ID NO: 1791821 - RNA, 19 nt, Artificial Sequence
  Description of Artificial Sequence: Synthetic oligonucleotide
  Sense strand starting at position 2174 of SEQ ID NO: 1563051
caccgaguaguugaauuaa

SEQ ID NO: 1791822 - RNA, 19 nt, Artificial Sequence
  Description of Artificial Sequence: Synthetic oligonucleotide
  Antisense strand to SEQ ID NO: 1791821
uuaauucaacuacucggug

SEQ ID NO: 1791823 - RNA, 19 nt, Artificial Sequence
  Description of Artificial Sequence: Synthetic oligonucleotide
  Sense strand starting at position 2195 of SEQ ID NO: 1563051
uuguguuauguccaagaua

SEQ ID NO: 1791824 - RNA, 19 nt, Artificial Sequence
  Description of Artificial Sequence: Synthetic oligonucleotide
  Antisense strand to SEQ ID NO: 1791823
uaucuuggacauaacacaa

SEQ ID NO: 1791825 - RNA, 19 nt, Artificial Sequence
  Description of Artificial Sequence: Synthetic oligonucleotide
  Sense strand starting at position 2198 of SEQ ID NO: 1563051
uguuauguccaagauaaca

SEQ ID NO: 1791826 - RNA, 19 nt, Artificial Sequence
  Description of Artificial Sequence: Synthetic oligonucleotide
  Antisense strand to SEQ ID NO: 1791825
uguuaucuuggacauaaca

SEQ ID NO: 1791827 - RNA, 19 nt, Artificial Sequence
  Description of Artificial Sequence: Synthetic oligonucleotide
  Sense strand starting at position 2241 of SEQ ID NO: 1563051
ggaagauuucggcgcuaga

SEQ ID NO: 1791828 - RNA, 19 nt, Artificial Sequence
  Description of Artificial Sequence: Synthetic oligonucleotide
  Antisense strand to SEQ ID NO: 1791827
ucuagcgccgaaaucuucc

SEQ ID NO: 1791829 - RNA, 19 nt, Artificial Sequence
  Description of Artificial Sequence: Synthetic oligonucleotide
  Sense strand starting at position 2373 of SEQ ID NO: 1563051
aggagugcaucaccaguuu

SEQ ID NO: 1791830 - RNA, 19 nt, Artificial Sequence
  Description of Artificial Sequence: Synthetic oligonucleotide
  Antisense strand to SEQ ID NO: 1791829
aaacuggugaugcacuccu

SEQ ID NO: 1791831 - RNA, 19 nt, Artificial Sequence
  Description of Artificial Sequence: Synthetic oligonucleotide
  Sense strand starting at position 2405 of SEQ ID NO: 1563051
cugacuugcccaggacaga

SEQ ID NO: 1791832 - RNA, 19 nt, Artificial Sequence
  Description of Artificial Sequence: Synthetic oligonucleotide
  Antisense strand to SEQ ID NO: 1791831
ucuguccugggcaagucag

SEQ ID NO: 1791833 - RNA, 19 nt, Artificial Sequence
  Description of Artificial Sequence: Synthetic oligonucleotide
  Sense strand starting at position 2510 of SEQ ID NO: 1563051
uguaaauccucaucuggag

SEQ ID NO: 1791834 - RNA, 19 nt, Artificial Sequence
  Description of Artificial Sequence: Synthetic oligonucleotide
  Antisense strand to SEQ ID NO: 1791833
cuccagaugaggauuuaca

SEQ ID NO: 1791835 - RNA, 19 nt, Artificial Sequence
  Description of Artificial Sequence: Synthetic oligonucleotide
  Sense strand starting at position 2531 of SEQ ID NO: 1563051
aguaacacguguccugaau

SEQ ID NO: 1791836 - RNA, 19 nt, Artificial Sequence
  Description of Artificial Sequence: Synthetic oligonucleotide
  Antisense strand to SEQ ID NO: 1791835
auucaggacacguguuacu

SEQ ID NO: 1791837 - RNA, 19 nt, Artificial Sequence
  Description of Artificial Sequence: Synthetic oligonucleotide
  Sense strand starting at position 2542 of SEQ ID NO: 1563051
uccugaaucccugguugua

SEQ ID NO: 1791838 - RNA, 19 nt, Artificial Sequence
  Description of Artificial Sequence: Synthetic oligonucleotide
  Antisense strand to SEQ ID NO: 1791837
uacaaccagggauucagga

SEQ ID NO: 1791839 - RNA, 19 nt, Artificial Sequence
  Description of Artificial Sequence: Synthetic oligonucleotide
  Sense strand starting at position 2925 of SEQ ID NO: 1563051
gacuguugagaauagcuca

SEQ ID NO: 1791840 - RNA, 19 nt, Artificial Sequence
  Description of Artificial Sequence: Synthetic oligonucleotide
  Antisense strand to SEQ ID NO: 1791839
ugagcuauucucaacaguc

SEQ ID NO: 1791841 - RNA, 19 nt, Artificial Sequence
  Description of Artificial Sequence: Synthetic oligonucleotide
  Sense strand starting at position 2928 of SEQ ID NO: 1563051
uguugagaauagcucaaga

SEQ ID NO: 1791842 - RNA, 19 nt, Artificial Sequence
  Description of Artificial Sequence: Synthetic oligonucleotide
  Antisense strand to SEQ ID NO: 1791841
ucuugagcuauucucaaca

SEQ ID NO: 1791843 - RNA, 19 nt, Artificial Sequence
  Description of Artificial Sequence: Synthetic oligonucleotide
  Sense strand starting at position 2967 of SEQ ID NO: 1563051
guagaucugccauguggga

SEQ ID NO: 1791844 - RNA, 19 nt, Artificial Sequence
  Description of Artificial Sequence: Synthetic oligonucleotide
  Antisense strand to SEQ ID NO: 1791843
ucccacauggcagaucuac

SEQ ID NO: 1791845 - RNA, 19 nt, Artificial Sequence
  Description of Artificial Sequence: Synthetic oligonucleotide
  Sense strand starting at position 3025 of SEQ ID NO: 1563051
ugcuaaaguuccuugcaga

SEQ ID NO: 1791846 - RNA, 19 nt, Artificial Sequence
  Description of Artificial Sequence: Synthetic oligonucleotide
  Antisense strand to SEQ ID NO: 1791845
ucugcaaggaacuuuagca

SEQ ID NO: 1791847 - RNA, 19 nt, Artificial Sequence
  Description of Artificial Sequence: Synthetic oligonucleotide
  Sense strand starting at position 3026 of SEQ ID NO: 1563051
gcuaaaguuccuugcagau

SEQ ID NO: 1791848 - RNA, 19 nt, Artificial Sequence
  Description of Artificial Sequence: Synthetic oligonucleotide
  Antisense strand to SEQ ID NO: 1791847
aucugcaaggaacuuuagc

SEQ ID NO: 1791849 - RNA, 19 nt, Artificial Sequence
  Description of Artificial Sequence: Synthetic oligonucleotide
  Sense strand starting at position 3032 of SEQ ID NO: 1563051
guuccuugcagaugaagaa

SEQ ID NO: 1791850 - RNA, 19 nt, Artificial Sequence
  Description of Artificial Sequence: Synthetic oligonucleotide
  Antisense strand to SEQ ID NO: 1791849
uucuucaucugcaaggaac

SEQ ID NO: 1791851 - RNA, 19 nt, Artificial Sequence
  Description of Artificial Sequence: Synthetic oligonucleotide
  Sense strand starting at position 3091 of SEQ ID NO: 1563051
gcaauuccagcacaaguuu

SEQ ID NO: 1791852 - RNA, 19 nt, Artificial Sequence
  Description of Artificial Sequence: Synthetic oligonucleotide
  Antisense strand to SEQ ID NO: 1791851
aaacuugugcuggaauugc

SEQ ID NO: 1791853 - RNA, 19 nt, Artificial Sequence
  Description of Artificial Sequence: Synthetic oligonucleotide
  Sense strand starting at position 3111 of SEQ ID NO: 1563051
ccuggaugguaggcagaau

SEQ ID NO: 1791854 - RNA, 19 nt, Artificial Sequence
  Description of Artificial Sequence: Synthetic oligonucleotide
  Antisense strand to SEQ ID NO: 1791853
auucugccuaccauccagg

SEQ ID NO: 1791855 - RNA, 19 nt, Artificial Sequence
  Description of Artificial Sequence: Synthetic oligonucleotide
  Sense strand starting at position 3289 of SEQ ID NO: 1563051
cagggucuagcuuguauau

SEQ ID NO: 1791856 - RNA, 19 nt, Artificial Sequence
  Description of Artificial Sequence: Synthetic oligonucleotide
  Antisense strand to SEQ ID NO: 1791855
auauacaagcuagacccug

SEQ ID NO: 1791857 - RNA, 19 nt, Artificial Sequence
  Description of Artificial Sequence: Synthetic oligonucleotide
  Sense strand starting at position 3301 of SEQ ID NO: 1563051
uguauauuugccugcagga

SEQ ID NO: 1791858 - RNA, 19 nt, Artificial Sequence
  Description of Artificial Sequence: Synthetic oligonucleotide
  Antisense strand to SEQ ID NO: 1791857
uccugcaggcaaauauaca

SEQ ID NO: 1791859 - RNA, 19 nt, Artificial Sequence
  Description of Artificial Sequence: Synthetic oligonucleotide
  Sense strand starting at position 3412 of SEQ ID NO: 1563051
cucuccaucugucuaguau

SEQ ID NO: 1791860 - RNA, 19 nt, Artificial Sequence
  Description of Artificial Sequence: Synthetic oligonucleotide
  Antisense strand to SEQ ID NO: 1791859
auacuagacagauggagag

SEQ ID NO: 1791861 - RNA, 19 nt, Artificial Sequence
  Description of Artificial Sequence: Synthetic oligonucleotide
  Sense strand starting at position 3413 of SEQ ID NO: 1563051
ucuccaucugucuaguauu

SEQ ID NO: 1791862 - RNA, 19 nt, Artificial Sequence
  Description of Artificial Sequence: Synthetic oligonucleotide
  Antisense strand to SEQ ID NO: 1791861
aauacuagacagauggaga

SEQ ID NO: 1791863 - RNA, 19 nt, Artificial Sequence
  Description of Artificial Sequence: Synthetic oligonucleotide
  Sense strand starting at position 3481 of SEQ ID NO: 1563051
uucuguauuccagauucca

SEQ ID NO: 1791864 - RNA, 19 nt, Artificial Sequence
  Description of Artificial Sequence: Synthetic oligonucleotide
  Antisense strand to SEQ ID NO: 1791863
uggaaucuggaauacagaa

SEQ ID NO: 1791865 - RNA, 19 nt, Artificial Sequence
  Description of Artificial Sequence: Synthetic oligonucleotide
  Sense strand starting at position 3543 of SEQ ID NO: 1563051
uuccgaguuccuguuacgu

SEQ ID NO: 1791866 - RNA, 19 nt, Artificial Sequence
  Description of Artificial Sequence: Synthetic oligonucleotide
  Antisense strand to SEQ ID NO: 1791865
acguaacaggaacucggaa

SEQ ID NO: 1791867 - RNA, 19 nt, Artificial Sequence
  Description of Artificial Sequence: Synthetic oligonucleotide
  Sense strand starting at position 3651 of SEQ ID NO: 1563051
ugacgagguuuguuuguau

SEQ ID NO: 1791868 - RNA, 19 nt, Artificial Sequence
  Description of Artificial Sequence: Synthetic oligonucleotide
  Antisense strand to SEQ ID NO: 1791867
auacaaacaaaccucguca

SEQ ID NO: 1791869 - RNA, 19 nt, Artificial Sequence
  Description of Artificial Sequence: Synthetic oligonucleotide
  Sense strand starting at position 3879 of SEQ ID NO: 1563051
acugguggccuugagauga

SEQ ID NO: 1791870 - RNA, 19 nt, Artificial Sequence
  Description of Artificial Sequence: Synthetic oligonucleotide
  Antisense strand to SEQ ID NO: 1791869
ucaucucaaggccaccagu

SEQ ID NO: 1791871 - RNA, 19 nt, Artificial Sequence
  Description of Artificial Sequence: Synthetic oligonucleotide
  Sense strand starting at position 3883 of SEQ ID NO: 1563051
guggccuugagaugaggaa

SEQ ID NO: 1791872 - RNA, 19 nt, Artificial Sequence
  Description of Artificial Sequence: Synthetic oligonucleotide
  Antisense strand to SEQ ID NO: 1791871
uuccucaucucaaggccac

SEQ ID NO: 1791873 - RNA, 19 nt, Artificial Sequence
  Description of Artificial Sequence: Synthetic oligonucleotide
  Sense strand starting at position 59 of SEQ ID NO: 1563052
gcacucagucuugacaaca

SEQ ID NO: 1791874 - RNA, 19 nt, Artificial Sequence
  Description of Artificial Sequence: Synthetic oligonucleotide
  Antisense strand to SEQ ID NO: 1791873
uguugucaagacugagugc

SEQ ID NO: 1791875 - RNA, 19 nt, Artificial Sequence
  Description of Artificial Sequence: Synthetic oligonucleotide
  Sense strand starting at position 1226 of SEQ ID NO: 1563052
uuguucuguacugagagaa

SEQ ID NO: 1791876 - RNA, 19 nt, Artificial Sequence
  Description of Artificial Sequence: Synthetic oligonucleotide
  Antisense strand to SEQ ID NO: 1791875
uucucucaguacagaacaa

SEQ ID NO: 1791877 - RNA, 19 nt, Artificial Sequence
  Description of Artificial Sequence: Synthetic oligonucleotide
  Sense strand starting at position 1609 of SEQ ID NO: 1563052
uuuaauaaacgguaguaga

SEQ ID NO: 1791878 - RNA, 19 nt, Artificial Sequence
  Description of Artificial Sequence: Synthetic oligonucleotide
  Antisense strand to SEQ ID NO: 1791877
ucuacuaccguuuauuaaa

SEQ ID NO: 1791879 - RNA, 19 nt, Artificial Sequence
  Description of Artificial Sequence: Synthetic oligonucleotide
  Sense strand starting at position 1619 of SEQ ID NO: 1563052
gguaguagaggugguaagu

SEQ ID NO: 1791880 - RNA, 19 nt, Artificial Sequence
  Description of Artificial Sequence: Synthetic oligonucleotide
  Antisense strand to SEQ ID NO: 1791879
acuuaccaccucuacuacc

SEQ ID NO: 1791881 - RNA, 19 nt, Artificial Sequence
  Description of Artificial Sequence: Synthetic oligonucleotide
  Sense strand starting at position 1665 of SEQ ID NO: 1563052
accugaaaggcuuaagugu

SEQ ID NO: 1791882 - RNA, 19 nt, Artificial Sequence
  Description of Artificial Sequence: Synthetic oligonucleotide
  Antisense strand to SEQ ID NO: 1791881
acacuuaagccuuucaggu

SEQ ID NO: 1791883 - RNA, 19 nt, Artificial Sequence
  Description of Artificial Sequence: Synthetic oligonucleotide
  Sense strand starting at position 1671 of SEQ ID NO: 1563052
aaggcuuaagugugggaaa

SEQ ID NO: 1791884 - RNA, 19 nt, Artificial Sequence
  Description of Artificial Sequence: Synthetic oligonucleotide
  Antisense strand to SEQ ID NO: 1791883
uuucccacacuuaagccuu

SEQ ID NO: 1791885 - RNA, 19 nt, Artificial Sequence
  Description of Artificial Sequence: Synthetic oligonucleotide
  Sense strand starting at position 1673 of SEQ ID NO: 1563052
ggcuuaagugugggaaauc

SEQ ID NO: 1791886 - RNA, 19 nt, Artificial Sequence
  Description of Artificial Sequence: Synthetic oligonucleotide
  Antisense strand to SEQ ID NO: 1791885
gauuucccacacuuaagcc

SEQ ID NO: 1791887 - RNA, 19 nt, Artificial Sequence
  Description of Artificial Sequence: Synthetic oligonucleotide
  Sense strand starting at position 1693 of SEQ ID NO: 1563052
ugacuuuggcaacacagua

SEQ ID NO: 1791888 - RNA, 19 nt, Artificial Sequence
  Description of Artificial Sequence: Synthetic oligonucleotide
  Antisense strand to SEQ ID NO: 1791887
uacuguguugccaaaguca

SEQ ID NO: 1791889 - RNA, 19 nt, Artificial Sequence
  Description of Artificial Sequence: Synthetic oligonucleotide
  Sense strand starting at position 1724 of SEQ ID NO: 1563052
caccgaagagcacgauaua

SEQ ID NO: 1791890 - RNA, 19 nt, Artificial Sequence
  Description of Artificial Sequence: Synthetic oligonucleotide
  Antisense strand to SEQ ID NO: 1791889
uauaucgugcucuucggug

SEQ ID NO: 1791891 - RNA, 19 nt, Artificial Sequence
  Description of Artificial Sequence: Synthetic oligonucleotide
  Sense strand starting at position 1725 of SEQ ID NO: 1563052
accgaagagcacgauauau

SEQ ID NO: 1791892 - RNA, 19 nt, Artificial Sequence
  Description of Artificial Sequence: Synthetic oligonucleotide
  Antisense strand to SEQ ID NO: 1791891
auauaucgugcucuucggu

SEQ ID NO: 1791893 - RNA, 19 nt, Artificial Sequence
  Description of Artificial Sequence: Synthetic oligonucleotide
  Sense strand starting at position 1727 of SEQ ID NO: 1563052
cgaagagcacgauauaugu

SEQ ID NO: 1791894 - RNA, 19 nt, Artificial Sequence
  Description of Artificial Sequence: Synthetic oligonucleotide
  Antisense strand to SEQ ID NO: 1791893
acauauaucgugcucuucg

SEQ ID NO: 1791895 - RNA, 19 nt, Artificial Sequence
  Description of Artificial Sequence: Synthetic oligonucleotide
  Sense strand starting at position 1733 of SEQ ID NO: 1563052
gcacgauauaugugagcug

SEQ ID NO: 1791896 - RNA, 19 nt, Artificial Sequence
  Description of Artificial Sequence: Synthetic oligonucleotide
  Antisense strand to SEQ ID NO: 1791895
cagcucacauauaucgugc

SEQ ID NO: 1791897 - RNA, 19 nt, Artificial Sequence
  Description of Artificial Sequence: Synthetic oligonucleotide
  Sense strand starting at position 1736 of SEQ ID NO: 1563052
cgauauaugugagcuguua

SEQ ID NO: 1791898 - RNA, 19 nt, Artificial Sequence
  Description of Artificial Sequence: Synthetic oligonucleotide
  Antisense strand to SEQ ID NO: 1791897
uaacagcucacauauaucg

SEQ ID NO: 1791899 - RNA, 19 nt, Artificial Sequence
  Description of Artificial Sequence: Synthetic oligonucleotide
  Sense strand starting at position 1809 of SEQ ID NO: 1563052
caacgugaagccugaggau

SEQ ID NO: 1791900 - RNA, 19 nt, Artificial Sequence
  Description of Artificial Sequence: Synthetic oligonucleotide
  Antisense strand to SEQ ID NO: 1791899
auccucaggcuucacguug

SEQ ID NO: 1791901 - RNA, 19 nt, Artificial Sequence
  Description of Artificial Sequence: Synthetic oligonucleotide
  Sense strand starting at position 2259 of SEQ ID NO: 1563052
ggcgcuccaccgaguaguu

SEQ ID NO: 1791902 - RNA, 19 nt, Artificial Sequence
  Description of Artificial Sequence: Synthetic oligonucleotide
  Antisense strand to SEQ ID NO: 1791901
aacuacucgguggagcgcc

SEQ ID NO: 1791903 - RNA, 19 nt, Artificial Sequence
  Description of Artificial Sequence: Synthetic oligonucleotide
  Sense strand starting at position 2266 of SEQ ID NO: 1563052
caccgaguaguugaauuaa

SEQ ID NO: 1791904 - RNA, 19 nt, Artificial Sequence
  Description of Artificial Sequence: Synthetic oligonucleotide
  Antisense strand to SEQ ID NO: 1791903
uuaauucaacuacucggug

SEQ ID NO: 1791905 - RNA, 19 nt, Artificial Sequence
  Description of Artificial Sequence: Synthetic oligonucleotide
  Sense strand starting at position 2287 of SEQ ID NO: 1563052
uuguguuauguccaagaua

SEQ ID NO: 1791906 - RNA, 19 nt, Artificial Sequence
  Description of Artificial Sequence: Synthetic oligonucleotide
  Antisense strand to SEQ ID NO: 1791905
uaucuuggacauaacacaa

SEQ ID NO: 1791907 - RNA, 19 nt, Artificial Sequence
  Description of Artificial Sequence: Synthetic oligonucleotide
  Sense strand starting at position 2290 of SEQ ID NO: 1563052
uguuauguccaagauaaca

SEQ ID NO: 1791908 - RNA, 19 nt, Artificial Sequence
  Description of Artificial Sequence: Synthetic oligonucleotide
  Antisense strand to SEQ ID NO: 1791907
uguuaucuuggacauaaca

SEQ ID NO: 1791909 - RNA, 19 nt, Artificial Sequence
  Description of Artificial Sequence: Synthetic oligonucleotide
  Sense strand starting at position 2333 of SEQ ID NO: 1563052
ggaagauuucggcgcuaga

SEQ ID NO: 1791910 - RNA, 19 nt, Artificial Sequence
  Description of Artificial Sequence: Synthetic oligonucleotide
  Antisense strand to SEQ ID NO: 1791909
ucuagcgccgaaaucuucc

SEQ ID NO: 1791911 - RNA, 19 nt, Artificial Sequence
  Description of Artificial Sequence: Synthetic oligonucleotide
  Sense strand starting at position 2465 of SEQ ID NO: 1563052
aggagugcaucaccaguuu

SEQ ID NO: 1791912 - RNA, 19 nt, Artificial Sequence
  Description of Artificial Sequence: Synthetic oligonucleotide
  Antisense strand to SEQ ID NO: 1791911
aaacuggugaugcacuccu

SEQ ID NO: 1791913 - RNA, 19 nt, Artificial Sequence
  Description of Artificial Sequence: Synthetic oligonucleotide
  Sense strand starting at position 2497 of SEQ ID NO: 1563052
cugacuugcccaggacaga

SEQ ID NO: 1791914 - RNA, 19 nt, Artificial Sequence
  Description of Artificial Sequence: Synthetic oligonucleotide
  Antisense strand to SEQ ID NO: 1791913
ucuguccugggcaagucag

SEQ ID NO: 1791915 - RNA, 19 nt, Artificial Sequence
  Description of Artificial Sequence: Synthetic oligonucleotide
  Sense strand starting at position 2602 of SEQ ID NO: 1563052
uguaaauccucaucuggag

SEQ ID NO: 1791916 - RNA, 19 nt, Artificial Sequence
  Description of Artificial Sequence: Synthetic oligonucleotide
  Antisense strand to SEQ ID NO: 1791915
cuccagaugaggauuuaca

SEQ ID NO: 1791917 - RNA, 19 nt, Artificial Sequence
  Description of Artificial Sequence: Synthetic oligonucleotide
  Sense strand starting at position 2623 of SEQ ID NO: 1563052
aguaacacguguccugaau

SEQ ID NO: 1791918 - RNA, 19 nt, Artificial Sequence
  Description of Artificial Sequence: Synthetic oligonucleotide
  Antisense strand to SEQ ID NO: 1791917
auucaggacacguguuacu

SEQ ID NO: 1791919 - RNA, 19 nt, Artificial Sequence
  Description of Artificial Sequence: Synthetic oligonucleotide
  Sense strand starting at position 2634 of SEQ ID NO: 1563052
uccugaaucccugguugua

SEQ ID NO: 1791920 - RNA, 19 nt, Artificial Sequence
  Description of Artificial Sequence: Synthetic oligonucleotide
  Antisense strand to SEQ ID NO: 1791919
uacaaccagggauucagga

SEQ ID NO: 1791921 - RNA, 19 nt, Artificial Sequence
  Description of Artificial Sequence: Synthetic oligonucleotide
  Sense strand starting at position 3017 of SEQ ID NO: 1563052
gacuguugagaauagcuca

SEQ ID NO: 1791922 - RNA, 19 nt, Artificial Sequence
  Description of Artificial Sequence: Synthetic oligonucleotide
  Antisense strand to SEQ ID NO: 1791921
ugagcuauucucaacaguc

SEQ ID NO: 1791923 - RNA, 19 nt, Artificial Sequence
  Description of Artificial Sequence: Synthetic oligonucleotide
  Sense strand starting at position 3020 of SEQ ID NO: 1563052
uguugagaauagcucaaga

SEQ ID NO: 1791924 - RNA, 19 nt, Artificial Sequence
  Description of Artificial Sequence: Synthetic oligonucleotide
  Antisense strand to SEQ ID NO: 1791923
ucuugagcuauucucaaca

SEQ ID NO: 1791925 - RNA, 19 nt, Artificial Sequence
  Description of Artificial Sequence: Synthetic oligonucleotide
  Sense strand starting at position 3059 of SEQ ID NO: 1563052
guagaucugccauguggga

SEQ ID NO: 1791926 - RNA, 19 nt, Artificial Sequence
  Description of Artificial Sequence: Synthetic oligonucleotide
  Antisense strand to SEQ ID NO: 1791925
ucccacauggcagaucuac

SEQ ID NO: 1791927 - RNA, 19 nt, Artificial Sequence
  Description of Artificial Sequence: Synthetic oligonucleotide
  Sense strand starting at position 3117 of SEQ ID NO: 1563052
ugcuaaaguuccuugcaga

SEQ ID NO: 1791928 - RNA, 19 nt, Artificial Sequence
  Description of Artificial Sequence: Synthetic oligonucleotide
  Antisense strand to SEQ ID NO: 1791927
ucugcaaggaacuuuagca

SEQ ID NO: 1791929 - RNA, 19 nt, Artificial Sequence
  Description of Artificial Sequence: Synthetic oligonucleotide
  Sense strand starting at position 3118 of SEQ ID NO: 1563052
gcuaaaguuccuugcagau

SEQ ID NO: 1791930 - RNA, 19 nt, Artificial Sequence
  Description of Artificial Sequence: Synthetic oligonucleotide
  Antisense strand to SEQ ID NO: 1791929
aucugcaaggaacuuuagc

SEQ ID NO: 1791931 - RNA, 19 nt, Artificial Sequence
  Description of Artificial Sequence: Synthetic oligonucleotide
  Sense strand starting at position 3124 of SEQ ID NO: 1563052
guuccuugcagaugaagaa

SEQ ID NO: 1791932 - RNA, 19 nt, Artificial Sequence
  Description of Artificial Sequence: Synthetic oligonucleotide
  Antisense strand to SEQ ID NO: 1791931
uucuucaucugcaaggaac

SEQ ID NO: 1791933 - RNA, 19 nt, Artificial Sequence
  Description of Artificial Sequence: Synthetic oligonucleotide
  Sense strand starting at position 3183 of SEQ ID NO: 1563052
gcaauuccagcacaaguuu

SEQ ID NO: 1791934 - RNA, 19 nt, Artificial Sequence
  Description of Artificial Sequence: Synthetic oligonucleotide
  Antisense strand to SEQ ID NO: 1791933
aaacuugugcuggaauugc

SEQ ID NO: 1791935 - RNA, 19 nt, Artificial Sequence
  Description of Artificial Sequence: Synthetic oligonucleotide
  Sense strand starting at position 3203 of SEQ ID NO: 1563052
ccuggaugguaggcagaau

SEQ ID NO: 1791936 - RNA, 19 nt, Artificial Sequence
  Description of Artificial Sequence: Synthetic oligonucleotide
  Antisense strand to SEQ ID NO: 1791935
auucugccuaccauccagg

SEQ ID NO: 1791937 - RNA, 19 nt, Artificial Sequence
  Description of Artificial Sequence: Synthetic oligonucleotide
  Sense strand starting at position 3381 of SEQ ID NO: 1563052
cagggucuagcuuguauau

SEQ ID NO: 1791938 - RNA, 19 nt, Artificial Sequence
  Description of Artificial Sequence: Synthetic oligonucleotide
  Antisense strand to SEQ ID NO: 1791937
auauacaagcuagacccug

SEQ ID NO: 1791939 - RNA, 19 nt, Artificial Sequence
  Description of Artificial Sequence: Synthetic oligonucleotide
  Sense strand starting at position 3393 of SEQ ID NO: 1563052
uguauauuugccugcagga

SEQ ID NO: 1791940 - RNA, 19 nt, Artificial Sequence
  Description of Artificial Sequence: Synthetic oligonucleotide
  Antisense strand to SEQ ID NO: 1791939
uccugcaggcaaauauaca

SEQ ID NO: 1791941 - RNA, 19 nt, Artificial Sequence
  Description of Artificial Sequence: Synthetic oligonucleotide
  Sense strand starting at position 3504 of SEQ ID NO: 1563052
cucuccaucugucuaguau

SEQ ID NO: 1791942 - RNA, 19 nt, Artificial Sequence
  Description of Artificial Sequence: Synthetic oligonucleotide
  Antisense strand to SEQ ID NO: 1791941
auacuagacagauggagag

SEQ ID NO: 1791943 - RNA, 19 nt, Artificial Sequence
  Description of Artificial Sequence: Synthetic oligonucleotide
  Sense strand starting at position 3505 of SEQ ID NO: 1563052
ucuccaucugucuaguauu

SEQ ID NO: 1791944 - RNA, 19 nt, Artificial Sequence
  Description of Artificial Sequence: Synthetic oligonucleotide
  Antisense strand to SEQ ID NO: 1791943
aauacuagacagauggaga

SEQ ID NO: 1791945 - RNA, 19 nt, Artificial Sequence
  Description of Artificial Sequence: Synthetic oligonucleotide
  Sense strand starting at position 3573 of SEQ ID NO: 1563052
uucuguauuccagauucca

SEQ ID NO: 1791946 - RNA, 19 nt, Artificial Sequence
  Description of Artificial Sequence: Synthetic oligonucleotide
  Antisense strand to SEQ ID NO: 1791945
uggaaucuggaauacagaa

SEQ ID NO: 1791947 - RNA, 19 nt, Artificial Sequence
  Description of Artificial Sequence: Synthetic oligonucleotide
  Sense strand starting at position 3635 of SEQ ID NO: 1563052
uuccgaguuccuguuacgu

SEQ ID NO: 1791948 - RNA, 19 nt, Artificial Sequence
  Description of Artificial Sequence: Synthetic oligonucleotide
  Antisense strand to SEQ ID NO: 1791947
acguaacaggaacucggaa

SEQ ID NO: 1791949 - RNA, 19 nt, Artificial Sequence
  Description of Artificial Sequence: Synthetic oligonucleotide
  Sense strand starting at position 3971 of SEQ ID NO: 1563052
acugguggccuugagauga

SEQ ID NO: 1791950 - RNA, 19 nt, Artificial Sequence
  Description of Artificial Sequence: Synthetic oligonucleotide
  Antisense strand to SEQ ID NO: 1791949
ucaucucaaggccaccagu

SEQ ID NO: 1791951 - RNA, 19 nt, Artificial Sequence
  Description of Artificial Sequence: Synthetic oligonucleotide
  Sense strand starting at position 3975 of SEQ ID NO: 1563052
guggccuugagaugaggaa

SEQ ID NO: 1791952 - RNA, 19 nt, Artificial Sequence
  Description of Artificial Sequence: Synthetic oligonucleotide
  Antisense strand to SEQ ID NO: 1791951
uuccucaucucaaggccac

SEQ ID NO: 1791953 - RNA, 19 nt, Artificial Sequence
  Description of Artificial Sequence: Synthetic oligonucleotide
  Sense strand starting at position 84 of SEQ ID NO: 1563053
gggucaaugccacagcuuu

SEQ ID NO: 1791954 - RNA, 19 nt, Artificial Sequence
  Description of Artificial Sequence: Synthetic oligonucleotide
  Antisense strand to SEQ ID NO: 1791953
aaagcuguggcauugaccc

SEQ ID NO: 1791955 - RNA, 19 nt, Artificial Sequence
  Description of Artificial Sequence: Synthetic oligonucleotide
  Sense strand starting at position 238 of SEQ ID NO: 1563053
cucggaguacuccaaguuu

SEQ ID NO: 1791956 - RNA, 19 nt, Artificial Sequence
  Description of Artificial Sequence: Synthetic oligonucleotide
  Antisense strand to SEQ ID NO: 1791955
aaacuuggaguacuccgag

SEQ ID NO: 1791957 - RNA, 19 nt, Artificial Sequence
  Description of Artificial Sequence: Synthetic oligonucleotide
  Sense strand starting at position 543 of SEQ ID NO: 1563053
gcccaaggacaucgaguuu

SEQ ID NO: 1791958 - RNA, 19 nt, Artificial Sequence
  Description of Artificial Sequence: Synthetic oligonucleotide
  Antisense strand to SEQ ID NO: 1791957
aaacucgauguccuugggc

SEQ ID NO: 1791959 - RNA, 19 nt, Artificial Sequence
  Description of Artificial Sequence: Synthetic oligonucleotide
  Sense strand starting at position 2187 of SEQ ID NO: 1563053
cuagacgacuagcuauaau

SEQ ID NO: 1791960 - RNA, 19 nt, Artificial Sequence
  Description of Artificial Sequence: Synthetic oligonucleotide
  Antisense strand to SEQ ID NO: 1791959
auuauagcuagucgucuag

SEQ ID NO: 1791961 - RNA, 19 nt, Artificial Sequence
  Description of Artificial Sequence: Synthetic oligonucleotide
  Sense strand starting at position 2198 of SEQ ID NO: 1563053
gcuauaauagaugauugca

SEQ ID NO: 1791962 - RNA, 19 nt, Artificial Sequence
  Description of Artificial Sequence: Synthetic oligonucleotide
  Antisense strand to SEQ ID NO: 1791961
ugcaaucaucuauuauagc

SEQ ID NO: 1791963 - RNA, 19 nt, Artificial Sequence
  Description of Artificial Sequence: Synthetic oligonucleotide
  Sense strand starting at position 2201 of SEQ ID NO: 1563053
auaauagaugauugcagau

SEQ ID NO: 1791964 - RNA, 19 nt, Artificial Sequence
  Description of Artificial Sequence: Synthetic oligonucleotide
  Antisense strand to SEQ ID NO: 1791963
aucugcaaucaucuauuau

SEQ ID NO: 1791965 - RNA, 19 nt, Artificial Sequence
  Description of Artificial Sequence: Synthetic oligonucleotide
  Sense strand starting at position 2254 of SEQ ID NO: 1563053
uugauucugcuuuguauuu

SEQ ID NO: 1791966 - RNA, 19 nt, Artificial Sequence
  Description of Artificial Sequence: Synthetic oligonucleotide
  Antisense strand to SEQ ID NO: 1791965
aaauacaaagcagaaucaa

SEQ ID NO: 1791967 - RNA, 19 nt, Artificial Sequence
  Description of Artificial Sequence: Synthetic oligonucleotide
  Sense strand starting at position 2288 of SEQ ID NO: 1563053
uguaucucaccguauuaua

SEQ ID NO: 1791968 - RNA, 19 nt, Artificial Sequence
  Description of Artificial Sequence: Synthetic oligonucleotide
  Antisense strand to SEQ ID NO: 1791967
uauaauacggugagauaca

SEQ ID NO: 1791969 - RNA, 19 nt, Artificial Sequence
  Description of Artificial Sequence: Synthetic oligonucleotide
  Sense strand starting at position 2312 of SEQ ID NO: 1563053
cacaauaaucuuugugggu

SEQ ID NO: 1791970 - RNA, 19 nt, Artificial Sequence
  Description of Artificial Sequence: Synthetic oligonucleotide
  Antisense strand to SEQ ID NO: 1791969
acccacaaagauuauugug

SEQ ID NO: 1791971 - RNA, 19 nt, Artificial Sequence
  Description of Artificial Sequence: Synthetic oligonucleotide
  Sense strand starting at position 2313 of SEQ ID NO: 1563053
acaauaaucuuugugggua

SEQ ID NO: 1791972 - RNA, 19 nt, Artificial Sequence
  Description of Artificial Sequence: Synthetic oligonucleotide
  Antisense strand to SEQ ID NO: 1791971
uacccacaaagauuauugu

SEQ ID NO: 1791973 - RNA, 19 nt, Artificial Sequence
  Description of Artificial Sequence: Synthetic oligonucleotide
  Sense strand starting at position 2316 of SEQ ID NO: 1563053
auaaucuuuguggguagga

SEQ ID NO: 1791974 - RNA, 19 nt, Artificial Sequence
  Description of Artificial Sequence: Synthetic oligonucleotide
  Antisense strand to SEQ ID NO: 1791973
uccuacccacaaagauuau

SEQ ID NO: 1791975 - RNA, 19 nt, Artificial Sequence
  Description of Artificial Sequence: Synthetic oligonucleotide
  Sense strand starting at position 2317 of SEQ ID NO: 1563053
uaaucuuuguggguaggaa

SEQ ID NO: 1791976 - RNA, 19 nt, Artificial Sequence
  Description of Artificial Sequence: Synthetic oligonucleotide
  Antisense strand to SEQ ID NO: 1791975
uuccuacccacaaagauua

SEQ ID NO: 1791977 - RNA, 19 nt, Artificial Sequence
  Description of Artificial Sequence: Synthetic oligonucleotide
  Sense strand starting at position 2381 of SEQ ID NO: 1563053
acagaaagaugggaugauu

SEQ ID NO: 1791978 - RNA, 19 nt, Artificial Sequence
  Description of Artificial Sequence: Synthetic oligonucleotide
  Antisense strand to SEQ ID NO: 1791977
aaucaucccaucuuucugu

SEQ ID NO: 1791979 - RNA, 19 nt, Artificial Sequence
  Description of Artificial Sequence: Synthetic oligonucleotide
  Sense strand starting at position 2458 of SEQ ID NO: 1563053
caugcauuucccugaacgu

SEQ ID NO: 1791980 - RNA, 19 nt, Artificial Sequence
  Description of Artificial Sequence: Synthetic oligonucleotide
  Antisense strand to SEQ ID NO: 1791979
acguucagggaaaugcaug

SEQ ID NO: 1791981 - RNA, 19 nt, Artificial Sequence
  Description of Artificial Sequence: Synthetic oligonucleotide
  Sense strand starting at position 2576 of SEQ ID NO: 1563053
uuagaaaugccacaaguuu

SEQ ID NO: 1791982 - RNA, 19 nt, Artificial Sequence
  Description of Artificial Sequence: Synthetic oligonucleotide
  Antisense strand to SEQ ID NO: 1791981
aaacuuguggcauuucuaa

SEQ ID NO: 1791983 - RNA, 19 nt, Artificial Sequence
  Description of Artificial Sequence: Synthetic oligonucleotide
  Sense strand starting at position 2687 of SEQ ID NO: 1563053
ggccgaagaauucgugaga

SEQ ID NO: 1791984 - RNA, 19 nt, Artificial Sequence
  Description of Artificial Sequence: Synthetic oligonucleotide
  Antisense strand to SEQ ID NO: 1791983
ucucacgaauucuucggcc

SEQ ID NO: 1791985 - RNA, 19 nt, Artificial Sequence
  Description of Artificial Sequence: Synthetic oligonucleotide
  Sense strand starting at position 2688 of SEQ ID NO: 1563053
gccgaagaauucgugagag

SEQ ID NO: 1791986 - RNA, 19 nt, Artificial Sequence
  Description of Artificial Sequence: Synthetic oligonucleotide
  Antisense strand to SEQ ID NO: 1791985
cucucacgaauucuucggc

SEQ ID NO: 1791987 - RNA, 19 nt, Artificial Sequence
  Description of Artificial Sequence: Synthetic oligonucleotide
  Sense strand starting at position 2690 of SEQ ID NO: 1563053
cgaagaauucgugagagau

SEQ ID NO: 1791988 - RNA, 19 nt, Artificial Sequence
  Description of Artificial Sequence: Synthetic oligonucleotide
  Antisense strand to SEQ ID NO: 1791987
aucucucacgaauucuucg

SEQ ID NO: 1791989 - RNA, 19 nt, Artificial Sequence
  Description of Artificial Sequence: Synthetic oligonucleotide
  Sense strand starting at position 2694 of SEQ ID NO: 1563053
gaauucgugagagauggua

SEQ ID NO: 1791990 - RNA, 19 nt, Artificial Sequence
  Description of Artificial Sequence: Synthetic oligonucleotide
  Antisense strand to SEQ ID NO: 1791989
uaccaucucucacgaauuc

SEQ ID NO: 1791991 - RNA, 19 nt, Artificial Sequence
  Description of Artificial Sequence: Synthetic oligonucleotide
  Sense strand starting at position 2696 of SEQ ID NO: 1563053
auucgugagagaugguauu

SEQ ID NO: 1791992 - RNA, 19 nt, Artificial Sequence
  Description of Artificial Sequence: Synthetic oligonucleotide
  Antisense strand to SEQ ID NO: 1791991
aauaccaucucucacgaau

SEQ ID NO: 1791993 - RNA, 19 nt, Artificial Sequence
  Description of Artificial Sequence: Synthetic oligonucleotide
  Sense strand starting at position 2752 of SEQ ID NO: 1563053
gcacuuuagccauaggaaa

SEQ ID NO: 1791994 - RNA, 19 nt, Artificial Sequence
  Description of Artificial Sequence: Synthetic oligonucleotide
  Antisense strand to SEQ ID NO: 1791993
uuuccuauggcuaaagugc

SEQ ID NO: 1791995 - RNA, 19 nt, Artificial Sequence
  Description of Artificial Sequence: Synthetic oligonucleotide
  Sense strand starting at position 2851 of SEQ ID NO: 1563053
gccuaacucguagagaugu

SEQ ID NO: 1791996 - RNA, 19 nt, Artificial Sequence
  Description of Artificial Sequence: Synthetic oligonucleotide
  Antisense strand to SEQ ID NO: 1791995
acaucucuacgaguuaggc

SEQ ID NO: 1791997 - RNA, 19 nt, Artificial Sequence
  Description of Artificial Sequence: Synthetic oligonucleotide
  Sense strand starting at position 2853 of SEQ ID NO: 1563053
cuaacucguagagauguuu

SEQ ID NO: 1791998 - RNA, 19 nt, Artificial Sequence
  Description of Artificial Sequence: Synthetic oligonucleotide
  Antisense strand to SEQ ID NO: 1791997
aaacaucucuacgaguuag

SEQ ID NO: 1791999 - RNA, 19 nt, Artificial Sequence
  Description of Artificial Sequence: Synthetic oligonucleotide
  Sense strand starting at position 2864 of SEQ ID NO: 1563053
agauguuucugucucucga

SEQ ID NO: 1792000 - RNA, 19 nt, Artificial Sequence
  Description of Artificial Sequence: Synthetic oligonucleotide
  Antisense strand to SEQ ID NO: 1791999
ucgagagacagaaacaucu

SEQ ID NO: 1792001 - RNA, 19 nt, Artificial Sequence
  Description of Artificial Sequence: Synthetic oligonucleotide
  Sense strand starting at position 2952 of SEQ ID NO: 1563053
uacuuugaggccugggaua

SEQ ID NO: 1792002 - RNA, 19 nt, Artificial Sequence
  Description of Artificial Sequence: Synthetic oligonucleotide
  Antisense strand to SEQ ID NO: 1792001
uaucccaggccucaaagua

SEQ ID NO: 1792003 - RNA, 19 nt, Artificial Sequence
  Description of Artificial Sequence: Synthetic oligonucleotide
  Sense strand starting at position 2954 of SEQ ID NO: 1563053
cuuugaggccugggauauu

SEQ ID NO: 1792004 - RNA, 19 nt, Artificial Sequence
  Description of Artificial Sequence: Synthetic oligonucleotide
  Antisense strand to SEQ ID NO: 1792003
aauaucccaggccucaaag

SEQ ID NO: 1792005 - RNA, 19 nt, Artificial Sequence
  Description of Artificial Sequence: Synthetic oligonucleotide
  Sense strand starting at position 3108 of SEQ ID NO: 1563053
ggcauacgugguggaauuu

SEQ ID NO: 1792006 - RNA, 19 nt, Artificial Sequence
  Description of Artificial Sequence: Synthetic oligonucleotide
  Antisense strand to SEQ ID NO: 1792005
aaauuccaccacguaugcc

SEQ ID NO: 1792007 - RNA, 19 nt, Artificial Sequence
  Description of Artificial Sequence: Synthetic oligonucleotide
  Sense strand starting at position 3117 of SEQ ID NO: 1563053
gguggaauuugagagauuc

SEQ ID NO: 1792008 - RNA, 19 nt, Artificial Sequence
  Description of Artificial Sequence: Synthetic oligonucleotide
  Antisense strand to SEQ ID NO: 1792007
gaaucucucaaauuccacc

SEQ ID NO: 1792009 - RNA, 19 nt, Artificial Sequence
  Description of Artificial Sequence: Synthetic oligonucleotide
  Sense strand starting at position 3156 of SEQ ID NO: 1563053
ugacuuauuccacagucau

SEQ ID NO: 1792010 - RNA, 19 nt, Artificial Sequence
  Description of Artificial Sequence: Synthetic oligonucleotide
  Antisense strand to SEQ ID NO: 1792009
augacuguggaauaaguca

SEQ ID NO: 1792011 - RNA, 19 nt, Artificial Sequence
  Description of Artificial Sequence: Synthetic oligonucleotide
  Sense strand starting at position 3166 of SEQ ID NO: 1563053
cacagucauguggaagguu

SEQ ID NO: 1792012 - RNA, 19 nt, Artificial Sequence
  Description of Artificial Sequence: Synthetic oligonucleotide
  Antisense strand to SEQ ID NO: 1792011
aaccuuccacaugacugug

SEQ ID NO: 1792013 - RNA, 19 nt, Artificial Sequence
  Description of Artificial Sequence: Synthetic oligonucleotide
  Sense strand starting at position 3302 of SEQ ID NO: 1563053
gaaggccuugccuggaaua

SEQ ID NO: 1792014 - RNA, 19 nt, Artificial Sequence
  Description of Artificial Sequence: Synthetic oligonucleotide
  Antisense strand to SEQ ID NO: 1792013
uauuccaggcaaggccuuc

SEQ ID NO: 1792015 - RNA, 19 nt, Artificial Sequence
  Description of Artificial Sequence: Synthetic oligonucleotide
  Sense strand starting at position 3303 of SEQ ID NO: 1563053
aaggccuugccuggaauau

SEQ ID NO: 1792016 - RNA, 19 nt, Artificial Sequence
  Description of Artificial Sequence: Synthetic oligonucleotide
  Antisense strand to SEQ ID NO: 1792015
auauuccaggcaaggccuu

SEQ ID NO: 1792017 - RNA, 19 nt, Artificial Sequence
  Description of Artificial Sequence: Synthetic oligonucleotide
  Sense strand starting at position 3304 of SEQ ID NO: 1563053
aggccuugccuggaauaua

SEQ ID NO: 1792018 - RNA, 19 nt, Artificial Sequence
  Description of Artificial Sequence: Synthetic oligonucleotide
  Antisense strand to SEQ ID NO: 1792017
uauauuccaggcaaggccu

SEQ ID NO: 1792019 - RNA, 19 nt, Artificial Sequence
  Description of Artificial Sequence: Synthetic oligonucleotide
  Sense strand starting at position 3399 of SEQ ID NO: 1563053
gcagcuacuuaauuaugaa

SEQ ID NO: 1792020 - RNA, 19 nt, Artificial Sequence
  Description of Artificial Sequence: Synthetic oligonucleotide
  Antisense strand to SEQ ID NO: 1792019
uucauaauuaaguagcugc

SEQ ID NO: 1792021 - RNA, 19 nt, Artificial Sequence
  Description of Artificial Sequence: Synthetic oligonucleotide
  Sense strand starting at position 3419 of SEQ ID NO: 1563053
gcacaaguauaaucugauc

SEQ ID NO: 1792022 - RNA, 19 nt, Artificial Sequence
  Description of Artificial Sequence: Synthetic oligonucleotide
  Antisense strand to SEQ ID NO: 1792021
gaucagauuauacuugugc

SEQ ID NO: 1792023 - RNA, 19 nt, Artificial Sequence
  Description of Artificial Sequence: Synthetic oligonucleotide
  Sense strand starting at position 3529 of SEQ ID NO: 1563053
agcgaauuccaagagcuuu

SEQ ID NO: 1792024 - RNA, 19 nt, Artificial Sequence
  Description of Artificial Sequence: Synthetic oligonucleotide
  Antisense strand to SEQ ID NO: 1792023
aaagcucuuggaauucgcu

SEQ ID NO: 1792025 - RNA, 19 nt, Artificial Sequence
  Description of Artificial Sequence: Synthetic oligonucleotide
  Sense strand starting at position 3552 of SEQ ID NO: 1563053
uugggauguucucucuuau

SEQ ID NO: 1792026 - RNA, 19 nt, Artificial Sequence
  Description of Artificial Sequence: Synthetic oligonucleotide
  Antisense strand to SEQ ID NO: 1792025
auaagagagaacaucccaa

SEQ ID NO: 1792027 - RNA, 19 nt, Artificial Sequence
  Description of Artificial Sequence: Synthetic oligonucleotide
  Sense strand starting at position 3729 of SEQ ID NO: 1563053
uguccaugagccuaauaau

SEQ ID NO: 1792028 - RNA, 19 nt, Artificial Sequence
  Description of Artificial Sequence: Synthetic oligonucleotide
  Antisense strand to SEQ ID NO: 1792027
auuauuaggcucauggaca

SEQ ID NO: 1792029 - RNA, 19 nt, Artificial Sequence
  Description of Artificial Sequence: Synthetic oligonucleotide
  Sense strand starting at position 3738 of SEQ ID NO: 1563053
gccuaauaauauguaagaa

SEQ ID NO: 1792030 - RNA, 19 nt, Artificial Sequence
  Description of Artificial Sequence: Synthetic oligonucleotide
  Antisense strand to SEQ ID NO: 1792029
uucuuacauauuauuaggc

SEQ ID NO: 1792031 - RNA, 19 nt, Artificial Sequence
  Description of Artificial Sequence: Synthetic oligonucleotide
  Sense strand starting at position 3748 of SEQ ID NO: 1563053
auguaagaauugguuauuc

SEQ ID NO: 1792032 - RNA, 19 nt, Artificial Sequence
  Description of Artificial Sequence: Synthetic oligonucleotide
  Antisense strand to SEQ ID NO: 1792031
gaauaaccaauucuuacau

SEQ ID NO: 1792033 - RNA, 19 nt, Artificial Sequence
  Description of Artificial Sequence: Synthetic oligonucleotide
  Sense strand starting at position 111 of SEQ ID NO: 1563054
guuuccacuccagggaauu

SEQ ID NO: 1792034 - RNA, 19 nt, Artificial Sequence
  Description of Artificial Sequence: Synthetic oligonucleotide
  Antisense strand to SEQ ID NO: 1792033
aauucccuggaguggaaac

SEQ ID NO: 1792035 - RNA, 19 nt, Artificial Sequence
  Description of Artificial Sequence: Synthetic oligonucleotide
  Sense strand starting at position 343 of SEQ ID NO: 1563054
cuuucuacuugguuggaga

SEQ ID NO: 1792036 - RNA, 19 nt, Artificial Sequence
  Description of Artificial Sequence: Synthetic oligonucleotide
  Antisense strand to SEQ ID NO: 1792035
ucuccaaccaaguagaaag

SEQ ID NO: 1792037 - RNA, 19 nt, Artificial Sequence
  Description of Artificial Sequence: Synthetic oligonucleotide
  Sense strand starting at position 344 of SEQ ID NO: 1563054
uuucuacuugguuggagaa

SEQ ID NO: 1792038 - RNA, 19 nt, Artificial Sequence
  Description of Artificial Sequence: Synthetic oligonucleotide
  Antisense strand to SEQ ID NO: 1792037
uucuccaaccaaguagaaa

SEQ ID NO: 1792039 - RNA, 19 nt, Artificial Sequence
  Description of Artificial Sequence: Synthetic oligonucleotide
  Sense strand starting at position 345 of SEQ ID NO: 1563054
uucuacuugguuggagaaa

SEQ ID NO: 1792040 - RNA, 19 nt, Artificial Sequence
  Description of Artificial Sequence: Synthetic oligonucleotide
  Antisense strand to SEQ ID NO: 1792039
uuucuccaaccaaguagaa

SEQ ID NO: 1792041 - RNA, 19 nt, Artificial Sequence
  Description of Artificial Sequence: Synthetic oligonucleotide
  Sense strand starting at position 346 of SEQ ID NO: 1563054
ucuacuugguuggagaaau

SEQ ID NO: 1792042 - RNA, 19 nt, Artificial Sequence
  Description of Artificial Sequence: Synthetic oligonucleotide
  Antisense strand to SEQ ID NO: 1792041
auuucuccaaccaaguaga

SEQ ID NO: 1792043 - RNA, 19 nt, Artificial Sequence
  Description of Artificial Sequence: Synthetic oligonucleotide
  Sense strand starting at position 372 of SEQ ID NO: 1563054
gggcucuuugaauaaccca

SEQ ID NO: 1792044 - RNA, 19 nt, Artificial Sequence
  Description of Artificial Sequence: Synthetic oligonucleotide
  Antisense strand to SEQ ID NO: 1792043
uggguuauucaaagagccc

SEQ ID NO: 1792045 - RNA, 19 nt, Artificial Sequence
  Description of Artificial Sequence: Synthetic oligonucleotide
  Sense strand starting at position 491 of SEQ ID NO: 1563054
ggagccucguauccagauu

SEQ ID NO: 1792046 - RNA, 19 nt, Artificial Sequence
  Description of Artificial Sequence: Synthetic oligonucleotide
  Antisense strand to SEQ ID NO: 1792045
aaucuggauacgaggcucc

SEQ ID NO: 1792047 - RNA, 19 nt, Artificial Sequence
  Description of Artificial Sequence: Synthetic oligonucleotide
  Sense strand starting at position 514 of SEQ ID NO: 1563054
ucacuaaaucaguguccau

SEQ ID NO: 1792048 - RNA, 19 nt, Artificial Sequence
  Description of Artificial Sequence: Synthetic oligonucleotide
  Antisense strand to SEQ ID NO: 1792047
auggacacugauuuaguga

SEQ ID NO: 1792049 - RNA, 19 nt, Artificial Sequence
  Description of Artificial Sequence: Synthetic oligonucleotide
  Sense strand starting at position 620 of SEQ ID NO: 1563054
aguagaugcucaguaaguu

SEQ ID NO: 1792050 - RNA, 19 nt, Artificial Sequence
  Description of Artificial Sequence: Synthetic oligonucleotide
  Antisense strand to SEQ ID NO: 1792049
aacuuacugagcaucuacu

SEQ ID NO: 1792051 - RNA, 19 nt, Artificial Sequence
  Description of Artificial Sequence: Synthetic oligonucleotide
  Sense strand starting at position 621 of SEQ ID NO: 1563054
guagaugcucaguaaguug

SEQ ID NO: 1792052 - RNA, 19 nt, Artificial Sequence
  Description of Artificial Sequence: Synthetic oligonucleotide
  Antisense strand to SEQ ID NO: 1792051
caacuuacugagcaucuac

SEQ ID NO: 1792053 - RNA, 19 nt, Artificial Sequence
  Description of Artificial Sequence: Synthetic oligonucleotide
  Sense strand starting at position 626 of SEQ ID NO: 1563054
ugcucaguaaguugcaaga

SEQ ID NO: 1792054 - RNA, 19 nt, Artificial Sequence
  Description of Artificial Sequence: Synthetic oligonucleotide
  Antisense strand to SEQ ID NO: 1792053
ucuugcaacuuacugagca

SEQ ID NO: 1792055 - RNA, 19 nt, Artificial Sequence
  Description of Artificial Sequence: Synthetic oligonucleotide
  Sense strand starting at position 661 of SEQ ID NO: 1563054
gagagagguccugguuaaa

SEQ ID NO: 1792056 - RNA, 19 nt, Artificial Sequence
  Description of Artificial Sequence: Synthetic oligonucleotide
  Antisense strand to SEQ ID NO: 1792055
uuuaaccaggaccucucuc

SEQ ID NO: 1792057 - RNA, 19 nt, Artificial Sequence
  Description of Artificial Sequence: Synthetic oligonucleotide
  Sense strand starting at position 701 of SEQ ID NO: 1563054
ccacguaucguggagaaga

SEQ ID NO: 1792058 - RNA, 19 nt, Artificial Sequence
  Description of Artificial Sequence: Synthetic oligonucleotide
  Antisense strand to SEQ ID NO: 1792057
ucuucuccacgauacgugg

SEQ ID NO: 1792059 - RNA, 19 nt, Artificial Sequence
  Description of Artificial Sequence: Synthetic oligonucleotide
  Sense strand starting at position 840 of SEQ ID NO: 1563054
ucagaugaacgucagucau

SEQ ID NO: 1792060 - RNA, 19 nt, Artificial Sequence
  Description of Artificial Sequence: Synthetic oligonucleotide
  Antisense strand to SEQ ID NO: 1792059
augacugacguucaucuga

SEQ ID NO: 1792061 - RNA, 19 nt, Artificial Sequence
  Description of Artificial Sequence: Synthetic oligonucleotide
  Sense strand starting at position 882 of SEQ ID NO: 1563054
cuccuuaugagggagucuu

SEQ ID NO: 1792062 - RNA, 19 nt, Artificial Sequence
  Description of Artificial Sequence: Synthetic oligonucleotide
  Antisense strand to SEQ ID NO: 1792061
aagacucccucauaaggag

SEQ ID NO: 1792063 - RNA, 19 nt, Artificial Sequence
  Description of Artificial Sequence: Synthetic oligonucleotide
  Sense strand starting at position 986 of SEQ ID NO: 1563054
gugaucaccuguuuccaaa

SEQ ID NO: 1792064 - RNA, 19 nt, Artificial Sequence
  Description of Artificial Sequence: Synthetic oligonucleotide
  Antisense strand to SEQ ID NO: 1792063
uuuggaaacaggugaucac

SEQ ID NO: 1792065 - RNA, 19 nt, Artificial Sequence
  Description of Artificial Sequence: Synthetic oligonucleotide
  Sense strand starting at position 1171 of SEQ ID NO: 1563054
gguucuaccaaggaagcua

SEQ ID NO: 1792066 - RNA, 19 nt, Artificial Sequence
  Description of Artificial Sequence: Synthetic oligonucleotide
  Antisense strand to SEQ ID NO: 1792065
uagcuuccuugguagaacc

SEQ ID NO: 1792067 - RNA, 19 nt, Artificial Sequence
  Description of Artificial Sequence: Synthetic oligonucleotide
  Sense strand starting at position 1392 of SEQ ID NO: 1563054
acagguaucaggcaugcaa

SEQ ID NO: 1792068 - RNA, 19 nt, Artificial Sequence
  Description of Artificial Sequence: Synthetic oligonucleotide
  Antisense strand to SEQ ID NO: 1792067
uugcaugccugauaccugu

SEQ ID NO: 1792069 - RNA, 19 nt, Artificial Sequence
  Description of Artificial Sequence: Synthetic oligonucleotide
  Sense strand starting at position 1394 of SEQ ID NO: 1563054
agguaucaggcaugcaaau

SEQ ID NO: 1792070 - RNA, 19 nt, Artificial Sequence
  Description of Artificial Sequence: Synthetic oligonucleotide
  Antisense strand to SEQ ID NO: 1792069
auuugcaugccugauaccu

SEQ ID NO: 1792071 - RNA, 19 nt, Artificial Sequence
  Description of Artificial Sequence: Synthetic oligonucleotide
  Sense strand starting at position 1456 of SEQ ID NO: 1563054
aacgucuggccuuauacaa

SEQ ID NO: 1792072 - RNA, 19 nt, Artificial Sequence
  Description of Artificial Sequence: Synthetic oligonucleotide
  Antisense strand to SEQ ID NO: 1792071
uuguauaaggccagacguu

SEQ ID NO: 1792073 - RNA, 19 nt, Artificial Sequence
  Description of Artificial Sequence: Synthetic oligonucleotide
  Sense strand starting at position 1486 of SEQ ID NO: 1563054
gggauauguauugggaauc

SEQ ID NO: 1792074 - RNA, 19 nt, Artificial Sequence
  Description of Artificial Sequence: Synthetic oligonucleotide
  Antisense strand to SEQ ID NO: 1792073
gauucccaauacauauccc

SEQ ID NO: 1792075 - RNA, 19 nt, Artificial Sequence
  Description of Artificial Sequence: Synthetic oligonucleotide
  Sense strand starting at position 1589 of SEQ ID NO: 1563054
gggugugcccaggaggaaa

SEQ ID NO: 1792076 - RNA, 19 nt, Artificial Sequence
  Description of Artificial Sequence: Synthetic oligonucleotide
  Antisense strand to SEQ ID NO: 1792075
uuuccuccugggcacaccc

SEQ ID NO: 1792077 - RNA, 19 nt, Artificial Sequence
  Description of Artificial Sequence: Synthetic oligonucleotide
  Sense strand starting at position 2661 of SEQ ID NO: 1563054
auggcuauuuguugaguga

SEQ ID NO: 1792078 - RNA, 19 nt, Artificial Sequence
  Description of Artificial Sequence: Synthetic oligonucleotide
  Antisense strand to SEQ ID NO: 1792077
ucacucaacaaauagccau

SEQ ID NO: 1792079 - RNA, 19 nt, Artificial Sequence
  Description of Artificial Sequence: Synthetic oligonucleotide
  Sense strand starting at position 2676 of SEQ ID NO: 1563054
gugaaggaugcguguggaa

SEQ ID NO: 1792080 - RNA, 19 nt, Artificial Sequence
  Description of Artificial Sequence: Synthetic oligonucleotide
  Antisense strand to SEQ ID NO: 1792079
uuccacacgcauccuucac

SEQ ID NO: 1792081 - RNA, 19 nt, Artificial Sequence
  Description of Artificial Sequence: Synthetic oligonucleotide
  Sense strand starting at position 2678 of SEQ ID NO: 1563054
gaaggaugcguguggaauu

SEQ ID NO: 1792082 - RNA, 19 nt, Artificial Sequence
  Description of Artificial Sequence: Synthetic oligonucleotide
  Antisense strand to SEQ ID NO: 1792081
aauuccacacgcauccuuc

SEQ ID NO: 1792083 - RNA, 19 nt, Artificial Sequence
  Description of Artificial Sequence: Synthetic oligonucleotide
  Sense strand starting at position 2691 of SEQ ID NO: 1563054
ggaauuguggaaugaacgu

SEQ ID NO: 1792084 - RNA, 19 nt, Artificial Sequence
  Description of Artificial Sequence: Synthetic oligonucleotide
  Antisense strand to SEQ ID NO: 1792083
acguucauuccacaauucc

SEQ ID NO: 1792085 - RNA, 19 nt, Artificial Sequence
  Description of Artificial Sequence: Synthetic oligonucleotide
  Sense strand starting at position 2715 of SEQ ID NO: 1563054
gaguguugugugcaauuag

SEQ ID NO: 1792086 - RNA, 19 nt, Artificial Sequence
  Description of Artificial Sequence: Synthetic oligonucleotide
  Antisense strand to SEQ ID NO: 1792085
cuaauugcacacaacacuc

SEQ ID NO: 1792087 - RNA, 19 nt, Artificial Sequence
  Description of Artificial Sequence: Synthetic oligonucleotide
  Sense strand starting at position 2724 of SEQ ID NO: 1563054
gugcaauuaggccagauga

SEQ ID NO: 1792088 - RNA, 19 nt, Artificial Sequence
  Description of Artificial Sequence: Synthetic oligonucleotide
  Antisense strand to SEQ ID NO: 1792087
ucaucuggccuaauugcac

SEQ ID NO: 1792089 - RNA, 19 nt, Artificial Sequence
  Description of Artificial Sequence: Synthetic oligonucleotide
  Sense strand starting at position 2887 of SEQ ID NO: 1563054
agacaucaccuagguuaac

SEQ ID NO: 1792090 - RNA, 19 nt, Artificial Sequence
  Description of Artificial Sequence: Synthetic oligonucleotide
  Antisense strand to SEQ ID NO: 1792089
guuaaccuaggugaugucu

SEQ ID NO: 1792091 - RNA, 19 nt, Artificial Sequence
  Description of Artificial Sequence: Synthetic oligonucleotide
  Sense strand starting at position 2932 of SEQ ID NO: 1563054
cuggcauugaugugcucaa

SEQ ID NO: 1792092 - RNA, 19 nt, Artificial Sequence
  Description of Artificial Sequence: Synthetic oligonucleotide
  Antisense strand to SEQ ID NO: 1792091
uugagcacaucaaugccag

SEQ ID NO: 1792093 - RNA, 19 nt, Artificial Sequence
  Description of Artificial Sequence: Synthetic oligonucleotide
  Sense strand starting at position 2936 of SEQ ID NO: 1563054
cauugaugugcucaagauc

SEQ ID NO: 1792094 - RNA, 19 nt, Artificial Sequence
  Description of Artificial Sequence: Synthetic oligonucleotide
  Antisense strand to SEQ ID NO: 1792093
gaucuugagcacaucaaug

SEQ ID NO: 1792095 - RNA, 19 nt, Artificial Sequence
  Description of Artificial Sequence: Synthetic oligonucleotide
  Sense strand starting at position 2985 of SEQ ID NO: 1563054
gccugaacugucuacccaa

SEQ ID NO: 1792096 - RNA, 19 nt, Artificial Sequence
  Description of Artificial Sequence: Synthetic oligonucleotide
  Antisense strand to SEQ ID NO: 1792095
uuggguagacaguucaggc

SEQ ID NO: 1792097 - RNA, 19 nt, Artificial Sequence
  Description of Artificial Sequence: Synthetic oligonucleotide
  Sense strand starting at position 3107 of SEQ ID NO: 1563054
ccaucagcuguugacaauu

SEQ ID NO: 1792098 - RNA, 19 nt, Artificial Sequence
  Description of Artificial Sequence: Synthetic oligonucleotide
  Antisense strand to SEQ ID NO: 1792097
aauugucaacagcugaugg

SEQ ID NO: 1792099 - RNA, 19 nt, Artificial Sequence
  Description of Artificial Sequence: Synthetic oligonucleotide
  Sense strand starting at position 3152 of SEQ ID NO: 1563054
cucggagucagcugugaau

SEQ ID NO: 1792100 - RNA, 19 nt, Artificial Sequence
  Description of Artificial Sequence: Synthetic oligonucleotide
  Antisense strand to SEQ ID NO: 1792099
auucacagcugacuccgag

SEQ ID NO: 1792101 - RNA, 19 nt, Artificial Sequence
  Description of Artificial Sequence: Synthetic oligonucleotide
  Sense strand starting at position 3154 of SEQ ID NO: 1563054
cggagucagcugugaauga

SEQ ID NO: 1792102 - RNA, 19 nt, Artificial Sequence
  Description of Artificial Sequence: Synthetic oligonucleotide
  Antisense strand to SEQ ID NO: 1792101
ucauucacagcugacuccg

SEQ ID NO: 1792103 - RNA, 19 nt, Artificial Sequence
  Description of Artificial Sequence: Synthetic oligonucleotide
  Sense strand starting at position 3240 of SEQ ID NO: 1563054
gaucuagacucagaugucu

SEQ ID NO: 1792104 - RNA, 19 nt, Artificial Sequence
  Description of Artificial Sequence: Synthetic oligonucleotide
  Antisense strand to SEQ ID NO: 1792103
agacaucugagucuagauc

SEQ ID NO: 1792105 - RNA, 19 nt, Artificial Sequence
  Description of Artificial Sequence: Synthetic oligonucleotide
  Sense strand starting at position 3246 of SEQ ID NO: 1563054
gacucagaugucugccacu

SEQ ID NO: 1792106 - RNA, 19 nt, Artificial Sequence
  Description of Artificial Sequence: Synthetic oligonucleotide
  Antisense strand to SEQ ID NO: 1792105
aguggcagacaucugaguc

SEQ ID NO: 1792107 - RNA, 19 nt, Artificial Sequence
  Description of Artificial Sequence: Synthetic oligonucleotide
  Sense strand starting at position 3301 of SEQ ID NO: 1563054
acaggauuauugcagaguu

SEQ ID NO: 1792108 - RNA, 19 nt, Artificial Sequence
  Description of Artificial Sequence: Synthetic oligonucleotide
  Antisense strand to SEQ ID NO: 1792107
aacucugcaauaauccugu

SEQ ID NO: 1792109 - RNA, 19 nt, Artificial Sequence
  Description of Artificial Sequence: Synthetic oligonucleotide
  Sense strand starting at position 3303 of SEQ ID NO: 1563054
aggauuauugcagaguucu

SEQ ID NO: 1792110 - RNA, 19 nt, Artificial Sequence
  Description of Artificial Sequence: Synthetic oligonucleotide
  Antisense strand to SEQ ID NO: 1792109
agaacucugcaauaauccu

SEQ ID NO: 1792111 - RNA, 19 nt, Artificial Sequence
  Description of Artificial Sequence: Synthetic oligonucleotide
  Sense strand starting at position 3428 of SEQ ID NO: 1563054
ucucgcucuuugucucaaa

SEQ ID NO: 1792112 - RNA, 19 nt, Artificial Sequence
  Description of Artificial Sequence: Synthetic oligonucleotide
  Antisense strand to SEQ ID NO: 1792111
uuugagacaaagagcgaga

SEQ ID NO: 1792113 - RNA, 19 nt, Artificial Sequence
  Description of Artificial Sequence: Synthetic oligonucleotide
  Sense strand starting at position 2 of SEQ ID NO: 1563055
gggcucuuugaauaaccca

SEQ ID NO: 1792114 - RNA, 19 nt, Artificial Sequence
  Description of Artificial Sequence: Synthetic oligonucleotide
  Antisense strand to SEQ ID NO: 1792113
uggguuauucaaagagccc

SEQ ID NO: 1792115 - RNA, 19 nt, Artificial Sequence
  Description of Artificial Sequence: Synthetic oligonucleotide
  Sense strand starting at position 121 of SEQ ID NO: 1563055
ggagccucguauccagauu

SEQ ID NO: 1792116 - RNA, 19 nt, Artificial Sequence
  Description of Artificial Sequence: Synthetic oligonucleotide
  Antisense strand to SEQ ID NO: 1792115
aaucuggauacgaggcucc

SEQ ID NO: 1792117 - RNA, 19 nt, Artificial Sequence
  Description of Artificial Sequence: Synthetic oligonucleotide
  Sense strand starting at position 144 of SEQ ID NO: 1563055
ucacuaaaucaguguccau

SEQ ID NO: 1792118 - RNA, 19 nt, Artificial Sequence
  Description of Artificial Sequence: Synthetic oligonucleotide
  Antisense strand to SEQ ID NO: 1792117
auggacacugauuuaguga

SEQ ID NO: 1792119 - RNA, 19 nt, Artificial Sequence
  Description of Artificial Sequence: Synthetic oligonucleotide
  Sense strand starting at position 250 of SEQ ID NO: 1563055
aguagaugcucaguaaguu

SEQ ID NO: 1792120 - RNA, 19 nt, Artificial Sequence
  Description of Artificial Sequence: Synthetic oligonucleotide
  Antisense strand to SEQ ID NO: 1792119
aacuuacugagcaucuacu

SEQ ID NO: 1792121 - RNA, 19 nt, Artificial Sequence
  Description of Artificial Sequence: Synthetic oligonucleotide
  Sense strand starting at position 251 of SEQ ID NO: 1563055
guagaugcucaguaaguug

SEQ ID NO: 1792122 - RNA, 19 nt, Artificial Sequence
  Description of Artificial Sequence: Synthetic oligonucleotide
  Antisense strand to SEQ ID NO: 1792121
caacuuacugagcaucuac

SEQ ID NO: 1792123 - RNA, 19 nt, Artificial Sequence
  Description of Artificial Sequence: Synthetic oligonucleotide
  Sense strand starting at position 256 of SEQ ID NO: 1563055
ugcucaguaaguugcaaga

SEQ ID NO: 1792124 - RNA, 19 nt, Artificial Sequence
  Description of Artificial Sequence: Synthetic oligonucleotide
  Antisense strand to SEQ ID NO: 1792123
ucuugcaacuuacugagca

SEQ ID NO: 1792125 - RNA, 19 nt, Artificial Sequence
  Description of Artificial Sequence: Synthetic oligonucleotide
  Sense strand starting at position 291 of SEQ ID NO: 1563055
gagagagguccugguuaaa

SEQ ID NO: 1792126 - RNA, 19 nt, Artificial Sequence
  Description of Artificial Sequence: Synthetic oligonucleotide
  Antisense strand to SEQ ID NO: 1792125
uuuaaccaggaccucucuc

SEQ ID NO: 1792127 - RNA, 19 nt, Artificial Sequence
  Description of Artificial Sequence: Synthetic oligonucleotide
  Sense strand starting at position 331 of SEQ ID NO: 1563055
ccacguaucguggagaaga

SEQ ID NO: 1792128 - RNA, 19 nt, Artificial Sequence
  Description of Artificial Sequence: Synthetic oligonucleotide
  Antisense strand to SEQ ID NO: 1792127
ucuucuccacgauacgugg

SEQ ID NO: 1792129 - RNA, 19 nt, Artificial Sequence
  Description of Artificial Sequence: Synthetic oligonucleotide
  Sense strand starting at position 470 of SEQ ID NO: 1563055
ucagaugaacgucagucau

SEQ ID NO: 1792130 - RNA, 19 nt, Artificial Sequence
  Description of Artificial Sequence: Synthetic oligonucleotide
  Antisense strand to SEQ ID NO: 1792129
augacugacguucaucuga

SEQ ID NO: 1792131 - RNA, 19 nt, Artificial Sequence
  Description of Artificial Sequence: Synthetic oligonucleotide
  Sense strand starting at position 512 of SEQ ID NO: 1563055
cuccuuaugagggagucuu

SEQ ID NO: 1792132 - RNA, 19 nt, Artificial Sequence
  Description of Artificial Sequence: Synthetic oligonucleotide
  Antisense strand to SEQ ID NO: 1792131
aagacucccucauaaggag

SEQ ID NO: 1792133 - RNA, 19 nt, Artificial Sequence
  Description of Artificial Sequence: Synthetic oligonucleotide
  Sense strand starting at position 616 of SEQ ID NO: 1563055
gugaucaccuguuuccaaa

SEQ ID NO: 1792134 - RNA, 19 nt, Artificial Sequence
  Description of Artificial Sequence: Synthetic oligonucleotide
  Antisense strand to SEQ ID NO: 1792133
uuuggaaacaggugaucac

SEQ ID NO: 1792135 - RNA, 19 nt, Artificial Sequence
  Description of Artificial Sequence: Synthetic oligonucleotide
  Sense strand starting at position 801 of SEQ ID NO: 1563055
gguucuaccaaggaagcua

SEQ ID NO: 1792136 - RNA, 19 nt, Artificial Sequence
  Description of Artificial Sequence: Synthetic oligonucleotide
  Antisense strand to SEQ ID NO: 1792135
uagcuuccuugguagaacc

SEQ ID NO: 1792137 - RNA, 19 nt, Artificial Sequence
  Description of Artificial Sequence: Synthetic oligonucleotide
  Sense strand starting at position 1022 of SEQ ID NO: 1563055
acagguaucaggcaugcaa

SEQ ID NO: 1792138 - RNA, 19 nt, Artificial Sequence
  Description of Artificial Sequence: Synthetic oligonucleotide
  Antisense strand to SEQ ID NO: 1792137
uugcaugccugauaccugu

SEQ ID NO: 1792139 - RNA, 19 nt, Artificial Sequence
  Description of Artificial Sequence: Synthetic oligonucleotide
  Sense strand starting at position 1024 of SEQ ID NO: 1563055
agguaucaggcaugcaaau

SEQ ID NO: 1792140 - RNA, 19 nt, Artificial Sequence
  Description of Artificial Sequence: Synthetic oligonucleotide
  Antisense strand to SEQ ID NO: 1792139
auuugcaugccugauaccu

SEQ ID NO: 1792141 - RNA, 19 nt, Artificial Sequence
  Description of Artificial Sequence: Synthetic oligonucleotide
  Sense strand starting at position 1086 of SEQ ID NO: 1563055
aacgucuggccuuauacaa

SEQ ID NO: 1792142 - RNA, 19 nt, Artificial Sequence
  Description of Artificial Sequence: Synthetic oligonucleotide
  Antisense strand to SEQ ID NO: 1792141
uuguauaaggccagacguu

SEQ ID NO: 1792143 - RNA, 19 nt, Artificial Sequence
  Description of Artificial Sequence: Synthetic oligonucleotide
  Sense strand starting at position 1116 of SEQ ID NO: 1563055
gggauauguauugggaauc

SEQ ID NO: 1792144 - RNA, 19 nt, Artificial Sequence
  Description of Artificial Sequence: Synthetic oligonucleotide
  Antisense strand to SEQ ID NO: 1792143
gauucccaauacauauccc

SEQ ID NO: 1792145 - RNA, 19 nt, Artificial Sequence
  Description of Artificial Sequence: Synthetic oligonucleotide
  Sense strand starting at position 1219 of SEQ ID NO: 1563055
gggugugcccaggaggaaa

SEQ ID NO: 1792146 - RNA, 19 nt, Artificial Sequence
  Description of Artificial Sequence: Synthetic oligonucleotide
  Antisense strand to SEQ ID NO: 1792145
uuuccuccugggcacaccc

SEQ ID NO: 1792147 - RNA, 19 nt, Artificial Sequence
  Description of Artificial Sequence: Synthetic oligonucleotide
  Sense strand starting at position 2291 of SEQ ID NO: 1563055
auggcuauuuguugaguga

SEQ ID NO: 1792148 - RNA, 19 nt, Artificial Sequence
  Description of Artificial Sequence: Synthetic oligonucleotide
  Antisense strand to SEQ ID NO: 1792147
ucacucaacaaauagccau

SEQ ID NO: 1792149 - RNA, 19 nt, Artificial Sequence
  Description of Artificial Sequence: Synthetic oligonucleotide
  Sense strand starting at position 2306 of SEQ ID NO: 1563055
gugaaggaugcguguggaa

SEQ ID NO: 1792150 - RNA, 19 nt, Artificial Sequence
  Description of Artificial Sequence: Synthetic oligonucleotide
  Antisense strand to SEQ ID NO: 1792149
uuccacacgcauccuucac

SEQ ID NO: 1792151 - RNA, 19 nt, Artificial Sequence
  Description of Artificial Sequence: Synthetic oligonucleotide
  Sense strand starting at position 2308 of SEQ ID NO: 1563055
gaaggaugcguguggaauu

SEQ ID NO: 1792152 - RNA, 19 nt, Artificial Sequence
  Description of Artificial Sequence: Synthetic oligonucleotide
  Antisense strand to SEQ ID NO: 1792151
aauuccacacgcauccuuc

SEQ ID NO: 1792153 - RNA, 19 nt, Artificial Sequence
  Description of Artificial Sequence: Synthetic oligonucleotide
  Sense strand starting at position 2321 of SEQ ID NO: 1563055
ggaauuguggaaugaacgu

SEQ ID NO: 1792154 - RNA, 19 nt, Artificial Sequence
  Description of Artificial Sequence: Synthetic oligonucleotide
  Antisense strand to SEQ ID NO: 1792153
acguucauuccacaauucc

SEQ ID NO: 1792155 - RNA, 19 nt, Artificial Sequence
  Description of Artificial Sequence: Synthetic oligonucleotide
  Sense strand starting at position 2345 of SEQ ID NO: 1563055
gaguguugugugcaauuag

SEQ ID NO: 1792156 - RNA, 19 nt, Artificial Sequence
  Description of Artificial Sequence: Synthetic oligonucleotide
  Antisense strand to SEQ ID NO: 1792155
cuaauugcacacaacacuc

SEQ ID NO: 1792157 - RNA, 19 nt, Artificial Sequence
  Description of Artificial Sequence: Synthetic oligonucleotide
  Sense strand starting at position 2354 of SEQ ID NO: 1563055
gugcaauuaggccagauga

SEQ ID NO: 1792158 - RNA, 19 nt, Artificial Sequence
  Description of Artificial Sequence: Synthetic oligonucleotide
  Antisense strand to SEQ ID NO: 1792157
ucaucuggccuaauugcac

SEQ ID NO: 1792159 - RNA, 19 nt, Artificial Sequence
  Description of Artificial Sequence: Synthetic oligonucleotide
  Sense strand starting at position 2517 of SEQ ID NO: 1563055
agacaucaccuagguuaac

SEQ ID NO: 1792160 - RNA, 19 nt, Artificial Sequence
  Description of Artificial Sequence: Synthetic oligonucleotide
  Antisense strand to SEQ ID NO: 1792159
guuaaccuaggugaugucu

SEQ ID NO: 1792161 - RNA, 19 nt, Artificial Sequence
  Description of Artificial Sequence: Synthetic oligonucleotide
  Sense strand starting at position 2562 of SEQ ID NO: 1563055
cuggcauugaugugcucaa

SEQ ID NO: 1792162 - RNA, 19 nt, Artificial Sequence
  Description of Artificial Sequence: Synthetic oligonucleotide
  Antisense strand to SEQ ID NO: 1792161
uugagcacaucaaugccag

SEQ ID NO: 1792163 - RNA, 19 nt, Artificial Sequence
  Description of Artificial Sequence: Synthetic oligonucleotide
  Sense strand starting at position 2566 of SEQ ID NO: 1563055
cauugaugugcucaagauc

SEQ ID NO: 1792164 - RNA, 19 nt, Artificial Sequence
  Description of Artificial Sequence: Synthetic oligonucleotide
  Antisense strand to SEQ ID NO: 1792163
gaucuugagcacaucaaug

SEQ ID NO: 1792165 - RNA, 19 nt, Artificial Sequence
  Description of Artificial Sequence: Synthetic oligonucleotide
  Sense strand starting at position 2615 of SEQ ID NO: 1563055
gccugaacugucuacccaa

SEQ ID NO: 1792166 - RNA, 19 nt, Artificial Sequence
  Description of Artificial Sequence: Synthetic oligonucleotide
  Antisense strand to SEQ ID NO: 1792165
uuggguagacaguucaggc

SEQ ID NO: 1792167 - RNA, 19 nt, Artificial Sequence
  Description of Artificial Sequence: Synthetic oligonucleotide
  Sense strand starting at position 2737 of SEQ ID NO: 1563055
ccaucagcuguugacaauu

SEQ ID NO: 1792168 - RNA, 19 nt, Artificial Sequence
  Description of Artificial Sequence: Synthetic oligonucleotide
  Antisense strand to SEQ ID NO: 1792167
aauugucaacagcugaugg

SEQ ID NO: 1792169 - RNA, 19 nt, Artificial Sequence
  Description of Artificial Sequence: Synthetic oligonucleotide
  Sense strand starting at position 2782 of SEQ ID NO: 1563055
cucggagucagcugugaau

SEQ ID NO: 1792170 - RNA, 19 nt, Artificial Sequence
  Description of Artificial Sequence: Synthetic oligonucleotide
  Antisense strand to SEQ ID NO: 1792169
auucacagcugacuccgag

SEQ ID NO: 1792171 - RNA, 19 nt, Artificial Sequence
  Description of Artificial Sequence: Synthetic oligonucleotide
  Sense strand starting at position 2784 of SEQ ID NO: 1563055
cggagucagcugugaauga

SEQ ID NO: 1792172 - RNA, 19 nt, Artificial Sequence
  Description of Artificial Sequence: Synthetic oligonucleotide
  Antisense strand to SEQ ID NO: 1792171
ucauucacagcugacuccg

SEQ ID NO: 1792173 - RNA, 19 nt, Artificial Sequence
  Description of Artificial Sequence: Synthetic oligonucleotide
  Sense strand starting at position 2785 of SEQ ID NO: 1563055
ggagucagcugugaaugaa

SEQ ID NO: 1792174 - RNA, 19 nt, Artificial Sequence
  Description of Artificial Sequence: Synthetic oligonucleotide
  Antisense strand to SEQ ID NO: 1792173
uucauucacagcugacucc

SEQ ID NO: 1792175 - RNA, 19 nt, Artificial Sequence
  Description of Artificial Sequence: Synthetic oligonucleotide
  Sense strand starting at position 2870 of SEQ ID NO: 1563055
gaucuagacucagaugucu

SEQ ID NO: 1792176 - RNA, 19 nt, Artificial Sequence
  Description of Artificial Sequence: Synthetic oligonucleotide
  Antisense strand to SEQ ID NO: 1792175
agacaucugagucuagauc

SEQ ID NO: 1792177 - RNA, 19 nt, Artificial Sequence
  Description of Artificial Sequence: Synthetic oligonucleotide
  Sense strand starting at position 2876 of SEQ ID NO: 1563055
gacucagaugucugccacu

SEQ ID NO: 1792178 - RNA, 19 nt, Artificial Sequence
  Description of Artificial Sequence: Synthetic oligonucleotide
  Antisense strand to SEQ ID NO: 1792177
aguggcagacaucugaguc

SEQ ID NO: 1792179 - RNA, 19 nt, Artificial Sequence
  Description of Artificial Sequence: Synthetic oligonucleotide
  Sense strand starting at position 2931 of SEQ ID NO: 1563055
acaggauuauugcagaguu

SEQ ID NO: 1792180 - RNA, 19 nt, Artificial Sequence
  Description of Artificial Sequence: Synthetic oligonucleotide
  Antisense strand to SEQ ID NO: 1792179
aacucugcaauaauccugu

SEQ ID NO: 1792181 - RNA, 19 nt, Artificial Sequence
  Description of Artificial Sequence: Synthetic oligonucleotide
  Sense strand starting at position 2933 of SEQ ID NO: 1563055
aggauuauugcagaguucu

SEQ ID NO: 1792182 - RNA, 19 nt, Artificial Sequence
  Description of Artificial Sequence: Synthetic oligonucleotide
  Antisense strand to SEQ ID NO: 1792181
agaacucugcaauaauccu

SEQ ID NO: 1792183 - RNA, 19 nt, Artificial Sequence
  Description of Artificial Sequence: Synthetic oligonucleotide
  Sense strand starting at position 3058 of SEQ ID NO: 1563055
ucucgcucuuugucucaaa

SEQ ID NO: 1792184 - RNA, 19 nt, Artificial Sequence
  Description of Artificial Sequence: Synthetic oligonucleotide
  Antisense strand to SEQ ID NO: 1792183
uuugagacaaagagcgaga

SEQ ID NO: 1792185 - RNA, 19 nt, Artificial Sequence
  Description of Artificial Sequence: Synthetic oligonucleotide
  Sense strand starting at position 3693 of SEQ ID NO: 1563055
gcucacuguuucgcucuaa

SEQ ID NO: 1792186 - RNA, 19 nt, Artificial Sequence
  Description of Artificial Sequence: Synthetic oligonucleotide
  Antisense strand to SEQ ID NO: 1792185
uuagagcgaaacagugagc

SEQ ID NO: 1792187 - RNA, 19 nt, Artificial Sequence
  Description of Artificial Sequence: Synthetic oligonucleotide
  Sense strand starting at position 3697 of SEQ ID NO: 1563055
acuguuucgcucuaaguaa

SEQ ID NO: 1792188 - RNA, 19 nt, Artificial Sequence
  Description of Artificial Sequence: Synthetic oligonucleotide
  Antisense strand to SEQ ID NO: 1792187
uuacuuagagcgaaacagu

SEQ ID NO: 1792189 - RNA, 19 nt, Artificial Sequence
  Description of Artificial Sequence: Synthetic oligonucleotide
  Sense strand starting at position 3932 of SEQ ID NO: 1563055
aaggguuugcucgaauguc

SEQ ID NO: 1792190 - RNA, 19 nt, Artificial Sequence
  Description of Artificial Sequence: Synthetic oligonucleotide
  Antisense strand to SEQ ID NO: 1792189
gacauucgagcaaacccuu

SEQ ID NO: 1792191 - RNA, 19 nt, Artificial Sequence
  Description of Artificial Sequence: Synthetic oligonucleotide
  Sense strand starting at position 3940 of SEQ ID NO: 1563055
gcucgaauguccuccacuu

SEQ ID NO: 1792192 - RNA, 19 nt, Artificial Sequence
  Description of Artificial Sequence: Synthetic oligonucleotide
  Antisense strand to SEQ ID NO: 1792191
aaguggaggacauucgagc

SEQ ID NO: 1792193 - RNA, 19 nt, Artificial Sequence
  Description of Artificial Sequence: Synthetic oligonucleotide
  Sense strand starting at position 139 of SEQ ID NO: 1563058
aagugauuggaggguggau

SEQ ID NO: 1792194 - RNA, 19 nt, Artificial Sequence
  Description of Artificial Sequence: Synthetic oligonucleotide
  Antisense strand to SEQ ID NO: 1792193
auccacccuccaaucacuu

SEQ ID NO: 1792195 - RNA, 19 nt, Artificial Sequence
  Description of Artificial Sequence: Synthetic oligonucleotide
  Sense strand starting at position 141 of SEQ ID NO: 1563058
gugauuggaggguggauaa

SEQ ID NO: 1792196 - RNA, 19 nt, Artificial Sequence
  Description of Artificial Sequence: Synthetic oligonucleotide
  Antisense strand to SEQ ID NO: 1792195
uuauccacccuccaaucac

SEQ ID NO: 1792197 - RNA, 19 nt, Artificial Sequence
  Description of Artificial Sequence: Synthetic oligonucleotide
  Sense strand starting at position 303 of SEQ ID NO: 1563058
gcauuaauugaaugaggau

SEQ ID NO: 1792198 - RNA, 19 nt, Artificial Sequence
  Description of Artificial Sequence: Synthetic oligonucleotide
  Antisense strand to SEQ ID NO: 1792197
auccucauucaauuaaugc

SEQ ID NO: 1792199 - RNA, 19 nt, Artificial Sequence
  Description of Artificial Sequence: Synthetic oligonucleotide
  Sense strand starting at position 324 of SEQ ID NO: 1563058
caaugaagaccuggcuagu

SEQ ID NO: 1792200 - RNA, 19 nt, Artificial Sequence
  Description of Artificial Sequence: Synthetic oligonucleotide
  Antisense strand to SEQ ID NO: 1792199
acuagccaggucuucauug

SEQ ID NO: 1792201 - RNA, 19 nt, Artificial Sequence
  Description of Artificial Sequence: Synthetic oligonucleotide
  Sense strand starting at position 327 of SEQ ID NO: 1563058
ugaagaccuggcuaguaua

SEQ ID NO: 1792202 - RNA, 19 nt, Artificial Sequence
  Description of Artificial Sequence: Synthetic oligonucleotide
  Antisense strand to SEQ ID NO: 1792201
uauacuagccaggucuuca

SEQ ID NO: 1792203 - RNA, 19 nt, Artificial Sequence
  Description of Artificial Sequence: Synthetic oligonucleotide
  Sense strand starting at position 412 of SEQ ID NO: 1563058
aguuuagcaagugaaguau

SEQ ID NO: 1792204 - RNA, 19 nt, Artificial Sequence
  Description of Artificial Sequence: Synthetic oligonucleotide
  Antisense strand to SEQ ID NO: 1792203
auacuucacuugcuaaacu

SEQ ID NO: 1792205 - RNA, 19 nt, Artificial Sequence
  Description of Artificial Sequence: Synthetic oligonucleotide
  Sense strand starting at position 418 of SEQ ID NO: 1563058
gcaagugaaguauggacua

SEQ ID NO: 1792206 - RNA, 19 nt, Artificial Sequence
  Description of Artificial Sequence: Synthetic oligonucleotide
  Antisense strand to SEQ ID NO: 1792205
uaguccauacuucacuugc

SEQ ID NO: 1792207 - RNA, 19 nt, Artificial Sequence
  Description of Artificial Sequence: Synthetic oligonucleotide
  Sense strand starting at position 563 of SEQ ID NO: 1563058
gauuauuaggacuggguca

SEQ ID NO: 1792208 - RNA, 19 nt, Artificial Sequence
  Description of Artificial Sequence: Synthetic oligonucleotide
  Antisense strand to SEQ ID NO: 1792207
ugacccaguccuaauaauc

SEQ ID NO: 1792209 - RNA, 19 nt, Artificial Sequence
  Description of Artificial Sequence: Synthetic oligonucleotide
  Sense strand starting at position 578 of SEQ ID NO: 1563058
gucagcuaagagcaguaau

SEQ ID NO: 1792210 - RNA, 19 nt, Artificial Sequence
  Description of Artificial Sequence: Synthetic oligonucleotide
  Antisense strand to SEQ ID NO: 1792209
auuacugcucuuagcugac

SEQ ID NO: 1792211 - RNA, 19 nt, Artificial Sequence
  Description of Artificial Sequence: Synthetic oligonucleotide
  Sense strand starting at position 588 of SEQ ID NO: 1563058
agcaguaaugggugacacu

SEQ ID NO: 1792212 - RNA, 19 nt, Artificial Sequence
  Description of Artificial Sequence: Synthetic oligonucleotide
  Antisense strand to SEQ ID NO: 1792211
agugucacccauuacugcu

SEQ ID NO: 1792213 - RNA, 19 nt, Artificial Sequence
  Description of Artificial Sequence: Synthetic oligonucleotide
  Sense strand starting at position 589 of SEQ ID NO: 1563058
gcaguaaugggugacacua

SEQ ID NO: 1792214 - RNA, 19 nt, Artificial Sequence
  Description of Artificial Sequence: Synthetic oligonucleotide
  Antisense strand to SEQ ID NO: 1792213
uagugucacccauuacugc

SEQ ID NO: 1792215 - RNA, 19 nt, Artificial Sequence
  Description of Artificial Sequence: Synthetic oligonucleotide
  Sense strand starting at position 629 of SEQ ID NO: 1563058
ccugauuucuggcuugcca

SEQ ID NO: 1792216 - RNA, 19 nt, Artificial Sequence
  Description of Artificial Sequence: Synthetic oligonucleotide
  Antisense strand to SEQ ID NO: 1792215
uggcaagccagaaaucagg

SEQ ID NO: 1792217 - RNA, 19 nt, Artificial Sequence
  Description of Artificial Sequence: Synthetic oligonucleotide
  Sense strand starting at position 631 of SEQ ID NO: 1563058
ugauuucuggcuugccaaa

SEQ ID NO: 1792218 - RNA, 19 nt, Artificial Sequence
  Description of Artificial Sequence: Synthetic oligonucleotide
  Antisense strand to SEQ ID NO: 1792217
uuuggcaagccagaaauca

SEQ ID NO: 1792219 - RNA, 19 nt, Artificial Sequence
  Description of Artificial Sequence: Synthetic oligonucleotide
  Sense strand starting at position 663 of SEQ ID NO: 1563058
ucaacaauccuaggguuua

SEQ ID NO: 1792220 - RNA, 19 nt, Artificial Sequence
  Description of Artificial Sequence: Synthetic oligonucleotide
  Antisense strand to SEQ ID NO: 1792219
uaaacccuaggauuguuga

SEQ ID NO: 1792221 - RNA, 19 nt, Artificial Sequence
  Description of Artificial Sequence: Synthetic oligonucleotide
  Sense strand starting at position 673 of SEQ ID NO: 1563058
uaggguuuaucucugaggu

SEQ ID NO: 1792222 - RNA, 19 nt, Artificial Sequence
  Description of Artificial Sequence: Synthetic oligonucleotide
  Antisense strand to SEQ ID NO: 1792221
accucagagauaaacccua

SEQ ID NO: 1792223 - RNA, 19 nt, Artificial Sequence
  Description of Artificial Sequence: Synthetic oligonucleotide
  Sense strand starting at position 674 of SEQ ID NO: 1563058
aggguuuaucucugagguc

SEQ ID NO: 1792224 - RNA, 19 nt, Artificial Sequence
  Description of Artificial Sequence: Synthetic oligonucleotide
  Antisense strand to SEQ ID NO: 1792223
gaccucagagauaaacccu

SEQ ID NO: 1792225 - RNA, 19 nt, Artificial Sequence
  Description of Artificial Sequence: Synthetic oligonucleotide
  Sense strand starting at position 762 of SEQ ID NO: 1563058
ugucuagagcacugacuau

SEQ ID NO: 1792226 - RNA, 19 nt, Artificial Sequence
  Description of Artificial Sequence: Synthetic oligonucleotide
  Antisense strand to SEQ ID NO: 1792225
auagucagugcucuagaca

SEQ ID NO: 1792227 - RNA, 19 nt, Artificial Sequence
  Description of Artificial Sequence: Synthetic oligonucleotide
  Sense strand starting at position 781 of SEQ ID NO: 1563058
gugccugugcauuggauuu

SEQ ID NO: 1792228 - RNA, 19 nt, Artificial Sequence
  Description of Artificial Sequence: Synthetic oligonucleotide
  Antisense strand to SEQ ID NO: 1792227
aaauccaaugcacaggcac

SEQ ID NO: 1792229 - RNA, 19 nt, Artificial Sequence
  Description of Artificial Sequence: Synthetic oligonucleotide
  Sense strand starting at position 1093 of SEQ ID NO: 1563058
uucugaguccucgcagcau

SEQ ID NO: 1792230 - RNA, 19 nt, Artificial Sequence
  Description of Artificial Sequence: Synthetic oligonucleotide
  Antisense strand to SEQ ID NO: 1792229
augcugcgaggacucagaa

SEQ ID NO: 1792231 - RNA, 19 nt, Artificial Sequence
  Description of Artificial Sequence: Synthetic oligonucleotide
  Sense strand starting at position 1208 of SEQ ID NO: 1563058
cucagaacacauggguaau

SEQ ID NO: 1792232 - RNA, 19 nt, Artificial Sequence
  Description of Artificial Sequence: Synthetic oligonucleotide
  Antisense strand to SEQ ID NO: 1792231
auuacccauguguucugag

SEQ ID NO: 1792233 - RNA, 19 nt, Artificial Sequence
  Description of Artificial Sequence: Synthetic oligonucleotide
  Sense strand starting at position 1219 of SEQ ID NO: 1563058
uggguaauuaagugguaga

SEQ ID NO: 1792234 - RNA, 19 nt, Artificial Sequence
  Description of Artificial Sequence: Synthetic oligonucleotide
  Antisense strand to SEQ ID NO: 1792233
ucuaccacuuaauuaccca

SEQ ID NO: 1792235 - RNA, 19 nt, Artificial Sequence
  Description of Artificial Sequence: Synthetic oligonucleotide
  Sense strand starting at position 1220 of SEQ ID NO: 1563058
ggguaauuaagugguagag

SEQ ID NO: 1792236 - RNA, 19 nt, Artificial Sequence
  Description of Artificial Sequence: Synthetic oligonucleotide
  Antisense strand to SEQ ID NO: 1792235
cucuaccacuuaauuaccc

SEQ ID NO: 1792237 - RNA, 19 nt, Artificial Sequence
  Description of Artificial Sequence: Synthetic oligonucleotide
  Sense strand starting at position 1230 of SEQ ID NO: 1563058
gugguagagccagaaugaa

SEQ ID NO: 1792238 - RNA, 19 nt, Artificial Sequence
  Description of Artificial Sequence: Synthetic oligonucleotide
  Antisense strand to SEQ ID NO: 1792237
uucauucuggcucuaccac

SEQ ID NO: 1792239 - RNA, 19 nt, Artificial Sequence
  Description of Artificial Sequence: Synthetic oligonucleotide
  Sense strand starting at position 1259 of SEQ ID NO: 1563058
gacugaccagcauauagua

SEQ ID NO: 1792240 - RNA, 19 nt, Artificial Sequence
  Description of Artificial Sequence: Synthetic oligonucleotide
  Antisense strand to SEQ ID NO: 1792239
uacuauaugcuggucaguc

SEQ ID NO: 1792241 - RNA, 19 nt, Artificial Sequence
  Description of Artificial Sequence: Synthetic oligonucleotide
  Sense strand starting at position 1267 of SEQ ID NO: 1563058
agcauauaguaccuuuauu

SEQ ID NO: 1792242 - RNA, 19 nt, Artificial Sequence
  Description of Artificial Sequence: Synthetic oligonucleotide
  Antisense strand to SEQ ID NO: 1792241
aauaaagguacuauaugcu

SEQ ID NO: 1792243 - RNA, 19 nt, Artificial Sequence
  Description of Artificial Sequence: Synthetic oligonucleotide
  Sense strand starting at position 1371 of SEQ ID NO: 1563058
uguauauucuuccuuagag

SEQ ID NO: 1792244 - RNA, 19 nt, Artificial Sequence
  Description of Artificial Sequence: Synthetic oligonucleotide
  Antisense strand to SEQ ID NO: 1792243
cucuaaggaagaauauaca

SEQ ID NO: 1792245 - RNA, 19 nt, Artificial Sequence
  Description of Artificial Sequence: Synthetic oligonucleotide
  Sense strand starting at position 1372 of SEQ ID NO: 1563058
guauauucuuccuuagagg

SEQ ID NO: 1792246 - RNA, 19 nt, Artificial Sequence
  Description of Artificial Sequence: Synthetic oligonucleotide
  Antisense strand to SEQ ID NO: 1792245
ccucuaaggaagaauauac

SEQ ID NO: 1792247 - RNA, 19 nt, Artificial Sequence
  Description of Artificial Sequence: Synthetic oligonucleotide
  Sense strand starting at position 1432 of SEQ ID NO: 1563058
uuuggcaaugugcaucaua

SEQ ID NO: 1792248 - RNA, 19 nt, Artificial Sequence
  Description of Artificial Sequence: Synthetic oligonucleotide
  Antisense strand to SEQ ID NO: 1792247
uaugaugcacauugccaaa

SEQ ID NO: 1792249 - RNA, 19 nt, Artificial Sequence
  Description of Artificial Sequence: Synthetic oligonucleotide
  Sense strand starting at position 1525 of SEQ ID NO: 1563058
gguuguauacugcacaacu

SEQ ID NO: 1792250 - RNA, 19 nt, Artificial Sequence
  Description of Artificial Sequence: Synthetic oligonucleotide
  Antisense strand to SEQ ID NO: 1792249
aguugugcaguauacaacc

SEQ ID NO: 1792251 - RNA, 19 nt, Artificial Sequence
  Description of Artificial Sequence: Synthetic oligonucleotide
  Sense strand starting at position 1573 of SEQ ID NO: 1563058
uuugcaaacugauuacagu

SEQ ID NO: 1792252 - RNA, 19 nt, Artificial Sequence
  Description of Artificial Sequence: Synthetic oligonucleotide
  Antisense strand to SEQ ID NO: 1792251
acuguaaucaguuugcaaa

SEQ ID NO: 1792253 - RNA, 19 nt, Artificial Sequence
  Description of Artificial Sequence: Synthetic oligonucleotide
  Sense strand starting at position 1684 of SEQ ID NO: 1563058
ggaaucauccugcauguuu

SEQ ID NO: 1792254 - RNA, 19 nt, Artificial Sequence
  Description of Artificial Sequence: Synthetic oligonucleotide
  Antisense strand to SEQ ID NO: 1792253
aaacaugcaggaugauucc

SEQ ID NO: 1792255 - RNA, 19 nt, Artificial Sequence
  Description of Artificial Sequence: Synthetic oligonucleotide
  Sense strand starting at position 1891 of SEQ ID NO: 1563058
aggaaagccuccucgaauu

SEQ ID NO: 1792256 - RNA, 19 nt, Artificial Sequence
  Description of Artificial Sequence: Synthetic oligonucleotide
  Antisense strand to SEQ ID NO: 1792255
aauucgaggaggcuuuccu

SEQ ID NO: 1792257 - RNA, 19 nt, Artificial Sequence
  Description of Artificial Sequence: Synthetic oligonucleotide
  Sense strand starting at position 1927 of SEQ ID NO: 1563058
cugccuuaaugaguuuaaa

SEQ ID NO: 1792258 - RNA, 19 nt, Artificial Sequence
  Description of Artificial Sequence: Synthetic oligonucleotide
  Antisense strand to SEQ ID NO: 1792257
uuuaaacucauuaaggcag

SEQ ID NO: 1792259 - RNA, 19 nt, Artificial Sequence
  Description of Artificial Sequence: Synthetic oligonucleotide
  Sense strand starting at position 1930 of SEQ ID NO: 1563058
ccuuaaugaguuuaaacga

SEQ ID NO: 1792260 - RNA, 19 nt, Artificial Sequence
  Description of Artificial Sequence: Synthetic oligonucleotide
  Antisense strand to SEQ ID NO: 1792259
ucguuuaaacucauuaagg

SEQ ID NO: 1792261 - RNA, 19 nt, Artificial Sequence
  Description of Artificial Sequence: Synthetic oligonucleotide
  Sense strand starting at position 2218 of SEQ ID NO: 1563058
agggaagauuacuaaugga

SEQ ID NO: 1792262 - RNA, 19 nt, Artificial Sequence
  Description of Artificial Sequence: Synthetic oligonucleotide
  Antisense strand to SEQ ID NO: 1792261
uccauuaguaaucuucccu

SEQ ID NO: 1792263 - RNA, 19 nt, Artificial Sequence
  Description of Artificial Sequence: Synthetic oligonucleotide
  Sense strand starting at position 2429 of SEQ ID NO: 1563058
gaauaaauguuagcccuga

SEQ ID NO: 1792264 - RNA, 19 nt, Artificial Sequence
  Description of Artificial Sequence: Synthetic oligonucleotide
  Antisense strand to SEQ ID NO: 1792263
ucagggcuaacauuuauuc

SEQ ID NO: 1792265 - RNA, 19 nt, Artificial Sequence
  Description of Artificial Sequence: Synthetic oligonucleotide
  Sense strand starting at position 2433 of SEQ ID NO: 1563058
aaauguuagcccugaaaga

SEQ ID NO: 1792266 - RNA, 19 nt, Artificial Sequence
  Description of Artificial Sequence: Synthetic oligonucleotide
  Antisense strand to SEQ ID NO: 1792265
ucuuucagggcuaacauuu

SEQ ID NO: 1792267 - RNA, 19 nt, Artificial Sequence
  Description of Artificial Sequence: Synthetic oligonucleotide
  Sense strand starting at position 2434 of SEQ ID NO: 1563058
aauguuagcccugaaagac

SEQ ID NO: 1792268 - RNA, 19 nt, Artificial Sequence
  Description of Artificial Sequence: Synthetic oligonucleotide
  Antisense strand to SEQ ID NO: 1792267
gucuuucagggcuaacauu

SEQ ID NO: 1792269 - RNA, 19 nt, Artificial Sequence
  Description of Artificial Sequence: Synthetic oligonucleotide
  Sense strand starting at position 3606 of SEQ ID NO: 1563058
acauguggcuaauuagaaa

SEQ ID NO: 1792270 - RNA, 19 nt, Artificial Sequence
  Description of Artificial Sequence: Synthetic oligonucleotide
  Antisense strand to SEQ ID NO: 1792269
uuucuaauuagccacaugu

SEQ ID NO: 1792271 - RNA, 19 nt, Artificial Sequence
  Description of Artificial Sequence: Synthetic oligonucleotide
  Sense strand starting at position 3794 of SEQ ID NO: 1563058
ugcauuucucauugcugca

SEQ ID NO: 1792272 - RNA, 19 nt, Artificial Sequence
  Description of Artificial Sequence: Synthetic oligonucleotide
  Antisense strand to SEQ ID NO: 1792271
ugcagcaaugagaaaugca

SEQ ID NO: 1792273 - RNA, 19 nt, Artificial Sequence
  Description of Artificial Sequence: Synthetic oligonucleotide
  Sense strand starting at position 9 of SEQ ID NO: 1563059
cccagugaguucucacaca

SEQ ID NO: 1792274 - RNA, 19 nt, Artificial Sequence
  Description of Artificial Sequence: Synthetic oligonucleotide
  Antisense strand to SEQ ID NO: 1792273
ugugugagaacucacuggg

SEQ ID NO: 1792275 - RNA, 19 nt, Artificial Sequence
  Description of Artificial Sequence: Synthetic oligonucleotide
  Sense strand starting at position 230 of SEQ ID NO: 1563059
gaugucaccucuccagaga

SEQ ID NO: 1792276 - RNA, 19 nt, Artificial Sequence
  Description of Artificial Sequence: Synthetic oligonucleotide
  Antisense strand to SEQ ID NO: 1792275
ucucuggagaggugacauc

SEQ ID NO: 1792277 - RNA, 19 nt, Artificial Sequence
  Description of Artificial Sequence: Synthetic oligonucleotide
  Sense strand starting at position 303 of SEQ ID NO: 1563059
aggccuaaauugccugaua

SEQ ID NO: 1792278 - RNA, 19 nt, Artificial Sequence
  Description of Artificial Sequence: Synthetic oligonucleotide
  Antisense strand to SEQ ID NO: 1792277
uaucaggcaauuuaggccu

SEQ ID NO: 1792279 - RNA, 19 nt, Artificial Sequence
  Description of Artificial Sequence: Synthetic oligonucleotide
  Sense strand starting at position 304 of SEQ ID NO: 1563059
ggccuaaauugccugauau

SEQ ID NO: 1792280 - RNA, 19 nt, Artificial Sequence
  Description of Artificial Sequence: Synthetic oligonucleotide
  Antisense strand to SEQ ID NO: 1792279
auaucaggcaauuuaggcc

SEQ ID NO: 1792281 - RNA, 19 nt, Artificial Sequence
  Description of Artificial Sequence: Synthetic oligonucleotide
  Sense strand starting at position 305 of SEQ ID NO: 1563059
gccuaaauugccugauaug

SEQ ID NO: 1792282 - RNA, 19 nt, Artificial Sequence
  Description of Artificial Sequence: Synthetic oligonucleotide
  Antisense strand to SEQ ID NO: 1792281
cauaucaggcaauuuaggc

SEQ ID NO: 1792283 - RNA, 19 nt, Artificial Sequence
  Description of Artificial Sequence: Synthetic oligonucleotide
  Sense strand starting at position 311 of SEQ ID NO: 1563059
auugccugauaugcaaaua

SEQ ID NO: 1792284 - RNA, 19 nt, Artificial Sequence
  Description of Artificial Sequence: Synthetic oligonucleotide
  Antisense strand to SEQ ID NO: 1792283
uauuugcauaucaggcaau

SEQ ID NO: 1792285 - RNA, 19 nt, Artificial Sequence
  Description of Artificial Sequence: Synthetic oligonucleotide
  Sense strand starting at position 353 of SEQ ID NO: 1563059
gucuguaagcugcaugaga

SEQ ID NO: 1792286 - RNA, 19 nt, Artificial Sequence
  Description of Artificial Sequence: Synthetic oligonucleotide
  Antisense strand to SEQ ID NO: 1792285
ucucaugcagcuuacagac

SEQ ID NO: 1792287 - RNA, 19 nt, Artificial Sequence
  Description of Artificial Sequence: Synthetic oligonucleotide
  Sense strand starting at position 389 of SEQ ID NO: 1563059
gcggacacucaguaauugu

SEQ ID NO: 1792288 - RNA, 19 nt, Artificial Sequence
  Description of Artificial Sequence: Synthetic oligonucleotide
  Antisense strand to SEQ ID NO: 1792287
acaauuacugaguguccgc

SEQ ID NO: 1792289 - RNA, 19 nt, Artificial Sequence
  Description of Artificial Sequence: Synthetic oligonucleotide
  Sense strand starting at position 545 of SEQ ID NO: 1563059
uggacuuccauuggugaga

SEQ ID NO: 1792290 - RNA, 19 nt, Artificial Sequence
  Description of Artificial Sequence: Synthetic oligonucleotide
  Antisense strand to SEQ ID NO: 1792289
ucucaccaauggaagucca

SEQ ID NO: 1792291 - RNA, 19 nt, Artificial Sequence
  Description of Artificial Sequence: Synthetic oligonucleotide
  Sense strand starting at position 546 of SEQ ID NO: 1563059
ggacuuccauuggugagaa

SEQ ID NO: 1792292 - RNA, 19 nt, Artificial Sequence
  Description of Artificial Sequence: Synthetic oligonucleotide
  Antisense strand to SEQ ID NO: 1792291
uucucaccaauggaagucc

SEQ ID NO: 1792293 - RNA, 19 nt, Artificial Sequence
  Description of Artificial Sequence: Synthetic oligonucleotide
  Sense strand starting at position 550 of SEQ ID NO: 1563059
uuccauuggugagaaauuu

SEQ ID NO: 1792294 - RNA, 19 nt, Artificial Sequence
  Description of Artificial Sequence: Synthetic oligonucleotide
  Antisense strand to SEQ ID NO: 1792293
aaauuucucaccaauggaa

SEQ ID NO: 1792295 - RNA, 19 nt, Artificial Sequence
  Description of Artificial Sequence: Synthetic oligonucleotide
  Sense strand starting at position 584 of SEQ ID NO: 1563059
agcaaacauuuauggauua

SEQ ID NO: 1792296 - RNA, 19 nt, Artificial Sequence
  Description of Artificial Sequence: Synthetic oligonucleotide
  Antisense strand to SEQ ID NO: 1792295
uaauccauaaauguuugcu

SEQ ID NO: 1792297 - RNA, 19 nt, Artificial Sequence
  Description of Artificial Sequence: Synthetic oligonucleotide
  Sense strand starting at position 585 of SEQ ID NO: 1563059
gcaaacauuuauggauuaa

SEQ ID NO: 1792298 - RNA, 19 nt, Artificial Sequence
  Description of Artificial Sequence: Synthetic oligonucleotide
  Antisense strand to SEQ ID NO: 1792297
uuaauccauaaauguuugc

SEQ ID NO: 1792299 - RNA, 19 nt, Artificial Sequence
  Description of Artificial Sequence: Synthetic oligonucleotide
  Sense strand starting at position 1330 of SEQ ID NO: 1563059
gggucccuuccacacauau

SEQ ID NO: 1792300 - RNA, 19 nt, Artificial Sequence
  Description of Artificial Sequence: Synthetic oligonucleotide
  Antisense strand to SEQ ID NO: 1792299
auauguguggaagggaccc

SEQ ID NO: 1792301 - RNA, 19 nt, Artificial Sequence
  Description of Artificial Sequence: Synthetic oligonucleotide
  Sense strand starting at position 1396 of SEQ ID NO: 1563059
gggauauacgcacaucuau

SEQ ID NO: 1792302 - RNA, 19 nt, Artificial Sequence
  Description of Artificial Sequence: Synthetic oligonucleotide
  Antisense strand to SEQ ID NO: 1792301
auagaugugcguauauccc

SEQ ID NO: 1792303 - RNA, 19 nt, Artificial Sequence
  Description of Artificial Sequence: Synthetic oligonucleotide
  Sense strand starting at position 1518 of SEQ ID NO: 1563059
gggcuuaagucaguacaua

SEQ ID NO: 1792304 - RNA, 19 nt, Artificial Sequence
  Description of Artificial Sequence: Synthetic oligonucleotide
  Antisense strand to SEQ ID NO: 1792303
uauguacugacuuaagccc

SEQ ID NO: 1792305 - RNA, 19 nt, Artificial Sequence
  Description of Artificial Sequence: Synthetic oligonucleotide
  Sense strand starting at position 1519 of SEQ ID NO: 1563059
ggcuuaagucaguacauag

SEQ ID NO: 1792306 - RNA, 19 nt, Artificial Sequence
  Description of Artificial Sequence: Synthetic oligonucleotide
  Antisense strand to SEQ ID NO: 1792305
cuauguacugacuuaagcc

SEQ ID NO: 1792307 - RNA, 19 nt, Artificial Sequence
  Description of Artificial Sequence: Synthetic oligonucleotide
  Sense strand starting at position 1557 of SEQ ID NO: 1563059
gccugucuccuacaccaga

SEQ ID NO: 1792308 - RNA, 19 nt, Artificial Sequence
  Description of Artificial Sequence: Synthetic oligonucleotide
  Antisense strand to SEQ ID NO: 1792307
ucugguguaggagacaggc

SEQ ID NO: 1792309 - RNA, 19 nt, Artificial Sequence
  Description of Artificial Sequence: Synthetic oligonucleotide
  Sense strand starting at position 2137 of SEQ ID NO: 1563059
acagcacugugacuaagua

SEQ ID NO: 1792310 - RNA, 19 nt, Artificial Sequence
  Description of Artificial Sequence: Synthetic oligonucleotide
  Antisense strand to SEQ ID NO: 1792309
uacuuagucacagugcugu

SEQ ID NO: 1792311 - RNA, 19 nt, Artificial Sequence
  Description of Artificial Sequence: Synthetic oligonucleotide
  Sense strand starting at position 2276 of SEQ ID NO: 1563059
gcccguugccuggugacau

SEQ ID NO: 1792312 - RNA, 19 nt, Artificial Sequence
  Description of Artificial Sequence: Synthetic oligonucleotide
  Antisense strand to SEQ ID NO: 1792311
augucaccaggcaacgggc

SEQ ID NO: 1792313 - RNA, 19 nt, Artificial Sequence
  Description of Artificial Sequence: Synthetic oligonucleotide
  Sense strand starting at position 2535 of SEQ ID NO: 1563059
uucuguuuagcugggaauu

SEQ ID NO: 1792314 - RNA, 19 nt, Artificial Sequence
  Description of Artificial Sequence: Synthetic oligonucleotide
  Antisense strand to SEQ ID NO: 1792313
aauucccagcuaaacagaa

SEQ ID NO: 1792315 - RNA, 19 nt, Artificial Sequence
  Description of Artificial Sequence: Synthetic oligonucleotide
  Sense strand starting at position 2536 of SEQ ID NO: 1563059
ucuguuuagcugggaauua

SEQ ID NO: 1792316 - RNA, 19 nt, Artificial Sequence
  Description of Artificial Sequence: Synthetic oligonucleotide
  Antisense strand to SEQ ID NO: 1792315
uaauucccagcuaaacaga

SEQ ID NO: 1792317 - RNA, 19 nt, Artificial Sequence
  Description of Artificial Sequence: Synthetic oligonucleotide
  Sense strand starting at position 2951 of SEQ ID NO: 1563059
gucagucugaacugagaaa

SEQ ID NO: 1792318 - RNA, 19 nt, Artificial Sequence
  Description of Artificial Sequence: Synthetic oligonucleotide
  Antisense strand to SEQ ID NO: 1792317
uuucucaguucagacugac

SEQ ID NO: 1792319 - RNA, 19 nt, Artificial Sequence
  Description of Artificial Sequence: Synthetic oligonucleotide
  Sense strand starting at position 3062 of SEQ ID NO: 1563059
uugaaauaacacuggugau

SEQ ID NO: 1792320 - RNA, 19 nt, Artificial Sequence
  Description of Artificial Sequence: Synthetic oligonucleotide
  Antisense strand to SEQ ID NO: 1792319
aucaccaguguuauuucaa

SEQ ID NO: 1792321 - RNA, 19 nt, Artificial Sequence
  Description of Artificial Sequence: Synthetic oligonucleotide
  Sense strand starting at position 3262 of SEQ ID NO: 1563059
guugcauguggauauuaga

SEQ ID NO: 1792322 - RNA, 19 nt, Artificial Sequence
  Description of Artificial Sequence: Synthetic oligonucleotide
  Antisense strand to SEQ ID NO: 1792321
ucuaauauccacaugcaac

SEQ ID NO: 1792323 - RNA, 19 nt, Artificial Sequence
  Description of Artificial Sequence: Synthetic oligonucleotide
  Sense strand starting at position 3304 of SEQ ID NO: 1563059
ugcguuguuguucuaugga

SEQ ID NO: 1792324 - RNA, 19 nt, Artificial Sequence
  Description of Artificial Sequence: Synthetic oligonucleotide
  Antisense strand to SEQ ID NO: 1792323
uccauagaacaacaacgca

SEQ ID NO: 1792325 - RNA, 19 nt, Artificial Sequence
  Description of Artificial Sequence: Synthetic oligonucleotide
  Sense strand starting at position 3307 of SEQ ID NO: 1563059
guuguuguucuauggaaca

SEQ ID NO: 1792326 - RNA, 19 nt, Artificial Sequence
  Description of Artificial Sequence: Synthetic oligonucleotide
  Antisense strand to SEQ ID NO: 1792325
uguuccauagaacaacaac

SEQ ID NO: 1792327 - RNA, 19 nt, Artificial Sequence
  Description of Artificial Sequence: Synthetic oligonucleotide
  Sense strand starting at position 3350 of SEQ ID NO: 1563059
gccauaugcgugccgaagu

SEQ ID NO: 1792328 - RNA, 19 nt, Artificial Sequence
  Description of Artificial Sequence: Synthetic oligonucleotide
  Antisense strand to SEQ ID NO: 1792327
acuucggcacgcauauggc

SEQ ID NO: 1792329 - RNA, 19 nt, Artificial Sequence
  Description of Artificial Sequence: Synthetic oligonucleotide
  Sense strand starting at position 3531 of SEQ ID NO: 1563059
gagagacagucuggaauuu

SEQ ID NO: 1792330 - RNA, 19 nt, Artificial Sequence
  Description of Artificial Sequence: Synthetic oligonucleotide
  Antisense strand to SEQ ID NO: 1792329
aaauuccagacugucucuc

SEQ ID NO: 1792331 - RNA, 19 nt, Artificial Sequence
  Description of Artificial Sequence: Synthetic oligonucleotide
  Sense strand starting at position 3557 of SEQ ID NO: 1563059
uagauuauguauguguaga

SEQ ID NO: 1792332 - RNA, 19 nt, Artificial Sequence
  Description of Artificial Sequence: Synthetic oligonucleotide
  Antisense strand to SEQ ID NO: 1792331
ucuacacauacauaaucua

SEQ ID NO: 1792333 - RNA, 19 nt, Artificial Sequence
  Description of Artificial Sequence: Synthetic oligonucleotide
  Sense strand starting at position 3558 of SEQ ID NO: 1563059
agauuauguauguguagaa

SEQ ID NO: 1792334 - RNA, 19 nt, Artificial Sequence
  Description of Artificial Sequence: Synthetic oligonucleotide
  Antisense strand to SEQ ID NO: 1792333
uucuacacauacauaaucu

SEQ ID NO: 1792335 - RNA, 19 nt, Artificial Sequence
  Description of Artificial Sequence: Synthetic oligonucleotide
  Sense strand starting at position 3559 of SEQ ID NO: 1563059
gauuauguauguguagaau

SEQ ID NO: 1792336 - RNA, 19 nt, Artificial Sequence
  Description of Artificial Sequence: Synthetic oligonucleotide
  Antisense strand to SEQ ID NO: 1792335
auucuacacauacauaauc

SEQ ID NO: 1792337 - RNA, 19 nt, Artificial Sequence
  Description of Artificial Sequence: Synthetic oligonucleotide
  Sense strand starting at position 3632 of SEQ ID NO: 1563059
uaagauuugugugagaggu

SEQ ID NO: 1792338 - RNA, 19 nt, Artificial Sequence
  Description of Artificial Sequence: Synthetic oligonucleotide
  Antisense strand to SEQ ID NO: 1792337
accucucacacaaaucuua

SEQ ID NO: 1792339 - RNA, 19 nt, Artificial Sequence
  Description of Artificial Sequence: Synthetic oligonucleotide
  Sense strand starting at position 3795 of SEQ ID NO: 1563059
guguguauggagcaugaga

SEQ ID NO: 1792340 - RNA, 19 nt, Artificial Sequence
  Description of Artificial Sequence: Synthetic oligonucleotide
  Antisense strand to SEQ ID NO: 1792339
ucucaugcuccauacacac

SEQ ID NO: 1792341 - RNA, 19 nt, Artificial Sequence
  Description of Artificial Sequence: Synthetic oligonucleotide
  Sense strand starting at position 3848 of SEQ ID NO: 1563059
cucacaguauguguggaau

SEQ ID NO: 1792342 - RNA, 19 nt, Artificial Sequence
  Description of Artificial Sequence: Synthetic oligonucleotide
  Antisense strand to SEQ ID NO: 1792341
auuccacacauacugugag

SEQ ID NO: 1792343 - RNA, 19 nt, Artificial Sequence
  Description of Artificial Sequence: Synthetic oligonucleotide
  Sense strand starting at position 3851 of SEQ ID NO: 1563059
acaguauguguggaauaug

SEQ ID NO: 1792344 - RNA, 19 nt, Artificial Sequence
  Description of Artificial Sequence: Synthetic oligonucleotide
  Antisense strand to SEQ ID NO: 1792343
cauauuccacacauacugu

SEQ ID NO: 1792345 - RNA, 19 nt, Artificial Sequence
  Description of Artificial Sequence: Synthetic oligonucleotide
  Sense strand starting at position 3863 of SEQ ID NO: 1563059
gaauaugaggcauguguuu

SEQ ID NO: 1792346 - RNA, 19 nt, Artificial Sequence
  Description of Artificial Sequence: Synthetic oligonucleotide
  Antisense strand to SEQ ID NO: 1792345
aaacacaugccucauauuc

SEQ ID NO: 1792347 - RNA, 19 nt, Artificial Sequence
  Description of Artificial Sequence: Synthetic oligonucleotide
  Sense strand starting at position 3865 of SEQ ID NO: 1563059
auaugaggcauguguuuag

SEQ ID NO: 1792348 - RNA, 19 nt, Artificial Sequence
  Description of Artificial Sequence: Synthetic oligonucleotide
  Antisense strand to SEQ ID NO: 1792347
cuaaacacaugccucauau

SEQ ID NO: 1792349 - RNA, 19 nt, Artificial Sequence
  Description of Artificial Sequence: Synthetic oligonucleotide
  Sense strand starting at position 3912 of SEQ ID NO: 1563059
guguguaguguaaggugua

SEQ ID NO: 1792350 - RNA, 19 nt, Artificial Sequence
  Description of Artificial Sequence: Synthetic oligonucleotide
  Antisense strand to SEQ ID NO: 1792349
uacaccuuacacuacacac

SEQ ID NO: 1792351 - RNA, 19 nt, Artificial Sequence
  Description of Artificial Sequence: Synthetic oligonucleotide
  Sense strand starting at position 3918 of SEQ ID NO: 1563059
aguguaagguguauguagu

SEQ ID NO: 1792352 - RNA, 19 nt, Artificial Sequence
  Description of Artificial Sequence: Synthetic oligonucleotide
  Antisense strand to SEQ ID NO: 1792351
acuacauacaccuuacacu

SEQ ID NO: 1792353 - RNA, 19 nt, Artificial Sequence
  Description of Artificial Sequence: Synthetic oligonucleotide
  Sense strand starting at position 163 of SEQ ID NO: 1563060
cccagugaguucucacaca

SEQ ID NO: 1792354 - RNA, 19 nt, Artificial Sequence
  Description of Artificial Sequence: Synthetic oligonucleotide
  Antisense strand to SEQ ID NO: 1792353
ugugugagaacucacuggg

SEQ ID NO: 1792355 - RNA, 19 nt, Artificial Sequence
  Description of Artificial Sequence: Synthetic oligonucleotide
  Sense strand starting at position 384 of SEQ ID NO: 1563060
gaugucaccucuccagaga

SEQ ID NO: 1792356 - RNA, 19 nt, Artificial Sequence
  Description of Artificial Sequence: Synthetic oligonucleotide
  Antisense strand to SEQ ID NO: 1792355
ucucuggagaggugacauc

SEQ ID NO: 1792357 - RNA, 19 nt, Artificial Sequence
  Description of Artificial Sequence: Synthetic oligonucleotide
  Sense strand starting at position 457 of SEQ ID NO: 1563060
aggccuaaauugccugaua

SEQ ID NO: 1792358 - RNA, 19 nt, Artificial Sequence
  Description of Artificial Sequence: Synthetic oligonucleotide
  Antisense strand to SEQ ID NO: 1792357
uaucaggcaauuuaggccu

SEQ ID NO: 1792359 - RNA, 19 nt, Artificial Sequence
  Description of Artificial Sequence: Synthetic oligonucleotide
  Sense strand starting at position 458 of SEQ ID NO: 1563060
ggccuaaauugccugauau

SEQ ID NO: 1792360 - RNA, 19 nt, Artificial Sequence
  Description of Artificial Sequence: Synthetic oligonucleotide
  Antisense strand to SEQ ID NO: 1792359
auaucaggcaauuuaggcc

SEQ ID NO: 1792361 - RNA, 19 nt, Artificial Sequence
  Description of Artificial Sequence: Synthetic oligonucleotide
  Sense strand starting at position 459 of SEQ ID NO: 1563060
gccuaaauugccugauaug

SEQ ID NO: 1792362 - RNA, 19 nt, Artificial Sequence
  Description of Artificial Sequence: Synthetic oligonucleotide
  Antisense strand to SEQ ID NO: 1792361
cauaucaggcaauuuaggc

SEQ ID NO: 1792363 - RNA, 19 nt, Artificial Sequence
  Description of Artificial Sequence: Synthetic oligonucleotide
  Sense strand starting at position 465 of SEQ ID NO: 1563060
auugccugauaugcaaaua

SEQ ID NO: 1792364 - RNA, 19 nt, Artificial Sequence
  Description of Artificial Sequence: Synthetic oligonucleotide
  Antisense strand to SEQ ID NO: 1792363
uauuugcauaucaggcaau

SEQ ID NO: 1792365 - RNA, 19 nt, Artificial Sequence
  Description of Artificial Sequence: Synthetic oligonucleotide
  Sense strand starting at position 507 of SEQ ID NO: 1563060
gucuguaagcugcaugaga

SEQ ID NO: 1792366 - RNA, 19 nt, Artificial Sequence
  Description of Artificial Sequence: Synthetic oligonucleotide
  Antisense strand to SEQ ID NO: 1792365
ucucaugcagcuuacagac

SEQ ID NO: 1792367 - RNA, 19 nt, Artificial Sequence
  Description of Artificial Sequence: Synthetic oligonucleotide
  Sense strand starting at position 543 of SEQ ID NO: 1563060
gcggacacucaguaauugu

SEQ ID NO: 1792368 - RNA, 19 nt, Artificial Sequence
  Description of Artificial Sequence: Synthetic oligonucleotide
  Antisense strand to SEQ ID NO: 1792367
acaauuacugaguguccgc

SEQ ID NO: 1792369 - RNA, 19 nt, Artificial Sequence
  Description of Artificial Sequence: Synthetic oligonucleotide
  Sense strand starting at position 699 of SEQ ID NO: 1563060
uggacuuccauuggugaga

SEQ ID NO: 1792370 - RNA, 19 nt, Artificial Sequence
  Description of Artificial Sequence: Synthetic oligonucleotide
  Antisense strand to SEQ ID NO: 1792369
ucucaccaauggaagucca

SEQ ID NO: 1792371 - RNA, 19 nt, Artificial Sequence
  Description of Artificial Sequence: Synthetic oligonucleotide
  Sense strand starting at position 700 of SEQ ID NO: 1563060
ggacuuccauuggugagaa

SEQ ID NO: 1792372 - RNA, 19 nt, Artificial Sequence
  Description of Artificial Sequence: Synthetic oligonucleotide
  Antisense strand to SEQ ID NO: 1792371
uucucaccaauggaagucc

SEQ ID NO: 1792373 - RNA, 19 nt, Artificial Sequence
  Description of Artificial Sequence: Synthetic oligonucleotide
  Sense strand starting at position 704 of SEQ ID NO: 1563060
uuccauuggugagaaauuu

SEQ ID NO: 1792374 - RNA, 19 nt, Artificial Sequence
  Description of Artificial Sequence: Synthetic oligonucleotide
  Antisense strand to SEQ ID NO: 1792373
aaauuucucaccaauggaa

SEQ ID NO: 1792375 - RNA, 19 nt, Artificial Sequence
  Description of Artificial Sequence: Synthetic oligonucleotide
  Sense strand starting at position 738 of SEQ ID NO: 1563060
agcaaacauuuauggauua

SEQ ID NO: 1792376 - RNA, 19 nt, Artificial Sequence
  Description of Artificial Sequence: Synthetic oligonucleotide
  Antisense strand to SEQ ID NO: 1792375
uaauccauaaauguuugcu

SEQ ID NO: 1792377 - RNA, 19 nt, Artificial Sequence
  Description of Artificial Sequence: Synthetic oligonucleotide
  Sense strand starting at position 739 of SEQ ID NO: 1563060
gcaaacauuuauggauuaa

SEQ ID NO: 1792378 - RNA, 19 nt, Artificial Sequence
  Description of Artificial Sequence: Synthetic oligonucleotide
  Antisense strand to SEQ ID NO: 1792377
uuaauccauaaauguuugc

SEQ ID NO: 1792379 - RNA, 19 nt, Artificial Sequence
  Description of Artificial Sequence: Synthetic oligonucleotide
  Sense strand starting at position 789 of SEQ ID NO: 1563060
gaccuugagcccugucagu

SEQ ID NO: 1792380 - RNA, 19 nt, Artificial Sequence
  Description of Artificial Sequence: Synthetic oligonucleotide
  Antisense strand to SEQ ID NO: 1792379
acugacagggcucaagguc

SEQ ID NO: 1792381 - RNA, 19 nt, Artificial Sequence
  Description of Artificial Sequence: Synthetic oligonucleotide
  Sense strand starting at position 1484 of SEQ ID NO: 1563060
gggucccuuccacacauau

SEQ ID NO: 1792382 - RNA, 19 nt, Artificial Sequence
  Description of Artificial Sequence: Synthetic oligonucleotide
  Antisense strand to SEQ ID NO: 1792381
auauguguggaagggaccc

SEQ ID NO: 1792383 - RNA, 19 nt, Artificial Sequence
  Description of Artificial Sequence: Synthetic oligonucleotide
  Sense strand starting at position 1550 of SEQ ID NO: 1563060
gggauauacgcacaucuau

SEQ ID NO: 1792384 - RNA, 19 nt, Artificial Sequence
  Description of Artificial Sequence: Synthetic oligonucleotide
  Antisense strand to SEQ ID NO: 1792383
auagaugugcguauauccc

SEQ ID NO: 1792385 - RNA, 19 nt, Artificial Sequence
  Description of Artificial Sequence: Synthetic oligonucleotide
  Sense strand starting at position 1672 of SEQ ID NO: 1563060
gggcuuaagucaguacaua

SEQ ID NO: 1792386 - RNA, 19 nt, Artificial Sequence
  Description of Artificial Sequence: Synthetic oligonucleotide
  Antisense strand to SEQ ID NO: 1792385
uauguacugacuuaagccc

SEQ ID NO: 1792387 - RNA, 19 nt, Artificial Sequence
  Description of Artificial Sequence: Synthetic oligonucleotide
  Sense strand starting at position 1673 of SEQ ID NO: 1563060
ggcuuaagucaguacauag

SEQ ID NO: 1792388 - RNA, 19 nt, Artificial Sequence
  Description of Artificial Sequence: Synthetic oligonucleotide
  Antisense strand to SEQ ID NO: 1792387
cuauguacugacuuaagcc

SEQ ID NO: 1792389 - RNA, 19 nt, Artificial Sequence
  Description of Artificial Sequence: Synthetic oligonucleotide
  Sense strand starting at position 1711 of SEQ ID NO: 1563060
gccugucuccuacaccaga

SEQ ID NO: 1792390 - RNA, 19 nt, Artificial Sequence
  Description of Artificial Sequence: Synthetic oligonucleotide
  Antisense strand to SEQ ID NO: 1792389
ucugguguaggagacaggc

SEQ ID NO: 1792391 - RNA, 19 nt, Artificial Sequence
  Description of Artificial Sequence: Synthetic oligonucleotide
  Sense strand starting at position 2291 of SEQ ID NO: 1563060
acagcacugugacuaagua

SEQ ID NO: 1792392 - RNA, 19 nt, Artificial Sequence
  Description of Artificial Sequence: Synthetic oligonucleotide
  Antisense strand to SEQ ID NO: 1792391
uacuuagucacagugcugu

SEQ ID NO: 1792393 - RNA, 19 nt, Artificial Sequence
  Description of Artificial Sequence: Synthetic oligonucleotide
  Sense strand starting at position 2430 of SEQ ID NO: 1563060
gcccguugccuggugacau

SEQ ID NO: 1792394 - RNA, 19 nt, Artificial Sequence
  Description of Artificial Sequence: Synthetic oligonucleotide
  Antisense strand to SEQ ID NO: 1792393
augucaccaggcaacgggc

SEQ ID NO: 1792395 - RNA, 19 nt, Artificial Sequence
  Description of Artificial Sequence: Synthetic oligonucleotide
  Sense strand starting at position 2689 of SEQ ID NO: 1563060
uucuguuuagcugggaauu

SEQ ID NO: 1792396 - RNA, 19 nt, Artificial Sequence
  Description of Artificial Sequence: Synthetic oligonucleotide
  Antisense strand to SEQ ID NO: 1792395
aauucccagcuaaacagaa

SEQ ID NO: 1792397 - RNA, 19 nt, Artificial Sequence
  Description of Artificial Sequence: Synthetic oligonucleotide
  Sense strand starting at position 2690 of SEQ ID NO: 1563060
ucuguuuagcugggaauua

SEQ ID NO: 1792398 - RNA, 19 nt, Artificial Sequence
  Description of Artificial Sequence: Synthetic oligonucleotide
  Antisense strand to SEQ ID NO: 1792397
uaauucccagcuaaacaga

SEQ ID NO: 1792399 - RNA, 19 nt, Artificial Sequence
  Description of Artificial Sequence: Synthetic oligonucleotide
  Sense strand starting at position 3097 of SEQ ID NO: 1563060
gcucuugagucagucugaa

SEQ ID NO: 1792400 - RNA, 19 nt, Artificial Sequence
  Description of Artificial Sequence: Synthetic oligonucleotide
  Antisense strand to SEQ ID NO: 1792399
uucagacugacucaagagc

SEQ ID NO: 1792401 - RNA, 19 nt, Artificial Sequence
  Description of Artificial Sequence: Synthetic oligonucleotide
  Sense strand starting at position 3105 of SEQ ID NO: 1563060
gucagucugaacugagaaa

SEQ ID NO: 1792402 - RNA, 19 nt, Artificial Sequence
  Description of Artificial Sequence: Synthetic oligonucleotide
  Antisense strand to SEQ ID NO: 1792401
uuucucaguucagacugac

SEQ ID NO: 1792403 - RNA, 19 nt, Artificial Sequence
  Description of Artificial Sequence: Synthetic oligonucleotide
  Sense strand starting at position 3174 of SEQ ID NO: 1563060
gaugucaaccaacgcgaua

SEQ ID NO: 1792404 - RNA, 19 nt, Artificial Sequence
  Description of Artificial Sequence: Synthetic oligonucleotide
  Antisense strand to SEQ ID NO: 1792403
uaucgcguugguugacauc

SEQ ID NO: 1792405 - RNA, 19 nt, Artificial Sequence
  Description of Artificial Sequence: Synthetic oligonucleotide
  Sense strand starting at position 3216 of SEQ ID NO: 1563060
uugaaauaacacuggugau

SEQ ID NO: 1792406 - RNA, 19 nt, Artificial Sequence
  Description of Artificial Sequence: Synthetic oligonucleotide
  Antisense strand to SEQ ID NO: 1792405
aucaccaguguuauuucaa

SEQ ID NO: 1792407 - RNA, 19 nt, Artificial Sequence
  Description of Artificial Sequence: Synthetic oligonucleotide
  Sense strand starting at position 3412 of SEQ ID NO: 1563060
ccuuguugcauguggauau

SEQ ID NO: 1792408 - RNA, 19 nt, Artificial Sequence
  Description of Artificial Sequence: Synthetic oligonucleotide
  Antisense strand to SEQ ID NO: 1792407
auauccacaugcaacaagg

SEQ ID NO: 1792409 - RNA, 19 nt, Artificial Sequence
  Description of Artificial Sequence: Synthetic oligonucleotide
  Sense strand starting at position 3416 of SEQ ID NO: 1563060
guugcauguggauauuaga

SEQ ID NO: 1792410 - RNA, 19 nt, Artificial Sequence
  Description of Artificial Sequence: Synthetic oligonucleotide
  Antisense strand to SEQ ID NO: 1792409
ucuaauauccacaugcaac

SEQ ID NO: 1792411 - RNA, 19 nt, Artificial Sequence
  Description of Artificial Sequence: Synthetic oligonucleotide
  Sense strand starting at position 3458 of SEQ ID NO: 1563060
ugcguuguuguucuaugga

SEQ ID NO: 1792412 - RNA, 19 nt, Artificial Sequence
  Description of Artificial Sequence: Synthetic oligonucleotide
  Antisense strand to SEQ ID NO: 1792411
uccauagaacaacaacgca

SEQ ID NO: 1792413 - RNA, 19 nt, Artificial Sequence
  Description of Artificial Sequence: Synthetic oligonucleotide
  Sense strand starting at position 3461 of SEQ ID NO: 1563060
guuguuguucuauggaaca

SEQ ID NO: 1792414 - RNA, 19 nt, Artificial Sequence
  Description of Artificial Sequence: Synthetic oligonucleotide
  Antisense strand to SEQ ID NO: 1792413
uguuccauagaacaacaac

SEQ ID NO: 1792415 - RNA, 19 nt, Artificial Sequence
  Description of Artificial Sequence: Synthetic oligonucleotide
  Sense strand starting at position 3504 of SEQ ID NO: 1563060
gccauaugcgugccgaagu

SEQ ID NO: 1792416 - RNA, 19 nt, Artificial Sequence
  Description of Artificial Sequence: Synthetic oligonucleotide
  Antisense strand to SEQ ID NO: 1792415
acuucggcacgcauauggc

SEQ ID NO: 1792417 - RNA, 19 nt, Artificial Sequence
  Description of Artificial Sequence: Synthetic oligonucleotide
  Sense strand starting at position 3685 of SEQ ID NO: 1563060
gagagacagucuggaauuu

SEQ ID NO: 1792418 - RNA, 19 nt, Artificial Sequence
  Description of Artificial Sequence: Synthetic oligonucleotide
  Antisense strand to SEQ ID NO: 1792417
aaauuccagacugucucuc

SEQ ID NO: 1792419 - RNA, 19 nt, Artificial Sequence
  Description of Artificial Sequence: Synthetic oligonucleotide
  Sense strand starting at position 3710 of SEQ ID NO: 1563060
guagauuauguauguguag

SEQ ID NO: 1792420 - RNA, 19 nt, Artificial Sequence
  Description of Artificial Sequence: Synthetic oligonucleotide
  Antisense strand to SEQ ID NO: 1792419
cuacacauacauaaucuac

SEQ ID NO: 1792421 - RNA, 19 nt, Artificial Sequence
  Description of Artificial Sequence: Synthetic oligonucleotide
  Sense strand starting at position 3711 of SEQ ID NO: 1563060
uagauuauguauguguaga

SEQ ID NO: 1792422 - RNA, 19 nt, Artificial Sequence
  Description of Artificial Sequence: Synthetic oligonucleotide
  Antisense strand to SEQ ID NO: 1792421
ucuacacauacauaaucua

SEQ ID NO: 1792423 - RNA, 19 nt, Artificial Sequence
  Description of Artificial Sequence: Synthetic oligonucleotide
  Sense strand starting at position 3712 of SEQ ID NO: 1563060
agauuauguauguguagaa

SEQ ID NO: 1792424 - RNA, 19 nt, Artificial Sequence
  Description of Artificial Sequence: Synthetic oligonucleotide
  Antisense strand to SEQ ID NO: 1792423
uucuacacauacauaaucu

SEQ ID NO: 1792425 - RNA, 19 nt, Artificial Sequence
  Description of Artificial Sequence: Synthetic oligonucleotide
  Sense strand starting at position 3713 of SEQ ID NO: 1563060
gauuauguauguguagaau

SEQ ID NO: 1792426 - RNA, 19 nt, Artificial Sequence
  Description of Artificial Sequence: Synthetic oligonucleotide
  Antisense strand to SEQ ID NO: 1792425
auucuacacauacauaauc

SEQ ID NO: 1792427 - RNA, 19 nt, Artificial Sequence
  Description of Artificial Sequence: Synthetic oligonucleotide
  Sense strand starting at position 3786 of SEQ ID NO: 1563060
uaagauuugugugagaggu

SEQ ID NO: 1792428 - RNA, 19 nt, Artificial Sequence
  Description of Artificial Sequence: Synthetic oligonucleotide
  Antisense strand to SEQ ID NO: 1792427
accucucacacaaaucuua

SEQ ID NO: 1792429 - RNA, 19 nt, Artificial Sequence
  Description of Artificial Sequence: Synthetic oligonucleotide
  Sense strand starting at position 3922 of SEQ ID NO: 1563060
gugucuuugagguacguau

SEQ ID NO: 1792430 - RNA, 19 nt, Artificial Sequence
  Description of Artificial Sequence: Synthetic oligonucleotide
  Antisense strand to SEQ ID NO: 1792429
auacguaccucaaagacac

SEQ ID NO: 1792431 - RNA, 19 nt, Artificial Sequence
  Description of Artificial Sequence: Synthetic oligonucleotide
  Sense strand starting at position 3949 of SEQ ID NO: 1563060
guguguauggagcaugaga

SEQ ID NO: 1792432 - RNA, 19 nt, Artificial Sequence
  Description of Artificial Sequence: Synthetic oligonucleotide
  Antisense strand to SEQ ID NO: 1792431
ucucaugcuccauacacac

SEQ ID NO: 1792433 - RNA, 19 nt, Artificial Sequence
  Description of Artificial Sequence: Synthetic oligonucleotide
  Sense strand starting at position 173 of SEQ ID NO: 1563061
ugguuuacccuguagacua

SEQ ID NO: 1792434 - RNA, 19 nt, Artificial Sequence
  Description of Artificial Sequence: Synthetic oligonucleotide
  Antisense strand to SEQ ID NO: 1792433
uagucuacaggguaaacca

SEQ ID NO: 1792435 - RNA, 19 nt, Artificial Sequence
  Description of Artificial Sequence: Synthetic oligonucleotide
  Sense strand starting at position 290 of SEQ ID NO: 1563061
ugcucaacucuggguagaa

SEQ ID NO: 1792436 - RNA, 19 nt, Artificial Sequence
  Description of Artificial Sequence: Synthetic oligonucleotide
  Antisense strand to SEQ ID NO: 1792435
uucuacccagaguugagca

SEQ ID NO: 1792437 - RNA, 19 nt, Artificial Sequence
  Description of Artificial Sequence: Synthetic oligonucleotide
  Sense strand starting at position 291 of SEQ ID NO: 1563061
gcucaacucuggguagaau

SEQ ID NO: 1792438 - RNA, 19 nt, Artificial Sequence
  Description of Artificial Sequence: Synthetic oligonucleotide
  Antisense strand to SEQ ID NO: 1792437
auucuacccagaguugagc

SEQ ID NO: 1792439 - RNA, 19 nt, Artificial Sequence
  Description of Artificial Sequence: Synthetic oligonucleotide
  Sense strand starting at position 500 of SEQ ID NO: 1563061
caguaagagcacuagcuau

SEQ ID NO: 1792440 - RNA, 19 nt, Artificial Sequence
  Description of Artificial Sequence: Synthetic oligonucleotide
  Antisense strand to SEQ ID NO: 1792439
auagcuagugcucuuacug

SEQ ID NO: 1792441 - RNA, 19 nt, Artificial Sequence
  Description of Artificial Sequence: Synthetic oligonucleotide
  Sense strand starting at position 511 of SEQ ID NO: 1563061
cuagcuauccuuugcagga

SEQ ID NO: 1792442 - RNA, 19 nt, Artificial Sequence
  Description of Artificial Sequence: Synthetic oligonucleotide
  Antisense strand to SEQ ID NO: 1792441
uccugcaaaggauagcuag

SEQ ID NO: 1792443 - RNA, 19 nt, Artificial Sequence
  Description of Artificial Sequence: Synthetic oligonucleotide
  Sense strand starting at position 512 of SEQ ID NO: 1563061
uagcuauccuuugcaggau

SEQ ID NO: 1792444 - RNA, 19 nt, Artificial Sequence
  Description of Artificial Sequence: Synthetic oligonucleotide
  Antisense strand to SEQ ID NO: 1792443
auccugcaaaggauagcua

SEQ ID NO: 1792445 - RNA, 19 nt, Artificial Sequence
  Description of Artificial Sequence: Synthetic oligonucleotide
  Sense strand starting at position 518 of SEQ ID NO: 1563061
uccuuugcaggauguuuaa

SEQ ID NO: 1792446 - RNA, 19 nt, Artificial Sequence
  Description of Artificial Sequence: Synthetic oligonucleotide
  Antisense strand to SEQ ID NO: 1792445
uuaaacauccugcaaagga

SEQ ID NO: 1792447 - RNA, 19 nt, Artificial Sequence
  Description of Artificial Sequence: Synthetic oligonucleotide
  Sense strand starting at position 527 of SEQ ID NO: 1563061
ggauguuuaaugggaugcu

SEQ ID NO: 1792448 - RNA, 19 nt, Artificial Sequence
  Description of Artificial Sequence: Synthetic oligonucleotide
  Antisense strand to SEQ ID NO: 1792447
agcaucccauuaaacaucc

SEQ ID NO: 1792449 - RNA, 19 nt, Artificial Sequence
  Description of Artificial Sequence: Synthetic oligonucleotide
  Sense strand starting at position 530 of SEQ ID NO: 1563061
uguuuaaugggaugcuucu

SEQ ID NO: 1792450 - RNA, 19 nt, Artificial Sequence
  Description of Artificial Sequence: Synthetic oligonucleotide
  Antisense strand to SEQ ID NO: 1792449
agaagcaucccauuaaaca

SEQ ID NO: 1792451 - RNA, 19 nt, Artificial Sequence
  Description of Artificial Sequence: Synthetic oligonucleotide
  Sense strand starting at position 539 of SEQ ID NO: 1563061
ggaugcuucugaucacgca

SEQ ID NO: 1792452 - RNA, 19 nt, Artificial Sequence
  Description of Artificial Sequence: Synthetic oligonucleotide
  Antisense strand to SEQ ID NO: 1792451
ugcgugaucagaagcaucc

SEQ ID NO: 1792453 - RNA, 19 nt, Artificial Sequence
  Description of Artificial Sequence: Synthetic oligonucleotide
  Sense strand starting at position 642 of SEQ ID NO: 1563061
gucugaugccuuggcuaaa

SEQ ID NO: 1792454 - RNA, 19 nt, Artificial Sequence
  Description of Artificial Sequence: Synthetic oligonucleotide
  Antisense strand to SEQ ID NO: 1792453
uuuagccaaggcaucagac

SEQ ID NO: 1792455 - RNA, 19 nt, Artificial Sequence
  Description of Artificial Sequence: Synthetic oligonucleotide
  Sense strand starting at position 643 of SEQ ID NO: 1563061
ucugaugccuuggcuaaau

SEQ ID NO: 1792456 - RNA, 19 nt, Artificial Sequence
  Description of Artificial Sequence: Synthetic oligonucleotide
  Antisense strand to SEQ ID NO: 1792455
auuuagccaaggcaucaga

SEQ ID NO: 1792457 - RNA, 19 nt, Artificial Sequence
  Description of Artificial Sequence: Synthetic oligonucleotide
  Sense strand starting at position 645 of SEQ ID NO: 1563061
ugaugccuuggcuaaauca

SEQ ID NO: 1792458 - RNA, 19 nt, Artificial Sequence
  Description of Artificial Sequence: Synthetic oligonucleotide
  Antisense strand to SEQ ID NO: 1792457
ugauuuagccaaggcauca

SEQ ID NO: 1792459 - RNA, 19 nt, Artificial Sequence
  Description of Artificial Sequence: Synthetic oligonucleotide
  Sense strand starting at position 703 of SEQ ID NO: 1563061
gugcuuggcacugaguaaa

SEQ ID NO: 1792460 - RNA, 19 nt, Artificial Sequence
  Description of Artificial Sequence: Synthetic oligonucleotide
  Antisense strand to SEQ ID NO: 1792459
uuuacucagugccaagcac

SEQ ID NO: 1792461 - RNA, 19 nt, Artificial Sequence
  Description of Artificial Sequence: Synthetic oligonucleotide
  Sense strand starting at position 769 of SEQ ID NO: 1563061
ccgauuugguuucuccauu

SEQ ID NO: 1792462 - RNA, 19 nt, Artificial Sequence
  Description of Artificial Sequence: Synthetic oligonucleotide
  Antisense strand to SEQ ID NO: 1792461
aauggagaaaccaaaucgg

SEQ ID NO: 1792463 - RNA, 19 nt, Artificial Sequence
  Description of Artificial Sequence: Synthetic oligonucleotide
  Sense strand starting at position 770 of SEQ ID NO: 1563061
cgauuugguuucuccauua

SEQ ID NO: 1792464 - RNA, 19 nt, Artificial Sequence
  Description of Artificial Sequence: Synthetic oligonucleotide
  Antisense strand to SEQ ID NO: 1792463
uaauggagaaaccaaaucg

SEQ ID NO: 1792465 - RNA, 19 nt, Artificial Sequence
  Description of Artificial Sequence: Synthetic oligonucleotide
  Sense strand starting at position 826 of SEQ ID NO: 1563061
ccaucaaucuuagagaaag

SEQ ID NO: 1792466 - RNA, 19 nt, Artificial Sequence
  Description of Artificial Sequence: Synthetic oligonucleotide
  Antisense strand to SEQ ID NO: 1792465
cuuucucuaagauugaugg

SEQ ID NO: 1792467 - RNA, 19 nt, Artificial Sequence
  Description of Artificial Sequence: Synthetic oligonucleotide
  Sense strand starting at position 848 of SEQ ID NO: 1563061
auagaugcucaagagcauu

SEQ ID NO: 1792468 - RNA, 19 nt, Artificial Sequence
  Description of Artificial Sequence: Synthetic oligonucleotide
  Antisense strand to SEQ ID NO: 1792467
aaugcucuugagcaucuau

SEQ ID NO: 1792469 - RNA, 19 nt, Artificial Sequence
  Description of Artificial Sequence: Synthetic oligonucleotide
  Sense strand starting at position 947 of SEQ ID NO: 1563061
gacugagggcugugacauc

SEQ ID NO: 1792470 - RNA, 19 nt, Artificial Sequence
  Description of Artificial Sequence: Synthetic oligonucleotide
  Antisense strand to SEQ ID NO: 1792469
gaugucacagcccucaguc

SEQ ID NO: 1792471 - RNA, 19 nt, Artificial Sequence
  Description of Artificial Sequence: Synthetic oligonucleotide
  Sense strand starting at position 1231 of SEQ ID NO: 1563061
aagggaaggcgauguuuau

SEQ ID NO: 1792472 - RNA, 19 nt, Artificial Sequence
  Description of Artificial Sequence: Synthetic oligonucleotide
  Antisense strand to SEQ ID NO: 1792471
auaaacaucgccuucccuu

SEQ ID NO: 1792473 - RNA, 19 nt, Artificial Sequence
  Description of Artificial Sequence: Synthetic oligonucleotide
  Sense strand starting at position 1554 of SEQ ID NO: 1563061
caacguuaccuaggaaaua

SEQ ID NO: 1792474 - RNA, 19 nt, Artificial Sequence
  Description of Artificial Sequence: Synthetic oligonucleotide
  Antisense strand to SEQ ID NO: 1792473
uauuuccuagguaacguug

SEQ ID NO: 1792475 - RNA, 19 nt, Artificial Sequence
  Description of Artificial Sequence: Synthetic oligonucleotide
  Sense strand starting at position 1761 of SEQ ID NO: 1563061
gcauccugccagggaaaca

SEQ ID NO: 1792476 - RNA, 19 nt, Artificial Sequence
  Description of Artificial Sequence: Synthetic oligonucleotide
  Antisense strand to SEQ ID NO: 1792475
uguuucccuggcaggaugc

SEQ ID NO: 1792477 - RNA, 19 nt, Artificial Sequence
  Description of Artificial Sequence: Synthetic oligonucleotide
  Sense strand starting at position 2119 of SEQ ID NO: 1563061
ugcagacuucuguagacau

SEQ ID NO: 1792478 - RNA, 19 nt, Artificial Sequence
  Description of Artificial Sequence: Synthetic oligonucleotide
  Antisense strand to SEQ ID NO: 1792477
augucuacagaagucugca

SEQ ID NO: 1792479 - RNA, 19 nt, Artificial Sequence
  Description of Artificial Sequence: Synthetic oligonucleotide
  Sense strand starting at position 2542 of SEQ ID NO: 1563061
gacccagaguguucuagca

SEQ ID NO: 1792480 - RNA, 19 nt, Artificial Sequence
  Description of Artificial Sequence: Synthetic oligonucleotide
  Antisense strand to SEQ ID NO: 1792479
ugcuagaacacucuggguc

SEQ ID NO: 1792481 - RNA, 19 nt, Artificial Sequence
  Description of Artificial Sequence: Synthetic oligonucleotide
  Sense strand starting at position 2550 of SEQ ID NO: 1563061
guguucuagcacuaacuca

SEQ ID NO: 1792482 - RNA, 19 nt, Artificial Sequence
  Description of Artificial Sequence: Synthetic oligonucleotide
  Antisense strand to SEQ ID NO: 1792481
ugaguuagugcuagaacac

SEQ ID NO: 1792483 - RNA, 19 nt, Artificial Sequence
  Description of Artificial Sequence: Synthetic oligonucleotide
  Sense strand starting at position 2709 of SEQ ID NO: 1563061
ggagguugagucuagaugu

SEQ ID NO: 1792484 - RNA, 19 nt, Artificial Sequence
  Description of Artificial Sequence: Synthetic oligonucleotide
  Antisense strand to SEQ ID NO: 1792483
acaucuagacucaaccucc

SEQ ID NO: 1792485 - RNA, 19 nt, Artificial Sequence
  Description of Artificial Sequence: Synthetic oligonucleotide
  Sense strand starting at position 2763 of SEQ ID NO: 1563061
ucccauaaaugagcuguua

SEQ ID NO: 1792486 - RNA, 19 nt, Artificial Sequence
  Description of Artificial Sequence: Synthetic oligonucleotide
  Antisense strand to SEQ ID NO: 1792485
uaacagcucauuuauggga

SEQ ID NO: 1792487 - RNA, 19 nt, Artificial Sequence
  Description of Artificial Sequence: Synthetic oligonucleotide
  Sense strand starting at position 2771 of SEQ ID NO: 1563061
augagcuguuaauuaacaa

SEQ ID NO: 1792488 - RNA, 19 nt, Artificial Sequence
  Description of Artificial Sequence: Synthetic oligonucleotide
  Antisense strand to SEQ ID NO: 1792487
uuguuaauuaacagcucau

SEQ ID NO: 1792489 - RNA, 19 nt, Artificial Sequence
  Description of Artificial Sequence: Synthetic oligonucleotide
  Sense strand starting at position 2880 of SEQ ID NO: 1563061
guauuuggccuuugacgca

SEQ ID NO: 1792490 - RNA, 19 nt, Artificial Sequence
  Description of Artificial Sequence: Synthetic oligonucleotide
  Antisense strand to SEQ ID NO: 1792489
ugcgucaaaggccaaauac

SEQ ID NO: 1792491 - RNA, 19 nt, Artificial Sequence
  Description of Artificial Sequence: Synthetic oligonucleotide
  Sense strand starting at position 2915 of SEQ ID NO: 1563061
agagaaagccuuugaccca

SEQ ID NO: 1792492 - RNA, 19 nt, Artificial Sequence
  Description of Artificial Sequence: Synthetic oligonucleotide
  Antisense strand to SEQ ID NO: 1792491
ugggucaaaggcuuucucu

SEQ ID NO: 1792493 - RNA, 19 nt, Artificial Sequence
  Description of Artificial Sequence: Synthetic oligonucleotide
  Sense strand starting at position 2944 of SEQ ID NO: 1563061
gagcaaaggcuccagacua

SEQ ID NO: 1792494 - RNA, 19 nt, Artificial Sequence
  Description of Artificial Sequence: Synthetic oligonucleotide
  Antisense strand to SEQ ID NO: 1792493
uagucuggagccuuugcuc

SEQ ID NO: 1792495 - RNA, 19 nt, Artificial Sequence
  Description of Artificial Sequence: Synthetic oligonucleotide
  Sense strand starting at position 2954 of SEQ ID NO: 1563061
uccagacuacugcgaaguu

SEQ ID NO: 1792496 - RNA, 19 nt, Artificial Sequence
  Description of Artificial Sequence: Synthetic oligonucleotide
  Antisense strand to SEQ ID NO: 1792495
aacuucgcaguagucugga

SEQ ID NO: 1792497 - RNA, 19 nt, Artificial Sequence
  Description of Artificial Sequence: Synthetic oligonucleotide
  Sense strand starting at position 3290 of SEQ ID NO: 1563061
agagcaagacucugcuuga

SEQ ID NO: 1792498 - RNA, 19 nt, Artificial Sequence
  Description of Artificial Sequence: Synthetic oligonucleotide
  Antisense strand to SEQ ID NO: 1792497
ucaagcagagucuugcucu

SEQ ID NO: 1792499 - RNA, 19 nt, Artificial Sequence
  Description of Artificial Sequence: Synthetic oligonucleotide
  Sense strand starting at position 3291 of SEQ ID NO: 1563061
gagcaagacucugcuugag

SEQ ID NO: 1792500 - RNA, 19 nt, Artificial Sequence
  Description of Artificial Sequence: Synthetic oligonucleotide
  Antisense strand to SEQ ID NO: 1792499
cucaagcagagucuugcuc

SEQ ID NO: 1792501 - RNA, 19 nt, Artificial Sequence
  Description of Artificial Sequence: Synthetic oligonucleotide
  Sense strand starting at position 3293 of SEQ ID NO: 1563061
gcaagacucugcuugagaa

SEQ ID NO: 1792502 - RNA, 19 nt, Artificial Sequence
  Description of Artificial Sequence: Synthetic oligonucleotide
  Antisense strand to SEQ ID NO: 1792501
uucucaagcagagucuugc

SEQ ID NO: 1792503 - RNA, 19 nt, Artificial Sequence
  Description of Artificial Sequence: Synthetic oligonucleotide
  Sense strand starting at position 3418 of SEQ ID NO: 1563061
uuuaguaaugcucaaaguc

SEQ ID NO: 1792504 - RNA, 19 nt, Artificial Sequence
  Description of Artificial Sequence: Synthetic oligonucleotide
  Antisense strand to SEQ ID NO: 1792503
gacuuugagcauuacuaaa

SEQ ID NO: 1792505 - RNA, 19 nt, Artificial Sequence
  Description of Artificial Sequence: Synthetic oligonucleotide
  Sense strand starting at position 3624 of SEQ ID NO: 1563061
acaacuaagcuaggacauu

SEQ ID NO: 1792506 - RNA, 19 nt, Artificial Sequence
  Description of Artificial Sequence: Synthetic oligonucleotide
  Antisense strand to SEQ ID NO: 1792505
aauguccuagcuuaguugu

SEQ ID NO: 1792507 - RNA, 19 nt, Artificial Sequence
  Description of Artificial Sequence: Synthetic oligonucleotide
  Sense strand starting at position 3683 of SEQ ID NO: 1563061
aggccagggaaugguaaau

SEQ ID NO: 1792508 - RNA, 19 nt, Artificial Sequence
  Description of Artificial Sequence: Synthetic oligonucleotide
  Antisense strand to SEQ ID NO: 1792507
auuuaccauucccuggccu

SEQ ID NO: 1792509 - RNA, 19 nt, Artificial Sequence
  Description of Artificial Sequence: Synthetic oligonucleotide
  Sense strand starting at position 3908 of SEQ ID NO: 1563061
cugagaagguuugcuggau

SEQ ID NO: 1792510 - RNA, 19 nt, Artificial Sequence
  Description of Artificial Sequence: Synthetic oligonucleotide
  Antisense strand to SEQ ID NO: 1792509
auccagcaaaccuucucag

SEQ ID NO: 1792511 - RNA, 19 nt, Artificial Sequence
  Description of Artificial Sequence: Synthetic oligonucleotide
  Sense strand starting at position 3909 of SEQ ID NO: 1563061
ugagaagguuugcuggauu

SEQ ID NO: 1792512 - RNA, 19 nt, Artificial Sequence
  Description of Artificial Sequence: Synthetic oligonucleotide
  Antisense strand to SEQ ID NO: 1792511
aauccagcaaaccuucuca

SEQ ID NO: 1792513 - RNA, 19 nt, Artificial Sequence
  Description of Artificial Sequence: Synthetic oligonucleotide
  Sense strand starting at position 58 of SEQ ID NO: 1563062
caaggagucggagguuaca

SEQ ID NO: 1792514 - RNA, 19 nt, Artificial Sequence
  Description of Artificial Sequence: Synthetic oligonucleotide
  Antisense strand to SEQ ID NO: 1792513
uguaaccuccgacuccuug

SEQ ID NO: 1792515 - RNA, 19 nt, Artificial Sequence
  Description of Artificial Sequence: Synthetic oligonucleotide
  Sense strand starting at position 341 of SEQ ID NO: 1563062
caaagauggugaggucuga

SEQ ID NO: 1792516 - RNA, 19 nt, Artificial Sequence
  Description of Artificial Sequence: Synthetic oligonucleotide
  Antisense strand to SEQ ID NO: 1792515
ucagaccucaccaucuuug

SEQ ID NO: 1792517 - RNA, 19 nt, Artificial Sequence
  Description of Artificial Sequence: Synthetic oligonucleotide
  Sense strand starting at position 392 of SEQ ID NO: 1563062
gcugaaugcuguggucugu

SEQ ID NO: 1792518 - RNA, 19 nt, Artificial Sequence
  Description of Artificial Sequence: Synthetic oligonucleotide
  Antisense strand to SEQ ID NO: 1792517
acagaccacagcauucagc

SEQ ID NO: 1792519 - RNA, 19 nt, Artificial Sequence
  Description of Artificial Sequence: Synthetic oligonucleotide
  Sense strand starting at position 412 of SEQ ID NO: 1563062
gugucugugcuucugcaga

SEQ ID NO: 1792520 - RNA, 19 nt, Artificial Sequence
  Description of Artificial Sequence: Synthetic oligonucleotide
  Antisense strand to SEQ ID NO: 1792519
ucugcagaagcacagacac

SEQ ID NO: 1792521 - RNA, 19 nt, Artificial Sequence
  Description of Artificial Sequence: Synthetic oligonucleotide
  Sense strand starting at position 414 of SEQ ID NO: 1563062
gucugugcuucugcagagu

SEQ ID NO: 1792522 - RNA, 19 nt, Artificial Sequence
  Description of Artificial Sequence: Synthetic oligonucleotide
  Antisense strand to SEQ ID NO: 1792521
acucugcagaagcacagac

SEQ ID NO: 1792523 - RNA, 19 nt, Artificial Sequence
  Description of Artificial Sequence: Synthetic oligonucleotide
  Sense strand starting at position 427 of SEQ ID NO: 1563062
cagaguuagccugguccca

SEQ ID NO: 1792524 - RNA, 19 nt, Artificial Sequence
  Description of Artificial Sequence: Synthetic oligonucleotide
  Antisense strand to SEQ ID NO: 1792523
ugggaccaggcuaacucug

SEQ ID NO: 1792525 - RNA, 19 nt, Artificial Sequence
  Description of Artificial Sequence: Synthetic oligonucleotide
  Sense strand starting at position 429 of SEQ ID NO: 1563062
gaguuagccuggucccaga

SEQ ID NO: 1792526 - RNA, 19 nt, Artificial Sequence
  Description of Artificial Sequence: Synthetic oligonucleotide
  Antisense strand to SEQ ID NO: 1792525
ucugggaccaggcuaacuc

SEQ ID NO: 1792527 - RNA, 19 nt, Artificial Sequence
  Description of Artificial Sequence: Synthetic oligonucleotide
  Sense strand starting at position 457 of SEQ ID NO: 1563062
ugugcaugcuggagugaag

SEQ ID NO: 1792528 - RNA, 19 nt, Artificial Sequence
  Description of Artificial Sequence: Synthetic oligonucleotide
  Antisense strand to SEQ ID NO: 1792527
cuucacuccagcaugcaca

SEQ ID NO: 1792529 - RNA, 19 nt, Artificial Sequence
  Description of Artificial Sequence: Synthetic oligonucleotide
  Sense strand starting at position 702 of SEQ ID NO: 1563062
gagacagaaugaugaccuu

SEQ ID NO: 1792530 - RNA, 19 nt, Artificial Sequence
  Description of Artificial Sequence: Synthetic oligonucleotide
  Antisense strand to SEQ ID NO: 1792529
aaggucaucauucugucuc

SEQ ID NO: 1792531 - RNA, 19 nt, Artificial Sequence
  Description of Artificial Sequence: Synthetic oligonucleotide
  Sense strand starting at position 708 of SEQ ID NO: 1563062
gaaugaugaccuuguccag

SEQ ID NO: 1792532 - RNA, 19 nt, Artificial Sequence
  Description of Artificial Sequence: Synthetic oligonucleotide
  Antisense strand to SEQ ID NO: 1792531
cuggacaaggucaucauuc

SEQ ID NO: 1792533 - RNA, 19 nt, Artificial Sequence
  Description of Artificial Sequence: Synthetic oligonucleotide
  Sense strand starting at position 814 of SEQ ID NO: 1563062
gcaguccuccgucaaauga

SEQ ID NO: 1792534 - RNA, 19 nt, Artificial Sequence
  Description of Artificial Sequence: Synthetic oligonucleotide
  Antisense strand to SEQ ID NO: 1792533
ucauuugacggaggacugc

SEQ ID NO: 1792535 - RNA, 19 nt, Artificial Sequence
  Description of Artificial Sequence: Synthetic oligonucleotide
  Sense strand starting at position 3031 of SEQ ID NO: 1563062
gagggaaucucacacuugu

SEQ ID NO: 1792536 - RNA, 19 nt, Artificial Sequence
  Description of Artificial Sequence: Synthetic oligonucleotide
  Antisense strand to SEQ ID NO: 1792535
acaagugugagauucccuc

SEQ ID NO: 1792537 - RNA, 19 nt, Artificial Sequence
  Description of Artificial Sequence: Synthetic oligonucleotide
  Sense strand starting at position 3089 of SEQ ID NO: 1563062
ucacgucauccuggaaggu

SEQ ID NO: 1792538 - RNA, 19 nt, Artificial Sequence
  Description of Artificial Sequence: Synthetic oligonucleotide
  Antisense strand to SEQ ID NO: 1792537
accuuccaggaugacguga

SEQ ID NO: 1792539 - RNA, 19 nt, Artificial Sequence
  Description of Artificial Sequence: Synthetic oligonucleotide
  Sense strand starting at position 3130 of SEQ ID NO: 1563062
gggcgauggugaaguguuu

SEQ ID NO: 1792540 - RNA, 19 nt, Artificial Sequence
  Description of Artificial Sequence: Synthetic oligonucleotide
  Antisense strand to SEQ ID NO: 1792539
aaacacuucaccaucgccc

SEQ ID NO: 1792541 - RNA, 19 nt, Artificial Sequence
  Description of Artificial Sequence: Synthetic oligonucleotide
  Sense strand starting at position 3136 of SEQ ID NO: 1563062
uggugaaguguuugccaga

SEQ ID NO: 1792542 - RNA, 19 nt, Artificial Sequence
  Description of Artificial Sequence: Synthetic oligonucleotide
  Antisense strand to SEQ ID NO: 1792541
ucuggcaaacacuucacca

SEQ ID NO: 1792543 - RNA, 19 nt, Artificial Sequence
  Description of Artificial Sequence: Synthetic oligonucleotide
  Sense strand starting at position 3137 of SEQ ID NO: 1563062
ggugaaguguuugccagau

SEQ ID NO: 1792544 - RNA, 19 nt, Artificial Sequence
  Description of Artificial Sequence: Synthetic oligonucleotide
  Antisense strand to SEQ ID NO: 1792543
aucuggcaaacacuucacc

SEQ ID NO: 1792545 - RNA, 19 nt, Artificial Sequence
  Description of Artificial Sequence: Synthetic oligonucleotide
  Sense strand starting at position 3141 of SEQ ID NO: 1563062
aaguguuugccagauggac

SEQ ID NO: 1792546 - RNA, 19 nt, Artificial Sequence
  Description of Artificial Sequence: Synthetic oligonucleotide
  Antisense strand to SEQ ID NO: 1792545
guccaucuggcaaacacuu

SEQ ID NO: 1792547 - RNA, 19 nt, Artificial Sequence
  Description of Artificial Sequence: Synthetic oligonucleotide
  Sense strand starting at position 3262 of SEQ ID NO: 1563062
ggccuuaucuagcacauua

SEQ ID NO: 1792548 - RNA, 19 nt, Artificial Sequence
  Description of Artificial Sequence: Synthetic oligonucleotide
  Antisense strand to SEQ ID NO: 1792547
uaaugugcuagauaaggcc

SEQ ID NO: 1792549 - RNA, 19 nt, Artificial Sequence
  Description of Artificial Sequence: Synthetic oligonucleotide
  Sense strand starting at position 3345 of SEQ ID NO: 1563062
ggaagaucugccuaugagu

SEQ ID NO: 1792550 - RNA, 19 nt, Artificial Sequence
  Description of Artificial Sequence: Synthetic oligonucleotide
  Antisense strand to SEQ ID NO: 1792549
acucauaggcagaucuucc

SEQ ID NO: 1792551 - RNA, 19 nt, Artificial Sequence
  Description of Artificial Sequence: Synthetic oligonucleotide
  Sense strand starting at position 3347 of SEQ ID NO: 1563062
aagaucugccuaugaguga

SEQ ID NO: 1792552 - RNA, 19 nt, Artificial Sequence
  Description of Artificial Sequence: Synthetic oligonucleotide
  Antisense strand to SEQ ID NO: 1792551
ucacucauaggcagaucuu

SEQ ID NO: 1792553 - RNA, 19 nt, Artificial Sequence
  Description of Artificial Sequence: Synthetic oligonucleotide
  Sense strand starting at position 3352 of SEQ ID NO: 1563062
cugccuaugagugagggaa

SEQ ID NO: 1792554 - RNA, 19 nt, Artificial Sequence
  Description of Artificial Sequence: Synthetic oligonucleotide
  Antisense strand to SEQ ID NO: 1792553
uucccucacucauaggcag

SEQ ID NO: 1792555 - RNA, 19 nt, Artificial Sequence
  Description of Artificial Sequence: Synthetic oligonucleotide
  Sense strand starting at position 3806 of SEQ ID NO: 1563062
gggcuaaggcuuggagaga

SEQ ID NO: 1792556 - RNA, 19 nt, Artificial Sequence
  Description of Artificial Sequence: Synthetic oligonucleotide
  Antisense strand to SEQ ID NO: 1792555
ucucuccaagccuuagccc

SEQ ID NO: 1792557 - RNA, 19 nt, Artificial Sequence
  Description of Artificial Sequence: Synthetic oligonucleotide
  Sense strand starting at position 3966 of SEQ ID NO: 1563062
gagggagauucugagcugu

SEQ ID NO: 1792558 - RNA, 19 nt, Artificial Sequence
  Description of Artificial Sequence: Synthetic oligonucleotide
  Antisense strand to SEQ ID NO: 1792557
acagcucagaaucucccuc

SEQ ID NO: 1792559 - RNA, 19 nt, Artificial Sequence
  Description of Artificial Sequence: Synthetic oligonucleotide
  Sense strand starting at position 3968 of SEQ ID NO: 1563062
gggagauucugagcuguac

SEQ ID NO: 1792560 - RNA, 19 nt, Artificial Sequence
  Description of Artificial Sequence: Synthetic oligonucleotide
  Antisense strand to SEQ ID NO: 1792559
guacagcucagaaucuccc

SEQ ID NO: 1792561 - RNA, 19 nt, Artificial Sequence
  Description of Artificial Sequence: Synthetic oligonucleotide
  Sense strand starting at position 130 of SEQ ID NO: 1563063
uggcacaaucuuugagacu

SEQ ID NO: 1792562 - RNA, 19 nt, Artificial Sequence
  Description of Artificial Sequence: Synthetic oligonucleotide
  Antisense strand to SEQ ID NO: 1792561
agucucaaagauugugcca

SEQ ID NO: 1792563 - RNA, 19 nt, Artificial Sequence
  Description of Artificial Sequence: Synthetic oligonucleotide
  Sense strand starting at position 216 of SEQ ID NO: 1563063
ccauuugaaugagggaaau

SEQ ID NO: 1792564 - RNA, 19 nt, Artificial Sequence
  Description of Artificial Sequence: Synthetic oligonucleotide
  Antisense strand to SEQ ID NO: 1792563
auuucccucauucaaaugg

SEQ ID NO: 1792565 - RNA, 19 nt, Artificial Sequence
  Description of Artificial Sequence: Synthetic oligonucleotide
  Sense strand starting at position 311 of SEQ ID NO: 1563063
aaauaaugguguuugggau

SEQ ID NO: 1792566 - RNA, 19 nt, Artificial Sequence
  Description of Artificial Sequence: Synthetic oligonucleotide
  Antisense strand to SEQ ID NO: 1792565
aucccaaacaccauuauuu

SEQ ID NO: 1792567 - RNA, 19 nt, Artificial Sequence
  Description of Artificial Sequence: Synthetic oligonucleotide
  Sense strand starting at position 312 of SEQ ID NO: 1563063
aauaaugguguuugggaua

SEQ ID NO: 1792568 - RNA, 19 nt, Artificial Sequence
  Description of Artificial Sequence: Synthetic oligonucleotide
  Antisense strand to SEQ ID NO: 1792567
uaucccaaacaccauuauu

SEQ ID NO: 1792569 - RNA, 19 nt, Artificial Sequence
  Description of Artificial Sequence: Synthetic oligonucleotide
  Sense strand starting at position 405 of SEQ ID NO: 1563063
aagccagucugauuuguau

SEQ ID NO: 1792570 - RNA, 19 nt, Artificial Sequence
  Description of Artificial Sequence: Synthetic oligonucleotide
  Antisense strand to SEQ ID NO: 1792569
auacaaaucagacuggcuu

SEQ ID NO: 1792571 - RNA, 19 nt, Artificial Sequence
  Description of Artificial Sequence: Synthetic oligonucleotide
  Sense strand starting at position 418 of SEQ ID NO: 1563063
uuguauucuggauauuggu

SEQ ID NO: 1792572 - RNA, 19 nt, Artificial Sequence
  Description of Artificial Sequence: Synthetic oligonucleotide
  Antisense strand to SEQ ID NO: 1792571
accaauauccagaauacaa

SEQ ID NO: 1792573 - RNA, 19 nt, Artificial Sequence
  Description of Artificial Sequence: Synthetic oligonucleotide
  Sense strand starting at position 523 of SEQ ID NO: 1563063
aaaguuccgcucuauaaga

SEQ ID NO: 1792574 - RNA, 19 nt, Artificial Sequence
  Description of Artificial Sequence: Synthetic oligonucleotide
  Antisense strand to SEQ ID NO: 1792573
ucuuauagagcggaacuuu

SEQ ID NO: 1792575 - RNA, 19 nt, Artificial Sequence
  Description of Artificial Sequence: Synthetic oligonucleotide
  Sense strand starting at position 530 of SEQ ID NO: 1563063
cgcucuauaagaggcauuu

SEQ ID NO: 1792576 - RNA, 19 nt, Artificial Sequence
  Description of Artificial Sequence: Synthetic oligonucleotide
  Antisense strand to SEQ ID NO: 1792575
aaaugccucuuauagagcg

SEQ ID NO: 1792577 - RNA, 19 nt, Artificial Sequence
  Description of Artificial Sequence: Synthetic oligonucleotide
  Sense strand starting at position 566 of SEQ ID NO: 1563063
acacaucuguacuuucgaa

SEQ ID NO: 1792578 - RNA, 19 nt, Artificial Sequence
  Description of Artificial Sequence: Synthetic oligonucleotide
  Antisense strand to SEQ ID NO: 1792577
uucgaaaguacagaugugu

SEQ ID NO: 1792579 - RNA, 19 nt, Artificial Sequence
  Description of Artificial Sequence: Synthetic oligonucleotide
  Sense strand starting at position 632 of SEQ ID NO: 1563063
ugaaaucucccacagcgaa

SEQ ID NO: 1792580 - RNA, 19 nt, Artificial Sequence
  Description of Artificial Sequence: Synthetic oligonucleotide
  Antisense strand to SEQ ID NO: 1792579
uucgcugugggagauuuca

SEQ ID NO: 1792581 - RNA, 19 nt, Artificial Sequence
  Description of Artificial Sequence: Synthetic oligonucleotide
  Sense strand starting at position 654 of SEQ ID NO: 1563063
agaaguaaccucuauuagu

SEQ ID NO: 1792582 - RNA, 19 nt, Artificial Sequence
  Description of Artificial Sequence: Synthetic oligonucleotide
  Antisense strand to SEQ ID NO: 1792581
acuaauagagguuacuucu

SEQ ID NO: 1792583 - RNA, 19 nt, Artificial Sequence
  Description of Artificial Sequence: Synthetic oligonucleotide
  Sense strand starting at position 973 of SEQ ID NO: 1563063
agaauaagcugguccuuaa

SEQ ID NO: 1792584 - RNA, 19 nt, Artificial Sequence
  Description of Artificial Sequence: Synthetic oligonucleotide
  Antisense strand to SEQ ID NO: 1792583
uuaaggaccagcuuauucu

SEQ ID NO: 1792585 - RNA, 19 nt, Artificial Sequence
  Description of Artificial Sequence: Synthetic oligonucleotide
  Sense strand starting at position 1065 of SEQ ID NO: 1563063
gccucuacagccgaauaaa

SEQ ID NO: 1792586 - RNA, 19 nt, Artificial Sequence
  Description of Artificial Sequence: Synthetic oligonucleotide
  Antisense strand to SEQ ID NO: 1792585
uuuauucggcuguagaggc

SEQ ID NO: 1792587 - RNA, 19 nt, Artificial Sequence
  Description of Artificial Sequence: Synthetic oligonucleotide
  Sense strand starting at position 1083 of SEQ ID NO: 1563063
accgguagucuggaacuga

SEQ ID NO: 1792588 - RNA, 19 nt, Artificial Sequence
  Description of Artificial Sequence: Synthetic oligonucleotide
  Antisense strand to SEQ ID NO: 1792587
ucaguuccagacuaccggu

SEQ ID NO: 1792589 - RNA, 19 nt, Artificial Sequence
  Description of Artificial Sequence: Synthetic oligonucleotide
  Sense strand starting at position 2177 of SEQ ID NO: 1563063
ugguuaagugcuucccguu

SEQ ID NO: 1792590 - RNA, 19 nt, Artificial Sequence
  Description of Artificial Sequence: Synthetic oligonucleotide
  Antisense strand to SEQ ID NO: 1792589
aacgggaagcacuuaacca

SEQ ID NO: 1792591 - RNA, 19 nt, Artificial Sequence
  Description of Artificial Sequence: Synthetic oligonucleotide
  Sense strand starting at position 2178 of SEQ ID NO: 1563063
gguuaagugcuucccguuu

SEQ ID NO: 1792592 - RNA, 19 nt, Artificial Sequence
  Description of Artificial Sequence: Synthetic oligonucleotide
  Antisense strand to SEQ ID NO: 1792591
aaacgggaagcacuuaacc

SEQ ID NO: 1792593 - RNA, 19 nt, Artificial Sequence
  Description of Artificial Sequence: Synthetic oligonucleotide
  Sense strand starting at position 2183 of SEQ ID NO: 1563063
agugcuucccguuuaacga

SEQ ID NO: 1792594 - RNA, 19 nt, Artificial Sequence
  Description of Artificial Sequence: Synthetic oligonucleotide
  Antisense strand to SEQ ID NO: 1792593
ucguuaaacgggaagcacu

SEQ ID NO: 1792595 - RNA, 19 nt, Artificial Sequence
  Description of Artificial Sequence: Synthetic oligonucleotide
  Sense strand starting at position 2600 of SEQ ID NO: 1563063
ugacuccacuguguuauuu

SEQ ID NO: 1792596 - RNA, 19 nt, Artificial Sequence
  Description of Artificial Sequence: Synthetic oligonucleotide
  Antisense strand to SEQ ID NO: 1792595
aaauaacacaguggaguca

SEQ ID NO: 1792597 - RNA, 19 nt, Artificial Sequence
  Description of Artificial Sequence: Synthetic oligonucleotide
  Sense strand starting at position 2610 of SEQ ID NO: 1563063
guguuauuuccuggcaccu

SEQ ID NO: 1792598 - RNA, 19 nt, Artificial Sequence
  Description of Artificial Sequence: Synthetic oligonucleotide
  Antisense strand to SEQ ID NO: 1792597
aggugccaggaaauaacac

SEQ ID NO: 1792599 - RNA, 19 nt, Artificial Sequence
  Description of Artificial Sequence: Synthetic oligonucleotide
  Sense strand starting at position 2623 of SEQ ID NO: 1563063
gcaccuuauugggcaaaua

SEQ ID NO: 1792600 - RNA, 19 nt, Artificial Sequence
  Description of Artificial Sequence: Synthetic oligonucleotide
  Antisense strand to SEQ ID NO: 1792599
uauuugcccaauaaggugc

SEQ ID NO: 1792601 - RNA, 19 nt, Artificial Sequence
  Description of Artificial Sequence: Synthetic oligonucleotide
  Sense strand starting at position 2661 of SEQ ID NO: 1563063
cgcucugcuacgguuaauu

SEQ ID NO: 1792602 - RNA, 19 nt, Artificial Sequence
  Description of Artificial Sequence: Synthetic oligonucleotide
  Antisense strand to SEQ ID NO: 1792601
aauuaaccguagcagagcg

SEQ ID NO: 1792603 - RNA, 19 nt, Artificial Sequence
  Description of Artificial Sequence: Synthetic oligonucleotide
  Sense strand starting at position 2707 of SEQ ID NO: 1563063
gguuguuuggccaguaguu

SEQ ID NO: 1792604 - RNA, 19 nt, Artificial Sequence
  Description of Artificial Sequence: Synthetic oligonucleotide
  Antisense strand to SEQ ID NO: 1792603
aacuacuggccaaacaacc

SEQ ID NO: 1792605 - RNA, 19 nt, Artificial Sequence
  Description of Artificial Sequence: Synthetic oligonucleotide
  Sense strand starting at position 2717 of SEQ ID NO: 1563063
ccaguaguugacgauaaua

SEQ ID NO: 1792606 - RNA, 19 nt, Artificial Sequence
  Description of Artificial Sequence: Synthetic oligonucleotide
  Antisense strand to SEQ ID NO: 1792605
uauuaucgucaacuacugg

SEQ ID NO: 1792607 - RNA, 19 nt, Artificial Sequence
  Description of Artificial Sequence: Synthetic oligonucleotide
  Sense strand starting at position 2719 of SEQ ID NO: 1563063
aguaguugacgauaauagu

SEQ ID NO: 1792608 - RNA, 19 nt, Artificial Sequence
  Description of Artificial Sequence: Synthetic oligonucleotide
  Antisense strand to SEQ ID NO: 1792607
acuauuaucgucaacuacu

SEQ ID NO: 1792609 - RNA, 19 nt, Artificial Sequence
  Description of Artificial Sequence: Synthetic oligonucleotide
  Sense strand starting at position 2728 of SEQ ID NO: 1563063
cgauaauagugacucccuu

SEQ ID NO: 1792610 - RNA, 19 nt, Artificial Sequence
  Description of Artificial Sequence: Synthetic oligonucleotide
  Antisense strand to SEQ ID NO: 1792609
aagggagucacuauuaucg

SEQ ID NO: 1792611 - RNA, 19 nt, Artificial Sequence
  Description of Artificial Sequence: Synthetic oligonucleotide
  Sense strand starting at position 2792 of SEQ ID NO: 1563063
ucugguuaaaccugggagu

SEQ ID NO: 1792612 - RNA, 19 nt, Artificial Sequence
  Description of Artificial Sequence: Synthetic oligonucleotide
  Antisense strand to SEQ ID NO: 1792611
acucccagguuuaaccaga

SEQ ID NO: 1792613 - RNA, 19 nt, Artificial Sequence
  Description of Artificial Sequence: Synthetic oligonucleotide
  Sense strand starting at position 2793 of SEQ ID NO: 1563063
cugguuaaaccugggagua

SEQ ID NO: 1792614 - RNA, 19 nt, Artificial Sequence
  Description of Artificial Sequence: Synthetic oligonucleotide
  Antisense strand to SEQ ID NO: 1792613
uacucccagguuuaaccag

SEQ ID NO: 1792615 - RNA, 19 nt, Artificial Sequence
  Description of Artificial Sequence: Synthetic oligonucleotide
  Sense strand starting at position 2794 of SEQ ID NO: 1563063
ugguuaaaccugggaguaa

SEQ ID NO: 1792616 - RNA, 19 nt, Artificial Sequence
  Description of Artificial Sequence: Synthetic oligonucleotide
  Antisense strand to SEQ ID NO: 1792615
uuacucccagguuuaacca

SEQ ID NO: 1792617 - RNA, 19 nt, Artificial Sequence
  Description of Artificial Sequence: Synthetic oligonucleotide
  Sense strand starting at position 2806 of SEQ ID NO: 1563063
ggaguaaugcaguauccag

SEQ ID NO: 1792618 - RNA, 19 nt, Artificial Sequence
  Description of Artificial Sequence: Synthetic oligonucleotide
  Antisense strand to SEQ ID NO: 1792617
cuggauacugcauuacucc

SEQ ID NO: 1792619 - RNA, 19 nt, Artificial Sequence
  Description of Artificial Sequence: Synthetic oligonucleotide
  Sense strand starting at position 2838 of SEQ ID NO: 1563063
gaaauuaaggcuggcgaga

SEQ ID NO: 1792620 - RNA, 19 nt, Artificial Sequence
  Description of Artificial Sequence: Synthetic oligonucleotide
  Antisense strand to SEQ ID NO: 1792619
ucucgccagccuuaauuuc

SEQ ID NO: 1792621 - RNA, 19 nt, Artificial Sequence
  Description of Artificial Sequence: Synthetic oligonucleotide
  Sense strand starting at position 2922 of SEQ ID NO: 1563063
ggucaaacugcagagacuu

SEQ ID NO: 1792622 - RNA, 19 nt, Artificial Sequence
  Description of Artificial Sequence: Synthetic oligonucleotide
  Antisense strand to SEQ ID NO: 1792621
aagucucugcaguuugacc

SEQ ID NO: 1792623 - RNA, 19 nt, Artificial Sequence
  Description of Artificial Sequence: Synthetic oligonucleotide
  Sense strand starting at position 3275 of SEQ ID NO: 1563063
cagaauaaaucgucuuaga

SEQ ID NO: 1792624 - RNA, 19 nt, Artificial Sequence
  Description of Artificial Sequence: Synthetic oligonucleotide
  Antisense strand to SEQ ID NO: 1792623
ucuaagacgauuuauucug

SEQ ID NO: 1792625 - RNA, 19 nt, Artificial Sequence
  Description of Artificial Sequence: Synthetic oligonucleotide
  Sense strand starting at position 3339 of SEQ ID NO: 1563063
ggaaaucuuccaggauagu

SEQ ID NO: 1792626 - RNA, 19 nt, Artificial Sequence
  Description of Artificial Sequence: Synthetic oligonucleotide
  Antisense strand to SEQ ID NO: 1792625
acuauccuggaagauuucc

SEQ ID NO: 1792627 - RNA, 19 nt, Artificial Sequence
  Description of Artificial Sequence: Synthetic oligonucleotide
  Sense strand starting at position 3398 of SEQ ID NO: 1563063
ggguucuuucccuauagca

SEQ ID NO: 1792628 - RNA, 19 nt, Artificial Sequence
  Description of Artificial Sequence: Synthetic oligonucleotide
  Antisense strand to SEQ ID NO: 1792627
ugcuauagggaaagaaccc

SEQ ID NO: 1792629 - RNA, 19 nt, Artificial Sequence
  Description of Artificial Sequence: Synthetic oligonucleotide
  Sense strand starting at position 3496 of SEQ ID NO: 1563063
ccgaaaugaucuccaggag

SEQ ID NO: 1792630 - RNA, 19 nt, Artificial Sequence
  Description of Artificial Sequence: Synthetic oligonucleotide
  Antisense strand to SEQ ID NO: 1792629
cuccuggagaucauuucgg

SEQ ID NO: 1792631 - RNA, 19 nt, Artificial Sequence
  Description of Artificial Sequence: Synthetic oligonucleotide
  Sense strand starting at position 3536 of SEQ ID NO: 1563063
acauuccaucuuggguaau

SEQ ID NO: 1792632 - RNA, 19 nt, Artificial Sequence
  Description of Artificial Sequence: Synthetic oligonucleotide
  Antisense strand to SEQ ID NO: 1792631
auuacccaagauggaaugu

SEQ ID NO: 1792633 - RNA, 19 nt, Artificial Sequence
  Description of Artificial Sequence: Synthetic oligonucleotide
  Sense strand starting at position 3538 of SEQ ID NO: 1563063
auuccaucuuggguaauua

SEQ ID NO: 1792634 - RNA, 19 nt, Artificial Sequence
  Description of Artificial Sequence: Synthetic oligonucleotide
  Antisense strand to SEQ ID NO: 1792633
uaauuacccaagauggaau

SEQ ID NO: 1792635 - RNA, 19 nt, Artificial Sequence
  Description of Artificial Sequence: Synthetic oligonucleotide
  Sense strand starting at position 3539 of SEQ ID NO: 1563063
uuccaucuuggguaauuaa

SEQ ID NO: 1792636 - RNA, 19 nt, Artificial Sequence
  Description of Artificial Sequence: Synthetic oligonucleotide
  Antisense strand to SEQ ID NO: 1792635
uuaauuacccaagauggaa

SEQ ID NO: 1792637 - RNA, 19 nt, Artificial Sequence
  Description of Artificial Sequence: Synthetic oligonucleotide
  Sense strand starting at position 3649 of SEQ ID NO: 1563063
uuggcacugcuuuaauaau

SEQ ID NO: 1792638 - RNA, 19 nt, Artificial Sequence
  Description of Artificial Sequence: Synthetic oligonucleotide
  Antisense strand to SEQ ID NO: 1792637
auuauuaaagcagugccaa

SEQ ID NO: 1792639 - RNA, 19 nt, Artificial Sequence
  Description of Artificial Sequence: Synthetic oligonucleotide
  Sense strand starting at position 3819 of SEQ ID NO: 1563063
ucuaauauagguuguaaga

SEQ ID NO: 1792640 - RNA, 19 nt, Artificial Sequence
  Description of Artificial Sequence: Synthetic oligonucleotide
  Antisense strand to SEQ ID NO: 1792639
ucuuacaaccuauauuaga

SEQ ID NO: 1792641 - RNA, 19 nt, Artificial Sequence
  Description of Artificial Sequence: Synthetic oligonucleotide
  Sense strand starting at position 22 of SEQ ID NO: 1563064
gggcuuuaauuaucuuaug

SEQ ID NO: 1792642 - RNA, 19 nt, Artificial Sequence
  Description of Artificial Sequence: Synthetic oligonucleotide
  Antisense strand to SEQ ID NO: 1792641
cauaagauaauuaaagccc

SEQ ID NO: 1792643 - RNA, 19 nt, Artificial Sequence
  Description of Artificial Sequence: Synthetic oligonucleotide
  Sense strand starting at position 64 of SEQ ID NO: 1563064
uuaaauuagcgugaaaguc

SEQ ID NO: 1792644 - RNA, 19 nt, Artificial Sequence
  Description of Artificial Sequence: Synthetic oligonucleotide
  Antisense strand to SEQ ID NO: 1792643
gacuuucacgcuaauuuaa

SEQ ID NO: 1792645 - RNA, 19 nt, Artificial Sequence
  Description of Artificial Sequence: Synthetic oligonucleotide
  Sense strand starting at position 438 of SEQ ID NO: 1563064
guaacagauuuagaagaac

SEQ ID NO: 1792646 - RNA, 19 nt, Artificial Sequence
  Description of Artificial Sequence: Synthetic oligonucleotide
  Antisense strand to SEQ ID NO: 1792645
guucuucuaaaucuguuac

SEQ ID NO: 1792647 - RNA, 19 nt, Artificial Sequence
  Description of Artificial Sequence: Synthetic oligonucleotide
  Sense strand starting at position 471 of SEQ ID NO: 1563064
gccaauaugccacagcaua

SEQ ID NO: 1792648 - RNA, 19 nt, Artificial Sequence
  Description of Artificial Sequence: Synthetic oligonucleotide
  Antisense strand to SEQ ID NO: 1792647
uaugcuguggcauauuggc

SEQ ID NO: 1792649 - RNA, 19 nt, Artificial Sequence
  Description of Artificial Sequence: Synthetic oligonucleotide
  Sense strand starting at position 590 of SEQ ID NO: 1563064
gggcaauuuacccgccaca

SEQ ID NO: 1792650 - RNA, 19 nt, Artificial Sequence
  Description of Artificial Sequence: Synthetic oligonucleotide
  Antisense strand to SEQ ID NO: 1792649
uguggcggguaaauugccc

SEQ ID NO: 1792651 - RNA, 19 nt, Artificial Sequence
  Description of Artificial Sequence: Synthetic oligonucleotide
  Sense strand starting at position 852 of SEQ ID NO: 1563064
uggauacauggccgaaaca

SEQ ID NO: 1792652 - RNA, 19 nt, Artificial Sequence
  Description of Artificial Sequence: Synthetic oligonucleotide
  Antisense strand to SEQ ID NO: 1792651
uguuucggccauguaucca

SEQ ID NO: 1792653 - RNA, 19 nt, Artificial Sequence
  Description of Artificial Sequence: Synthetic oligonucleotide
  Sense strand starting at position 949 of SEQ ID NO: 1563064
uuucgugaggaaugaagaa

SEQ ID NO: 1792654 - RNA, 19 nt, Artificial Sequence
  Description of Artificial Sequence: Synthetic oligonucleotide
  Antisense strand to SEQ ID NO: 1792653
uucuucauuccucacgaaa

SEQ ID NO: 1792655 - RNA, 19 nt, Artificial Sequence
  Description of Artificial Sequence: Synthetic oligonucleotide
  Sense strand starting at position 1001 of SEQ ID NO: 1563064
auuucuaaucgcggugaau

SEQ ID NO: 1792656 - RNA, 19 nt, Artificial Sequence
  Description of Artificial Sequence: Synthetic oligonucleotide
  Antisense strand to SEQ ID NO: 1792655
auucaccgcgauuagaaau

SEQ ID NO: 1792657 - RNA, 19 nt, Artificial Sequence
  Description of Artificial Sequence: Synthetic oligonucleotide
  Sense strand starting at position 1105 of SEQ ID NO: 1563064
cugcacauuugagaacaca

SEQ ID NO: 1792658 - RNA, 19 nt, Artificial Sequence
  Description of Artificial Sequence: Synthetic oligonucleotide
  Antisense strand to SEQ ID NO: 1792657
uguguucucaaaugugcag

SEQ ID NO: 1792659 - RNA, 19 nt, Artificial Sequence
  Description of Artificial Sequence: Synthetic oligonucleotide
  Sense strand starting at position 1165 of SEQ ID NO: 1563064
gggugagccacauauugcu

SEQ ID NO: 1792660 - RNA, 19 nt, Artificial Sequence
  Description of Artificial Sequence: Synthetic oligonucleotide
  Antisense strand to SEQ ID NO: 1792659
agcaauauguggcucaccc

SEQ ID NO: 1792661 - RNA, 19 nt, Artificial Sequence
  Description of Artificial Sequence: Synthetic oligonucleotide
  Sense strand starting at position 1173 of SEQ ID NO: 1563064
cacauauugcuugggaggu

SEQ ID NO: 1792662 - RNA, 19 nt, Artificial Sequence
  Description of Artificial Sequence: Synthetic oligonucleotide
  Antisense strand to SEQ ID NO: 1792661
accucccaagcaauaugug

SEQ ID NO: 1792663 - RNA, 19 nt, Artificial Sequence
  Description of Artificial Sequence: Synthetic oligonucleotide
  Sense strand starting at position 1379 of SEQ ID NO: 1563064
gccuuagcagccgaaagaa

SEQ ID NO: 1792664 - RNA, 19 nt, Artificial Sequence
  Description of Artificial Sequence: Synthetic oligonucleotide
  Antisense strand to SEQ ID NO: 1792663
uucuuucggcugcuaaggc

SEQ ID NO: 1792665 - RNA, 19 nt, Artificial Sequence
  Description of Artificial Sequence: Synthetic oligonucleotide
  Sense strand starting at position 1521 of SEQ ID NO: 1563064
gcaagauagaaacgaugau

SEQ ID NO: 1792666 - RNA, 19 nt, Artificial Sequence
  Description of Artificial Sequence: Synthetic oligonucleotide
  Antisense strand to SEQ ID NO: 1792665
aucaucguuucuaucuugc

SEQ ID NO: 1792667 - RNA, 19 nt, Artificial Sequence
  Description of Artificial Sequence: Synthetic oligonucleotide
  Sense strand starting at position 1642 of SEQ ID NO: 1563064
gggucugauuuacacagau

SEQ ID NO: 1792668 - RNA, 19 nt, Artificial Sequence
  Description of Artificial Sequence: Synthetic oligonucleotide
  Antisense strand to SEQ ID NO: 1792667
aucuguguaaaucagaccc

SEQ ID NO: 1792669 - RNA, 19 nt, Artificial Sequence
  Description of Artificial Sequence: Synthetic oligonucleotide
  Sense strand starting at position 1681 of SEQ ID NO: 1563064
gucuccaugcuagacaaau

SEQ ID NO: 1792670 - RNA, 19 nt, Artificial Sequence
  Description of Artificial Sequence: Synthetic oligonucleotide
  Antisense strand to SEQ ID NO: 1792669
auuugucuagcauggagac

SEQ ID NO: 1792671 - RNA, 19 nt, Artificial Sequence
  Description of Artificial Sequence: Synthetic oligonucleotide
  Sense strand starting at position 1687 of SEQ ID NO: 1563064
augcuagacaaaugucgau

SEQ ID NO: 1792672 - RNA, 19 nt, Artificial Sequence
  Description of Artificial Sequence: Synthetic oligonucleotide
  Antisense strand to SEQ ID NO: 1792671
aucgacauuugucuagcau

SEQ ID NO: 1792673 - RNA, 19 nt, Artificial Sequence
  Description of Artificial Sequence: Synthetic oligonucleotide
  Sense strand starting at position 1989 of SEQ ID NO: 1563064
ccucucugucucuaaagga

SEQ ID NO: 1792674 - RNA, 19 nt, Artificial Sequence
  Description of Artificial Sequence: Synthetic oligonucleotide
  Antisense strand to SEQ ID NO: 1792673
uccuuuagagacagagagg

SEQ ID NO: 1792675 - RNA, 19 nt, Artificial Sequence
  Description of Artificial Sequence: Synthetic oligonucleotide
  Sense strand starting at position 2090 of SEQ ID NO: 1563064
agcugagacugccuuaaag

SEQ ID NO: 1792676 - RNA, 19 nt, Artificial Sequence
  Description of Artificial Sequence: Synthetic oligonucleotide
  Antisense strand to SEQ ID NO: 1792675
cuuuaaggcagucucagcu

SEQ ID NO: 1792677 - RNA, 19 nt, Artificial Sequence
  Description of Artificial Sequence: Synthetic oligonucleotide
  Sense strand starting at position 2172 of SEQ ID NO: 1563064
acagacacugcaugugaaa

SEQ ID NO: 1792678 - RNA, 19 nt, Artificial Sequence
  Description of Artificial Sequence: Synthetic oligonucleotide
  Antisense strand to SEQ ID NO: 1792677
uuucacaugcagugucugu

SEQ ID NO: 1792679 - RNA, 19 nt, Artificial Sequence
  Description of Artificial Sequence: Synthetic oligonucleotide
  Sense strand starting at position 2174 of SEQ ID NO: 1563064
agacacugcaugugaaagu

SEQ ID NO: 1792680 - RNA, 19 nt, Artificial Sequence
  Description of Artificial Sequence: Synthetic oligonucleotide
  Antisense strand to SEQ ID NO: 1792679
acuuucacaugcagugucu

SEQ ID NO: 1792681 - RNA, 19 nt, Artificial Sequence
  Description of Artificial Sequence: Synthetic oligonucleotide
  Sense strand starting at position 2233 of SEQ ID NO: 1563064
ccuuuauugguuuauagaa

SEQ ID NO: 1792682 - RNA, 19 nt, Artificial Sequence
  Description of Artificial Sequence: Synthetic oligonucleotide
  Antisense strand to SEQ ID NO: 1792681
uucuauaaaccaauaaagg

SEQ ID NO: 1792683 - RNA, 19 nt, Artificial Sequence
  Description of Artificial Sequence: Synthetic oligonucleotide
  Sense strand starting at position 2246 of SEQ ID NO: 1563064
auagaaauaugcucaguug

SEQ ID NO: 1792684 - RNA, 19 nt, Artificial Sequence
  Description of Artificial Sequence: Synthetic oligonucleotide
  Antisense strand to SEQ ID NO: 1792683
caacugagcauauuucuau

SEQ ID NO: 1792685 - RNA, 19 nt, Artificial Sequence
  Description of Artificial Sequence: Synthetic oligonucleotide
  Sense strand starting at position 2307 of SEQ ID NO: 1563064
gcuaguuauucucuagaug

SEQ ID NO: 1792686 - RNA, 19 nt, Artificial Sequence
  Description of Artificial Sequence: Synthetic oligonucleotide
  Antisense strand to SEQ ID NO: 1792685
caucuagagaauaacuagc

SEQ ID NO: 1792687 - RNA, 19 nt, Artificial Sequence
  Description of Artificial Sequence: Synthetic oligonucleotide
  Sense strand starting at position 2308 of SEQ ID NO: 1563064
cuaguuauucucuagaugu

SEQ ID NO: 1792688 - RNA, 19 nt, Artificial Sequence
  Description of Artificial Sequence: Synthetic oligonucleotide
  Antisense strand to SEQ ID NO: 1792687
acaucuagagaauaacuag

SEQ ID NO: 1792689 - RNA, 19 nt, Artificial Sequence
  Description of Artificial Sequence: Synthetic oligonucleotide
  Sense strand starting at position 2310 of SEQ ID NO: 1563064
aguuauucucuagauguuu

SEQ ID NO: 1792690 - RNA, 19 nt, Artificial Sequence
  Description of Artificial Sequence: Synthetic oligonucleotide
  Antisense strand to SEQ ID NO: 1792689
aaacaucuagagaauaacu

SEQ ID NO: 1792691 - RNA, 19 nt, Artificial Sequence
  Description of Artificial Sequence: Synthetic oligonucleotide
  Sense strand starting at position 2316 of SEQ ID NO: 1563064
ucucuagauguuugggcaa

SEQ ID NO: 1792692 - RNA, 19 nt, Artificial Sequence
  Description of Artificial Sequence: Synthetic oligonucleotide
  Antisense strand to SEQ ID NO: 1792691
uugcccaaacaucuagaga

SEQ ID NO: 1792693 - RNA, 19 nt, Artificial Sequence
  Description of Artificial Sequence: Synthetic oligonucleotide
  Sense strand starting at position 2392 of SEQ ID NO: 1563064
aggcuuuagcuuugaaaga

SEQ ID NO: 1792694 - RNA, 19 nt, Artificial Sequence
  Description of Artificial Sequence: Synthetic oligonucleotide
  Antisense strand to SEQ ID NO: 1792693
ucuuucaaagcuaaagccu

SEQ ID NO: 1792695 - RNA, 19 nt, Artificial Sequence
  Description of Artificial Sequence: Synthetic oligonucleotide
  Sense strand starting at position 2426 of SEQ ID NO: 1563064
gggcacgacugaucucuaa

SEQ ID NO: 1792696 - RNA, 19 nt, Artificial Sequence
  Description of Artificial Sequence: Synthetic oligonucleotide
  Antisense strand to SEQ ID NO: 1792695
uuagagaucagucgugccc

SEQ ID NO: 1792697 - RNA, 19 nt, Artificial Sequence
  Description of Artificial Sequence: Synthetic oligonucleotide
  Sense strand starting at position 2563 of SEQ ID NO: 1563064
agggacugguuucccaauu

SEQ ID NO: 1792698 - RNA, 19 nt, Artificial Sequence
  Description of Artificial Sequence: Synthetic oligonucleotide
  Antisense strand to SEQ ID NO: 1792697
aauugggaaaccagucccu

SEQ ID NO: 1792699 - RNA, 19 nt, Artificial Sequence
  Description of Artificial Sequence: Synthetic oligonucleotide
  Sense strand starting at position 2691 of SEQ ID NO: 1563064
gcaggucugagucaucuuu

SEQ ID NO: 1792700 - RNA, 19 nt, Artificial Sequence
  Description of Artificial Sequence: Synthetic oligonucleotide
  Antisense strand to SEQ ID NO: 1792699
aaagaugacucagaccugc

SEQ ID NO: 1792701 - RNA, 19 nt, Artificial Sequence
  Description of Artificial Sequence: Synthetic oligonucleotide
  Sense strand starting at position 2693 of SEQ ID NO: 1563064
aggucugagucaucuuuaa

SEQ ID NO: 1792702 - RNA, 19 nt, Artificial Sequence
  Description of Artificial Sequence: Synthetic oligonucleotide
  Antisense strand to SEQ ID NO: 1792701
uuaaagaugacucagaccu

SEQ ID NO: 1792703 - RNA, 19 nt, Artificial Sequence
  Description of Artificial Sequence: Synthetic oligonucleotide
  Sense strand starting at position 2982 of SEQ ID NO: 1563064
ugggcuucccuagauggua

SEQ ID NO: 1792704 - RNA, 19 nt, Artificial Sequence
  Description of Artificial Sequence: Synthetic oligonucleotide
  Antisense strand to SEQ ID NO: 1792703
uaccaucuagggaagccca

SEQ ID NO: 1792705 - RNA, 19 nt, Artificial Sequence
  Description of Artificial Sequence: Synthetic oligonucleotide
  Sense strand starting at position 3173 of SEQ ID NO: 1563064
cagagcaauggucauaauu

SEQ ID NO: 1792706 - RNA, 19 nt, Artificial Sequence
  Description of Artificial Sequence: Synthetic oligonucleotide
  Antisense strand to SEQ ID NO: 1792705
aauuaugaccauugcucug

SEQ ID NO: 1792707 - RNA, 19 nt, Artificial Sequence
  Description of Artificial Sequence: Synthetic oligonucleotide
  Sense strand starting at position 3199 of SEQ ID NO: 1563064
augaaagaaugugcuuaac

SEQ ID NO: 1792708 - RNA, 19 nt, Artificial Sequence
  Description of Artificial Sequence: Synthetic oligonucleotide
  Antisense strand to SEQ ID NO: 1792707
guuaagcacauucuuucau

SEQ ID NO: 1792709 - RNA, 19 nt, Artificial Sequence
  Description of Artificial Sequence: Synthetic oligonucleotide
  Sense strand starting at position 3412 of SEQ ID NO: 1563064
gucacauaguucccagaaa

SEQ ID NO: 1792710 - RNA, 19 nt, Artificial Sequence
  Description of Artificial Sequence: Synthetic oligonucleotide
  Antisense strand to SEQ ID NO: 1792709
uuucugggaacuaugugac

SEQ ID NO: 1792711 - RNA, 19 nt, Artificial Sequence
  Description of Artificial Sequence: Synthetic oligonucleotide
  Sense strand starting at position 3679 of SEQ ID NO: 1563064
cugagcuuagcaggagaau

SEQ ID NO: 1792712 - RNA, 19 nt, Artificial Sequence
  Description of Artificial Sequence: Synthetic oligonucleotide
  Antisense strand to SEQ ID NO: 1792711
auucuccugcuaagcucag

SEQ ID NO: 1792713 - RNA, 19 nt, Artificial Sequence
  Description of Artificial Sequence: Synthetic oligonucleotide
  Sense strand starting at position 3808 of SEQ ID NO: 1563064
augagaaugcccugugacu

SEQ ID NO: 1792714 - RNA, 19 nt, Artificial Sequence
  Description of Artificial Sequence: Synthetic oligonucleotide
  Antisense strand to SEQ ID NO: 1792713
agucacagggcauucucau

SEQ ID NO: 1792715 - RNA, 19 nt, Artificial Sequence
  Description of Artificial Sequence: Synthetic oligonucleotide
  Sense strand starting at position 3810 of SEQ ID NO: 1563064
gagaaugcccugugacuau

SEQ ID NO: 1792716 - RNA, 19 nt, Artificial Sequence
  Description of Artificial Sequence: Synthetic oligonucleotide
  Antisense strand to SEQ ID NO: 1792715
auagucacagggcauucuc

SEQ ID NO: 1792717 - RNA, 19 nt, Artificial Sequence
  Description of Artificial Sequence: Synthetic oligonucleotide
  Sense strand starting at position 3957 of SEQ ID NO: 1563064
accuacgaaugcuuguaaa

SEQ ID NO: 1792718 - RNA, 19 nt, Artificial Sequence
  Description of Artificial Sequence: Synthetic oligonucleotide
  Antisense strand to SEQ ID NO: 1792717
uuuacaagcauucguaggu

SEQ ID NO: 1792719 - RNA, 19 nt, Artificial Sequence
  Description of Artificial Sequence: Synthetic oligonucleotide
  Sense strand starting at position 3979 of SEQ ID NO: 1563064
ccacaacacuuguugucau

SEQ ID NO: 1792720 - RNA, 19 nt, Artificial Sequence
  Description of Artificial Sequence: Synthetic oligonucleotide
  Antisense strand to SEQ ID NO: 1792719
augacaacaaguguugugg

SEQ ID NO: 1792721 - RNA, 19 nt, Artificial Sequence
  Description of Artificial Sequence: Synthetic oligonucleotide
  Sense strand starting at position 27 of SEQ ID NO: 1563065
cguccucucggccaaagaa

SEQ ID NO: 1792722 - RNA, 19 nt, Artificial Sequence
  Description of Artificial Sequence: Synthetic oligonucleotide
  Antisense strand to SEQ ID NO: 1792721
uucuuuggccgagaggacg

SEQ ID NO: 1792723 - RNA, 19 nt, Artificial Sequence
  Description of Artificial Sequence: Synthetic oligonucleotide
  Sense strand starting at position 111 of SEQ ID NO: 1563065
cuaaucgaagacugaguaa

SEQ ID NO: 1792724 - RNA, 19 nt, Artificial Sequence
  Description of Artificial Sequence: Synthetic oligonucleotide
  Antisense strand to SEQ ID NO: 1792723
uuacucagucuucgauuag

SEQ ID NO: 1792725 - RNA, 19 nt, Artificial Sequence
  Description of Artificial Sequence: Synthetic oligonucleotide
  Sense strand starting at position 238 of SEQ ID NO: 1563065
cauugcaaggucugcuuua

SEQ ID NO: 1792726 - RNA, 19 nt, Artificial Sequence
  Description of Artificial Sequence: Synthetic oligonucleotide
  Antisense strand to SEQ ID NO: 1792725
uaaagcagaccuugcaaug

SEQ ID NO: 1792727 - RNA, 19 nt, Artificial Sequence
  Description of Artificial Sequence: Synthetic oligonucleotide
  Sense strand starting at position 249 of SEQ ID NO: 1563065
cugcuuuacgaccagacuu

SEQ ID NO: 1792728 - RNA, 19 nt, Artificial Sequence
  Description of Artificial Sequence: Synthetic oligonucleotide
  Antisense strand to SEQ ID NO: 1792727
aagucuggucguaaagcag

SEQ ID NO: 1792729 - RNA, 19 nt, Artificial Sequence
  Description of Artificial Sequence: Synthetic oligonucleotide
  Sense strand starting at position 462 of SEQ ID NO: 1563065
accguuuagauacggagua

SEQ ID NO: 1792730 - RNA, 19 nt, Artificial Sequence
  Description of Artificial Sequence: Synthetic oligonucleotide
  Antisense strand to SEQ ID NO: 1792729
uacuccguaucuaaacggu

SEQ ID NO: 1792731 - RNA, 19 nt, Artificial Sequence
  Description of Artificial Sequence: Synthetic oligonucleotide
  Sense strand starting at position 602 of SEQ ID NO: 1563065
ccagauuucugguggucaa

SEQ ID NO: 1792732 - RNA, 19 nt, Artificial Sequence
  Description of Artificial Sequence: Synthetic oligonucleotide
  Antisense strand to SEQ ID NO: 1792731
uugaccaccagaaaucugg

SEQ ID NO: 1792733 - RNA, 19 nt, Artificial Sequence
  Description of Artificial Sequence: Synthetic oligonucleotide
  Sense strand starting at position 968 of SEQ ID NO: 1563065
ccuuccuuccucggauuua

SEQ ID NO: 1792734 - RNA, 19 nt, Artificial Sequence
  Description of Artificial Sequence: Synthetic oligonucleotide
  Antisense strand to SEQ ID NO: 1792733
uaaauccgaggaaggaagg

SEQ ID NO: 1792735 - RNA, 19 nt, Artificial Sequence
  Description of Artificial Sequence: Synthetic oligonucleotide
  Sense strand starting at position 969 of SEQ ID NO: 1563065
cuuccuuccucggauuuau

SEQ ID NO: 1792736 - RNA, 19 nt, Artificial Sequence
  Description of Artificial Sequence: Synthetic oligonucleotide
  Antisense strand to SEQ ID NO: 1792735
auaaauccgaggaaggaag

SEQ ID NO: 1792737 - RNA, 19 nt, Artificial Sequence
  Description of Artificial Sequence: Synthetic oligonucleotide
  Sense strand starting at position 1000 of SEQ ID NO: 1563065
ggaguuauguuucuuugga

SEQ ID NO: 1792738 - RNA, 19 nt, Artificial Sequence
  Description of Artificial Sequence: Synthetic oligonucleotide
  Antisense strand to SEQ ID NO: 1792737
uccaaagaaacauaacucc

SEQ ID NO: 1792739 - RNA, 19 nt, Artificial Sequence
  Description of Artificial Sequence: Synthetic oligonucleotide
  Sense strand starting at position 1001 of SEQ ID NO: 1563065
gaguuauguuucuuuggag

SEQ ID NO: 1792740 - RNA, 19 nt, Artificial Sequence
  Description of Artificial Sequence: Synthetic oligonucleotide
  Antisense strand to SEQ ID NO: 1792739
cuccaaagaaacauaacuc

SEQ ID NO: 1792741 - RNA, 19 nt, Artificial Sequence
  Description of Artificial Sequence: Synthetic oligonucleotide
  Sense strand starting at position 1002 of SEQ ID NO: 1563065
aguuauguuucuuuggaga

SEQ ID NO: 1792742 - RNA, 19 nt, Artificial Sequence
  Description of Artificial Sequence: Synthetic oligonucleotide
  Antisense strand to SEQ ID NO: 1792741
ucuccaaagaaacauaacu

SEQ ID NO: 1792743 - RNA, 19 nt, Artificial Sequence
  Description of Artificial Sequence: Synthetic oligonucleotide
  Sense strand starting at position 1005 of SEQ ID NO: 1563065
uauguuucuuuggagaaca

SEQ ID NO: 1792744 - RNA, 19 nt, Artificial Sequence
  Description of Artificial Sequence: Synthetic oligonucleotide
  Antisense strand to SEQ ID NO: 1792743
uguucuccaaagaaacaua

SEQ ID NO: 1792745 - RNA, 19 nt, Artificial Sequence
  Description of Artificial Sequence: Synthetic oligonucleotide
  Sense strand starting at position 1152 of SEQ ID NO: 1563065
cacagauggcgugagaaga

SEQ ID NO: 1792746 - RNA, 19 nt, Artificial Sequence
  Description of Artificial Sequence: Synthetic oligonucleotide
  Antisense strand to SEQ ID NO: 1792745
ucuucucacgccaucugug

SEQ ID NO: 1792747 - RNA, 19 nt, Artificial Sequence
  Description of Artificial Sequence: Synthetic oligonucleotide
  Sense strand starting at position 2428 of SEQ ID NO: 1563065
uuccgagcgccuugugauu

SEQ ID NO: 1792748 - RNA, 19 nt, Artificial Sequence
  Description of Artificial Sequence: Synthetic oligonucleotide
  Antisense strand to SEQ ID NO: 1792747
aaucacaaggcgcucggaa

SEQ ID NO: 1792749 - RNA, 19 nt, Artificial Sequence
  Description of Artificial Sequence: Synthetic oligonucleotide
  Sense strand starting at position 2454 of SEQ ID NO: 1563065
gggcucaacgucgaaagaa

SEQ ID NO: 1792750 - RNA, 19 nt, Artificial Sequence
  Description of Artificial Sequence: Synthetic oligonucleotide
  Antisense strand to SEQ ID NO: 1792749
uucuuucgacguugagccc

SEQ ID NO: 1792751 - RNA, 19 nt, Artificial Sequence
  Description of Artificial Sequence: Synthetic oligonucleotide
  Sense strand starting at position 2534 of SEQ ID NO: 1563065
ggcugacggccgugaaacu

SEQ ID NO: 1792752 - RNA, 19 nt, Artificial Sequence
  Description of Artificial Sequence: Synthetic oligonucleotide
  Antisense strand to SEQ ID NO: 1792751
aguuucacggccgucagcc

SEQ ID NO: 1792753 - RNA, 19 nt, Artificial Sequence
  Description of Artificial Sequence: Synthetic oligonucleotide
  Sense strand starting at position 3083 of SEQ ID NO: 1563065
uuugucauuccagacgguu

SEQ ID NO: 1792754 - RNA, 19 nt, Artificial Sequence
  Description of Artificial Sequence: Synthetic oligonucleotide
  Antisense strand to SEQ ID NO: 1792753
aaccgucuggaaugacaaa

SEQ ID NO: 1792755 - RNA, 19 nt, Artificial Sequence
  Description of Artificial Sequence: Synthetic oligonucleotide
  Sense strand starting at position 3143 of SEQ ID NO: 1563065
auccgaaaguuuccagcua

SEQ ID NO: 1792756 - RNA, 19 nt, Artificial Sequence
  Description of Artificial Sequence: Synthetic oligonucleotide
  Antisense strand to SEQ ID NO: 1792755
uagcuggaaacuuucggau

SEQ ID NO: 1792757 - RNA, 19 nt, Artificial Sequence
  Description of Artificial Sequence: Synthetic oligonucleotide
  Sense strand starting at position 3241 of SEQ ID NO: 1563065
ugcacuuucccugaaugca

SEQ ID NO: 1792758 - RNA, 19 nt, Artificial Sequence
  Description of Artificial Sequence: Synthetic oligonucleotide
  Antisense strand to SEQ ID NO: 1792757
ugcauucagggaaagugca

SEQ ID NO: 1792759 - RNA, 19 nt, Artificial Sequence
  Description of Artificial Sequence: Synthetic oligonucleotide
  Sense strand starting at position 3550 of SEQ ID NO: 1563065
aaauauagccgguguguua

SEQ ID NO: 1792760 - RNA, 19 nt, Artificial Sequence
  Description of Artificial Sequence: Synthetic oligonucleotide
  Antisense strand to SEQ ID NO: 1792759
uaacacaccggcuauauuu

SEQ ID NO: 1792761 - RNA, 19 nt, Artificial Sequence
  Description of Artificial Sequence: Synthetic oligonucleotide
  Sense strand starting at position 3605 of SEQ ID NO: 1563065
gcggugucugauuggguuu

SEQ ID NO: 1792762 - RNA, 19 nt, Artificial Sequence
  Description of Artificial Sequence: Synthetic oligonucleotide
  Antisense strand to SEQ ID NO: 1792761
aaacccaaucagacaccgc

SEQ ID NO: 1792763 - RNA, 19 nt, Artificial Sequence
  Description of Artificial Sequence: Synthetic oligonucleotide
  Sense strand starting at position 3606 of SEQ ID NO: 1563065
cggugucugauuggguuua

SEQ ID NO: 1792764 - RNA, 19 nt, Artificial Sequence
  Description of Artificial Sequence: Synthetic oligonucleotide
  Antisense strand to SEQ ID NO: 1792763
uaaacccaaucagacaccg

SEQ ID NO: 1792765 - RNA, 19 nt, Artificial Sequence
  Description of Artificial Sequence: Synthetic oligonucleotide
  Sense strand starting at position 3683 of SEQ ID NO: 1563065
aagggaugcugguauuugu

SEQ ID NO: 1792766 - RNA, 19 nt, Artificial Sequence
  Description of Artificial Sequence: Synthetic oligonucleotide
  Antisense strand to SEQ ID NO: 1792765
acaaauaccagcaucccuu

SEQ ID NO: 1792767 - RNA, 19 nt, Artificial Sequence
  Description of Artificial Sequence: Synthetic oligonucleotide
  Sense strand starting at position 3700 of SEQ ID NO: 1563065
guagucauugauuaaggca

SEQ ID NO: 1792768 - RNA, 19 nt, Artificial Sequence
  Description of Artificial Sequence: Synthetic oligonucleotide
  Antisense strand to SEQ ID NO: 1792767
ugccuuaaucaaugacuac

SEQ ID NO: 1792769 - RNA, 19 nt, Artificial Sequence
  Description of Artificial Sequence: Synthetic oligonucleotide
  Sense strand starting at position 3722 of SEQ ID NO: 1563065
auguaaauagguggguuua

SEQ ID NO: 1792770 - RNA, 19 nt, Artificial Sequence
  Description of Artificial Sequence: Synthetic oligonucleotide
  Antisense strand to SEQ ID NO: 1792769
uaaacccaccuauuuacau

SEQ ID NO: 1792771 - RNA, 19 nt, Artificial Sequence
  Description of Artificial Sequence: Synthetic oligonucleotide
  Sense strand starting at position 3724 of SEQ ID NO: 1563065
guaaauagguggguuuaca

SEQ ID NO: 1792772 - RNA, 19 nt, Artificial Sequence
  Description of Artificial Sequence: Synthetic oligonucleotide
  Antisense strand to SEQ ID NO: 1792771
uguaaacccaccuauuuac

SEQ ID NO: 1792773 - RNA, 19 nt, Artificial Sequence
  Description of Artificial Sequence: Synthetic oligonucleotide
  Sense strand starting at position 3757 of SEQ ID NO: 1563065
ccgacugugugaucuugau

SEQ ID NO: 1792774 - RNA, 19 nt, Artificial Sequence
  Description of Artificial Sequence: Synthetic oligonucleotide
  Antisense strand to SEQ ID NO: 1792773
aucaagaucacacagucgg

SEQ ID NO: 1792775 - RNA, 19 nt, Artificial Sequence
  Description of Artificial Sequence: Synthetic oligonucleotide
  Sense strand starting at position 3846 of SEQ ID NO: 1563065
gauuaaauaugaugcugua

SEQ ID NO: 1792776 - RNA, 19 nt, Artificial Sequence
  Description of Artificial Sequence: Synthetic oligonucleotide
  Antisense strand to SEQ ID NO: 1792775
uacagcaucauauuuaauc

SEQ ID NO: 1792777 - RNA, 19 nt, Artificial Sequence
  Description of Artificial Sequence: Synthetic oligonucleotide
  Sense strand starting at position 3862 of SEQ ID NO: 1563065
guauguaaagccuggcuca

SEQ ID NO: 1792778 - RNA, 19 nt, Artificial Sequence
  Description of Artificial Sequence: Synthetic oligonucleotide
  Antisense strand to SEQ ID NO: 1792777
ugagccaggcuuuacauac

SEQ ID NO: 1792779 - RNA, 19 nt, Artificial Sequence
  Description of Artificial Sequence: Synthetic oligonucleotide
  Sense strand starting at position 3863 of SEQ ID NO: 1563065
uauguaaagccuggcucaa

SEQ ID NO: 1792780 - RNA, 19 nt, Artificial Sequence
  Description of Artificial Sequence: Synthetic oligonucleotide
  Antisense strand to SEQ ID NO: 1792779
uugagccaggcuuuacaua

SEQ ID NO: 1792781 - RNA, 19 nt, Artificial Sequence
  Description of Artificial Sequence: Synthetic oligonucleotide
  Sense strand starting at position 3865 of SEQ ID NO: 1563065
uguaaagccuggcucaaau

SEQ ID NO: 1792782 - RNA, 19 nt, Artificial Sequence
  Description of Artificial Sequence: Synthetic oligonucleotide
  Antisense strand to SEQ ID NO: 1792781
auuugagccaggcuuuaca

SEQ ID NO: 1792783 - RNA, 19 nt, Artificial Sequence
  Description of Artificial Sequence: Synthetic oligonucleotide
  Sense strand starting at position 3874 of SEQ ID NO: 1563065
uggcucaaaucguugcuau

SEQ ID NO: 1792784 - RNA, 19 nt, Artificial Sequence
  Description of Artificial Sequence: Synthetic oligonucleotide
  Antisense strand to SEQ ID NO: 1792783
auagcaacgauuugagcca

SEQ ID NO: 1792785 - RNA, 19 nt, Artificial Sequence
  Description of Artificial Sequence: Synthetic oligonucleotide
  Sense strand starting at position 3875 of SEQ ID NO: 1563065
ggcucaaaucguugcuauu

SEQ ID NO: 1792786 - RNA, 19 nt, Artificial Sequence
  Description of Artificial Sequence: Synthetic oligonucleotide
  Antisense strand to SEQ ID NO: 1792785
aauagcaacgauuugagcc

SEQ ID NO: 1792787 - RNA, 19 nt, Artificial Sequence
  Description of Artificial Sequence: Synthetic oligonucleotide
  Sense strand starting at position 3884 of SEQ ID NO: 1563065
cguugcuauucuuaauuua

SEQ ID NO: 1792788 - RNA, 19 nt, Artificial Sequence
  Description of Artificial Sequence: Synthetic oligonucleotide
  Antisense strand to SEQ ID NO: 1792787
uaaauuaagaauagcaacg

SEQ ID NO: 1792789 - RNA, 19 nt, Artificial Sequence
  Description of Artificial Sequence: Synthetic oligonucleotide
  Sense strand starting at position 3903 of SEQ ID NO: 1563065
aagauuaguguuugggcca

SEQ ID NO: 1792790 - RNA, 19 nt, Artificial Sequence
  Description of Artificial Sequence: Synthetic oligonucleotide
  Antisense strand to SEQ ID NO: 1792789
uggcccaaacacuaaucuu

SEQ ID NO: 1792791 - RNA, 19 nt, Artificial Sequence
  Description of Artificial Sequence: Synthetic oligonucleotide
  Sense strand starting at position 3906 of SEQ ID NO: 1563065
auuaguguuugggccaaau

SEQ ID NO: 1792792 - RNA, 19 nt, Artificial Sequence
  Description of Artificial Sequence: Synthetic oligonucleotide
  Antisense strand to SEQ ID NO: 1792791
auuuggcccaaacacuaau

SEQ ID NO: 1792793 - RNA, 19 nt, Artificial Sequence
  Description of Artificial Sequence: Synthetic oligonucleotide
  Sense strand starting at position 3908 of SEQ ID NO: 1563065
uaguguuugggccaaauug

SEQ ID NO: 1792794 - RNA, 19 nt, Artificial Sequence
  Description of Artificial Sequence: Synthetic oligonucleotide
  Antisense strand to SEQ ID NO: 1792793
caauuuggcccaaacacua

SEQ ID NO: 1792795 - RNA, 19 nt, Artificial Sequence
  Description of Artificial Sequence: Synthetic oligonucleotide
  Sense strand starting at position 3940 of SEQ ID NO: 1563065
ugcauauccugggcugagu

SEQ ID NO: 1792796 - RNA, 19 nt, Artificial Sequence
  Description of Artificial Sequence: Synthetic oligonucleotide
  Antisense strand to SEQ ID NO: 1792795
acucagcccaggauaugca

SEQ ID NO: 1792797 - RNA, 19 nt, Artificial Sequence
  Description of Artificial Sequence: Synthetic oligonucleotide
  Sense strand starting at position 3976 of SEQ ID NO: 1563065
augugaaacuucugacaau

SEQ ID NO: 1792798 - RNA, 19 nt, Artificial Sequence
  Description of Artificial Sequence: Synthetic oligonucleotide
  Antisense strand to SEQ ID NO: 1792797
auugucagaaguuucacau

SEQ ID NO: 1792799 - RNA, 19 nt, Artificial Sequence
  Description of Artificial Sequence: Synthetic oligonucleotide
  Sense strand starting at position 3979 of SEQ ID NO: 1563065
ugaaacuucugacaauggu

SEQ ID NO: 1792800 - RNA, 19 nt, Artificial Sequence
  Description of Artificial Sequence: Synthetic oligonucleotide
  Antisense strand to SEQ ID NO: 1792799
accauugucagaaguuuca

SEQ ID NO: 1792801 - RNA, 19 nt, Artificial Sequence
  Description of Artificial Sequence: Synthetic oligonucleotide
  Sense strand starting at position 33 of SEQ ID NO: 1563066
auguguauguguuucaaga

SEQ ID NO: 1792802 - RNA, 19 nt, Artificial Sequence
  Description of Artificial Sequence: Synthetic oligonucleotide
  Antisense strand to SEQ ID NO: 1792801
ucuugaaacacauacacau

SEQ ID NO: 1792803 - RNA, 19 nt, Artificial Sequence
  Description of Artificial Sequence: Synthetic oligonucleotide
  Sense strand starting at position 338 of SEQ ID NO: 1563066
ugcccagcccagugauaau

SEQ ID NO: 1792804 - RNA, 19 nt, Artificial Sequence
  Description of Artificial Sequence: Synthetic oligonucleotide
  Antisense strand to SEQ ID NO: 1792803
auuaucacugggcugggca

SEQ ID NO: 1792805 - RNA, 19 nt, Artificial Sequence
  Description of Artificial Sequence: Synthetic oligonucleotide
  Sense strand starting at position 523 of SEQ ID NO: 1563066
gucacagaacugugaguau

SEQ ID NO: 1792806 - RNA, 19 nt, Artificial Sequence
  Description of Artificial Sequence: Synthetic oligonucleotide
  Antisense strand to SEQ ID NO: 1792805
auacucacaguucugugac

SEQ ID NO: 1792807 - RNA, 19 nt, Artificial Sequence
  Description of Artificial Sequence: Synthetic oligonucleotide
  Sense strand starting at position 713 of SEQ ID NO: 1563066
uugagguugggucgagaaa

SEQ ID NO: 1792808 - RNA, 19 nt, Artificial Sequence
  Description of Artificial Sequence: Synthetic oligonucleotide
  Antisense strand to SEQ ID NO: 1792807
uuucucgacccaaccucaa

SEQ ID NO: 1792809 - RNA, 19 nt, Artificial Sequence
  Description of Artificial Sequence: Synthetic oligonucleotide
  Sense strand starting at position 1069 of SEQ ID NO: 1563066
uuaccuacuggcugucaua

SEQ ID NO: 1792810 - RNA, 19 nt, Artificial Sequence
  Description of Artificial Sequence: Synthetic oligonucleotide
  Antisense strand to SEQ ID NO: 1792809
uaugacagccaguagguaa

SEQ ID NO: 1792811 - RNA, 19 nt, Artificial Sequence
  Description of Artificial Sequence: Synthetic oligonucleotide
  Sense strand starting at position 1695 of SEQ ID NO: 1563066
aagugacuugggugaguua

SEQ ID NO: 1792812 - RNA, 19 nt, Artificial Sequence
  Description of Artificial Sequence: Synthetic oligonucleotide
  Antisense strand to SEQ ID NO: 1792811
uaacucacccaagucacuu

SEQ ID NO: 1792813 - RNA, 19 nt, Artificial Sequence
  Description of Artificial Sequence: Synthetic oligonucleotide
  Sense strand starting at position 1810 of SEQ ID NO: 1563066
ucuccuugucccgguaaga

SEQ ID NO: 1792814 - RNA, 19 nt, Artificial Sequence
  Description of Artificial Sequence: Synthetic oligonucleotide
  Antisense strand to SEQ ID NO: 1792813
ucuuaccgggacaaggaga

SEQ ID NO: 1792815 - RNA, 19 nt, Artificial Sequence
  Description of Artificial Sequence: Synthetic oligonucleotide
  Sense strand starting at position 1821 of SEQ ID NO: 1563066
cgguaagacucuuccuguu

SEQ ID NO: 1792816 - RNA, 19 nt, Artificial Sequence
  Description of Artificial Sequence: Synthetic oligonucleotide
  Antisense strand to SEQ ID NO: 1792815
aacaggaagagucuuaccg

SEQ ID NO: 1792817 - RNA, 19 nt, Artificial Sequence
  Description of Artificial Sequence: Synthetic oligonucleotide
  Sense strand starting at position 1823 of SEQ ID NO: 1563066
guaagacucuuccuguuug

SEQ ID NO: 1792818 - RNA, 19 nt, Artificial Sequence
  Description of Artificial Sequence: Synthetic oligonucleotide
  Antisense strand to SEQ ID NO: 1792817
caaacaggaagagucuuac

SEQ ID NO: 1792819 - RNA, 19 nt, Artificial Sequence
  Description of Artificial Sequence: Synthetic oligonucleotide
  Sense strand starting at position 1827 of SEQ ID NO: 1563066
gacucuuccuguuugaugu

SEQ ID NO: 1792820 - RNA, 19 nt, Artificial Sequence
  Description of Artificial Sequence: Synthetic oligonucleotide
  Antisense strand to SEQ ID NO: 1792819
acaucaaacaggaagaguc

SEQ ID NO: 1792821 - RNA, 19 nt, Artificial Sequence
  Description of Artificial Sequence: Synthetic oligonucleotide
  Sense strand starting at position 2001 of SEQ ID NO: 1563066
cacagauguagucacgagu

SEQ ID NO: 1792822 - RNA, 19 nt, Artificial Sequence
  Description of Artificial Sequence: Synthetic oligonucleotide
  Antisense strand to SEQ ID NO: 1792821
acucgugacuacaucugug

SEQ ID NO: 1792823 - RNA, 19 nt, Artificial Sequence
  Description of Artificial Sequence: Synthetic oligonucleotide
  Sense strand starting at position 2033 of SEQ ID NO: 1563066
ccgucucugccauaaauuu

SEQ ID NO: 1792824 - RNA, 19 nt, Artificial Sequence
  Description of Artificial Sequence: Synthetic oligonucleotide
  Antisense strand to SEQ ID NO: 1792823
aaauuuauggcagagacgg

SEQ ID NO: 1792825 - RNA, 19 nt, Artificial Sequence
  Description of Artificial Sequence: Synthetic oligonucleotide
  Sense strand starting at position 2047 of SEQ ID NO: 1563066
aauuuacugugugagccaa

SEQ ID NO: 1792826 - RNA, 19 nt, Artificial Sequence
  Description of Artificial Sequence: Synthetic oligonucleotide
  Antisense strand to SEQ ID NO: 1792825
uuggcucacacaguaaauu

SEQ ID NO: 1792827 - RNA, 19 nt, Artificial Sequence
  Description of Artificial Sequence: Synthetic oligonucleotide
  Sense strand starting at position 2142 of SEQ ID NO: 1563066
gucacagucuccuuugaga

SEQ ID NO: 1792828 - RNA, 19 nt, Artificial Sequence
  Description of Artificial Sequence: Synthetic oligonucleotide
  Antisense strand to SEQ ID NO: 1792827
ucucaaaggagacugugac

SEQ ID NO: 1792829 - RNA, 19 nt, Artificial Sequence
  Description of Artificial Sequence: Synthetic oligonucleotide
  Sense strand starting at position 2173 of SEQ ID NO: 1563066
ccaugagccuuucugaaga

SEQ ID NO: 1792830 - RNA, 19 nt, Artificial Sequence
  Description of Artificial Sequence: Synthetic oligonucleotide
  Antisense strand to SEQ ID NO: 1792829
ucuucagaaaggcucaugg

SEQ ID NO: 1792831 - RNA, 19 nt, Artificial Sequence
  Description of Artificial Sequence: Synthetic oligonucleotide
  Sense strand starting at position 2216 of SEQ ID NO: 1563066
uuauaaccucagggaguuu

SEQ ID NO: 1792832 - RNA, 19 nt, Artificial Sequence
  Description of Artificial Sequence: Synthetic oligonucleotide
  Antisense strand to SEQ ID NO: 1792831
aaacucccugagguuauaa

SEQ ID NO: 1792833 - RNA, 19 nt, Artificial Sequence
  Description of Artificial Sequence: Synthetic oligonucleotide
  Sense strand starting at position 2362 of SEQ ID NO: 1563066
gauaccuaucuauggguua

SEQ ID NO: 1792834 - RNA, 19 nt, Artificial Sequence
  Description of Artificial Sequence: Synthetic oligonucleotide
  Antisense strand to SEQ ID NO: 1792833
uaacccauagauagguauc

SEQ ID NO: 1792835 - RNA, 19 nt, Artificial Sequence
  Description of Artificial Sequence: Synthetic oligonucleotide
  Sense strand starting at position 2365 of SEQ ID NO: 1563066
accuaucuauggguuauga

SEQ ID NO: 1792836 - RNA, 19 nt, Artificial Sequence
  Description of Artificial Sequence: Synthetic oligonucleotide
  Antisense strand to SEQ ID NO: 1792835
ucauaacccauagauaggu

SEQ ID NO: 1792837 - RNA, 19 nt, Artificial Sequence
  Description of Artificial Sequence: Synthetic oligonucleotide
  Sense strand starting at position 2417 of SEQ ID NO: 1563066
uaaccauggccuuaguagu

SEQ ID NO: 1792838 - RNA, 19 nt, Artificial Sequence
  Description of Artificial Sequence: Synthetic oligonucleotide
  Antisense strand to SEQ ID NO: 1792837
acuacuaaggccaugguua

SEQ ID NO: 1792839 - RNA, 19 nt, Artificial Sequence
  Description of Artificial Sequence: Synthetic oligonucleotide
  Sense strand starting at position 2441 of SEQ ID NO: 1563066
uacugugggugcuuaagua

SEQ ID NO: 1792840 - RNA, 19 nt, Artificial Sequence
  Description of Artificial Sequence: Synthetic oligonucleotide
  Antisense strand to SEQ ID NO: 1792839
uacuuaagcacccacagua

SEQ ID NO: 1792841 - RNA, 19 nt, Artificial Sequence
  Description of Artificial Sequence: Synthetic oligonucleotide
  Sense strand starting at position 2445 of SEQ ID NO: 1563066
gugggugcuuaaguacuua

SEQ ID NO: 1792842 - RNA, 19 nt, Artificial Sequence
  Description of Artificial Sequence: Synthetic oligonucleotide
  Antisense strand to SEQ ID NO: 1792841
uaaguacuuaagcacccac

SEQ ID NO: 1792843 - RNA, 19 nt, Artificial Sequence
  Description of Artificial Sequence: Synthetic oligonucleotide
  Sense strand starting at position 2499 of SEQ ID NO: 1563066
guaaauugacugcacaaau

SEQ ID NO: 1792844 - RNA, 19 nt, Artificial Sequence
  Description of Artificial Sequence: Synthetic oligonucleotide
  Antisense strand to SEQ ID NO: 1792843
auuugugcagucaauuuac

SEQ ID NO: 1792845 - RNA, 19 nt, Artificial Sequence
  Description of Artificial Sequence: Synthetic oligonucleotide
  Sense strand starting at position 2808 of SEQ ID NO: 1563066
agaguaaggcugugucuua

SEQ ID NO: 1792846 - RNA, 19 nt, Artificial Sequence
  Description of Artificial Sequence: Synthetic oligonucleotide
  Antisense strand to SEQ ID NO: 1792845
uaagacacagccuuacucu

SEQ ID NO: 1792847 - RNA, 19 nt, Artificial Sequence
  Description of Artificial Sequence: Synthetic oligonucleotide
  Sense strand starting at position 2809 of SEQ ID NO: 1563066
gaguaaggcugugucuuaa

SEQ ID NO: 1792848 - RNA, 19 nt, Artificial Sequence
  Description of Artificial Sequence: Synthetic oligonucleotide
  Antisense strand to SEQ ID NO: 1792847
uuaagacacagccuuacuc

SEQ ID NO: 1792849 - RNA, 19 nt, Artificial Sequence
  Description of Artificial Sequence: Synthetic oligonucleotide
  Sense strand starting at position 2895 of SEQ ID NO: 1563066
guccgaugucuuuacugua

SEQ ID NO: 1792850 - RNA, 19 nt, Artificial Sequence
  Description of Artificial Sequence: Synthetic oligonucleotide
  Antisense strand to SEQ ID NO: 1792849
uacaguaaagacaucggac

SEQ ID NO: 1792851 - RNA, 19 nt, Artificial Sequence
  Description of Artificial Sequence: Synthetic oligonucleotide
  Sense strand starting at position 2900 of SEQ ID NO: 1563066
augucuuuacuguacaaua

SEQ ID NO: 1792852 - RNA, 19 nt, Artificial Sequence
  Description of Artificial Sequence: Synthetic oligonucleotide
  Antisense strand to SEQ ID NO: 1792851
uauuguacaguaaagacau

SEQ ID NO: 1792853 - RNA, 19 nt, Artificial Sequence
  Description of Artificial Sequence: Synthetic oligonucleotide
  Sense strand starting at position 2902 of SEQ ID NO: 1563066
gucuuuacuguacaauaua

SEQ ID NO: 1792854 - RNA, 19 nt, Artificial Sequence
  Description of Artificial Sequence: Synthetic oligonucleotide
  Antisense strand to SEQ ID NO: 1792853
uauauuguacaguaaagac

SEQ ID NO: 1792855 - RNA, 19 nt, Artificial Sequence
  Description of Artificial Sequence: Synthetic oligonucleotide
  Sense strand starting at position 2929 of SEQ ID NO: 1563066
uuugaaguguuuccacaac

SEQ ID NO: 1792856 - RNA, 19 nt, Artificial Sequence
  Description of Artificial Sequence: Synthetic oligonucleotide
  Antisense strand to SEQ ID NO: 1792855
guuguggaaacacuucaaa

SEQ ID NO: 1792857 - RNA, 19 nt, Artificial Sequence
  Description of Artificial Sequence: Synthetic oligonucleotide
  Sense strand starting at position 2935 of SEQ ID NO: 1563066
guguuuccacaacacucau

SEQ ID NO: 1792858 - RNA, 19 nt, Artificial Sequence
  Description of Artificial Sequence: Synthetic oligonucleotide
  Antisense strand to SEQ ID NO: 1792857
augaguguuguggaaacac

SEQ ID NO: 1792859 - RNA, 19 nt, Artificial Sequence
  Description of Artificial Sequence: Synthetic oligonucleotide
  Sense strand starting at position 3034 of SEQ ID NO: 1563066
acuauugucuaacccagua

SEQ ID NO: 1792860 - RNA, 19 nt, Artificial Sequence
  Description of Artificial Sequence: Synthetic oligonucleotide
  Antisense strand to SEQ ID NO: 1792859
uacuggguuagacaauagu

SEQ ID NO: 1792861 - RNA, 19 nt, Artificial Sequence
  Description of Artificial Sequence: Synthetic oligonucleotide
  Sense strand starting at position 3174 of SEQ ID NO: 1563066
accuuauugcuuggucaua

SEQ ID NO: 1792862 - RNA, 19 nt, Artificial Sequence
  Description of Artificial Sequence: Synthetic oligonucleotide
  Antisense strand to SEQ ID NO: 1792861
uaugaccaagcaauaaggu

SEQ ID NO: 1792863 - RNA, 19 nt, Artificial Sequence
  Description of Artificial Sequence: Synthetic oligonucleotide
  Sense strand starting at position 3175 of SEQ ID NO: 1563066
ccuuauugcuuggucauau

SEQ ID NO: 1792864 - RNA, 19 nt, Artificial Sequence
  Description of Artificial Sequence: Synthetic oligonucleotide
  Antisense strand to SEQ ID NO: 1792863
auaugaccaagcaauaagg

SEQ ID NO: 1792865 - RNA, 19 nt, Artificial Sequence
  Description of Artificial Sequence: Synthetic oligonucleotide
  Sense strand starting at position 3176 of SEQ ID NO: 1563066
cuuauugcuuggucauaug

SEQ ID NO: 1792866 - RNA, 19 nt, Artificial Sequence
  Description of Artificial Sequence: Synthetic oligonucleotide
  Antisense strand to SEQ ID NO: 1792865
cauaugaccaagcaauaag

SEQ ID NO: 1792867 - RNA, 19 nt, Artificial Sequence
  Description of Artificial Sequence: Synthetic oligonucleotide
  Sense strand starting at position 3183 of SEQ ID NO: 1563066
cuuggucauauggaguuau

SEQ ID NO: 1792868 - RNA, 19 nt, Artificial Sequence
  Description of Artificial Sequence: Synthetic oligonucleotide
  Antisense strand to SEQ ID NO: 1792867
auaacuccauaugaccaag

SEQ ID NO: 1792869 - RNA, 19 nt, Artificial Sequence
  Description of Artificial Sequence: Synthetic oligonucleotide
  Sense strand starting at position 3187 of SEQ ID NO: 1563066
gucauauggaguuauguuu

SEQ ID NO: 1792870 - RNA, 19 nt, Artificial Sequence
  Description of Artificial Sequence: Synthetic oligonucleotide
  Antisense strand to SEQ ID NO: 1792869
aaacauaacuccauaugac

SEQ ID NO: 1792871 - RNA, 19 nt, Artificial Sequence
  Description of Artificial Sequence: Synthetic oligonucleotide
  Sense strand starting at position 3193 of SEQ ID NO: 1563066
uggaguuauguuuagcaug

SEQ ID NO: 1792872 - RNA, 19 nt, Artificial Sequence
  Description of Artificial Sequence: Synthetic oligonucleotide
  Antisense strand to SEQ ID NO: 1792871
caugcuaaacauaacucca

SEQ ID NO: 1792873 - RNA, 19 nt, Artificial Sequence
  Description of Artificial Sequence: Synthetic oligonucleotide
  Sense strand starting at position 3195 of SEQ ID NO: 1563066
gaguuauguuuagcaugaa

SEQ ID NO: 1792874 - RNA, 19 nt, Artificial Sequence
  Description of Artificial Sequence: Synthetic oligonucleotide
  Antisense strand to SEQ ID NO: 1792873
uucaugcuaaacauaacuc

SEQ ID NO: 1792875 - RNA, 19 nt, Artificial Sequence
  Description of Artificial Sequence: Synthetic oligonucleotide
  Sense strand starting at position 3198 of SEQ ID NO: 1563066
uuauguuuagcaugaacuu

SEQ ID NO: 1792876 - RNA, 19 nt, Artificial Sequence
  Description of Artificial Sequence: Synthetic oligonucleotide
  Antisense strand to SEQ ID NO: 1792875
aaguucaugcuaaacauaa

SEQ ID NO: 1792877 - RNA, 19 nt, Artificial Sequence
  Description of Artificial Sequence: Synthetic oligonucleotide
  Sense strand starting at position 3281 of SEQ ID NO: 1563066
caggcugguccuugaacuu

SEQ ID NO: 1792878 - RNA, 19 nt, Artificial Sequence
  Description of Artificial Sequence: Synthetic oligonucleotide
  Antisense strand to SEQ ID NO: 1792877
aaguucaaggaccagccug

SEQ ID NO: 1792879 - RNA, 19 nt, Artificial Sequence
  Description of Artificial Sequence: Synthetic oligonucleotide
  Sense strand starting at position 3863 of SEQ ID NO: 1563066
auggaaguauauggauuua

SEQ ID NO: 1792880 - RNA, 19 nt, Artificial Sequence
  Description of Artificial Sequence: Synthetic oligonucleotide
  Antisense strand to SEQ ID NO: 1792879
uaaauccauauacuuccau

SEQ ID NO: 1792881 - RNA, 19 nt, Artificial Sequence
  Description of Artificial Sequence: Synthetic oligonucleotide
  Sense strand starting at position 81 of SEQ ID NO: 1563067
cuuggagagcauugauuac

SEQ ID NO: 1792882 - RNA, 19 nt, Artificial Sequence
  Description of Artificial Sequence: Synthetic oligonucleotide
  Antisense strand to SEQ ID NO: 1792881
guaaucaaugcucuccaag

SEQ ID NO: 1792883 - RNA, 19 nt, Artificial Sequence
  Description of Artificial Sequence: Synthetic oligonucleotide
  Sense strand starting at position 158 of SEQ ID NO: 1563067
acaagcuuucgugagguuu

SEQ ID NO: 1792884 - RNA, 19 nt, Artificial Sequence
  Description of Artificial Sequence: Synthetic oligonucleotide
  Antisense strand to SEQ ID NO: 1792883
aaaccucacgaaagcuugu

SEQ ID NO: 1792885 - RNA, 19 nt, Artificial Sequence
  Description of Artificial Sequence: Synthetic oligonucleotide
  Sense strand starting at position 162 of SEQ ID NO: 1563067
gcuuucgugagguuucgca

SEQ ID NO: 1792886 - RNA, 19 nt, Artificial Sequence
  Description of Artificial Sequence: Synthetic oligonucleotide
  Antisense strand to SEQ ID NO: 1792885
ugcgaaaccucacgaaagc

SEQ ID NO: 1792887 - RNA, 19 nt, Artificial Sequence
  Description of Artificial Sequence: Synthetic oligonucleotide
  Sense strand starting at position 170 of SEQ ID NO: 1563067
gagguuucgcaagacacua

SEQ ID NO: 1792888 - RNA, 19 nt, Artificial Sequence
  Description of Artificial Sequence: Synthetic oligonucleotide
  Antisense strand to SEQ ID NO: 1792887
uagugucuugcgaaaccuc

SEQ ID NO: 1792889 - RNA, 19 nt, Artificial Sequence
  Description of Artificial Sequence: Synthetic oligonucleotide
  Sense strand starting at position 175 of SEQ ID NO: 1563067
uucgcaagacacuaagaau

SEQ ID NO: 1792890 - RNA, 19 nt, Artificial Sequence
  Description of Artificial Sequence: Synthetic oligonucleotide
  Antisense strand to SEQ ID NO: 1792889
auucuuagugucuugcgaa

SEQ ID NO: 1792891 - RNA, 19 nt, Artificial Sequence
  Description of Artificial Sequence: Synthetic oligonucleotide
  Sense strand starting at position 320 of SEQ ID NO: 1563067
aaccauccuccggagaagu

SEQ ID NO: 1792892 - RNA, 19 nt, Artificial Sequence
  Description of Artificial Sequence: Synthetic oligonucleotide
  Antisense strand to SEQ ID NO: 1792891
acuucuccggaggaugguu

SEQ ID NO: 1792893 - RNA, 19 nt, Artificial Sequence
  Description of Artificial Sequence: Synthetic oligonucleotide
  Sense strand starting at position 331 of SEQ ID NO: 1563067
ggagaaguguggcuguuug

SEQ ID NO: 1792894 - RNA, 19 nt, Artificial Sequence
  Description of Artificial Sequence: Synthetic oligonucleotide
  Antisense strand to SEQ ID NO: 1792893
caaacagccacacuucucc

SEQ ID NO: 1792895 - RNA, 19 nt, Artificial Sequence
  Description of Artificial Sequence: Synthetic oligonucleotide
  Sense strand starting at position 341 of SEQ ID NO: 1563067
ggcuguuugggugaaggca

SEQ ID NO: 1792896 - RNA, 19 nt, Artificial Sequence
  Description of Artificial Sequence: Synthetic oligonucleotide
  Antisense strand to SEQ ID NO: 1792895
ugccuucacccaaacagcc

SEQ ID NO: 1792897 - RNA, 19 nt, Artificial Sequence
  Description of Artificial Sequence: Synthetic oligonucleotide
  Sense strand starting at position 373 of SEQ ID NO: 1563067
gguguuggugcccaagaau

SEQ ID NO: 1792898 - RNA, 19 nt, Artificial Sequence
  Description of Artificial Sequence: Synthetic oligonucleotide
  Antisense strand to SEQ ID NO: 1792897
auucuugggcaccaacacc

SEQ ID NO: 1792899 - RNA, 19 nt, Artificial Sequence
  Description of Artificial Sequence: Synthetic oligonucleotide
  Sense strand starting at position 413 of SEQ ID NO: 1563067
ccaagcgauuuccagggau

SEQ ID NO: 1792900 - RNA, 19 nt, Artificial Sequence
  Description of Artificial Sequence: Synthetic oligonucleotide
  Antisense strand to SEQ ID NO: 1792899
aucccuggaaaucgcuugg

SEQ ID NO: 1792901 - RNA, 19 nt, Artificial Sequence
  Description of Artificial Sequence: Synthetic oligonucleotide
  Sense strand starting at position 562 of SEQ ID NO: 1563067
auguguauguguuucaaga

SEQ ID NO: 1792902 - RNA, 19 nt, Artificial Sequence
  Description of Artificial Sequence: Synthetic oligonucleotide
  Antisense strand to SEQ ID NO: 1792901
ucuugaaacacauacacau

SEQ ID NO: 1792903 - RNA, 19 nt, Artificial Sequence
  Description of Artificial Sequence: Synthetic oligonucleotide
  Sense strand starting at position 1052 of SEQ ID NO: 1563067
gucacagaacugugaguau

SEQ ID NO: 1792904 - RNA, 19 nt, Artificial Sequence
  Description of Artificial Sequence: Synthetic oligonucleotide
  Antisense strand to SEQ ID NO: 1792903
auacucacaguucugugac

SEQ ID NO: 1792905 - RNA, 19 nt, Artificial Sequence
  Description of Artificial Sequence: Synthetic oligonucleotide
  Sense strand starting at position 1242 of SEQ ID NO: 1563067
uugagguugggucgagaaa

SEQ ID NO: 1792906 - RNA, 19 nt, Artificial Sequence
  Description of Artificial Sequence: Synthetic oligonucleotide
  Antisense strand to SEQ ID NO: 1792905
uuucucgacccaaccucaa

SEQ ID NO: 1792907 - RNA, 19 nt, Artificial Sequence
  Description of Artificial Sequence: Synthetic oligonucleotide
  Sense strand starting at position 1598 of SEQ ID NO: 1563067
uuaccuacuggcugucaua

SEQ ID NO: 1792908 - RNA, 19 nt, Artificial Sequence
  Description of Artificial Sequence: Synthetic oligonucleotide
  Antisense strand to SEQ ID NO: 1792907
uaugacagccaguagguaa

SEQ ID NO: 1792909 - RNA, 19 nt, Artificial Sequence
  Description of Artificial Sequence: Synthetic oligonucleotide
  Sense strand starting at position 2224 of SEQ ID NO: 1563067
aagugacuugggugaguua

SEQ ID NO: 1792910 - RNA, 19 nt, Artificial Sequence
  Description of Artificial Sequence: Synthetic oligonucleotide
  Antisense strand to SEQ ID NO: 1792909
uaacucacccaagucacuu

SEQ ID NO: 1792911 - RNA, 19 nt, Artificial Sequence
  Description of Artificial Sequence: Synthetic oligonucleotide
  Sense strand starting at position 2352 of SEQ ID NO: 1563067
guaagacucuuccuguuug

SEQ ID NO: 1792912 - RNA, 19 nt, Artificial Sequence
  Description of Artificial Sequence: Synthetic oligonucleotide
  Antisense strand to SEQ ID NO: 1792911
caaacaggaagagucuuac

SEQ ID NO: 1792913 - RNA, 19 nt, Artificial Sequence
  Description of Artificial Sequence: Synthetic oligonucleotide
  Sense strand starting at position 2356 of SEQ ID NO: 1563067
gacucuuccuguuugaugu

SEQ ID NO: 1792914 - RNA, 19 nt, Artificial Sequence
  Description of Artificial Sequence: Synthetic oligonucleotide
  Antisense strand to SEQ ID NO: 1792913
acaucaaacaggaagaguc

SEQ ID NO: 1792915 - RNA, 19 nt, Artificial Sequence
  Description of Artificial Sequence: Synthetic oligonucleotide
  Sense strand starting at position 2530 of SEQ ID NO: 1563067
cacagauguagucacgagu

SEQ ID NO: 1792916 - RNA, 19 nt, Artificial Sequence
  Description of Artificial Sequence: Synthetic oligonucleotide
  Antisense strand to SEQ ID NO: 1792915
acucgugacuacaucugug

SEQ ID NO: 1792917 - RNA, 19 nt, Artificial Sequence
  Description of Artificial Sequence: Synthetic oligonucleotide
  Sense strand starting at position 2562 of SEQ ID NO: 1563067
ccgucucugccauaaauuu

SEQ ID NO: 1792918 - RNA, 19 nt, Artificial Sequence
  Description of Artificial Sequence: Synthetic oligonucleotide
  Antisense strand to SEQ ID NO: 1792917
aaauuuauggcagagacgg

SEQ ID NO: 1792919 - RNA, 19 nt, Artificial Sequence
  Description of Artificial Sequence: Synthetic oligonucleotide
  Sense strand starting at position 2671 of SEQ ID NO: 1563067
gucacagucuccuuugaga

SEQ ID NO: 1792920 - RNA, 19 nt, Artificial Sequence
  Description of Artificial Sequence: Synthetic oligonucleotide
  Antisense strand to SEQ ID NO: 1792919
ucucaaaggagacugugac

SEQ ID NO: 1792921 - RNA, 19 nt, Artificial Sequence
  Description of Artificial Sequence: Synthetic oligonucleotide
  Sense strand starting at position 2702 of SEQ ID NO: 1563067
ccaugagccuuucugaaga

SEQ ID NO: 1792922 - RNA, 19 nt, Artificial Sequence
  Description of Artificial Sequence: Synthetic oligonucleotide
  Antisense strand to SEQ ID NO: 1792921
ucuucagaaaggcucaugg

SEQ ID NO: 1792923 - RNA, 19 nt, Artificial Sequence
  Description of Artificial Sequence: Synthetic oligonucleotide
  Sense strand starting at position 2745 of SEQ ID NO: 1563067
uuauaaccucagggaguuu

SEQ ID NO: 1792924 - RNA, 19 nt, Artificial Sequence
  Description of Artificial Sequence: Synthetic oligonucleotide
  Antisense strand to SEQ ID NO: 1792923
aaacucccugagguuauaa

SEQ ID NO: 1792925 - RNA, 19 nt, Artificial Sequence
  Description of Artificial Sequence: Synthetic oligonucleotide
  Sense strand starting at position 2891 of SEQ ID NO: 1563067
gauaccuaucuauggguua

SEQ ID NO: 1792926 - RNA, 19 nt, Artificial Sequence
  Description of Artificial Sequence: Synthetic oligonucleotide
  Antisense strand to SEQ ID NO: 1792925
uaacccauagauagguauc

SEQ ID NO: 1792927 - RNA, 19 nt, Artificial Sequence
  Description of Artificial Sequence: Synthetic oligonucleotide
  Sense strand starting at position 2894 of SEQ ID NO: 1563067
accuaucuauggguuauga

SEQ ID NO: 1792928 - RNA, 19 nt, Artificial Sequence
  Description of Artificial Sequence: Synthetic oligonucleotide
  Antisense strand to SEQ ID NO: 1792927
ucauaacccauagauaggu

SEQ ID NO: 1792929 - RNA, 19 nt, Artificial Sequence
  Description of Artificial Sequence: Synthetic oligonucleotide
  Sense strand starting at position 2946 of SEQ ID NO: 1563067
uaaccauggccuuaguagu

SEQ ID NO: 1792930 - RNA, 19 nt, Artificial Sequence
  Description of Artificial Sequence: Synthetic oligonucleotide
  Antisense strand to SEQ ID NO: 1792929
acuacuaaggccaugguua

SEQ ID NO: 1792931 - RNA, 19 nt, Artificial Sequence
  Description of Artificial Sequence: Synthetic oligonucleotide
  Sense strand starting at position 3028 of SEQ ID NO: 1563067
guaaauugacugcacaaau

SEQ ID NO: 1792932 - RNA, 19 nt, Artificial Sequence
  Description of Artificial Sequence: Synthetic oligonucleotide
  Antisense strand to SEQ ID NO: 1792931
auuugugcagucaauuuac

SEQ ID NO: 1792933 - RNA, 19 nt, Artificial Sequence
  Description of Artificial Sequence: Synthetic oligonucleotide
  Sense strand starting at position 3338 of SEQ ID NO: 1563067
gaguaaggcugugucuuaa

SEQ ID NO: 1792934 - RNA, 19 nt, Artificial Sequence
  Description of Artificial Sequence: Synthetic oligonucleotide
  Antisense strand to SEQ ID NO: 1792933
uuaagacacagccuuacuc

SEQ ID NO: 1792935 - RNA, 19 nt, Artificial Sequence
  Description of Artificial Sequence: Synthetic oligonucleotide
  Sense strand starting at position 3429 of SEQ ID NO: 1563067
augucuuuacuguacaaua

SEQ ID NO: 1792936 - RNA, 19 nt, Artificial Sequence
  Description of Artificial Sequence: Synthetic oligonucleotide
  Antisense strand to SEQ ID NO: 1792935
uauuguacaguaaagacau

SEQ ID NO: 1792937 - RNA, 19 nt, Artificial Sequence
  Description of Artificial Sequence: Synthetic oligonucleotide
  Sense strand starting at position 3431 of SEQ ID NO: 1563067
gucuuuacuguacaauaua

SEQ ID NO: 1792938 - RNA, 19 nt, Artificial Sequence
  Description of Artificial Sequence: Synthetic oligonucleotide
  Antisense strand to SEQ ID NO: 1792937
uauauuguacaguaaagac

SEQ ID NO: 1792939 - RNA, 19 nt, Artificial Sequence
  Description of Artificial Sequence: Synthetic oligonucleotide
  Sense strand starting at position 3458 of SEQ ID NO: 1563067
uuugaaguguuuccacaac

SEQ ID NO: 1792940 - RNA, 19 nt, Artificial Sequence
  Description of Artificial Sequence: Synthetic oligonucleotide
  Antisense strand to SEQ ID NO: 1792939
guuguggaaacacuucaaa

SEQ ID NO: 1792941 - RNA, 19 nt, Artificial Sequence
  Description of Artificial Sequence: Synthetic oligonucleotide
  Sense strand starting at position 3464 of SEQ ID NO: 1563067
guguuuccacaacacucau

SEQ ID NO: 1792942 - RNA, 19 nt, Artificial Sequence
  Description of Artificial Sequence: Synthetic oligonucleotide
  Antisense strand to SEQ ID NO: 1792941
augaguguuguggaaacac

SEQ ID NO: 1792943 - RNA, 19 nt, Artificial Sequence
  Description of Artificial Sequence: Synthetic oligonucleotide
  Sense strand starting at position 3563 of SEQ ID NO: 1563067
acuauugucuaacccagua

SEQ ID NO: 1792944 - RNA, 19 nt, Artificial Sequence
  Description of Artificial Sequence: Synthetic oligonucleotide
  Antisense strand to SEQ ID NO: 1792943
uacuggguuagacaauagu

SEQ ID NO: 1792945 - RNA, 19 nt, Artificial Sequence
  Description of Artificial Sequence: Synthetic oligonucleotide
  Sense strand starting at position 3703 of SEQ ID NO: 1563067
accuuauugcuuggucaua

SEQ ID NO: 1792946 - RNA, 19 nt, Artificial Sequence
  Description of Artificial Sequence: Synthetic oligonucleotide
  Antisense strand to SEQ ID NO: 1792945
uaugaccaagcaauaaggu

SEQ ID NO: 1792947 - RNA, 19 nt, Artificial Sequence
  Description of Artificial Sequence: Synthetic oligonucleotide
  Sense strand starting at position 3705 of SEQ ID NO: 1563067
cuuauugcuuggucauaug

SEQ ID NO: 1792948 - RNA, 19 nt, Artificial Sequence
  Description of Artificial Sequence: Synthetic oligonucleotide
  Antisense strand to SEQ ID NO: 1792947
cauaugaccaagcaauaag

SEQ ID NO: 1792949 - RNA, 19 nt, Artificial Sequence
  Description of Artificial Sequence: Synthetic oligonucleotide
  Sense strand starting at position 3712 of SEQ ID NO: 1563067
cuuggucauauggaguuau

SEQ ID NO: 1792950 - RNA, 19 nt, Artificial Sequence
  Description of Artificial Sequence: Synthetic oligonucleotide
  Antisense strand to SEQ ID NO: 1792949
auaacuccauaugaccaag

SEQ ID NO: 1792951 - RNA, 19 nt, Artificial Sequence
  Description of Artificial Sequence: Synthetic oligonucleotide
  Sense strand starting at position 3716 of SEQ ID NO: 1563067
gucauauggaguuauguuu

SEQ ID NO: 1792952 - RNA, 19 nt, Artificial Sequence
  Description of Artificial Sequence: Synthetic oligonucleotide
  Antisense strand to SEQ ID NO: 1792951
aaacauaacuccauaugac

SEQ ID NO: 1792953 - RNA, 19 nt, Artificial Sequence
  Description of Artificial Sequence: Synthetic oligonucleotide
  Sense strand starting at position 3722 of SEQ ID NO: 1563067
uggaguuauguuuagcaug

SEQ ID NO: 1792954 - RNA, 19 nt, Artificial Sequence
  Description of Artificial Sequence: Synthetic oligonucleotide
  Antisense strand to SEQ ID NO: 1792953
caugcuaaacauaacucca

SEQ ID NO: 1792955 - RNA, 19 nt, Artificial Sequence
  Description of Artificial Sequence: Synthetic oligonucleotide
  Sense strand starting at position 3724 of SEQ ID NO: 1563067
gaguuauguuuagcaugaa

SEQ ID NO: 1792956 - RNA, 19 nt, Artificial Sequence
  Description of Artificial Sequence: Synthetic oligonucleotide
  Antisense strand to SEQ ID NO: 1792955
uucaugcuaaacauaacuc

SEQ ID NO: 1792957 - RNA, 19 nt, Artificial Sequence
  Description of Artificial Sequence: Synthetic oligonucleotide
  Sense strand starting at position 3727 of SEQ ID NO: 1563067
uuauguuuagcaugaacuu

SEQ ID NO: 1792958 - RNA, 19 nt, Artificial Sequence
  Description of Artificial Sequence: Synthetic oligonucleotide
  Antisense strand to SEQ ID NO: 1792957
aaguucaugcuaaacauaa

SEQ ID NO: 1792959 - RNA, 19 nt, Artificial Sequence
  Description of Artificial Sequence: Synthetic oligonucleotide
  Sense strand starting at position 3810 of SEQ ID NO: 1563067
caggcugguccuugaacuu

SEQ ID NO: 1792960 - RNA, 19 nt, Artificial Sequence
  Description of Artificial Sequence: Synthetic oligonucleotide
  Antisense strand to SEQ ID NO: 1792959
aaguucaaggaccagccug

SEQ ID NO: 1792961 - RNA, 19 nt, Artificial Sequence
  Description of Artificial Sequence: Synthetic oligonucleotide
  Sense strand starting at position 202 of SEQ ID NO: 1563068
gguguaaggcaucauacag

SEQ ID NO: 1792962 - RNA, 19 nt, Artificial Sequence
  Description of Artificial Sequence: Synthetic oligonucleotide
  Antisense strand to SEQ ID NO: 1792961
cuguaugaugccuuacacc

SEQ ID NO: 1792963 - RNA, 19 nt, Artificial Sequence
  Description of Artificial Sequence: Synthetic oligonucleotide
  Sense strand starting at position 334 of SEQ ID NO: 1563068
acauuaacuguuggucaac

SEQ ID NO: 1792964 - RNA, 19 nt, Artificial Sequence
  Description of Artificial Sequence: Synthetic oligonucleotide
  Antisense strand to SEQ ID NO: 1792963
guugaccaacaguuaaugu

SEQ ID NO: 1792965 - RNA, 19 nt, Artificial Sequence
  Description of Artificial Sequence: Synthetic oligonucleotide
  Sense strand starting at position 700 of SEQ ID NO: 1563068
ccacucauucuacguuaua

SEQ ID NO: 1792966 - RNA, 19 nt, Artificial Sequence
  Description of Artificial Sequence: Synthetic oligonucleotide
  Antisense strand to SEQ ID NO: 1792965
uauaacguagaaugagugg

SEQ ID NO: 1792967 - RNA, 19 nt, Artificial Sequence
  Description of Artificial Sequence: Synthetic oligonucleotide
  Sense strand starting at position 703 of SEQ ID NO: 1563068
cucauucuacguuauagaa

SEQ ID NO: 1792968 - RNA, 19 nt, Artificial Sequence
  Description of Artificial Sequence: Synthetic oligonucleotide
  Antisense strand to SEQ ID NO: 1792967
uucuauaacguagaaugag

SEQ ID NO: 1792969 - RNA, 19 nt, Artificial Sequence
  Description of Artificial Sequence: Synthetic oligonucleotide
  Sense strand starting at position 887 of SEQ ID NO: 1563068
ggaccaauguguuagugaa

SEQ ID NO: 1792970 - RNA, 19 nt, Artificial Sequence
  Description of Artificial Sequence: Synthetic oligonucleotide
  Antisense strand to SEQ ID NO: 1792969
uucacuaacacauuggucc

SEQ ID NO: 1792971 - RNA, 19 nt, Artificial Sequence
  Description of Artificial Sequence: Synthetic oligonucleotide
  Sense strand starting at position 895 of SEQ ID NO: 1563068
guguuagugaaauaacuug

SEQ ID NO: 1792972 - RNA, 19 nt, Artificial Sequence
  Description of Artificial Sequence: Synthetic oligonucleotide
  Antisense strand to SEQ ID NO: 1792971
caaguuauuucacuaacac

SEQ ID NO: 1792973 - RNA, 19 nt, Artificial Sequence
  Description of Artificial Sequence: Synthetic oligonucleotide
  Sense strand starting at position 900 of SEQ ID NO: 1563068
agugaaauaacuugcgucu

SEQ ID NO: 1792974 - RNA, 19 nt, Artificial Sequence
  Description of Artificial Sequence: Synthetic oligonucleotide
  Antisense strand to SEQ ID NO: 1792973
agacgcaaguuauuucacu

SEQ ID NO: 1792975 - RNA, 19 nt, Artificial Sequence
  Description of Artificial Sequence: Synthetic oligonucleotide
  Sense strand starting at position 903 of SEQ ID NO: 1563068
gaaauaacuugcgucucca

SEQ ID NO: 1792976 - RNA, 19 nt, Artificial Sequence
  Description of Artificial Sequence: Synthetic oligonucleotide
  Antisense strand to SEQ ID NO: 1792975
uggagacgcaaguuauuuc

SEQ ID NO: 1792977 - RNA, 19 nt, Artificial Sequence
  Description of Artificial Sequence: Synthetic oligonucleotide
  Sense strand starting at position 1232 of SEQ ID NO: 1563068
agcuaugguagcuguauca

SEQ ID NO: 1792978 - RNA, 19 nt, Artificial Sequence
  Description of Artificial Sequence: Synthetic oligonucleotide
  Antisense strand to SEQ ID NO: 1792977
ugauacagcuaccauagcu

SEQ ID NO: 1792979 - RNA, 19 nt, Artificial Sequence
  Description of Artificial Sequence: Synthetic oligonucleotide
  Sense strand starting at position 1251 of SEQ ID NO: 1563068
ucuagugauggcgguuuaa

SEQ ID NO: 1792980 - RNA, 19 nt, Artificial Sequence
  Description of Artificial Sequence: Synthetic oligonucleotide
  Antisense strand to SEQ ID NO: 1792979
uuaaaccgccaucacuaga

SEQ ID NO: 1792981 - RNA, 19 nt, Artificial Sequence
  Description of Artificial Sequence: Synthetic oligonucleotide
  Sense strand starting at position 1263 of SEQ ID NO: 1563068
gguuuaacauucuccugag

SEQ ID NO: 1792982 - RNA, 19 nt, Artificial Sequence
  Description of Artificial Sequence: Synthetic oligonucleotide
  Antisense strand to SEQ ID NO: 1792981
cucaggagaauguuaaacc

SEQ ID NO: 1792983 - RNA, 19 nt, Artificial Sequence
  Description of Artificial Sequence: Synthetic oligonucleotide
  Sense strand starting at position 1264 of SEQ ID NO: 1563068
guuuaacauucuccugagu

SEQ ID NO: 1792984 - RNA, 19 nt, Artificial Sequence
  Description of Artificial Sequence: Synthetic oligonucleotide
  Antisense strand to SEQ ID NO: 1792983
acucaggagaauguuaaac

SEQ ID NO: 1792985 - RNA, 19 nt, Artificial Sequence
  Description of Artificial Sequence: Synthetic oligonucleotide
  Sense strand starting at position 1421 of SEQ ID NO: 1563068
cgggucugcugcuuccaaa

SEQ ID NO: 1792986 - RNA, 19 nt, Artificial Sequence
  Description of Artificial Sequence: Synthetic oligonucleotide
  Antisense strand to SEQ ID NO: 1792985
uuuggaagcagcagacccg

SEQ ID NO: 1792987 - RNA, 19 nt, Artificial Sequence
  Description of Artificial Sequence: Synthetic oligonucleotide
  Sense strand starting at position 1635 of SEQ ID NO: 1563068
ggaguagacgcgggucuua

SEQ ID NO: 1792988 - RNA, 19 nt, Artificial Sequence
  Description of Artificial Sequence: Synthetic oligonucleotide
  Antisense strand to SEQ ID NO: 1792987
uaagacccgcgucuacucc

SEQ ID NO: 1792989 - RNA, 19 nt, Artificial Sequence
  Description of Artificial Sequence: Synthetic oligonucleotide
  Sense strand starting at position 2230 of SEQ ID NO: 1563068
cucagaaacuugcuuguuu

SEQ ID NO: 1792990 - RNA, 19 nt, Artificial Sequence
  Description of Artificial Sequence: Synthetic oligonucleotide
  Antisense strand to SEQ ID NO: 1792989
aaacaagcaaguuucugag

SEQ ID NO: 1792991 - RNA, 19 nt, Artificial Sequence
  Description of Artificial Sequence: Synthetic oligonucleotide
  Sense strand starting at position 2315 of SEQ ID NO: 1563068
ggcugacucuggcaagauu

SEQ ID NO: 1792992 - RNA, 19 nt, Artificial Sequence
  Description of Artificial Sequence: Synthetic oligonucleotide
  Antisense strand to SEQ ID NO: 1792991
aaucuugccagagucagcc

SEQ ID NO: 1792993 - RNA, 19 nt, Artificial Sequence
  Description of Artificial Sequence: Synthetic oligonucleotide
  Sense strand starting at position 2369 of SEQ ID NO: 1563068
guaggaguggcugagugaa

SEQ ID NO: 1792994 - RNA, 19 nt, Artificial Sequence
  Description of Artificial Sequence: Synthetic oligonucleotide
  Antisense strand to SEQ ID NO: 1792993
uucacucagccacuccuac

SEQ ID NO: 1792995 - RNA, 19 nt, Artificial Sequence
  Description of Artificial Sequence: Synthetic oligonucleotide
  Sense strand starting at position 2471 of SEQ ID NO: 1563068
acuuuauucgagcauaggu

SEQ ID NO: 1792996 - RNA, 19 nt, Artificial Sequence
  Description of Artificial Sequence: Synthetic oligonucleotide
  Antisense strand to SEQ ID NO: 1792995
accuaugcucgaauaaagu

SEQ ID NO: 1792997 - RNA, 19 nt, Artificial Sequence
  Description of Artificial Sequence: Synthetic oligonucleotide
  Sense strand starting at position 2480 of SEQ ID NO: 1563068
gagcauagguggccaaaga

SEQ ID NO: 1792998 - RNA, 19 nt, Artificial Sequence
  Description of Artificial Sequence: Synthetic oligonucleotide
  Antisense strand to SEQ ID NO: 1792997
ucuuuggccaccuaugcuc

SEQ ID NO: 1792999 - RNA, 19 nt, Artificial Sequence
  Description of Artificial Sequence: Synthetic oligonucleotide
  Sense strand starting at position 2481 of SEQ ID NO: 1563068
agcauagguggccaaagau

SEQ ID NO: 1793000 - RNA, 19 nt, Artificial Sequence
  Description of Artificial Sequence: Synthetic oligonucleotide
  Antisense strand to SEQ ID NO: 1792999
aucuuuggccaccuaugcu

SEQ ID NO: 1793001 - RNA, 19 nt, Artificial Sequence
  Description of Artificial Sequence: Synthetic oligonucleotide
  Sense strand starting at position 2493 of SEQ ID NO: 1563068
caaagauguggccgggaau

SEQ ID NO: 1793002 - RNA, 19 nt, Artificial Sequence
  Description of Artificial Sequence: Synthetic oligonucleotide
  Antisense strand to SEQ ID NO: 1793001
auucccggccacaucuuug

SEQ ID NO: 1793003 - RNA, 19 nt, Artificial Sequence
  Description of Artificial Sequence: Synthetic oligonucleotide
  Sense strand starting at position 2494 of SEQ ID NO: 1563068
aaagauguggccgggaaua

SEQ ID NO: 1793004 - RNA, 19 nt, Artificial Sequence
  Description of Artificial Sequence: Synthetic oligonucleotide
  Antisense strand to SEQ ID NO: 1793003
uauucccggccacaucuuu

SEQ ID NO: 1793005 - RNA, 19 nt, Artificial Sequence
  Description of Artificial Sequence: Synthetic oligonucleotide
  Sense strand starting at position 2496 of SEQ ID NO: 1563068
agauguggccgggaauaga

SEQ ID NO: 1793006 - RNA, 19 nt, Artificial Sequence
  Description of Artificial Sequence: Synthetic oligonucleotide
  Antisense strand to SEQ ID NO: 1793005
ucuauucccggccacaucu

SEQ ID NO: 1793007 - RNA, 19 nt, Artificial Sequence
  Description of Artificial Sequence: Synthetic oligonucleotide
  Sense strand starting at position 2505 of SEQ ID NO: 1563068
cgggaauagagauguuuaa

SEQ ID NO: 1793008 - RNA, 19 nt, Artificial Sequence
  Description of Artificial Sequence: Synthetic oligonucleotide
  Antisense strand to SEQ ID NO: 1793007
uuaaacaucucuauucccg

SEQ ID NO: 1793009 - RNA, 19 nt, Artificial Sequence
  Description of Artificial Sequence: Synthetic oligonucleotide
  Sense strand starting at position 3235 of SEQ ID NO: 1563068
cuugccggauuucuuaauu

SEQ ID NO: 1793010 - RNA, 19 nt, Artificial Sequence
  Description of Artificial Sequence: Synthetic oligonucleotide
  Antisense strand to SEQ ID NO: 1793009
aauuaagaaauccggcaag

SEQ ID NO: 1793011 - RNA, 19 nt, Artificial Sequence
  Description of Artificial Sequence: Synthetic oligonucleotide
  Sense strand starting at position 3324 of SEQ ID NO: 1563068
gagagacacugauccaguu

SEQ ID NO: 1793012 - RNA, 19 nt, Artificial Sequence
  Description of Artificial Sequence: Synthetic oligonucleotide
  Antisense strand to SEQ ID NO: 1793011
aacuggaucagugucucuc

SEQ ID NO: 1793013 - RNA, 19 nt, Artificial Sequence
  Description of Artificial Sequence: Synthetic oligonucleotide
  Sense strand starting at position 3373 of SEQ ID NO: 1563068
ggaauaaauuagugucuug

SEQ ID NO: 1793014 - RNA, 19 nt, Artificial Sequence
  Description of Artificial Sequence: Synthetic oligonucleotide
  Antisense strand to SEQ ID NO: 1793013
caagacacuaauuuauucc

SEQ ID NO: 1793015 - RNA, 19 nt, Artificial Sequence
  Description of Artificial Sequence: Synthetic oligonucleotide
  Sense strand starting at position 3378 of SEQ ID NO: 1563068
aaauuagugucuugcaggu

SEQ ID NO: 1793016 - RNA, 19 nt, Artificial Sequence
  Description of Artificial Sequence: Synthetic oligonucleotide
  Antisense strand to SEQ ID NO: 1793015
accugcaagacacuaauuu

SEQ ID NO: 1793017 - RNA, 19 nt, Artificial Sequence
  Description of Artificial Sequence: Synthetic oligonucleotide
  Sense strand starting at position 3413 of SEQ ID NO: 1563068
agguaaaucuucccuaugu

SEQ ID NO: 1793018 - RNA, 19 nt, Artificial Sequence
  Description of Artificial Sequence: Synthetic oligonucleotide
  Antisense strand to SEQ ID NO: 1793017
acauagggaagauuuaccu

SEQ ID NO: 1793019 - RNA, 19 nt, Artificial Sequence
  Description of Artificial Sequence: Synthetic oligonucleotide
  Sense strand starting at position 3414 of SEQ ID NO: 1563068
gguaaaucuucccuaugua

SEQ ID NO: 1793020 - RNA, 19 nt, Artificial Sequence
  Description of Artificial Sequence: Synthetic oligonucleotide
  Antisense strand to SEQ ID NO: 1793019
uacauagggaagauuuacc

SEQ ID NO: 1793021 - RNA, 19 nt, Artificial Sequence
  Description of Artificial Sequence: Synthetic oligonucleotide
  Sense strand starting at position 3415 of SEQ ID NO: 1563068
guaaaucuucccuauguac

SEQ ID NO: 1793022 - RNA, 19 nt, Artificial Sequence
  Description of Artificial Sequence: Synthetic oligonucleotide
  Antisense strand to SEQ ID NO: 1793021
guacauagggaagauuuac

SEQ ID NO: 1793023 - RNA, 19 nt, Artificial Sequence
  Description of Artificial Sequence: Synthetic oligonucleotide
  Sense strand starting at position 3497 of SEQ ID NO: 1563068
ugcgguguguccuccuuua

SEQ ID NO: 1793024 - RNA, 19 nt, Artificial Sequence
  Description of Artificial Sequence: Synthetic oligonucleotide
  Antisense strand to SEQ ID NO: 1793023
uaaaggaggacacaccgca

SEQ ID NO: 1793025 - RNA, 19 nt, Artificial Sequence
  Description of Artificial Sequence: Synthetic oligonucleotide
  Sense strand starting at position 3502 of SEQ ID NO: 1563068
uguguccuccuuuaaucuu

SEQ ID NO: 1793026 - RNA, 19 nt, Artificial Sequence
  Description of Artificial Sequence: Synthetic oligonucleotide
  Antisense strand to SEQ ID NO: 1793025
aagauuaaaggaggacaca

SEQ ID NO: 1793027 - RNA, 19 nt, Artificial Sequence
  Description of Artificial Sequence: Synthetic oligonucleotide
  Sense strand starting at position 3588 of SEQ ID NO: 1563068
auagauuucuaguaaguag

SEQ ID NO: 1793028 - RNA, 19 nt, Artificial Sequence
  Description of Artificial Sequence: Synthetic oligonucleotide
  Antisense strand to SEQ ID NO: 1793027
cuacuuacuagaaaucuau

SEQ ID NO: 1793029 - RNA, 19 nt, Artificial Sequence
  Description of Artificial Sequence: Synthetic oligonucleotide
  Sense strand starting at position 3607 of SEQ ID NO: 1563068
gugagcuggucagaaagua

SEQ ID NO: 1793030 - RNA, 19 nt, Artificial Sequence
  Description of Artificial Sequence: Synthetic oligonucleotide
  Antisense strand to SEQ ID NO: 1793029
uacuuucugaccagcucac

SEQ ID NO: 1793031 - RNA, 19 nt, Artificial Sequence
  Description of Artificial Sequence: Synthetic oligonucleotide
  Sense strand starting at position 3645 of SEQ ID NO: 1563068
uugaguuuguguguuuguu

SEQ ID NO: 1793032 - RNA, 19 nt, Artificial Sequence
  Description of Artificial Sequence: Synthetic oligonucleotide
  Antisense strand to SEQ ID NO: 1793031
aacaaacacacaaacucaa

SEQ ID NO: 1793033 - RNA, 19 nt, Artificial Sequence
  Description of Artificial Sequence: Synthetic oligonucleotide
  Sense strand starting at position 3646 of SEQ ID NO: 1563068
ugaguuuguguguuuguuu

SEQ ID NO: 1793034 - RNA, 19 nt, Artificial Sequence
  Description of Artificial Sequence: Synthetic oligonucleotide
  Antisense strand to SEQ ID NO: 1793033
aaacaaacacacaaacuca

SEQ ID NO: 1793035 - RNA, 19 nt, Artificial Sequence
  Description of Artificial Sequence: Synthetic oligonucleotide
  Sense strand starting at position 3976 of SEQ ID NO: 1563068
uggaaauguccuuguccca

SEQ ID NO: 1793036 - RNA, 19 nt, Artificial Sequence
  Description of Artificial Sequence: Synthetic oligonucleotide
  Antisense strand to SEQ ID NO: 1793035
ugggacaaggacauuucca

SEQ ID NO: 1793037 - RNA, 19 nt, Artificial Sequence
  Description of Artificial Sequence: Synthetic oligonucleotide
  Sense strand starting at position 77 of SEQ ID NO: 1563069
gugauuaugacuggccucu

SEQ ID NO: 1793038 - RNA, 19 nt, Artificial Sequence
  Description of Artificial Sequence: Synthetic oligonucleotide
  Antisense strand to SEQ ID NO: 1793037
agaggccagucauaaucac

SEQ ID NO: 1793039 - RNA, 19 nt, Artificial Sequence
  Description of Artificial Sequence: Synthetic oligonucleotide
  Sense strand starting at position 262 of SEQ ID NO: 1563069
cuuccaaaguaggaaauuu

SEQ ID NO: 1793040 - RNA, 19 nt, Artificial Sequence
  Description of Artificial Sequence: Synthetic oligonucleotide
  Antisense strand to SEQ ID NO: 1793039
aaauuuccuacuuuggaag

SEQ ID NO: 1793041 - RNA, 19 nt, Artificial Sequence
  Description of Artificial Sequence: Synthetic oligonucleotide
  Sense strand starting at position 305 of SEQ ID NO: 1563069
uucucaugucuaugccaca

SEQ ID NO: 1793042 - RNA, 19 nt, Artificial Sequence
  Description of Artificial Sequence: Synthetic oligonucleotide
  Antisense strand to SEQ ID NO: 1793041
uguggcauagacaugagaa

SEQ ID NO: 1793043 - RNA, 19 nt, Artificial Sequence
  Description of Artificial Sequence: Synthetic oligonucleotide
  Sense strand starting at position 310 of SEQ ID NO: 1563069
augucuaugccacagagua

SEQ ID NO: 1793044 - RNA, 19 nt, Artificial Sequence
  Description of Artificial Sequence: Synthetic oligonucleotide
  Antisense strand to SEQ ID NO: 1793043
uacucuguggcauagacau

SEQ ID NO: 1793045 - RNA, 19 nt, Artificial Sequence
  Description of Artificial Sequence: Synthetic oligonucleotide
  Sense strand starting at position 312 of SEQ ID NO: 1563069
gucuaugccacagaguagu

SEQ ID NO: 1793046 - RNA, 19 nt, Artificial Sequence
  Description of Artificial Sequence: Synthetic oligonucleotide
  Antisense strand to SEQ ID NO: 1793045
acuacucuguggcauagac

SEQ ID NO: 1793047 - RNA, 19 nt, Artificial Sequence
  Description of Artificial Sequence: Synthetic oligonucleotide
  Sense strand starting at position 318 of SEQ ID NO: 1563069
gccacagaguagucagcaa

SEQ ID NO: 1793048 - RNA, 19 nt, Artificial Sequence
  Description of Artificial Sequence: Synthetic oligonucleotide
  Antisense strand to SEQ ID NO: 1793047
uugcugacuacucuguggc

SEQ ID NO: 1793049 - RNA, 19 nt, Artificial Sequence
  Description of Artificial Sequence: Synthetic oligonucleotide
  Sense strand starting at position 322 of SEQ ID NO: 1563069
cagaguagucagcaauuau

SEQ ID NO: 1793050 - RNA, 19 nt, Artificial Sequence
  Description of Artificial Sequence: Synthetic oligonucleotide
  Antisense strand to SEQ ID NO: 1793049
auaauugcugacuacucug

SEQ ID NO: 1793051 - RNA, 19 nt, Artificial Sequence
  Description of Artificial Sequence: Synthetic oligonucleotide
  Sense strand starting at position 326 of SEQ ID NO: 1563069
guagucagcaauuauguau

SEQ ID NO: 1793052 - RNA, 19 nt, Artificial Sequence
  Description of Artificial Sequence: Synthetic oligonucleotide
  Antisense strand to SEQ ID NO: 1793051
auacauaauugcugacuac

SEQ ID NO: 1793053 - RNA, 19 nt, Artificial Sequence
  Description of Artificial Sequence: Synthetic oligonucleotide
  Sense strand starting at position 332 of SEQ ID NO: 1563069
agcaauuauguaugacaua

SEQ ID NO: 1793054 - RNA, 19 nt, Artificial Sequence
  Description of Artificial Sequence: Synthetic oligonucleotide
  Antisense strand to SEQ ID NO: 1793053
uaugucauacauaauugcu

SEQ ID NO: 1793055 - RNA, 19 nt, Artificial Sequence
  Description of Artificial Sequence: Synthetic oligonucleotide
  Sense strand starting at position 473 of SEQ ID NO: 1563069
uggacuugguuguucuaga

SEQ ID NO: 1793056 - RNA, 19 nt, Artificial Sequence
  Description of Artificial Sequence: Synthetic oligonucleotide
  Antisense strand to SEQ ID NO: 1793055
ucuagaacaaccaagucca

SEQ ID NO: 1793057 - RNA, 19 nt, Artificial Sequence
  Description of Artificial Sequence: Synthetic oligonucleotide
  Sense strand starting at position 474 of SEQ ID NO: 1563069
ggacuugguuguucuagaa

SEQ ID NO: 1793058 - RNA, 19 nt, Artificial Sequence
  Description of Artificial Sequence: Synthetic oligonucleotide
  Antisense strand to SEQ ID NO: 1793057
uucuagaacaaccaagucc

SEQ ID NO: 1793059 - RNA, 19 nt, Artificial Sequence
  Description of Artificial Sequence: Synthetic oligonucleotide
  Sense strand starting at position 524 of SEQ ID NO: 1563069
cugugagcacucugaugga

SEQ ID NO: 1793060 - RNA, 19 nt, Artificial Sequence
  Description of Artificial Sequence: Synthetic oligonucleotide
  Antisense strand to SEQ ID NO: 1793059
uccaucagagugcucacag

SEQ ID NO: 1793061 - RNA, 19 nt, Artificial Sequence
  Description of Artificial Sequence: Synthetic oligonucleotide
  Sense strand starting at position 675 of SEQ ID NO: 1563069
gcauucucacgguaaauag

SEQ ID NO: 1793062 - RNA, 19 nt, Artificial Sequence
  Description of Artificial Sequence: Synthetic oligonucleotide
  Antisense strand to SEQ ID NO: 1793061
cuauuuaccgugagaaugc

SEQ ID NO: 1793063 - RNA, 19 nt, Artificial Sequence
  Description of Artificial Sequence: Synthetic oligonucleotide
  Sense strand starting at position 686 of SEQ ID NO: 1563069
guaaauagacagugagcaa

SEQ ID NO: 1793064 - RNA, 19 nt, Artificial Sequence
  Description of Artificial Sequence: Synthetic oligonucleotide
  Antisense strand to SEQ ID NO: 1793063
uugcucacugucuauuuac

SEQ ID NO: 1793065 - RNA, 19 nt, Artificial Sequence
  Description of Artificial Sequence: Synthetic oligonucleotide
  Sense strand starting at position 939 of SEQ ID NO: 1563069
ugagacucugccugcaaca

SEQ ID NO: 1793066 - RNA, 19 nt, Artificial Sequence
  Description of Artificial Sequence: Synthetic oligonucleotide
  Antisense strand to SEQ ID NO: 1793065
uguugcaggcagagucuca

SEQ ID NO: 1793067 - RNA, 19 nt, Artificial Sequence
  Description of Artificial Sequence: Synthetic oligonucleotide
  Sense strand starting at position 941 of SEQ ID NO: 1563069
agacucugccugcaacaaa

SEQ ID NO: 1793068 - RNA, 19 nt, Artificial Sequence
  Description of Artificial Sequence: Synthetic oligonucleotide
  Antisense strand to SEQ ID NO: 1793067
uuuguugcaggcagagucu

SEQ ID NO: 1793069 - RNA, 19 nt, Artificial Sequence
  Description of Artificial Sequence: Synthetic oligonucleotide
  Sense strand starting at position 1003 of SEQ ID NO: 1563069
cuagcaguggucugaauag

SEQ ID NO: 1793070 - RNA, 19 nt, Artificial Sequence
  Description of Artificial Sequence: Synthetic oligonucleotide
  Antisense strand to SEQ ID NO: 1793069
cuauucagaccacugcuag

SEQ ID NO: 1793071 - RNA, 19 nt, Artificial Sequence
  Description of Artificial Sequence: Synthetic oligonucleotide
  Sense strand starting at position 1229 of SEQ ID NO: 1563069
acuagugucaggugaccuu

SEQ ID NO: 1793072 - RNA, 19 nt, Artificial Sequence
  Description of Artificial Sequence: Synthetic oligonucleotide
  Antisense strand to SEQ ID NO: 1793071
aaggucaccugacacuagu

SEQ ID NO: 1793073 - RNA, 19 nt, Artificial Sequence
  Description of Artificial Sequence: Synthetic oligonucleotide
  Sense strand starting at position 1360 of SEQ ID NO: 1563069
ucacuucugcgagaaauua

SEQ ID NO: 1793074 - RNA, 19 nt, Artificial Sequence
  Description of Artificial Sequence: Synthetic oligonucleotide
  Antisense strand to SEQ ID NO: 1793073
uaauuucucgcagaaguga

SEQ ID NO: 1793075 - RNA, 19 nt, Artificial Sequence
  Description of Artificial Sequence: Synthetic oligonucleotide
  Sense strand starting at position 1608 of SEQ ID NO: 1563069
ugugggaggguucgaagaa

SEQ ID NO: 1793076 - RNA, 19 nt, Artificial Sequence
  Description of Artificial Sequence: Synthetic oligonucleotide
  Antisense strand to SEQ ID NO: 1793075
uucuucgaacccucccaca

SEQ ID NO: 1793077 - RNA, 19 nt, Artificial Sequence
  Description of Artificial Sequence: Synthetic oligonucleotide
  Sense strand starting at position 2281 of SEQ ID NO: 1563069
aaugaaugaucuguguaaa

SEQ ID NO: 1793078 - RNA, 19 nt, Artificial Sequence
  Description of Artificial Sequence: Synthetic oligonucleotide
  Antisense strand to SEQ ID NO: 1793077
uuuacacagaucauucauu

SEQ ID NO: 1793079 - RNA, 19 nt, Artificial Sequence
  Description of Artificial Sequence: Synthetic oligonucleotide
  Sense strand starting at position 2927 of SEQ ID NO: 1563069
ggauuacaggugugacucu

SEQ ID NO: 1793080 - RNA, 19 nt, Artificial Sequence
  Description of Artificial Sequence: Synthetic oligonucleotide
  Antisense strand to SEQ ID NO: 1793079
agagucacaccuguaaucc

SEQ ID NO: 1793081 - RNA, 19 nt, Artificial Sequence
  Description of Artificial Sequence: Synthetic oligonucleotide
  Sense strand starting at position 2969 of SEQ ID NO: 1563069
uuguuagagcauuaggauu

SEQ ID NO: 1793082 - RNA, 19 nt, Artificial Sequence
  Description of Artificial Sequence: Synthetic oligonucleotide
  Antisense strand to SEQ ID NO: 1793081
aauccuaaugcucuaacaa

SEQ ID NO: 1793083 - RNA, 19 nt, Artificial Sequence
  Description of Artificial Sequence: Synthetic oligonucleotide
  Sense strand starting at position 3403 of SEQ ID NO: 1563069
ccuuuauuggaaugaucug

SEQ ID NO: 1793084 - RNA, 19 nt, Artificial Sequence
  Description of Artificial Sequence: Synthetic oligonucleotide
  Antisense strand to SEQ ID NO: 1793083
cagaucauuccaauaaagg

SEQ ID NO: 1793085 - RNA, 19 nt, Artificial Sequence
  Description of Artificial Sequence: Synthetic oligonucleotide
  Sense strand starting at position 3408 of SEQ ID NO: 1563069
auuggaaugaucuguguaa

SEQ ID NO: 1793086 - RNA, 19 nt, Artificial Sequence
  Description of Artificial Sequence: Synthetic oligonucleotide
  Antisense strand to SEQ ID NO: 1793085
uuacacagaucauuccaau

SEQ ID NO: 1793087 - RNA, 19 nt, Artificial Sequence
  Description of Artificial Sequence: Synthetic oligonucleotide
  Sense strand starting at position 3409 of SEQ ID NO: 1563069
uuggaaugaucuguguaaa

SEQ ID NO: 1793088 - RNA, 19 nt, Artificial Sequence
  Description of Artificial Sequence: Synthetic oligonucleotide
  Antisense strand to SEQ ID NO: 1793087
uuuacacagaucauuccaa

SEQ ID NO: 1793089 - RNA, 19 nt, Artificial Sequence
  Description of Artificial Sequence: Synthetic oligonucleotide
  Sense strand starting at position 3410 of SEQ ID NO: 1563069
uggaaugaucuguguaaag

SEQ ID NO: 1793090 - RNA, 19 nt, Artificial Sequence
  Description of Artificial Sequence: Synthetic oligonucleotide
  Antisense strand to SEQ ID NO: 1793089
cuuuacacagaucauucca

SEQ ID NO: 1793091 - RNA, 19 nt, Artificial Sequence
  Description of Artificial Sequence: Synthetic oligonucleotide
  Sense strand starting at position 3412 of SEQ ID NO: 1563069
gaaugaucuguguaaagua

SEQ ID NO: 1793092 - RNA, 19 nt, Artificial Sequence
  Description of Artificial Sequence: Synthetic oligonucleotide
  Antisense strand to SEQ ID NO: 1793091
uacuuuacacagaucauuc

SEQ ID NO: 1793093 - RNA, 19 nt, Artificial Sequence
  Description of Artificial Sequence: Synthetic oligonucleotide
  Sense strand starting at position 3487 of SEQ ID NO: 1563069
aauaauaaguagucuggau

SEQ ID NO: 1793094 - RNA, 19 nt, Artificial Sequence
  Description of Artificial Sequence: Synthetic oligonucleotide
  Antisense strand to SEQ ID NO: 1793093
auccagacuacuuauuauu

SEQ ID NO: 1793095 - RNA, 19 nt, Artificial Sequence
  Description of Artificial Sequence: Synthetic oligonucleotide
  Sense strand starting at position 3489 of SEQ ID NO: 1563069
uaauaaguagucuggauag

SEQ ID NO: 1793096 - RNA, 19 nt, Artificial Sequence
  Description of Artificial Sequence: Synthetic oligonucleotide
  Antisense strand to SEQ ID NO: 1793095
cuauccagacuacuuauua

SEQ ID NO: 1793097 - RNA, 19 nt, Artificial Sequence
  Description of Artificial Sequence: Synthetic oligonucleotide
  Sense strand starting at position 3566 of SEQ ID NO: 1563069
augagucacggugagacuu

SEQ ID NO: 1793098 - RNA, 19 nt, Artificial Sequence
  Description of Artificial Sequence: Synthetic oligonucleotide
  Antisense strand to SEQ ID NO: 1793097
aagucucaccgugacucau

SEQ ID NO: 1793099 - RNA, 19 nt, Artificial Sequence
  Description of Artificial Sequence: Synthetic oligonucleotide
  Sense strand starting at position 3594 of SEQ ID NO: 1563069
agcagaacuccugauucca

SEQ ID NO: 1793100 - RNA, 19 nt, Artificial Sequence
  Description of Artificial Sequence: Synthetic oligonucleotide
  Antisense strand to SEQ ID NO: 1793099
uggaaucaggaguucugcu

SEQ ID NO: 1793101 - RNA, 19 nt, Artificial Sequence
  Description of Artificial Sequence: Synthetic oligonucleotide
  Sense strand starting at position 3663 of SEQ ID NO: 1563069
cugguugcucagggacaga

SEQ ID NO: 1793102 - RNA, 19 nt, Artificial Sequence
  Description of Artificial Sequence: Synthetic oligonucleotide
  Antisense strand to SEQ ID NO: 1793101
ucugucccugagcaaccag

SEQ ID NO: 1793103 - RNA, 19 nt, Artificial Sequence
  Description of Artificial Sequence: Synthetic oligonucleotide
  Sense strand starting at position 3714 of SEQ ID NO: 1563069
ugccauuacugucuuuaca

SEQ ID NO: 1793104 - RNA, 19 nt, Artificial Sequence
  Description of Artificial Sequence: Synthetic oligonucleotide
  Antisense strand to SEQ ID NO: 1793103
uguaaagacaguaauggca

SEQ ID NO: 1793105 - RNA, 19 nt, Artificial Sequence
  Description of Artificial Sequence: Synthetic oligonucleotide
  Sense strand starting at position 3874 of SEQ ID NO: 1563069
agucaagaagcgugcagaa

SEQ ID NO: 1793106 - RNA, 19 nt, Artificial Sequence
  Description of Artificial Sequence: Synthetic oligonucleotide
  Antisense strand to SEQ ID NO: 1793105
uucugcacgcuucuugacu

SEQ ID NO: 1793107 - RNA, 19 nt, Artificial Sequence
  Description of Artificial Sequence: Synthetic oligonucleotide
  Sense strand starting at position 3917 of SEQ ID NO: 1563069
aauccuguagguggaaauu

SEQ ID NO: 1793108 - RNA, 19 nt, Artificial Sequence
  Description of Artificial Sequence: Synthetic oligonucleotide
  Antisense strand to SEQ ID NO: 1793107
aauuuccaccuacaggauu

SEQ ID NO: 1793109 - RNA, 19 nt, Artificial Sequence
  Description of Artificial Sequence: Synthetic oligonucleotide
  Sense strand starting at position 3923 of SEQ ID NO: 1563069
guagguggaaauuguccua

SEQ ID NO: 1793110 - RNA, 19 nt, Artificial Sequence
  Description of Artificial Sequence: Synthetic oligonucleotide
  Antisense strand to SEQ ID NO: 1793109
uaggacaauuuccaccuac

SEQ ID NO: 1793111 - RNA, 19 nt, Artificial Sequence
  Description of Artificial Sequence: Synthetic oligonucleotide
  Sense strand starting at position 3926 of SEQ ID NO: 1563069
gguggaaauuguccuaaau

SEQ ID NO: 1793112 - RNA, 19 nt, Artificial Sequence
  Description of Artificial Sequence: Synthetic oligonucleotide
  Antisense strand to SEQ ID NO: 1793111
auuuaggacaauuuccacc

SEQ ID NO: 1793113 - RNA, 19 nt, Artificial Sequence
  Description of Artificial Sequence: Synthetic oligonucleotide
  Sense strand starting at position 3937 of SEQ ID NO: 1563069
uccuaaaucgaagacugua

SEQ ID NO: 1793114 - RNA, 19 nt, Artificial Sequence
  Description of Artificial Sequence: Synthetic oligonucleotide
  Antisense strand to SEQ ID NO: 1793113
uacagucuucgauuuagga

SEQ ID NO: 1793115 - RNA, 19 nt, Artificial Sequence
  Description of Artificial Sequence: Synthetic oligonucleotide
  Sense strand starting at position 3940 of SEQ ID NO: 1563069
uaaaucgaagacuguauau

SEQ ID NO: 1793116 - RNA, 19 nt, Artificial Sequence
  Description of Artificial Sequence: Synthetic oligonucleotide
  Antisense strand to SEQ ID NO: 1793115
auauacagucuucgauuua

SEQ ID NO: 1793117 - RNA, 19 nt, Artificial Sequence
  Description of Artificial Sequence: Synthetic oligonucleotide
  Sense strand starting at position 239 of SEQ ID NO: 1563070
uuaauuguuccagagcauc

SEQ ID NO: 1793118 - RNA, 19 nt, Artificial Sequence
  Description of Artificial Sequence: Synthetic oligonucleotide
  Antisense strand to SEQ ID NO: 1793117
gaugcucuggaacaauuaa

SEQ ID NO: 1793119 - RNA, 19 nt, Artificial Sequence
  Description of Artificial Sequence: Synthetic oligonucleotide
  Sense strand starting at position 291 of SEQ ID NO: 1563070
ggccuucugacagacaugu

SEQ ID NO: 1793120 - RNA, 19 nt, Artificial Sequence
  Description of Artificial Sequence: Synthetic oligonucleotide
  Antisense strand to SEQ ID NO: 1793119
acaugucugucagaaggcc

SEQ ID NO: 1793121 - RNA, 19 nt, Artificial Sequence
  Description of Artificial Sequence: Synthetic oligonucleotide
  Sense strand starting at position 486 of SEQ ID NO: 1563070
ggcguuuccaugcacaaua

SEQ ID NO: 1793122 - RNA, 19 nt, Artificial Sequence
  Description of Artificial Sequence: Synthetic oligonucleotide
  Antisense strand to SEQ ID NO: 1793121
uauugugcauggaaacgcc

SEQ ID NO: 1793123 - RNA, 19 nt, Artificial Sequence
  Description of Artificial Sequence: Synthetic oligonucleotide
  Sense strand starting at position 559 of SEQ ID NO: 1563070
gggccacucucccuuuaua

SEQ ID NO: 1793124 - RNA, 19 nt, Artificial Sequence
  Description of Artificial Sequence: Synthetic oligonucleotide
  Antisense strand to SEQ ID NO: 1793123
uauaaagggagaguggccc

SEQ ID NO: 1793125 - RNA, 19 nt, Artificial Sequence
  Description of Artificial Sequence: Synthetic oligonucleotide
  Sense strand starting at position 726 of SEQ ID NO: 1563070
gaacgaggugucuagacaa

SEQ ID NO: 1793126 - RNA, 19 nt, Artificial Sequence
  Description of Artificial Sequence: Synthetic oligonucleotide
  Antisense strand to SEQ ID NO: 1793125
uugucuagacaccucguuc

SEQ ID NO: 1793127 - RNA, 19 nt, Artificial Sequence
  Description of Artificial Sequence: Synthetic oligonucleotide
  Sense strand starting at position 934 of SEQ ID NO: 1563070
ggcuuagugggcuggacau

SEQ ID NO: 1793128 - RNA, 19 nt, Artificial Sequence
  Description of Artificial Sequence: Synthetic oligonucleotide
  Antisense strand to SEQ ID NO: 1793127
auguccagcccacuaagcc

SEQ ID NO: 1793129 - RNA, 19 nt, Artificial Sequence
  Description of Artificial Sequence: Synthetic oligonucleotide
  Sense strand starting at position 1089 of SEQ ID NO: 1563070
gaaagugcuccagggccaa

SEQ ID NO: 1793130 - RNA, 19 nt, Artificial Sequence
  Description of Artificial Sequence: Synthetic oligonucleotide
  Antisense strand to SEQ ID NO: 1793129
uuggcccuggagcacuuuc

SEQ ID NO: 1793131 - RNA, 19 nt, Artificial Sequence
  Description of Artificial Sequence: Synthetic oligonucleotide
  Sense strand starting at position 1271 of SEQ ID NO: 1563070
gccggugcucuguuacuuu

SEQ ID NO: 1793132 - RNA, 19 nt, Artificial Sequence
  Description of Artificial Sequence: Synthetic oligonucleotide
  Antisense strand to SEQ ID NO: 1793131
aaaguaacagagcaccggc

SEQ ID NO: 1793133 - RNA, 19 nt, Artificial Sequence
  Description of Artificial Sequence: Synthetic oligonucleotide
  Sense strand starting at position 1391 of SEQ ID NO: 1563070
uugaucgaacacugaguua

SEQ ID NO: 1793134 - RNA, 19 nt, Artificial Sequence
  Description of Artificial Sequence: Synthetic oligonucleotide
  Antisense strand to SEQ ID NO: 1793133
uaacucaguguucgaucaa

SEQ ID NO: 1793135 - RNA, 19 nt, Artificial Sequence
  Description of Artificial Sequence: Synthetic oligonucleotide
  Sense strand starting at position 1402 of SEQ ID NO: 1563070
cugaguuauagccauggaa

SEQ ID NO: 1793136 - RNA, 19 nt, Artificial Sequence
  Description of Artificial Sequence: Synthetic oligonucleotide
  Antisense strand to SEQ ID NO: 1793135
uuccauggcuauaacucag

SEQ ID NO: 1793137 - RNA, 19 nt, Artificial Sequence
  Description of Artificial Sequence: Synthetic oligonucleotide
  Sense strand starting at position 1404 of SEQ ID NO: 1563070
gaguuauagccauggaagg

SEQ ID NO: 1793138 - RNA, 19 nt, Artificial Sequence
  Description of Artificial Sequence: Synthetic oligonucleotide
  Antisense strand to SEQ ID NO: 1793137
ccuuccauggcuauaacuc

SEQ ID NO: 1793139 - RNA, 19 nt, Artificial Sequence
  Description of Artificial Sequence: Synthetic oligonucleotide
  Sense strand starting at position 1436 of SEQ ID NO: 1563070
cugcaaagucagcauuacu

SEQ ID NO: 1793140 - RNA, 19 nt, Artificial Sequence
  Description of Artificial Sequence: Synthetic oligonucleotide
  Antisense strand to SEQ ID NO: 1793139
aguaaugcugacuuugcag

SEQ ID NO: 1793141 - RNA, 19 nt, Artificial Sequence
  Description of Artificial Sequence: Synthetic oligonucleotide
  Sense strand starting at position 1518 of SEQ ID NO: 1563070
uccacuuucucagcaguga

SEQ ID NO: 1793142 - RNA, 19 nt, Artificial Sequence
  Description of Artificial Sequence: Synthetic oligonucleotide
  Antisense strand to SEQ ID NO: 1793141
ucacugcugagaaagugga

SEQ ID NO: 1793143 - RNA, 19 nt, Artificial Sequence
  Description of Artificial Sequence: Synthetic oligonucleotide
  Sense strand starting at position 1519 of SEQ ID NO: 1563070
ccacuuucucagcagugaa

SEQ ID NO: 1793144 - RNA, 19 nt, Artificial Sequence
  Description of Artificial Sequence: Synthetic oligonucleotide
  Antisense strand to SEQ ID NO: 1793143
uucacugcugagaaagugg

SEQ ID NO: 1793145 - RNA, 19 nt, Artificial Sequence
  Description of Artificial Sequence: Synthetic oligonucleotide
  Sense strand starting at position 1522 of SEQ ID NO: 1563070
cuuucucagcagugaaaug

SEQ ID NO: 1793146 - RNA, 19 nt, Artificial Sequence
  Description of Artificial Sequence: Synthetic oligonucleotide
  Antisense strand to SEQ ID NO: 1793145
cauuucacugcugagaaag

SEQ ID NO: 1793147 - RNA, 19 nt, Artificial Sequence
  Description of Artificial Sequence: Synthetic oligonucleotide
  Sense strand starting at position 1533 of SEQ ID NO: 1563070
gugaaaugaggacguaaca

SEQ ID NO: 1793148 - RNA, 19 nt, Artificial Sequence
  Description of Artificial Sequence: Synthetic oligonucleotide
  Antisense strand to SEQ ID NO: 1793147
uguuacguccucauuucac

SEQ ID NO: 1793149 - RNA, 19 nt, Artificial Sequence
  Description of Artificial Sequence: Synthetic oligonucleotide
  Sense strand starting at position 1584 of SEQ ID NO: 1563070
agagaauacugucugcaga

SEQ ID NO: 1793150 - RNA, 19 nt, Artificial Sequence
  Description of Artificial Sequence: Synthetic oligonucleotide
  Antisense strand to SEQ ID NO: 1793149
ucugcagacaguauucucu

SEQ ID NO: 1793151 - RNA, 19 nt, Artificial Sequence
  Description of Artificial Sequence: Synthetic oligonucleotide
  Sense strand starting at position 1585 of SEQ ID NO: 1563070
gagaauacugucugcagac

SEQ ID NO: 1793152 - RNA, 19 nt, Artificial Sequence
  Description of Artificial Sequence: Synthetic oligonucleotide
  Antisense strand to SEQ ID NO: 1793151
gucugcagacaguauucuc

SEQ ID NO: 1793153 - RNA, 19 nt, Artificial Sequence
  Description of Artificial Sequence: Synthetic oligonucleotide
  Sense strand starting at position 1673 of SEQ ID NO: 1563070
cucugaucuuuccugagcu

SEQ ID NO: 1793154 - RNA, 19 nt, Artificial Sequence
  Description of Artificial Sequence: Synthetic oligonucleotide
  Antisense strand to SEQ ID NO: 1793153
agcucaggaaagaucagag

SEQ ID NO: 1793155 - RNA, 19 nt, Artificial Sequence
  Description of Artificial Sequence: Synthetic oligonucleotide
  Sense strand starting at position 1677 of SEQ ID NO: 1563070
gaucuuuccugagcucuag

SEQ ID NO: 1793156 - RNA, 19 nt, Artificial Sequence
  Description of Artificial Sequence: Synthetic oligonucleotide
  Antisense strand to SEQ ID NO: 1793155
cuagagcucaggaaagauc

SEQ ID NO: 1793157 - RNA, 19 nt, Artificial Sequence
  Description of Artificial Sequence: Synthetic oligonucleotide
  Sense strand starting at position 1740 of SEQ ID NO: 1563070
gggaaagccacuugcucua

SEQ ID NO: 1793158 - RNA, 19 nt, Artificial Sequence
  Description of Artificial Sequence: Synthetic oligonucleotide
  Antisense strand to SEQ ID NO: 1793157
uagagcaaguggcuuuccc

SEQ ID NO: 1793159 - RNA, 19 nt, Artificial Sequence
  Description of Artificial Sequence: Synthetic oligonucleotide
  Sense strand starting at position 1772 of SEQ ID NO: 1563070
guaaguaguagagagcaga

SEQ ID NO: 1793160 - RNA, 19 nt, Artificial Sequence
  Description of Artificial Sequence: Synthetic oligonucleotide
  Antisense strand to SEQ ID NO: 1793159
ucugcucucuacuacuuac

SEQ ID NO: 1793161 - RNA, 19 nt, Artificial Sequence
  Description of Artificial Sequence: Synthetic oligonucleotide
  Sense strand starting at position 1950 of SEQ ID NO: 1563070
cugggaggcuccuuugaag

SEQ ID NO: 1793162 - RNA, 19 nt, Artificial Sequence
  Description of Artificial Sequence: Synthetic oligonucleotide
  Antisense strand to SEQ ID NO: 1793161
cuucaaaggagccucccag

SEQ ID NO: 1793163 - RNA, 19 nt, Artificial Sequence
  Description of Artificial Sequence: Synthetic oligonucleotide
  Sense strand starting at position 1957 of SEQ ID NO: 1563070
gcuccuuugaaggaucagu

SEQ ID NO: 1793164 - RNA, 19 nt, Artificial Sequence
  Description of Artificial Sequence: Synthetic oligonucleotide
  Antisense strand to SEQ ID NO: 1793163
acugauccuucaaaggagc

SEQ ID NO: 1793165 - RNA, 19 nt, Artificial Sequence
  Description of Artificial Sequence: Synthetic oligonucleotide
  Sense strand starting at position 2258 of SEQ ID NO: 1563070
auagaaaugcagugugaga

SEQ ID NO: 1793166 - RNA, 19 nt, Artificial Sequence
  Description of Artificial Sequence: Synthetic oligonucleotide
  Antisense strand to SEQ ID NO: 1793165
ucucacacugcauuucuau

SEQ ID NO: 1793167 - RNA, 19 nt, Artificial Sequence
  Description of Artificial Sequence: Synthetic oligonucleotide
  Sense strand starting at position 2260 of SEQ ID NO: 1563070
agaaaugcagugugagaca

SEQ ID NO: 1793168 - RNA, 19 nt, Artificial Sequence
  Description of Artificial Sequence: Synthetic oligonucleotide
  Antisense strand to SEQ ID NO: 1793167
ugucucacacugcauuucu

SEQ ID NO: 1793169 - RNA, 19 nt, Artificial Sequence
  Description of Artificial Sequence: Synthetic oligonucleotide
  Sense strand starting at position 2426 of SEQ ID NO: 1563070
ccuugaaacccaggguaaa

SEQ ID NO: 1793170 - RNA, 19 nt, Artificial Sequence
  Description of Artificial Sequence: Synthetic oligonucleotide
  Antisense strand to SEQ ID NO: 1793169
uuuacccuggguuucaagg

SEQ ID NO: 1793171 - RNA, 19 nt, Artificial Sequence
  Description of Artificial Sequence: Synthetic oligonucleotide
  Sense strand starting at position 2490 of SEQ ID NO: 1563070
aauggcuaaucuguacaga

SEQ ID NO: 1793172 - RNA, 19 nt, Artificial Sequence
  Description of Artificial Sequence: Synthetic oligonucleotide
  Antisense strand to SEQ ID NO: 1793171
ucuguacagauuagccauu

SEQ ID NO: 1793173 - RNA, 19 nt, Artificial Sequence
  Description of Artificial Sequence: Synthetic oligonucleotide
  Sense strand starting at position 2493 of SEQ ID NO: 1563070
ggcuaaucuguacagagau

SEQ ID NO: 1793174 - RNA, 19 nt, Artificial Sequence
  Description of Artificial Sequence: Synthetic oligonucleotide
  Antisense strand to SEQ ID NO: 1793173
aucucuguacagauuagcc

SEQ ID NO: 1793175 - RNA, 19 nt, Artificial Sequence
  Description of Artificial Sequence: Synthetic oligonucleotide
  Sense strand starting at position 2590 of SEQ ID NO: 1563070
gggaaugaguaucuguucu

SEQ ID NO: 1793176 - RNA, 19 nt, Artificial Sequence
  Description of Artificial Sequence: Synthetic oligonucleotide
  Antisense strand to SEQ ID NO: 1793175
agaacagauacucauuccc

SEQ ID NO: 1793177 - RNA, 19 nt, Artificial Sequence
  Description of Artificial Sequence: Synthetic oligonucleotide
  Sense strand starting at position 2592 of SEQ ID NO: 1563070
gaaugaguaucuguucuga

SEQ ID NO: 1793178 - RNA, 19 nt, Artificial Sequence
  Description of Artificial Sequence: Synthetic oligonucleotide
  Antisense strand to SEQ ID NO: 1793177
ucagaacagauacucauuc

SEQ ID NO: 1793179 - RNA, 19 nt, Artificial Sequence
  Description of Artificial Sequence: Synthetic oligonucleotide
  Sense strand starting at position 2594 of SEQ ID NO: 1563070
augaguaucuguucugaaa

SEQ ID NO: 1793180 - RNA, 19 nt, Artificial Sequence
  Description of Artificial Sequence: Synthetic oligonucleotide
  Antisense strand to SEQ ID NO: 1793179
uuucagaacagauacucau

SEQ ID NO: 1793181 - RNA, 19 nt, Artificial Sequence
  Description of Artificial Sequence: Synthetic oligonucleotide
  Sense strand starting at position 2657 of SEQ ID NO: 1563070
gccacauuucgagggcucu

SEQ ID NO: 1793182 - RNA, 19 nt, Artificial Sequence
  Description of Artificial Sequence: Synthetic oligonucleotide
  Antisense strand to SEQ ID NO: 1793181
agagcccucgaaauguggc

SEQ ID NO: 1793183 - RNA, 19 nt, Artificial Sequence
  Description of Artificial Sequence: Synthetic oligonucleotide
  Sense strand starting at position 3343 of SEQ ID NO: 1563070
gucucaaagucaguaaaua

SEQ ID NO: 1793184 - RNA, 19 nt, Artificial Sequence
  Description of Artificial Sequence: Synthetic oligonucleotide
  Antisense strand to SEQ ID NO: 1793183
uauuuacugacuuugagac

SEQ ID NO: 1793185 - RNA, 19 nt, Artificial Sequence
  Description of Artificial Sequence: Synthetic oligonucleotide
  Sense strand starting at position 3477 of SEQ ID NO: 1563070
gucucugcacuauagacau

SEQ ID NO: 1793186 - RNA, 19 nt, Artificial Sequence
  Description of Artificial Sequence: Synthetic oligonucleotide
  Antisense strand to SEQ ID NO: 1793185
augucuauagugcagagac

SEQ ID NO: 1793187 - RNA, 19 nt, Artificial Sequence
  Description of Artificial Sequence: Synthetic oligonucleotide
  Sense strand starting at position 3502 of SEQ ID NO: 1563070
cagaucauucuuuguggua

SEQ ID NO: 1793188 - RNA, 19 nt, Artificial Sequence
  Description of Artificial Sequence: Synthetic oligonucleotide
  Antisense strand to SEQ ID NO: 1793187
uaccacaaagaaugaucug

SEQ ID NO: 1793189 - RNA, 19 nt, Artificial Sequence
  Description of Artificial Sequence: Synthetic oligonucleotide
  Sense strand starting at position 3503 of SEQ ID NO: 1563070
agaucauucuuugugguag

SEQ ID NO: 1793190 - RNA, 19 nt, Artificial Sequence
  Description of Artificial Sequence: Synthetic oligonucleotide
  Antisense strand to SEQ ID NO: 1793189
cuaccacaaagaaugaucu

SEQ ID NO: 1793191 - RNA, 19 nt, Artificial Sequence
  Description of Artificial Sequence: Synthetic oligonucleotide
  Sense strand starting at position 3676 of SEQ ID NO: 1563070
caagaacacuggucuauug

SEQ ID NO: 1793192 - RNA, 19 nt, Artificial Sequence
  Description of Artificial Sequence: Synthetic oligonucleotide
  Antisense strand to SEQ ID NO: 1793191
caauagaccaguguucuug

SEQ ID NO: 1793193 - RNA, 19 nt, Artificial Sequence
  Description of Artificial Sequence: Synthetic oligonucleotide
  Sense strand starting at position 3707 of SEQ ID NO: 1563070
gggugagacuaagccgauu

SEQ ID NO: 1793194 - RNA, 19 nt, Artificial Sequence
  Description of Artificial Sequence: Synthetic oligonucleotide
  Antisense strand to SEQ ID NO: 1793193
aaucggcuuagucucaccc

SEQ ID NO: 1793195 - RNA, 19 nt, Artificial Sequence
  Description of Artificial Sequence: Synthetic oligonucleotide
  Sense strand starting at position 3826 of SEQ ID NO: 1563070
ccaggaagcuuuccacaau

SEQ ID NO: 1793196 - RNA, 19 nt, Artificial Sequence
  Description of Artificial Sequence: Synthetic oligonucleotide
  Antisense strand to SEQ ID NO: 1793195
auuguggaaagcuuccugg

SEQ ID NO: 1793197 - RNA, 19 nt, Artificial Sequence
  Description of Artificial Sequence: Synthetic oligonucleotide
  Sense strand starting at position 9 of SEQ ID NO: 1563071
auggauagaaugugguaua

SEQ ID NO: 1793198 - RNA, 19 nt, Artificial Sequence
  Description of Artificial Sequence: Synthetic oligonucleotide
  Antisense strand to SEQ ID NO: 1793197
uauaccacauucuauccau

SEQ ID NO: 1793199 - RNA, 19 nt, Artificial Sequence
  Description of Artificial Sequence: Synthetic oligonucleotide
  Sense strand starting at position 128 of SEQ ID NO: 1563071
agaaacauucucugaagug

SEQ ID NO: 1793200 - RNA, 19 nt, Artificial Sequence
  Description of Artificial Sequence: Synthetic oligonucleotide
  Antisense strand to SEQ ID NO: 1793199
cacuucagagaauguuucu

SEQ ID NO: 1793201 - RNA, 19 nt, Artificial Sequence
  Description of Artificial Sequence: Synthetic oligonucleotide
  Sense strand starting at position 334 of SEQ ID NO: 1563071
aguggugaugacuaugcaa

SEQ ID NO: 1793202 - RNA, 19 nt, Artificial Sequence
  Description of Artificial Sequence: Synthetic oligonucleotide
  Antisense strand to SEQ ID NO: 1793201
uugcauagucaucaccacu

SEQ ID NO: 1793203 - RNA, 19 nt, Artificial Sequence
  Description of Artificial Sequence: Synthetic oligonucleotide
  Sense strand starting at position 336 of SEQ ID NO: 1563071
uggugaugacuaugcaacu

SEQ ID NO: 1793204 - RNA, 19 nt, Artificial Sequence
  Description of Artificial Sequence: Synthetic oligonucleotide
  Antisense strand to SEQ ID NO: 1793203
aguugcauagucaucacca

SEQ ID NO: 1793205 - RNA, 19 nt, Artificial Sequence
  Description of Artificial Sequence: Synthetic oligonucleotide
  Sense strand starting at position 546 of SEQ ID NO: 1563071
cccaacaguuccuuuagga

SEQ ID NO: 1793206 - RNA, 19 nt, Artificial Sequence
  Description of Artificial Sequence: Synthetic oligonucleotide
  Antisense strand to SEQ ID NO: 1793205
uccuaaaggaacuguuggg

SEQ ID NO: 1793207 - RNA, 19 nt, Artificial Sequence
  Description of Artificial Sequence: Synthetic oligonucleotide
  Sense strand starting at position 601 of SEQ ID NO: 1563071
gagacuagaucggaaggaa

SEQ ID NO: 1793208 - RNA, 19 nt, Artificial Sequence
  Description of Artificial Sequence: Synthetic oligonucleotide
  Antisense strand to SEQ ID NO: 1793207
uuccuuccgaucuagucuc

SEQ ID NO: 1793209 - RNA, 19 nt, Artificial Sequence
  Description of Artificial Sequence: Synthetic oligonucleotide
  Sense strand starting at position 722 of SEQ ID NO: 1563071
ggguuaucacauggaggcu

SEQ ID NO: 1793210 - RNA, 19 nt, Artificial Sequence
  Description of Artificial Sequence: Synthetic oligonucleotide
  Antisense strand to SEQ ID NO: 1793209
agccuccaugugauaaccc

SEQ ID NO: 1793211 - RNA, 19 nt, Artificial Sequence
  Description of Artificial Sequence: Synthetic oligonucleotide
  Sense strand starting at position 723 of SEQ ID NO: 1563071
gguuaucacauggaggcua

SEQ ID NO: 1793212 - RNA, 19 nt, Artificial Sequence
  Description of Artificial Sequence: Synthetic oligonucleotide
  Antisense strand to SEQ ID NO: 1793211
uagccuccaugugauaacc

SEQ ID NO: 1793213 - RNA, 19 nt, Artificial Sequence
  Description of Artificial Sequence: Synthetic oligonucleotide
  Sense strand starting at position 786 of SEQ ID NO: 1563071
aagggaaugucuguuggga

SEQ ID NO: 1793214 - RNA, 19 nt, Artificial Sequence
  Description of Artificial Sequence: Synthetic oligonucleotide
  Antisense strand to SEQ ID NO: 1793213
ucccaacagacauucccuu

SEQ ID NO: 1793215 - RNA, 19 nt, Artificial Sequence
  Description of Artificial Sequence: Synthetic oligonucleotide
  Sense strand starting at position 795 of SEQ ID NO: 1563071
ucuguugggaagugagaaa

SEQ ID NO: 1793216 - RNA, 19 nt, Artificial Sequence
  Description of Artificial Sequence: Synthetic oligonucleotide
  Antisense strand to SEQ ID NO: 1793215
uuucucacuucccaacaga

SEQ ID NO: 1793217 - RNA, 19 nt, Artificial Sequence
  Description of Artificial Sequence: Synthetic oligonucleotide
  Sense strand starting at position 1016 of SEQ ID NO: 1563071
cugugaauccuagggucac

SEQ ID NO: 1793218 - RNA, 19 nt, Artificial Sequence
  Description of Artificial Sequence: Synthetic oligonucleotide
  Antisense strand to SEQ ID NO: 1793217
gugacccuaggauucacag

SEQ ID NO: 1793219 - RNA, 19 nt, Artificial Sequence
  Description of Artificial Sequence: Synthetic oligonucleotide
  Sense strand starting at position 1129 of SEQ ID NO: 1563071
guggaugguuccuucccua

SEQ ID NO: 1793220 - RNA, 19 nt, Artificial Sequence
  Description of Artificial Sequence: Synthetic oligonucleotide
  Antisense strand to SEQ ID NO: 1793219
uagggaaggaaccauccac

SEQ ID NO: 1793221 - RNA, 19 nt, Artificial Sequence
  Description of Artificial Sequence: Synthetic oligonucleotide
  Sense strand starting at position 1153 of SEQ ID NO: 1563071
cgggccuuugagugggaau

SEQ ID NO: 1793222 - RNA, 19 nt, Artificial Sequence
  Description of Artificial Sequence: Synthetic oligonucleotide
  Antisense strand to SEQ ID NO: 1793221
auucccacucaaaggcccg

SEQ ID NO: 1793223 - RNA, 19 nt, Artificial Sequence
  Description of Artificial Sequence: Synthetic oligonucleotide
  Sense strand starting at position 1344 of SEQ ID NO: 1563071
ggugggauccucgggucaa

SEQ ID NO: 1793224 - RNA, 19 nt, Artificial Sequence
  Description of Artificial Sequence: Synthetic oligonucleotide
  Antisense strand to SEQ ID NO: 1793223
uugacccgaggaucccacc

SEQ ID NO: 1793225 - RNA, 19 nt, Artificial Sequence
  Description of Artificial Sequence: Synthetic oligonucleotide
  Sense strand starting at position 1356 of SEQ ID NO: 1563071
gggucaaauuccucuccac

SEQ ID NO: 1793226 - RNA, 19 nt, Artificial Sequence
  Description of Artificial Sequence: Synthetic oligonucleotide
  Antisense strand to SEQ ID NO: 1793225
guggagaggaauuugaccc

SEQ ID NO: 1793227 - RNA, 19 nt, Artificial Sequence
  Description of Artificial Sequence: Synthetic oligonucleotide
  Sense strand starting at position 2123 of SEQ ID NO: 1563071
gaggcuggucgggaaguuu

SEQ ID NO: 1793228 - RNA, 19 nt, Artificial Sequence
  Description of Artificial Sequence: Synthetic oligonucleotide
  Antisense strand to SEQ ID NO: 1793227
aaacuucccgaccagccuc

SEQ ID NO: 1793229 - RNA, 19 nt, Artificial Sequence
  Description of Artificial Sequence: Synthetic oligonucleotide
  Sense strand starting at position 2239 of SEQ ID NO: 1563071
gucaguucuguuuaagaga

SEQ ID NO: 1793230 - RNA, 19 nt, Artificial Sequence
  Description of Artificial Sequence: Synthetic oligonucleotide
  Antisense strand to SEQ ID NO: 1793229
ucucuuaaacagaacugac

SEQ ID NO: 1793231 - RNA, 19 nt, Artificial Sequence
  Description of Artificial Sequence: Synthetic oligonucleotide
  Sense strand starting at position 2262 of SEQ ID NO: 1563071
ccuuucugccuguaagcaa

SEQ ID NO: 1793232 - RNA, 19 nt, Artificial Sequence
  Description of Artificial Sequence: Synthetic oligonucleotide
  Antisense strand to SEQ ID NO: 1793231
uugcuuacaggcagaaagg

SEQ ID NO: 1793233 - RNA, 19 nt, Artificial Sequence
  Description of Artificial Sequence: Synthetic oligonucleotide
  Sense strand starting at position 2337 of SEQ ID NO: 1563071
ggguguauucgugcuacug

SEQ ID NO: 1793234 - RNA, 19 nt, Artificial Sequence
  Description of Artificial Sequence: Synthetic oligonucleotide
  Antisense strand to SEQ ID NO: 1793233
caguagcacgaauacaccc

SEQ ID NO: 1793235 - RNA, 19 nt, Artificial Sequence
  Description of Artificial Sequence: Synthetic oligonucleotide
  Sense strand starting at position 2338 of SEQ ID NO: 1563071
gguguauucgugcuacugu

SEQ ID NO: 1793236 - RNA, 19 nt, Artificial Sequence
  Description of Artificial Sequence: Synthetic oligonucleotide
  Antisense strand to SEQ ID NO: 1793235
acaguagcacgaauacacc

SEQ ID NO: 1793237 - RNA, 19 nt, Artificial Sequence
  Description of Artificial Sequence: Synthetic oligonucleotide
  Sense strand starting at position 2384 of SEQ ID NO: 1563071
gguggucugauguauaguc

SEQ ID NO: 1793238 - RNA, 19 nt, Artificial Sequence
  Description of Artificial Sequence: Synthetic oligonucleotide
  Antisense strand to SEQ ID NO: 1793237
gacuauacaucagaccacc

SEQ ID NO: 1793239 - RNA, 19 nt, Artificial Sequence
  Description of Artificial Sequence: Synthetic oligonucleotide
  Sense strand starting at position 2386 of SEQ ID NO: 1563071
uggucugauguauagucau

SEQ ID NO: 1793240 - RNA, 19 nt, Artificial Sequence
  Description of Artificial Sequence: Synthetic oligonucleotide
  Antisense strand to SEQ ID NO: 1793239
augacuauacaucagacca

SEQ ID NO: 1793241 - RNA, 19 nt, Artificial Sequence
  Description of Artificial Sequence: Synthetic oligonucleotide
  Sense strand starting at position 2389 of SEQ ID NO: 1563071
ucugauguauagucauaca

SEQ ID NO: 1793242 - RNA, 19 nt, Artificial Sequence
  Description of Artificial Sequence: Synthetic oligonucleotide
  Antisense strand to SEQ ID NO: 1793241
uguaugacuauacaucaga

SEQ ID NO: 1793243 - RNA, 19 nt, Artificial Sequence
  Description of Artificial Sequence: Synthetic oligonucleotide
  Sense strand starting at position 2450 of SEQ ID NO: 1563071
cucuccauuuaucagggau

SEQ ID NO: 1793244 - RNA, 19 nt, Artificial Sequence
  Description of Artificial Sequence: Synthetic oligonucleotide
  Antisense strand to SEQ ID NO: 1793243
aucccugauaaauggagag

SEQ ID NO: 1793245 - RNA, 19 nt, Artificial Sequence
  Description of Artificial Sequence: Synthetic oligonucleotide
  Sense strand starting at position 2452 of SEQ ID NO: 1563071
cuccauuuaucagggauuu

SEQ ID NO: 1793246 - RNA, 19 nt, Artificial Sequence
  Description of Artificial Sequence: Synthetic oligonucleotide
  Antisense strand to SEQ ID NO: 1793245
aaaucccugauaaauggag

SEQ ID NO: 1793247 - RNA, 19 nt, Artificial Sequence
  Description of Artificial Sequence: Synthetic oligonucleotide
  Sense strand starting at position 2672 of SEQ ID NO: 1563071
gccgaauagcguaaagguu

SEQ ID NO: 1793248 - RNA, 19 nt, Artificial Sequence
  Description of Artificial Sequence: Synthetic oligonucleotide
  Antisense strand to SEQ ID NO: 1793247
aaccuuuacgcuauucggc

SEQ ID NO: 1793249 - RNA, 19 nt, Artificial Sequence
  Description of Artificial Sequence: Synthetic oligonucleotide
  Sense strand starting at position 2689 of SEQ ID NO: 1563071
uugugaagcccugauauac

SEQ ID NO: 1793250 - RNA, 19 nt, Artificial Sequence
  Description of Artificial Sequence: Synthetic oligonucleotide
  Antisense strand to SEQ ID NO: 1793249
guauaucagggcuucacaa

SEQ ID NO: 1793251 - RNA, 19 nt, Artificial Sequence
  Description of Artificial Sequence: Synthetic oligonucleotide
  Sense strand starting at position 2731 of SEQ ID NO: 1563071
ugauaaaucuuagcacagu

SEQ ID NO: 1793252 - RNA, 19 nt, Artificial Sequence
  Description of Artificial Sequence: Synthetic oligonucleotide
  Antisense strand to SEQ ID NO: 1793251
acugugcuaagauuuauca

SEQ ID NO: 1793253 - RNA, 19 nt, Artificial Sequence
  Description of Artificial Sequence: Synthetic oligonucleotide
  Sense strand starting at position 2742 of SEQ ID NO: 1563071
agcacagucuaaguucuau

SEQ ID NO: 1793254 - RNA, 19 nt, Artificial Sequence
  Description of Artificial Sequence: Synthetic oligonucleotide
  Antisense strand to SEQ ID NO: 1793253
auagaacuuagacugugcu

SEQ ID NO: 1793255 - RNA, 19 nt, Artificial Sequence
  Description of Artificial Sequence: Synthetic oligonucleotide
  Sense strand starting at position 2748 of SEQ ID NO: 1563071
gucuaaguucuauaaccuu

SEQ ID NO: 1793256 - RNA, 19 nt, Artificial Sequence
  Description of Artificial Sequence: Synthetic oligonucleotide
  Antisense strand to SEQ ID NO: 1793255
aagguuauagaacuuagac

SEQ ID NO: 1793257 - RNA, 19 nt, Artificial Sequence
  Description of Artificial Sequence: Synthetic oligonucleotide
  Sense strand starting at position 2822 of SEQ ID NO: 1563071
caucguaugcuugugcauu

SEQ ID NO: 1793258 - RNA, 19 nt, Artificial Sequence
  Description of Artificial Sequence: Synthetic oligonucleotide
  Antisense strand to SEQ ID NO: 1793257
aaugcacaagcauacgaug

SEQ ID NO: 1793259 - RNA, 19 nt, Artificial Sequence
  Description of Artificial Sequence: Synthetic oligonucleotide
  Sense strand starting at position 2835 of SEQ ID NO: 1563071
ugcauugaauaccugaaga

SEQ ID NO: 1793260 - RNA, 19 nt, Artificial Sequence
  Description of Artificial Sequence: Synthetic oligonucleotide
  Antisense strand to SEQ ID NO: 1793259
ucuucagguauucaaugca

SEQ ID NO: 1793261 - RNA, 19 nt, Artificial Sequence
  Description of Artificial Sequence: Synthetic oligonucleotide
  Sense strand starting at position 3715 of SEQ ID NO: 1563071
agagguuacagugagugua

SEQ ID NO: 1793262 - RNA, 19 nt, Artificial Sequence
  Description of Artificial Sequence: Synthetic oligonucleotide
  Antisense strand to SEQ ID NO: 1793261
uacacucacuguaaccucu

SEQ ID NO: 1793263 - RNA, 19 nt, Artificial Sequence
  Description of Artificial Sequence: Synthetic oligonucleotide
  Sense strand starting at position 3718 of SEQ ID NO: 1563071
gguuacagugaguguagau

SEQ ID NO: 1793264 - RNA, 19 nt, Artificial Sequence
  Description of Artificial Sequence: Synthetic oligonucleotide
  Antisense strand to SEQ ID NO: 1793263
aucuacacucacuguaacc

SEQ ID NO: 1793265 - RNA, 19 nt, Artificial Sequence
  Description of Artificial Sequence: Synthetic oligonucleotide
  Sense strand starting at position 3748 of SEQ ID NO: 1563071
acuccauccugggugagua

SEQ ID NO: 1793266 - RNA, 19 nt, Artificial Sequence
  Description of Artificial Sequence: Synthetic oligonucleotide
  Antisense strand to SEQ ID NO: 1793265
uacucacccaggauggagu

SEQ ID NO: 1793267 - RNA, 19 nt, Artificial Sequence
  Description of Artificial Sequence: Synthetic oligonucleotide
  Sense strand starting at position 3883 of SEQ ID NO: 1563071
ucauguguccaauaaauag

SEQ ID NO: 1793268 - RNA, 19 nt, Artificial Sequence
  Description of Artificial Sequence: Synthetic oligonucleotide
  Antisense strand to SEQ ID NO: 1793267
cuauuuauuggacacauga

SEQ ID NO: 1793269 - RNA, 19 nt, Artificial Sequence
  Description of Artificial Sequence: Synthetic oligonucleotide
  Sense strand starting at position 3899 of SEQ ID NO: 1563071
uaguuagugcuugccuuau

SEQ ID NO: 1793270 - RNA, 19 nt, Artificial Sequence
  Description of Artificial Sequence: Synthetic oligonucleotide
  Antisense strand to SEQ ID NO: 1793269
auaaggcaagcacuaacua

SEQ ID NO: 1793271 - RNA, 19 nt, Artificial Sequence
  Description of Artificial Sequence: Synthetic oligonucleotide
  Sense strand starting at position 3903 of SEQ ID NO: 1563071
uagugcuugccuuauggaa

SEQ ID NO: 1793272 - RNA, 19 nt, Artificial Sequence
  Description of Artificial Sequence: Synthetic oligonucleotide
  Antisense strand to SEQ ID NO: 1793271
uuccauaaggcaagcacua

SEQ ID NO: 1793273 - RNA, 19 nt, Artificial Sequence
  Description of Artificial Sequence: Synthetic oligonucleotide
  Sense strand starting at position 3957 of SEQ ID NO: 1563071
agccauuacuggucuggaa

SEQ ID NO: 1793274 - RNA, 19 nt, Artificial Sequence
  Description of Artificial Sequence: Synthetic oligonucleotide
  Antisense strand to SEQ ID NO: 1793273
uuccagaccaguaauggcu

SEQ ID NO: 1793275 - RNA, 19 nt, Artificial Sequence
  Description of Artificial Sequence: Synthetic oligonucleotide
  Sense strand starting at position 3959 of SEQ ID NO: 1563071
ccauuacuggucuggaaac

SEQ ID NO: 1793276 - RNA, 19 nt, Artificial Sequence
  Description of Artificial Sequence: Synthetic oligonucleotide
  Antisense strand to SEQ ID NO: 1793275
guuuccagaccaguaaugg

SEQ ID NO: 1793277 - RNA, 19 nt, Artificial Sequence
  Description of Artificial Sequence: Synthetic oligonucleotide
  Sense strand starting at position 264 of SEQ ID NO: 1563072
cugugaugcuuuguuacag

SEQ ID NO: 1793278 - RNA, 19 nt, Artificial Sequence
  Description of Artificial Sequence: Synthetic oligonucleotide
  Antisense strand to SEQ ID NO: 1793277
cuguaacaaagcaucacag

SEQ ID NO: 1793279 - RNA, 19 nt, Artificial Sequence
  Description of Artificial Sequence: Synthetic oligonucleotide
  Sense strand starting at position 1001 of SEQ ID NO: 1563072
ccacaaguuccugguuguu

SEQ ID NO: 1793280 - RNA, 19 nt, Artificial Sequence
  Description of Artificial Sequence: Synthetic oligonucleotide
  Antisense strand to SEQ ID NO: 1793279
aacaaccaggaacuugugg

SEQ ID NO: 1793281 - RNA, 19 nt, Artificial Sequence
  Description of Artificial Sequence: Synthetic oligonucleotide
  Sense strand starting at position 1013 of SEQ ID NO: 1563072
gguuguuucugggacgcua

SEQ ID NO: 1793282 - RNA, 19 nt, Artificial Sequence
  Description of Artificial Sequence: Synthetic oligonucleotide
  Antisense strand to SEQ ID NO: 1793281
uagcgucccagaaacaacc

SEQ ID NO: 1793283 - RNA, 19 nt, Artificial Sequence
  Description of Artificial Sequence: Synthetic oligonucleotide
  Sense strand starting at position 1052 of SEQ ID NO: 1563072
ccaucuuucuuguaagagu

SEQ ID NO: 1793284 - RNA, 19 nt, Artificial Sequence
  Description of Artificial Sequence: Synthetic oligonucleotide
  Antisense strand to SEQ ID NO: 1793283
acucuuacaagaaagaugg

SEQ ID NO: 1793285 - RNA, 19 nt, Artificial Sequence
  Description of Artificial Sequence: Synthetic oligonucleotide
  Sense strand starting at position 2347 of SEQ ID NO: 1563072
ucagucgaaugauauugaa

SEQ ID NO: 1793286 - RNA, 19 nt, Artificial Sequence
  Description of Artificial Sequence: Synthetic oligonucleotide
  Antisense strand to SEQ ID NO: 1793285
uucaauaucauucgacuga

SEQ ID NO: 1793287 - RNA, 19 nt, Artificial Sequence
  Description of Artificial Sequence: Synthetic oligonucleotide
  Sense strand starting at position 2350 of SEQ ID NO: 1563072
gucgaaugauauugaaaug

SEQ ID NO: 1793288 - RNA, 19 nt, Artificial Sequence
  Description of Artificial Sequence: Synthetic oligonucleotide
  Antisense strand to SEQ ID NO: 1793287
cauuucaauaucauucgac

SEQ ID NO: 1793289 - RNA, 19 nt, Artificial Sequence
  Description of Artificial Sequence: Synthetic oligonucleotide
  Sense strand starting at position 2364 of SEQ ID NO: 1563072
aaauguaacuguucuguga

SEQ ID NO: 1793290 - RNA, 19 nt, Artificial Sequence
  Description of Artificial Sequence: Synthetic oligonucleotide
  Antisense strand to SEQ ID NO: 1793289
ucacagaacaguuacauuu

SEQ ID NO: 1793291 - RNA, 19 nt, Artificial Sequence
  Description of Artificial Sequence: Synthetic oligonucleotide
  Sense strand starting at position 2384 of SEQ ID NO: 1563072
ccgucagucccgcacgaaa

SEQ ID NO: 1793292 - RNA, 19 nt, Artificial Sequence
  Description of Artificial Sequence: Synthetic oligonucleotide
  Antisense strand to SEQ ID NO: 1793291
uuucgugcgggacugacgg

SEQ ID NO: 1793293 - RNA, 19 nt, Artificial Sequence
  Description of Artificial Sequence: Synthetic oligonucleotide
  Sense strand starting at position 3760 of SEQ ID NO: 1563072
ugagcauucuuacacaaga

SEQ ID NO: 1793294 - RNA, 19 nt, Artificial Sequence
  Description of Artificial Sequence: Synthetic oligonucleotide
  Antisense strand to SEQ ID NO: 1793293
ucuuguguaagaaugcuca

SEQ ID NO: 1793295 - RNA, 19 nt, Artificial Sequence
  Description of Artificial Sequence: Synthetic oligonucleotide
  Sense strand starting at position 3840 of SEQ ID NO: 1563072
cucuguccuccuuggugaa

SEQ ID NO: 1793296 - RNA, 19 nt, Artificial Sequence
  Description of Artificial Sequence: Synthetic oligonucleotide
  Antisense strand to SEQ ID NO: 1793295
uucaccaaggaggacagag

SEQ ID NO: 1793297 - RNA, 19 nt, Artificial Sequence
  Description of Artificial Sequence: Synthetic oligonucleotide
  Sense strand starting at position 3843 of SEQ ID NO: 1563072
uguccuccuuggugaagga

SEQ ID NO: 1793298 - RNA, 19 nt, Artificial Sequence
  Description of Artificial Sequence: Synthetic oligonucleotide
  Antisense strand to SEQ ID NO: 1793297
uccuucaccaaggaggaca

SEQ ID NO: 1793299 - RNA, 19 nt, Artificial Sequence
  Description of Artificial Sequence: Synthetic oligonucleotide
  Sense strand starting at position 3900 of SEQ ID NO: 1563072
cuccauugauucucauugu

SEQ ID NO: 1793300 - RNA, 19 nt, Artificial Sequence
  Description of Artificial Sequence: Synthetic oligonucleotide
  Antisense strand to SEQ ID NO: 1793299
acaaugagaaucaauggag

SEQ ID NO: 1793301 - RNA, 19 nt, Artificial Sequence
  Description of Artificial Sequence: Synthetic oligonucleotide
  Sense strand starting at position 3901 of SEQ ID NO: 1563072
uccauugauucucauuguu

SEQ ID NO: 1793302 - RNA, 19 nt, Artificial Sequence
  Description of Artificial Sequence: Synthetic oligonucleotide
  Antisense strand to SEQ ID NO: 1793301
aacaaugagaaucaaugga

SEQ ID NO: 1793303 - RNA, 19 nt, Artificial Sequence
  Description of Artificial Sequence: Synthetic oligonucleotide
  Sense strand starting at position 247 of SEQ ID NO: 1563073
agucucugggacugaguaa

SEQ ID NO: 1793304 - RNA, 19 nt, Artificial Sequence
  Description of Artificial Sequence: Synthetic oligonucleotide
  Antisense strand to SEQ ID NO: 1793303
uuacucagucccagagacu

SEQ ID NO: 1793305 - RNA, 19 nt, Artificial Sequence
  Description of Artificial Sequence: Synthetic oligonucleotide
  Sense strand starting at position 723 of SEQ ID NO: 1563073
acaggugugaagcaucaua

SEQ ID NO: 1793306 - RNA, 19 nt, Artificial Sequence
  Description of Artificial Sequence: Synthetic oligonucleotide
  Antisense strand to SEQ ID NO: 1793305
uaugaugcuucacaccugu

SEQ ID NO: 1793307 - RNA, 19 nt, Artificial Sequence
  Description of Artificial Sequence: Synthetic oligonucleotide
  Sense strand starting at position 747 of SEQ ID NO: 1563073
cugaaacccuggugucuuu

SEQ ID NO: 1793308 - RNA, 19 nt, Artificial Sequence
  Description of Artificial Sequence: Synthetic oligonucleotide
  Antisense strand to SEQ ID NO: 1793307
aaagacaccaggguuucag

SEQ ID NO: 1793309 - RNA, 19 nt, Artificial Sequence
  Description of Artificial Sequence: Synthetic oligonucleotide
  Sense strand starting at position 1075 of SEQ ID NO: 1563073
cugguaucuuacuugugca

SEQ ID NO: 1793310 - RNA, 19 nt, Artificial Sequence
  Description of Artificial Sequence: Synthetic oligonucleotide
  Antisense strand to SEQ ID NO: 1793309
ugcacaaguaagauaccag

SEQ ID NO: 1793311 - RNA, 19 nt, Artificial Sequence
  Description of Artificial Sequence: Synthetic oligonucleotide
  Sense strand starting at position 1147 of SEQ ID NO: 1563073
ggagcugggucaggagaau

SEQ ID NO: 1793312 - RNA, 19 nt, Artificial Sequence
  Description of Artificial Sequence: Synthetic oligonucleotide
  Antisense strand to SEQ ID NO: 1793311
auucuccugacccagcucc

SEQ ID NO: 1793313 - RNA, 19 nt, Artificial Sequence
  Description of Artificial Sequence: Synthetic oligonucleotide
  Sense strand starting at position 1719 of SEQ ID NO: 1563073
gcacuugagauguggauau

SEQ ID NO: 1793314 - RNA, 19 nt, Artificial Sequence
  Description of Artificial Sequence: Synthetic oligonucleotide
  Antisense strand to SEQ ID NO: 1793313
auauccacaucucaagugc

SEQ ID NO: 1793315 - RNA, 19 nt, Artificial Sequence
  Description of Artificial Sequence: Synthetic oligonucleotide
  Sense strand starting at position 2256 of SEQ ID NO: 1563073
gguucauucugccgacagu

SEQ ID NO: 1793316 - RNA, 19 nt, Artificial Sequence
  Description of Artificial Sequence: Synthetic oligonucleotide
  Antisense strand to SEQ ID NO: 1793315
acugucggcagaaugaacc

SEQ ID NO: 1793317 - RNA, 19 nt, Artificial Sequence
  Description of Artificial Sequence: Synthetic oligonucleotide
  Sense strand starting at position 2303 of SEQ ID NO: 1563073
ggacuagagucuuaaccuc

SEQ ID NO: 1793318 - RNA, 19 nt, Artificial Sequence
  Description of Artificial Sequence: Synthetic oligonucleotide
  Antisense strand to SEQ ID NO: 1793317
gagguuaagacucuagucc

SEQ ID NO: 1793319 - RNA, 19 nt, Artificial Sequence
  Description of Artificial Sequence: Synthetic oligonucleotide
  Sense strand starting at position 2311 of SEQ ID NO: 1563073
gucuuaaccucucugucau

SEQ ID NO: 1793320 - RNA, 19 nt, Artificial Sequence
  Description of Artificial Sequence: Synthetic oligonucleotide
  Antisense strand to SEQ ID NO: 1793319
augacagagagguuaagac

SEQ ID NO: 1793321 - RNA, 19 nt, Artificial Sequence
  Description of Artificial Sequence: Synthetic oligonucleotide
  Sense strand starting at position 2317 of SEQ ID NO: 1563073
accucucugucaugacagu

SEQ ID NO: 1793322 - RNA, 19 nt, Artificial Sequence
  Description of Artificial Sequence: Synthetic oligonucleotide
  Antisense strand to SEQ ID NO: 1793321
acugucaugacagagaggu

SEQ ID NO: 1793323 - RNA, 19 nt, Artificial Sequence
  Description of Artificial Sequence: Synthetic oligonucleotide
  Sense strand starting at position 2318 of SEQ ID NO: 1563073
ccucucugucaugacaguu

SEQ ID NO: 1793324 - RNA, 19 nt, Artificial Sequence
  Description of Artificial Sequence: Synthetic oligonucleotide
  Antisense strand to SEQ ID NO: 1793323
aacugucaugacagagagg

SEQ ID NO: 1793325 - RNA, 19 nt, Artificial Sequence
  Description of Artificial Sequence: Synthetic oligonucleotide
  Sense strand starting at position 2641 of SEQ ID NO: 1563073
guugauauuugccaauugu

SEQ ID NO: 1793326 - RNA, 19 nt, Artificial Sequence
  Description of Artificial Sequence: Synthetic oligonucleotide
  Antisense strand to SEQ ID NO: 1793325
acaauuggcaaauaucaac

SEQ ID NO: 1793327 - RNA, 19 nt, Artificial Sequence
  Description of Artificial Sequence: Synthetic oligonucleotide
  Sense strand starting at position 2682 of SEQ ID NO: 1563073
gggcgaaauucacuggaca

SEQ ID NO: 1793328 - RNA, 19 nt, Artificial Sequence
  Description of Artificial Sequence: Synthetic oligonucleotide
  Antisense strand to SEQ ID NO: 1793327
uguccagugaauuucgccc

SEQ ID NO: 1793329 - RNA, 19 nt, Artificial Sequence
  Description of Artificial Sequence: Synthetic oligonucleotide
  Sense strand starting at position 2683 of SEQ ID NO: 1563073
ggcgaaauucacuggacag

SEQ ID NO: 1793330 - RNA, 19 nt, Artificial Sequence
  Description of Artificial Sequence: Synthetic oligonucleotide
  Antisense strand to SEQ ID NO: 1793329
cuguccagugaauuucgcc

SEQ ID NO: 1793331 - RNA, 19 nt, Artificial Sequence
  Description of Artificial Sequence: Synthetic oligonucleotide
  Sense strand starting at position 2728 of SEQ ID NO: 1563073
gagagaugggugcagugau

SEQ ID NO: 1793332 - RNA, 19 nt, Artificial Sequence
  Description of Artificial Sequence: Synthetic oligonucleotide
  Antisense strand to SEQ ID NO: 1793331
aucacugcacccaucucuc

SEQ ID NO: 1793333 - RNA, 19 nt, Artificial Sequence
  Description of Artificial Sequence: Synthetic oligonucleotide
  Sense strand starting at position 2797 of SEQ ID NO: 1563073
gcacuagggucacagaaau

SEQ ID NO: 1793334 - RNA, 19 nt, Artificial Sequence
  Description of Artificial Sequence: Synthetic oligonucleotide
  Antisense strand to SEQ ID NO: 1793333
auuucugugacccuagugc

SEQ ID NO: 1793335 - RNA, 19 nt, Artificial Sequence
  Description of Artificial Sequence: Synthetic oligonucleotide
  Sense strand starting at position 2867 of SEQ ID NO: 1563073
aggauuggcugagaaccua

SEQ ID NO: 1793336 - RNA, 19 nt, Artificial Sequence
  Description of Artificial Sequence: Synthetic oligonucleotide
  Antisense strand to SEQ ID NO: 1793335
uagguucucagccaauccu

SEQ ID NO: 1793337 - RNA, 19 nt, Artificial Sequence
  Description of Artificial Sequence: Synthetic oligonucleotide
  Sense strand starting at position 2918 of SEQ ID NO: 1563073
agaaaugacuaagauacaa

SEQ ID NO: 1793338 - RNA, 19 nt, Artificial Sequence
  Description of Artificial Sequence: Synthetic oligonucleotide
  Antisense strand to SEQ ID NO: 1793337
uuguaucuuagucauuucu

SEQ ID NO: 1793339 - RNA, 19 nt, Artificial Sequence
  Description of Artificial Sequence: Synthetic oligonucleotide
  Sense strand starting at position 2956 of SEQ ID NO: 1563073
uggucugguucgagggaca

SEQ ID NO: 1793340 - RNA, 19 nt, Artificial Sequence
  Description of Artificial Sequence: Synthetic oligonucleotide
  Antisense strand to SEQ ID NO: 1793339
ugucccucgaaccagacca

SEQ ID NO: 1793341 - RNA, 19 nt, Artificial Sequence
  Description of Artificial Sequence: Synthetic oligonucleotide
  Sense strand starting at position 2957 of SEQ ID NO: 1563073
ggucugguucgagggacaa

SEQ ID NO: 1793342 - RNA, 19 nt, Artificial Sequence
  Description of Artificial Sequence: Synthetic oligonucleotide
  Antisense strand to SEQ ID NO: 1793341
uugucccucgaaccagacc

SEQ ID NO: 1793343 - RNA, 19 nt, Artificial Sequence
  Description of Artificial Sequence: Synthetic oligonucleotide
  Sense strand starting at position 3146 of SEQ ID NO: 1563073
ggccaaugcuagcucagaa

SEQ ID NO: 1793344 - RNA, 19 nt, Artificial Sequence
  Description of Artificial Sequence: Synthetic oligonucleotide
  Antisense strand to SEQ ID NO: 1793343
uucugagcuagcauuggcc

SEQ ID NO: 1793345 - RNA, 19 nt, Artificial Sequence
  Description of Artificial Sequence: Synthetic oligonucleotide
  Sense strand starting at position 3333 of SEQ ID NO: 1563073
gacgcugaggcuuauauga

SEQ ID NO: 1793346 - RNA, 19 nt, Artificial Sequence
  Description of Artificial Sequence: Synthetic oligonucleotide
  Antisense strand to SEQ ID NO: 1793345
ucauauaagccucagcguc

SEQ ID NO: 1793347 - RNA, 19 nt, Artificial Sequence
  Description of Artificial Sequence: Synthetic oligonucleotide
  Sense strand starting at position 3477 of SEQ ID NO: 1563073
ggccacagcucaucaugua

SEQ ID NO: 1793348 - RNA, 19 nt, Artificial Sequence
  Description of Artificial Sequence: Synthetic oligonucleotide
  Antisense strand to SEQ ID NO: 1793347
uacaugaugagcuguggcc

SEQ ID NO: 1793349 - RNA, 19 nt, Artificial Sequence
  Description of Artificial Sequence: Synthetic oligonucleotide
  Sense strand starting at position 3506 of SEQ ID NO: 1563073
gccugaccuuggugugaaa

SEQ ID NO: 1793350 - RNA, 19 nt, Artificial Sequence
  Description of Artificial Sequence: Synthetic oligonucleotide
  Antisense strand to SEQ ID NO: 1793349
uuucacaccaaggucaggc

SEQ ID NO: 1793351 - RNA, 19 nt, Artificial Sequence
  Description of Artificial Sequence: Synthetic oligonucleotide
  Sense strand starting at position 3534 of SEQ ID NO: 1563073
ggauaaaugucugcuguga

SEQ ID NO: 1793352 - RNA, 19 nt, Artificial Sequence
  Description of Artificial Sequence: Synthetic oligonucleotide
  Antisense strand to SEQ ID NO: 1793351
ucacagcagacauuuaucc

SEQ ID NO: 1793353 - RNA, 19 nt, Artificial Sequence
  Description of Artificial Sequence: Synthetic oligonucleotide
  Sense strand starting at position 3536 of SEQ ID NO: 1563073
auaaaugucugcugugacu

SEQ ID NO: 1793354 - RNA, 19 nt, Artificial Sequence
  Description of Artificial Sequence: Synthetic oligonucleotide
  Antisense strand to SEQ ID NO: 1793353
agucacagcagacauuuau

SEQ ID NO: 1793355 - RNA, 19 nt, Artificial Sequence
  Description of Artificial Sequence: Synthetic oligonucleotide
  Sense strand starting at position 3538 of SEQ ID NO: 1563073
aaaugucugcugugacuuu

SEQ ID NO: 1793356 - RNA, 19 nt, Artificial Sequence
  Description of Artificial Sequence: Synthetic oligonucleotide
  Antisense strand to SEQ ID NO: 1793355
aaagucacagcagacauuu

SEQ ID NO: 1793357 - RNA, 19 nt, Artificial Sequence
  Description of Artificial Sequence: Synthetic oligonucleotide
  Sense strand starting at position 3539 of SEQ ID NO: 1563073
aaugucugcugugacuuua

SEQ ID NO: 1793358 - RNA, 19 nt, Artificial Sequence
  Description of Artificial Sequence: Synthetic oligonucleotide
  Antisense strand to SEQ ID NO: 1793357
uaaagucacagcagacauu

SEQ ID NO: 1793359 - RNA, 19 nt, Artificial Sequence
  Description of Artificial Sequence: Synthetic oligonucleotide
  Sense strand starting at position 3596 of SEQ ID NO: 1563073
auauuuggcuucugugaaa

SEQ ID NO: 1793360 - RNA, 19 nt, Artificial Sequence
  Description of Artificial Sequence: Synthetic oligonucleotide
  Antisense strand to SEQ ID NO: 1793359
uuucacagaagccaaauau

SEQ ID NO: 1793361 - RNA, 19 nt, Artificial Sequence
  Description of Artificial Sequence: Synthetic oligonucleotide
  Sense strand starting at position 3599 of SEQ ID NO: 1563073
uuuggcuucugugaaauaa

SEQ ID NO: 1793362 - RNA, 19 nt, Artificial Sequence
  Description of Artificial Sequence: Synthetic oligonucleotide
  Antisense strand to SEQ ID NO: 1793361
uuauuucacagaagccaaa

SEQ ID NO: 1793363 - RNA, 19 nt, Artificial Sequence
  Description of Artificial Sequence: Synthetic oligonucleotide
  Sense strand starting at position 3609 of SEQ ID NO: 1563073
gugaaauaaucugcugauu

SEQ ID NO: 1793364 - RNA, 19 nt, Artificial Sequence
  Description of Artificial Sequence: Synthetic oligonucleotide
  Antisense strand to SEQ ID NO: 1793363
aaucagcagauuauuucac

SEQ ID NO: 1793365 - RNA, 19 nt, Artificial Sequence
  Description of Artificial Sequence: Synthetic oligonucleotide
  Sense strand starting at position 3675 of SEQ ID NO: 1563073
gacagauucucgcucaguu

SEQ ID NO: 1793366 - RNA, 19 nt, Artificial Sequence
  Description of Artificial Sequence: Synthetic oligonucleotide
  Antisense strand to SEQ ID NO: 1793365
aacugagcgagaaucuguc

SEQ ID NO: 1793367 - RNA, 19 nt, Artificial Sequence
  Description of Artificial Sequence: Synthetic oligonucleotide
  Sense strand starting at position 20 of SEQ ID NO: 1563074
gaacacuauuaauggugau

SEQ ID NO: 1793368 - RNA, 19 nt, Artificial Sequence
  Description of Artificial Sequence: Synthetic oligonucleotide
  Antisense strand to SEQ ID NO: 1793367
aucaccauuaauaguguuc

SEQ ID NO: 1793369 - RNA, 19 nt, Artificial Sequence
  Description of Artificial Sequence: Synthetic oligonucleotide
  Sense strand starting at position 207 of SEQ ID NO: 1563074
cugacaaggcccuauaauc

SEQ ID NO: 1793370 - RNA, 19 nt, Artificial Sequence
  Description of Artificial Sequence: Synthetic oligonucleotide
  Antisense strand to SEQ ID NO: 1793369
gauuauagggccuugucag

SEQ ID NO: 1793371 - RNA, 19 nt, Artificial Sequence
  Description of Artificial Sequence: Synthetic oligonucleotide
  Sense strand starting at position 382 of SEQ ID NO: 1563074
ggauacaaauucuggcuua

SEQ ID NO: 1793372 - RNA, 19 nt, Artificial Sequence
  Description of Artificial Sequence: Synthetic oligonucleotide
  Antisense strand to SEQ ID NO: 1793371
uaagccagaauuuguaucc

SEQ ID NO: 1793373 - RNA, 19 nt, Artificial Sequence
  Description of Artificial Sequence: Synthetic oligonucleotide
  Sense strand starting at position 455 of SEQ ID NO: 1563074
guuuccucaucuguuugau

SEQ ID NO: 1793374 - RNA, 19 nt, Artificial Sequence
  Description of Artificial Sequence: Synthetic oligonucleotide
  Antisense strand to SEQ ID NO: 1793373
aucaaacagaugaggaaac

SEQ ID NO: 1793375 - RNA, 19 nt, Artificial Sequence
  Description of Artificial Sequence: Synthetic oligonucleotide
  Sense strand starting at position 457 of SEQ ID NO: 1563074
uuccucaucuguuugauua

SEQ ID NO: 1793376 - RNA, 19 nt, Artificial Sequence
  Description of Artificial Sequence: Synthetic oligonucleotide
  Antisense strand to SEQ ID NO: 1793375
uaaucaaacagaugaggaa

SEQ ID NO: 1793377 - RNA, 19 nt, Artificial Sequence
  Description of Artificial Sequence: Synthetic oligonucleotide
  Sense strand starting at position 459 of SEQ ID NO: 1563074
ccucaucuguuugauuaag

SEQ ID NO: 1793378 - RNA, 19 nt, Artificial Sequence
  Description of Artificial Sequence: Synthetic oligonucleotide
  Antisense strand to SEQ ID NO: 1793377
cuuaaucaaacagaugagg

SEQ ID NO: 1793379 - RNA, 19 nt, Artificial Sequence
  Description of Artificial Sequence: Synthetic oligonucleotide
  Sense strand starting at position 461 of SEQ ID NO: 1563074
ucaucuguuugauuaagau

SEQ ID NO: 1793380 - RNA, 19 nt, Artificial Sequence
  Description of Artificial Sequence: Synthetic oligonucleotide
  Antisense strand to SEQ ID NO: 1793379
aucuuaaucaaacagauga

SEQ ID NO: 1793381 - RNA, 19 nt, Artificial Sequence
  Description of Artificial Sequence: Synthetic oligonucleotide
  Sense strand starting at position 499 of SEQ ID NO: 1563074
gaucaaaucugguaacgug

SEQ ID NO: 1793382 - RNA, 19 nt, Artificial Sequence
  Description of Artificial Sequence: Synthetic oligonucleotide
  Antisense strand to SEQ ID NO: 1793381
cacguuaccagauuugauc

SEQ ID NO: 1793383 - RNA, 19 nt, Artificial Sequence
  Description of Artificial Sequence: Synthetic oligonucleotide
  Sense strand starting at position 614 of SEQ ID NO: 1563074
ccuucugcuccugacagaa

SEQ ID NO: 1793384 - RNA, 19 nt, Artificial Sequence
  Description of Artificial Sequence: Synthetic oligonucleotide
  Antisense strand to SEQ ID NO: 1793383
uucugucaggagcagaagg

SEQ ID NO: 1793385 - RNA, 19 nt, Artificial Sequence
  Description of Artificial Sequence: Synthetic oligonucleotide
  Sense strand starting at position 1041 of SEQ ID NO: 1563074
caguuuaucuggcugugaa

SEQ ID NO: 1793386 - RNA, 19 nt, Artificial Sequence
  Description of Artificial Sequence: Synthetic oligonucleotide
  Antisense strand to SEQ ID NO: 1793385
uucacagccagauaaacug

SEQ ID NO: 1793387 - RNA, 19 nt, Artificial Sequence
  Description of Artificial Sequence: Synthetic oligonucleotide
  Sense strand starting at position 1042 of SEQ ID NO: 1563074
aguuuaucuggcugugaag

SEQ ID NO: 1793388 - RNA, 19 nt, Artificial Sequence
  Description of Artificial Sequence: Synthetic oligonucleotide
  Antisense strand to SEQ ID NO: 1793387
cuucacagccagauaaacu

SEQ ID NO: 1793389 - RNA, 19 nt, Artificial Sequence
  Description of Artificial Sequence: Synthetic oligonucleotide
  Sense strand starting at position 1080 of SEQ ID NO: 1563074
agcugugaggcucaauaug

SEQ ID NO: 1793390 - RNA, 19 nt, Artificial Sequence
  Description of Artificial Sequence: Synthetic oligonucleotide
  Antisense strand to SEQ ID NO: 1793389
cauauugagccucacagcu

SEQ ID NO: 1793391 - RNA, 19 nt, Artificial Sequence
  Description of Artificial Sequence: Synthetic oligonucleotide
  Sense strand starting at position 1088 of SEQ ID NO: 1563074
ggcucaauaugcuaacuau

SEQ ID NO: 1793392 - RNA, 19 nt, Artificial Sequence
  Description of Artificial Sequence: Synthetic oligonucleotide
  Antisense strand to SEQ ID NO: 1793391
auaguuagcauauugagcc

SEQ ID NO: 1793393 - RNA, 19 nt, Artificial Sequence
  Description of Artificial Sequence: Synthetic oligonucleotide
  Sense strand starting at position 1244 of SEQ ID NO: 1563074
gugguaucccgcugcuuca

SEQ ID NO: 1793394 - RNA, 19 nt, Artificial Sequence
  Description of Artificial Sequence: Synthetic oligonucleotide
  Antisense strand to SEQ ID NO: 1793393
ugaagcagcgggauaccac

SEQ ID NO: 1793395 - RNA, 19 nt, Artificial Sequence
  Description of Artificial Sequence: Synthetic oligonucleotide
  Sense strand starting at position 1457 of SEQ ID NO: 1563074
ggaaucgggucuucgucua

SEQ ID NO: 1793396 - RNA, 19 nt, Artificial Sequence
  Description of Artificial Sequence: Synthetic oligonucleotide
  Antisense strand to SEQ ID NO: 1793395
uagacgaagacccgauucc

SEQ ID NO: 1793397 - RNA, 19 nt, Artificial Sequence
  Description of Artificial Sequence: Synthetic oligonucleotide
  Sense strand starting at position 1698 of SEQ ID NO: 1563074
uccucucgccuucgggaaa

SEQ ID NO: 1793398 - RNA, 19 nt, Artificial Sequence
  Description of Artificial Sequence: Synthetic oligonucleotide
  Antisense strand to SEQ ID NO: 1793397
uuucccgaaggcgagagga

SEQ ID NO: 1793399 - RNA, 19 nt, Artificial Sequence
  Description of Artificial Sequence: Synthetic oligonucleotide
  Sense strand starting at position 1701 of SEQ ID NO: 1563074
ucucgccuucgggaaauga

SEQ ID NO: 1793400 - RNA, 19 nt, Artificial Sequence
  Description of Artificial Sequence: Synthetic oligonucleotide
  Antisense strand to SEQ ID NO: 1793399
ucauuucccgaaggcgaga

SEQ ID NO: 1793401 - RNA, 19 nt, Artificial Sequence
  Description of Artificial Sequence: Synthetic oligonucleotide
  Sense strand starting at position 2555 of SEQ ID NO: 1563074
gccgauuugcccgagguca

SEQ ID NO: 1793402 - RNA, 19 nt, Artificial Sequence
  Description of Artificial Sequence: Synthetic oligonucleotide
  Antisense strand to SEQ ID NO: 1793401
ugaccucgggcaaaucggc

SEQ ID NO: 1793403 - RNA, 19 nt, Artificial Sequence
  Description of Artificial Sequence: Synthetic oligonucleotide
  Sense strand starting at position 2557 of SEQ ID NO: 1563074
cgauuugcccgaggucaca

SEQ ID NO: 1793404 - RNA, 19 nt, Artificial Sequence
  Description of Artificial Sequence: Synthetic oligonucleotide
  Antisense strand to SEQ ID NO: 1793403
ugugaccucgggcaaaucg

SEQ ID NO: 1793405 - RNA, 19 nt, Artificial Sequence
  Description of Artificial Sequence: Synthetic oligonucleotide
  Sense strand starting at position 2584 of SEQ ID NO: 1563074
ggcggaauuccuagcgagu

SEQ ID NO: 1793406 - RNA, 19 nt, Artificial Sequence
  Description of Artificial Sequence: Synthetic oligonucleotide
  Antisense strand to SEQ ID NO: 1793405
acucgcuaggaauuccgcc

SEQ ID NO: 1793407 - RNA, 19 nt, Artificial Sequence
  Description of Artificial Sequence: Synthetic oligonucleotide
  Sense strand starting at position 2587 of SEQ ID NO: 1563074
ggaauuccuagcgaguaag

SEQ ID NO: 1793408 - RNA, 19 nt, Artificial Sequence
  Description of Artificial Sequence: Synthetic oligonucleotide
  Antisense strand to SEQ ID NO: 1793407
cuuacucgcuaggaauucc

SEQ ID NO: 1793409 - RNA, 19 nt, Artificial Sequence
  Description of Artificial Sequence: Synthetic oligonucleotide
  Sense strand starting at position 2597 of SEQ ID NO: 1563074
gcgaguaagcuggacacaa

SEQ ID NO: 1793410 - RNA, 19 nt, Artificial Sequence
  Description of Artificial Sequence: Synthetic oligonucleotide
  Antisense strand to SEQ ID NO: 1793409
uuguguccagcuuacucgc

SEQ ID NO: 1793411 - RNA, 19 nt, Artificial Sequence
  Description of Artificial Sequence: Synthetic oligonucleotide
  Sense strand starting at position 2613 of SEQ ID NO: 1563074
caaagugaguucuuggaug

SEQ ID NO: 1793412 - RNA, 19 nt, Artificial Sequence
  Description of Artificial Sequence: Synthetic oligonucleotide
  Antisense strand to SEQ ID NO: 1793411
cauccaagaacucacuuug

SEQ ID NO: 1793413 - RNA, 19 nt, Artificial Sequence
  Description of Artificial Sequence: Synthetic oligonucleotide
  Sense strand starting at position 2737 of SEQ ID NO: 1563074
ccguuuguuagaugcucuu

SEQ ID NO: 1793414 - RNA, 19 nt, Artificial Sequence
  Description of Artificial Sequence: Synthetic oligonucleotide
  Antisense strand to SEQ ID NO: 1793413
aagagcaucuaacaaacgg

SEQ ID NO: 1793415 - RNA, 19 nt, Artificial Sequence
  Description of Artificial Sequence: Synthetic oligonucleotide
  Sense strand starting at position 2780 of SEQ ID NO: 1563074
gguggaauugguugcuaaa

SEQ ID NO: 1793416 - RNA, 19 nt, Artificial Sequence
  Description of Artificial Sequence: Synthetic oligonucleotide
  Antisense strand to SEQ ID NO: 1793415
uuuagcaaccaauuccacc

SEQ ID NO: 1793417 - RNA, 19 nt, Artificial Sequence
  Description of Artificial Sequence: Synthetic oligonucleotide
  Sense strand starting at position 2782 of SEQ ID NO: 1563074
uggaauugguugcuaaaug

SEQ ID NO: 1793418 - RNA, 19 nt, Artificial Sequence
  Description of Artificial Sequence: Synthetic oligonucleotide
  Antisense strand to SEQ ID NO: 1793417
cauuuagcaaccaauucca

SEQ ID NO: 1793419 - RNA, 19 nt, Artificial Sequence
  Description of Artificial Sequence: Synthetic oligonucleotide
  Sense strand starting at position 2824 of SEQ ID NO: 1563074
gggauuccagccuaguguu

SEQ ID NO: 1793420 - RNA, 19 nt, Artificial Sequence
  Description of Artificial Sequence: Synthetic oligonucleotide
  Antisense strand to SEQ ID NO: 1793419
aacacuaggcuggaauccc

SEQ ID NO: 1793421 - RNA, 19 nt, Artificial Sequence
  Description of Artificial Sequence: Synthetic oligonucleotide
  Sense strand starting at position 2832 of SEQ ID NO: 1563074
agccuaguguuaccuuaag

SEQ ID NO: 1793422 - RNA, 19 nt, Artificial Sequence
  Description of Artificial Sequence: Synthetic oligonucleotide
  Antisense strand to SEQ ID NO: 1793421
cuuaagguaacacuaggcu

SEQ ID NO: 1793423 - RNA, 19 nt, Artificial Sequence
  Description of Artificial Sequence: Synthetic oligonucleotide
  Sense strand starting at position 2855 of SEQ ID NO: 1563074
gcaccucucggugcucaau

SEQ ID NO: 1793424 - RNA, 19 nt, Artificial Sequence
  Description of Artificial Sequence: Synthetic oligonucleotide
  Antisense strand to SEQ ID NO: 1793423
auugagcaccgagaggugc

SEQ ID NO: 1793425 - RNA, 19 nt, Artificial Sequence
  Description of Artificial Sequence: Synthetic oligonucleotide
  Sense strand starting at position 2911 of SEQ ID NO: 1563074
ugagguugcuggaaggauu

SEQ ID NO: 1793426 - RNA, 19 nt, Artificial Sequence
  Description of Artificial Sequence: Synthetic oligonucleotide
  Antisense strand to SEQ ID NO: 1793425
aauccuuccagcaaccuca

SEQ ID NO: 1793427 - RNA, 19 nt, Artificial Sequence
  Description of Artificial Sequence: Synthetic oligonucleotide
  Sense strand starting at position 2976 of SEQ ID NO: 1563074
auuagcuauccuuaggcaa

SEQ ID NO: 1793428 - RNA, 19 nt, Artificial Sequence
  Description of Artificial Sequence: Synthetic oligonucleotide
  Antisense strand to SEQ ID NO: 1793427
uugccuaaggauagcuaau

SEQ ID NO: 1793429 - RNA, 19 nt, Artificial Sequence
  Description of Artificial Sequence: Synthetic oligonucleotide
  Sense strand starting at position 3000 of SEQ ID NO: 1563074
cagggaagcuuggaauaau

SEQ ID NO: 1793430 - RNA, 19 nt, Artificial Sequence
  Description of Artificial Sequence: Synthetic oligonucleotide
  Antisense strand to SEQ ID NO: 1793429
auuauuccaagcuucccug

SEQ ID NO: 1793431 - RNA, 19 nt, Artificial Sequence
  Description of Artificial Sequence: Synthetic oligonucleotide
  Sense strand starting at position 3029 of SEQ ID NO: 1563074
auuauucugucaucuugau

SEQ ID NO: 1793432 - RNA, 19 nt, Artificial Sequence
  Description of Artificial Sequence: Synthetic oligonucleotide
  Antisense strand to SEQ ID NO: 1793431
aucaagaugacagaauaau

SEQ ID NO: 1793433 - RNA, 19 nt, Artificial Sequence
  Description of Artificial Sequence: Synthetic oligonucleotide
  Sense strand starting at position 3123 of SEQ ID NO: 1563074
guggguggaucauugagau

SEQ ID NO: 1793434 - RNA, 19 nt, Artificial Sequence
  Description of Artificial Sequence: Synthetic oligonucleotide
  Antisense strand to SEQ ID NO: 1793433
aucucaaugauccacccac

SEQ ID NO: 1793435 - RNA, 19 nt, Artificial Sequence
  Description of Artificial Sequence: Synthetic oligonucleotide
  Sense strand starting at position 3423 of SEQ ID NO: 1563074
ugaaguucuuucccagcau

SEQ ID NO: 1793436 - RNA, 19 nt, Artificial Sequence
  Description of Artificial Sequence: Synthetic oligonucleotide
  Antisense strand to SEQ ID NO: 1793435
augcugggaaagaacuuca

SEQ ID NO: 1793437 - RNA, 19 nt, Artificial Sequence
  Description of Artificial Sequence: Synthetic oligonucleotide
  Sense strand starting at position 3437 of SEQ ID NO: 1563074
agcauuugcugccaggagu

SEQ ID NO: 1793438 - RNA, 19 nt, Artificial Sequence
  Description of Artificial Sequence: Synthetic oligonucleotide
  Antisense strand to SEQ ID NO: 1793437
acuccuggcagcaaaugcu

SEQ ID NO: 1793439 - RNA, 19 nt, Artificial Sequence
  Description of Artificial Sequence: Synthetic oligonucleotide
  Sense strand starting at position 3454 of SEQ ID NO: 1563074
gucucuccaccaugaggaa

SEQ ID NO: 1793440 - RNA, 19 nt, Artificial Sequence
  Description of Artificial Sequence: Synthetic oligonucleotide
  Antisense strand to SEQ ID NO: 1793439
uuccucaugguggagagac

SEQ ID NO: 1793441 - RNA, 19 nt, Artificial Sequence
  Description of Artificial Sequence: Synthetic oligonucleotide
  Sense strand starting at position 3757 of SEQ ID NO: 1563074
cugacagaucagugcuaca

SEQ ID NO: 1793442 - RNA, 19 nt, Artificial Sequence
  Description of Artificial Sequence: Synthetic oligonucleotide
  Antisense strand to SEQ ID NO: 1793441
uguagcacugaucugucag

SEQ ID NO: 1793443 - RNA, 19 nt, Artificial Sequence
  Description of Artificial Sequence: Synthetic oligonucleotide
  Sense strand starting at position 3768 of SEQ ID NO: 1563074
gugcuacauuccucuucua

SEQ ID NO: 1793444 - RNA, 19 nt, Artificial Sequence
  Description of Artificial Sequence: Synthetic oligonucleotide
  Antisense strand to SEQ ID NO: 1793443
uagaagaggaauguagcac

SEQ ID NO: 1793445 - RNA, 19 nt, Artificial Sequence
  Description of Artificial Sequence: Synthetic oligonucleotide
  Sense strand starting at position 3862 of SEQ ID NO: 1563074
agacacauacuuuggucaa

SEQ ID NO: 1793446 - RNA, 19 nt, Artificial Sequence
  Description of Artificial Sequence: Synthetic oligonucleotide
  Antisense strand to SEQ ID NO: 1793445
uugaccaaaguaugugucu

SEQ ID NO: 1793447 - RNA, 19 nt, Artificial Sequence
  Description of Artificial Sequence: Synthetic oligonucleotide
  Sense strand starting at position 17 of SEQ ID NO: 1563075
ggaugugcacggugucaaa

SEQ ID NO: 1793448 - RNA, 19 nt, Artificial Sequence
  Description of Artificial Sequence: Synthetic oligonucleotide
  Antisense strand to SEQ ID NO: 1793447
uuugacaccgugcacaucc

SEQ ID NO: 1793449 - RNA, 19 nt, Artificial Sequence
  Description of Artificial Sequence: Synthetic oligonucleotide
  Sense strand starting at position 251 of SEQ ID NO: 1563075
agcugacaacuaugugaug

SEQ ID NO: 1793450 - RNA, 19 nt, Artificial Sequence
  Description of Artificial Sequence: Synthetic oligonucleotide
  Antisense strand to SEQ ID NO: 1793449
caucacauaguugucagcu

SEQ ID NO: 1793451 - RNA, 19 nt, Artificial Sequence
  Description of Artificial Sequence: Synthetic oligonucleotide
  Sense strand starting at position 254 of SEQ ID NO: 1563075
ugacaacuaugugauguua

SEQ ID NO: 1793452 - RNA, 19 nt, Artificial Sequence
  Description of Artificial Sequence: Synthetic oligonucleotide
  Antisense strand to SEQ ID NO: 1793451
uaacaucacauaguuguca

SEQ ID NO: 1793453 - RNA, 19 nt, Artificial Sequence
  Description of Artificial Sequence: Synthetic oligonucleotide
  Sense strand starting at position 262 of SEQ ID NO: 1563075
augugauguuaccagaaga

SEQ ID NO: 1793454 - RNA, 19 nt, Artificial Sequence
  Description of Artificial Sequence: Synthetic oligonucleotide
  Antisense strand to SEQ ID NO: 1793453
ucuucugguaacaucacau

SEQ ID NO: 1793455 - RNA, 19 nt, Artificial Sequence
  Description of Artificial Sequence: Synthetic oligonucleotide
  Sense strand starting at position 573 of SEQ ID NO: 1563075
ccuccuuugggaugucauu

SEQ ID NO: 1793456 - RNA, 19 nt, Artificial Sequence
  Description of Artificial Sequence: Synthetic oligonucleotide
  Antisense strand to SEQ ID NO: 1793455
aaugacaucccaaaggagg

SEQ ID NO: 1793457 - RNA, 19 nt, Artificial Sequence
  Description of Artificial Sequence: Synthetic oligonucleotide
  Sense strand starting at position 1136 of SEQ ID NO: 1563075
guaaacaagucaucccuga

SEQ ID NO: 1793458 - RNA, 19 nt, Artificial Sequence
  Description of Artificial Sequence: Synthetic oligonucleotide
  Antisense strand to SEQ ID NO: 1793457
ucagggaugacuuguuuac

SEQ ID NO: 1793459 - RNA, 19 nt, Artificial Sequence
  Description of Artificial Sequence: Synthetic oligonucleotide
  Sense strand starting at position 1140 of SEQ ID NO: 1563075
acaagucaucccugaugua

SEQ ID NO: 1793460 - RNA, 19 nt, Artificial Sequence
  Description of Artificial Sequence: Synthetic oligonucleotide
  Antisense strand to SEQ ID NO: 1793459
uacaucagggaugacuugu

SEQ ID NO: 1793461 - RNA, 19 nt, Artificial Sequence
  Description of Artificial Sequence: Synthetic oligonucleotide
  Sense strand starting at position 1141 of SEQ ID NO: 1563075
caagucaucccugauguag

SEQ ID NO: 1793462 - RNA, 19 nt, Artificial Sequence
  Description of Artificial Sequence: Synthetic oligonucleotide
  Antisense strand to SEQ ID NO: 1793461
cuacaucagggaugacuug

SEQ ID NO: 1793463 - RNA, 19 nt, Artificial Sequence
  Description of Artificial Sequence: Synthetic oligonucleotide
  Sense strand starting at position 1686 of SEQ ID NO: 1563075
agggaaguggccugucaca

SEQ ID NO: 1793464 - RNA, 19 nt, Artificial Sequence
  Description of Artificial Sequence: Synthetic oligonucleotide
  Antisense strand to SEQ ID NO: 1793463
ugugacaggccacuucccu

SEQ ID NO: 1793465 - RNA, 19 nt, Artificial Sequence
  Description of Artificial Sequence: Synthetic oligonucleotide
  Sense strand starting at position 1916 of SEQ ID NO: 1563075
ggccgagcgucucuaugau

SEQ ID NO: 1793466 - RNA, 19 nt, Artificial Sequence
  Description of Artificial Sequence: Synthetic oligonucleotide
  Antisense strand to SEQ ID NO: 1793465
aucauagagacgcucggcc

SEQ ID NO: 1793467 - RNA, 19 nt, Artificial Sequence
  Description of Artificial Sequence: Synthetic oligonucleotide
  Sense strand starting at position 3015 of SEQ ID NO: 1563075
caaggcauguguucuggaa

SEQ ID NO: 1793468 - RNA, 19 nt, Artificial Sequence
  Description of Artificial Sequence: Synthetic oligonucleotide
  Antisense strand to SEQ ID NO: 1793467
uuccagaacacaugccuug

SEQ ID NO: 1793469 - RNA, 19 nt, Artificial Sequence
  Description of Artificial Sequence: Synthetic oligonucleotide
  Sense strand starting at position 3019 of SEQ ID NO: 1563075
gcauguguucuggaagacu

SEQ ID NO: 1793470 - RNA, 19 nt, Artificial Sequence
  Description of Artificial Sequence: Synthetic oligonucleotide
  Antisense strand to SEQ ID NO: 1793469
agucuuccagaacacaugc

SEQ ID NO: 1793471 - RNA, 19 nt, Artificial Sequence
  Description of Artificial Sequence: Synthetic oligonucleotide
  Sense strand starting at position 3052 of SEQ ID NO: 1563075
gauuauuggugcucucuua

SEQ ID NO: 1793472 - RNA, 19 nt, Artificial Sequence
  Description of Artificial Sequence: Synthetic oligonucleotide
  Antisense strand to SEQ ID NO: 1793471
uaagagagcaccaauaauc

SEQ ID NO: 1793473 - RNA, 19 nt, Artificial Sequence
  Description of Artificial Sequence: Synthetic oligonucleotide
  Sense strand starting at position 3059 of SEQ ID NO: 1563075
ggugcucucuuauccucua

SEQ ID NO: 1793474 - RNA, 19 nt, Artificial Sequence
  Description of Artificial Sequence: Synthetic oligonucleotide
  Antisense strand to SEQ ID NO: 1793473
uagaggauaagagagcacc

SEQ ID NO: 1793475 - RNA, 19 nt, Artificial Sequence
  Description of Artificial Sequence: Synthetic oligonucleotide
  Sense strand starting at position 3106 of SEQ ID NO: 1563075
cgguacaauuuaucuaguu

SEQ ID NO: 1793476 - RNA, 19 nt, Artificial Sequence
  Description of Artificial Sequence: Synthetic oligonucleotide
  Antisense strand to SEQ ID NO: 1793475
aacuagauaaauuguaccg

SEQ ID NO: 1793477 - RNA, 19 nt, Artificial Sequence
  Description of Artificial Sequence: Synthetic oligonucleotide
  Sense strand starting at position 3169 of SEQ ID NO: 1563075
gugaauccaguguaaauac

SEQ ID NO: 1793478 - RNA, 19 nt, Artificial Sequence
  Description of Artificial Sequence: Synthetic oligonucleotide
  Antisense strand to SEQ ID NO: 1793477
guauuuacacuggauucac

SEQ ID NO: 1793479 - RNA, 19 nt, Artificial Sequence
  Description of Artificial Sequence: Synthetic oligonucleotide
  Sense strand starting at position 3307 of SEQ ID NO: 1563075
ccaucauuguguccuuuga

SEQ ID NO: 1793480 - RNA, 19 nt, Artificial Sequence
  Description of Artificial Sequence: Synthetic oligonucleotide
  Antisense strand to SEQ ID NO: 1793479
ucaaaggacacaaugaugg

SEQ ID NO: 1793481 - RNA, 19 nt, Artificial Sequence
  Description of Artificial Sequence: Synthetic oligonucleotide
  Sense strand starting at position 3309 of SEQ ID NO: 1563075
aucauuguguccuuugauc

SEQ ID NO: 1793482 - RNA, 19 nt, Artificial Sequence
  Description of Artificial Sequence: Synthetic oligonucleotide
  Antisense strand to SEQ ID NO: 1793481
gaucaaaggacacaaugau

SEQ ID NO: 1793483 - RNA, 19 nt, Artificial Sequence
  Description of Artificial Sequence: Synthetic oligonucleotide
  Sense strand starting at position 3364 of SEQ ID NO: 1563075
ggaagaaacugaugcucaa

SEQ ID NO: 1793484 - RNA, 19 nt, Artificial Sequence
  Description of Artificial Sequence: Synthetic oligonucleotide
  Antisense strand to SEQ ID NO: 1793483
uugagcaucaguuucuucc

SEQ ID NO: 1793485 - RNA, 19 nt, Artificial Sequence
  Description of Artificial Sequence: Synthetic oligonucleotide
  Sense strand starting at position 3443 of SEQ ID NO: 1563075
ccaucagucugugcacaga

SEQ ID NO: 1793486 - RNA, 19 nt, Artificial Sequence
  Description of Artificial Sequence: Synthetic oligonucleotide
  Antisense strand to SEQ ID NO: 1793485
ucugugcacagacugaugg

SEQ ID NO: 1793487 - RNA, 19 nt, Artificial Sequence
  Description of Artificial Sequence: Synthetic oligonucleotide
  Sense strand starting at position 3452 of SEQ ID NO: 1563075
ugugcacagaucugauuga

SEQ ID NO: 1793488 - RNA, 19 nt, Artificial Sequence
  Description of Artificial Sequence: Synthetic oligonucleotide
  Antisense strand to SEQ ID NO: 1793487
ucaaucagaucugugcaca

SEQ ID NO: 1793489 - RNA, 19 nt, Artificial Sequence
  Description of Artificial Sequence: Synthetic oligonucleotide
  Sense strand starting at position 3456 of SEQ ID NO: 1563075
cacagaucugauugauguc

SEQ ID NO: 1793490 - RNA, 19 nt, Artificial Sequence
  Description of Artificial Sequence: Synthetic oligonucleotide
  Antisense strand to SEQ ID NO: 1793489
gacaucaaucagaucugug

SEQ ID NO: 1793491 - RNA, 19 nt, Artificial Sequence
  Description of Artificial Sequence: Synthetic oligonucleotide
  Sense strand starting at position 3462 of SEQ ID NO: 1563075
ucugauugaugucugugaa

SEQ ID NO: 1793492 - RNA, 19 nt, Artificial Sequence
  Description of Artificial Sequence: Synthetic oligonucleotide
  Antisense strand to SEQ ID NO: 1793491
uucacagacaucaaucaga

SEQ ID NO: 1793493 - RNA, 19 nt, Artificial Sequence
  Description of Artificial Sequence: Synthetic oligonucleotide
  Sense strand starting at position 3463 of SEQ ID NO: 1563075
cugauugaugucugugaau

SEQ ID NO: 1793494 - RNA, 19 nt, Artificial Sequence
  Description of Artificial Sequence: Synthetic oligonucleotide
  Antisense strand to SEQ ID NO: 1793493
auucacagacaucaaucag

SEQ ID NO: 1793495 - RNA, 19 nt, Artificial Sequence
  Description of Artificial Sequence: Synthetic oligonucleotide
  Sense strand starting at position 3465 of SEQ ID NO: 1563075
gauugaugucugugaaucu

SEQ ID NO: 1793496 - RNA, 19 nt, Artificial Sequence
  Description of Artificial Sequence: Synthetic oligonucleotide
  Antisense strand to SEQ ID NO: 1793495
agauucacagacaucaauc

SEQ ID NO: 1793497 - RNA, 19 nt, Artificial Sequence
  Description of Artificial Sequence: Synthetic oligonucleotide
  Sense strand starting at position 3535 of SEQ ID NO: 1563075
ggcauaaacgcagagcuuu

SEQ ID NO: 1793498 - RNA, 19 nt, Artificial Sequence
  Description of Artificial Sequence: Synthetic oligonucleotide
  Antisense strand to SEQ ID NO: 1793497
aaagcucugcguuuaugcc

SEQ ID NO: 1793499 - RNA, 19 nt, Artificial Sequence
  Description of Artificial Sequence: Synthetic oligonucleotide
  Sense strand starting at position 3549 of SEQ ID NO: 1563075
gcuuuccuaguguggaaga

SEQ ID NO: 1793500 - RNA, 19 nt, Artificial Sequence
  Description of Artificial Sequence: Synthetic oligonucleotide
  Antisense strand to SEQ ID NO: 1793499
ucuuccacacuaggaaagc

SEQ ID NO: 1793501 - RNA, 19 nt, Artificial Sequence
  Description of Artificial Sequence: Synthetic oligonucleotide
  Sense strand starting at position 3560 of SEQ ID NO: 1563075
guggaagagugggccuaau

SEQ ID NO: 1793502 - RNA, 19 nt, Artificial Sequence
  Description of Artificial Sequence: Synthetic oligonucleotide
  Antisense strand to SEQ ID NO: 1793501
auuaggcccacucuuccac

SEQ ID NO: 1793503 - RNA, 19 nt, Artificial Sequence
  Description of Artificial Sequence: Synthetic oligonucleotide
  Sense strand starting at position 3570 of SEQ ID NO: 1563075
gggccuaauuucuugcuuu

SEQ ID NO: 1793504 - RNA, 19 nt, Artificial Sequence
  Description of Artificial Sequence: Synthetic oligonucleotide
  Antisense strand to SEQ ID NO: 1793503
aaagcaagaaauuaggccc

SEQ ID NO: 1793505 - RNA, 19 nt, Artificial Sequence
  Description of Artificial Sequence: Synthetic oligonucleotide
  Sense strand starting at position 3665 of SEQ ID NO: 1563075
gguugugagccagauccau

SEQ ID NO: 1793506 - RNA, 19 nt, Artificial Sequence
  Description of Artificial Sequence: Synthetic oligonucleotide
  Antisense strand to SEQ ID NO: 1793505
auggaucuggcucacaacc

SEQ ID NO: 1793507 - RNA, 19 nt, Artificial Sequence
  Description of Artificial Sequence: Synthetic oligonucleotide
  Sense strand starting at position 3692 of SEQ ID NO: 1563075
aguguaaccucuuuguauc

SEQ ID NO: 1793508 - RNA, 19 nt, Artificial Sequence
  Description of Artificial Sequence: Synthetic oligonucleotide
  Antisense strand to SEQ ID NO: 1793507
gauacaaagagguuacacu

SEQ ID NO: 1793509 - RNA, 19 nt, Artificial Sequence
  Description of Artificial Sequence: Synthetic oligonucleotide
  Sense strand starting at position 3693 of SEQ ID NO: 1563075
guguaaccucuuuguaucu

SEQ ID NO: 1793510 - RNA, 19 nt, Artificial Sequence
  Description of Artificial Sequence: Synthetic oligonucleotide
  Antisense strand to SEQ ID NO: 1793509
agauacaaagagguuacac

SEQ ID NO: 1793511 - RNA, 19 nt, Artificial Sequence
  Description of Artificial Sequence: Synthetic oligonucleotide
  Sense strand starting at position 3703 of SEQ ID NO: 1563075
uuuguaucuccacaggaca

SEQ ID NO: 1793512 - RNA, 19 nt, Artificial Sequence
  Description of Artificial Sequence: Synthetic oligonucleotide
  Antisense strand to SEQ ID NO: 1793511
uguccuguggagauacaaa

SEQ ID NO: 1793513 - RNA, 19 nt, Artificial Sequence
  Description of Artificial Sequence: Synthetic oligonucleotide
  Sense strand starting at position 3863 of SEQ ID NO: 1563075
gcugaugucccagaaauag

SEQ ID NO: 1793514 - RNA, 19 nt, Artificial Sequence
  Description of Artificial Sequence: Synthetic oligonucleotide
  Antisense strand to SEQ ID NO: 1793513
cuauuucugggacaucagc

SEQ ID NO: 1793515 - RNA, 19 nt, Artificial Sequence
  Description of Artificial Sequence: Synthetic oligonucleotide
  Sense strand starting at position 3883 of SEQ ID NO: 1563075
acucuuuaagguugagguu

SEQ ID NO: 1793516 - RNA, 19 nt, Artificial Sequence
  Description of Artificial Sequence: Synthetic oligonucleotide
  Antisense strand to SEQ ID NO: 1793515
aaccucaaccuuaaagagu

SEQ ID NO: 1793517 - RNA, 19 nt, Artificial Sequence
  Description of Artificial Sequence: Synthetic oligonucleotide
  Sense strand starting at position 3884 of SEQ ID NO: 1563075
cucuuuaagguugagguua

SEQ ID NO: 1793518 - RNA, 19 nt, Artificial Sequence
  Description of Artificial Sequence: Synthetic oligonucleotide
  Antisense strand to SEQ ID NO: 1793517
uaaccucaaccuuaaagag

SEQ ID NO: 1793519 - RNA, 19 nt, Artificial Sequence
  Description of Artificial Sequence: Synthetic oligonucleotide
  Sense strand starting at position 3945 of SEQ ID NO: 1563075
gacugaggcugcuuaaaga

SEQ ID NO: 1793520 - RNA, 19 nt, Artificial Sequence
  Description of Artificial Sequence: Synthetic oligonucleotide
  Antisense strand to SEQ ID NO: 1793519
ucuuuaagcagccucaguc

SEQ ID NO: 1793521 - RNA, 19 nt, Artificial Sequence
  Description of Artificial Sequence: Synthetic oligonucleotide
  Sense strand starting at position 3967 of SEQ ID NO: 1563075
ggccuaaaguuggugacua

SEQ ID NO: 1793522 - RNA, 19 nt, Artificial Sequence
  Description of Artificial Sequence: Synthetic oligonucleotide
  Antisense strand to SEQ ID NO: 1793521
uagucaccaacuuuaggcc

SEQ ID NO: 1793523 - RNA, 19 nt, Artificial Sequence
  Description of Artificial Sequence: Synthetic oligonucleotide
  Sense strand starting at position 3969 of SEQ ID NO: 1563075
ccuaaaguuggugacuaau

SEQ ID NO: 1793524 - RNA, 19 nt, Artificial Sequence
  Description of Artificial Sequence: Synthetic oligonucleotide
  Antisense strand to SEQ ID NO: 1793523
auuagucaccaacuuuagg

SEQ ID NO: 1793525 - RNA, 19 nt, Artificial Sequence
  Description of Artificial Sequence: Synthetic oligonucleotide
  Sense strand starting at position 3980 of SEQ ID NO: 1563075
ugacuaaucccauguggaa

SEQ ID NO: 1793526 - RNA, 19 nt, Artificial Sequence
  Description of Artificial Sequence: Synthetic oligonucleotide
  Antisense strand to SEQ ID NO: 1793525
uuccacaugggauuaguca

SEQ ID NO: 1793527 - RNA, 19 nt, Artificial Sequence
  Description of Artificial Sequence: Synthetic oligonucleotide
  Sense strand starting at position 7 of SEQ ID NO: 1563076
cuuagauucuaagugauca

SEQ ID NO: 1793528 - RNA, 19 nt, Artificial Sequence
  Description of Artificial Sequence: Synthetic oligonucleotide
  Antisense strand to SEQ ID NO: 1793527
ugaucacuuagaaucuaag

SEQ ID NO: 1793529 - RNA, 19 nt, Artificial Sequence
  Description of Artificial Sequence: Synthetic oligonucleotide
  Sense strand starting at position 11 of SEQ ID NO: 1563076
gauucuaagugaucagaua

SEQ ID NO: 1793530 - RNA, 19 nt, Artificial Sequence
  Description of Artificial Sequence: Synthetic oligonucleotide
  Antisense strand to SEQ ID NO: 1793529
uaucugaucacuuagaauc

SEQ ID NO: 1793531 - RNA, 19 nt, Artificial Sequence
  Description of Artificial Sequence: Synthetic oligonucleotide
  Sense strand starting at position 179 of SEQ ID NO: 1563076
gcagacccuguaugagaaa

SEQ ID NO: 1793532 - RNA, 19 nt, Artificial Sequence
  Description of Artificial Sequence: Synthetic oligonucleotide
  Antisense strand to SEQ ID NO: 1793531
uuucucauacagggucugc

SEQ ID NO: 1793533 - RNA, 19 nt, Artificial Sequence
  Description of Artificial Sequence: Synthetic oligonucleotide
  Sense strand starting at position 212 of SEQ ID NO: 1563076
guaggcugaauguaaugaa

SEQ ID NO: 1793534 - RNA, 19 nt, Artificial Sequence
  Description of Artificial Sequence: Synthetic oligonucleotide
  Antisense strand to SEQ ID NO: 1793533
uucauuacauucagccuac

SEQ ID NO: 1793535 - RNA, 19 nt, Artificial Sequence
  Description of Artificial Sequence: Synthetic oligonucleotide
  Sense strand starting at position 280 of SEQ ID NO: 1563076
acagaaauuugaugacaaa

SEQ ID NO: 1793536 - RNA, 19 nt, Artificial Sequence
  Description of Artificial Sequence: Synthetic oligonucleotide
  Antisense strand to SEQ ID NO: 1793535
uuugucaucaaauuucugu

SEQ ID NO: 1793537 - RNA, 19 nt, Artificial Sequence
  Description of Artificial Sequence: Synthetic oligonucleotide
  Sense strand starting at position 291 of SEQ ID NO: 1563076
augacaaagcuuugucaaa

SEQ ID NO: 1793538 - RNA, 19 nt, Artificial Sequence
  Description of Artificial Sequence: Synthetic oligonucleotide
  Antisense strand to SEQ ID NO: 1793537
uuugacaaagcuuugucau

SEQ ID NO: 1793539 - RNA, 19 nt, Artificial Sequence
  Description of Artificial Sequence: Synthetic oligonucleotide
  Sense strand starting at position 388 of SEQ ID NO: 1563076
gguauagcaucuuccauaa

SEQ ID NO: 1793540 - RNA, 19 nt, Artificial Sequence
  Description of Artificial Sequence: Synthetic oligonucleotide
  Antisense strand to SEQ ID NO: 1793539
uuauggaagaugcuauacc

SEQ ID NO: 1793541 - RNA, 19 nt, Artificial Sequence
  Description of Artificial Sequence: Synthetic oligonucleotide
  Sense strand starting at position 399 of SEQ ID NO: 1563076
uuccauaaucagggcuaaa

SEQ ID NO: 1793542 - RNA, 19 nt, Artificial Sequence
  Description of Artificial Sequence: Synthetic oligonucleotide
  Antisense strand to SEQ ID NO: 1793541
uuuagcccugauuauggaa

SEQ ID NO: 1793543 - RNA, 19 nt, Artificial Sequence
  Description of Artificial Sequence: Synthetic oligonucleotide
  Sense strand starting at position 546 of SEQ ID NO: 1563076
gugacauccuacucuucuu

SEQ ID NO: 1793544 - RNA, 19 nt, Artificial Sequence
  Description of Artificial Sequence: Synthetic oligonucleotide
  Antisense strand to SEQ ID NO: 1793543
aagaagaguaggaugucac

SEQ ID NO: 1793545 - RNA, 19 nt, Artificial Sequence
  Description of Artificial Sequence: Synthetic oligonucleotide
  Sense strand starting at position 677 of SEQ ID NO: 1563076
ccauaauagcuaugguuau

SEQ ID NO: 1793546 - RNA, 19 nt, Artificial Sequence
  Description of Artificial Sequence: Synthetic oligonucleotide
  Antisense strand to SEQ ID NO: 1793545
auaaccauagcuauuaugg

SEQ ID NO: 1793547 - RNA, 19 nt, Artificial Sequence
  Description of Artificial Sequence: Synthetic oligonucleotide
  Sense strand starting at position 750 of SEQ ID NO: 1563076
gcacguacucaucaguaug

SEQ ID NO: 1793548 - RNA, 19 nt, Artificial Sequence
  Description of Artificial Sequence: Synthetic oligonucleotide
  Antisense strand to SEQ ID NO: 1793547
cauacugaugaguacgugc

SEQ ID NO: 1793549 - RNA, 19 nt, Artificial Sequence
  Description of Artificial Sequence: Synthetic oligonucleotide
  Sense strand starting at position 767 of SEQ ID NO: 1563076
uguacuaugucaucuaauc

SEQ ID NO: 1793550 - RNA, 19 nt, Artificial Sequence
  Description of Artificial Sequence: Synthetic oligonucleotide
  Antisense strand to SEQ ID NO: 1793549
gauuagaugacauaguaca

SEQ ID NO: 1793551 - RNA, 19 nt, Artificial Sequence
  Description of Artificial Sequence: Synthetic oligonucleotide
  Sense strand starting at position 805 of SEQ ID NO: 1563076
gcagguguuagccgaauuu

SEQ ID NO: 1793552 - RNA, 19 nt, Artificial Sequence
  Description of Artificial Sequence: Synthetic oligonucleotide
  Antisense strand to SEQ ID NO: 1793551
aaauucggcuaacaccugc

SEQ ID NO: 1793553 - RNA, 19 nt, Artificial Sequence
  Description of Artificial Sequence: Synthetic oligonucleotide
  Sense strand starting at position 891 of SEQ ID NO: 1563076
aaacgugacucugugaaug

SEQ ID NO: 1793554 - RNA, 19 nt, Artificial Sequence
  Description of Artificial Sequence: Synthetic oligonucleotide
  Antisense strand to SEQ ID NO: 1793553
cauucacagagucacguuu

SEQ ID NO: 1793555 - RNA, 19 nt, Artificial Sequence
  Description of Artificial Sequence: Synthetic oligonucleotide
  Sense strand starting at position 999 of SEQ ID NO: 1563076
cguuuagaugccggaagaa

SEQ ID NO: 1793556 - RNA, 19 nt, Artificial Sequence
  Description of Artificial Sequence: Synthetic oligonucleotide
  Antisense strand to SEQ ID NO: 1793555
uucuuccggcaucuaaacg

SEQ ID NO: 1793557 - RNA, 19 nt, Artificial Sequence
  Description of Artificial Sequence: Synthetic oligonucleotide
  Sense strand starting at position 1020 of SEQ ID NO: 1563076
gcaaaugcuccuggagaaa

SEQ ID NO: 1793558 - RNA, 19 nt, Artificial Sequence
  Description of Artificial Sequence: Synthetic oligonucleotide
  Antisense strand to SEQ ID NO: 1793557
uuucuccaggagcauuugc

SEQ ID NO: 1793559 - RNA, 19 nt, Artificial Sequence
  Description of Artificial Sequence: Synthetic oligonucleotide
  Sense strand starting at position 1211 of SEQ ID NO: 1563076
cacggucucacaggugaau

SEQ ID NO: 1793560 - RNA, 19 nt, Artificial Sequence
  Description of Artificial Sequence: Synthetic oligonucleotide
  Antisense strand to SEQ ID NO: 1793559
auucaccugugagaccgug

SEQ ID NO: 1793561 - RNA, 19 nt, Artificial Sequence
  Description of Artificial Sequence: Synthetic oligonucleotide
  Sense strand starting at position 2029 of SEQ ID NO: 1563076
cgcgaguucgggcucugau

SEQ ID NO: 1793562 - RNA, 19 nt, Artificial Sequence
  Description of Artificial Sequence: Synthetic oligonucleotide
  Antisense strand to SEQ ID NO: 1793561
aucagagcccgaacucgcg

SEQ ID NO: 1793563 - RNA, 19 nt, Artificial Sequence
  Description of Artificial Sequence: Synthetic oligonucleotide
  Sense strand starting at position 2030 of SEQ ID NO: 1563076
gcgaguucgggcucugaug

SEQ ID NO: 1793564 - RNA, 19 nt, Artificial Sequence
  Description of Artificial Sequence: Synthetic oligonucleotide
  Antisense strand to SEQ ID NO: 1793563
caucagagcccgaacucgc

SEQ ID NO: 1793565 - RNA, 19 nt, Artificial Sequence
  Description of Artificial Sequence: Synthetic oligonucleotide
  Sense strand starting at position 2095 of SEQ ID NO: 1563076
uggaauucggaccagcauu

SEQ ID NO: 1793566 - RNA, 19 nt, Artificial Sequence
  Description of Artificial Sequence: Synthetic oligonucleotide
  Antisense strand to SEQ ID NO: 1793565
aaugcugguccgaauucca

SEQ ID NO: 1793567 - RNA, 19 nt, Artificial Sequence
  Description of Artificial Sequence: Synthetic oligonucleotide
  Sense strand starting at position 2180 of SEQ ID NO: 1563076
auggcaggcccugaaagau

SEQ ID NO: 1793568 - RNA, 19 nt, Artificial Sequence
  Description of Artificial Sequence: Synthetic oligonucleotide
  Antisense strand to SEQ ID NO: 1793567
aucuuucagggccugccau

SEQ ID NO: 1793569 - RNA, 19 nt, Artificial Sequence
  Description of Artificial Sequence: Synthetic oligonucleotide
  Sense strand starting at position 2689 of SEQ ID NO: 1563076
guuugagcacguguucuca

SEQ ID NO: 1793570 - RNA, 19 nt, Artificial Sequence
  Description of Artificial Sequence: Synthetic oligonucleotide
  Antisense strand to SEQ ID NO: 1793569
ugagaacacgugcucaaac

SEQ ID NO: 1793571 - RNA, 19 nt, Artificial Sequence
  Description of Artificial Sequence: Synthetic oligonucleotide
  Sense strand starting at position 2705 of SEQ ID NO: 1563076
ucaggaucuccugggacua

SEQ ID NO: 1793572 - RNA, 19 nt, Artificial Sequence
  Description of Artificial Sequence: Synthetic oligonucleotide
  Antisense strand to SEQ ID NO: 1793571
uagucccaggagauccuga

SEQ ID NO: 1793573 - RNA, 19 nt, Artificial Sequence
  Description of Artificial Sequence: Synthetic oligonucleotide
  Sense strand starting at position 2706 of SEQ ID NO: 1563076
caggaucuccugggacuau

SEQ ID NO: 1793574 - RNA, 19 nt, Artificial Sequence
  Description of Artificial Sequence: Synthetic oligonucleotide
  Antisense strand to SEQ ID NO: 1793573
auagucccaggagauccug

SEQ ID NO: 1793575 - RNA, 19 nt, Artificial Sequence
  Description of Artificial Sequence: Synthetic oligonucleotide
  Sense strand starting at position 2753 of SEQ ID NO: 1563076
acaguuugacuccaagcau

SEQ ID NO: 1793576 - RNA, 19 nt, Artificial Sequence
  Description of Artificial Sequence: Synthetic oligonucleotide
  Antisense strand to SEQ ID NO: 1793575
augcuuggagucaaacugu

SEQ ID NO: 1793577 - RNA, 19 nt, Artificial Sequence
  Description of Artificial Sequence: Synthetic oligonucleotide
  Sense strand starting at position 2879 of SEQ ID NO: 1563076
ucauaaccucgcugaauaa

SEQ ID NO: 1793578 - RNA, 19 nt, Artificial Sequence
  Description of Artificial Sequence: Synthetic oligonucleotide
  Antisense strand to SEQ ID NO: 1793577
uuauucagcgagguuauga

SEQ ID NO: 1793579 - RNA, 19 nt, Artificial Sequence
  Description of Artificial Sequence: Synthetic oligonucleotide
  Sense strand starting at position 2945 of SEQ ID NO: 1563076
cugaguucuucucuacgag

SEQ ID NO: 1793580 - RNA, 19 nt, Artificial Sequence
  Description of Artificial Sequence: Synthetic oligonucleotide
  Antisense strand to SEQ ID NO: 1793579
cucguagagaagaacucag

SEQ ID NO: 1793581 - RNA, 19 nt, Artificial Sequence
  Description of Artificial Sequence: Synthetic oligonucleotide
  Sense strand starting at position 2946 of SEQ ID NO: 1563076
ugaguucuucucuacgagu

SEQ ID NO: 1793582 - RNA, 19 nt, Artificial Sequence
  Description of Artificial Sequence: Synthetic oligonucleotide
  Antisense strand to SEQ ID NO: 1793581
acucguagagaagaacuca

SEQ ID NO: 1793583 - RNA, 19 nt, Artificial Sequence
  Description of Artificial Sequence: Synthetic oligonucleotide
  Sense strand starting at position 2960 of SEQ ID NO: 1563076
cgaguuagcaucuagacaa

SEQ ID NO: 1793584 - RNA, 19 nt, Artificial Sequence
  Description of Artificial Sequence: Synthetic oligonucleotide
  Antisense strand to SEQ ID NO: 1793583
uugucuagaugcuaacucg

SEQ ID NO: 1793585 - RNA, 19 nt, Artificial Sequence
  Description of Artificial Sequence: Synthetic oligonucleotide
  Sense strand starting at position 3061 of SEQ ID NO: 1563076
acaauaagcuaugugggua

SEQ ID NO: 1793586 - RNA, 19 nt, Artificial Sequence
  Description of Artificial Sequence: Synthetic oligonucleotide
  Antisense strand to SEQ ID NO: 1793585
uacccacauagcuuauugu

SEQ ID NO: 1793587 - RNA, 19 nt, Artificial Sequence
  Description of Artificial Sequence: Synthetic oligonucleotide
  Sense strand starting at position 3457 of SEQ ID NO: 1563076
uugagauaauucuuuggcu

SEQ ID NO: 1793588 - RNA, 19 nt, Artificial Sequence
  Description of Artificial Sequence: Synthetic oligonucleotide
  Antisense strand to SEQ ID NO: 1793587
agccaaagaauuaucucaa

SEQ ID NO: 1793589 - RNA, 19 nt, Artificial Sequence
  Description of Artificial Sequence: Synthetic oligonucleotide
  Sense strand starting at position 3458 of SEQ ID NO: 1563076
ugagauaauucuuuggcua

SEQ ID NO: 1793590 - RNA, 19 nt, Artificial Sequence
  Description of Artificial Sequence: Synthetic oligonucleotide
  Antisense strand to SEQ ID NO: 1793589
uagccaaagaauuaucuca

SEQ ID NO: 1793591 - RNA, 19 nt, Artificial Sequence
  Description of Artificial Sequence: Synthetic oligonucleotide
  Sense strand starting at position 3646 of SEQ ID NO: 1563076
ggcacaugugcaugagaac

SEQ ID NO: 1793592 - RNA, 19 nt, Artificial Sequence
  Description of Artificial Sequence: Synthetic oligonucleotide
  Antisense strand to SEQ ID NO: 1793591
guucucaugcacaugugcc

SEQ ID NO: 1793593 - RNA, 19 nt, Artificial Sequence
  Description of Artificial Sequence: Synthetic oligonucleotide
  Sense strand starting at position 3673 of SEQ ID NO: 1563076
gugguaugaacccaaagua

SEQ ID NO: 1793594 - RNA, 19 nt, Artificial Sequence
  Description of Artificial Sequence: Synthetic oligonucleotide
  Antisense strand to SEQ ID NO: 1793593
uacuuuggguucauaccac

SEQ ID NO: 1793595 - RNA, 19 nt, Artificial Sequence
  Description of Artificial Sequence: Synthetic oligonucleotide
  Sense strand starting at position 3764 of SEQ ID NO: 1563076
ugauguccugaggauaugu

SEQ ID NO: 1793596 - RNA, 19 nt, Artificial Sequence
  Description of Artificial Sequence: Synthetic oligonucleotide
  Antisense strand to SEQ ID NO: 1793595
acauauccucaggacauca

SEQ ID NO: 1793597 - RNA, 19 nt, Artificial Sequence
  Description of Artificial Sequence: Synthetic oligonucleotide
  Sense strand starting at position 3773 of SEQ ID NO: 1563076
gaggauaugugcccaaggu

SEQ ID NO: 1793598 - RNA, 19 nt, Artificial Sequence
  Description of Artificial Sequence: Synthetic oligonucleotide
  Antisense strand to SEQ ID NO: 1793597
accuugggcacauauccuc

SEQ ID NO: 1793599 - RNA, 19 nt, Artificial Sequence
  Description of Artificial Sequence: Synthetic oligonucleotide
  Sense strand starting at position 3841 of SEQ ID NO: 1563076
aauuaauacguguaagaug

SEQ ID NO: 1793600 - RNA, 19 nt, Artificial Sequence
  Description of Artificial Sequence: Synthetic oligonucleotide
  Antisense strand to SEQ ID NO: 1793599
caucuuacacguauuaauu

SEQ ID NO: 1793601 - RNA, 19 nt, Artificial Sequence
  Description of Artificial Sequence: Synthetic oligonucleotide
  Sense strand starting at position 3863 of SEQ ID NO: 1563076
acugguucugucuggaaag

SEQ ID NO: 1793602 - RNA, 19 nt, Artificial Sequence
  Description of Artificial Sequence: Synthetic oligonucleotide
  Antisense strand to SEQ ID NO: 1793601
cuuuccagacagaaccagu

SEQ ID NO: 1793603 - RNA, 19 nt, Artificial Sequence
  Description of Artificial Sequence: Synthetic oligonucleotide
  Sense strand starting at position 3947 of SEQ ID NO: 1563076
uccuuugggucuuugauca

SEQ ID NO: 1793604 - RNA, 19 nt, Artificial Sequence
  Description of Artificial Sequence: Synthetic oligonucleotide
  Antisense strand to SEQ ID NO: 1793603
ugaucaaagacccaaagga

SEQ ID NO: 1793605 - RNA, 19 nt, Artificial Sequence
  Description of Artificial Sequence: Synthetic oligonucleotide
  Sense strand starting at position 3980 of SEQ ID NO: 1563076
acacaaucuccaugugaga

SEQ ID NO: 1793606 - RNA, 19 nt, Artificial Sequence
  Description of Artificial Sequence: Synthetic oligonucleotide
  Antisense strand to SEQ ID NO: 1793605
ucucacauggagauugugu

SEQ ID NO: 1793607 - RNA, 19 nt, Artificial Sequence
  Description of Artificial Sequence: Synthetic oligonucleotide
  Sense strand starting at position 262 of SEQ ID NO: 1563077
ccaggaguucugcaggaga

SEQ ID NO: 1793608 - RNA, 19 nt, Artificial Sequence
  Description of Artificial Sequence: Synthetic oligonucleotide
  Antisense strand to SEQ ID NO: 1793607
ucuccugcagaacuccugg

SEQ ID NO: 1793609 - RNA, 19 nt, Artificial Sequence
  Description of Artificial Sequence: Synthetic oligonucleotide
  Sense strand starting at position 264 of SEQ ID NO: 1563077
aggaguucugcaggagacu

SEQ ID NO: 1793610 - RNA, 19 nt, Artificial Sequence
  Description of Artificial Sequence: Synthetic oligonucleotide
  Antisense strand to SEQ ID NO: 1793609
agucuccugcagaacuccu

SEQ ID NO: 1793611 - RNA, 19 nt, Artificial Sequence
  Description of Artificial Sequence: Synthetic oligonucleotide
  Sense strand starting at position 590 of SEQ ID NO: 1563077
ugugaauacuuucugguag

SEQ ID NO: 1793612 - RNA, 19 nt, Artificial Sequence
  Description of Artificial Sequence: Synthetic oligonucleotide
  Antisense strand to SEQ ID NO: 1793611
cuaccagaaaguauucaca

SEQ ID NO: 1793613 - RNA, 19 nt, Artificial Sequence
  Description of Artificial Sequence: Synthetic oligonucleotide
  Sense strand starting at position 591 of SEQ ID NO: 1563077
gugaauacuuucugguaga

SEQ ID NO: 1793614 - RNA, 19 nt, Artificial Sequence
  Description of Artificial Sequence: Synthetic oligonucleotide
  Antisense strand to SEQ ID NO: 1793613
ucuaccagaaaguauucac

SEQ ID NO: 1793615 - RNA, 19 nt, Artificial Sequence
  Description of Artificial Sequence: Synthetic oligonucleotide
  Sense strand starting at position 592 of SEQ ID NO: 1563077
ugaauacuuucugguagau

SEQ ID NO: 1793616 - RNA, 19 nt, Artificial Sequence
  Description of Artificial Sequence: Synthetic oligonucleotide
  Antisense strand to SEQ ID NO: 1793615
aucuaccagaaaguauuca

SEQ ID NO: 1793617 - RNA, 19 nt, Artificial Sequence
  Description of Artificial Sequence: Synthetic oligonucleotide
  Sense strand starting at position 604 of SEQ ID NO: 1563077
gguagauccagccagacau

SEQ ID NO: 1793618 - RNA, 19 nt, Artificial Sequence
  Description of Artificial Sequence: Synthetic oligonucleotide
  Antisense strand to SEQ ID NO: 1793617
augucuggcuggaucuacc

SEQ ID NO: 1793619 - RNA, 19 nt, Artificial Sequence
  Description of Artificial Sequence: Synthetic oligonucleotide
  Sense strand starting at position 778 of SEQ ID NO: 1563077
cugcgugacucuggacaaa

SEQ ID NO: 1793620 - RNA, 19 nt, Artificial Sequence
  Description of Artificial Sequence: Synthetic oligonucleotide
  Antisense strand to SEQ ID NO: 1793619
uuuguccagagucacgcag

SEQ ID NO: 1793621 - RNA, 19 nt, Artificial Sequence
  Description of Artificial Sequence: Synthetic oligonucleotide
  Sense strand starting at position 999 of SEQ ID NO: 1563077
gcccacuguucuggcagua

SEQ ID NO: 1793622 - RNA, 19 nt, Artificial Sequence
  Description of Artificial Sequence: Synthetic oligonucleotide
  Antisense strand to SEQ ID NO: 1793621
uacugccagaacagugggc

SEQ ID NO: 1793623 - RNA, 19 nt, Artificial Sequence
  Description of Artificial Sequence: Synthetic oligonucleotide
  Sense strand starting at position 2246 of SEQ ID NO: 1563077
ucguuugucgucucuucua

SEQ ID NO: 1793624 - RNA, 19 nt, Artificial Sequence
  Description of Artificial Sequence: Synthetic oligonucleotide
  Antisense strand to SEQ ID NO: 1793623
uagaagagacgacaaacga

SEQ ID NO: 1793625 - RNA, 19 nt, Artificial Sequence
  Description of Artificial Sequence: Synthetic oligonucleotide
  Sense strand starting at position 2505 of SEQ ID NO: 1563077
ggcacaaagucgugggacu

SEQ ID NO: 1793626 - RNA, 19 nt, Artificial Sequence
  Description of Artificial Sequence: Synthetic oligonucleotide
  Antisense strand to SEQ ID NO: 1793625
agucccacgacuuugugcc

SEQ ID NO: 1793627 - RNA, 19 nt, Artificial Sequence
  Description of Artificial Sequence: Synthetic oligonucleotide
  Sense strand starting at position 2803 of SEQ ID NO: 1563077
ggcuacuucuacccagaca

SEQ ID NO: 1793628 - RNA, 19 nt, Artificial Sequence
  Description of Artificial Sequence: Synthetic oligonucleotide
  Antisense strand to SEQ ID NO: 1793627
ugucuggguagaaguagcc

SEQ ID NO: 1793629 - RNA, 19 nt, Artificial Sequence
  Description of Artificial Sequence: Synthetic oligonucleotide
  Sense strand starting at position 2859 of SEQ ID NO: 1563077
caguauggcuuuccuagga

SEQ ID NO: 1793630 - RNA, 19 nt, Artificial Sequence
  Description of Artificial Sequence: Synthetic oligonucleotide
  Antisense strand to SEQ ID NO: 1793629
uccuaggaaagccauacug

SEQ ID NO: 1793631 - RNA, 19 nt, Artificial Sequence
  Description of Artificial Sequence: Synthetic oligonucleotide
  Sense strand starting at position 2894 of SEQ ID NO: 1563077
uugugagccucuuccucua

SEQ ID NO: 1793632 - RNA, 19 nt, Artificial Sequence
  Description of Artificial Sequence: Synthetic oligonucleotide
  Antisense strand to SEQ ID NO: 1793631
uagaggaagaggcucacaa

SEQ ID NO: 1793633 - RNA, 19 nt, Artificial Sequence
  Description of Artificial Sequence: Synthetic oligonucleotide
  Sense strand starting at position 2896 of SEQ ID NO: 1563077
gugagccucuuccucuauu

SEQ ID NO: 1793634 - RNA, 19 nt, Artificial Sequence
  Description of Artificial Sequence: Synthetic oligonucleotide
  Antisense strand to SEQ ID NO: 1793633
aauagaggaagaggcucac

SEQ ID NO: 1793635 - RNA, 19 nt, Artificial Sequence
  Description of Artificial Sequence: Synthetic oligonucleotide
  Sense strand starting at position 3117 of SEQ ID NO: 1563077
gugauucucuccucccuca

SEQ ID NO: 1793636 - RNA, 19 nt, Artificial Sequence
  Description of Artificial Sequence: Synthetic oligonucleotide
  Antisense strand to SEQ ID NO: 1793635
ugagggaggagagaaucac

SEQ ID NO: 1793637 - RNA, 19 nt, Artificial Sequence
  Description of Artificial Sequence: Synthetic oligonucleotide
  Sense strand starting at position 170 of SEQ ID NO: 1563078
gaaugacuucccuaguggu

SEQ ID NO: 1793638 - RNA, 19 nt, Artificial Sequence
  Description of Artificial Sequence: Synthetic oligonucleotide
  Antisense strand to SEQ ID NO: 1793637
accacuagggaagucauuc

SEQ ID NO: 1793639 - RNA, 19 nt, Artificial Sequence
  Description of Artificial Sequence: Synthetic oligonucleotide
  Sense strand starting at position 173 of SEQ ID NO: 1563078
ugacuucccuaguggucua

SEQ ID NO: 1793640 - RNA, 19 nt, Artificial Sequence
  Description of Artificial Sequence: Synthetic oligonucleotide
  Antisense strand to SEQ ID NO: 1793639
uagaccacuagggaaguca

SEQ ID NO: 1793641 - RNA, 19 nt, Artificial Sequence
  Description of Artificial Sequence: Synthetic oligonucleotide
  Sense strand starting at position 683 of SEQ ID NO: 1563078
ccaggaguucugcaggaga

SEQ ID NO: 1793642 - RNA, 19 nt, Artificial Sequence
  Description of Artificial Sequence: Synthetic oligonucleotide
  Antisense strand to SEQ ID NO: 1793641
ucuccugcagaacuccugg

SEQ ID NO: 1793643 - RNA, 19 nt, Artificial Sequence
  Description of Artificial Sequence: Synthetic oligonucleotide
  Sense strand starting at position 685 of SEQ ID NO: 1563078
aggaguucugcaggagacu

SEQ ID NO: 1793644 - RNA, 19 nt, Artificial Sequence
  Description of Artificial Sequence: Synthetic oligonucleotide
  Antisense strand to SEQ ID NO: 1793643
agucuccugcagaacuccu

SEQ ID NO: 1793645 - RNA, 19 nt, Artificial Sequence
  Description of Artificial Sequence: Synthetic oligonucleotide
  Sense strand starting at position 1011 of SEQ ID NO: 1563078
ugugaauacuuucugguag

SEQ ID NO: 1793646 - RNA, 19 nt, Artificial Sequence
  Description of Artificial Sequence: Synthetic oligonucleotide
  Antisense strand to SEQ ID NO: 1793645
cuaccagaaaguauucaca

SEQ ID NO: 1793647 - RNA, 19 nt, Artificial Sequence
  Description of Artificial Sequence: Synthetic oligonucleotide
  Sense strand starting at position 1012 of SEQ ID NO: 1563078
gugaauacuuucugguaga

SEQ ID NO: 1793648 - RNA, 19 nt, Artificial Sequence
  Description of Artificial Sequence: Synthetic oligonucleotide
  Antisense strand to SEQ ID NO: 1793647
ucuaccagaaaguauucac

SEQ ID NO: 1793649 - RNA, 19 nt, Artificial Sequence
  Description of Artificial Sequence: Synthetic oligonucleotide
  Sense strand starting at position 1013 of SEQ ID NO: 1563078
ugaauacuuucugguagau

SEQ ID NO: 1793650 - RNA, 19 nt, Artificial Sequence
  Description of Artificial Sequence: Synthetic oligonucleotide
  Antisense strand to SEQ ID NO: 1793649
aucuaccagaaaguauuca

SEQ ID NO: 1793651 - RNA, 19 nt, Artificial Sequence
  Description of Artificial Sequence: Synthetic oligonucleotide
  Sense strand starting at position 1025 of SEQ ID NO: 1563078
gguagauccagccagacau

SEQ ID NO: 1793652 - RNA, 19 nt, Artificial Sequence
  Description of Artificial Sequence: Synthetic oligonucleotide
  Antisense strand to SEQ ID NO: 1793651
augucuggcuggaucuacc

SEQ ID NO: 1793653 - RNA, 19 nt, Artificial Sequence
  Description of Artificial Sequence: Synthetic oligonucleotide
  Sense strand starting at position 1199 of SEQ ID NO: 1563078
cugcgugacucuggacaaa

SEQ ID NO: 1793654 - RNA, 19 nt, Artificial Sequence
  Description of Artificial Sequence: Synthetic oligonucleotide
  Antisense strand to SEQ ID NO: 1793653
uuuguccagagucacgcag

SEQ ID NO: 1793655 - RNA, 19 nt, Artificial Sequence
  Description of Artificial Sequence: Synthetic oligonucleotide
  Sense strand starting at position 1420 of SEQ ID NO: 1563078
gcccacuguucuggcagua

SEQ ID NO: 1793656 - RNA, 19 nt, Artificial Sequence
  Description of Artificial Sequence: Synthetic oligonucleotide
  Antisense strand to SEQ ID NO: 1793655
uacugccagaacagugggc

SEQ ID NO: 1793657 - RNA, 19 nt, Artificial Sequence
  Description of Artificial Sequence: Synthetic oligonucleotide
  Sense strand starting at position 2667 of SEQ ID NO: 1563078
ucguuugucgucucuucua

SEQ ID NO: 1793658 - RNA, 19 nt, Artificial Sequence
  Description of Artificial Sequence: Synthetic oligonucleotide
  Antisense strand to SEQ ID NO: 1793657
uagaagagacgacaaacga

SEQ ID NO: 1793659 - RNA, 19 nt, Artificial Sequence
  Description of Artificial Sequence: Synthetic oligonucleotide
  Sense strand starting at position 2926 of SEQ ID NO: 1563078
ggcacaaagucgugggacu

SEQ ID NO: 1793660 - RNA, 19 nt, Artificial Sequence
  Description of Artificial Sequence: Synthetic oligonucleotide
  Antisense strand to SEQ ID NO: 1793659
agucccacgacuuugugcc

SEQ ID NO: 1793661 - RNA, 19 nt, Artificial Sequence
  Description of Artificial Sequence: Synthetic oligonucleotide
  Sense strand starting at position 3224 of SEQ ID NO: 1563078
ggcuacuucuacccagaca

SEQ ID NO: 1793662 - RNA, 19 nt, Artificial Sequence
  Description of Artificial Sequence: Synthetic oligonucleotide
  Antisense strand to SEQ ID NO: 1793661
ugucuggguagaaguagcc

SEQ ID NO: 1793663 - RNA, 19 nt, Artificial Sequence
  Description of Artificial Sequence: Synthetic oligonucleotide
  Sense strand starting at position 3280 of SEQ ID NO: 1563078
caguauggcuuuccuagga

SEQ ID NO: 1793664 - RNA, 19 nt, Artificial Sequence
  Description of Artificial Sequence: Synthetic oligonucleotide
  Antisense strand to SEQ ID NO: 1793663
uccuaggaaagccauacug

SEQ ID NO: 1793665 - RNA, 19 nt, Artificial Sequence
  Description of Artificial Sequence: Synthetic oligonucleotide
  Sense strand starting at position 3315 of SEQ ID NO: 1563078
uugugagccucuuccucua

SEQ ID NO: 1793666 - RNA, 19 nt, Artificial Sequence
  Description of Artificial Sequence: Synthetic oligonucleotide
  Antisense strand to SEQ ID NO: 1793665
uagaggaagaggcucacaa

SEQ ID NO: 1793667 - RNA, 19 nt, Artificial Sequence
  Description of Artificial Sequence: Synthetic oligonucleotide
  Sense strand starting at position 3317 of SEQ ID NO: 1563078
gugagccucuuccucuauu

SEQ ID NO: 1793668 - RNA, 19 nt, Artificial Sequence
  Description of Artificial Sequence: Synthetic oligonucleotide
  Antisense strand to SEQ ID NO: 1793667
aauagaggaagaggcucac

SEQ ID NO: 1793669 - RNA, 19 nt, Artificial Sequence
  Description of Artificial Sequence: Synthetic oligonucleotide
  Sense strand starting at position 3538 of SEQ ID NO: 1563078
gugauucucuccucccuca

SEQ ID NO: 1793670 - RNA, 19 nt, Artificial Sequence
  Description of Artificial Sequence: Synthetic oligonucleotide
  Antisense strand to SEQ ID NO: 1793669
ugagggaggagagaaucac

SEQ ID NO: 1793671 - RNA, 19 nt, Artificial Sequence
  Description of Artificial Sequence: Synthetic oligonucleotide
  Sense strand starting at position 168 of SEQ ID NO: 1563079
gaaugacuucccuaguggu

SEQ ID NO: 1793672 - RNA, 19 nt, Artificial Sequence
  Description of Artificial Sequence: Synthetic oligonucleotide
  Antisense strand to SEQ ID NO: 1793671
accacuagggaagucauuc

SEQ ID NO: 1793673 - RNA, 19 nt, Artificial Sequence
  Description of Artificial Sequence: Synthetic oligonucleotide
  Sense strand starting at position 171 of SEQ ID NO: 1563079
ugacuucccuaguggucua

SEQ ID NO: 1793674 - RNA, 19 nt, Artificial Sequence
  Description of Artificial Sequence: Synthetic oligonucleotide
  Antisense strand to SEQ ID NO: 1793673
uagaccacuagggaaguca

SEQ ID NO: 1793675 - RNA, 19 nt, Artificial Sequence
  Description of Artificial Sequence: Synthetic oligonucleotide
  Sense strand starting at position 681 of SEQ ID NO: 1563079
ccaggaguucugcaggaga

SEQ ID NO: 1793676 - RNA, 19 nt, Artificial Sequence
  Description of Artificial Sequence: Synthetic oligonucleotide
  Antisense strand to SEQ ID NO: 1793675
ucuccugcagaacuccugg

SEQ ID NO: 1793677 - RNA, 19 nt, Artificial Sequence
  Description of Artificial Sequence: Synthetic oligonucleotide
  Sense strand starting at position 683 of SEQ ID NO: 1563079
aggaguucugcaggagacu

SEQ ID NO: 1793678 - RNA, 19 nt, Artificial Sequence
  Description of Artificial Sequence: Synthetic oligonucleotide
  Antisense strand to SEQ ID NO: 1793677
agucuccugcagaacuccu

SEQ ID NO: 1793679 - RNA, 19 nt, Artificial Sequence
  Description of Artificial Sequence: Synthetic oligonucleotide
  Sense strand starting at position 1009 of SEQ ID NO: 1563079
ugugaauacuuucugguag

SEQ ID NO: 1793680 - RNA, 19 nt, Artificial Sequence
  Description of Artificial Sequence: Synthetic oligonucleotide
  Antisense strand to SEQ ID NO: 1793679
cuaccagaaaguauucaca

SEQ ID NO: 1793681 - RNA, 19 nt, Artificial Sequence
  Description of Artificial Sequence: Synthetic oligonucleotide
  Sense strand starting at position 1010 of SEQ ID NO: 1563079
gugaauacuuucugguaga

SEQ ID NO: 1793682 - RNA, 19 nt, Artificial Sequence
  Description of Artificial Sequence: Synthetic oligonucleotide
  Antisense strand to SEQ ID NO: 1793681
ucuaccagaaaguauucac

SEQ ID NO: 1793683 - RNA, 19 nt, Artificial Sequence
  Description of Artificial Sequence: Synthetic oligonucleotide
  Sense strand starting at position 1011 of SEQ ID NO: 1563079
ugaauacuuucugguagau

SEQ ID NO: 1793684 - RNA, 19 nt, Artificial Sequence
  Description of Artificial Sequence: Synthetic oligonucleotide
  Antisense strand to SEQ ID NO: 1793683
aucuaccagaaaguauuca

SEQ ID NO: 1793685 - RNA, 19 nt, Artificial Sequence
  Description of Artificial Sequence: Synthetic oligonucleotide
  Sense strand starting at position 1023 of SEQ ID NO: 1563079
gguagauccagccagacau

SEQ ID NO: 1793686 - RNA, 19 nt, Artificial Sequence
  Description of Artificial Sequence: Synthetic oligonucleotide
  Antisense strand to SEQ ID NO: 1793685
augucuggcuggaucuacc

SEQ ID NO: 1793687 - RNA, 19 nt, Artificial Sequence
  Description of Artificial Sequence: Synthetic oligonucleotide
  Sense strand starting at position 1197 of SEQ ID NO: 1563079
cugcgugacucuggacaaa

SEQ ID NO: 1793688 - RNA, 19 nt, Artificial Sequence
  Description of Artificial Sequence: Synthetic oligonucleotide
  Antisense strand to SEQ ID NO: 1793687
uuuguccagagucacgcag

SEQ ID NO: 1793689 - RNA, 19 nt, Artificial Sequence
  Description of Artificial Sequence: Synthetic oligonucleotide
  Sense strand starting at position 1418 of SEQ ID NO: 1563079
gcccacuguucuggcagua

SEQ ID NO: 1793690 - RNA, 19 nt, Artificial Sequence
  Description of Artificial Sequence: Synthetic oligonucleotide
  Antisense strand to SEQ ID NO: 1793689
uacugccagaacagugggc

SEQ ID NO: 1793691 - RNA, 19 nt, Artificial Sequence
  Description of Artificial Sequence: Synthetic oligonucleotide
  Sense strand starting at position 2665 of SEQ ID NO: 1563079
ucguuugucgucucuucua

SEQ ID NO: 1793692 - RNA, 19 nt, Artificial Sequence
  Description of Artificial Sequence: Synthetic oligonucleotide
  Antisense strand to SEQ ID NO: 1793691
uagaagagacgacaaacga

SEQ ID NO: 1793693 - RNA, 19 nt, Artificial Sequence
  Description of Artificial Sequence: Synthetic oligonucleotide
  Sense strand starting at position 2924 of SEQ ID NO: 1563079
ggcacaaagucgugggacu

SEQ ID NO: 1793694 - RNA, 19 nt, Artificial Sequence
  Description of Artificial Sequence: Synthetic oligonucleotide
  Antisense strand to SEQ ID NO: 1793693
agucccacgacuuugugcc

SEQ ID NO: 1793695 - RNA, 19 nt, Artificial Sequence
  Description of Artificial Sequence: Synthetic oligonucleotide
  Sense strand starting at position 3222 of SEQ ID NO: 1563079
ggcuacuucuacccagaca

SEQ ID NO: 1793696 - RNA, 19 nt, Artificial Sequence
  Description of Artificial Sequence: Synthetic oligonucleotide
  Antisense strand to SEQ ID NO: 1793695
ugucuggguagaaguagcc

SEQ ID NO: 1793697 - RNA, 19 nt, Artificial Sequence
  Description of Artificial Sequence: Synthetic oligonucleotide
  Sense strand starting at position 3278 of SEQ ID NO: 1563079
caguauggcuuuccuagga

SEQ ID NO: 1793698 - RNA, 19 nt, Artificial Sequence
  Description of Artificial Sequence: Synthetic oligonucleotide
  Antisense strand to SEQ ID NO: 1793697
uccuaggaaagccauacug

SEQ ID NO: 1793699 - RNA, 19 nt, Artificial Sequence
  Description of Artificial Sequence: Synthetic oligonucleotide
  Sense strand starting at position 3313 of SEQ ID NO: 1563079
uugugagccucuuccucua

SEQ ID NO: 1793700 - RNA, 19 nt, Artificial Sequence
  Description of Artificial Sequence: Synthetic oligonucleotide
  Antisense strand to SEQ ID NO: 1793699
uagaggaagaggcucacaa

SEQ ID NO: 1793701 - RNA, 19 nt, Artificial Sequence
  Description of Artificial Sequence: Synthetic oligonucleotide
  Sense strand starting at position 3315 of SEQ ID NO: 1563079
gugagccucuuccucuauu

SEQ ID NO: 1793702 - RNA, 19 nt, Artificial Sequence
  Description of Artificial Sequence: Synthetic oligonucleotide
  Antisense strand to SEQ ID NO: 1793701
aauagaggaagaggcucac

SEQ ID NO: 1793703 - RNA, 19 nt, Artificial Sequence
  Description of Artificial Sequence: Synthetic oligonucleotide
  Sense strand starting at position 3536 of SEQ ID NO: 1563079
gugauucucuccucccuca

SEQ ID NO: 1793704 - RNA, 19 nt, Artificial Sequence
  Description of Artificial Sequence: Synthetic oligonucleotide
  Antisense strand to SEQ ID NO: 1793703
ugagggaggagagaaucac

SEQ ID NO: 1793705 - RNA, 19 nt, Artificial Sequence
  Description of Artificial Sequence: Synthetic oligonucleotide
  Sense strand starting at position 123 of SEQ ID NO: 1563080
gugguuuauuuggugguca

SEQ ID NO: 1793706 - RNA, 19 nt, Artificial Sequence
  Description of Artificial Sequence: Synthetic oligonucleotide
  Antisense strand to SEQ ID NO: 1793705
ugaccaccaaauaaaccac

SEQ ID NO: 1793707 - RNA, 19 nt, Artificial Sequence
  Description of Artificial Sequence: Synthetic oligonucleotide
  Sense strand starting at position 125 of SEQ ID NO: 1563080
gguuuauuugguggucagu

SEQ ID NO: 1793708 - RNA, 19 nt, Artificial Sequence
  Description of Artificial Sequence: Synthetic oligonucleotide
  Antisense strand to SEQ ID NO: 1793707
acugaccaccaaauaaacc

SEQ ID NO: 1793709 - RNA, 19 nt, Artificial Sequence
  Description of Artificial Sequence: Synthetic oligonucleotide
  Sense strand starting at position 131 of SEQ ID NO: 1563080
uuugguggucaguaaggaa

SEQ ID NO: 1793710 - RNA, 19 nt, Artificial Sequence
  Description of Artificial Sequence: Synthetic oligonucleotide
  Antisense strand to SEQ ID NO: 1793709
uuccuuacugaccaccaaa

SEQ ID NO: 1793711 - RNA, 19 nt, Artificial Sequence
  Description of Artificial Sequence: Synthetic oligonucleotide
  Sense strand starting at position 2184 of SEQ ID NO: 1563080
acaggcagcuguuugaaua

SEQ ID NO: 1793712 - RNA, 19 nt, Artificial Sequence
  Description of Artificial Sequence: Synthetic oligonucleotide
  Antisense strand to SEQ ID NO: 1793711
uauucaaacagcugccugu

SEQ ID NO: 1793713 - RNA, 19 nt, Artificial Sequence
  Description of Artificial Sequence: Synthetic oligonucleotide
  Sense strand starting at position 2376 of SEQ ID NO: 1563080
ccaguagacuuaggugauu

SEQ ID NO: 1793714 - RNA, 19 nt, Artificial Sequence
  Description of Artificial Sequence: Synthetic oligonucleotide
  Antisense strand to SEQ ID NO: 1793713
aaucaccuaagucuacugg

SEQ ID NO: 1793715 - RNA, 19 nt, Artificial Sequence
  Description of Artificial Sequence: Synthetic oligonucleotide
  Sense strand starting at position 2382 of SEQ ID NO: 1563080
gacuuaggugauugcugua

SEQ ID NO: 1793716 - RNA, 19 nt, Artificial Sequence
  Description of Artificial Sequence: Synthetic oligonucleotide
  Antisense strand to SEQ ID NO: 1793715
uacagcaaucaccuaaguc

SEQ ID NO: 1793717 - RNA, 19 nt, Artificial Sequence
  Description of Artificial Sequence: Synthetic oligonucleotide
  Sense strand starting at position 2387 of SEQ ID NO: 1563080
aggugauugcuguacugca

SEQ ID NO: 1793718 - RNA, 19 nt, Artificial Sequence
  Description of Artificial Sequence: Synthetic oligonucleotide
  Antisense strand to SEQ ID NO: 1793717
ugcaguacagcaaucaccu

SEQ ID NO: 1793719 - RNA, 19 nt, Artificial Sequence
  Description of Artificial Sequence: Synthetic oligonucleotide
  Sense strand starting at position 2469 of SEQ ID NO: 1563080
cuggaauuaucuccagccu

SEQ ID NO: 1793720 - RNA, 19 nt, Artificial Sequence
  Description of Artificial Sequence: Synthetic oligonucleotide
  Antisense strand to SEQ ID NO: 1793719
aggcuggagauaauuccag

SEQ ID NO: 1793721 - RNA, 19 nt, Artificial Sequence
  Description of Artificial Sequence: Synthetic oligonucleotide
  Sense strand starting at position 2578 of SEQ ID NO: 1563080
uggcuugguucugggaaca

SEQ ID NO: 1793722 - RNA, 19 nt, Artificial Sequence
  Description of Artificial Sequence: Synthetic oligonucleotide
  Antisense strand to SEQ ID NO: 1793721
uguucccagaaccaagcca

SEQ ID NO: 1793723 - RNA, 19 nt, Artificial Sequence
  Description of Artificial Sequence: Synthetic oligonucleotide
  Sense strand starting at position 2668 of SEQ ID NO: 1563080
cucuguguuugggagcaga

SEQ ID NO: 1793724 - RNA, 19 nt, Artificial Sequence
  Description of Artificial Sequence: Synthetic oligonucleotide
  Antisense strand to SEQ ID NO: 1793723
ucugcucccaaacacagag

SEQ ID NO: 1793725 - RNA, 19 nt, Artificial Sequence
  Description of Artificial Sequence: Synthetic oligonucleotide
  Sense strand starting at position 2741 of SEQ ID NO: 1563080
cgagcaagggccuguguau

SEQ ID NO: 1793726 - RNA, 19 nt, Artificial Sequence
  Description of Artificial Sequence: Synthetic oligonucleotide
  Antisense strand to SEQ ID NO: 1793725
auacacaggcccuugcucg

SEQ ID NO: 1793727 - RNA, 19 nt, Artificial Sequence
  Description of Artificial Sequence: Synthetic oligonucleotide
  Sense strand starting at position 2912 of SEQ ID NO: 1563080
cugaaagugacuggaagua

SEQ ID NO: 1793728 - RNA, 19 nt, Artificial Sequence
  Description of Artificial Sequence: Synthetic oligonucleotide
  Antisense strand to SEQ ID NO: 1793727
uacuuccagucacuuucag

SEQ ID NO: 1793729 - RNA, 19 nt, Artificial Sequence
  Description of Artificial Sequence: Synthetic oligonucleotide
  Sense strand starting at position 3003 of SEQ ID NO: 1563080
ggccgucccaguuguguuu

SEQ ID NO: 1793730 - RNA, 19 nt, Artificial Sequence
  Description of Artificial Sequence: Synthetic oligonucleotide
  Antisense strand to SEQ ID NO: 1793729
aaacacaacugggacggcc

SEQ ID NO: 1793731 - RNA, 19 nt, Artificial Sequence
  Description of Artificial Sequence: Synthetic oligonucleotide
  Sense strand starting at position 3022 of SEQ ID NO: 1563080
uaagauggucaguggcaga

SEQ ID NO: 1793732 - RNA, 19 nt, Artificial Sequence
  Description of Artificial Sequence: Synthetic oligonucleotide
  Antisense strand to SEQ ID NO: 1793731
ucugccacugaccaucuua

SEQ ID NO: 1793733 - RNA, 19 nt, Artificial Sequence
  Description of Artificial Sequence: Synthetic oligonucleotide
  Sense strand starting at position 3056 of SEQ ID NO: 1563080
agaguagaauuggcuuuga

SEQ ID NO: 1793734 - RNA, 19 nt, Artificial Sequence
  Description of Artificial Sequence: Synthetic oligonucleotide
  Antisense strand to SEQ ID NO: 1793733
ucaaagccaauucuacucu

SEQ ID NO: 1793735 - RNA, 19 nt, Artificial Sequence
  Description of Artificial Sequence: Synthetic oligonucleotide
  Sense strand starting at position 3061 of SEQ ID NO: 1563080
agaauuggcuuugagguga

SEQ ID NO: 1793736 - RNA, 19 nt, Artificial Sequence
  Description of Artificial Sequence: Synthetic oligonucleotide
  Antisense strand to SEQ ID NO: 1793735
ucaccucaaagccaauucu

SEQ ID NO: 1793737 - RNA, 19 nt, Artificial Sequence
  Description of Artificial Sequence: Synthetic oligonucleotide
  Sense strand starting at position 3065 of SEQ ID NO: 1563080
uuggcuuugaggugagagu

SEQ ID NO: 1793738 - RNA, 19 nt, Artificial Sequence
  Description of Artificial Sequence: Synthetic oligonucleotide
  Antisense strand to SEQ ID NO: 1793737
acucucaccucaaagccaa

SEQ ID NO: 1793739 - RNA, 19 nt, Artificial Sequence
  Description of Artificial Sequence: Synthetic oligonucleotide
  Sense strand starting at position 3088 of SEQ ID NO: 1563080
gccagugccuuugaccaaa

SEQ ID NO: 1793740 - RNA, 19 nt, Artificial Sequence
  Description of Artificial Sequence: Synthetic oligonucleotide
  Antisense strand to SEQ ID NO: 1793739
uuuggucaaaggcacuggc

SEQ ID NO: 1793741 - RNA, 19 nt, Artificial Sequence
  Description of Artificial Sequence: Synthetic oligonucleotide
  Sense strand starting at position 3091 of SEQ ID NO: 1563080
agugccuuugaccaaauga

SEQ ID NO: 1793742 - RNA, 19 nt, Artificial Sequence
  Description of Artificial Sequence: Synthetic oligonucleotide
  Antisense strand to SEQ ID NO: 1793741
ucauuuggucaaaggcacu

SEQ ID NO: 1793743 - RNA, 19 nt, Artificial Sequence
  Description of Artificial Sequence: Synthetic oligonucleotide
  Sense strand starting at position 3151 of SEQ ID NO: 1563080
cagagaaggucaggucuua

SEQ ID NO: 1793744 - RNA, 19 nt, Artificial Sequence
  Description of Artificial Sequence: Synthetic oligonucleotide
  Antisense strand to SEQ ID NO: 1793743
uaagaccugaccuucucug

SEQ ID NO: 1793745 - RNA, 19 nt, Artificial Sequence
  Description of Artificial Sequence: Synthetic oligonucleotide
  Sense strand starting at position 3164 of SEQ ID NO: 1563080
gucuuagucuuguuugcua

SEQ ID NO: 1793746 - RNA, 19 nt, Artificial Sequence
  Description of Artificial Sequence: Synthetic oligonucleotide
  Antisense strand to SEQ ID NO: 1793745
uagcaaacaagacuaagac

SEQ ID NO: 1793747 - RNA, 19 nt, Artificial Sequence
  Description of Artificial Sequence: Synthetic oligonucleotide
  Sense strand starting at position 3166 of SEQ ID NO: 1563080
cuuagucuuguuugcuaga

SEQ ID NO: 1793748 - RNA, 19 nt, Artificial Sequence
  Description of Artificial Sequence: Synthetic oligonucleotide
  Antisense strand to SEQ ID NO: 1793747
ucuagcaaacaagacuaag

SEQ ID NO: 1793749 - RNA, 19 nt, Artificial Sequence
  Description of Artificial Sequence: Synthetic oligonucleotide
  Sense strand starting at position 3168 of SEQ ID NO: 1563080
uagucuuguuugcuagacu

SEQ ID NO: 1793750 - RNA, 19 nt, Artificial Sequence
  Description of Artificial Sequence: Synthetic oligonucleotide
  Antisense strand to SEQ ID NO: 1793749
agucuagcaaacaagacua

SEQ ID NO: 1793751 - RNA, 19 nt, Artificial Sequence
  Description of Artificial Sequence: Synthetic oligonucleotide
  Sense strand starting at position 3277 of SEQ ID NO: 1563080
gguucugaaucacaucagu

SEQ ID NO: 1793752 - RNA, 19 nt, Artificial Sequence
  Description of Artificial Sequence: Synthetic oligonucleotide
  Antisense strand to SEQ ID NO: 1793751
acugaugugauucagaacc

SEQ ID NO: 1793753 - RNA, 19 nt, Artificial Sequence
  Description of Artificial Sequence: Synthetic oligonucleotide
  Sense strand starting at position 3298 of SEQ ID NO: 1563080
gggccuuuguguggaguga

SEQ ID NO: 1793754 - RNA, 19 nt, Artificial Sequence
  Description of Artificial Sequence: Synthetic oligonucleotide
  Antisense strand to SEQ ID NO: 1793753
ucacuccacacaaaggccc

SEQ ID NO: 1793755 - RNA, 19 nt, Artificial Sequence
  Description of Artificial Sequence: Synthetic oligonucleotide
  Sense strand starting at position 3338 of SEQ ID NO: 1563080
ccugacauuggguagcauu

SEQ ID NO: 1793756 - RNA, 19 nt, Artificial Sequence
  Description of Artificial Sequence: Synthetic oligonucleotide
  Antisense strand to SEQ ID NO: 1793755
aaugcuacccaaugucagg

SEQ ID NO: 1793757 - RNA, 19 nt, Artificial Sequence
  Description of Artificial Sequence: Synthetic oligonucleotide
  Sense strand starting at position 3415 of SEQ ID NO: 1563080
guggauuugugcuuuggga

SEQ ID NO: 1793758 - RNA, 19 nt, Artificial Sequence
  Description of Artificial Sequence: Synthetic oligonucleotide
  Antisense strand to SEQ ID NO: 1793757
ucccaaagcacaaauccac

SEQ ID NO: 1793759 - RNA, 19 nt, Artificial Sequence
  Description of Artificial Sequence: Synthetic oligonucleotide
  Sense strand starting at position 3436 of SEQ ID NO: 1563080
uguggcauccuguacaugu

SEQ ID NO: 1793760 - RNA, 19 nt, Artificial Sequence
  Description of Artificial Sequence: Synthetic oligonucleotide
  Antisense strand to SEQ ID NO: 1793759
acauguacaggaugccaca

SEQ ID NO: 1793761 - RNA, 19 nt, Artificial Sequence
  Description of Artificial Sequence: Synthetic oligonucleotide
  Sense strand starting at position 3462 of SEQ ID NO: 1563080
ggugcguuggacugauguu

SEQ ID NO: 1793762 - RNA, 19 nt, Artificial Sequence
  Description of Artificial Sequence: Synthetic oligonucleotide
  Antisense strand to SEQ ID NO: 1793761
aacaucaguccaacgcacc

SEQ ID NO: 1793763 - RNA, 19 nt, Artificial Sequence
  Description of Artificial Sequence: Synthetic oligonucleotide
  Sense strand starting at position 3538 of SEQ ID NO: 1563080
cuguguguucaguguuuag

SEQ ID NO: 1793764 - RNA, 19 nt, Artificial Sequence
  Description of Artificial Sequence: Synthetic oligonucleotide
  Antisense strand to SEQ ID NO: 1793763
cuaaacacugaacacacag

SEQ ID NO: 1793765 - RNA, 19 nt, Artificial Sequence
  Description of Artificial Sequence: Synthetic oligonucleotide
  Sense strand starting at position 3587 of SEQ ID NO: 1563080
ggguuuaguccuggaaggu

SEQ ID NO: 1793766 - RNA, 19 nt, Artificial Sequence
  Description of Artificial Sequence: Synthetic oligonucleotide
  Antisense strand to SEQ ID NO: 1793765
accuuccaggacuaaaccc

SEQ ID NO: 1793767 - RNA, 19 nt, Artificial Sequence
  Description of Artificial Sequence: Synthetic oligonucleotide
  Sense strand starting at position 3588 of SEQ ID NO: 1563080
gguuuaguccuggaagguu

SEQ ID NO: 1793768 - RNA, 19 nt, Artificial Sequence
  Description of Artificial Sequence: Synthetic oligonucleotide
  Antisense strand to SEQ ID NO: 1793767
aaccuuccaggacuaaacc

SEQ ID NO: 1793769 - RNA, 19 nt, Artificial Sequence
  Description of Artificial Sequence: Synthetic oligonucleotide
  Sense strand starting at position 3676 of SEQ ID NO: 1563080
caggacaugucagacagau

SEQ ID NO: 1793770 - RNA, 19 nt, Artificial Sequence
  Description of Artificial Sequence: Synthetic oligonucleotide
  Antisense strand to SEQ ID NO: 1793769
aucugucugacauguccug

SEQ ID NO: 1793771 - RNA, 19 nt, Artificial Sequence
  Description of Artificial Sequence: Synthetic oligonucleotide
  Sense strand starting at position 3682 of SEQ ID NO: 1563080
augucagacagaugugaca

SEQ ID NO: 1793772 - RNA, 19 nt, Artificial Sequence
  Description of Artificial Sequence: Synthetic oligonucleotide
  Antisense strand to SEQ ID NO: 1793771
ugucacaucugucugacau

SEQ ID NO: 1793773 - RNA, 19 nt, Artificial Sequence
  Description of Artificial Sequence: Synthetic oligonucleotide
  Sense strand starting at position 3747 of SEQ ID NO: 1563080
cagggagcacccuguguuu

SEQ ID NO: 1793774 - RNA, 19 nt, Artificial Sequence
  Description of Artificial Sequence: Synthetic oligonucleotide
  Antisense strand to SEQ ID NO: 1793773
aaacacagggugcucccug

SEQ ID NO: 1793775 - RNA, 19 nt, Artificial Sequence
  Description of Artificial Sequence: Synthetic oligonucleotide
  Sense strand starting at position 3910 of SEQ ID NO: 1563080
uuuauagcaucggugguua

SEQ ID NO: 1793776 - RNA, 19 nt, Artificial Sequence
  Description of Artificial Sequence: Synthetic oligonucleotide
  Antisense strand to SEQ ID NO: 1793775
uaaccaccgaugcuauaaa

SEQ ID NO: 1793777 - RNA, 19 nt, Artificial Sequence
  Description of Artificial Sequence: Synthetic oligonucleotide
  Sense strand starting at position 3912 of SEQ ID NO: 1563080
uauagcaucggugguuaau

SEQ ID NO: 1793778 - RNA, 19 nt, Artificial Sequence
  Description of Artificial Sequence: Synthetic oligonucleotide
  Antisense strand to SEQ ID NO: 1793777
auuaaccaccgaugcuaua

SEQ ID NO: 1793779 - RNA, 19 nt, Artificial Sequence
  Description of Artificial Sequence: Synthetic oligonucleotide
  Sense strand starting at position 3921 of SEQ ID NO: 1563080
ggugguuaauagcuuuagu

SEQ ID NO: 1793780 - RNA, 19 nt, Artificial Sequence
  Description of Artificial Sequence: Synthetic oligonucleotide
  Antisense strand to SEQ ID NO: 1793779
acuaaagcuauuaaccacc

SEQ ID NO: 1793781 - RNA, 19 nt, Artificial Sequence
  Description of Artificial Sequence: Synthetic oligonucleotide
  Sense strand starting at position 3924 of SEQ ID NO: 1563080
gguuaauagcuuuaguuug

SEQ ID NO: 1793782 - RNA, 19 nt, Artificial Sequence
  Description of Artificial Sequence: Synthetic oligonucleotide
  Antisense strand to SEQ ID NO: 1793781
caaacuaaagcuauuaacc

SEQ ID NO: 1793783 - RNA, 19 nt, Artificial Sequence
  Description of Artificial Sequence: Synthetic oligonucleotide
  Sense strand starting at position 3964 of SEQ ID NO: 1563080
gccucuacggcugaaauga

SEQ ID NO: 1793784 - RNA, 19 nt, Artificial Sequence
  Description of Artificial Sequence: Synthetic oligonucleotide
  Antisense strand to SEQ ID NO: 1793783
ucauuucagccguagaggc

SEQ ID NO: 1793785 - RNA, 19 nt, Artificial Sequence
  Description of Artificial Sequence: Synthetic oligonucleotide
  Sense strand starting at position 15 of SEQ ID NO: 1563081
gcuggaaccucuuagauuc

SEQ ID NO: 1793786 - RNA, 19 nt, Artificial Sequence
  Description of Artificial Sequence: Synthetic oligonucleotide
  Antisense strand to SEQ ID NO: 1793785
gaaucuaagagguuccagc

SEQ ID NO: 1793787 - RNA, 19 nt, Artificial Sequence
  Description of Artificial Sequence: Synthetic oligonucleotide
  Sense strand starting at position 75 of SEQ ID NO: 1563081
gguccaguguggcuuugaa

SEQ ID NO: 1793788 - RNA, 19 nt, Artificial Sequence
  Description of Artificial Sequence: Synthetic oligonucleotide
  Antisense strand to SEQ ID NO: 1793787
uucaaagccacacuggacc

SEQ ID NO: 1793789 - RNA, 19 nt, Artificial Sequence
  Description of Artificial Sequence: Synthetic oligonucleotide
  Sense strand starting at position 327 of SEQ ID NO: 1563081
gcaucaucucguagggcga

SEQ ID NO: 1793790 - RNA, 19 nt, Artificial Sequence
  Description of Artificial Sequence: Synthetic oligonucleotide
  Antisense strand to SEQ ID NO: 1793789
ucgcccuacgagaugaugc

SEQ ID NO: 1793791 - RNA, 19 nt, Artificial Sequence
  Description of Artificial Sequence: Synthetic oligonucleotide
  Sense strand starting at position 357 of SEQ ID NO: 1563081
ggcacucuucuaugucaaa

SEQ ID NO: 1793792 - RNA, 19 nt, Artificial Sequence
  Description of Artificial Sequence: Synthetic oligonucleotide
  Antisense strand to SEQ ID NO: 1793791
uuugacauagaagagugcc

SEQ ID NO: 1793793 - RNA, 19 nt, Artificial Sequence
  Description of Artificial Sequence: Synthetic oligonucleotide
  Sense strand starting at position 358 of SEQ ID NO: 1563081
gcacucuucuaugucaaag

SEQ ID NO: 1793794 - RNA, 19 nt, Artificial Sequence
  Description of Artificial Sequence: Synthetic oligonucleotide
  Antisense strand to SEQ ID NO: 1793793
cuuugacauagaagagugc

SEQ ID NO: 1793795 - RNA, 19 nt, Artificial Sequence
  Description of Artificial Sequence: Synthetic oligonucleotide
  Sense strand starting at position 719 of SEQ ID NO: 1563081
gcgggauaaguuugcagau

SEQ ID NO: 1793796 - RNA, 19 nt, Artificial Sequence
  Description of Artificial Sequence: Synthetic oligonucleotide
  Antisense strand to SEQ ID NO: 1793795
aucugcaaacuuaucccgc

SEQ ID NO: 1793797 - RNA, 19 nt, Artificial Sequence
  Description of Artificial Sequence: Synthetic oligonucleotide
  Sense strand starting at position 720 of SEQ ID NO: 1563081
cgggauaaguuugcagauu

SEQ ID NO: 1793798 - RNA, 19 nt, Artificial Sequence
  Description of Artificial Sequence: Synthetic oligonucleotide
  Antisense strand to SEQ ID NO: 1793797
aaucugcaaacuuaucccg

SEQ ID NO: 1793799 - RNA, 19 nt, Artificial Sequence
  Description of Artificial Sequence: Synthetic oligonucleotide
  Sense strand starting at position 721 of SEQ ID NO: 1563081
gggauaaguuugcagauuc

SEQ ID NO: 1793800 - RNA, 19 nt, Artificial Sequence
  Description of Artificial Sequence: Synthetic oligonucleotide
  Antisense strand to SEQ ID NO: 1793799
gaaucugcaaacuuauccc

SEQ ID NO: 1793801 - RNA, 19 nt, Artificial Sequence
  Description of Artificial Sequence: Synthetic oligonucleotide
  Sense strand starting at position 732 of SEQ ID NO: 1563081
gcagauucccucuggaaag

SEQ ID NO: 1793802 - RNA, 19 nt, Artificial Sequence
  Description of Artificial Sequence: Synthetic oligonucleotide
  Antisense strand to SEQ ID NO: 1793801
cuuuccagagggaaucugc

SEQ ID NO: 1793803 - RNA, 19 nt, Artificial Sequence
  Description of Artificial Sequence: Synthetic oligonucleotide
  Sense strand starting at position 806 of SEQ ID NO: 1563081
agaguuuccgaggacucca

SEQ ID NO: 1793804 - RNA, 19 nt, Artificial Sequence
  Description of Artificial Sequence: Synthetic oligonucleotide
  Antisense strand to SEQ ID NO: 1793803
uggaguccucggaaacucu

SEQ ID NO: 1793805 - RNA, 19 nt, Artificial Sequence
  Description of Artificial Sequence: Synthetic oligonucleotide
  Sense strand starting at position 848 of SEQ ID NO: 1563081
ggaucuggcuccuagaagu

SEQ ID NO: 1793806 - RNA, 19 nt, Artificial Sequence
  Description of Artificial Sequence: Synthetic oligonucleotide
  Antisense strand to SEQ ID NO: 1793805
acuucuaggagccagaucc

SEQ ID NO: 1793807 - RNA, 19 nt, Artificial Sequence
  Description of Artificial Sequence: Synthetic oligonucleotide
  Sense strand starting at position 873 of SEQ ID NO: 1563081
acucgaucccgccaggaaa

SEQ ID NO: 1793808 - RNA, 19 nt, Artificial Sequence
  Description of Artificial Sequence: Synthetic oligonucleotide
  Antisense strand to SEQ ID NO: 1793807
uuuccuggcgggaucgagu

SEQ ID NO: 1793809 - RNA, 19 nt, Artificial Sequence
  Description of Artificial Sequence: Synthetic oligonucleotide
  Sense strand starting at position 924 of SEQ ID NO: 1563081
auggcaucuugggcuuaga

SEQ ID NO: 1793810 - RNA, 19 nt, Artificial Sequence
  Description of Artificial Sequence: Synthetic oligonucleotide
  Antisense strand to SEQ ID NO: 1793809
ucuaagcccaagaugccau

SEQ ID NO: 1793811 - RNA, 19 nt, Artificial Sequence
  Description of Artificial Sequence: Synthetic oligonucleotide
  Sense strand starting at position 927 of SEQ ID NO: 1563081
gcaucuugggcuuagaauc

SEQ ID NO: 1793812 - RNA, 19 nt, Artificial Sequence
  Description of Artificial Sequence: Synthetic oligonucleotide
  Antisense strand to SEQ ID NO: 1793811
gauucuaagcccaagaugc

SEQ ID NO: 1793813 - RNA, 19 nt, Artificial Sequence
  Description of Artificial Sequence: Synthetic oligonucleotide
  Sense strand starting at position 1256 of SEQ ID NO: 1563081
ggagaaguuggccgguuca

SEQ ID NO: 1793814 - RNA, 19 nt, Artificial Sequence
  Description of Artificial Sequence: Synthetic oligonucleotide
  Antisense strand to SEQ ID NO: 1793813
ugaaccggccaacuucucc

SEQ ID NO: 1793815 - RNA, 19 nt, Artificial Sequence
  Description of Artificial Sequence: Synthetic oligonucleotide
  Sense strand starting at position 1792 of SEQ ID NO: 1563081
gggcuuagucuaggagaga

SEQ ID NO: 1793816 - RNA, 19 nt, Artificial Sequence
  Description of Artificial Sequence: Synthetic oligonucleotide
  Antisense strand to SEQ ID NO: 1793815
ucucuccuagacuaagccc

SEQ ID NO: 1793817 - RNA, 19 nt, Artificial Sequence
  Description of Artificial Sequence: Synthetic oligonucleotide
  Sense strand starting at position 1793 of SEQ ID NO: 1563081
ggcuuagucuaggagagaa

SEQ ID NO: 1793818 - RNA, 19 nt, Artificial Sequence
  Description of Artificial Sequence: Synthetic oligonucleotide
  Antisense strand to SEQ ID NO: 1793817
uucucuccuagacuaagcc

SEQ ID NO: 1793819 - RNA, 19 nt, Artificial Sequence
  Description of Artificial Sequence: Synthetic oligonucleotide
  Sense strand starting at position 2004 of SEQ ID NO: 1563081
gccaauaacuuguuaguga

SEQ ID NO: 1793820 - RNA, 19 nt, Artificial Sequence
  Description of Artificial Sequence: Synthetic oligonucleotide
  Antisense strand to SEQ ID NO: 1793819
ucacuaacaaguuauuggc

SEQ ID NO: 1793821 - RNA, 19 nt, Artificial Sequence
  Description of Artificial Sequence: Synthetic oligonucleotide
  Sense strand starting at position 2005 of SEQ ID NO: 1563081
ccaauaacuuguuagugag

SEQ ID NO: 1793822 - RNA, 19 nt, Artificial Sequence
  Description of Artificial Sequence: Synthetic oligonucleotide
  Antisense strand to SEQ ID NO: 1793821
cucacuaacaaguuauugg

SEQ ID NO: 1793823 - RNA, 19 nt, Artificial Sequence
  Description of Artificial Sequence: Synthetic oligonucleotide
  Sense strand starting at position 2011 of SEQ ID NO: 1563081
acuuguuagugagugaaag

SEQ ID NO: 1793824 - RNA, 19 nt, Artificial Sequence
  Description of Artificial Sequence: Synthetic oligonucleotide
  Antisense strand to SEQ ID NO: 1793823
cuuucacucacuaacaagu

SEQ ID NO: 1793825 - RNA, 19 nt, Artificial Sequence
  Description of Artificial Sequence: Synthetic oligonucleotide
  Sense strand starting at position 2013 of SEQ ID NO: 1563081
uuguuagugagugaaagga

SEQ ID NO: 1793826 - RNA, 19 nt, Artificial Sequence
  Description of Artificial Sequence: Synthetic oligonucleotide
  Antisense strand to SEQ ID NO: 1793825
uccuuucacucacuaacaa

SEQ ID NO: 1793827 - RNA, 19 nt, Artificial Sequence
  Description of Artificial Sequence: Synthetic oligonucleotide
  Sense strand starting at position 2120 of SEQ ID NO: 1563081
gccagaaacuuacuaagac

SEQ ID NO: 1793828 - RNA, 19 nt, Artificial Sequence
  Description of Artificial Sequence: Synthetic oligonucleotide
  Antisense strand to SEQ ID NO: 1793827
gucuuaguaaguuucuggc

SEQ ID NO: 1793829 - RNA, 19 nt, Artificial Sequence
  Description of Artificial Sequence: Synthetic oligonucleotide
  Sense strand starting at position 2242 of SEQ ID NO: 1563081
uggcucuucccugaagguu

SEQ ID NO: 1793830 - RNA, 19 nt, Artificial Sequence
  Description of Artificial Sequence: Synthetic oligonucleotide
  Antisense strand to SEQ ID NO: 1793829
aaccuucagggaagagcca

SEQ ID NO: 1793831 - RNA, 19 nt, Artificial Sequence
  Description of Artificial Sequence: Synthetic oligonucleotide
  Sense strand starting at position 2286 of SEQ ID NO: 1563081
uugaacuuagcccguuuaa

SEQ ID NO: 1793832 - RNA, 19 nt, Artificial Sequence
  Description of Artificial Sequence: Synthetic oligonucleotide
  Antisense strand to SEQ ID NO: 1793831
uuaaacgggcuaaguucaa

SEQ ID NO: 1793833 - RNA, 19 nt, Artificial Sequence
  Description of Artificial Sequence: Synthetic oligonucleotide
  Sense strand starting at position 2299 of SEQ ID NO: 1563081
guuuaaucauaaguugaug

SEQ ID NO: 1793834 - RNA, 19 nt, Artificial Sequence
  Description of Artificial Sequence: Synthetic oligonucleotide
  Antisense strand to SEQ ID NO: 1793833
caucaacuuaugauuaaac

SEQ ID NO: 1793835 - RNA, 19 nt, Artificial Sequence
  Description of Artificial Sequence: Synthetic oligonucleotide
  Sense strand starting at position 2968 of SEQ ID NO: 1563081
guguauccuucugacauga

SEQ ID NO: 1793836 - RNA, 19 nt, Artificial Sequence
  Description of Artificial Sequence: Synthetic oligonucleotide
  Antisense strand to SEQ ID NO: 1793835
ucaugucagaaggauacac

SEQ ID NO: 1793837 - RNA, 19 nt, Artificial Sequence
  Description of Artificial Sequence: Synthetic oligonucleotide
  Sense strand starting at position 3126 of SEQ ID NO: 1563081
cccacagaccuuugugaga

SEQ ID NO: 1793838 - RNA, 19 nt, Artificial Sequence
  Description of Artificial Sequence: Synthetic oligonucleotide
  Antisense strand to SEQ ID NO: 1793837
ucucacaaaggucuguggg

SEQ ID NO: 1793839 - RNA, 19 nt, Artificial Sequence
  Description of Artificial Sequence: Synthetic oligonucleotide
  Sense strand starting at position 3128 of SEQ ID NO: 1563081
cacagaccuuugugagaag

SEQ ID NO: 1793840 - RNA, 19 nt, Artificial Sequence
  Description of Artificial Sequence: Synthetic oligonucleotide
  Antisense strand to SEQ ID NO: 1793839
cuucucacaaaggucugug

SEQ ID NO: 1793841 - RNA, 19 nt, Artificial Sequence
  Description of Artificial Sequence: Synthetic oligonucleotide
  Sense strand starting at position 3129 of SEQ ID NO: 1563081
acagaccuuugugagaagu

SEQ ID NO: 1793842 - RNA, 19 nt, Artificial Sequence
  Description of Artificial Sequence: Synthetic oligonucleotide
  Antisense strand to SEQ ID NO: 1793841
acuucucacaaaggucugu

SEQ ID NO: 1793843 - RNA, 19 nt, Artificial Sequence
  Description of Artificial Sequence: Synthetic oligonucleotide
  Sense strand starting at position 3135 of SEQ ID NO: 1563081
cuuugugagaagugccaau

SEQ ID NO: 1793844 - RNA, 19 nt, Artificial Sequence
  Description of Artificial Sequence: Synthetic oligonucleotide
  Antisense strand to SEQ ID NO: 1793843
auuggcacuucucacaaag

SEQ ID NO: 1793845 - RNA, 19 nt, Artificial Sequence
  Description of Artificial Sequence: Synthetic oligonucleotide
  Sense strand starting at position 3178 of SEQ ID NO: 1563081
gaccucagaucucugaagu

SEQ ID NO: 1793846 - RNA, 19 nt, Artificial Sequence
  Description of Artificial Sequence: Synthetic oligonucleotide
  Antisense strand to SEQ ID NO: 1793845
acuucagagaucugagguc

SEQ ID NO: 1793847 - RNA, 19 nt, Artificial Sequence
  Description of Artificial Sequence: Synthetic oligonucleotide
  Sense strand starting at position 3179 of SEQ ID NO: 1563081
accucagaucucugaaguc

SEQ ID NO: 1793848 - RNA, 19 nt, Artificial Sequence
  Description of Artificial Sequence: Synthetic oligonucleotide
  Antisense strand to SEQ ID NO: 1793847
gacuucagagaucugaggu

SEQ ID NO: 1793849 - RNA, 19 nt, Artificial Sequence
  Description of Artificial Sequence: Synthetic oligonucleotide
  Sense strand starting at position 3255 of SEQ ID NO: 1563081
caaugagaguaauggaaga

SEQ ID NO: 1793850 - RNA, 19 nt, Artificial Sequence
  Description of Artificial Sequence: Synthetic oligonucleotide
  Antisense strand to SEQ ID NO: 1793849
ucuuccauuacucucauug

SEQ ID NO: 1793851 - RNA, 19 nt, Artificial Sequence
  Description of Artificial Sequence: Synthetic oligonucleotide
  Sense strand starting at position 3621 of SEQ ID NO: 1563081
gauguaaugcauggugguu

SEQ ID NO: 1793852 - RNA, 19 nt, Artificial Sequence
  Description of Artificial Sequence: Synthetic oligonucleotide
  Antisense strand to SEQ ID NO: 1793851
aaccaccaugcauuacauc

SEQ ID NO: 1793853 - RNA, 19 nt, Artificial Sequence
  Description of Artificial Sequence: Synthetic oligonucleotide
  Sense strand starting at position 3655 of SEQ ID NO: 1563081
uuguuuaaucuuggcucua

SEQ ID NO: 1793854 - RNA, 19 nt, Artificial Sequence
  Description of Artificial Sequence: Synthetic oligonucleotide
  Antisense strand to SEQ ID NO: 1793853
uagagccaagauuaaacaa

SEQ ID NO: 1793855 - RNA, 19 nt, Artificial Sequence
  Description of Artificial Sequence: Synthetic oligonucleotide
  Sense strand starting at position 3656 of SEQ ID NO: 1563081
uguuuaaucuuggcucuaa

SEQ ID NO: 1793856 - RNA, 19 nt, Artificial Sequence
  Description of Artificial Sequence: Synthetic oligonucleotide
  Antisense strand to SEQ ID NO: 1793855
uuagagccaagauuaaaca

SEQ ID NO: 1793857 - RNA, 19 nt, Artificial Sequence
  Description of Artificial Sequence: Synthetic oligonucleotide
  Sense strand starting at position 3657 of SEQ ID NO: 1563081
guuuaaucuuggcucuaag

SEQ ID NO: 1793858 - RNA, 19 nt, Artificial Sequence
  Description of Artificial Sequence: Synthetic oligonucleotide
  Antisense strand to SEQ ID NO: 1793857
cuuagagccaagauuaaac

SEQ ID NO: 1793859 - RNA, 19 nt, Artificial Sequence
  Description of Artificial Sequence: Synthetic oligonucleotide
  Sense strand starting at position 3911 of SEQ ID NO: 1563081
uaggguuccucaggaagga

SEQ ID NO: 1793860 - RNA, 19 nt, Artificial Sequence
  Description of Artificial Sequence: Synthetic oligonucleotide
  Antisense strand to SEQ ID NO: 1793859
uccuuccugaggaacccua

SEQ ID NO: 1793861 - RNA, 19 nt, Artificial Sequence
  Description of Artificial Sequence: Synthetic oligonucleotide
  Sense strand starting at position 3964 of SEQ ID NO: 1563081
ugugcuguaacgcagauaa

SEQ ID NO: 1793862 - RNA, 19 nt, Artificial Sequence
  Description of Artificial Sequence: Synthetic oligonucleotide
  Antisense strand to SEQ ID NO: 1793861
uuaucugcguuacagcaca

SEQ ID NO: 1793863 - RNA, 19 nt, Artificial Sequence
  Description of Artificial Sequence: Synthetic oligonucleotide
  Sense strand starting at position 3966 of SEQ ID NO: 1563081
ugcuguaacgcagauaaug

SEQ ID NO: 1793864 - RNA, 19 nt, Artificial Sequence
  Description of Artificial Sequence: Synthetic oligonucleotide
  Antisense strand to SEQ ID NO: 1793863
cauuaucugcguuacagca

SEQ ID NO: 1793865 - RNA, 19 nt, Artificial Sequence
  Description of Artificial Sequence: Synthetic oligonucleotide
  Sense strand starting at position 15 of SEQ ID NO: 1563082
acuuuauguccuggcaucu

SEQ ID NO: 1793866 - RNA, 19 nt, Artificial Sequence
  Description of Artificial Sequence: Synthetic oligonucleotide
  Antisense strand to SEQ ID NO: 1793865
agaugccaggacauaaagu

SEQ ID NO: 1793867 - RNA, 19 nt, Artificial Sequence
  Description of Artificial Sequence: Synthetic oligonucleotide
  Sense strand starting at position 70 of SEQ ID NO: 1563082
ugagcuuuguucgcugaga

SEQ ID NO: 1793868 - RNA, 19 nt, Artificial Sequence
  Description of Artificial Sequence: Synthetic oligonucleotide
  Antisense strand to SEQ ID NO: 1793867
ucucagcgaacaaagcuca

SEQ ID NO: 1793869 - RNA, 19 nt, Artificial Sequence
  Description of Artificial Sequence: Synthetic oligonucleotide
  Sense strand starting at position 71 of SEQ ID NO: 1563082
gagcuuuguucgcugagau

SEQ ID NO: 1793870 - RNA, 19 nt, Artificial Sequence
  Description of Artificial Sequence: Synthetic oligonucleotide
  Antisense strand to SEQ ID NO: 1793869
aucucagcgaacaaagcuc

SEQ ID NO: 1793871 - RNA, 19 nt, Artificial Sequence
  Description of Artificial Sequence: Synthetic oligonucleotide
  Sense strand starting at position 72 of SEQ ID NO: 1563082
agcuuuguucgcugagaua

SEQ ID NO: 1793872 - RNA, 19 nt, Artificial Sequence
  Description of Artificial Sequence: Synthetic oligonucleotide
  Antisense strand to SEQ ID NO: 1793871
uaucucagcgaacaaagcu

SEQ ID NO: 1793873 - RNA, 19 nt, Artificial Sequence
  Description of Artificial Sequence: Synthetic oligonucleotide
  Sense strand starting at position 85 of SEQ ID NO: 1563082
gagauaaugcggugccaag

SEQ ID NO: 1793874 - RNA, 19 nt, Artificial Sequence
  Description of Artificial Sequence: Synthetic oligonucleotide
  Antisense strand to SEQ ID NO: 1793873
cuuggcaccgcauuaucuc

SEQ ID NO: 1793875 - RNA, 19 nt, Artificial Sequence
  Description of Artificial Sequence: Synthetic oligonucleotide
  Sense strand starting at position 101 of SEQ ID NO: 1563082
aagugucuggcaugaaaug

SEQ ID NO: 1793876 - RNA, 19 nt, Artificial Sequence
  Description of Artificial Sequence: Synthetic oligonucleotide
  Antisense strand to SEQ ID NO: 1793875
cauuucaugccagacacuu

SEQ ID NO: 1793877 - RNA, 19 nt, Artificial Sequence
  Description of Artificial Sequence: Synthetic oligonucleotide
  Sense strand starting at position 246 of SEQ ID NO: 1563082
cacuguugaugucuauaag

SEQ ID NO: 1793878 - RNA, 19 nt, Artificial Sequence
  Description of Artificial Sequence: Synthetic oligonucleotide
  Antisense strand to SEQ ID NO: 1793877
cuuauagacaucaacagug

SEQ ID NO: 1793879 - RNA, 19 nt, Artificial Sequence
  Description of Artificial Sequence: Synthetic oligonucleotide
  Sense strand starting at position 249 of SEQ ID NO: 1563082
uguugaugucuauaagggu

SEQ ID NO: 1793880 - RNA, 19 nt, Artificial Sequence
  Description of Artificial Sequence: Synthetic oligonucleotide
  Antisense strand to SEQ ID NO: 1793879
acccuuauagacaucaaca

SEQ ID NO: 1793881 - RNA, 19 nt, Artificial Sequence
  Description of Artificial Sequence: Synthetic oligonucleotide
  Sense strand starting at position 264 of SEQ ID NO: 1563082
ggguuucugcgggacgaga

SEQ ID NO: 1793882 - RNA, 19 nt, Artificial Sequence
  Description of Artificial Sequence: Synthetic oligonucleotide
  Antisense strand to SEQ ID NO: 1793881
ucucgucccgcagaaaccc

SEQ ID NO: 1793883 - RNA, 19 nt, Artificial Sequence
  Description of Artificial Sequence: Synthetic oligonucleotide
  Sense strand starting at position 299 of SEQ ID NO: 1563082
ggauguguccgugggaggu

SEQ ID NO: 1793884 - RNA, 19 nt, Artificial Sequence
  Description of Artificial Sequence: Synthetic oligonucleotide
  Antisense strand to SEQ ID NO: 1793883
accucccacggacacaucc

SEQ ID NO: 1793885 - RNA, 19 nt, Artificial Sequence
  Description of Artificial Sequence: Synthetic oligonucleotide
  Sense strand starting at position 300 of SEQ ID NO: 1563082
gauguguccgugggagguu

SEQ ID NO: 1793886 - RNA, 19 nt, Artificial Sequence
  Description of Artificial Sequence: Synthetic oligonucleotide
  Antisense strand to SEQ ID NO: 1793885
aaccucccacggacacauc

SEQ ID NO: 1793887 - RNA, 19 nt, Artificial Sequence
  Description of Artificial Sequence: Synthetic oligonucleotide
  Sense strand starting at position 313 of SEQ ID NO: 1563082
gagguuucuguacagcaau

SEQ ID NO: 1793888 - RNA, 19 nt, Artificial Sequence
  Description of Artificial Sequence: Synthetic oligonucleotide
  Antisense strand to SEQ ID NO: 1793887
auugcuguacagaaaccuc

SEQ ID NO: 1793889 - RNA, 19 nt, Artificial Sequence
  Description of Artificial Sequence: Synthetic oligonucleotide
  Sense strand starting at position 350 of SEQ ID NO: 1563082
gcaugacacccuuagguau

SEQ ID NO: 1793890 - RNA, 19 nt, Artificial Sequence
  Description of Artificial Sequence: Synthetic oligonucleotide
  Antisense strand to SEQ ID NO: 1793889
auaccuaagggugucaugc

SEQ ID NO: 1793891 - RNA, 19 nt, Artificial Sequence
  Description of Artificial Sequence: Synthetic oligonucleotide
  Sense strand starting at position 412 of SEQ ID NO: 1563082
guggacaugucaccaguga

SEQ ID NO: 1793892 - RNA, 19 nt, Artificial Sequence
  Description of Artificial Sequence: Synthetic oligonucleotide
  Antisense strand to SEQ ID NO: 1793891
ucacuggugacauguccac

SEQ ID NO: 1793893 - RNA, 19 nt, Artificial Sequence
  Description of Artificial Sequence: Synthetic oligonucleotide
  Sense strand starting at position 426 of SEQ ID NO: 1563082
agugacuucugcucacaca

SEQ ID NO: 1793894 - RNA, 19 nt, Artificial Sequence
  Description of Artificial Sequence: Synthetic oligonucleotide
  Antisense strand to SEQ ID NO: 1793893
ugugugagcagaagucacu

SEQ ID NO: 1793895 - RNA, 19 nt, Artificial Sequence
  Description of Artificial Sequence: Synthetic oligonucleotide
  Sense strand starting at position 521 of SEQ ID NO: 1563082
uuagguuugucuccacuuu

SEQ ID NO: 1793896 - RNA, 19 nt, Artificial Sequence
  Description of Artificial Sequence: Synthetic oligonucleotide
  Antisense strand to SEQ ID NO: 1793895
aaaguggagacaaaccuaa

SEQ ID NO: 1793897 - RNA, 19 nt, Artificial Sequence
  Description of Artificial Sequence: Synthetic oligonucleotide
  Sense strand starting at position 805 of SEQ ID NO: 1563082
gguccaguguggcuuugaa

SEQ ID NO: 1793898 - RNA, 19 nt, Artificial Sequence
  Description of Artificial Sequence: Synthetic oligonucleotide
  Antisense strand to SEQ ID NO: 1793897
uucaaagccacacuggacc

SEQ ID NO: 1793899 - RNA, 19 nt, Artificial Sequence
  Description of Artificial Sequence: Synthetic oligonucleotide
  Sense strand starting at position 1057 of SEQ ID NO: 1563082
gcaucaucucguagggcga

SEQ ID NO: 1793900 - RNA, 19 nt, Artificial Sequence
  Description of Artificial Sequence: Synthetic oligonucleotide
  Antisense strand to SEQ ID NO: 1793899
ucgcccuacgagaugaugc

SEQ ID NO: 1793901 - RNA, 19 nt, Artificial Sequence
  Description of Artificial Sequence: Synthetic oligonucleotide
  Sense strand starting at position 1087 of SEQ ID NO: 1563082
ggcacucuucuaugucaaa

SEQ ID NO: 1793902 - RNA, 19 nt, Artificial Sequence
  Description of Artificial Sequence: Synthetic oligonucleotide
  Antisense strand to SEQ ID NO: 1793901
uuugacauagaagagugcc

SEQ ID NO: 1793903 - RNA, 19 nt, Artificial Sequence
  Description of Artificial Sequence: Synthetic oligonucleotide
  Sense strand starting at position 1088 of SEQ ID NO: 1563082
gcacucuucuaugucaaag

SEQ ID NO: 1793904 - RNA, 19 nt, Artificial Sequence
  Description of Artificial Sequence: Synthetic oligonucleotide
  Antisense strand to SEQ ID NO: 1793903
cuuugacauagaagagugc

SEQ ID NO: 1793905 - RNA, 19 nt, Artificial Sequence
  Description of Artificial Sequence: Synthetic oligonucleotide
  Sense strand starting at position 1449 of SEQ ID NO: 1563082
gcgggauaaguuugcagau

SEQ ID NO: 1793906 - RNA, 19 nt, Artificial Sequence
  Description of Artificial Sequence: Synthetic oligonucleotide
  Antisense strand to SEQ ID NO: 1793905
aucugcaaacuuaucccgc

SEQ ID NO: 1793907 - RNA, 19 nt, Artificial Sequence
  Description of Artificial Sequence: Synthetic oligonucleotide
  Sense strand starting at position 1450 of SEQ ID NO: 1563082
cgggauaaguuugcagauu

SEQ ID NO: 1793908 - RNA, 19 nt, Artificial Sequence
  Description of Artificial Sequence: Synthetic oligonucleotide
  Antisense strand to SEQ ID NO: 1793907
aaucugcaaacuuaucccg

SEQ ID NO: 1793909 - RNA, 19 nt, Artificial Sequence
  Description of Artificial Sequence: Synthetic oligonucleotide
  Sense strand starting at position 1462 of SEQ ID NO: 1563082
gcagauucccucuggaaag

SEQ ID NO: 1793910 - RNA, 19 nt, Artificial Sequence
  Description of Artificial Sequence: Synthetic oligonucleotide
  Antisense strand to SEQ ID NO: 1793909
cuuuccagagggaaucugc

SEQ ID NO: 1793911 - RNA, 19 nt, Artificial Sequence
  Description of Artificial Sequence: Synthetic oligonucleotide
  Sense strand starting at position 1536 of SEQ ID NO: 1563082
agaguuuccgaggacucca

SEQ ID NO: 1793912 - RNA, 19 nt, Artificial Sequence
  Description of Artificial Sequence: Synthetic oligonucleotide
  Antisense strand to SEQ ID NO: 1793911
uggaguccucggaaacucu

SEQ ID NO: 1793913 - RNA, 19 nt, Artificial Sequence
  Description of Artificial Sequence: Synthetic oligonucleotide
  Sense strand starting at position 1603 of SEQ ID NO: 1563082
acucgaucccgccaggaaa

SEQ ID NO: 1793914 - RNA, 19 nt, Artificial Sequence
  Description of Artificial Sequence: Synthetic oligonucleotide
  Antisense strand to SEQ ID NO: 1793913
uuuccuggcgggaucgagu

SEQ ID NO: 1793915 - RNA, 19 nt, Artificial Sequence
  Description of Artificial Sequence: Synthetic oligonucleotide
  Sense strand starting at position 1654 of SEQ ID NO: 1563082
auggcaucuugggcuuaga

SEQ ID NO: 1793916 - RNA, 19 nt, Artificial Sequence
  Description of Artificial Sequence: Synthetic oligonucleotide
  Antisense strand to SEQ ID NO: 1793915
ucuaagcccaagaugccau

SEQ ID NO: 1793917 - RNA, 19 nt, Artificial Sequence
  Description of Artificial Sequence: Synthetic oligonucleotide
  Sense strand starting at position 1657 of SEQ ID NO: 1563082
gcaucuugggcuuagaauc

SEQ ID NO: 1793918 - RNA, 19 nt, Artificial Sequence
  Description of Artificial Sequence: Synthetic oligonucleotide
  Antisense strand to SEQ ID NO: 1793917
gauucuaagcccaagaugc

SEQ ID NO: 1793919 - RNA, 19 nt, Artificial Sequence
  Description of Artificial Sequence: Synthetic oligonucleotide
  Sense strand starting at position 1986 of SEQ ID NO: 1563082
ggagaaguuggccgguuca

SEQ ID NO: 1793920 - RNA, 19 nt, Artificial Sequence
  Description of Artificial Sequence: Synthetic oligonucleotide
  Antisense strand to SEQ ID NO: 1793919
ugaaccggccaacuucucc

SEQ ID NO: 1793921 - RNA, 19 nt, Artificial Sequence
  Description of Artificial Sequence: Synthetic oligonucleotide
  Sense strand starting at position 2522 of SEQ ID NO: 1563082
gggcuuagucuaggagaga

SEQ ID NO: 1793922 - RNA, 19 nt, Artificial Sequence
  Description of Artificial Sequence: Synthetic oligonucleotide
  Antisense strand to SEQ ID NO: 1793921
ucucuccuagacuaagccc

SEQ ID NO: 1793923 - RNA, 19 nt, Artificial Sequence
  Description of Artificial Sequence: Synthetic oligonucleotide
  Sense strand starting at position 2734 of SEQ ID NO: 1563082
gccaauaacuuguuaguga

SEQ ID NO: 1793924 - RNA, 19 nt, Artificial Sequence
  Description of Artificial Sequence: Synthetic oligonucleotide
  Antisense strand to SEQ ID NO: 1793923
ucacuaacaaguuauuggc

SEQ ID NO: 1793925 - RNA, 19 nt, Artificial Sequence
  Description of Artificial Sequence: Synthetic oligonucleotide
  Sense strand starting at position 2741 of SEQ ID NO: 1563082
acuuguuagugagugaaag

SEQ ID NO: 1793926 - RNA, 19 nt, Artificial Sequence
  Description of Artificial Sequence: Synthetic oligonucleotide
  Antisense strand to SEQ ID NO: 1793925
cuuucacucacuaacaagu

SEQ ID NO: 1793927 - RNA, 19 nt, Artificial Sequence
  Description of Artificial Sequence: Synthetic oligonucleotide
  Sense strand starting at position 2743 of SEQ ID NO: 1563082
uuguuagugagugaaagga

SEQ ID NO: 1793928 - RNA, 19 nt, Artificial Sequence
  Description of Artificial Sequence: Synthetic oligonucleotide
  Antisense strand to SEQ ID NO: 1793927
uccuuucacucacuaacaa

SEQ ID NO: 1793929 - RNA, 19 nt, Artificial Sequence
  Description of Artificial Sequence: Synthetic oligonucleotide
  Sense strand starting at position 2850 of SEQ ID NO: 1563082
gccagaaacuuacuaagac

SEQ ID NO: 1793930 - RNA, 19 nt, Artificial Sequence
  Description of Artificial Sequence: Synthetic oligonucleotide
  Antisense strand to SEQ ID NO: 1793929
gucuuaguaaguuucuggc

SEQ ID NO: 1793931 - RNA, 19 nt, Artificial Sequence
  Description of Artificial Sequence: Synthetic oligonucleotide
  Sense strand starting at position 2972 of SEQ ID NO: 1563082
uggcucuucccugaagguu

SEQ ID NO: 1793932 - RNA, 19 nt, Artificial Sequence
  Description of Artificial Sequence: Synthetic oligonucleotide
  Antisense strand to SEQ ID NO: 1793931
aaccuucagggaagagcca

SEQ ID NO: 1793933 - RNA, 19 nt, Artificial Sequence
  Description of Artificial Sequence: Synthetic oligonucleotide
  Sense strand starting at position 3016 of SEQ ID NO: 1563082
uugaacuuagcccguuuaa

SEQ ID NO: 1793934 - RNA, 19 nt, Artificial Sequence
  Description of Artificial Sequence: Synthetic oligonucleotide
  Antisense strand to SEQ ID NO: 1793933
uuaaacgggcuaaguucaa

SEQ ID NO: 1793935 - RNA, 19 nt, Artificial Sequence
  Description of Artificial Sequence: Synthetic oligonucleotide
  Sense strand starting at position 3029 of SEQ ID NO: 1563082
guuuaaucauaaguugaug

SEQ ID NO: 1793936 - RNA, 19 nt, Artificial Sequence
  Description of Artificial Sequence: Synthetic oligonucleotide
  Antisense strand to SEQ ID NO: 1793935
caucaacuuaugauuaaac

SEQ ID NO: 1793937 - RNA, 19 nt, Artificial Sequence
  Description of Artificial Sequence: Synthetic oligonucleotide
  Sense strand starting at position 3856 of SEQ ID NO: 1563082
cccacagaccuuugugaga

SEQ ID NO: 1793938 - RNA, 19 nt, Artificial Sequence
  Description of Artificial Sequence: Synthetic oligonucleotide
  Antisense strand to SEQ ID NO: 1793937
ucucacaaaggucuguggg

SEQ ID NO: 1793939 - RNA, 19 nt, Artificial Sequence
  Description of Artificial Sequence: Synthetic oligonucleotide
  Sense strand starting at position 3865 of SEQ ID NO: 1563082
cuuugugagaagugccaau

SEQ ID NO: 1793940 - RNA, 19 nt, Artificial Sequence
  Description of Artificial Sequence: Synthetic oligonucleotide
  Antisense strand to SEQ ID NO: 1793939
auuggcacuucucacaaag

SEQ ID NO: 1793941 - RNA, 19 nt, Artificial Sequence
  Description of Artificial Sequence: Synthetic oligonucleotide
  Sense strand starting at position 3908 of SEQ ID NO: 1563082
gaccucagaucucugaagu

SEQ ID NO: 1793942 - RNA, 19 nt, Artificial Sequence
  Description of Artificial Sequence: Synthetic oligonucleotide
  Antisense strand to SEQ ID NO: 1793941
acuucagagaucugagguc

SEQ ID NO: 1793943 - RNA, 19 nt, Artificial Sequence
  Description of Artificial Sequence: Synthetic oligonucleotide
  Sense strand starting at position 3909 of SEQ ID NO: 1563082
accucagaucucugaaguc

SEQ ID NO: 1793944 - RNA, 19 nt, Artificial Sequence
  Description of Artificial Sequence: Synthetic oligonucleotide
  Antisense strand to SEQ ID NO: 1793943
gacuucagagaucugaggu

SEQ ID NO: 1793945 - RNA, 19 nt, Artificial Sequence
  Description of Artificial Sequence: Synthetic oligonucleotide
  Sense strand starting at position 187 of SEQ ID NO: 1563083
uuugcuuugucauaaaugu

SEQ ID NO: 1793946 - RNA, 19 nt, Artificial Sequence
  Description of Artificial Sequence: Synthetic oligonucleotide
  Antisense strand to SEQ ID NO: 1793945
acauuuaugacaaagcaaa

SEQ ID NO: 1793947 - RNA, 19 nt, Artificial Sequence
  Description of Artificial Sequence: Synthetic oligonucleotide
  Sense strand starting at position 242 of SEQ ID NO: 1563083
agccuaguguucccaaaug

SEQ ID NO: 1793948 - RNA, 19 nt, Artificial Sequence
  Description of Artificial Sequence: Synthetic oligonucleotide
  Antisense strand to SEQ ID NO: 1793947
cauuugggaacacuaggcu

SEQ ID NO: 1793949 - RNA, 19 nt, Artificial Sequence
  Description of Artificial Sequence: Synthetic oligonucleotide
  Sense strand starting at position 530 of SEQ ID NO: 1563083
gaacgagucucgcuauguu

SEQ ID NO: 1793950 - RNA, 19 nt, Artificial Sequence
  Description of Artificial Sequence: Synthetic oligonucleotide
  Antisense strand to SEQ ID NO: 1793949
aacauagcgagacucguuc

SEQ ID NO: 1793951 - RNA, 19 nt, Artificial Sequence
  Description of Artificial Sequence: Synthetic oligonucleotide
  Sense strand starting at position 983 of SEQ ID NO: 1563083
ccaagcucgccugaucaca

SEQ ID NO: 1793952 - RNA, 19 nt, Artificial Sequence
  Description of Artificial Sequence: Synthetic oligonucleotide
  Antisense strand to SEQ ID NO: 1793951
ugugaucaggcgagcuugg

SEQ ID NO: 1793953 - RNA, 19 nt, Artificial Sequence
  Description of Artificial Sequence: Synthetic oligonucleotide
  Sense strand starting at position 1001 of SEQ ID NO: 1563083
aacuucggagcuuguuuaa

SEQ ID NO: 1793954 - RNA, 19 nt, Artificial Sequence
  Description of Artificial Sequence: Synthetic oligonucleotide
  Antisense strand to SEQ ID NO: 1793953
uuaaacaagcuccgaaguu

SEQ ID NO: 1793955 - RNA, 19 nt, Artificial Sequence
  Description of Artificial Sequence: Synthetic oligonucleotide
  Sense strand starting at position 1004 of SEQ ID NO: 1563083
uucggagcuuguuuaaguu

SEQ ID NO: 1793956 - RNA, 19 nt, Artificial Sequence
  Description of Artificial Sequence: Synthetic oligonucleotide
  Antisense strand to SEQ ID NO: 1793955
aacuuaaacaagcuccgaa

SEQ ID NO: 1793957 - RNA, 19 nt, Artificial Sequence
  Description of Artificial Sequence: Synthetic oligonucleotide
  Sense strand starting at position 2286 of SEQ ID NO: 1563083
gcaagaagugucgaguuaa

SEQ ID NO: 1793958 - RNA, 19 nt, Artificial Sequence
  Description of Artificial Sequence: Synthetic oligonucleotide
  Antisense strand to SEQ ID NO: 1793957
uuaacucgacacuucuugc

SEQ ID NO: 1793959 - RNA, 19 nt, Artificial Sequence
  Description of Artificial Sequence: Synthetic oligonucleotide
  Sense strand starting at position 2760 of SEQ ID NO: 1563083
acggccuguuucuccuaaa

SEQ ID NO: 1793960 - RNA, 19 nt, Artificial Sequence
  Description of Artificial Sequence: Synthetic oligonucleotide
  Antisense strand to SEQ ID NO: 1793959
uuuaggagaaacaggccgu

SEQ ID NO: 1793961 - RNA, 19 nt, Artificial Sequence
  Description of Artificial Sequence: Synthetic oligonucleotide
  Sense strand starting at position 2761 of SEQ ID NO: 1563083
cggccuguuucuccuaaau

SEQ ID NO: 1793962 - RNA, 19 nt, Artificial Sequence
  Description of Artificial Sequence: Synthetic oligonucleotide
  Antisense strand to SEQ ID NO: 1793961
auuuaggagaaacaggccg

SEQ ID NO: 1793963 - RNA, 19 nt, Artificial Sequence
  Description of Artificial Sequence: Synthetic oligonucleotide
  Sense strand starting at position 2924 of SEQ ID NO: 1563083
ccgccuccaucucuugaaa

SEQ ID NO: 1793964 - RNA, 19 nt, Artificial Sequence
  Description of Artificial Sequence: Synthetic oligonucleotide
  Antisense strand to SEQ ID NO: 1793963
uuucaagagauggaggcgg

SEQ ID NO: 1793965 - RNA, 19 nt, Artificial Sequence
  Description of Artificial Sequence: Synthetic oligonucleotide
  Sense strand starting at position 3116 of SEQ ID NO: 1563083
aggugauugcgucauugug

SEQ ID NO: 1793966 - RNA, 19 nt, Artificial Sequence
  Description of Artificial Sequence: Synthetic oligonucleotide
  Antisense strand to SEQ ID NO: 1793965
cacaaugacgcaaucaccu

SEQ ID NO: 1793967 - RNA, 19 nt, Artificial Sequence
  Description of Artificial Sequence: Synthetic oligonucleotide
  Sense strand starting at position 3118 of SEQ ID NO: 1563083
gugauugcgucauugugca

SEQ ID NO: 1793968 - RNA, 19 nt, Artificial Sequence
  Description of Artificial Sequence: Synthetic oligonucleotide
  Antisense strand to SEQ ID NO: 1793967
ugcacaaugacgcaaucac

SEQ ID NO: 1793969 - RNA, 19 nt, Artificial Sequence
  Description of Artificial Sequence: Synthetic oligonucleotide
  Sense strand starting at position 3122 of SEQ ID NO: 1563083
uugcgucauugugcaaaca

SEQ ID NO: 1793970 - RNA, 19 nt, Artificial Sequence
  Description of Artificial Sequence: Synthetic oligonucleotide
  Antisense strand to SEQ ID NO: 1793969
uguuugcacaaugacgcaa

SEQ ID NO: 1793971 - RNA, 19 nt, Artificial Sequence
  Description of Artificial Sequence: Synthetic oligonucleotide
  Sense strand starting at position 3409 of SEQ ID NO: 1563083
ggaugagucacugagugug

SEQ ID NO: 1793972 - RNA, 19 nt, Artificial Sequence
  Description of Artificial Sequence: Synthetic oligonucleotide
  Antisense strand to SEQ ID NO: 1793971
cacacucagugacucaucc

SEQ ID NO: 1793973 - RNA, 19 nt, Artificial Sequence
  Description of Artificial Sequence: Synthetic oligonucleotide
  Sense strand starting at position 3411 of SEQ ID NO: 1563083
augagucacugagugugaa

SEQ ID NO: 1793974 - RNA, 19 nt, Artificial Sequence
  Description of Artificial Sequence: Synthetic oligonucleotide
  Antisense strand to SEQ ID NO: 1793973
uucacacucagugacucau

SEQ ID NO: 1793975 - RNA, 19 nt, Artificial Sequence
  Description of Artificial Sequence: Synthetic oligonucleotide
  Sense strand starting at position 3981 of SEQ ID NO: 1563083
cagugucucaugcggguaa

SEQ ID NO: 1793976 - RNA, 19 nt, Artificial Sequence
  Description of Artificial Sequence: Synthetic oligonucleotide
  Antisense strand to SEQ ID NO: 1793975
uuacccgcaugagacacug

SEQ ID NO: 1793977 - RNA, 19 nt, Artificial Sequence
  Description of Artificial Sequence: Synthetic oligonucleotide
  Sense strand starting at position 3982 of SEQ ID NO: 1563083
agugucucaugcggguaau

SEQ ID NO: 1793978 - RNA, 19 nt, Artificial Sequence
  Description of Artificial Sequence: Synthetic oligonucleotide
  Antisense strand to SEQ ID NO: 1793977
auuacccgcaugagacacu

SEQ ID NO: 1793979 - RNA, 19 nt, Artificial Sequence
  Description of Artificial Sequence: Synthetic oligonucleotide
  Sense strand starting at position 3983 of SEQ ID NO: 1563083
gugucucaugcggguaauc

SEQ ID NO: 1793980 - RNA, 19 nt, Artificial Sequence
  Description of Artificial Sequence: Synthetic oligonucleotide
  Antisense strand to SEQ ID NO: 1793979
gauuacccgcaugagacac

SEQ ID NO: 1793981 - RNA, 19 nt, Artificial Sequence
  Description of Artificial Sequence: Synthetic oligonucleotide
  Sense strand starting at position 206 of SEQ ID NO: 1563084
gcaagugagccaggucaaa

SEQ ID NO: 1793982 - RNA, 19 nt, Artificial Sequence
  Description of Artificial Sequence: Synthetic oligonucleotide
  Antisense strand to SEQ ID NO: 1793981
uuugaccuggcucacuugc

SEQ ID NO: 1793983 - RNA, 19 nt, Artificial Sequence
  Description of Artificial Sequence: Synthetic oligonucleotide
  Sense strand starting at position 371 of SEQ ID NO: 1563084
ccuccuguuauguggauga

SEQ ID NO: 1793984 - RNA, 19 nt, Artificial Sequence
  Description of Artificial Sequence: Synthetic oligonucleotide
  Antisense strand to SEQ ID NO: 1793983
ucauccacauaacaggagg

SEQ ID NO: 1793985 - RNA, 19 nt, Artificial Sequence
  Description of Artificial Sequence: Synthetic oligonucleotide
  Sense strand starting at position 375 of SEQ ID NO: 1563084
cuguuauguggaugaaguc

SEQ ID NO: 1793986 - RNA, 19 nt, Artificial Sequence
  Description of Artificial Sequence: Synthetic oligonucleotide
  Antisense strand to SEQ ID NO: 1793985
gacuucauccacauaacag

SEQ ID NO: 1793987 - RNA, 19 nt, Artificial Sequence
  Description of Artificial Sequence: Synthetic oligonucleotide
  Sense strand starting at position 384 of SEQ ID NO: 1563084
ggaugaagucaguaugcag

SEQ ID NO: 1793988 - RNA, 19 nt, Artificial Sequence
  Description of Artificial Sequence: Synthetic oligonucleotide
  Antisense strand to SEQ ID NO: 1793987
cugcauacugacuucaucc

SEQ ID NO: 1793989 - RNA, 19 nt, Artificial Sequence
  Description of Artificial Sequence: Synthetic oligonucleotide
  Sense strand starting at position 428 of SEQ ID NO: 1563084
agcuuagguuucuaucagu

SEQ ID NO: 1793990 - RNA, 19 nt, Artificial Sequence
  Description of Artificial Sequence: Synthetic oligonucleotide
  Antisense strand to SEQ ID NO: 1793989
acugauagaaaccuaagcu

SEQ ID NO: 1793991 - RNA, 19 nt, Artificial Sequence
  Description of Artificial Sequence: Synthetic oligonucleotide
  Sense strand starting at position 431 of SEQ ID NO: 1563084
uuagguuucuaucagugca

SEQ ID NO: 1793992 - RNA, 19 nt, Artificial Sequence
  Description of Artificial Sequence: Synthetic oligonucleotide
  Antisense strand to SEQ ID NO: 1793991
ugcacugauagaaaccuaa

SEQ ID NO: 1793993 - RNA, 19 nt, Artificial Sequence
  Description of Artificial Sequence: Synthetic oligonucleotide
  Sense strand starting at position 434 of SEQ ID NO: 1563084
gguuucuaucagugcaguu

SEQ ID NO: 1793994 - RNA, 19 nt, Artificial Sequence
  Description of Artificial Sequence: Synthetic oligonucleotide
  Antisense strand to SEQ ID NO: 1793993
aacugcacugauagaaacc

SEQ ID NO: 1793995 - RNA, 19 nt, Artificial Sequence
  Description of Artificial Sequence: Synthetic oligonucleotide
  Sense strand starting at position 467 of SEQ ID NO: 1563084
ccugguucugccuguaauu

SEQ ID NO: 1793996 - RNA, 19 nt, Artificial Sequence
  Description of Artificial Sequence: Synthetic oligonucleotide
  Antisense strand to SEQ ID NO: 1793995
aauuacaggcagaaccagg

SEQ ID NO: 1793997 - RNA, 19 nt, Artificial Sequence
  Description of Artificial Sequence: Synthetic oligonucleotide
  Sense strand starting at position 546 of SEQ ID NO: 1563084
ggaagcuaguuggaucuua

SEQ ID NO: 1793998 - RNA, 19 nt, Artificial Sequence
  Description of Artificial Sequence: Synthetic oligonucleotide
  Antisense strand to SEQ ID NO: 1793997
uaagauccaacuagcuucc

SEQ ID NO: 1793999 - RNA, 19 nt, Artificial Sequence
  Description of Artificial Sequence: Synthetic oligonucleotide
  Sense strand starting at position 557 of SEQ ID NO: 1563084
ggaucuuacuucugagacu

SEQ ID NO: 1794000 - RNA, 19 nt, Artificial Sequence
  Description of Artificial Sequence: Synthetic oligonucleotide
  Antisense strand to SEQ ID NO: 1793999
agucucagaaguaagaucc

SEQ ID NO: 1794001 - RNA, 19 nt, Artificial Sequence
  Description of Artificial Sequence: Synthetic oligonucleotide
  Sense strand starting at position 566 of SEQ ID NO: 1563084
uucugagacuucuccuagu

SEQ ID NO: 1794002 - RNA, 19 nt, Artificial Sequence
  Description of Artificial Sequence: Synthetic oligonucleotide
  Antisense strand to SEQ ID NO: 1794001
acuaggagaagucucagaa

SEQ ID NO: 1794003 - RNA, 19 nt, Artificial Sequence
  Description of Artificial Sequence: Synthetic oligonucleotide
  Sense strand starting at position 569 of SEQ ID NO: 1563084
ugagacuucuccuaguucu

SEQ ID NO: 1794004 - RNA, 19 nt, Artificial Sequence
  Description of Artificial Sequence: Synthetic oligonucleotide
  Antisense strand to SEQ ID NO: 1794003
agaacuaggagaagucuca

SEQ ID NO: 1794005 - RNA, 19 nt, Artificial Sequence
  Description of Artificial Sequence: Synthetic oligonucleotide
  Sense strand starting at position 614 of SEQ ID NO: 1563084
agaaaugacugguaaugug

SEQ ID NO: 1794006 - RNA, 19 nt, Artificial Sequence
  Description of Artificial Sequence: Synthetic oligonucleotide
  Antisense strand to SEQ ID NO: 1794005
cacauuaccagucauuucu

SEQ ID NO: 1794007 - RNA, 19 nt, Artificial Sequence
  Description of Artificial Sequence: Synthetic oligonucleotide
  Sense strand starting at position 632 of SEQ ID NO: 1563084
ggcagaaggucuuggcaca

SEQ ID NO: 1794008 - RNA, 19 nt, Artificial Sequence
  Description of Artificial Sequence: Synthetic oligonucleotide
  Antisense strand to SEQ ID NO: 1794007
ugugccaagaccuucugcc

SEQ ID NO: 1794009 - RNA, 19 nt, Artificial Sequence
  Description of Artificial Sequence: Synthetic oligonucleotide
  Sense strand starting at position 663 of SEQ ID NO: 1563084
gcaguauacucacagauuc

SEQ ID NO: 1794010 - RNA, 19 nt, Artificial Sequence
  Description of Artificial Sequence: Synthetic oligonucleotide
  Antisense strand to SEQ ID NO: 1794009
gaaucugugaguauacugc

SEQ ID NO: 1794011 - RNA, 19 nt, Artificial Sequence
  Description of Artificial Sequence: Synthetic oligonucleotide
  Sense strand starting at position 1804 of SEQ ID NO: 1563084
ggccaugucucccguuauu

SEQ ID NO: 1794012 - RNA, 19 nt, Artificial Sequence
  Description of Artificial Sequence: Synthetic oligonucleotide
  Antisense strand to SEQ ID NO: 1794011
aauaacgggagacauggcc

SEQ ID NO: 1794013 - RNA, 19 nt, Artificial Sequence
  Description of Artificial Sequence: Synthetic oligonucleotide
  Sense strand starting at position 2296 of SEQ ID NO: 1563084
cgcucugucuccugcagua

SEQ ID NO: 1794014 - RNA, 19 nt, Artificial Sequence
  Description of Artificial Sequence: Synthetic oligonucleotide
  Antisense strand to SEQ ID NO: 1794013
uacugcaggagacagagcg

SEQ ID NO: 1794015 - RNA, 19 nt, Artificial Sequence
  Description of Artificial Sequence: Synthetic oligonucleotide
  Sense strand starting at position 2530 of SEQ ID NO: 1563084
gaaauauugcacugaagua

SEQ ID NO: 1794016 - RNA, 19 nt, Artificial Sequence
  Description of Artificial Sequence: Synthetic oligonucleotide
  Antisense strand to SEQ ID NO: 1794015
uacuucagugcaauauuuc

SEQ ID NO: 1794017 - RNA, 19 nt, Artificial Sequence
  Description of Artificial Sequence: Synthetic oligonucleotide
  Sense strand starting at position 2558 of SEQ ID NO: 1563084
uuaugugagagcuguaaag

SEQ ID NO: 1794018 - RNA, 19 nt, Artificial Sequence
  Description of Artificial Sequence: Synthetic oligonucleotide
  Antisense strand to SEQ ID NO: 1794017
cuuuacagcucucacauaa

SEQ ID NO: 1794019 - RNA, 19 nt, Artificial Sequence
  Description of Artificial Sequence: Synthetic oligonucleotide
  Sense strand starting at position 2560 of SEQ ID NO: 1563084
augugagagcuguaaagau

SEQ ID NO: 1794020 - RNA, 19 nt, Artificial Sequence
  Description of Artificial Sequence: Synthetic oligonucleotide
  Antisense strand to SEQ ID NO: 1794019
aucuuuacagcucucacau

SEQ ID NO: 1794021 - RNA, 19 nt, Artificial Sequence
  Description of Artificial Sequence: Synthetic oligonucleotide
  Sense strand starting at position 2626 of SEQ ID NO: 1563084
agcaauggauucuuagaug

SEQ ID NO: 1794022 - RNA, 19 nt, Artificial Sequence
  Description of Artificial Sequence: Synthetic oligonucleotide
  Antisense strand to SEQ ID NO: 1794021
caucuaagaauccauugcu

SEQ ID NO: 1794023 - RNA, 19 nt, Artificial Sequence
  Description of Artificial Sequence: Synthetic oligonucleotide
  Sense strand starting at position 2629 of SEQ ID NO: 1563084
aauggauucuuagauguaa

SEQ ID NO: 1794024 - RNA, 19 nt, Artificial Sequence
  Description of Artificial Sequence: Synthetic oligonucleotide
  Antisense strand to SEQ ID NO: 1794023
uuacaucuaagaauccauu

SEQ ID NO: 1794025 - RNA, 19 nt, Artificial Sequence
  Description of Artificial Sequence: Synthetic oligonucleotide
  Sense strand starting at position 2681 of SEQ ID NO: 1563084
uaaguuggacuucgucaaa

SEQ ID NO: 1794026 - RNA, 19 nt, Artificial Sequence
  Description of Artificial Sequence: Synthetic oligonucleotide
  Antisense strand to SEQ ID NO: 1794025
uuugacgaaguccaacuua

SEQ ID NO: 1794027 - RNA, 19 nt, Artificial Sequence
  Description of Artificial Sequence: Synthetic oligonucleotide
  Sense strand starting at position 2723 of SEQ ID NO: 1563084
ggacacuacucaggaaacu

SEQ ID NO: 1794028 - RNA, 19 nt, Artificial Sequence
  Description of Artificial Sequence: Synthetic oligonucleotide
  Antisense strand to SEQ ID NO: 1794027
aguuuccugaguagugucc

SEQ ID NO: 1794029 - RNA, 19 nt, Artificial Sequence
  Description of Artificial Sequence: Synthetic oligonucleotide
  Sense strand starting at position 2776 of SEQ ID NO: 1563084
aaucauauauuggguaaga

SEQ ID NO: 1794030 - RNA, 19 nt, Artificial Sequence
  Description of Artificial Sequence: Synthetic oligonucleotide
  Antisense strand to SEQ ID NO: 1794029
ucuuacccaauauaugauu

SEQ ID NO: 1794031 - RNA, 19 nt, Artificial Sequence
  Description of Artificial Sequence: Synthetic oligonucleotide
  Sense strand starting at position 2781 of SEQ ID NO: 1563084
uauauuggguaagagucua

SEQ ID NO: 1794032 - RNA, 19 nt, Artificial Sequence
  Description of Artificial Sequence: Synthetic oligonucleotide
  Antisense strand to SEQ ID NO: 1794031
uagacucuuacccaauaua

SEQ ID NO: 1794033 - RNA, 19 nt, Artificial Sequence
  Description of Artificial Sequence: Synthetic oligonucleotide
  Sense strand starting at position 3168 of SEQ ID NO: 1563084
caaagaauuugaggugaca

SEQ ID NO: 1794034 - RNA, 19 nt, Artificial Sequence
  Description of Artificial Sequence: Synthetic oligonucleotide
  Antisense strand to SEQ ID NO: 1794033
ugucaccucaaauucuuug

SEQ ID NO: 1794035 - RNA, 19 nt, Artificial Sequence
  Description of Artificial Sequence: Synthetic oligonucleotide
  Sense strand starting at position 3179 of SEQ ID NO: 1563084
aggugacaguucuccaaag

SEQ ID NO: 1794036 - RNA, 19 nt, Artificial Sequence
  Description of Artificial Sequence: Synthetic oligonucleotide
  Antisense strand to SEQ ID NO: 1794035
cuuuggagaacugucaccu

SEQ ID NO: 1794037 - RNA, 19 nt, Artificial Sequence
  Description of Artificial Sequence: Synthetic oligonucleotide
  Sense strand starting at position 3180 of SEQ ID NO: 1563084
ggugacaguucuccaaaga

SEQ ID NO: 1794038 - RNA, 19 nt, Artificial Sequence
  Description of Artificial Sequence: Synthetic oligonucleotide
  Antisense strand to SEQ ID NO: 1794037
ucuuuggagaacugucacc

SEQ ID NO: 1794039 - RNA, 19 nt, Artificial Sequence
  Description of Artificial Sequence: Synthetic oligonucleotide
  Sense strand starting at position 3262 of SEQ ID NO: 1563084
agguaacacuuguauuagu

SEQ ID NO: 1794040 - RNA, 19 nt, Artificial Sequence
  Description of Artificial Sequence: Synthetic oligonucleotide
  Antisense strand to SEQ ID NO: 1794039
acuaauacaaguguuaccu

SEQ ID NO: 1794041 - RNA, 19 nt, Artificial Sequence
  Description of Artificial Sequence: Synthetic oligonucleotide
  Sense strand starting at position 3285 of SEQ ID NO: 1563084
uuacaugcauguccagaau

SEQ ID NO: 1794042 - RNA, 19 nt, Artificial Sequence
  Description of Artificial Sequence: Synthetic oligonucleotide
  Antisense strand to SEQ ID NO: 1794041
auucuggacaugcauguaa

SEQ ID NO: 1794043 - RNA, 19 nt, Artificial Sequence
  Description of Artificial Sequence: Synthetic oligonucleotide
  Sense strand starting at position 3460 of SEQ ID NO: 1563084
gagaauuugucuugauuau

SEQ ID NO: 1794044 - RNA, 19 nt, Artificial Sequence
  Description of Artificial Sequence: Synthetic oligonucleotide
  Antisense strand to SEQ ID NO: 1794043
auaaucaagacaaauucuc

SEQ ID NO: 1794045 - RNA, 19 nt, Artificial Sequence
  Description of Artificial Sequence: Synthetic oligonucleotide
  Sense strand starting at position 3514 of SEQ ID NO: 1563084
acuugagcugaguacuaau

SEQ ID NO: 1794046 - RNA, 19 nt, Artificial Sequence
  Description of Artificial Sequence: Synthetic oligonucleotide
  Antisense strand to SEQ ID NO: 1794045
auuaguacucagcucaagu

SEQ ID NO: 1794047 - RNA, 19 nt, Artificial Sequence
  Description of Artificial Sequence: Synthetic oligonucleotide
  Sense strand starting at position 3517 of SEQ ID NO: 1563084
ugagcugaguacuaauaug

SEQ ID NO: 1794048 - RNA, 19 nt, Artificial Sequence
  Description of Artificial Sequence: Synthetic oligonucleotide
  Antisense strand to SEQ ID NO: 1794047
cauauuaguacucagcuca

SEQ ID NO: 1794049 - RNA, 19 nt, Artificial Sequence
  Description of Artificial Sequence: Synthetic oligonucleotide
  Sense strand starting at position 3523 of SEQ ID NO: 1563084
gaguacuaauauggacuaa

SEQ ID NO: 1794050 - RNA, 19 nt, Artificial Sequence
  Description of Artificial Sequence: Synthetic oligonucleotide
  Antisense strand to SEQ ID NO: 1794049
uuaguccauauuaguacuc

SEQ ID NO: 1794051 - RNA, 19 nt, Artificial Sequence
  Description of Artificial Sequence: Synthetic oligonucleotide
  Sense strand starting at position 3658 of SEQ ID NO: 1563084
acaggaguaugugggaaau

SEQ ID NO: 1794052 - RNA, 19 nt, Artificial Sequence
  Description of Artificial Sequence: Synthetic oligonucleotide
  Antisense strand to SEQ ID NO: 1794051
auuucccacauacuccugu

SEQ ID NO: 1794053 - RNA, 19 nt, Artificial Sequence
  Description of Artificial Sequence: Synthetic oligonucleotide
  Sense strand starting at position 3660 of SEQ ID NO: 1563084
aggaguaugugggaaauuu

SEQ ID NO: 1794054 - RNA, 19 nt, Artificial Sequence
  Description of Artificial Sequence: Synthetic oligonucleotide
  Antisense strand to SEQ ID NO: 1794053
aaauuucccacauacuccu

SEQ ID NO: 1794055 - RNA, 19 nt, Artificial Sequence
  Description of Artificial Sequence: Synthetic oligonucleotide
  Sense strand starting at position 3687 of SEQ ID NO: 1563084
cccagauacuuguugaaug

SEQ ID NO: 1794056 - RNA, 19 nt, Artificial Sequence
  Description of Artificial Sequence: Synthetic oligonucleotide
  Antisense strand to SEQ ID NO: 1794055
cauucaacaaguaucuggg

SEQ ID NO: 1794057 - RNA, 19 nt, Artificial Sequence
  Description of Artificial Sequence: Synthetic oligonucleotide
  Sense strand starting at position 744 of SEQ ID NO: 1563085
uaacaaugucagugaugac

SEQ ID NO: 1794058 - RNA, 19 nt, Artificial Sequence
  Description of Artificial Sequence: Synthetic oligonucleotide
  Antisense strand to SEQ ID NO: 1794057
gucaucacugacauuguua

SEQ ID NO: 1794059 - RNA, 19 nt, Artificial Sequence
  Description of Artificial Sequence: Synthetic oligonucleotide
  Sense strand starting at position 792 of SEQ ID NO: 1563085
cgguauugucacuguccau

SEQ ID NO: 1794060 - RNA, 19 nt, Artificial Sequence
  Description of Artificial Sequence: Synthetic oligonucleotide
  Antisense strand to SEQ ID NO: 1794059
auggacagugacaauaccg

SEQ ID NO: 1794061 - RNA, 19 nt, Artificial Sequence
  Description of Artificial Sequence: Synthetic oligonucleotide
  Sense strand starting at position 855 of SEQ ID NO: 1563085
gcuuaccagugucuguaau

SEQ ID NO: 1794062 - RNA, 19 nt, Artificial Sequence
  Description of Artificial Sequence: Synthetic oligonucleotide
  Antisense strand to SEQ ID NO: 1794061
auuacagacacugguaagc

SEQ ID NO: 1794063 - RNA, 19 nt, Artificial Sequence
  Description of Artificial Sequence: Synthetic oligonucleotide
  Sense strand starting at position 856 of SEQ ID NO: 1563085
cuuaccagugucuguaauu

SEQ ID NO: 1794064 - RNA, 19 nt, Artificial Sequence
  Description of Artificial Sequence: Synthetic oligonucleotide
  Antisense strand to SEQ ID NO: 1794063
aauuacagacacugguaag

SEQ ID NO: 1794065 - RNA, 19 nt, Artificial Sequence
  Description of Artificial Sequence: Synthetic oligonucleotide
  Sense strand starting at position 857 of SEQ ID NO: 1563085
uuaccagugucuguaauuu

SEQ ID NO: 1794066 - RNA, 19 nt, Artificial Sequence
  Description of Artificial Sequence: Synthetic oligonucleotide
  Antisense strand to SEQ ID NO: 1794065
aaauuacagacacugguaa

SEQ ID NO: 1794067 - RNA, 19 nt, Artificial Sequence
  Description of Artificial Sequence: Synthetic oligonucleotide
  Sense strand starting at position 866 of SEQ ID NO: 1563085
ucuguaauuugagggcaga

SEQ ID NO: 1794068 - RNA, 19 nt, Artificial Sequence
  Description of Artificial Sequence: Synthetic oligonucleotide
  Antisense strand to SEQ ID NO: 1794067
ucugcccucaaauuacaga

SEQ ID NO: 1794069 - RNA, 19 nt, Artificial Sequence
  Description of Artificial Sequence: Synthetic oligonucleotide
  Sense strand starting at position 1252 of SEQ ID NO: 1563085
uaaugugcucaucaaacgu

SEQ ID NO: 1794070 - RNA, 19 nt, Artificial Sequence
  Description of Artificial Sequence: Synthetic oligonucleotide
  Antisense strand to SEQ ID NO: 1794069
acguuugaugagcacauua

SEQ ID NO: 1794071 - RNA, 19 nt, Artificial Sequence
  Description of Artificial Sequence: Synthetic oligonucleotide
  Sense strand starting at position 1266 of SEQ ID NO: 1563085
aacguuuccugagcaaaga

SEQ ID NO: 1794072 - RNA, 19 nt, Artificial Sequence
  Description of Artificial Sequence: Synthetic oligonucleotide
  Antisense strand to SEQ ID NO: 1794071
ucuuugcucaggaaacguu

SEQ ID NO: 1794073 - RNA, 19 nt, Artificial Sequence
  Description of Artificial Sequence: Synthetic oligonucleotide
  Sense strand starting at position 1267 of SEQ ID NO: 1563085
acguuuccugagcaaagaa

SEQ ID NO: 1794074 - RNA, 19 nt, Artificial Sequence
  Description of Artificial Sequence: Synthetic oligonucleotide
  Antisense strand to SEQ ID NO: 1794073
uucuuugcucaggaaacgu

SEQ ID NO: 1794075 - RNA, 19 nt, Artificial Sequence
  Description of Artificial Sequence: Synthetic oligonucleotide
  Sense strand starting at position 1308 of SEQ ID NO: 1563085
ggcuaacaaugauaagaua

SEQ ID NO: 1794076 - RNA, 19 nt, Artificial Sequence
  Description of Artificial Sequence: Synthetic oligonucleotide
  Antisense strand to SEQ ID NO: 1794075
uaucuuaucauuguuagcc

SEQ ID NO: 1794077 - RNA, 19 nt, Artificial Sequence
  Description of Artificial Sequence: Synthetic oligonucleotide
  Sense strand starting at position 1426 of SEQ ID NO: 1563085
gggaaaugucuugguccag

SEQ ID NO: 1794078 - RNA, 19 nt, Artificial Sequence
  Description of Artificial Sequence: Synthetic oligonucleotide
  Antisense strand to SEQ ID NO: 1794077
cuggaccaagacauuuccc

SEQ ID NO: 1794079 - RNA, 19 nt, Artificial Sequence
  Description of Artificial Sequence: Synthetic oligonucleotide
  Sense strand starting at position 1427 of SEQ ID NO: 1563085
ggaaaugucuugguccagu

SEQ ID NO: 1794080 - RNA, 19 nt, Artificial Sequence
  Description of Artificial Sequence: Synthetic oligonucleotide
  Antisense strand to SEQ ID NO: 1794079
acuggaccaagacauuucc

SEQ ID NO: 1794081 - RNA, 19 nt, Artificial Sequence
  Description of Artificial Sequence: Synthetic oligonucleotide
  Sense strand starting at position 1430 of SEQ ID NO: 1563085
aaugucuugguccagucau

SEQ ID NO: 1794082 - RNA, 19 nt, Artificial Sequence
  Description of Artificial Sequence: Synthetic oligonucleotide
  Antisense strand to SEQ ID NO: 1794081
augacuggaccaagacauu

SEQ ID NO: 1794083 - RNA, 19 nt, Artificial Sequence
  Description of Artificial Sequence: Synthetic oligonucleotide
  Sense strand starting at position 1499 of SEQ ID NO: 1563085
gguacauugcgcccugcaa

SEQ ID NO: 1794084 - RNA, 19 nt, Artificial Sequence
  Description of Artificial Sequence: Synthetic oligonucleotide
  Antisense strand to SEQ ID NO: 1794083
uugcagggcgcaauguacc

SEQ ID NO: 1794085 - RNA, 19 nt, Artificial Sequence
  Description of Artificial Sequence: Synthetic oligonucleotide
  Sense strand starting at position 1500 of SEQ ID NO: 1563085
guacauugcgcccugcaaa

SEQ ID NO: 1794086 - RNA, 19 nt, Artificial Sequence
  Description of Artificial Sequence: Synthetic oligonucleotide
  Antisense strand to SEQ ID NO: 1794085
uuugcagggcgcaauguac

SEQ ID NO: 1794087 - RNA, 19 nt, Artificial Sequence
  Description of Artificial Sequence: Synthetic oligonucleotide
  Sense strand starting at position 1571 of SEQ ID NO: 1563085
caaugaaagucugggauaa

SEQ ID NO: 1794088 - RNA, 19 nt, Artificial Sequence
  Description of Artificial Sequence: Synthetic oligonucleotide
  Antisense strand to SEQ ID NO: 1794087
uuaucccagacuuucauug

SEQ ID NO: 1794089 - RNA, 19 nt, Artificial Sequence
  Description of Artificial Sequence: Synthetic oligonucleotide
  Sense strand starting at position 1573 of SEQ ID NO: 1563085
augaaagucugggauaaca

SEQ ID NO: 1794090 - RNA, 19 nt, Artificial Sequence
  Description of Artificial Sequence: Synthetic oligonucleotide
  Antisense strand to SEQ ID NO: 1794089
uguuaucccagacuuucau

SEQ ID NO: 1794091 - RNA, 19 nt, Artificial Sequence
  Description of Artificial Sequence: Synthetic oligonucleotide
  Sense strand starting at position 2121 of SEQ ID NO: 1563085
gggcuuggauccuaggaaa

SEQ ID NO: 1794092 - RNA, 19 nt, Artificial Sequence
  Description of Artificial Sequence: Synthetic oligonucleotide
  Antisense strand to SEQ ID NO: 1794091
uuuccuaggauccaagccc

SEQ ID NO: 1794093 - RNA, 19 nt, Artificial Sequence
  Description of Artificial Sequence: Synthetic oligonucleotide
  Sense strand starting at position 2219 of SEQ ID NO: 1563085
gguagagcggugugaugau

SEQ ID NO: 1794094 - RNA, 19 nt, Artificial Sequence
  Description of Artificial Sequence: Synthetic oligonucleotide
  Antisense strand to SEQ ID NO: 1794093
aucaucacaccgcucuacc

SEQ ID NO: 1794095 - RNA, 19 nt, Artificial Sequence
  Description of Artificial Sequence: Synthetic oligonucleotide
  Sense strand starting at position 2229 of SEQ ID NO: 1563085
ugugaugauuagguccgaa

SEQ ID NO: 1794096 - RNA, 19 nt, Artificial Sequence
  Description of Artificial Sequence: Synthetic oligonucleotide
  Antisense strand to SEQ ID NO: 1794095
uucggaccuaaucaucaca

SEQ ID NO: 1794097 - RNA, 19 nt, Artificial Sequence
  Description of Artificial Sequence: Synthetic oligonucleotide
  Sense strand starting at position 2268 of SEQ ID NO: 1563085
cgcuguuuagccucuccua

SEQ ID NO: 1794098 - RNA, 19 nt, Artificial Sequence
  Description of Artificial Sequence: Synthetic oligonucleotide
  Antisense strand to SEQ ID NO: 1794097
uaggagaggcuaaacagcg

SEQ ID NO: 1794099 - RNA, 19 nt, Artificial Sequence
  Description of Artificial Sequence: Synthetic oligonucleotide
  Sense strand starting at position 2299 of SEQ ID NO: 1563085
cggcuuccuuaucugaaga

SEQ ID NO: 1794100 - RNA, 19 nt, Artificial Sequence
  Description of Artificial Sequence: Synthetic oligonucleotide
  Antisense strand to SEQ ID NO: 1794099
ucuucagauaaggaagccg

SEQ ID NO: 1794101 - RNA, 19 nt, Artificial Sequence
  Description of Artificial Sequence: Synthetic oligonucleotide
  Sense strand starting at position 2424 of SEQ ID NO: 1563085
aguguuuaucugggccaga

SEQ ID NO: 1794102 - RNA, 19 nt, Artificial Sequence
  Description of Artificial Sequence: Synthetic oligonucleotide
  Antisense strand to SEQ ID NO: 1794101
ucuggcccagauaaacacu

SEQ ID NO: 1794103 - RNA, 19 nt, Artificial Sequence
  Description of Artificial Sequence: Synthetic oligonucleotide
  Sense strand starting at position 2425 of SEQ ID NO: 1563085
guguuuaucugggccagac

SEQ ID NO: 1794104 - RNA, 19 nt, Artificial Sequence
  Description of Artificial Sequence: Synthetic oligonucleotide
  Antisense strand to SEQ ID NO: 1794103
gucuggcccagauaaacac

SEQ ID NO: 1794105 - RNA, 19 nt, Artificial Sequence
  Description of Artificial Sequence: Synthetic oligonucleotide
  Sense strand starting at position 2663 of SEQ ID NO: 1563085
ucguuauagaccuguguua

SEQ ID NO: 1794106 - RNA, 19 nt, Artificial Sequence
  Description of Artificial Sequence: Synthetic oligonucleotide
  Antisense strand to SEQ ID NO: 1794105
uaacacaggucuauaacga

SEQ ID NO: 1794107 - RNA, 19 nt, Artificial Sequence
  Description of Artificial Sequence: Synthetic oligonucleotide
  Sense strand starting at position 2665 of SEQ ID NO: 1563085
guuauagaccuguguuacc

SEQ ID NO: 1794108 - RNA, 19 nt, Artificial Sequence
  Description of Artificial Sequence: Synthetic oligonucleotide
  Antisense strand to SEQ ID NO: 1794107
gguaacacaggucuauaac

SEQ ID NO: 1794109 - RNA, 19 nt, Artificial Sequence
  Description of Artificial Sequence: Synthetic oligonucleotide
  Sense strand starting at position 2670 of SEQ ID NO: 1563085
agaccuguguuaccucgaa

SEQ ID NO: 1794110 - RNA, 19 nt, Artificial Sequence
  Description of Artificial Sequence: Synthetic oligonucleotide
  Antisense strand to SEQ ID NO: 1794109
uucgagguaacacaggucu

SEQ ID NO: 1794111 - RNA, 19 nt, Artificial Sequence
  Description of Artificial Sequence: Synthetic oligonucleotide
  Sense strand starting at position 2674 of SEQ ID NO: 1563085
cuguguuaccucgaauucu

SEQ ID NO: 1794112 - RNA, 19 nt, Artificial Sequence
  Description of Artificial Sequence: Synthetic oligonucleotide
  Antisense strand to SEQ ID NO: 1794111
agaauucgagguaacacag

SEQ ID NO: 1794113 - RNA, 19 nt, Artificial Sequence
  Description of Artificial Sequence: Synthetic oligonucleotide
  Sense strand starting at position 2747 of SEQ ID NO: 1563085
gcaacuuguaagugacaga

SEQ ID NO: 1794114 - RNA, 19 nt, Artificial Sequence
  Description of Artificial Sequence: Synthetic oligonucleotide
  Antisense strand to SEQ ID NO: 1794113
ucugucacuuacaaguugc

SEQ ID NO: 1794115 - RNA, 19 nt, Artificial Sequence
  Description of Artificial Sequence: Synthetic oligonucleotide
  Sense strand starting at position 2823 of SEQ ID NO: 1563085
gguggugugcuuucuuagu

SEQ ID NO: 1794116 - RNA, 19 nt, Artificial Sequence
  Description of Artificial Sequence: Synthetic oligonucleotide
  Antisense strand to SEQ ID NO: 1794115
acuaagaaagcacaccacc

SEQ ID NO: 1794117 - RNA, 19 nt, Artificial Sequence
  Description of Artificial Sequence: Synthetic oligonucleotide
  Sense strand starting at position 2825 of SEQ ID NO: 1563085
uggugugcuuucuuaguga

SEQ ID NO: 1794118 - RNA, 19 nt, Artificial Sequence
  Description of Artificial Sequence: Synthetic oligonucleotide
  Antisense strand to SEQ ID NO: 1794117
ucacuaagaaagcacacca

SEQ ID NO: 1794119 - RNA, 19 nt, Artificial Sequence
  Description of Artificial Sequence: Synthetic oligonucleotide
  Sense strand starting at position 2828 of SEQ ID NO: 1563085
ugugcuuucuuagugauga

SEQ ID NO: 1794120 - RNA, 19 nt, Artificial Sequence
  Description of Artificial Sequence: Synthetic oligonucleotide
  Antisense strand to SEQ ID NO: 1794119
ucaucacuaagaaagcaca

SEQ ID NO: 1794121 - RNA, 19 nt, Artificial Sequence
  Description of Artificial Sequence: Synthetic oligonucleotide
  Sense strand starting at position 2846 of SEQ ID NO: 1563085
auuggagcuuugcuaacau

SEQ ID NO: 1794122 - RNA, 19 nt, Artificial Sequence
  Description of Artificial Sequence: Synthetic oligonucleotide
  Antisense strand to SEQ ID NO: 1794121
auguuagcaaagcuccaau

SEQ ID NO: 1794123 - RNA, 19 nt, Artificial Sequence
  Description of Artificial Sequence: Synthetic oligonucleotide
  Sense strand starting at position 2915 of SEQ ID NO: 1563085
agcgcaucaucauuuacuu

SEQ ID NO: 1794124 - RNA, 19 nt, Artificial Sequence
  Description of Artificial Sequence: Synthetic oligonucleotide
  Antisense strand to SEQ ID NO: 1794123
aaguaaaugaugaugcgcu

SEQ ID NO: 1794125 - RNA, 19 nt, Artificial Sequence
  Description of Artificial Sequence: Synthetic oligonucleotide
  Sense strand starting at position 3008 of SEQ ID NO: 1563085
uugugaggccuugagaagu

SEQ ID NO: 1794126 - RNA, 19 nt, Artificial Sequence
  Description of Artificial Sequence: Synthetic oligonucleotide
  Antisense strand to SEQ ID NO: 1794125
acuucucaaggccucacaa

SEQ ID NO: 1794127 - RNA, 19 nt, Artificial Sequence
  Description of Artificial Sequence: Synthetic oligonucleotide
  Sense strand starting at position 3091 of SEQ ID NO: 1563085
gugguuagggccuggcaua

SEQ ID NO: 1794128 - RNA, 19 nt, Artificial Sequence
  Description of Artificial Sequence: Synthetic oligonucleotide
  Antisense strand to SEQ ID NO: 1794127
uaugccaggcccuaaccac

SEQ ID NO: 1794129 - RNA, 19 nt, Artificial Sequence
  Description of Artificial Sequence: Synthetic oligonucleotide
  Sense strand starting at position 3769 of SEQ ID NO: 1563085
gaacuuuaagauggcgaca

SEQ ID NO: 1794130 - RNA, 19 nt, Artificial Sequence
  Description of Artificial Sequence: Synthetic oligonucleotide
  Antisense strand to SEQ ID NO: 1794129
ugucgccaucuuaaaguuc

SEQ ID NO: 1794131 - RNA, 19 nt, Artificial Sequence
  Description of Artificial Sequence: Synthetic oligonucleotide
  Sense strand starting at position 3780 of SEQ ID NO: 1563085
uggcgacagcagcauuaaa

SEQ ID NO: 1794132 - RNA, 19 nt, Artificial Sequence
  Description of Artificial Sequence: Synthetic oligonucleotide
  Antisense strand to SEQ ID NO: 1794131
uuuaaugcugcugucgcca

SEQ ID NO: 1794133 - RNA, 19 nt, Artificial Sequence
  Description of Artificial Sequence: Synthetic oligonucleotide
  Sense strand starting at position 3915 of SEQ ID NO: 1563085
gaacucugcugaguuaaug

SEQ ID NO: 1794134 - RNA, 19 nt, Artificial Sequence
  Description of Artificial Sequence: Synthetic oligonucleotide
  Antisense strand to SEQ ID NO: 1794133
cauuaacucagcagaguuc

SEQ ID NO: 1794135 - RNA, 19 nt, Artificial Sequence
  Description of Artificial Sequence: Synthetic oligonucleotide
  Sense strand starting at position 3921 of SEQ ID NO: 1563085
ugcugaguuaaugguguua

SEQ ID NO: 1794136 - RNA, 19 nt, Artificial Sequence
  Description of Artificial Sequence: Synthetic oligonucleotide
  Antisense strand to SEQ ID NO: 1794135
uaacaccauuaacucagca

SEQ ID NO: 1794137 - RNA, 19 nt, Artificial Sequence
  Description of Artificial Sequence: Synthetic oligonucleotide
  Sense strand starting at position 330 of SEQ ID NO: 1563086
caggaagagcugcaaguuu

SEQ ID NO: 1794138 - RNA, 19 nt, Artificial Sequence
  Description of Artificial Sequence: Synthetic oligonucleotide
  Antisense strand to SEQ ID NO: 1794137
aaacuugcagcucuuccug

SEQ ID NO: 1794139 - RNA, 19 nt, Artificial Sequence
  Description of Artificial Sequence: Synthetic oligonucleotide
  Sense strand starting at position 342 of SEQ ID NO: 1563086
caaguuugugaaugguaaa

SEQ ID NO: 1794140 - RNA, 19 nt, Artificial Sequence
  Description of Artificial Sequence: Synthetic oligonucleotide
  Antisense strand to SEQ ID NO: 1794139
uuuaccauucacaaacuug

SEQ ID NO: 1794141 - RNA, 19 nt, Artificial Sequence
  Description of Artificial Sequence: Synthetic oligonucleotide
  Sense strand starting at position 343 of SEQ ID NO: 1563086
aaguuugugaaugguaaag

SEQ ID NO: 1794142 - RNA, 19 nt, Artificial Sequence
  Description of Artificial Sequence: Synthetic oligonucleotide
  Antisense strand to SEQ ID NO: 1794141
cuuuaccauucacaaacuu

SEQ ID NO: 1794143 - RNA, 19 nt, Artificial Sequence
  Description of Artificial Sequence: Synthetic oligonucleotide
  Sense strand starting at position 484 of SEQ ID NO: 1563086
cucugugugccaggcauau

SEQ ID NO: 1794144 - RNA, 19 nt, Artificial Sequence
  Description of Artificial Sequence: Synthetic oligonucleotide
  Antisense strand to SEQ ID NO: 1794143
auaugccuggcacacagag

SEQ ID NO: 1794145 - RNA, 19 nt, Artificial Sequence
  Description of Artificial Sequence: Synthetic oligonucleotide
  Sense strand starting at position 486 of SEQ ID NO: 1563086
cugugugccaggcauauuu

SEQ ID NO: 1794146 - RNA, 19 nt, Artificial Sequence
  Description of Artificial Sequence: Synthetic oligonucleotide
  Antisense strand to SEQ ID NO: 1794145
aaauaugccuggcacacag

SEQ ID NO: 1794147 - RNA, 19 nt, Artificial Sequence
  Description of Artificial Sequence: Synthetic oligonucleotide
  Sense strand starting at position 495 of SEQ ID NO: 1563086
aggcauauuucucaugcca

SEQ ID NO: 1794148 - RNA, 19 nt, Artificial Sequence
  Description of Artificial Sequence: Synthetic oligonucleotide
  Antisense strand to SEQ ID NO: 1794147
uggcaugagaaauaugccu

SEQ ID NO: 1794149 - RNA, 19 nt, Artificial Sequence
  Description of Artificial Sequence: Synthetic oligonucleotide
  Sense strand starting at position 745 of SEQ ID NO: 1563086
cagagugguccucggaaag

SEQ ID NO: 1794150 - RNA, 19 nt, Artificial Sequence
  Description of Artificial Sequence: Synthetic oligonucleotide
  Antisense strand to SEQ ID NO: 1794149
cuuuccgaggaccacucug

SEQ ID NO: 1794151 - RNA, 19 nt, Artificial Sequence
  Description of Artificial Sequence: Synthetic oligonucleotide
  Sense strand starting at position 761 of SEQ ID NO: 1563086
aagcauauggcagaaguga

SEQ ID NO: 1794152 - RNA, 19 nt, Artificial Sequence
  Description of Artificial Sequence: Synthetic oligonucleotide
  Antisense strand to SEQ ID NO: 1794151
ucacuucugccauaugcuu

SEQ ID NO: 1794153 - RNA, 19 nt, Artificial Sequence
  Description of Artificial Sequence: Synthetic oligonucleotide
  Sense strand starting at position 785 of SEQ ID NO: 1563086
agaggaaacucucuguuac

SEQ ID NO: 1794154 - RNA, 19 nt, Artificial Sequence
  Description of Artificial Sequence: Synthetic oligonucleotide
  Antisense strand to SEQ ID NO: 1794153
guaacagagaguuuccucu

SEQ ID NO: 1794155 - RNA, 19 nt, Artificial Sequence
  Description of Artificial Sequence: Synthetic oligonucleotide
  Sense strand starting at position 786 of SEQ ID NO: 1563086
gaggaaacucucuguuaca

SEQ ID NO: 1794156 - RNA, 19 nt, Artificial Sequence
  Description of Artificial Sequence: Synthetic oligonucleotide
  Antisense strand to SEQ ID NO: 1794155
uguaacagagaguuuccuc

SEQ ID NO: 1794157 - RNA, 19 nt, Artificial Sequence
  Description of Artificial Sequence: Synthetic oligonucleotide
  Sense strand starting at position 787 of SEQ ID NO: 1563086
aggaaacucucuguuacac

SEQ ID NO: 1794158 - RNA, 19 nt, Artificial Sequence
  Description of Artificial Sequence: Synthetic oligonucleotide
  Antisense strand to SEQ ID NO: 1794157
guguaacagagaguuuccu

SEQ ID NO: 1794159 - RNA, 19 nt, Artificial Sequence
  Description of Artificial Sequence: Synthetic oligonucleotide
  Sense strand starting at position 796 of SEQ ID NO: 1563086
ucuguuacacuguagcaua

SEQ ID NO: 1794160 - RNA, 19 nt, Artificial Sequence
  Description of Artificial Sequence: Synthetic oligonucleotide
  Antisense strand to SEQ ID NO: 1794159
uaugcuacaguguaacaga

SEQ ID NO: 1794161 - RNA, 19 nt, Artificial Sequence
  Description of Artificial Sequence: Synthetic oligonucleotide
  Sense strand starting at position 832 of SEQ ID NO: 1563086
gcacguuuccagcaggaag

SEQ ID NO: 1794162 - RNA, 19 nt, Artificial Sequence
  Description of Artificial Sequence: Synthetic oligonucleotide
  Antisense strand to SEQ ID NO: 1794161
cuuccugcuggaaacgugc

SEQ ID NO: 1794163 - RNA, 19 nt, Artificial Sequence
  Description of Artificial Sequence: Synthetic oligonucleotide
  Sense strand starting at position 847 of SEQ ID NO: 1563086
gaagguuccuaguccaauc

SEQ ID NO: 1794164 - RNA, 19 nt, Artificial Sequence
  Description of Artificial Sequence: Synthetic oligonucleotide
  Antisense strand to SEQ ID NO: 1794163
gauuggacuaggaaccuuc

SEQ ID NO: 1794165 - RNA, 19 nt, Artificial Sequence
  Description of Artificial Sequence: Synthetic oligonucleotide
  Sense strand starting at position 1036 of SEQ ID NO: 1563086
ucgggucccagcuaaagaa

SEQ ID NO: 1794166 - RNA, 19 nt, Artificial Sequence
  Description of Artificial Sequence: Synthetic oligonucleotide
  Antisense strand to SEQ ID NO: 1794165
uucuuuagcugggacccga

SEQ ID NO: 1794167 - RNA, 19 nt, Artificial Sequence
  Description of Artificial Sequence: Synthetic oligonucleotide
  Sense strand starting at position 1214 of SEQ ID NO: 1563086
ccuagaggcuucucaaucu

SEQ ID NO: 1794168 - RNA, 19 nt, Artificial Sequence
  Description of Artificial Sequence: Synthetic oligonucleotide
  Antisense strand to SEQ ID NO: 1794167
agauugagaagccucuagg

SEQ ID NO: 1794169 - RNA, 19 nt, Artificial Sequence
  Description of Artificial Sequence: Synthetic oligonucleotide
  Sense strand starting at position 1278 of SEQ ID NO: 1563086
uucuuuaaccugcaagaug

SEQ ID NO: 1794170 - RNA, 19 nt, Artificial Sequence
  Description of Artificial Sequence: Synthetic oligonucleotide
  Antisense strand to SEQ ID NO: 1794169
caucuugcagguuaaagaa

SEQ ID NO: 1794171 - RNA, 19 nt, Artificial Sequence
  Description of Artificial Sequence: Synthetic oligonucleotide
  Sense strand starting at position 1331 of SEQ ID NO: 1563086
accgaauucugugaaccca

SEQ ID NO: 1794172 - RNA, 19 nt, Artificial Sequence
  Description of Artificial Sequence: Synthetic oligonucleotide
  Antisense strand to SEQ ID NO: 1794171
uggguucacagaauucggu

SEQ ID NO: 1794173 - RNA, 19 nt, Artificial Sequence
  Description of Artificial Sequence: Synthetic oligonucleotide
  Sense strand starting at position 2707 of SEQ ID NO: 1563086
uugggagcucucgauucuu

SEQ ID NO: 1794174 - RNA, 19 nt, Artificial Sequence
  Description of Artificial Sequence: Synthetic oligonucleotide
  Antisense strand to SEQ ID NO: 1794173
aagaaucgagagcucccaa

SEQ ID NO: 1794175 - RNA, 19 nt, Artificial Sequence
  Description of Artificial Sequence: Synthetic oligonucleotide
  Sense strand starting at position 2726 of SEQ ID NO: 1563086
gugagcguuucaccagauu

SEQ ID NO: 1794176 - RNA, 19 nt, Artificial Sequence
  Description of Artificial Sequence: Synthetic oligonucleotide
  Antisense strand to SEQ ID NO: 1794175
aaucuggugaaacgcucac

SEQ ID NO: 1794177 - RNA, 19 nt, Artificial Sequence
  Description of Artificial Sequence: Synthetic oligonucleotide
  Sense strand starting at position 2781 of SEQ ID NO: 1563086
auauuuggauucggaaugu

SEQ ID NO: 1794178 - RNA, 19 nt, Artificial Sequence
  Description of Artificial Sequence: Synthetic oligonucleotide
  Antisense strand to SEQ ID NO: 1794177
acauuccgaauccaaauau

SEQ ID NO: 1794179 - RNA, 19 nt, Artificial Sequence
  Description of Artificial Sequence: Synthetic oligonucleotide
  Sense strand starting at position 2785 of SEQ ID NO: 1563086
uuggauucggaaugucagu

SEQ ID NO: 1794180 - RNA, 19 nt, Artificial Sequence
  Description of Artificial Sequence: Synthetic oligonucleotide
  Antisense strand to SEQ ID NO: 1794179
acugacauuccgaauccaa

SEQ ID NO: 1794181 - RNA, 19 nt, Artificial Sequence
  Description of Artificial Sequence: Synthetic oligonucleotide
  Sense strand starting at position 2790 of SEQ ID NO: 1563086
uucggaaugucaguugauc

SEQ ID NO: 1794182 - RNA, 19 nt, Artificial Sequence
  Description of Artificial Sequence: Synthetic oligonucleotide
  Antisense strand to SEQ ID NO: 1794181
gaucaacugacauuccgaa

SEQ ID NO: 1794183 - RNA, 19 nt, Artificial Sequence
  Description of Artificial Sequence: Synthetic oligonucleotide
  Sense strand starting at position 2792 of SEQ ID NO: 1563086
cggaaugucaguugaucca

SEQ ID NO: 1794184 - RNA, 19 nt, Artificial Sequence
  Description of Artificial Sequence: Synthetic oligonucleotide
  Antisense strand to SEQ ID NO: 1794183
uggaucaacugacauuccg

SEQ ID NO: 1794185 - RNA, 19 nt, Artificial Sequence
  Description of Artificial Sequence: Synthetic oligonucleotide
  Sense strand starting at position 2820 of SEQ ID NO: 1563086
aaguguacccgucagagga

SEQ ID NO: 1794186 - RNA, 19 nt, Artificial Sequence
  Description of Artificial Sequence: Synthetic oligonucleotide
  Antisense strand to SEQ ID NO: 1794185
uccucugacggguacacuu

SEQ ID NO: 1794187 - RNA, 19 nt, Artificial Sequence
  Description of Artificial Sequence: Synthetic oligonucleotide
  Sense strand starting at position 2836 of SEQ ID NO: 1563086
ggaauuuacuccuacaugu

SEQ ID NO: 1794188 - RNA, 19 nt, Artificial Sequence
  Description of Artificial Sequence: Synthetic oligonucleotide
  Antisense strand to SEQ ID NO: 1794187
acauguaggaguaaauucc

SEQ ID NO: 1794189 - RNA, 19 nt, Artificial Sequence
  Description of Artificial Sequence: Synthetic oligonucleotide
  Sense strand starting at position 2846 of SEQ ID NO: 1563086
ccuacaugucgggauguuu

SEQ ID NO: 1794190 - RNA, 19 nt, Artificial Sequence
  Description of Artificial Sequence: Synthetic oligonucleotide
  Antisense strand to SEQ ID NO: 1794189
aaacaucccgacauguagg

SEQ ID NO: 1794191 - RNA, 19 nt, Artificial Sequence
  Description of Artificial Sequence: Synthetic oligonucleotide
  Sense strand starting at position 2855 of SEQ ID NO: 1563086
cgggauguuucgaagugca

SEQ ID NO: 1794192 - RNA, 19 nt, Artificial Sequence
  Description of Artificial Sequence: Synthetic oligonucleotide
  Antisense strand to SEQ ID NO: 1794191
ugcacuucgaaacaucccg

SEQ ID NO: 1794193 - RNA, 19 nt, Artificial Sequence
  Description of Artificial Sequence: Synthetic oligonucleotide
  Sense strand starting at position 2858 of SEQ ID NO: 1563086
gauguuucgaagugcaguu

SEQ ID NO: 1794194 - RNA, 19 nt, Artificial Sequence
  Description of Artificial Sequence: Synthetic oligonucleotide
  Antisense strand to SEQ ID NO: 1794193
aacugcacuucgaaacauc

SEQ ID NO: 1794195 - RNA, 19 nt, Artificial Sequence
  Description of Artificial Sequence: Synthetic oligonucleotide
  Sense strand starting at position 3055 of SEQ ID NO: 1563086
uuuauugcuccauagggau

SEQ ID NO: 1794196 - RNA, 19 nt, Artificial Sequence
  Description of Artificial Sequence: Synthetic oligonucleotide
  Antisense strand to SEQ ID NO: 1794195
aucccuauggagcaauaaa

SEQ ID NO: 1794197 - RNA, 19 nt, Artificial Sequence
  Description of Artificial Sequence: Synthetic oligonucleotide
  Sense strand starting at position 3178 of SEQ ID NO: 1563086
uugaacugaguuugaauaa

SEQ ID NO: 1794198 - RNA, 19 nt, Artificial Sequence
  Description of Artificial Sequence: Synthetic oligonucleotide
  Antisense strand to SEQ ID NO: 1794197
uuauucaaacucaguucaa

SEQ ID NO: 1794199 - RNA, 19 nt, Artificial Sequence
  Description of Artificial Sequence: Synthetic oligonucleotide
  Sense strand starting at position 3179 of SEQ ID NO: 1563086
ugaacugaguuugaauaaa

SEQ ID NO: 1794200 - RNA, 19 nt, Artificial Sequence
  Description of Artificial Sequence: Synthetic oligonucleotide
  Antisense strand to SEQ ID NO: 1794199
uuuauucaaacucaguuca

SEQ ID NO: 1794201 - RNA, 19 nt, Artificial Sequence
  Description of Artificial Sequence: Synthetic oligonucleotide
  Sense strand starting at position 3518 of SEQ ID NO: 1563086
aacccugauuccucgguuu

SEQ ID NO: 1794202 - RNA, 19 nt, Artificial Sequence
  Description of Artificial Sequence: Synthetic oligonucleotide
  Antisense strand to SEQ ID NO: 1794201
aaaccgaggaaucaggguu

SEQ ID NO: 1794203 - RNA, 19 nt, Artificial Sequence
  Description of Artificial Sequence: Synthetic oligonucleotide
  Sense strand starting at position 3858 of SEQ ID NO: 1563086
gacugagucucaguugugu

SEQ ID NO: 1794204 - RNA, 19 nt, Artificial Sequence
  Description of Artificial Sequence: Synthetic oligonucleotide
  Antisense strand to SEQ ID NO: 1794203
acacaacugagacucaguc

SEQ ID NO: 1794205 - RNA, 19 nt, Artificial Sequence
  Description of Artificial Sequence: Synthetic oligonucleotide
  Sense strand starting at position 3860 of SEQ ID NO: 1563086
cugagucucaguuguguca

SEQ ID NO: 1794206 - RNA, 19 nt, Artificial Sequence
  Description of Artificial Sequence: Synthetic oligonucleotide
  Antisense strand to SEQ ID NO: 1794205
ugacacaacugagacucag

SEQ ID NO: 1794207 - RNA, 19 nt, Artificial Sequence
  Description of Artificial Sequence: Synthetic oligonucleotide
  Sense strand starting at position 3873 of SEQ ID NO: 1563086
gugucagguacuggucaga

SEQ ID NO: 1794208 - RNA, 19 nt, Artificial Sequence
  Description of Artificial Sequence: Synthetic oligonucleotide
  Antisense strand to SEQ ID NO: 1794207
ucugaccaguaccugacac

SEQ ID NO: 1794209 - RNA, 19 nt, Artificial Sequence
  Description of Artificial Sequence: Synthetic oligonucleotide
  Sense strand starting at position 3876 of SEQ ID NO: 1563086
ucagguacuggucagauua

SEQ ID NO: 1794210 - RNA, 19 nt, Artificial Sequence
  Description of Artificial Sequence: Synthetic oligonucleotide
  Antisense strand to SEQ ID NO: 1794209
uaaucugaccaguaccuga

SEQ ID NO: 1794211 - RNA, 19 nt, Artificial Sequence
  Description of Artificial Sequence: Synthetic oligonucleotide
  Sense strand starting at position 3878 of SEQ ID NO: 1563086
agguacuggucagauuaug

SEQ ID NO: 1794212 - RNA, 19 nt, Artificial Sequence
  Description of Artificial Sequence: Synthetic oligonucleotide
  Antisense strand to SEQ ID NO: 1794211
cauaaucugaccaguaccu

SEQ ID NO: 1794213 - RNA, 19 nt, Artificial Sequence
  Description of Artificial Sequence: Synthetic oligonucleotide
  Sense strand starting at position 3884 of SEQ ID NO: 1563086
uggucagauuaugugaaca

SEQ ID NO: 1794214 - RNA, 19 nt, Artificial Sequence
  Description of Artificial Sequence: Synthetic oligonucleotide
  Antisense strand to SEQ ID NO: 1794213
uguucacauaaucugacca

SEQ ID NO: 1794215 - RNA, 19 nt, Artificial Sequence
  Description of Artificial Sequence: Synthetic oligonucleotide
  Sense strand starting at position 3886 of SEQ ID NO: 1563086
gucagauuaugugaacauu

SEQ ID NO: 1794216 - RNA, 19 nt, Artificial Sequence
  Description of Artificial Sequence: Synthetic oligonucleotide
  Antisense strand to SEQ ID NO: 1794215
aauguucacauaaucugac

SEQ ID NO: 1794217 - RNA, 19 nt, Artificial Sequence
  Description of Artificial Sequence: Synthetic oligonucleotide
  Sense strand starting at position 49 of SEQ ID NO: 1563087
ugcuguuugaauuguugau

SEQ ID NO: 1794218 - RNA, 19 nt, Artificial Sequence
  Description of Artificial Sequence: Synthetic oligonucleotide
  Antisense strand to SEQ ID NO: 1794217
aucaacaauucaaacagca

SEQ ID NO: 1794219 - RNA, 19 nt, Artificial Sequence
  Description of Artificial Sequence: Synthetic oligonucleotide
  Sense strand starting at position 67 of SEQ ID NO: 1563087
uuuaccaggcauugucaga

SEQ ID NO: 1794220 - RNA, 19 nt, Artificial Sequence
  Description of Artificial Sequence: Synthetic oligonucleotide
  Antisense strand to SEQ ID NO: 1794219
ucugacaaugccugguaaa

SEQ ID NO: 1794221 - RNA, 19 nt, Artificial Sequence
  Description of Artificial Sequence: Synthetic oligonucleotide
  Sense strand starting at position 82 of SEQ ID NO: 1563087
cagaaacacgucuguggau

SEQ ID NO: 1794222 - RNA, 19 nt, Artificial Sequence
  Description of Artificial Sequence: Synthetic oligonucleotide
  Antisense strand to SEQ ID NO: 1794221
auccacagacguguuucug

SEQ ID NO: 1794223 - RNA, 19 nt, Artificial Sequence
  Description of Artificial Sequence: Synthetic oligonucleotide
  Sense strand starting at position 128 of SEQ ID NO: 1563087
ggguuaagauccucgacac

SEQ ID NO: 1794224 - RNA, 19 nt, Artificial Sequence
  Description of Artificial Sequence: Synthetic oligonucleotide
  Antisense strand to SEQ ID NO: 1794223
gugucgaggaucuuaaccc

SEQ ID NO: 1794225 - RNA, 19 nt, Artificial Sequence
  Description of Artificial Sequence: Synthetic oligonucleotide
  Sense strand starting at position 246 of SEQ ID NO: 1563087
agcuaccugcuagauauua

SEQ ID NO: 1794226 - RNA, 19 nt, Artificial Sequence
  Description of Artificial Sequence: Synthetic oligonucleotide
  Antisense strand to SEQ ID NO: 1794225
uaauaucuagcagguagcu

SEQ ID NO: 1794227 - RNA, 19 nt, Artificial Sequence
  Description of Artificial Sequence: Synthetic oligonucleotide
  Sense strand starting at position 287 of SEQ ID NO: 1563087
gaguaugcagccuagcauu

SEQ ID NO: 1794228 - RNA, 19 nt, Artificial Sequence
  Description of Artificial Sequence: Synthetic oligonucleotide
  Antisense strand to SEQ ID NO: 1794227
aaugcuaggcugcauacuc

SEQ ID NO: 1794229 - RNA, 19 nt, Artificial Sequence
  Description of Artificial Sequence: Synthetic oligonucleotide
  Sense strand starting at position 336 of SEQ ID NO: 1563087
ugaagugagacaggucaga

SEQ ID NO: 1794230 - RNA, 19 nt, Artificial Sequence
  Description of Artificial Sequence: Synthetic oligonucleotide
  Antisense strand to SEQ ID NO: 1794229
ucugaccugucucacuuca

SEQ ID NO: 1794231 - RNA, 19 nt, Artificial Sequence
  Description of Artificial Sequence: Synthetic oligonucleotide
  Sense strand starting at position 346 of SEQ ID NO: 1563087
caggucagaaguugguaau

SEQ ID NO: 1794232 - RNA, 19 nt, Artificial Sequence
  Description of Artificial Sequence: Synthetic oligonucleotide
  Antisense strand to SEQ ID NO: 1794231
auuaccaacuucugaccug

SEQ ID NO: 1794233 - RNA, 19 nt, Artificial Sequence
  Description of Artificial Sequence: Synthetic oligonucleotide
  Sense strand starting at position 347 of SEQ ID NO: 1563087
aggucagaaguugguaauu

SEQ ID NO: 1794234 - RNA, 19 nt, Artificial Sequence
  Description of Artificial Sequence: Synthetic oligonucleotide
  Antisense strand to SEQ ID NO: 1794233
aauuaccaacuucugaccu

SEQ ID NO: 1794235 - RNA, 19 nt, Artificial Sequence
  Description of Artificial Sequence: Synthetic oligonucleotide
  Sense strand starting at position 352 of SEQ ID NO: 1563087
agaaguugguaauuauuga

SEQ ID NO: 1794236 - RNA, 19 nt, Artificial Sequence
  Description of Artificial Sequence: Synthetic oligonucleotide
  Antisense strand to SEQ ID NO: 1794235
ucaauaauuaccaacuucu

SEQ ID NO: 1794237 - RNA, 19 nt, Artificial Sequence
  Description of Artificial Sequence: Synthetic oligonucleotide
  Sense strand starting at position 378 of SEQ ID NO: 1563087
ugauguauauaaucgcuaa

SEQ ID NO: 1794238 - RNA, 19 nt, Artificial Sequence
  Description of Artificial Sequence: Synthetic oligonucleotide
  Antisense strand to SEQ ID NO: 1794237
uuagcgauuauauacauca

SEQ ID NO: 1794239 - RNA, 19 nt, Artificial Sequence
  Description of Artificial Sequence: Synthetic oligonucleotide
  Sense strand starting at position 405 of SEQ ID NO: 1563087
uuugcucuccguuugcaua

SEQ ID NO: 1794240 - RNA, 19 nt, Artificial Sequence
  Description of Artificial Sequence: Synthetic oligonucleotide
  Antisense strand to SEQ ID NO: 1794239
uaugcaaacggagagcaaa

SEQ ID NO: 1794241 - RNA, 19 nt, Artificial Sequence
  Description of Artificial Sequence: Synthetic oligonucleotide
  Sense strand starting at position 459 of SEQ ID NO: 1563087
aaugaaaucuaaguggagu

SEQ ID NO: 1794242 - RNA, 19 nt, Artificial Sequence
  Description of Artificial Sequence: Synthetic oligonucleotide
  Antisense strand to SEQ ID NO: 1794241
acuccacuuagauuucauu

SEQ ID NO: 1794243 - RNA, 19 nt, Artificial Sequence
  Description of Artificial Sequence: Synthetic oligonucleotide
  Sense strand starting at position 460 of SEQ ID NO: 1563087
augaaaucuaaguggaguc

SEQ ID NO: 1794244 - RNA, 19 nt, Artificial Sequence
  Description of Artificial Sequence: Synthetic oligonucleotide
  Antisense strand to SEQ ID NO: 1794243
gacuccacuuagauuucau

SEQ ID NO: 1794245 - RNA, 19 nt, Artificial Sequence
  Description of Artificial Sequence: Synthetic oligonucleotide
  Sense strand starting at position 470 of SEQ ID NO: 1563087
aguggagucuuggaaauuu

SEQ ID NO: 1794246 - RNA, 19 nt, Artificial Sequence
  Description of Artificial Sequence: Synthetic oligonucleotide
  Antisense strand to SEQ ID NO: 1794245
aaauuuccaagacuccacu

SEQ ID NO: 1794247 - RNA, 19 nt, Artificial Sequence
  Description of Artificial Sequence: Synthetic oligonucleotide
  Sense strand starting at position 882 of SEQ ID NO: 1563087
cgaccuuggccaugacaua

SEQ ID NO: 1794248 - RNA, 19 nt, Artificial Sequence
  Description of Artificial Sequence: Synthetic oligonucleotide
  Antisense strand to SEQ ID NO: 1794247
uaugucauggccaaggucg

SEQ ID NO: 1794249 - RNA, 19 nt, Artificial Sequence
  Description of Artificial Sequence: Synthetic oligonucleotide
  Sense strand starting at position 889 of SEQ ID NO: 1563087
ggccaugacauaggcuuau

SEQ ID NO: 1794250 - RNA, 19 nt, Artificial Sequence
  Description of Artificial Sequence: Synthetic oligonucleotide
  Antisense strand to SEQ ID NO: 1794249
auaagccuaugucauggcc

SEQ ID NO: 1794251 - RNA, 19 nt, Artificial Sequence
  Description of Artificial Sequence: Synthetic oligonucleotide
  Sense strand starting at position 944 of SEQ ID NO: 1563087
cucccuacugcugaaagau

SEQ ID NO: 1794252 - RNA, 19 nt, Artificial Sequence
  Description of Artificial Sequence: Synthetic oligonucleotide
  Antisense strand to SEQ ID NO: 1794251
aucuuucagcaguagggag

SEQ ID NO: 1794253 - RNA, 19 nt, Artificial Sequence
  Description of Artificial Sequence: Synthetic oligonucleotide
  Sense strand starting at position 974 of SEQ ID NO: 1563087
gagggauuccugggauucu

SEQ ID NO: 1794254 - RNA, 19 nt, Artificial Sequence
  Description of Artificial Sequence: Synthetic oligonucleotide
  Antisense strand to SEQ ID NO: 1794253
agaaucccaggaaucccuc

SEQ ID NO: 1794255 - RNA, 19 nt, Artificial Sequence
  Description of Artificial Sequence: Synthetic oligonucleotide
  Sense strand starting at position 987 of SEQ ID NO: 1563087
gauucugggcuuugggaaa

SEQ ID NO: 1794256 - RNA, 19 nt, Artificial Sequence
  Description of Artificial Sequence: Synthetic oligonucleotide
  Antisense strand to SEQ ID NO: 1794255
uuucccaaagcccagaauc

SEQ ID NO: 1794257 - RNA, 19 nt, Artificial Sequence
  Description of Artificial Sequence: Synthetic oligonucleotide
  Sense strand starting at position 1219 of SEQ ID NO: 1563087
gacucugaccgcuggaaag

SEQ ID NO: 1794258 - RNA, 19 nt, Artificial Sequence
  Description of Artificial Sequence: Synthetic oligonucleotide
  Antisense strand to SEQ ID NO: 1794257
cuuuccagcggucagaguc

SEQ ID NO: 1794259 - RNA, 19 nt, Artificial Sequence
  Description of Artificial Sequence: Synthetic oligonucleotide
  Sense strand starting at position 2118 of SEQ ID NO: 1563087
gcacguguccacguuccaa

SEQ ID NO: 1794260 - RNA, 19 nt, Artificial Sequence
  Description of Artificial Sequence: Synthetic oligonucleotide
  Antisense strand to SEQ ID NO: 1794259
uuggaacguggacacgugc

SEQ ID NO: 1794261 - RNA, 19 nt, Artificial Sequence
  Description of Artificial Sequence: Synthetic oligonucleotide
  Sense strand starting at position 2419 of SEQ ID NO: 1563087
acggaaaugagauggcaua

SEQ ID NO: 1794262 - RNA, 19 nt, Artificial Sequence
  Description of Artificial Sequence: Synthetic oligonucleotide
  Antisense strand to SEQ ID NO: 1794261
uaugccaucucauuuccgu

SEQ ID NO: 1794263 - RNA, 19 nt, Artificial Sequence
  Description of Artificial Sequence: Synthetic oligonucleotide
  Sense strand starting at position 2935 of SEQ ID NO: 1563087
acuuuagccagacguggua

SEQ ID NO: 1794264 - RNA, 19 nt, Artificial Sequence
  Description of Artificial Sequence: Synthetic oligonucleotide
  Antisense strand to SEQ ID NO: 1794263
uaccacgucuggcuaaagu

SEQ ID NO: 1794265 - RNA, 19 nt, Artificial Sequence
  Description of Artificial Sequence: Synthetic oligonucleotide
  Sense strand starting at position 3013 of SEQ ID NO: 1563087
ccugcuuguggccaauaga

SEQ ID NO: 1794266 - RNA, 19 nt, Artificial Sequence
  Description of Artificial Sequence: Synthetic oligonucleotide
  Antisense strand to SEQ ID NO: 1794265
ucuauuggccacaagcagg

SEQ ID NO: 1794267 - RNA, 19 nt, Artificial Sequence
  Description of Artificial Sequence: Synthetic oligonucleotide
  Sense strand starting at position 3016 of SEQ ID NO: 1563087
gcuuguggccaauagagaa

SEQ ID NO: 1794268 - RNA, 19 nt, Artificial Sequence
  Description of Artificial Sequence: Synthetic oligonucleotide
  Antisense strand to SEQ ID NO: 1794267
uucucuauuggccacaagc

SEQ ID NO: 1794269 - RNA, 19 nt, Artificial Sequence
  Description of Artificial Sequence: Synthetic oligonucleotide
  Sense strand starting at position 3040 of SEQ ID NO: 1563087
gcagauuucugcuuaccua

SEQ ID NO: 1794270 - RNA, 19 nt, Artificial Sequence
  Description of Artificial Sequence: Synthetic oligonucleotide
  Antisense strand to SEQ ID NO: 1794269
uagguaagcagaaaucugc

SEQ ID NO: 1794271 - RNA, 19 nt, Artificial Sequence
  Description of Artificial Sequence: Synthetic oligonucleotide
  Sense strand starting at position 3096 of SEQ ID NO: 1563087
gauaguacaugugucguaa

SEQ ID NO: 1794272 - RNA, 19 nt, Artificial Sequence
  Description of Artificial Sequence: Synthetic oligonucleotide
  Antisense strand to SEQ ID NO: 1794271
uuacgacacauguacuauc

SEQ ID NO: 1794273 - RNA, 19 nt, Artificial Sequence
  Description of Artificial Sequence: Synthetic oligonucleotide
  Sense strand starting at position 3104 of SEQ ID NO: 1563087
augugucguaaucaucuuu

SEQ ID NO: 1794274 - RNA, 19 nt, Artificial Sequence
  Description of Artificial Sequence: Synthetic oligonucleotide
  Antisense strand to SEQ ID NO: 1794273
aaagaugauuacgacacau

SEQ ID NO: 1794275 - RNA, 19 nt, Artificial Sequence
  Description of Artificial Sequence: Synthetic oligonucleotide
  Sense strand starting at position 3109 of SEQ ID NO: 1563087
ucguaaucaucuuugcauu

SEQ ID NO: 1794276 - RNA, 19 nt, Artificial Sequence
  Description of Artificial Sequence: Synthetic oligonucleotide
  Antisense strand to SEQ ID NO: 1794275
aaugcaaagaugauuacga

SEQ ID NO: 1794277 - RNA, 19 nt, Artificial Sequence
  Description of Artificial Sequence: Synthetic oligonucleotide
  Sense strand starting at position 3110 of SEQ ID NO: 1563087
cguaaucaucuuugcauuu

SEQ ID NO: 1794278 - RNA, 19 nt, Artificial Sequence
  Description of Artificial Sequence: Synthetic oligonucleotide
  Antisense strand to SEQ ID NO: 1794277
aaaugcaaagaugauuacg

SEQ ID NO: 1794279 - RNA, 19 nt, Artificial Sequence
  Description of Artificial Sequence: Synthetic oligonucleotide
  Sense strand starting at position 3119 of SEQ ID NO: 1563087
cuuugcauuugagagagua

SEQ ID NO: 1794280 - RNA, 19 nt, Artificial Sequence
  Description of Artificial Sequence: Synthetic oligonucleotide
  Antisense strand to SEQ ID NO: 1794279
uacucucucaaaugcaaag

SEQ ID NO: 1794281 - RNA, 19 nt, Artificial Sequence
  Description of Artificial Sequence: Synthetic oligonucleotide
  Sense strand starting at position 3177 of SEQ ID NO: 1563087
aguaaagcaugcguugaau

SEQ ID NO: 1794282 - RNA, 19 nt, Artificial Sequence
  Description of Artificial Sequence: Synthetic oligonucleotide
  Antisense strand to SEQ ID NO: 1794281
auucaacgcaugcuuuacu

SEQ ID NO: 1794283 - RNA, 19 nt, Artificial Sequence
  Description of Artificial Sequence: Synthetic oligonucleotide
  Sense strand starting at position 3179 of SEQ ID NO: 1563087
uaaagcaugcguugaauuu

SEQ ID NO: 1794284 - RNA, 19 nt, Artificial Sequence
  Description of Artificial Sequence: Synthetic oligonucleotide
  Antisense strand to SEQ ID NO: 1794283
aaauucaacgcaugcuuua

SEQ ID NO: 1794285 - RNA, 19 nt, Artificial Sequence
  Description of Artificial Sequence: Synthetic oligonucleotide
  Sense strand starting at position 3214 of SEQ ID NO: 1563087
guaagauccugacaauuaa

SEQ ID NO: 1794286 - RNA, 19 nt, Artificial Sequence
  Description of Artificial Sequence: Synthetic oligonucleotide
  Antisense strand to SEQ ID NO: 1794285
uuaauugucaggaucuuac

SEQ ID NO: 1794287 - RNA, 19 nt, Artificial Sequence
  Description of Artificial Sequence: Synthetic oligonucleotide
  Sense strand starting at position 3289 of SEQ ID NO: 1563087
ugguuauuaguauaacucu

SEQ ID NO: 1794288 - RNA, 19 nt, Artificial Sequence
  Description of Artificial Sequence: Synthetic oligonucleotide
  Antisense strand to SEQ ID NO: 1794287
agaguuauacuaauaacca

SEQ ID NO: 1794289 - RNA, 19 nt, Artificial Sequence
  Description of Artificial Sequence: Synthetic oligonucleotide
  Sense strand starting at position 3295 of SEQ ID NO: 1563087
uuaguauaacucuaugugu

SEQ ID NO: 1794290 - RNA, 19 nt, Artificial Sequence
  Description of Artificial Sequence: Synthetic oligonucleotide
  Antisense strand to SEQ ID NO: 1794289
acacauagaguuauacuaa

SEQ ID NO: 1794291 - RNA, 19 nt, Artificial Sequence
  Description of Artificial Sequence: Synthetic oligonucleotide
  Sense strand starting at position 3297 of SEQ ID NO: 1563087
aguauaacucuauguguau

SEQ ID NO: 1794292 - RNA, 19 nt, Artificial Sequence
  Description of Artificial Sequence: Synthetic oligonucleotide
  Antisense strand to SEQ ID NO: 1794291
auacacauagaguuauacu

SEQ ID NO: 1794293 - RNA, 19 nt, Artificial Sequence
  Description of Artificial Sequence: Synthetic oligonucleotide
  Sense strand starting at position 3298 of SEQ ID NO: 1563087
guauaacucuauguguauu

SEQ ID NO: 1794294 - RNA, 19 nt, Artificial Sequence
  Description of Artificial Sequence: Synthetic oligonucleotide
  Antisense strand to SEQ ID NO: 1794293
aauacacauagaguuauac

SEQ ID NO: 1794295 - RNA, 19 nt, Artificial Sequence
  Description of Artificial Sequence: Synthetic oligonucleotide
  Sense strand starting at position 3853 of SEQ ID NO: 1563087
gcuaauauguaucuuuagu

SEQ ID NO: 1794296 - RNA, 19 nt, Artificial Sequence
  Description of Artificial Sequence: Synthetic oligonucleotide
  Antisense strand to SEQ ID NO: 1794295
acuaaagauacauauuagc

SEQ ID NO: 1794297 - RNA, 19 nt, Artificial Sequence
  Description of Artificial Sequence: Synthetic oligonucleotide
  Sense strand starting at position 801 of SEQ ID NO: 1563088
gucggacguccaugucaua

SEQ ID NO: 1794298 - RNA, 19 nt, Artificial Sequence
  Description of Artificial Sequence: Synthetic oligonucleotide
  Antisense strand to SEQ ID NO: 1794297
uaugacauggacguccgac

SEQ ID NO: 1794299 - RNA, 19 nt, Artificial Sequence
  Description of Artificial Sequence: Synthetic oligonucleotide
  Sense strand starting at position 804 of SEQ ID NO: 1563088
ggacguccaugucauaagu

SEQ ID NO: 1794300 - RNA, 19 nt, Artificial Sequence
  Description of Artificial Sequence: Synthetic oligonucleotide
  Antisense strand to SEQ ID NO: 1794299
acuuaugacauggacgucc

SEQ ID NO: 1794301 - RNA, 19 nt, Artificial Sequence
  Description of Artificial Sequence: Synthetic oligonucleotide
  Sense strand starting at position 950 of SEQ ID NO: 1563088
ugaaguguuuccuggauca

SEQ ID NO: 1794302 - RNA, 19 nt, Artificial Sequence
  Description of Artificial Sequence: Synthetic oligonucleotide
  Antisense strand to SEQ ID NO: 1794301
ugauccaggaaacacuuca

SEQ ID NO: 1794303 - RNA, 19 nt, Artificial Sequence
  Description of Artificial Sequence: Synthetic oligonucleotide
  Sense strand starting at position 952 of SEQ ID NO: 1563088
aaguguuuccuggaucaug

SEQ ID NO: 1794304 - RNA, 19 nt, Artificial Sequence
  Description of Artificial Sequence: Synthetic oligonucleotide
  Antisense strand to SEQ ID NO: 1794303
caugauccaggaaacacuu

SEQ ID NO: 1794305 - RNA, 19 nt, Artificial Sequence
  Description of Artificial Sequence: Synthetic oligonucleotide
  Sense strand starting at position 960 of SEQ ID NO: 1563088
ccuggaucaugcugugaca

SEQ ID NO: 1794306 - RNA, 19 nt, Artificial Sequence
  Description of Artificial Sequence: Synthetic oligonucleotide
  Antisense strand to SEQ ID NO: 1794305
ugucacagcaugauccagg

SEQ ID NO: 1794307 - RNA, 19 nt, Artificial Sequence
  Description of Artificial Sequence: Synthetic oligonucleotide
  Sense strand starting at position 963 of SEQ ID NO: 1563088
ggaucaugcugugacacaa

SEQ ID NO: 1794308 - RNA, 19 nt, Artificial Sequence
  Description of Artificial Sequence: Synthetic oligonucleotide
  Antisense strand to SEQ ID NO: 1794307
uugugucacagcaugaucc

SEQ ID NO: 1794309 - RNA, 19 nt, Artificial Sequence
  Description of Artificial Sequence: Synthetic oligonucleotide
  Sense strand starting at position 982 of SEQ ID NO: 1563088
acacucuucucuggagauc

SEQ ID NO: 1794310 - RNA, 19 nt, Artificial Sequence
  Description of Artificial Sequence: Synthetic oligonucleotide
  Antisense strand to SEQ ID NO: 1794309
gaucuccagagaagagugu

SEQ ID NO: 1794311 - RNA, 19 nt, Artificial Sequence
  Description of Artificial Sequence: Synthetic oligonucleotide
  Sense strand starting at position 1070 of SEQ ID NO: 1563088
cccacaugcuuguuguuaa

SEQ ID NO: 1794312 - RNA, 19 nt, Artificial Sequence
  Description of Artificial Sequence: Synthetic oligonucleotide
  Antisense strand to SEQ ID NO: 1794311
uuaacaacaagcauguggg

SEQ ID NO: 1794313 - RNA, 19 nt, Artificial Sequence
  Description of Artificial Sequence: Synthetic oligonucleotide
  Sense strand starting at position 1071 of SEQ ID NO: 1563088
ccacaugcuuguuguuaag

SEQ ID NO: 1794314 - RNA, 19 nt, Artificial Sequence
  Description of Artificial Sequence: Synthetic oligonucleotide
  Antisense strand to SEQ ID NO: 1794313
cuuaacaacaagcaugugg

SEQ ID NO: 1794315 - RNA, 19 nt, Artificial Sequence
  Description of Artificial Sequence: Synthetic oligonucleotide
  Sense strand starting at position 1073 of SEQ ID NO: 1563088
acaugcuuguuguuaagga

SEQ ID NO: 1794316 - RNA, 19 nt, Artificial Sequence
  Description of Artificial Sequence: Synthetic oligonucleotide
  Antisense strand to SEQ ID NO: 1794315
uccuuaacaacaagcaugu

SEQ ID NO: 1794317 - RNA, 19 nt, Artificial Sequence
  Description of Artificial Sequence: Synthetic oligonucleotide
  Sense strand starting at position 1074 of SEQ ID NO: 1563088
caugcuuguuguuaaggaa

SEQ ID NO: 1794318 - RNA, 19 nt, Artificial Sequence
  Description of Artificial Sequence: Synthetic oligonucleotide
  Antisense strand to SEQ ID NO: 1794317
uuccuuaacaacaagcaug

SEQ ID NO: 1794319 - RNA, 19 nt, Artificial Sequence
  Description of Artificial Sequence: Synthetic oligonucleotide
  Sense strand starting at position 1077 of SEQ ID NO: 1563088
gcuuguuguuaaggaagua

SEQ ID NO: 1794320 - RNA, 19 nt, Artificial Sequence
  Description of Artificial Sequence: Synthetic oligonucleotide
  Antisense strand to SEQ ID NO: 1794319
uacuuccuuaacaacaagc

SEQ ID NO: 1794321 - RNA, 19 nt, Artificial Sequence
  Description of Artificial Sequence: Synthetic oligonucleotide
  Sense strand starting at position 1272 of SEQ ID NO: 1563088
acaugaggaucuuguuucu

SEQ ID NO: 1794322 - RNA, 19 nt, Artificial Sequence
  Description of Artificial Sequence: Synthetic oligonucleotide
  Antisense strand to SEQ ID NO: 1794321
agaaacaagauccucaugu

SEQ ID NO: 1794323 - RNA, 19 nt, Artificial Sequence
  Description of Artificial Sequence: Synthetic oligonucleotide
  Sense strand starting at position 1282 of SEQ ID NO: 1563088
cuuguuucucgcugguagu

SEQ ID NO: 1794324 - RNA, 19 nt, Artificial Sequence
  Description of Artificial Sequence: Synthetic oligonucleotide
  Antisense strand to SEQ ID NO: 1794323
acuaccagcgagaaacaag

SEQ ID NO: 1794325 - RNA, 19 nt, Artificial Sequence
  Description of Artificial Sequence: Synthetic oligonucleotide
  Sense strand starting at position 1322 of SEQ ID NO: 1563088
uguugagucucaucuugaa

SEQ ID NO: 1794326 - RNA, 19 nt, Artificial Sequence
  Description of Artificial Sequence: Synthetic oligonucleotide
  Antisense strand to SEQ ID NO: 1794325
uucaagaugagacucaaca

SEQ ID NO: 1794327 - RNA, 19 nt, Artificial Sequence
  Description of Artificial Sequence: Synthetic oligonucleotide
  Sense strand starting at position 1653 of SEQ ID NO: 1563088
gguugcucuacucagagua

SEQ ID NO: 1794328 - RNA, 19 nt, Artificial Sequence
  Description of Artificial Sequence: Synthetic oligonucleotide
  Antisense strand to SEQ ID NO: 1794327
uacucugaguagagcaacc

SEQ ID NO: 1794329 - RNA, 19 nt, Artificial Sequence
  Description of Artificial Sequence: Synthetic oligonucleotide
  Sense strand starting at position 1655 of SEQ ID NO: 1563088
uugcucuacucagaguaaa

SEQ ID NO: 1794330 - RNA, 19 nt, Artificial Sequence
  Description of Artificial Sequence: Synthetic oligonucleotide
  Antisense strand to SEQ ID NO: 1794329
uuuacucugaguagagcaa

SEQ ID NO: 1794331 - RNA, 19 nt, Artificial Sequence
  Description of Artificial Sequence: Synthetic oligonucleotide
  Sense strand starting at position 1736 of SEQ ID NO: 1563088
cucggcguuucuucuaauu

SEQ ID NO: 1794332 - RNA, 19 nt, Artificial Sequence
  Description of Artificial Sequence: Synthetic oligonucleotide
  Antisense strand to SEQ ID NO: 1794331
aauuagaagaaacgccgag

SEQ ID NO: 1794333 - RNA, 19 nt, Artificial Sequence
  Description of Artificial Sequence: Synthetic oligonucleotide
  Sense strand starting at position 1778 of SEQ ID NO: 1563088
gucacagaaccguggcaaa

SEQ ID NO: 1794334 - RNA, 19 nt, Artificial Sequence
  Description of Artificial Sequence: Synthetic oligonucleotide
  Antisense strand to SEQ ID NO: 1794333
uuugccacgguucugugac

SEQ ID NO: 1794335 - RNA, 19 nt, Artificial Sequence
  Description of Artificial Sequence: Synthetic oligonucleotide
  Sense strand starting at position 2077 of SEQ ID NO: 1563088
ggaaauacgucacgggaac

SEQ ID NO: 1794336 - RNA, 19 nt, Artificial Sequence
  Description of Artificial Sequence: Synthetic oligonucleotide
  Antisense strand to SEQ ID NO: 1794335
guucccgugacguauuucc

SEQ ID NO: 1794337 - RNA, 19 nt, Artificial Sequence
  Description of Artificial Sequence: Synthetic oligonucleotide
  Sense strand starting at position 2176 of SEQ ID NO: 1563088
ggccgagcgugcucaguaa

SEQ ID NO: 1794338 - RNA, 19 nt, Artificial Sequence
  Description of Artificial Sequence: Synthetic oligonucleotide
  Antisense strand to SEQ ID NO: 1794337
uuacugagcacgcucggcc

SEQ ID NO: 1794339 - RNA, 19 nt, Artificial Sequence
  Description of Artificial Sequence: Synthetic oligonucleotide
  Sense strand starting at position 2178 of SEQ ID NO: 1563088
ccgagcgugcucaguaaag

SEQ ID NO: 1794340 - RNA, 19 nt, Artificial Sequence
  Description of Artificial Sequence: Synthetic oligonucleotide
  Antisense strand to SEQ ID NO: 1794339
cuuuacugagcacgcucgg

SEQ ID NO: 1794341 - RNA, 19 nt, Artificial Sequence
  Description of Artificial Sequence: Synthetic oligonucleotide
  Sense strand starting at position 2180 of SEQ ID NO: 1563088
gagcgugcucaguaaagga

SEQ ID NO: 1794342 - RNA, 19 nt, Artificial Sequence
  Description of Artificial Sequence: Synthetic oligonucleotide
  Antisense strand to SEQ ID NO: 1794341
uccuuuacugagcacgcuc

SEQ ID NO: 1794343 - RNA, 19 nt, Artificial Sequence
  Description of Artificial Sequence: Synthetic oligonucleotide
  Sense strand starting at position 2207 of SEQ ID NO: 1563088
cagcguuucguuugagcga

SEQ ID NO: 1794344 - RNA, 19 nt, Artificial Sequence
  Description of Artificial Sequence: Synthetic oligonucleotide
  Antisense strand to SEQ ID NO: 1794343
ucgcucaaacgaaacgcug

SEQ ID NO: 1794345 - RNA, 19 nt, Artificial Sequence
  Description of Artificial Sequence: Synthetic oligonucleotide
  Sense strand starting at position 2209 of SEQ ID NO: 1563088
gcguuucguuugagcgaug

SEQ ID NO: 1794346 - RNA, 19 nt, Artificial Sequence
  Description of Artificial Sequence: Synthetic oligonucleotide
  Antisense strand to SEQ ID NO: 1794345
caucgcucaaacgaaacgc

SEQ ID NO: 1794347 - RNA, 19 nt, Artificial Sequence
  Description of Artificial Sequence: Synthetic oligonucleotide
  Sense strand starting at position 2212 of SEQ ID NO: 1563088
uuucguuugagcgauguuu

SEQ ID NO: 1794348 - RNA, 19 nt, Artificial Sequence
  Description of Artificial Sequence: Synthetic oligonucleotide
  Antisense strand to SEQ ID NO: 1794347
aaacaucgcucaaacgaaa

SEQ ID NO: 1794349 - RNA, 19 nt, Artificial Sequence
  Description of Artificial Sequence: Synthetic oligonucleotide
  Sense strand starting at position 2214 of SEQ ID NO: 1563088
ucguuugagcgauguuuac

SEQ ID NO: 1794350 - RNA, 19 nt, Artificial Sequence
  Description of Artificial Sequence: Synthetic oligonucleotide
  Antisense strand to SEQ ID NO: 1794349
guaaacaucgcucaaacga

SEQ ID NO: 1794351 - RNA, 19 nt, Artificial Sequence
  Description of Artificial Sequence: Synthetic oligonucleotide
  Sense strand starting at position 2495 of SEQ ID NO: 1563088
gugucauuucugcggugua

SEQ ID NO: 1794352 - RNA, 19 nt, Artificial Sequence
  Description of Artificial Sequence: Synthetic oligonucleotide
  Antisense strand to SEQ ID NO: 1794351
uacaccgcagaaaugacac

SEQ ID NO: 1794353 - RNA, 19 nt, Artificial Sequence
  Description of Artificial Sequence: Synthetic oligonucleotide
  Sense strand starting at position 2496 of SEQ ID NO: 1563088
ugucauuucugcgguguaa

SEQ ID NO: 1794354 - RNA, 19 nt, Artificial Sequence
  Description of Artificial Sequence: Synthetic oligonucleotide
  Antisense strand to SEQ ID NO: 1794353
uuacaccgcagaaaugaca

SEQ ID NO: 1794355 - RNA, 19 nt, Artificial Sequence
  Description of Artificial Sequence: Synthetic oligonucleotide
  Sense strand starting at position 2498 of SEQ ID NO: 1563088
ucauuucugcgguguaaau

SEQ ID NO: 1794356 - RNA, 19 nt, Artificial Sequence
  Description of Artificial Sequence: Synthetic oligonucleotide
  Antisense strand to SEQ ID NO: 1794355
auuuacaccgcagaaauga

SEQ ID NO: 1794357 - RNA, 19 nt, Artificial Sequence
  Description of Artificial Sequence: Synthetic oligonucleotide
  Sense strand starting at position 2642 of SEQ ID NO: 1563088
caccgaucugugcggcaga

SEQ ID NO: 1794358 - RNA, 19 nt, Artificial Sequence
  Description of Artificial Sequence: Synthetic oligonucleotide
  Antisense strand to SEQ ID NO: 1794357
ucugccgcacagaucggug

SEQ ID NO: 1794359 - RNA, 19 nt, Artificial Sequence
  Description of Artificial Sequence: Synthetic oligonucleotide
  Sense strand starting at position 3234 of SEQ ID NO: 1563088
gaggccugcuaucaugaca

SEQ ID NO: 1794360 - RNA, 19 nt, Artificial Sequence
  Description of Artificial Sequence: Synthetic oligonucleotide
  Antisense strand to SEQ ID NO: 1794359
ugucaugauagcaggccuc

SEQ ID NO: 1794361 - RNA, 19 nt, Artificial Sequence
  Description of Artificial Sequence: Synthetic oligonucleotide
  Sense strand starting at position 3237 of SEQ ID NO: 1563088
gccugcuaucaugacaaug

SEQ ID NO: 1794362 - RNA, 19 nt, Artificial Sequence
  Description of Artificial Sequence: Synthetic oligonucleotide
  Antisense strand to SEQ ID NO: 1794361
cauugucaugauagcaggc

SEQ ID NO: 1794363 - RNA, 19 nt, Artificial Sequence
  Description of Artificial Sequence: Synthetic oligonucleotide
  Sense strand starting at position 3668 of SEQ ID NO: 1563088
acaugcauggcuggacaua

SEQ ID NO: 1794364 - RNA, 19 nt, Artificial Sequence
  Description of Artificial Sequence: Synthetic oligonucleotide
  Antisense strand to SEQ ID NO: 1794363
uauguccagccaugcaugu

SEQ ID NO: 1794365 - RNA, 19 nt, Artificial Sequence
  Description of Artificial Sequence: Synthetic oligonucleotide
  Sense strand starting at position 3669 of SEQ ID NO: 1563088
caugcauggcuggacauau

SEQ ID NO: 1794366 - RNA, 19 nt, Artificial Sequence
  Description of Artificial Sequence: Synthetic oligonucleotide
  Antisense strand to SEQ ID NO: 1794365
auauguccagccaugcaug

SEQ ID NO: 1794367 - RNA, 19 nt, Artificial Sequence
  Description of Artificial Sequence: Synthetic oligonucleotide
  Sense strand starting at position 3684 of SEQ ID NO: 1563088
auaugcaagaccugagagu

SEQ ID NO: 1794368 - RNA, 19 nt, Artificial Sequence
  Description of Artificial Sequence: Synthetic oligonucleotide
  Antisense strand to SEQ ID NO: 1794367
acucucaggucuugcauau

SEQ ID NO: 1794369 - RNA, 19 nt, Artificial Sequence
  Description of Artificial Sequence: Synthetic oligonucleotide
  Sense strand starting at position 3697 of SEQ ID NO: 1563088
gagaguccuacccgucaug

SEQ ID NO: 1794370 - RNA, 19 nt, Artificial Sequence
  Description of Artificial Sequence: Synthetic oligonucleotide
  Antisense strand to SEQ ID NO: 1794369
caugacggguaggacucuc

SEQ ID NO: 1794371 - RNA, 19 nt, Artificial Sequence
  Description of Artificial Sequence: Synthetic oligonucleotide
  Sense strand starting at position 3793 of SEQ ID NO: 1563088
uguucauguuguccagagu

SEQ ID NO: 1794372 - RNA, 19 nt, Artificial Sequence
  Description of Artificial Sequence: Synthetic oligonucleotide
  Antisense strand to SEQ ID NO: 1794371
acucuggacaacaugaaca

SEQ ID NO: 1794373 - RNA, 19 nt, Artificial Sequence
  Description of Artificial Sequence: Synthetic oligonucleotide
  Sense strand starting at position 3796 of SEQ ID NO: 1563088
ucauguuguccagagucca

SEQ ID NO: 1794374 - RNA, 19 nt, Artificial Sequence
  Description of Artificial Sequence: Synthetic oligonucleotide
  Antisense strand to SEQ ID NO: 1794373
uggacucuggacaacauga

SEQ ID NO: 1794375 - RNA, 19 nt, Artificial Sequence
  Description of Artificial Sequence: Synthetic oligonucleotide
  Sense strand starting at position 3817 of SEQ ID NO: 1563088
cccagaacucucugugcuu

SEQ ID NO: 1794376 - RNA, 19 nt, Artificial Sequence
  Description of Artificial Sequence: Synthetic oligonucleotide
  Antisense strand to SEQ ID NO: 1794375
aagcacagagaguucuggg

SEQ ID NO: 1794377 - RNA, 19 nt, Artificial Sequence
  Description of Artificial Sequence: Synthetic oligonucleotide
  Sense strand starting at position 51 of SEQ ID NO: 1563089
gagggcuuuguccagcuuu

SEQ ID NO: 1794378 - RNA, 19 nt, Artificial Sequence
  Description of Artificial Sequence: Synthetic oligonucleotide
  Antisense strand to SEQ ID NO: 1794377
aaagcuggacaaagcccuc

SEQ ID NO: 1794379 - RNA, 19 nt, Artificial Sequence
  Description of Artificial Sequence: Synthetic oligonucleotide
  Sense strand starting at position 225 of SEQ ID NO: 1563089
gguagugacaccgauaacu

SEQ ID NO: 1794380 - RNA, 19 nt, Artificial Sequence
  Description of Artificial Sequence: Synthetic oligonucleotide
  Antisense strand to SEQ ID NO: 1794379
aguuaucggugucacuacc

SEQ ID NO: 1794381 - RNA, 19 nt, Artificial Sequence
  Description of Artificial Sequence: Synthetic oligonucleotide
  Sense strand starting at position 227 of SEQ ID NO: 1563089
uagugacaccgauaacuuu

SEQ ID NO: 1794382 - RNA, 19 nt, Artificial Sequence
  Description of Artificial Sequence: Synthetic oligonucleotide
  Antisense strand to SEQ ID NO: 1794381
aaaguuaucggugucacua

SEQ ID NO: 1794383 - RNA, 19 nt, Artificial Sequence
  Description of Artificial Sequence: Synthetic oligonucleotide
  Sense strand starting at position 588 of SEQ ID NO: 1563089
ggauguuaacaucagcuua

SEQ ID NO: 1794384 - RNA, 19 nt, Artificial Sequence
  Description of Artificial Sequence: Synthetic oligonucleotide
  Antisense strand to SEQ ID NO: 1794383
uaagcugauguuaacaucc

SEQ ID NO: 1794385 - RNA, 19 nt, Artificial Sequence
  Description of Artificial Sequence: Synthetic oligonucleotide
  Sense strand starting at position 678 of SEQ ID NO: 1563089
uaaagaugacgcugagcuu

SEQ ID NO: 1794386 - RNA, 19 nt, Artificial Sequence
  Description of Artificial Sequence: Synthetic oligonucleotide
  Antisense strand to SEQ ID NO: 1794385
aagcucagcgucaucuuua

SEQ ID NO: 1794387 - RNA, 19 nt, Artificial Sequence
  Description of Artificial Sequence: Synthetic oligonucleotide
  Sense strand starting at position 715 of SEQ ID NO: 1563089
gaacauguguuucccagca

SEQ ID NO: 1794388 - RNA, 19 nt, Artificial Sequence
  Description of Artificial Sequence: Synthetic oligonucleotide
  Antisense strand to SEQ ID NO: 1794387
ugcugggaaacacauguuc

SEQ ID NO: 1794389 - RNA, 19 nt, Artificial Sequence
  Description of Artificial Sequence: Synthetic oligonucleotide
  Sense strand starting at position 720 of SEQ ID NO: 1563089
uguguuucccagcacuaac

SEQ ID NO: 1794390 - RNA, 19 nt, Artificial Sequence
  Description of Artificial Sequence: Synthetic oligonucleotide
  Antisense strand to SEQ ID NO: 1794389
guuagugcugggaaacaca

SEQ ID NO: 1794391 - RNA, 19 nt, Artificial Sequence
  Description of Artificial Sequence: Synthetic oligonucleotide
  Sense strand starting at position 809 of SEQ ID NO: 1563089
gccugaccagucuguauau

SEQ ID NO: 1794392 - RNA, 19 nt, Artificial Sequence
  Description of Artificial Sequence: Synthetic oligonucleotide
  Antisense strand to SEQ ID NO: 1794391
auauacagacuggucaggc

SEQ ID NO: 1794393 - RNA, 19 nt, Artificial Sequence
  Description of Artificial Sequence: Synthetic oligonucleotide
  Sense strand starting at position 810 of SEQ ID NO: 1563089
ccugaccagucuguauauu

SEQ ID NO: 1794394 - RNA, 19 nt, Artificial Sequence
  Description of Artificial Sequence: Synthetic oligonucleotide
  Antisense strand to SEQ ID NO: 1794393
aauauacagacuggucagg

SEQ ID NO: 1794395 - RNA, 19 nt, Artificial Sequence
  Description of Artificial Sequence: Synthetic oligonucleotide
  Sense strand starting at position 819 of SEQ ID NO: 1563089
ucuguauauugagucuaca

SEQ ID NO: 1794396 - RNA, 19 nt, Artificial Sequence
  Description of Artificial Sequence: Synthetic oligonucleotide
  Antisense strand to SEQ ID NO: 1794395
uguagacucaauauacaga

SEQ ID NO: 1794397 - RNA, 19 nt, Artificial Sequence
  Description of Artificial Sequence: Synthetic oligonucleotide
  Sense strand starting at position 822 of SEQ ID NO: 1563089
guauauugagucuacauau

SEQ ID NO: 1794398 - RNA, 19 nt, Artificial Sequence
  Description of Artificial Sequence: Synthetic oligonucleotide
  Antisense strand to SEQ ID NO: 1794397
auauguagacucaauauac

SEQ ID NO: 1794399 - RNA, 19 nt, Artificial Sequence
  Description of Artificial Sequence: Synthetic oligonucleotide
  Sense strand starting at position 832 of SEQ ID NO: 1563089
ucuacauaugagcagcaua

SEQ ID NO: 1794400 - RNA, 19 nt, Artificial Sequence
  Description of Artificial Sequence: Synthetic oligonucleotide
  Antisense strand to SEQ ID NO: 1794399
uaugcugcucauauguaga

SEQ ID NO: 1794401 - RNA, 19 nt, Artificial Sequence
  Description of Artificial Sequence: Synthetic oligonucleotide
  Sense strand starting at position 928 of SEQ ID NO: 1563089
uacucacugugcguggaaa

SEQ ID NO: 1794402 - RNA, 19 nt, Artificial Sequence
  Description of Artificial Sequence: Synthetic oligonucleotide
  Antisense strand to SEQ ID NO: 1794401
uuuccacgcacagugagua

SEQ ID NO: 1794403 - RNA, 19 nt, Artificial Sequence
  Description of Artificial Sequence: Synthetic oligonucleotide
  Sense strand starting at position 929 of SEQ ID NO: 1563089
acucacugugcguggaaau

SEQ ID NO: 1794404 - RNA, 19 nt, Artificial Sequence
  Description of Artificial Sequence: Synthetic oligonucleotide
  Antisense strand to SEQ ID NO: 1794403
auuuccacgcacagugagu

SEQ ID NO: 1794405 - RNA, 19 nt, Artificial Sequence
  Description of Artificial Sequence: Synthetic oligonucleotide
  Sense strand starting at position 956 of SEQ ID NO: 1563089
acuggugucucacuguuga

SEQ ID NO: 1794406 - RNA, 19 nt, Artificial Sequence
  Description of Artificial Sequence: Synthetic oligonucleotide
  Antisense strand to SEQ ID NO: 1794405
ucaacagugagacaccagu

SEQ ID NO: 1794407 - RNA, 19 nt, Artificial Sequence
  Description of Artificial Sequence: Synthetic oligonucleotide
  Sense strand starting at position 993 of SEQ ID NO: 1563089
cagguccauccuggauauu

SEQ ID NO: 1794408 - RNA, 19 nt, Artificial Sequence
  Description of Artificial Sequence: Synthetic oligonucleotide
  Antisense strand to SEQ ID NO: 1794407
aauauccaggauggaccug

SEQ ID NO: 1794409 - RNA, 19 nt, Artificial Sequence
  Description of Artificial Sequence: Synthetic oligonucleotide
  Sense strand starting at position 1006 of SEQ ID NO: 1563089
gauauuaaagguugucaag

SEQ ID NO: 1794410 - RNA, 19 nt, Artificial Sequence
  Description of Artificial Sequence: Synthetic oligonucleotide
  Antisense strand to SEQ ID NO: 1794409
cuugacaaccuuuaauauc

SEQ ID NO: 1794411 - RNA, 19 nt, Artificial Sequence
  Description of Artificial Sequence: Synthetic oligonucleotide
  Sense strand starting at position 1008 of SEQ ID NO: 1563089
uauuaaagguugucaagga

SEQ ID NO: 1794412 - RNA, 19 nt, Artificial Sequence
  Description of Artificial Sequence: Synthetic oligonucleotide
  Antisense strand to SEQ ID NO: 1794411
uccuugacaaccuuuaaua

SEQ ID NO: 1794413 - RNA, 19 nt, Artificial Sequence
  Description of Artificial Sequence: Synthetic oligonucleotide
  Sense strand starting at position 1012 of SEQ ID NO: 1563089
aaagguugucaaggagauc

SEQ ID NO: 1794414 - RNA, 19 nt, Artificial Sequence
  Description of Artificial Sequence: Synthetic oligonucleotide
  Antisense strand to SEQ ID NO: 1794413
gaucuccuugacaaccuuu

SEQ ID NO: 1794415 - RNA, 19 nt, Artificial Sequence
  Description of Artificial Sequence: Synthetic oligonucleotide
  Sense strand starting at position 1024 of SEQ ID NO: 1563089
ggagauccucgugguguau

SEQ ID NO: 1794416 - RNA, 19 nt, Artificial Sequence
  Description of Artificial Sequence: Synthetic oligonucleotide
  Antisense strand to SEQ ID NO: 1794415
auacaccacgaggaucucc

SEQ ID NO: 1794417 - RNA, 19 nt, Artificial Sequence
  Description of Artificial Sequence: Synthetic oligonucleotide
  Sense strand starting at position 1143 of SEQ ID NO: 1563089
gcuuccuggagaugacaga

SEQ ID NO: 1794418 - RNA, 19 nt, Artificial Sequence
  Description of Artificial Sequence: Synthetic oligonucleotide
  Antisense strand to SEQ ID NO: 1794417
ucugucaucuccaggaagc

SEQ ID NO: 1794419 - RNA, 19 nt, Artificial Sequence
  Description of Artificial Sequence: Synthetic oligonucleotide
  Sense strand starting at position 1178 of SEQ ID NO: 1563089
agaagaagucgcugagcca

SEQ ID NO: 1794420 - RNA, 19 nt, Artificial Sequence
  Description of Artificial Sequence: Synthetic oligonucleotide
  Antisense strand to SEQ ID NO: 1794419
uggcucagcgacuucuucu

SEQ ID NO: 1794421 - RNA, 19 nt, Artificial Sequence
  Description of Artificial Sequence: Synthetic oligonucleotide
  Sense strand starting at position 1179 of SEQ ID NO: 1563089
gaagaagucgcugagccau

SEQ ID NO: 1794422 - RNA, 19 nt, Artificial Sequence
  Description of Artificial Sequence: Synthetic oligonucleotide
  Antisense strand to SEQ ID NO: 1794421
auggcucagcgacuucuuc

SEQ ID NO: 1794423 - RNA, 19 nt, Artificial Sequence
  Description of Artificial Sequence: Synthetic oligonucleotide
  Sense strand starting at position 1185 of SEQ ID NO: 1563089
gucgcugagccaucuguga

SEQ ID NO: 1794424 - RNA, 19 nt, Artificial Sequence
  Description of Artificial Sequence: Synthetic oligonucleotide
  Antisense strand to SEQ ID NO: 1794423
ucacagauggcucagcgac

SEQ ID NO: 1794425 - RNA, 19 nt, Artificial Sequence
  Description of Artificial Sequence: Synthetic oligonucleotide
  Sense strand starting at position 1327 of SEQ ID NO: 1563089
agauuuguagcguggaagu

SEQ ID NO: 1794426 - RNA, 19 nt, Artificial Sequence
  Description of Artificial Sequence: Synthetic oligonucleotide
  Antisense strand to SEQ ID NO: 1794425
acuuccacgcuacaaaucu

SEQ ID NO: 1794427 - RNA, 19 nt, Artificial Sequence
  Description of Artificial Sequence: Synthetic oligonucleotide
  Sense strand starting at position 1431 of SEQ ID NO: 1563089
ggauuuagauuauaacgga

SEQ ID NO: 1794428 - RNA, 19 nt, Artificial Sequence
  Description of Artificial Sequence: Synthetic oligonucleotide
  Antisense strand to SEQ ID NO: 1794427
uccguuauaaucuaaaucc

SEQ ID NO: 1794429 - RNA, 19 nt, Artificial Sequence
  Description of Artificial Sequence: Synthetic oligonucleotide
  Sense strand starting at position 1434 of SEQ ID NO: 1563089
uuuagauuauaacggaaga

SEQ ID NO: 1794430 - RNA, 19 nt, Artificial Sequence
  Description of Artificial Sequence: Synthetic oligonucleotide
  Antisense strand to SEQ ID NO: 1794429
ucuuccguuauaaucuaaa

SEQ ID NO: 1794431 - RNA, 19 nt, Artificial Sequence
  Description of Artificial Sequence: Synthetic oligonucleotide
  Sense strand starting at position 1577 of SEQ ID NO: 1563089
gaaggaauacgaggcucaa

SEQ ID NO: 1794432 - RNA, 19 nt, Artificial Sequence
  Description of Artificial Sequence: Synthetic oligonucleotide
  Antisense strand to SEQ ID NO: 1794431
uugagccucguauuccuuc

SEQ ID NO: 1794433 - RNA, 19 nt, Artificial Sequence
  Description of Artificial Sequence: Synthetic oligonucleotide
  Sense strand starting at position 1581 of SEQ ID NO: 1563089
gaauacgaggcucaaguaa

SEQ ID NO: 1794434 - RNA, 19 nt, Artificial Sequence
  Description of Artificial Sequence: Synthetic oligonucleotide
  Antisense strand to SEQ ID NO: 1794433
uuacuugagccucguauuc

SEQ ID NO: 1794435 - RNA, 19 nt, Artificial Sequence
  Description of Artificial Sequence: Synthetic oligonucleotide
  Sense strand starting at position 1590 of SEQ ID NO: 1563089
gcucaaguaaguuaaguga

SEQ ID NO: 1794436 - RNA, 19 nt, Artificial Sequence
  Description of Artificial Sequence: Synthetic oligonucleotide
  Antisense strand to SEQ ID NO: 1794435
ucacuuaacuuacuugagc

SEQ ID NO: 1794437 - RNA, 19 nt, Artificial Sequence
  Description of Artificial Sequence: Synthetic oligonucleotide
  Sense strand starting at position 1593 of SEQ ID NO: 1563089
caaguaaguuaagugacau

SEQ ID NO: 1794438 - RNA, 19 nt, Artificial Sequence
  Description of Artificial Sequence: Synthetic oligonucleotide
  Antisense strand to SEQ ID NO: 1794437
augucacuuaacuuacuug

SEQ ID NO: 1794439 - RNA, 19 nt, Artificial Sequence
  Description of Artificial Sequence: Synthetic oligonucleotide
  Sense strand starting at position 1603 of SEQ ID NO: 1563089
aagugacaugcccaaagua

SEQ ID NO: 1794440 - RNA, 19 nt, Artificial Sequence
  Description of Artificial Sequence: Synthetic oligonucleotide
  Antisense strand to SEQ ID NO: 1794439
uacuuugggcaugucacuu

SEQ ID NO: 1794441 - RNA, 19 nt, Artificial Sequence
  Description of Artificial Sequence: Synthetic oligonucleotide
  Sense strand starting at position 1652 of SEQ ID NO: 1563089
aacccagggucgucugaaa

SEQ ID NO: 1794442 - RNA, 19 nt, Artificial Sequence
  Description of Artificial Sequence: Synthetic oligonucleotide
  Antisense strand to SEQ ID NO: 1794441
uuucagacgacccuggguu

SEQ ID NO: 1794443 - RNA, 19 nt, Artificial Sequence
  Description of Artificial Sequence: Synthetic oligonucleotide
  Sense strand starting at position 2047 of SEQ ID NO: 1563089
gagcgucccucuccaauuu

SEQ ID NO: 1794444 - RNA, 19 nt, Artificial Sequence
  Description of Artificial Sequence: Synthetic oligonucleotide
  Antisense strand to SEQ ID NO: 1794443
aaauuggagagggacgcuc

SEQ ID NO: 1794445 - RNA, 19 nt, Artificial Sequence
  Description of Artificial Sequence: Synthetic oligonucleotide
  Sense strand starting at position 2313 of SEQ ID NO: 1563089
uucucagaggguugugauu

SEQ ID NO: 1794446 - RNA, 19 nt, Artificial Sequence
  Description of Artificial Sequence: Synthetic oligonucleotide
  Antisense strand to SEQ ID NO: 1794445
aaucacaacccucugagaa

SEQ ID NO: 1794447 - RNA, 19 nt, Artificial Sequence
  Description of Artificial Sequence: Synthetic oligonucleotide
  Sense strand starting at position 2607 of SEQ ID NO: 1563089
gaggguacuuaagggagaa

SEQ ID NO: 1794448 - RNA, 19 nt, Artificial Sequence
  Description of Artificial Sequence: Synthetic oligonucleotide
  Antisense strand to SEQ ID NO: 1794447
uucucccuuaaguacccuc

SEQ ID NO: 1794449 - RNA, 19 nt, Artificial Sequence
  Description of Artificial Sequence: Synthetic oligonucleotide
  Sense strand starting at position 3032 of SEQ ID NO: 1563089
gguucuguuucuccauuua

SEQ ID NO: 1794450 - RNA, 19 nt, Artificial Sequence
  Description of Artificial Sequence: Synthetic oligonucleotide
  Antisense strand to SEQ ID NO: 1794449
uaaauggagaaacagaacc

SEQ ID NO: 1794451 - RNA, 19 nt, Artificial Sequence
  Description of Artificial Sequence: Synthetic oligonucleotide
  Sense strand starting at position 3099 of SEQ ID NO: 1563089
agaacucaaccgggaguuu

SEQ ID NO: 1794452 - RNA, 19 nt, Artificial Sequence
  Description of Artificial Sequence: Synthetic oligonucleotide
  Antisense strand to SEQ ID NO: 1794451
aaacucccgguugaguucu

SEQ ID NO: 1794453 - RNA, 19 nt, Artificial Sequence
  Description of Artificial Sequence: Synthetic oligonucleotide
  Sense strand starting at position 3313 of SEQ ID NO: 1563089
guuuccaaauuguugauca

SEQ ID NO: 1794454 - RNA, 19 nt, Artificial Sequence
  Description of Artificial Sequence: Synthetic oligonucleotide
  Antisense strand to SEQ ID NO: 1794453
ugaucaacaauuuggaaac

SEQ ID NO: 1794455 - RNA, 19 nt, Artificial Sequence
  Description of Artificial Sequence: Synthetic oligonucleotide
  Sense strand starting at position 3317 of SEQ ID NO: 1563089
ccaaauuguugaucaaagu

SEQ ID NO: 1794456 - RNA, 19 nt, Artificial Sequence
  Description of Artificial Sequence: Synthetic oligonucleotide
  Antisense strand to SEQ ID NO: 1794455
acuuugaucaacaauuugg

SEQ ID NO: 1794457 - RNA, 19 nt, Artificial Sequence
  Description of Artificial Sequence: Synthetic oligonucleotide
  Sense strand starting at position 435 of SEQ ID NO: 1563090
guuuguucuuucccuuaaa

SEQ ID NO: 1794458 - RNA, 19 nt, Artificial Sequence
  Description of Artificial Sequence: Synthetic oligonucleotide
  Antisense strand to SEQ ID NO: 1794457
uuuaagggaaagaacaaac

SEQ ID NO: 1794459 - RNA, 19 nt, Artificial Sequence
  Description of Artificial Sequence: Synthetic oligonucleotide
  Sense strand starting at position 479 of SEQ ID NO: 1563090
cuaagucucguaugauauu

SEQ ID NO: 1794460 - RNA, 19 nt, Artificial Sequence
  Description of Artificial Sequence: Synthetic oligonucleotide
  Antisense strand to SEQ ID NO: 1794459
aauaucauacgagacuuag

SEQ ID NO: 1794461 - RNA, 19 nt, Artificial Sequence
  Description of Artificial Sequence: Synthetic oligonucleotide
  Sense strand starting at position 547 of SEQ ID NO: 1563090
gugucuggacugugaguau

SEQ ID NO: 1794462 - RNA, 19 nt, Artificial Sequence
  Description of Artificial Sequence: Synthetic oligonucleotide
  Antisense strand to SEQ ID NO: 1794461
auacucacaguccagacac

SEQ ID NO: 1794463 - RNA, 19 nt, Artificial Sequence
  Description of Artificial Sequence: Synthetic oligonucleotide
  Sense strand starting at position 609 of SEQ ID NO: 1563090
ucacauccgugauucugaa

SEQ ID NO: 1794464 - RNA, 19 nt, Artificial Sequence
  Description of Artificial Sequence: Synthetic oligonucleotide
  Antisense strand to SEQ ID NO: 1794463
uucagaaucacggauguga

SEQ ID NO: 1794465 - RNA, 19 nt, Artificial Sequence
  Description of Artificial Sequence: Synthetic oligonucleotide
  Sense strand starting at position 1093 of SEQ ID NO: 1563090
cauguugucgugcauggaa

SEQ ID NO: 1794466 - RNA, 19 nt, Artificial Sequence
  Description of Artificial Sequence: Synthetic oligonucleotide
  Antisense strand to SEQ ID NO: 1794465
uuccaugcacgacaacaug

SEQ ID NO: 1794467 - RNA, 19 nt, Artificial Sequence
  Description of Artificial Sequence: Synthetic oligonucleotide
  Sense strand starting at position 1236 of SEQ ID NO: 1563090
uuaugauuauuguccugau

SEQ ID NO: 1794468 - RNA, 19 nt, Artificial Sequence
  Description of Artificial Sequence: Synthetic oligonucleotide
  Antisense strand to SEQ ID NO: 1794467
aucaggacaauaaucauaa

SEQ ID NO: 1794469 - RNA, 19 nt, Artificial Sequence
  Description of Artificial Sequence: Synthetic oligonucleotide
  Sense strand starting at position 1239 of SEQ ID NO: 1563090
ugauuauuguccugauuua

SEQ ID NO: 1794470 - RNA, 19 nt, Artificial Sequence
  Description of Artificial Sequence: Synthetic oligonucleotide
  Antisense strand to SEQ ID NO: 1794469
uaaaucaggacaauaauca

SEQ ID NO: 1794471 - RNA, 19 nt, Artificial Sequence
  Description of Artificial Sequence: Synthetic oligonucleotide
  Sense strand starting at position 1289 of SEQ ID NO: 1563090
gaguguguauccucccauu

SEQ ID NO: 1794472 - RNA, 19 nt, Artificial Sequence
  Description of Artificial Sequence: Synthetic oligonucleotide
  Antisense strand to SEQ ID NO: 1794471
aaugggaggauacacacuc

SEQ ID NO: 1794473 - RNA, 19 nt, Artificial Sequence
  Description of Artificial Sequence: Synthetic oligonucleotide
  Sense strand starting at position 1400 of SEQ ID NO: 1563090
gugggauaucaucaucuuc

SEQ ID NO: 1794474 - RNA, 19 nt, Artificial Sequence
  Description of Artificial Sequence: Synthetic oligonucleotide
  Antisense strand to SEQ ID NO: 1794473
gaagaugaugauaucccac

SEQ ID NO: 1794475 - RNA, 19 nt, Artificial Sequence
  Description of Artificial Sequence: Synthetic oligonucleotide
  Sense strand starting at position 1425 of SEQ ID NO: 1563090
guaguuguuacugggauac

SEQ ID NO: 1794476 - RNA, 19 nt, Artificial Sequence
  Description of Artificial Sequence: Synthetic oligonucleotide
  Antisense strand to SEQ ID NO: 1794475
guaucccaguaacaacuac

SEQ ID NO: 1794477 - RNA, 19 nt, Artificial Sequence
  Description of Artificial Sequence: Synthetic oligonucleotide
  Sense strand starting at position 2010 of SEQ ID NO: 1563090
ugugaagugaucugacguu

SEQ ID NO: 1794478 - RNA, 19 nt, Artificial Sequence
  Description of Artificial Sequence: Synthetic oligonucleotide
  Antisense strand to SEQ ID NO: 1794477
aacgucagaucacuucaca

SEQ ID NO: 1794479 - RNA, 19 nt, Artificial Sequence
  Description of Artificial Sequence: Synthetic oligonucleotide
  Sense strand starting at position 2135 of SEQ ID NO: 1563090
gaaagcugagguugaagau

SEQ ID NO: 1794480 - RNA, 19 nt, Artificial Sequence
  Description of Artificial Sequence: Synthetic oligonucleotide
  Antisense strand to SEQ ID NO: 1794479
aucuucaaccucagcuuuc

SEQ ID NO: 1794481 - RNA, 19 nt, Artificial Sequence
  Description of Artificial Sequence: Synthetic oligonucleotide
  Sense strand starting at position 2144 of SEQ ID NO: 1563090
gguugaagaucugugcugu

SEQ ID NO: 1794482 - RNA, 19 nt, Artificial Sequence
  Description of Artificial Sequence: Synthetic oligonucleotide
  Antisense strand to SEQ ID NO: 1794481
acagcacagaucuucaacc

SEQ ID NO: 1794483 - RNA, 19 nt, Artificial Sequence
  Description of Artificial Sequence: Synthetic oligonucleotide
  Sense strand starting at position 2145 of SEQ ID NO: 1563090
guugaagaucugugcugug

SEQ ID NO: 1794484 - RNA, 19 nt, Artificial Sequence
  Description of Artificial Sequence: Synthetic oligonucleotide
  Antisense strand to SEQ ID NO: 1794483
cacagcacagaucuucaac

SEQ ID NO: 1794485 - RNA, 19 nt, Artificial Sequence
  Description of Artificial Sequence: Synthetic oligonucleotide
  Sense strand starting at position 2150 of SEQ ID NO: 1563090
agaucugugcugugaugag

SEQ ID NO: 1794486 - RNA, 19 nt, Artificial Sequence
  Description of Artificial Sequence: Synthetic oligonucleotide
  Antisense strand to SEQ ID NO: 1794485
cucaucacagcacagaucu

SEQ ID NO: 1794487 - RNA, 19 nt, Artificial Sequence
  Description of Artificial Sequence: Synthetic oligonucleotide
  Sense strand starting at position 2173 of SEQ ID NO: 1563090
uccagauagcggugagaga

SEQ ID NO: 1794488 - RNA, 19 nt, Artificial Sequence
  Description of Artificial Sequence: Synthetic oligonucleotide
  Antisense strand to SEQ ID NO: 1794487
ucucucaccgcuaucugga

SEQ ID NO: 1794489 - RNA, 19 nt, Artificial Sequence
  Description of Artificial Sequence: Synthetic oligonucleotide
  Sense strand starting at position 2174 of SEQ ID NO: 1563090
ccagauagcggugagagau

SEQ ID NO: 1794490 - RNA, 19 nt, Artificial Sequence
  Description of Artificial Sequence: Synthetic oligonucleotide
  Antisense strand to SEQ ID NO: 1794489
aucucucaccgcuaucugg

SEQ ID NO: 1794491 - RNA, 19 nt, Artificial Sequence
  Description of Artificial Sequence: Synthetic oligonucleotide
  Sense strand starting at position 2232 of SEQ ID NO: 1563090
uaagccucucccuggagua

SEQ ID NO: 1794492 - RNA, 19 nt, Artificial Sequence
  Description of Artificial Sequence: Synthetic oligonucleotide
  Antisense strand to SEQ ID NO: 1794491
uacuccagggagaggcuua

SEQ ID NO: 1794493 - RNA, 19 nt, Artificial Sequence
  Description of Artificial Sequence: Synthetic oligonucleotide
  Sense strand starting at position 2322 of SEQ ID NO: 1563090
cucucagagcuggagaguu

SEQ ID NO: 1794494 - RNA, 19 nt, Artificial Sequence
  Description of Artificial Sequence: Synthetic oligonucleotide
  Antisense strand to SEQ ID NO: 1794493
aacucuccagcucugagag

SEQ ID NO: 1794495 - RNA, 19 nt, Artificial Sequence
  Description of Artificial Sequence: Synthetic oligonucleotide
  Sense strand starting at position 2387 of SEQ ID NO: 1563090
cuuggugacuucuccaaca

SEQ ID NO: 1794496 - RNA, 19 nt, Artificial Sequence
  Description of Artificial Sequence: Synthetic oligonucleotide
  Antisense strand to SEQ ID NO: 1794495
uguuggagaagucaccaag

SEQ ID NO: 1794497 - RNA, 19 nt, Artificial Sequence
  Description of Artificial Sequence: Synthetic oligonucleotide
  Sense strand starting at position 2436 of SEQ ID NO: 1563090
agggccuuucccugcaaga

SEQ ID NO: 1794498 - RNA, 19 nt, Artificial Sequence
  Description of Artificial Sequence: Synthetic oligonucleotide
  Antisense strand to SEQ ID NO: 1794497
ucuugcagggaaaggcccu

SEQ ID NO: 1794499 - RNA, 19 nt, Artificial Sequence
  Description of Artificial Sequence: Synthetic oligonucleotide
  Sense strand starting at position 2438 of SEQ ID NO: 1563090
ggccuuucccugcaagaga

SEQ ID NO: 1794500 - RNA, 19 nt, Artificial Sequence
  Description of Artificial Sequence: Synthetic oligonucleotide
  Antisense strand to SEQ ID NO: 1794499
ucucuugcagggaaaggcc

SEQ ID NO: 1794501 - RNA, 19 nt, Artificial Sequence
  Description of Artificial Sequence: Synthetic oligonucleotide
  Sense strand starting at position 2526 of SEQ ID NO: 1563090
gugggaauguuagagaaag

SEQ ID NO: 1794502 - RNA, 19 nt, Artificial Sequence
  Description of Artificial Sequence: Synthetic oligonucleotide
  Antisense strand to SEQ ID NO: 1794501
cuuucucuaacauucccac

SEQ ID NO: 1794503 - RNA, 19 nt, Artificial Sequence
  Description of Artificial Sequence: Synthetic oligonucleotide
  Sense strand starting at position 2772 of SEQ ID NO: 1563090
ucuagaugugccuggaguu

SEQ ID NO: 1794504 - RNA, 19 nt, Artificial Sequence
  Description of Artificial Sequence: Synthetic oligonucleotide
  Antisense strand to SEQ ID NO: 1794503
aacuccaggcacaucuaga

SEQ ID NO: 1794505 - RNA, 19 nt, Artificial Sequence
  Description of Artificial Sequence: Synthetic oligonucleotide
  Sense strand starting at position 2773 of SEQ ID NO: 1563090
cuagaugugccuggaguuu

SEQ ID NO: 1794506 - RNA, 19 nt, Artificial Sequence
  Description of Artificial Sequence: Synthetic oligonucleotide
  Antisense strand to SEQ ID NO: 1794505
aaacuccaggcacaucuag

SEQ ID NO: 1794507 - RNA, 19 nt, Artificial Sequence
  Description of Artificial Sequence: Synthetic oligonucleotide
  Sense strand starting at position 2784 of SEQ ID NO: 1563090
uggaguuuaaagggagagu

SEQ ID NO: 1794508 - RNA, 19 nt, Artificial Sequence
  Description of Artificial Sequence: Synthetic oligonucleotide
  Antisense strand to SEQ ID NO: 1794507
acucucccuuuaaacucca

SEQ ID NO: 1794509 - RNA, 19 nt, Artificial Sequence
  Description of Artificial Sequence: Synthetic oligonucleotide
  Sense strand starting at position 2976 of SEQ ID NO: 1563090
agguguuggcuggaacaca

SEQ ID NO: 1794510 - RNA, 19 nt, Artificial Sequence
  Description of Artificial Sequence: Synthetic oligonucleotide
  Antisense strand to SEQ ID NO: 1794509
uguguuccagccaacaccu

SEQ ID NO: 1794511 - RNA, 19 nt, Artificial Sequence
  Description of Artificial Sequence: Synthetic oligonucleotide
  Sense strand starting at position 3050 of SEQ ID NO: 1563090
aggaucguucugggaaugu

SEQ ID NO: 1794512 - RNA, 19 nt, Artificial Sequence
  Description of Artificial Sequence: Synthetic oligonucleotide
  Antisense strand to SEQ ID NO: 1794511
acauucccagaacgauccu

SEQ ID NO: 1794513 - RNA, 19 nt, Artificial Sequence
  Description of Artificial Sequence: Synthetic oligonucleotide
  Sense strand starting at position 3077 of SEQ ID NO: 1563090
gcuguuaggagcuauguua

SEQ ID NO: 1794514 - RNA, 19 nt, Artificial Sequence
  Description of Artificial Sequence: Synthetic oligonucleotide
  Antisense strand to SEQ ID NO: 1794513
uaacauagcuccuaacagc

SEQ ID NO: 1794515 - RNA, 19 nt, Artificial Sequence
  Description of Artificial Sequence: Synthetic oligonucleotide
  Sense strand starting at position 3086 of SEQ ID NO: 1563090
agcuauguuaguguucguu

SEQ ID NO: 1794516 - RNA, 19 nt, Artificial Sequence
  Description of Artificial Sequence: Synthetic oligonucleotide
  Antisense strand to SEQ ID NO: 1794515
aacgaacacuaacauagcu

SEQ ID NO: 1794517 - RNA, 19 nt, Artificial Sequence
  Description of Artificial Sequence: Synthetic oligonucleotide
  Sense strand starting at position 3096 of SEQ ID NO: 1563090
guguucguuccagccuaga

SEQ ID NO: 1794518 - RNA, 19 nt, Artificial Sequence
  Description of Artificial Sequence: Synthetic oligonucleotide
  Antisense strand to SEQ ID NO: 1794517
ucuaggcuggaacgaacac

SEQ ID NO: 1794519 - RNA, 19 nt, Artificial Sequence
  Description of Artificial Sequence: Synthetic oligonucleotide
  Sense strand starting at position 3286 of SEQ ID NO: 1563090
gcgggaccaucuguugaga

SEQ ID NO: 1794520 - RNA, 19 nt, Artificial Sequence
  Description of Artificial Sequence: Synthetic oligonucleotide
  Antisense strand to SEQ ID NO: 1794519
ucucaacagauggucccgc

SEQ ID NO: 1794521 - RNA, 19 nt, Artificial Sequence
  Description of Artificial Sequence: Synthetic oligonucleotide
  Sense strand starting at position 3297 of SEQ ID NO: 1563090
uguugagacuugguagcaa

SEQ ID NO: 1794522 - RNA, 19 nt, Artificial Sequence
  Description of Artificial Sequence: Synthetic oligonucleotide
  Antisense strand to SEQ ID NO: 1794521
uugcuaccaagucucaaca

SEQ ID NO: 1794523 - RNA, 19 nt, Artificial Sequence
  Description of Artificial Sequence: Synthetic oligonucleotide
  Sense strand starting at position 3328 of SEQ ID NO: 1563090
ggaugaugcaagcagucaa

SEQ ID NO: 1794524 - RNA, 19 nt, Artificial Sequence
  Description of Artificial Sequence: Synthetic oligonucleotide
  Antisense strand to SEQ ID NO: 1794523
uugacugcuugcaucaucc

SEQ ID NO: 1794525 - RNA, 19 nt, Artificial Sequence
  Description of Artificial Sequence: Synthetic oligonucleotide
  Sense strand starting at position 3343 of SEQ ID NO: 1563090
ucaagcauuuaaugaggaa

SEQ ID NO: 1794526 - RNA, 19 nt, Artificial Sequence
  Description of Artificial Sequence: Synthetic oligonucleotide
  Antisense strand to SEQ ID NO: 1794525
uuccucauuaaaugcuuga

SEQ ID NO: 1794527 - RNA, 19 nt, Artificial Sequence
  Description of Artificial Sequence: Synthetic oligonucleotide
  Sense strand starting at position 3346 of SEQ ID NO: 1563090
agcauuuaaugaggaaaca

SEQ ID NO: 1794528 - RNA, 19 nt, Artificial Sequence
  Description of Artificial Sequence: Synthetic oligonucleotide
  Antisense strand to SEQ ID NO: 1794527
uguuuccucauuaaaugcu

SEQ ID NO: 1794529 - RNA, 19 nt, Artificial Sequence
  Description of Artificial Sequence: Synthetic oligonucleotide
  Sense strand starting at position 3514 of SEQ ID NO: 1563090
guggcaugggccuauaguu

SEQ ID NO: 1794530 - RNA, 19 nt, Artificial Sequence
  Description of Artificial Sequence: Synthetic oligonucleotide
  Antisense strand to SEQ ID NO: 1794529
aacuauaggcccaugccac

SEQ ID NO: 1794531 - RNA, 19 nt, Artificial Sequence
  Description of Artificial Sequence: Synthetic oligonucleotide
  Sense strand starting at position 3708 of SEQ ID NO: 1563090
gaugaauggagcuguugau

SEQ ID NO: 1794532 - RNA, 19 nt, Artificial Sequence
  Description of Artificial Sequence: Synthetic oligonucleotide
  Antisense strand to SEQ ID NO: 1794531
aucaacagcuccauucauc

SEQ ID NO: 1794533 - RNA, 19 nt, Artificial Sequence
  Description of Artificial Sequence: Synthetic oligonucleotide
  Sense strand starting at position 3822 of SEQ ID NO: 1563090
uggugugaagucugugaug

SEQ ID NO: 1794534 - RNA, 19 nt, Artificial Sequence
  Description of Artificial Sequence: Synthetic oligonucleotide
  Antisense strand to SEQ ID NO: 1794533
caucacagacuucacacca

SEQ ID NO: 1794535 - RNA, 19 nt, Artificial Sequence
  Description of Artificial Sequence: Synthetic oligonucleotide
  Sense strand starting at position 3824 of SEQ ID NO: 1563090
gugugaagucugugaugau

SEQ ID NO: 1794536 - RNA, 19 nt, Artificial Sequence
  Description of Artificial Sequence: Synthetic oligonucleotide
  Antisense strand to SEQ ID NO: 1794535
aucaucacagacuucacac

SEQ ID NO: 1794537 - RNA, 19 nt, Artificial Sequence
  Description of Artificial Sequence: Synthetic oligonucleotide
  Sense strand starting at position 215 of SEQ ID NO: 1563091
ccgccagccaucugugauu

SEQ ID NO: 1794538 - RNA, 19 nt, Artificial Sequence
  Description of Artificial Sequence: Synthetic oligonucleotide
  Antisense strand to SEQ ID NO: 1794537
aaucacagauggcuggcgg

SEQ ID NO: 1794539 - RNA, 19 nt, Artificial Sequence
  Description of Artificial Sequence: Synthetic oligonucleotide
  Sense strand starting at position 291 of SEQ ID NO: 1563091
ggcccagugacucaugagu

SEQ ID NO: 1794540 - RNA, 19 nt, Artificial Sequence
  Description of Artificial Sequence: Synthetic oligonucleotide
  Antisense strand to SEQ ID NO: 1794539
acucaugagucacugggcc

SEQ ID NO: 1794541 - RNA, 19 nt, Artificial Sequence
  Description of Artificial Sequence: Synthetic oligonucleotide
  Sense strand starting at position 293 of SEQ ID NO: 1563091
cccagugacucaugaguaa

SEQ ID NO: 1794542 - RNA, 19 nt, Artificial Sequence
  Description of Artificial Sequence: Synthetic oligonucleotide
  Antisense strand to SEQ ID NO: 1794541
uuacucaugagucacuggg

SEQ ID NO: 1794543 - RNA, 19 nt, Artificial Sequence
  Description of Artificial Sequence: Synthetic oligonucleotide
  Sense strand starting at position 297 of SEQ ID NO: 1563091
gugacucaugaguaaccuu

SEQ ID NO: 1794544 - RNA, 19 nt, Artificial Sequence
  Description of Artificial Sequence: Synthetic oligonucleotide
  Antisense strand to SEQ ID NO: 1794543
aagguuacucaugagucac

SEQ ID NO: 1794545 - RNA, 19 nt, Artificial Sequence
  Description of Artificial Sequence: Synthetic oligonucleotide
  Sense strand starting at position 304 of SEQ ID NO: 1563091
augaguaaccuugaccagu

SEQ ID NO: 1794546 - RNA, 19 nt, Artificial Sequence
  Description of Artificial Sequence: Synthetic oligonucleotide
  Antisense strand to SEQ ID NO: 1794545
acuggucaagguuacucau

SEQ ID NO: 1794547 - RNA, 19 nt, Artificial Sequence
  Description of Artificial Sequence: Synthetic oligonucleotide
  Sense strand starting at position 313 of SEQ ID NO: 1563091
cuugaccaguguucucauu

SEQ ID NO: 1794548 - RNA, 19 nt, Artificial Sequence
  Description of Artificial Sequence: Synthetic oligonucleotide
  Antisense strand to SEQ ID NO: 1794547
aaugagaacacuggucaag

SEQ ID NO: 1794549 - RNA, 19 nt, Artificial Sequence
  Description of Artificial Sequence: Synthetic oligonucleotide
  Sense strand starting at position 315 of SEQ ID NO: 1563091
ugaccaguguucucauuag

SEQ ID NO: 1794550 - RNA, 19 nt, Artificial Sequence
  Description of Artificial Sequence: Synthetic oligonucleotide
  Antisense strand to SEQ ID NO: 1794549
cuaaugagaacacugguca

SEQ ID NO: 1794551 - RNA, 19 nt, Artificial Sequence
  Description of Artificial Sequence: Synthetic oligonucleotide
  Sense strand starting at position 342 of SEQ ID NO: 1563091
augauccaccagugaucuu

SEQ ID NO: 1794552 - RNA, 19 nt, Artificial Sequence
  Description of Artificial Sequence: Synthetic oligonucleotide
  Antisense strand to SEQ ID NO: 1794551
aagaucacugguggaucau

SEQ ID NO: 1794553 - RNA, 19 nt, Artificial Sequence
  Description of Artificial Sequence: Synthetic oligonucleotide
  Sense strand starting at position 362 of SEQ ID NO: 1563091
uagugauucuggccagggu

SEQ ID NO: 1794554 - RNA, 19 nt, Artificial Sequence
  Description of Artificial Sequence: Synthetic oligonucleotide
  Antisense strand to SEQ ID NO: 1794553
acccuggccagaaucacua

SEQ ID NO: 1794555 - RNA, 19 nt, Artificial Sequence
  Description of Artificial Sequence: Synthetic oligonucleotide
  Sense strand starting at position 396 of SEQ ID NO: 1563091
ggauuaaugacugauccgu

SEQ ID NO: 1794556 - RNA, 19 nt, Artificial Sequence
  Description of Artificial Sequence: Synthetic oligonucleotide
  Antisense strand to SEQ ID NO: 1794555
acggaucagucauuaaucc

SEQ ID NO: 1794557 - RNA, 19 nt, Artificial Sequence
  Description of Artificial Sequence: Synthetic oligonucleotide
  Sense strand starting at position 432 of SEQ ID NO: 1563091
cugggcucuggaugacauu

SEQ ID NO: 1794558 - RNA, 19 nt, Artificial Sequence
  Description of Artificial Sequence: Synthetic oligonucleotide
  Antisense strand to SEQ ID NO: 1794557
aaugucauccagagcccag

SEQ ID NO: 1794559 - RNA, 19 nt, Artificial Sequence
  Description of Artificial Sequence: Synthetic oligonucleotide
  Sense strand starting at position 435 of SEQ ID NO: 1563091
ggcucuggaugacauugaa

SEQ ID NO: 1794560 - RNA, 19 nt, Artificial Sequence
  Description of Artificial Sequence: Synthetic oligonucleotide
  Antisense strand to SEQ ID NO: 1794559
uucaaugucauccagagcc

SEQ ID NO: 1794561 - RNA, 19 nt, Artificial Sequence
  Description of Artificial Sequence: Synthetic oligonucleotide
  Sense strand starting at position 542 of SEQ ID NO: 1563091
cugaguacccugcacagua

SEQ ID NO: 1794562 - RNA, 19 nt, Artificial Sequence
  Description of Artificial Sequence: Synthetic oligonucleotide
  Antisense strand to SEQ ID NO: 1794561
uacugugcaggguacucag

SEQ ID NO: 1794563 - RNA, 19 nt, Artificial Sequence
  Description of Artificial Sequence: Synthetic oligonucleotide
  Sense strand starting at position 677 of SEQ ID NO: 1563091
uuucuugguugagaagugu

SEQ ID NO: 1794564 - RNA, 19 nt, Artificial Sequence
  Description of Artificial Sequence: Synthetic oligonucleotide
  Antisense strand to SEQ ID NO: 1794563
acacuucucaaccaagaaa

SEQ ID NO: 1794565 - RNA, 19 nt, Artificial Sequence
  Description of Artificial Sequence: Synthetic oligonucleotide
  Sense strand starting at position 681 of SEQ ID NO: 1563091
uugguugagaagugucagu

SEQ ID NO: 1794566 - RNA, 19 nt, Artificial Sequence
  Description of Artificial Sequence: Synthetic oligonucleotide
  Antisense strand to SEQ ID NO: 1794565
acugacacuucucaaccaa

SEQ ID NO: 1794567 - RNA, 19 nt, Artificial Sequence
  Description of Artificial Sequence: Synthetic oligonucleotide
  Sense strand starting at position 750 of SEQ ID NO: 1563091
ggaggaaaguccucagcuc

SEQ ID NO: 1794568 - RNA, 19 nt, Artificial Sequence
  Description of Artificial Sequence: Synthetic oligonucleotide
  Antisense strand to SEQ ID NO: 1794567
gagcugaggacuuuccucc

SEQ ID NO: 1794569 - RNA, 19 nt, Artificial Sequence
  Description of Artificial Sequence: Synthetic oligonucleotide
  Sense strand starting at position 807 of SEQ ID NO: 1563091
gggucugaauuccaucagu

SEQ ID NO: 1794570 - RNA, 19 nt, Artificial Sequence
  Description of Artificial Sequence: Synthetic oligonucleotide
  Antisense strand to SEQ ID NO: 1794569
acugauggaauucagaccc

SEQ ID NO: 1794571 - RNA, 19 nt, Artificial Sequence
  Description of Artificial Sequence: Synthetic oligonucleotide
  Sense strand starting at position 1035 of SEQ ID NO: 1563091
ggaggugguuucuaaccuu

SEQ ID NO: 1794572 - RNA, 19 nt, Artificial Sequence
  Description of Artificial Sequence: Synthetic oligonucleotide
  Antisense strand to SEQ ID NO: 1794571
aagguuagaaaccaccucc

SEQ ID NO: 1794573 - RNA, 19 nt, Artificial Sequence
  Description of Artificial Sequence: Synthetic oligonucleotide
  Sense strand starting at position 1038 of SEQ ID NO: 1563091
ggugguuucuaaccuugca

SEQ ID NO: 1794574 - RNA, 19 nt, Artificial Sequence
  Description of Artificial Sequence: Synthetic oligonucleotide
  Antisense strand to SEQ ID NO: 1794573
ugcaagguuagaaaccacc

SEQ ID NO: 1794575 - RNA, 19 nt, Artificial Sequence
  Description of Artificial Sequence: Synthetic oligonucleotide
  Sense strand starting at position 1115 of SEQ ID NO: 1563091
guggaaugcuuguccacaa

SEQ ID NO: 1794576 - RNA, 19 nt, Artificial Sequence
  Description of Artificial Sequence: Synthetic oligonucleotide
  Antisense strand to SEQ ID NO: 1794575
uuguggacaagcauuccac

SEQ ID NO: 1794577 - RNA, 19 nt, Artificial Sequence
  Description of Artificial Sequence: Synthetic oligonucleotide
  Sense strand starting at position 1203 of SEQ ID NO: 1563091
aggucuccuccagauccau

SEQ ID NO: 1794578 - RNA, 19 nt, Artificial Sequence
  Description of Artificial Sequence: Synthetic oligonucleotide
  Antisense strand to SEQ ID NO: 1794577
auggaucuggaggagaccu

SEQ ID NO: 1794579 - RNA, 19 nt, Artificial Sequence
  Description of Artificial Sequence: Synthetic oligonucleotide
  Sense strand starting at position 2141 of SEQ ID NO: 1563091
gucuguggcucccgagagu

SEQ ID NO: 1794580 - RNA, 19 nt, Artificial Sequence
  Description of Artificial Sequence: Synthetic oligonucleotide
  Antisense strand to SEQ ID NO: 1794579
acucucgggagccacagac

SEQ ID NO: 1794581 - RNA, 19 nt, Artificial Sequence
  Description of Artificial Sequence: Synthetic oligonucleotide
  Sense strand starting at position 2341 of SEQ ID NO: 1563091
ugcggacucgcagacuuua

SEQ ID NO: 1794582 - RNA, 19 nt, Artificial Sequence
  Description of Artificial Sequence: Synthetic oligonucleotide
  Antisense strand to SEQ ID NO: 1794581
uaaagucugcgaguccgca

SEQ ID NO: 1794583 - RNA, 19 nt, Artificial Sequence
  Description of Artificial Sequence: Synthetic oligonucleotide
  Sense strand starting at position 2394 of SEQ ID NO: 1563091
gucaguuguccgcgucggu

SEQ ID NO: 1794584 - RNA, 19 nt, Artificial Sequence
  Description of Artificial Sequence: Synthetic oligonucleotide
  Antisense strand to SEQ ID NO: 1794583
accgacgcggacaacugac

SEQ ID NO: 1794585 - RNA, 19 nt, Artificial Sequence
  Description of Artificial Sequence: Synthetic oligonucleotide
  Sense strand starting at position 2623 of SEQ ID NO: 1563091
ccaccugauccacguugua

SEQ ID NO: 1794586 - RNA, 19 nt, Artificial Sequence
  Description of Artificial Sequence: Synthetic oligonucleotide
  Antisense strand to SEQ ID NO: 1794585
uacaacguggaucaggugg

SEQ ID NO: 1794587 - RNA, 19 nt, Artificial Sequence
  Description of Artificial Sequence: Synthetic oligonucleotide
  Sense strand starting at position 2689 of SEQ ID NO: 1563091
gcgccagaaucgugaacug

SEQ ID NO: 1794588 - RNA, 19 nt, Artificial Sequence
  Description of Artificial Sequence: Synthetic oligonucleotide
  Antisense strand to SEQ ID NO: 1794587
caguucacgauucuggcgc

SEQ ID NO: 1794589 - RNA, 19 nt, Artificial Sequence
  Description of Artificial Sequence: Synthetic oligonucleotide
  Sense strand starting at position 2854 of SEQ ID NO: 1563091
ugcugagguccucgaagaa

SEQ ID NO: 1794590 - RNA, 19 nt, Artificial Sequence
  Description of Artificial Sequence: Synthetic oligonucleotide
  Antisense strand to SEQ ID NO: 1794589
uucuucgaggaccucagca

SEQ ID NO: 1794591 - RNA, 19 nt, Artificial Sequence
  Description of Artificial Sequence: Synthetic oligonucleotide
  Sense strand starting at position 3293 of SEQ ID NO: 1563091
gggagucugagccacgauu

SEQ ID NO: 1794592 - RNA, 19 nt, Artificial Sequence
  Description of Artificial Sequence: Synthetic oligonucleotide
  Antisense strand to SEQ ID NO: 1794591
aaucguggcucagacuccc

SEQ ID NO: 1794593 - RNA, 19 nt, Artificial Sequence
  Description of Artificial Sequence: Synthetic oligonucleotide
  Sense strand starting at position 3365 of SEQ ID NO: 1563091
uaccgaauaugcgguguua

SEQ ID NO: 1794594 - RNA, 19 nt, Artificial Sequence
  Description of Artificial Sequence: Synthetic oligonucleotide
  Antisense strand to SEQ ID NO: 1794593
uaacaccgcauauucggua

SEQ ID NO: 1794595 - RNA, 19 nt, Artificial Sequence
  Description of Artificial Sequence: Synthetic oligonucleotide
  Sense strand starting at position 3692 of SEQ ID NO: 1563091
ggagcauccgaguuagcgu

SEQ ID NO: 1794596 - RNA, 19 nt, Artificial Sequence
  Description of Artificial Sequence: Synthetic oligonucleotide
  Antisense strand to SEQ ID NO: 1794595
acgcuaacucggaugcucc

SEQ ID NO: 1794597 - RNA, 19 nt, Artificial Sequence
  Description of Artificial Sequence: Synthetic oligonucleotide
  Sense strand starting at position 1640 of SEQ ID NO: 1563092
gcuguuauacccugcaaga

SEQ ID NO: 1794598 - RNA, 19 nt, Artificial Sequence
  Description of Artificial Sequence: Synthetic oligonucleotide
  Antisense strand to SEQ ID NO: 1794597
ucuugcaggguauaacagc

SEQ ID NO: 1794599 - RNA, 19 nt, Artificial Sequence
  Description of Artificial Sequence: Synthetic oligonucleotide
  Sense strand starting at position 3902 of SEQ ID NO: 1563092
ggagcaccguauuggaauu

SEQ ID NO: 1794600 - RNA, 19 nt, Artificial Sequence
  Description of Artificial Sequence: Synthetic oligonucleotide
  Antisense strand to SEQ ID NO: 1794599
aauuccaauacggugcucc

SEQ ID NO: 1794601 - RNA, 19 nt, Artificial Sequence
  Description of Artificial Sequence: Synthetic oligonucleotide
  Sense strand starting at position 58 of SEQ ID NO: 1563093
gcaccugagagaugaggau

SEQ ID NO: 1794602 - RNA, 19 nt, Artificial Sequence
  Description of Artificial Sequence: Synthetic oligonucleotide
  Antisense strand to SEQ ID NO: 1794601
auccucaucucucaggugc

SEQ ID NO: 1794603 - RNA, 19 nt, Artificial Sequence
  Description of Artificial Sequence: Synthetic oligonucleotide
  Sense strand starting at position 113 of SEQ ID NO: 1563093
aggcaugcacuccagaaau

SEQ ID NO: 1794604 - RNA, 19 nt, Artificial Sequence
  Description of Artificial Sequence: Synthetic oligonucleotide
  Antisense strand to SEQ ID NO: 1794603
auuucuggagugcaugccu

SEQ ID NO: 1794605 - RNA, 19 nt, Artificial Sequence
  Description of Artificial Sequence: Synthetic oligonucleotide
  Sense strand starting at position 115 of SEQ ID NO: 1563093
gcaugcacuccagaaaucu

SEQ ID NO: 1794606 - RNA, 19 nt, Artificial Sequence
  Description of Artificial Sequence: Synthetic oligonucleotide
  Antisense strand to SEQ ID NO: 1794605
agauuucuggagugcaugc

SEQ ID NO: 1794607 - RNA, 19 nt, Artificial Sequence
  Description of Artificial Sequence: Synthetic oligonucleotide
  Sense strand starting at position 393 of SEQ ID NO: 1563093
ccaggagugcugggauuac

SEQ ID NO: 1794608 - RNA, 19 nt, Artificial Sequence
  Description of Artificial Sequence: Synthetic oligonucleotide
  Antisense strand to SEQ ID NO: 1794607
guaaucccagcacuccugg

SEQ ID NO: 1794609 - RNA, 19 nt, Artificial Sequence
  Description of Artificial Sequence: Synthetic oligonucleotide
  Sense strand starting at position 431 of SEQ ID NO: 1563093
cggccugcacuccagaaau

SEQ ID NO: 1794610 - RNA, 19 nt, Artificial Sequence
  Description of Artificial Sequence: Synthetic oligonucleotide
  Antisense strand to SEQ ID NO: 1794609
auuucuggagugcaggccg

SEQ ID NO: 1794611 - RNA, 19 nt, Artificial Sequence
  Description of Artificial Sequence: Synthetic oligonucleotide
  Sense strand starting at position 433 of SEQ ID NO: 1563093
gccugcacuccagaaaucu

SEQ ID NO: 1794612 - RNA, 19 nt, Artificial Sequence
  Description of Artificial Sequence: Synthetic oligonucleotide
  Antisense strand to SEQ ID NO: 1794611
agauuucuggagugcaggc

SEQ ID NO: 1794613 - RNA, 19 nt, Artificial Sequence
  Description of Artificial Sequence: Synthetic oligonucleotide
  Sense strand starting at position 528 of SEQ ID NO: 1563093
cccuuaucuggugaauggu

SEQ ID NO: 1794614 - RNA, 19 nt, Artificial Sequence
  Description of Artificial Sequence: Synthetic oligonucleotide
  Antisense strand to SEQ ID NO: 1794613
accauucaccagauaaggg

SEQ ID NO: 1794615 - RNA, 19 nt, Artificial Sequence
  Description of Artificial Sequence: Synthetic oligonucleotide
  Sense strand starting at position 546 of SEQ ID NO: 1563093
uggugucacuagcuuaaga

SEQ ID NO: 1794616 - RNA, 19 nt, Artificial Sequence
  Description of Artificial Sequence: Synthetic oligonucleotide
  Antisense strand to SEQ ID NO: 1794615
ucuuaagcuagugacacca

SEQ ID NO: 1794617 - RNA, 19 nt, Artificial Sequence
  Description of Artificial Sequence: Synthetic oligonucleotide
  Sense strand starting at position 548 of SEQ ID NO: 1563093
gugucacuagcuuaagaga

SEQ ID NO: 1794618 - RNA, 19 nt, Artificial Sequence
  Description of Artificial Sequence: Synthetic oligonucleotide
  Antisense strand to SEQ ID NO: 1794617
ucucuuaagcuagugacac

SEQ ID NO: 1794619 - RNA, 19 nt, Artificial Sequence
  Description of Artificial Sequence: Synthetic oligonucleotide
  Sense strand starting at position 551 of SEQ ID NO: 1563093
ucacuagcuuaagagauga

SEQ ID NO: 1794620 - RNA, 19 nt, Artificial Sequence
  Description of Artificial Sequence: Synthetic oligonucleotide
  Antisense strand to SEQ ID NO: 1794619
ucaucucuuaagcuaguga

SEQ ID NO: 1794621 - RNA, 19 nt, Artificial Sequence
  Description of Artificial Sequence: Synthetic oligonucleotide
  Sense strand starting at position 577 of SEQ ID NO: 1563093
ucugaaguccucugacugu

SEQ ID NO: 1794622 - RNA, 19 nt, Artificial Sequence
  Description of Artificial Sequence: Synthetic oligonucleotide
  Antisense strand to SEQ ID NO: 1794621
acagucagaggacuucaga

SEQ ID NO: 1794623 - RNA, 19 nt, Artificial Sequence
  Description of Artificial Sequence: Synthetic oligonucleotide
  Sense strand starting at position 639 of SEQ ID NO: 1563093
cucucuagcccuuagggaa

SEQ ID NO: 1794624 - RNA, 19 nt, Artificial Sequence
  Description of Artificial Sequence: Synthetic oligonucleotide
  Antisense strand to SEQ ID NO: 1794623
uucccuaagggcuagagag

SEQ ID NO: 1794625 - RNA, 19 nt, Artificial Sequence
  Description of Artificial Sequence: Synthetic oligonucleotide
  Sense strand starting at position 687 of SEQ ID NO: 1563093
agggaaugcucagagacug

SEQ ID NO: 1794626 - RNA, 19 nt, Artificial Sequence
  Description of Artificial Sequence: Synthetic oligonucleotide
  Antisense strand to SEQ ID NO: 1794625
cagucucugagcauucccu

SEQ ID NO: 1794627 - RNA, 19 nt, Artificial Sequence
  Description of Artificial Sequence: Synthetic oligonucleotide
  Sense strand starting at position 888 of SEQ ID NO: 1563093
uggcaaauccacuggcaaa

SEQ ID NO: 1794628 - RNA, 19 nt, Artificial Sequence
  Description of Artificial Sequence: Synthetic oligonucleotide
  Antisense strand to SEQ ID NO: 1794627
uuugccaguggauuugcca

SEQ ID NO: 1794629 - RNA, 19 nt, Artificial Sequence
  Description of Artificial Sequence: Synthetic oligonucleotide
  Sense strand starting at position 915 of SEQ ID NO: 1563093
gccaauuuagcauguguuc

SEQ ID NO: 1794630 - RNA, 19 nt, Artificial Sequence
  Description of Artificial Sequence: Synthetic oligonucleotide
  Antisense strand to SEQ ID NO: 1794629
gaacacaugcuaaauuggc

SEQ ID NO: 1794631 - RNA, 19 nt, Artificial Sequence
  Description of Artificial Sequence: Synthetic oligonucleotide
  Sense strand starting at position 924 of SEQ ID NO: 1563093
gcauguguuccucaccaaa

SEQ ID NO: 1794632 - RNA, 19 nt, Artificial Sequence
  Description of Artificial Sequence: Synthetic oligonucleotide
  Antisense strand to SEQ ID NO: 1794631
uuuggugaggaacacaugc

SEQ ID NO: 1794633 - RNA, 19 nt, Artificial Sequence
  Description of Artificial Sequence: Synthetic oligonucleotide
  Sense strand starting at position 945 of SEQ ID NO: 1563093
gugccaauuagcgagaaag

SEQ ID NO: 1794634 - RNA, 19 nt, Artificial Sequence
  Description of Artificial Sequence: Synthetic oligonucleotide
  Antisense strand to SEQ ID NO: 1794633
cuuucucgcuaauuggcac

SEQ ID NO: 1794635 - RNA, 19 nt, Artificial Sequence
  Description of Artificial Sequence: Synthetic oligonucleotide
  Sense strand starting at position 947 of SEQ ID NO: 1563093
gccaauuagcgagaaagca

SEQ ID NO: 1794636 - RNA, 19 nt, Artificial Sequence
  Description of Artificial Sequence: Synthetic oligonucleotide
  Antisense strand to SEQ ID NO: 1794635
ugcuuucucgcuaauuggc

SEQ ID NO: 1794637 - RNA, 19 nt, Artificial Sequence
  Description of Artificial Sequence: Synthetic oligonucleotide
  Sense strand starting at position 1021 of SEQ ID NO: 1563093
uuugauucgaacgacugaa

SEQ ID NO: 1794638 - RNA, 19 nt, Artificial Sequence
  Description of Artificial Sequence: Synthetic oligonucleotide
  Antisense strand to SEQ ID NO: 1794637
uucagucguucgaaucaaa

SEQ ID NO: 1794639 - RNA, 19 nt, Artificial Sequence
  Description of Artificial Sequence: Synthetic oligonucleotide
  Sense strand starting at position 1163 of SEQ ID NO: 1563093
gaacuuacccgcuguguga

SEQ ID NO: 1794640 - RNA, 19 nt, Artificial Sequence
  Description of Artificial Sequence: Synthetic oligonucleotide
  Antisense strand to SEQ ID NO: 1794639
ucacacagcggguaaguuc

SEQ ID NO: 1794641 - RNA, 19 nt, Artificial Sequence
  Description of Artificial Sequence: Synthetic oligonucleotide
  Sense strand starting at position 2008 of SEQ ID NO: 1563093
cguccaaucagauggcagu

SEQ ID NO: 1794642 - RNA, 19 nt, Artificial Sequence
  Description of Artificial Sequence: Synthetic oligonucleotide
  Antisense strand to SEQ ID NO: 1794641
acugccaucugauuggacg

SEQ ID NO: 1794643 - RNA, 19 nt, Artificial Sequence
  Description of Artificial Sequence: Synthetic oligonucleotide
  Sense strand starting at position 2384 of SEQ ID NO: 1563093
uugaauaaccaagguuacu

SEQ ID NO: 1794644 - RNA, 19 nt, Artificial Sequence
  Description of Artificial Sequence: Synthetic oligonucleotide
  Antisense strand to SEQ ID NO: 1794643
aguaaccuugguuauucaa

SEQ ID NO: 1794645 - RNA, 19 nt, Artificial Sequence
  Description of Artificial Sequence: Synthetic oligonucleotide
  Sense strand starting at position 2408 of SEQ ID NO: 1563093
cugccaagcucugugaaga

SEQ ID NO: 1794646 - RNA, 19 nt, Artificial Sequence
  Description of Artificial Sequence: Synthetic oligonucleotide
  Antisense strand to SEQ ID NO: 1794645
ucuucacagagcuuggcag

SEQ ID NO: 1794647 - RNA, 19 nt, Artificial Sequence
  Description of Artificial Sequence: Synthetic oligonucleotide
  Sense strand starting at position 2409 of SEQ ID NO: 1563093
ugccaagcucugugaagaa

SEQ ID NO: 1794648 - RNA, 19 nt, Artificial Sequence
  Description of Artificial Sequence: Synthetic oligonucleotide
  Antisense strand to SEQ ID NO: 1794647
uucuucacagagcuuggca

SEQ ID NO: 1794649 - RNA, 19 nt, Artificial Sequence
  Description of Artificial Sequence: Synthetic oligonucleotide
  Sense strand starting at position 2454 of SEQ ID NO: 1563093
gggacauacuuugagaggu

SEQ ID NO: 1794650 - RNA, 19 nt, Artificial Sequence
  Description of Artificial Sequence: Synthetic oligonucleotide
  Antisense strand to SEQ ID NO: 1794649
accucucaaaguauguccc

SEQ ID NO: 1794651 - RNA, 19 nt, Artificial Sequence
  Description of Artificial Sequence: Synthetic oligonucleotide
  Sense strand starting at position 2456 of SEQ ID NO: 1563093
gacauacuuugagagguca

SEQ ID NO: 1794652 - RNA, 19 nt, Artificial Sequence
  Description of Artificial Sequence: Synthetic oligonucleotide
  Antisense strand to SEQ ID NO: 1794651
ugaccucucaaaguauguc

SEQ ID NO: 1794653 - RNA, 19 nt, Artificial Sequence
  Description of Artificial Sequence: Synthetic oligonucleotide
  Sense strand starting at position 2517 of SEQ ID NO: 1563093
ucucucuagugcuuuauuu

SEQ ID NO: 1794654 - RNA, 19 nt, Artificial Sequence
  Description of Artificial Sequence: Synthetic oligonucleotide
  Antisense strand to SEQ ID NO: 1794653
aaauaaagcacuagagaga

SEQ ID NO: 1794655 - RNA, 19 nt, Artificial Sequence
  Description of Artificial Sequence: Synthetic oligonucleotide
  Sense strand starting at position 2553 of SEQ ID NO: 1563093
cauccucugggauacguua

SEQ ID NO: 1794656 - RNA, 19 nt, Artificial Sequence
  Description of Artificial Sequence: Synthetic oligonucleotide
  Antisense strand to SEQ ID NO: 1794655
uaacguaucccagaggaug

SEQ ID NO: 1794657 - RNA, 19 nt, Artificial Sequence
  Description of Artificial Sequence: Synthetic oligonucleotide
  Sense strand starting at position 2560 of SEQ ID NO: 1563093
ugggauacguuagcauuaa

SEQ ID NO: 1794658 - RNA, 19 nt, Artificial Sequence
  Description of Artificial Sequence: Synthetic oligonucleotide
  Antisense strand to SEQ ID NO: 1794657
uuaaugcuaacguauccca

SEQ ID NO: 1794659 - RNA, 19 nt, Artificial Sequence
  Description of Artificial Sequence: Synthetic oligonucleotide
  Sense strand starting at position 2564 of SEQ ID NO: 1563093
auacguuagcauuaacauc

SEQ ID NO: 1794660 - RNA, 19 nt, Artificial Sequence
  Description of Artificial Sequence: Synthetic oligonucleotide
  Antisense strand to SEQ ID NO: 1794659
gauguuaaugcuaacguau

SEQ ID NO: 1794661 - RNA, 19 nt, Artificial Sequence
  Description of Artificial Sequence: Synthetic oligonucleotide
  Sense strand starting at position 2790 of SEQ ID NO: 1563093
cugucucaguguccagaau

SEQ ID NO: 1794662 - RNA, 19 nt, Artificial Sequence
  Description of Artificial Sequence: Synthetic oligonucleotide
  Antisense strand to SEQ ID NO: 1794661
auucuggacacugagacag

SEQ ID NO: 1794663 - RNA, 19 nt, Artificial Sequence
  Description of Artificial Sequence: Synthetic oligonucleotide
  Sense strand starting at position 2796 of SEQ ID NO: 1563093
caguguccagaauggagua

SEQ ID NO: 1794664 - RNA, 19 nt, Artificial Sequence
  Description of Artificial Sequence: Synthetic oligonucleotide
  Antisense strand to SEQ ID NO: 1794663
uacuccauucuggacacug

SEQ ID NO: 1794665 - RNA, 19 nt, Artificial Sequence
  Description of Artificial Sequence: Synthetic oligonucleotide
  Sense strand starting at position 2880 of SEQ ID NO: 1563093
guugguuucuauuccaugu

SEQ ID NO: 1794666 - RNA, 19 nt, Artificial Sequence
  Description of Artificial Sequence: Synthetic oligonucleotide
  Antisense strand to SEQ ID NO: 1794665
acauggaauagaaaccaac

SEQ ID NO: 1794667 - RNA, 19 nt, Artificial Sequence
  Description of Artificial Sequence: Synthetic oligonucleotide
  Sense strand starting at position 2902 of SEQ ID NO: 1563093
gugagaggucuuugauaga

SEQ ID NO: 1794668 - RNA, 19 nt, Artificial Sequence
  Description of Artificial Sequence: Synthetic oligonucleotide
  Antisense strand to SEQ ID NO: 1794667
ucuaucaaagaccucucac

SEQ ID NO: 1794669 - RNA, 19 nt, Artificial Sequence
  Description of Artificial Sequence: Synthetic oligonucleotide
  Sense strand starting at position 2905 of SEQ ID NO: 1563093
agaggucuuugauagauau

SEQ ID NO: 1794670 - RNA, 19 nt, Artificial Sequence
  Description of Artificial Sequence: Synthetic oligonucleotide
  Antisense strand to SEQ ID NO: 1794669
auaucuaucaaagaccucu

SEQ ID NO: 1794671 - RNA, 19 nt, Artificial Sequence
  Description of Artificial Sequence: Synthetic oligonucleotide
  Sense strand starting at position 2909 of SEQ ID NO: 1563093
gucuuugauagauaugagu

SEQ ID NO: 1794672 - RNA, 19 nt, Artificial Sequence
  Description of Artificial Sequence: Synthetic oligonucleotide
  Antisense strand to SEQ ID NO: 1794671
acucauaucuaucaaagac

SEQ ID NO: 1794673 - RNA, 19 nt, Artificial Sequence
  Description of Artificial Sequence: Synthetic oligonucleotide
  Sense strand starting at position 2924 of SEQ ID NO: 1563093
gaguauugacuccaugguc

SEQ ID NO: 1794674 - RNA, 19 nt, Artificial Sequence
  Description of Artificial Sequence: Synthetic oligonucleotide
  Antisense strand to SEQ ID NO: 1794673
gaccauggagucaauacuc

SEQ ID NO: 1794675 - RNA, 19 nt, Artificial Sequence
  Description of Artificial Sequence: Synthetic oligonucleotide
  Sense strand starting at position 2927 of SEQ ID NO: 1563093
uauugacuccauggucaga

SEQ ID NO: 1794676 - RNA, 19 nt, Artificial Sequence
  Description of Artificial Sequence: Synthetic oligonucleotide
  Antisense strand to SEQ ID NO: 1794675
ucugaccauggagucaaua

SEQ ID NO: 1794677 - RNA, 19 nt, Artificial Sequence
  Description of Artificial Sequence: Synthetic oligonucleotide
  Sense strand starting at position 3698 of SEQ ID NO: 1563093
gguagcaaugcagagagaa

SEQ ID NO: 1794678 - RNA, 19 nt, Artificial Sequence
  Description of Artificial Sequence: Synthetic oligonucleotide
  Antisense strand to SEQ ID NO: 1794677
uucucucugcauugcuacc

SEQ ID NO: 1794679 - RNA, 19 nt, Artificial Sequence
  Description of Artificial Sequence: Synthetic oligonucleotide
  Sense strand starting at position 3899 of SEQ ID NO: 1563093
uccugaguagcauagauua

SEQ ID NO: 1794680 - RNA, 19 nt, Artificial Sequence
  Description of Artificial Sequence: Synthetic oligonucleotide
  Antisense strand to SEQ ID NO: 1794679
uaaucuaugcuacucagga

SEQ ID NO: 1794681 - RNA, 19 nt, Artificial Sequence
  Description of Artificial Sequence: Synthetic oligonucleotide
  Sense strand starting at position 74 of SEQ ID NO: 1563094
ucaaguguccaaugacaga

SEQ ID NO: 1794682 - RNA, 19 nt, Artificial Sequence
  Description of Artificial Sequence: Synthetic oligonucleotide
  Antisense strand to SEQ ID NO: 1794681
ucugucauuggacacuuga

SEQ ID NO: 1794683 - RNA, 19 nt, Artificial Sequence
  Description of Artificial Sequence: Synthetic oligonucleotide
  Sense strand starting at position 105 of SEQ ID NO: 1563094
caaauugugguaugguaua

SEQ ID NO: 1794684 - RNA, 19 nt, Artificial Sequence
  Description of Artificial Sequence: Synthetic oligonucleotide
  Antisense strand to SEQ ID NO: 1794683
uauaccauaccacaauuug

SEQ ID NO: 1794685 - RNA, 19 nt, Artificial Sequence
  Description of Artificial Sequence: Synthetic oligonucleotide
  Sense strand starting at position 110 of SEQ ID NO: 1563094
ugugguaugguauauacau

SEQ ID NO: 1794686 - RNA, 19 nt, Artificial Sequence
  Description of Artificial Sequence: Synthetic oligonucleotide
  Antisense strand to SEQ ID NO: 1794685
auguauauaccauaccaca

SEQ ID NO: 1794687 - RNA, 19 nt, Artificial Sequence
  Description of Artificial Sequence: Synthetic oligonucleotide
  Sense strand starting at position 341 of SEQ ID NO: 1563094
guuuaaugugaguagaguu

SEQ ID NO: 1794688 - RNA, 19 nt, Artificial Sequence
  Description of Artificial Sequence: Synthetic oligonucleotide
  Antisense strand to SEQ ID NO: 1794687
aacucuacucacauuaaac

SEQ ID NO: 1794689 - RNA, 19 nt, Artificial Sequence
  Description of Artificial Sequence: Synthetic oligonucleotide
  Sense strand starting at position 728 of SEQ ID NO: 1563094
agcuaaaucuuggccagaa

SEQ ID NO: 1794690 - RNA, 19 nt, Artificial Sequence
  Description of Artificial Sequence: Synthetic oligonucleotide
  Antisense strand to SEQ ID NO: 1794689
uucuggccaagauuuagcu

SEQ ID NO: 1794691 - RNA, 19 nt, Artificial Sequence
  Description of Artificial Sequence: Synthetic oligonucleotide
  Sense strand starting at position 729 of SEQ ID NO: 1563094
gcuaaaucuuggccagaac

SEQ ID NO: 1794692 - RNA, 19 nt, Artificial Sequence
  Description of Artificial Sequence: Synthetic oligonucleotide
  Antisense strand to SEQ ID NO: 1794691
guucuggccaagauuuagc

SEQ ID NO: 1794693 - RNA, 19 nt, Artificial Sequence
  Description of Artificial Sequence: Synthetic oligonucleotide
  Sense strand starting at position 996 of SEQ ID NO: 1563094
gcacacugccuggaacaua

SEQ ID NO: 1794694 - RNA, 19 nt, Artificial Sequence
  Description of Artificial Sequence: Synthetic oligonucleotide
  Antisense strand to SEQ ID NO: 1794693
uauguuccaggcagugugc

SEQ ID NO: 1794695 - RNA, 19 nt, Artificial Sequence
  Description of Artificial Sequence: Synthetic oligonucleotide
  Sense strand starting at position 1015 of SEQ ID NO: 1563094
ucagguauucuugagugga

SEQ ID NO: 1794696 - RNA, 19 nt, Artificial Sequence
  Description of Artificial Sequence: Synthetic oligonucleotide
  Antisense strand to SEQ ID NO: 1794695
uccacucaagaauaccuga

SEQ ID NO: 1794697 - RNA, 19 nt, Artificial Sequence
  Description of Artificial Sequence: Synthetic oligonucleotide
  Sense strand starting at position 1017 of SEQ ID NO: 1563094
agguauucuugaguggaug

SEQ ID NO: 1794698 - RNA, 19 nt, Artificial Sequence
  Description of Artificial Sequence: Synthetic oligonucleotide
  Antisense strand to SEQ ID NO: 1794697
cauccacucaagaauaccu

SEQ ID NO: 1794699 - RNA, 19 nt, Artificial Sequence
  Description of Artificial Sequence: Synthetic oligonucleotide
  Sense strand starting at position 1018 of SEQ ID NO: 1563094
gguauucuugaguggauga

SEQ ID NO: 1794700 - RNA, 19 nt, Artificial Sequence
  Description of Artificial Sequence: Synthetic oligonucleotide
  Antisense strand to SEQ ID NO: 1794699
ucauccacucaagaauacc

SEQ ID NO: 1794701 - RNA, 19 nt, Artificial Sequence
  Description of Artificial Sequence: Synthetic oligonucleotide
  Sense strand starting at position 1019 of SEQ ID NO: 1563094
guauucuugaguggaugaa

SEQ ID NO: 1794702 - RNA, 19 nt, Artificial Sequence
  Description of Artificial Sequence: Synthetic oligonucleotide
  Antisense strand to SEQ ID NO: 1794701
uucauccacucaagaauac

SEQ ID NO: 1794703 - RNA, 19 nt, Artificial Sequence
  Description of Artificial Sequence: Synthetic oligonucleotide
  Sense strand starting at position 1048 of SEQ ID NO: 1563094
gaaauaagccaggguuuga

SEQ ID NO: 1794704 - RNA, 19 nt, Artificial Sequence
  Description of Artificial Sequence: Synthetic oligonucleotide
  Antisense strand to SEQ ID NO: 1794703
ucaaacccuggcuuauuuc

SEQ ID NO: 1794705 - RNA, 19 nt, Artificial Sequence
  Description of Artificial Sequence: Synthetic oligonucleotide
  Sense strand starting at position 1058 of SEQ ID NO: 1563094
aggguuugacagugacaca

SEQ ID NO: 1794706 - RNA, 19 nt, Artificial Sequence
  Description of Artificial Sequence: Synthetic oligonucleotide
  Antisense strand to SEQ ID NO: 1794705
ugugucacugucaaacccu

SEQ ID NO: 1794707 - RNA, 19 nt, Artificial Sequence
  Description of Artificial Sequence: Synthetic oligonucleotide
  Sense strand starting at position 1198 of SEQ ID NO: 1563094
cugugacucgaauaaagua

SEQ ID NO: 1794708 - RNA, 19 nt, Artificial Sequence
  Description of Artificial Sequence: Synthetic oligonucleotide
  Antisense strand to SEQ ID NO: 1794707
uacuuuauucgagucacag

SEQ ID NO: 1794709 - RNA, 19 nt, Artificial Sequence
  Description of Artificial Sequence: Synthetic oligonucleotide
  Sense strand starting at position 1206 of SEQ ID NO: 1563094
cgaauaaaguaccucugua

SEQ ID NO: 1794710 - RNA, 19 nt, Artificial Sequence
  Description of Artificial Sequence: Synthetic oligonucleotide
  Antisense strand to SEQ ID NO: 1794709
uacagagguacuuuauucg

SEQ ID NO: 1794711 - RNA, 19 nt, Artificial Sequence
  Description of Artificial Sequence: Synthetic oligonucleotide
  Sense strand starting at position 1211 of SEQ ID NO: 1563094
aaaguaccucuguaaacgu

SEQ ID NO: 1794712 - RNA, 19 nt, Artificial Sequence
  Description of Artificial Sequence: Synthetic oligonucleotide
  Antisense strand to SEQ ID NO: 1794711
acguuuacagagguacuuu

SEQ ID NO: 1794713 - RNA, 19 nt, Artificial Sequence
  Description of Artificial Sequence: Synthetic oligonucleotide
  Sense strand starting at position 1366 of SEQ ID NO: 1563094
caucguuaucauuaccgaa

SEQ ID NO: 1794714 - RNA, 19 nt, Artificial Sequence
  Description of Artificial Sequence: Synthetic oligonucleotide
  Antisense strand to SEQ ID NO: 1794713
uucgguaaugauaacgaug

SEQ ID NO: 1794715 - RNA, 19 nt, Artificial Sequence
  Description of Artificial Sequence: Synthetic oligonucleotide
  Sense strand starting at position 2112 of SEQ ID NO: 1563094
augcccuuucgugauuuau

SEQ ID NO: 1794716 - RNA, 19 nt, Artificial Sequence
  Description of Artificial Sequence: Synthetic oligonucleotide
  Antisense strand to SEQ ID NO: 1794715
auaaaucacgaaagggcau

SEQ ID NO: 1794717 - RNA, 19 nt, Artificial Sequence
  Description of Artificial Sequence: Synthetic oligonucleotide
  Sense strand starting at position 2165 of SEQ ID NO: 1563094
aaauuacguguugacagua

SEQ ID NO: 1794718 - RNA, 19 nt, Artificial Sequence
  Description of Artificial Sequence: Synthetic oligonucleotide
  Antisense strand to SEQ ID NO: 1794717
uacugucaacacguaauuu

SEQ ID NO: 1794719 - RNA, 19 nt, Artificial Sequence
  Description of Artificial Sequence: Synthetic oligonucleotide
  Sense strand starting at position 2215 of SEQ ID NO: 1563094
uguccuuacgacuacacua

SEQ ID NO: 1794720 - RNA, 19 nt, Artificial Sequence
  Description of Artificial Sequence: Synthetic oligonucleotide
  Antisense strand to SEQ ID NO: 1794719
uaguguagucguaaggaca

SEQ ID NO: 1794721 - RNA, 19 nt, Artificial Sequence
  Description of Artificial Sequence: Synthetic oligonucleotide
  Sense strand starting at position 2355 of SEQ ID NO: 1563094
ggguaugugacugaguuua

SEQ ID NO: 1794722 - RNA, 19 nt, Artificial Sequence
  Description of Artificial Sequence: Synthetic oligonucleotide
  Antisense strand to SEQ ID NO: 1794721
uaaacucagucacauaccc

SEQ ID NO: 1794723 - RNA, 19 nt, Artificial Sequence
  Description of Artificial Sequence: Synthetic oligonucleotide
  Sense strand starting at position 2360 of SEQ ID NO: 1563094
ugugacugaguuuaaugua

SEQ ID NO: 1794724 - RNA, 19 nt, Artificial Sequence
  Description of Artificial Sequence: Synthetic oligonucleotide
  Antisense strand to SEQ ID NO: 1794723
uacauuaaacucagucaca

SEQ ID NO: 1794725 - RNA, 19 nt, Artificial Sequence
  Description of Artificial Sequence: Synthetic oligonucleotide
  Sense strand starting at position 2365 of SEQ ID NO: 1563094
cugaguuuaauguaugguu

SEQ ID NO: 1794726 - RNA, 19 nt, Artificial Sequence
  Description of Artificial Sequence: Synthetic oligonucleotide
  Antisense strand to SEQ ID NO: 1794725
aaccauacauuaaacucag

SEQ ID NO: 1794727 - RNA, 19 nt, Artificial Sequence
  Description of Artificial Sequence: Synthetic oligonucleotide
  Sense strand starting at position 2367 of SEQ ID NO: 1563094
gaguuuaauguaugguuag

SEQ ID NO: 1794728 - RNA, 19 nt, Artificial Sequence
  Description of Artificial Sequence: Synthetic oligonucleotide
  Antisense strand to SEQ ID NO: 1794727
cuaaccauacauuaaacuc

SEQ ID NO: 1794729 - RNA, 19 nt, Artificial Sequence
  Description of Artificial Sequence: Synthetic oligonucleotide
  Sense strand starting at position 2370 of SEQ ID NO: 1563094
uuuaauguaugguuagaag

SEQ ID NO: 1794730 - RNA, 19 nt, Artificial Sequence
  Description of Artificial Sequence: Synthetic oligonucleotide
  Antisense strand to SEQ ID NO: 1794729
cuucuaaccauacauuaaa

SEQ ID NO: 1794731 - RNA, 19 nt, Artificial Sequence
  Description of Artificial Sequence: Synthetic oligonucleotide
  Sense strand starting at position 2385 of SEQ ID NO: 1563094
gaaguauacuuucccugag

SEQ ID NO: 1794732 - RNA, 19 nt, Artificial Sequence
  Description of Artificial Sequence: Synthetic oligonucleotide
  Antisense strand to SEQ ID NO: 1794731
cucagggaaaguauacuuc

SEQ ID NO: 1794733 - RNA, 19 nt, Artificial Sequence
  Description of Artificial Sequence: Synthetic oligonucleotide
  Sense strand starting at position 2389 of SEQ ID NO: 1563094
uauacuuucccugaggguu

SEQ ID NO: 1794734 - RNA, 19 nt, Artificial Sequence
  Description of Artificial Sequence: Synthetic oligonucleotide
  Antisense strand to SEQ ID NO: 1794733
aacccucagggaaaguaua

SEQ ID NO: 1794735 - RNA, 19 nt, Artificial Sequence
  Description of Artificial Sequence: Synthetic oligonucleotide
  Sense strand starting at position 2938 of SEQ ID NO: 1563094
gauagaggguccuucucuu

SEQ ID NO: 1794736 - RNA, 19 nt, Artificial Sequence
  Description of Artificial Sequence: Synthetic oligonucleotide
  Antisense strand to SEQ ID NO: 1794735
aagagaaggacccucuauc

SEQ ID NO: 1794737 - RNA, 19 nt, Artificial Sequence
  Description of Artificial Sequence: Synthetic oligonucleotide
  Sense strand starting at position 3222 of SEQ ID NO: 1563094
uaaagagacuaguuuguau

SEQ ID NO: 1794738 - RNA, 19 nt, Artificial Sequence
  Description of Artificial Sequence: Synthetic oligonucleotide
  Antisense strand to SEQ ID NO: 1794737
auacaaacuagucucuuua

SEQ ID NO: 1794739 - RNA, 19 nt, Artificial Sequence
  Description of Artificial Sequence: Synthetic oligonucleotide
  Sense strand starting at position 3350 of SEQ ID NO: 1563094
ugacaacuguggguauagu

SEQ ID NO: 1794740 - RNA, 19 nt, Artificial Sequence
  Description of Artificial Sequence: Synthetic oligonucleotide
  Antisense strand to SEQ ID NO: 1794739
acuauacccacaguuguca

SEQ ID NO: 1794741 - RNA, 19 nt, Artificial Sequence
  Description of Artificial Sequence: Synthetic oligonucleotide
  Sense strand starting at position 3412 of SEQ ID NO: 1563094
uagggaagaucguuaguuu

SEQ ID NO: 1794742 - RNA, 19 nt, Artificial Sequence
  Description of Artificial Sequence: Synthetic oligonucleotide
  Antisense strand to SEQ ID NO: 1794741
aaacuaacgaucuucccua

SEQ ID NO: 1794743 - RNA, 19 nt, Artificial Sequence
  Description of Artificial Sequence: Synthetic oligonucleotide
  Sense strand starting at position 3413 of SEQ ID NO: 1563094
agggaagaucguuaguuug

SEQ ID NO: 1794744 - RNA, 19 nt, Artificial Sequence
  Description of Artificial Sequence: Synthetic oligonucleotide
  Antisense strand to SEQ ID NO: 1794743
caaacuaacgaucuucccu

SEQ ID NO: 1794745 - RNA, 19 nt, Artificial Sequence
  Description of Artificial Sequence: Synthetic oligonucleotide
  Sense strand starting at position 3435 of SEQ ID NO: 1563094
uugaauagggcauaguauu

SEQ ID NO: 1794746 - RNA, 19 nt, Artificial Sequence
  Description of Artificial Sequence: Synthetic oligonucleotide
  Antisense strand to SEQ ID NO: 1794745
aauacuaugcccuauucaa

SEQ ID NO: 1794747 - RNA, 19 nt, Artificial Sequence
  Description of Artificial Sequence: Synthetic oligonucleotide
  Sense strand starting at position 3445 of SEQ ID NO: 1563094
cauaguauuuacguuguuu

SEQ ID NO: 1794748 - RNA, 19 nt, Artificial Sequence
  Description of Artificial Sequence: Synthetic oligonucleotide
  Antisense strand to SEQ ID NO: 1794747
aaacaacguaaauacuaug

SEQ ID NO: 1794749 - RNA, 19 nt, Artificial Sequence
  Description of Artificial Sequence: Synthetic oligonucleotide
  Sense strand starting at position 3556 of SEQ ID NO: 1563094
cacagaaugguaugguaaa

SEQ ID NO: 1794750 - RNA, 19 nt, Artificial Sequence
  Description of Artificial Sequence: Synthetic oligonucleotide
  Antisense strand to SEQ ID NO: 1794749
uuuaccauaccauucugug

SEQ ID NO: 1794751 - RNA, 19 nt, Artificial Sequence
  Description of Artificial Sequence: Synthetic oligonucleotide
  Sense strand starting at position 3681 of SEQ ID NO: 1563094
caagguaaauugcuaaugu

SEQ ID NO: 1794752 - RNA, 19 nt, Artificial Sequence
  Description of Artificial Sequence: Synthetic oligonucleotide
  Antisense strand to SEQ ID NO: 1794751
acauuagcaauuuaccuug

SEQ ID NO: 1794753 - RNA, 19 nt, Artificial Sequence
  Description of Artificial Sequence: Synthetic oligonucleotide
  Sense strand starting at position 3907 of SEQ ID NO: 1563094
auagauuaagcguguauuu

SEQ ID NO: 1794754 - RNA, 19 nt, Artificial Sequence
  Description of Artificial Sequence: Synthetic oligonucleotide
  Antisense strand to SEQ ID NO: 1794753
aaauacacgcuuaaucuau

SEQ ID NO: 1794755 - RNA, 19 nt, Artificial Sequence
  Description of Artificial Sequence: Synthetic oligonucleotide
  Sense strand starting at position 3912 of SEQ ID NO: 1563094
uuaagcguguauuuaagua

SEQ ID NO: 1794756 - RNA, 19 nt, Artificial Sequence
  Description of Artificial Sequence: Synthetic oligonucleotide
  Antisense strand to SEQ ID NO: 1794755
uacuuaaauacacgcuuaa

SEQ ID NO: 1794757 - RNA, 19 nt, Artificial Sequence
  Description of Artificial Sequence: Synthetic oligonucleotide
  Sense strand starting at position 3916 of SEQ ID NO: 1563094
gcguguauuuaaguaucag

SEQ ID NO: 1794758 - RNA, 19 nt, Artificial Sequence
  Description of Artificial Sequence: Synthetic oligonucleotide
  Antisense strand to SEQ ID NO: 1794757
cugauacuuaaauacacgc

SEQ ID NO: 1794759 - RNA, 19 nt, Artificial Sequence
  Description of Artificial Sequence: Synthetic oligonucleotide
  Sense strand starting at position 3966 of SEQ ID NO: 1563094
gcuguauuuacuggugacu

SEQ ID NO: 1794760 - RNA, 19 nt, Artificial Sequence
  Description of Artificial Sequence: Synthetic oligonucleotide
  Antisense strand to SEQ ID NO: 1794759
agucaccaguaaauacagc

SEQ ID NO: 1794761 - RNA, 19 nt, Artificial Sequence
  Description of Artificial Sequence: Synthetic oligonucleotide
  Sense strand starting at position 51 of SEQ ID NO: 1563095
uuccuacguguaugcauua

SEQ ID NO: 1794762 - RNA, 19 nt, Artificial Sequence
  Description of Artificial Sequence: Synthetic oligonucleotide
  Antisense strand to SEQ ID NO: 1794761
uaaugcauacacguaggaa

SEQ ID NO: 1794763 - RNA, 19 nt, Artificial Sequence
  Description of Artificial Sequence: Synthetic oligonucleotide
  Sense strand starting at position 56 of SEQ ID NO: 1563095
acguguaugcauuacaaau

SEQ ID NO: 1794764 - RNA, 19 nt, Artificial Sequence
  Description of Artificial Sequence: Synthetic oligonucleotide
  Antisense strand to SEQ ID NO: 1794763
auuuguaaugcauacacgu

SEQ ID NO: 1794765 - RNA, 19 nt, Artificial Sequence
  Description of Artificial Sequence: Synthetic oligonucleotide
  Sense strand starting at position 261 of SEQ ID NO: 1563095
gagggacaguguuccacau

SEQ ID NO: 1794766 - RNA, 19 nt, Artificial Sequence
  Description of Artificial Sequence: Synthetic oligonucleotide
  Antisense strand to SEQ ID NO: 1794765
auguggaacacugucccuc

SEQ ID NO: 1794767 - RNA, 19 nt, Artificial Sequence
  Description of Artificial Sequence: Synthetic oligonucleotide
  Sense strand starting at position 265 of SEQ ID NO: 1563095
gacaguguuccacauaugu

SEQ ID NO: 1794768 - RNA, 19 nt, Artificial Sequence
  Description of Artificial Sequence: Synthetic oligonucleotide
  Antisense strand to SEQ ID NO: 1794767
acauauguggaacacuguc

SEQ ID NO: 1794769 - RNA, 19 nt, Artificial Sequence
  Description of Artificial Sequence: Synthetic oligonucleotide
  Sense strand starting at position 275 of SEQ ID NO: 1563095
cacauauguccauguguuu

SEQ ID NO: 1794770 - RNA, 19 nt, Artificial Sequence
  Description of Artificial Sequence: Synthetic oligonucleotide
  Antisense strand to SEQ ID NO: 1794769
aaacacauggacauaugug

SEQ ID NO: 1794771 - RNA, 19 nt, Artificial Sequence
  Description of Artificial Sequence: Synthetic oligonucleotide
  Sense strand starting at position 393 of SEQ ID NO: 1563095
gccuuaucauggcuaaauc

SEQ ID NO: 1794772 - RNA, 19 nt, Artificial Sequence
  Description of Artificial Sequence: Synthetic oligonucleotide
  Antisense strand to SEQ ID NO: 1794771
gauuuagccaugauaaggc

SEQ ID NO: 1794773 - RNA, 19 nt, Artificial Sequence
  Description of Artificial Sequence: Synthetic oligonucleotide
  Sense strand starting at position 403 of SEQ ID NO: 1563095
ggcuaaauccagcagacuu

SEQ ID NO: 1794774 - RNA, 19 nt, Artificial Sequence
  Description of Artificial Sequence: Synthetic oligonucleotide
  Antisense strand to SEQ ID NO: 1794773
aagucugcuggauuuagcc

SEQ ID NO: 1794775 - RNA, 19 nt, Artificial Sequence
  Description of Artificial Sequence: Synthetic oligonucleotide
  Sense strand starting at position 428 of SEQ ID NO: 1563095
guccucacccgcuagacau

SEQ ID NO: 1794776 - RNA, 19 nt, Artificial Sequence
  Description of Artificial Sequence: Synthetic oligonucleotide
  Antisense strand to SEQ ID NO: 1794775
augucuagcgggugaggac

SEQ ID NO: 1794777 - RNA, 19 nt, Artificial Sequence
  Description of Artificial Sequence: Synthetic oligonucleotide
  Sense strand starting at position 439 of SEQ ID NO: 1563095
cuagacauuucugagccau

SEQ ID NO: 1794778 - RNA, 19 nt, Artificial Sequence
  Description of Artificial Sequence: Synthetic oligonucleotide
  Antisense strand to SEQ ID NO: 1794777
auggcucagaaaugucuag

SEQ ID NO: 1794779 - RNA, 19 nt, Artificial Sequence
  Description of Artificial Sequence: Synthetic oligonucleotide
  Sense strand starting at position 743 of SEQ ID NO: 1563095
uggaaccugucauugugau

SEQ ID NO: 1794780 - RNA, 19 nt, Artificial Sequence
  Description of Artificial Sequence: Synthetic oligonucleotide
  Antisense strand to SEQ ID NO: 1794779
aucacaaugacagguucca

SEQ ID NO: 1794781 - RNA, 19 nt, Artificial Sequence
  Description of Artificial Sequence: Synthetic oligonucleotide
  Sense strand starting at position 744 of SEQ ID NO: 1563095
ggaaccugucauugugauu

SEQ ID NO: 1794782 - RNA, 19 nt, Artificial Sequence
  Description of Artificial Sequence: Synthetic oligonucleotide
  Antisense strand to SEQ ID NO: 1794781
aaucacaaugacagguucc

SEQ ID NO: 1794783 - RNA, 19 nt, Artificial Sequence
  Description of Artificial Sequence: Synthetic oligonucleotide
  Sense strand starting at position 797 of SEQ ID NO: 1563095
aggucaggaucucaagaua

SEQ ID NO: 1794784 - RNA, 19 nt, Artificial Sequence
  Description of Artificial Sequence: Synthetic oligonucleotide
  Antisense strand to SEQ ID NO: 1794783
uaucuugagauccugaccu

SEQ ID NO: 1794785 - RNA, 19 nt, Artificial Sequence
  Description of Artificial Sequence: Synthetic oligonucleotide
  Sense strand starting at position 814 of SEQ ID NO: 1563095
uaagaucauccgggauuau

SEQ ID NO: 1794786 - RNA, 19 nt, Artificial Sequence
  Description of Artificial Sequence: Synthetic oligonucleotide
  Antisense strand to SEQ ID NO: 1794785
auaaucccggaugaucuua

SEQ ID NO: 1794787 - RNA, 19 nt, Artificial Sequence
  Description of Artificial Sequence: Synthetic oligonucleotide
  Sense strand starting at position 1071 of SEQ ID NO: 1563095
augcuuuauagagaugggu

SEQ ID NO: 1794788 - RNA, 19 nt, Artificial Sequence
  Description of Artificial Sequence: Synthetic oligonucleotide
  Antisense strand to SEQ ID NO: 1794787
acccaucucuauaaagcau

SEQ ID NO: 1794789 - RNA, 19 nt, Artificial Sequence
  Description of Artificial Sequence: Synthetic oligonucleotide
  Sense strand starting at position 1073 of SEQ ID NO: 1563095
gcuuuauagagaugggugu

SEQ ID NO: 1794790 - RNA, 19 nt, Artificial Sequence
  Description of Artificial Sequence: Synthetic oligonucleotide
  Antisense strand to SEQ ID NO: 1794789
acacccaucucuauaaagc

SEQ ID NO: 1794791 - RNA, 19 nt, Artificial Sequence
  Description of Artificial Sequence: Synthetic oligonucleotide
  Sense strand starting at position 1217 of SEQ ID NO: 1563095
cacaguguccagcaguaua

SEQ ID NO: 1794792 - RNA, 19 nt, Artificial Sequence
  Description of Artificial Sequence: Synthetic oligonucleotide
  Antisense strand to SEQ ID NO: 1794791
uauacugcuggacacugug

SEQ ID NO: 1794793 - RNA, 19 nt, Artificial Sequence
  Description of Artificial Sequence: Synthetic oligonucleotide
  Sense strand starting at position 1295 of SEQ ID NO: 1563095
auggcuugccagugggaaa

SEQ ID NO: 1794794 - RNA, 19 nt, Artificial Sequence
  Description of Artificial Sequence: Synthetic oligonucleotide
  Antisense strand to SEQ ID NO: 1794793
uuucccacuggcaagccau

SEQ ID NO: 1794795 - RNA, 19 nt, Artificial Sequence
  Description of Artificial Sequence: Synthetic oligonucleotide
  Sense strand starting at position 1312 of SEQ ID NO: 1563095
aagguucccucgccaacua

SEQ ID NO: 1794796 - RNA, 19 nt, Artificial Sequence
  Description of Artificial Sequence: Synthetic oligonucleotide
  Antisense strand to SEQ ID NO: 1794795
uaguuggcgagggaaccuu

SEQ ID NO: 1794797 - RNA, 19 nt, Artificial Sequence
  Description of Artificial Sequence: Synthetic oligonucleotide
  Sense strand starting at position 1420 of SEQ ID NO: 1563095
ugggugcucugguuggaga

SEQ ID NO: 1794798 - RNA, 19 nt, Artificial Sequence
  Description of Artificial Sequence: Synthetic oligonucleotide
  Antisense strand to SEQ ID NO: 1794797
ucuccaaccagagcaccca

SEQ ID NO: 1794799 - RNA, 19 nt, Artificial Sequence
  Description of Artificial Sequence: Synthetic oligonucleotide
  Sense strand starting at position 1503 of SEQ ID NO: 1563095
agagaaagcccuggagagu

SEQ ID NO: 1794800 - RNA, 19 nt, Artificial Sequence
  Description of Artificial Sequence: Synthetic oligonucleotide
  Antisense strand to SEQ ID NO: 1794799
acucuccagggcuuucucu

SEQ ID NO: 1794801 - RNA, 19 nt, Artificial Sequence
  Description of Artificial Sequence: Synthetic oligonucleotide
  Sense strand starting at position 1564 of SEQ ID NO: 1563095
agaagagauuuguaaaggu

SEQ ID NO: 1794802 - RNA, 19 nt, Artificial Sequence
  Description of Artificial Sequence: Synthetic oligonucleotide
  Antisense strand to SEQ ID NO: 1794801
accuuuacaaaucucuucu

SEQ ID NO: 1794803 - RNA, 19 nt, Artificial Sequence
  Description of Artificial Sequence: Synthetic oligonucleotide
  Sense strand starting at position 2911 of SEQ ID NO: 1563095
cgguagggugcgcuuuaaa

SEQ ID NO: 1794804 - RNA, 19 nt, Artificial Sequence
  Description of Artificial Sequence: Synthetic oligonucleotide
  Antisense strand to SEQ ID NO: 1794803
uuuaaagcgcacccuaccg

SEQ ID NO: 1794805 - RNA, 19 nt, Artificial Sequence
  Description of Artificial Sequence: Synthetic oligonucleotide
  Sense strand starting at position 2924 of SEQ ID NO: 1563095
uuuaaacugucacugagau

SEQ ID NO: 1794806 - RNA, 19 nt, Artificial Sequence
  Description of Artificial Sequence: Synthetic oligonucleotide
  Antisense strand to SEQ ID NO: 1794805
aucucagugacaguuuaaa

SEQ ID NO: 1794807 - RNA, 19 nt, Artificial Sequence
  Description of Artificial Sequence: Synthetic oligonucleotide
  Sense strand starting at position 2925 of SEQ ID NO: 1563095
uuaaacugucacugagaug

SEQ ID NO: 1794808 - RNA, 19 nt, Artificial Sequence
  Description of Artificial Sequence: Synthetic oligonucleotide
  Antisense strand to SEQ ID NO: 1794807
caucucagugacaguuuaa

SEQ ID NO: 1794809 - RNA, 19 nt, Artificial Sequence
  Description of Artificial Sequence: Synthetic oligonucleotide
  Sense strand starting at position 2964 of SEQ ID NO: 1563095
ugcuguuaccgcgaaucca

SEQ ID NO: 1794810 - RNA, 19 nt, Artificial Sequence
  Description of Artificial Sequence: Synthetic oligonucleotide
  Antisense strand to SEQ ID NO: 1794809
uggauucgcgguaacagca

SEQ ID NO: 1794811 - RNA, 19 nt, Artificial Sequence
  Description of Artificial Sequence: Synthetic oligonucleotide
  Sense strand starting at position 3024 of SEQ ID NO: 1563095
ggguccuauugagaauuag

SEQ ID NO: 1794812 - RNA, 19 nt, Artificial Sequence
  Description of Artificial Sequence: Synthetic oligonucleotide
  Antisense strand to SEQ ID NO: 1794811
cuaauucucaauaggaccc

SEQ ID NO: 1794813 - RNA, 19 nt, Artificial Sequence
  Description of Artificial Sequence: Synthetic oligonucleotide
  Sense strand starting at position 3081 of SEQ ID NO: 1563095
aaggaaccagucuguagaa

SEQ ID NO: 1794814 - RNA, 19 nt, Artificial Sequence
  Description of Artificial Sequence: Synthetic oligonucleotide
  Antisense strand to SEQ ID NO: 1794813
uucuacagacugguuccuu

SEQ ID NO: 1794815 - RNA, 19 nt, Artificial Sequence
  Description of Artificial Sequence: Synthetic oligonucleotide
  Sense strand starting at position 3082 of SEQ ID NO: 1563095
aggaaccagucuguagaaa

SEQ ID NO: 1794816 - RNA, 19 nt, Artificial Sequence
  Description of Artificial Sequence: Synthetic oligonucleotide
  Antisense strand to SEQ ID NO: 1794815
uuucuacagacugguuccu

SEQ ID NO: 1794817 - RNA, 19 nt, Artificial Sequence
  Description of Artificial Sequence: Synthetic oligonucleotide
  Sense strand starting at position 3163 of SEQ ID NO: 1563095
ucuguugcuuuaucuguaa

SEQ ID NO: 1794818 - RNA, 19 nt, Artificial Sequence
  Description of Artificial Sequence: Synthetic oligonucleotide
  Antisense strand to SEQ ID NO: 1794817
uuacagauaaagcaacaga

SEQ ID NO: 1794819 - RNA, 19 nt, Artificial Sequence
  Description of Artificial Sequence: Synthetic oligonucleotide
  Sense strand starting at position 3439 of SEQ ID NO: 1563095
gaggcucccuagcuaugau

SEQ ID NO: 1794820 - RNA, 19 nt, Artificial Sequence
  Description of Artificial Sequence: Synthetic oligonucleotide
  Antisense strand to SEQ ID NO: 1794819
aucauagcuagggagccuc

SEQ ID NO: 1794821 - RNA, 19 nt, Artificial Sequence
  Description of Artificial Sequence: Synthetic oligonucleotide
  Sense strand starting at position 3442 of SEQ ID NO: 1563095
gcucccuagcuaugaucuu

SEQ ID NO: 1794822 - RNA, 19 nt, Artificial Sequence
  Description of Artificial Sequence: Synthetic oligonucleotide
  Antisense strand to SEQ ID NO: 1794821
aagaucauagcuagggagc

SEQ ID NO: 1794823 - RNA, 19 nt, Artificial Sequence
  Description of Artificial Sequence: Synthetic oligonucleotide
  Sense strand starting at position 3544 of SEQ ID NO: 1563095
ggagcuaauuuauaucuag

SEQ ID NO: 1794824 - RNA, 19 nt, Artificial Sequence
  Description of Artificial Sequence: Synthetic oligonucleotide
  Antisense strand to SEQ ID NO: 1794823
cuagauauaaauuagcucc

SEQ ID NO: 1794825 - RNA, 19 nt, Artificial Sequence
  Description of Artificial Sequence: Synthetic oligonucleotide
  Sense strand starting at position 3653 of SEQ ID NO: 1563095
agcugacgguuucuaguau

SEQ ID NO: 1794826 - RNA, 19 nt, Artificial Sequence
  Description of Artificial Sequence: Synthetic oligonucleotide
  Antisense strand to SEQ ID NO: 1794825
auacuagaaaccgucagcu

SEQ ID NO: 1794827 - RNA, 19 nt, Artificial Sequence
  Description of Artificial Sequence: Synthetic oligonucleotide
  Sense strand starting at position 3661 of SEQ ID NO: 1563095
guuucuaguaucugaugga

SEQ ID NO: 1794828 - RNA, 19 nt, Artificial Sequence
  Description of Artificial Sequence: Synthetic oligonucleotide
  Antisense strand to SEQ ID NO: 1794827
uccaucagauacuagaaac

SEQ ID NO: 1794829 - RNA, 19 nt, Artificial Sequence
  Description of Artificial Sequence: Synthetic oligonucleotide
  Sense strand starting at position 3677 of SEQ ID NO: 1563095
ggagcugccuucucaagag

SEQ ID NO: 1794830 - RNA, 19 nt, Artificial Sequence
  Description of Artificial Sequence: Synthetic oligonucleotide
  Antisense strand to SEQ ID NO: 1794829
cucuugagaaggcagcucc

SEQ ID NO: 1794831 - RNA, 19 nt, Artificial Sequence
  Description of Artificial Sequence: Synthetic oligonucleotide
  Sense strand starting at position 3681 of SEQ ID NO: 1563095
cugccuucucaagagugca

SEQ ID NO: 1794832 - RNA, 19 nt, Artificial Sequence
  Description of Artificial Sequence: Synthetic oligonucleotide
  Antisense strand to SEQ ID NO: 1794831
ugcacucuugagaaggcag

SEQ ID NO: 1794833 - RNA, 19 nt, Artificial Sequence
  Description of Artificial Sequence: Synthetic oligonucleotide
  Sense strand starting at position 3706 of SEQ ID NO: 1563095
gaggacuuucuauguguaa

SEQ ID NO: 1794834 - RNA, 19 nt, Artificial Sequence
  Description of Artificial Sequence: Synthetic oligonucleotide
  Antisense strand to SEQ ID NO: 1794833
uuacacauagaaaguccuc

SEQ ID NO: 1794835 - RNA, 19 nt, Artificial Sequence
  Description of Artificial Sequence: Synthetic oligonucleotide
  Sense strand starting at position 3707 of SEQ ID NO: 1563095
aggacuuucuauguguaag

SEQ ID NO: 1794836 - RNA, 19 nt, Artificial Sequence
  Description of Artificial Sequence: Synthetic oligonucleotide
  Antisense strand to SEQ ID NO: 1794835
cuuacacauagaaaguccu

SEQ ID NO: 1794837 - RNA, 19 nt, Artificial Sequence
  Description of Artificial Sequence: Synthetic oligonucleotide
  Sense strand starting at position 3708 of SEQ ID NO: 1563095
ggacuuucuauguguaagg

SEQ ID NO: 1794838 - RNA, 19 nt, Artificial Sequence
  Description of Artificial Sequence: Synthetic oligonucleotide
  Antisense strand to SEQ ID NO: 1794837
ccuuacacauagaaagucc

SEQ ID NO: 1794839 - RNA, 19 nt, Artificial Sequence
  Description of Artificial Sequence: Synthetic oligonucleotide
  Sense strand starting at position 3710 of SEQ ID NO: 1563095
acuuucuauguguaaggca

SEQ ID NO: 1794840 - RNA, 19 nt, Artificial Sequence
  Description of Artificial Sequence: Synthetic oligonucleotide
  Antisense strand to SEQ ID NO: 1794839
ugccuuacacauagaaagu

SEQ ID NO: 1794841 - RNA, 19 nt, Artificial Sequence
  Description of Artificial Sequence: Synthetic oligonucleotide
  Sense strand starting at position 90 of SEQ ID NO: 1563096
gcugaaagcccuggauucu

SEQ ID NO: 1794842 - RNA, 19 nt, Artificial Sequence
  Description of Artificial Sequence: Synthetic oligonucleotide
  Antisense strand to SEQ ID NO: 1794841
agaauccagggcuuucagc

SEQ ID NO: 1794843 - RNA, 19 nt, Artificial Sequence
  Description of Artificial Sequence: Synthetic oligonucleotide
  Sense strand starting at position 133 of SEQ ID NO: 1563096
ggucaucgguccaagggaa

SEQ ID NO: 1794844 - RNA, 19 nt, Artificial Sequence
  Description of Artificial Sequence: Synthetic oligonucleotide
  Antisense strand to SEQ ID NO: 1794843
uucccuuggaccgaugacc

SEQ ID NO: 1794845 - RNA, 19 nt, Artificial Sequence
  Description of Artificial Sequence: Synthetic oligonucleotide
  Sense strand starting at position 179 of SEQ ID NO: 1563096
cuccuuacuagauggguga

SEQ ID NO: 1794846 - RNA, 19 nt, Artificial Sequence
  Description of Artificial Sequence: Synthetic oligonucleotide
  Antisense strand to SEQ ID NO: 1794845
ucacccaucuaguaaggag

SEQ ID NO: 1794847 - RNA, 19 nt, Artificial Sequence
  Description of Artificial Sequence: Synthetic oligonucleotide
  Sense strand starting at position 224 of SEQ ID NO: 1563096
agacccuagucuucuauga

SEQ ID NO: 1794848 - RNA, 19 nt, Artificial Sequence
  Description of Artificial Sequence: Synthetic oligonucleotide
  Antisense strand to SEQ ID NO: 1794847
ucauagaagacuagggucu

SEQ ID NO: 1794849 - RNA, 19 nt, Artificial Sequence
  Description of Artificial Sequence: Synthetic oligonucleotide
  Sense strand starting at position 228 of SEQ ID NO: 1563096
ccuagucuucuaugaaaug

SEQ ID NO: 1794850 - RNA, 19 nt, Artificial Sequence
  Description of Artificial Sequence: Synthetic oligonucleotide
  Antisense strand to SEQ ID NO: 1794849
cauuucauagaagacuagg

SEQ ID NO: 1794851 - RNA, 19 nt, Artificial Sequence
  Description of Artificial Sequence: Synthetic oligonucleotide
  Sense strand starting at position 248 of SEQ ID NO: 1563096
gagagaaauucccuacagu

SEQ ID NO: 1794852 - RNA, 19 nt, Artificial Sequence
  Description of Artificial Sequence: Synthetic oligonucleotide
  Antisense strand to SEQ ID NO: 1794851
acuguagggaauuucucuc

SEQ ID NO: 1794853 - RNA, 19 nt, Artificial Sequence
  Description of Artificial Sequence: Synthetic oligonucleotide
  Sense strand starting at position 356 of SEQ ID NO: 1563096
ggcugcuagaaaugcaaga

SEQ ID NO: 1794854 - RNA, 19 nt, Artificial Sequence
  Description of Artificial Sequence: Synthetic oligonucleotide
  Antisense strand to SEQ ID NO: 1794853
ucuugcauuucuagcagcc

SEQ ID NO: 1794855 - RNA, 19 nt, Artificial Sequence
  Description of Artificial Sequence: Synthetic oligonucleotide
  Sense strand starting at position 358 of SEQ ID NO: 1563096
cugcuagaaaugcaagagu

SEQ ID NO: 1794856 - RNA, 19 nt, Artificial Sequence
  Description of Artificial Sequence: Synthetic oligonucleotide
  Antisense strand to SEQ ID NO: 1794855
acucuugcauuucuagcag

SEQ ID NO: 1794857 - RNA, 19 nt, Artificial Sequence
  Description of Artificial Sequence: Synthetic oligonucleotide
  Sense strand starting at position 623 of SEQ ID NO: 1563096
gguaauagcuaccuuacaa

SEQ ID NO: 1794858 - RNA, 19 nt, Artificial Sequence
  Description of Artificial Sequence: Synthetic oligonucleotide
  Antisense strand to SEQ ID NO: 1794857
uuguaagguagcuauuacc

SEQ ID NO: 1794859 - RNA, 19 nt, Artificial Sequence
  Description of Artificial Sequence: Synthetic oligonucleotide
  Sense strand starting at position 636 of SEQ ID NO: 1563096
uuacaagcugguuguagau

SEQ ID NO: 1794860 - RNA, 19 nt, Artificial Sequence
  Description of Artificial Sequence: Synthetic oligonucleotide
  Antisense strand to SEQ ID NO: 1794859
aucuacaaccagcuuguaa

SEQ ID NO: 1794861 - RNA, 19 nt, Artificial Sequence
  Description of Artificial Sequence: Synthetic oligonucleotide
  Sense strand starting at position 648 of SEQ ID NO: 1563096
uguagauacuagcucuaug

SEQ ID NO: 1794862 - RNA, 19 nt, Artificial Sequence
  Description of Artificial Sequence: Synthetic oligonucleotide
  Antisense strand to SEQ ID NO: 1794861
cauagagcuaguaucuaca

SEQ ID NO: 1794863 - RNA, 19 nt, Artificial Sequence
  Description of Artificial Sequence: Synthetic oligonucleotide
  Sense strand starting at position 769 of SEQ ID NO: 1563096
ugcaguaccuguuuaauga

SEQ ID NO: 1794864 - RNA, 19 nt, Artificial Sequence
  Description of Artificial Sequence: Synthetic oligonucleotide
  Antisense strand to SEQ ID NO: 1794863
ucauuaaacagguacugca

SEQ ID NO: 1794865 - RNA, 19 nt, Artificial Sequence
  Description of Artificial Sequence: Synthetic oligonucleotide
  Sense strand starting at position 770 of SEQ ID NO: 1563096
gcaguaccuguuuaaugag

SEQ ID NO: 1794866 - RNA, 19 nt, Artificial Sequence
  Description of Artificial Sequence: Synthetic oligonucleotide
  Antisense strand to SEQ ID NO: 1794865
cucauuaaacagguacugc

SEQ ID NO: 1794867 - RNA, 19 nt, Artificial Sequence
  Description of Artificial Sequence: Synthetic oligonucleotide
  Sense strand starting at position 778 of SEQ ID NO: 1563096
uguuuaaugagacgacuac

SEQ ID NO: 1794868 - RNA, 19 nt, Artificial Sequence
  Description of Artificial Sequence: Synthetic oligonucleotide
  Antisense strand to SEQ ID NO: 1794867
guagucgucucauuaaaca

SEQ ID NO: 1794869 - RNA, 19 nt, Artificial Sequence
  Description of Artificial Sequence: Synthetic oligonucleotide
  Sense strand starting at position 1202 of SEQ ID NO: 1563096
agucauccugcucagaaau

SEQ ID NO: 1794870 - RNA, 19 nt, Artificial Sequence
  Description of Artificial Sequence: Synthetic oligonucleotide
  Antisense strand to SEQ ID NO: 1794869
auuucugagcaggaugacu

SEQ ID NO: 1794871 - RNA, 19 nt, Artificial Sequence
  Description of Artificial Sequence: Synthetic oligonucleotide
  Sense strand starting at position 1262 of SEQ ID NO: 1563096
gacacucaguugccaagaa

SEQ ID NO: 1794872 - RNA, 19 nt, Artificial Sequence
  Description of Artificial Sequence: Synthetic oligonucleotide
  Antisense strand to SEQ ID NO: 1794871
uucuuggcaacugaguguc

SEQ ID NO: 1794873 - RNA, 19 nt, Artificial Sequence
  Description of Artificial Sequence: Synthetic oligonucleotide
  Sense strand starting at position 1432 of SEQ ID NO: 1563096
aguccagccucucuggaaa

SEQ ID NO: 1794874 - RNA, 19 nt, Artificial Sequence
  Description of Artificial Sequence: Synthetic oligonucleotide
  Antisense strand to SEQ ID NO: 1794873
uuuccagagaggcuggacu

SEQ ID NO: 1794875 - RNA, 19 nt, Artificial Sequence
  Description of Artificial Sequence: Synthetic oligonucleotide
  Sense strand starting at position 1453 of SEQ ID NO: 1563096
cagugagguccugaaguuc

SEQ ID NO: 1794876 - RNA, 19 nt, Artificial Sequence
  Description of Artificial Sequence: Synthetic oligonucleotide
  Antisense strand to SEQ ID NO: 1794875
gaacuucaggaccucacug

SEQ ID NO: 1794877 - RNA, 19 nt, Artificial Sequence
  Description of Artificial Sequence: Synthetic oligonucleotide
  Sense strand starting at position 1608 of SEQ ID NO: 1563096
cugcuuccucggccgaaau

SEQ ID NO: 1794878 - RNA, 19 nt, Artificial Sequence
  Description of Artificial Sequence: Synthetic oligonucleotide
  Antisense strand to SEQ ID NO: 1794877
auuucggccgaggaagcag

SEQ ID NO: 1794879 - RNA, 19 nt, Artificial Sequence
  Description of Artificial Sequence: Synthetic oligonucleotide
  Sense strand starting at position 1619 of SEQ ID NO: 1563096
gccgaaauaucucucuauc

SEQ ID NO: 1794880 - RNA, 19 nt, Artificial Sequence
  Description of Artificial Sequence: Synthetic oligonucleotide
  Antisense strand to SEQ ID NO: 1794879
gauagagagauauuucggc

SEQ ID NO: 1794881 - RNA, 19 nt, Artificial Sequence
  Description of Artificial Sequence: Synthetic oligonucleotide
  Sense strand starting at position 1621 of SEQ ID NO: 1563096
cgaaauaucucucuaucug

SEQ ID NO: 1794882 - RNA, 19 nt, Artificial Sequence
  Description of Artificial Sequence: Synthetic oligonucleotide
  Antisense strand to SEQ ID NO: 1794881
cagauagagagauauuucg

SEQ ID NO: 1794883 - RNA, 19 nt, Artificial Sequence
  Description of Artificial Sequence: Synthetic oligonucleotide
  Sense strand starting at position 1781 of SEQ ID NO: 1563096
guaaacguuggcuaucacu

SEQ ID NO: 1794884 - RNA, 19 nt, Artificial Sequence
  Description of Artificial Sequence: Synthetic oligonucleotide
  Antisense strand to SEQ ID NO: 1794883
agugauagccaacguuuac

SEQ ID NO: 1794885 - RNA, 19 nt, Artificial Sequence
  Description of Artificial Sequence: Synthetic oligonucleotide
  Sense strand starting at position 1787 of SEQ ID NO: 1563096
guuggcuaucacuauuauu

SEQ ID NO: 1794886 - RNA, 19 nt, Artificial Sequence
  Description of Artificial Sequence: Synthetic oligonucleotide
  Antisense strand to SEQ ID NO: 1794885
aauaauagugauagccaac

SEQ ID NO: 1794887 - RNA, 19 nt, Artificial Sequence
  Description of Artificial Sequence: Synthetic oligonucleotide
  Sense strand starting at position 2406 of SEQ ID NO: 1563096
uggguugaccaguaaaggu

SEQ ID NO: 1794888 - RNA, 19 nt, Artificial Sequence
  Description of Artificial Sequence: Synthetic oligonucleotide
  Antisense strand to SEQ ID NO: 1794887
accuuuacuggucaaccca

SEQ ID NO: 1794889 - RNA, 19 nt, Artificial Sequence
  Description of Artificial Sequence: Synthetic oligonucleotide
  Sense strand starting at position 2410 of SEQ ID NO: 1563096
uugaccaguaaaggugaua

SEQ ID NO: 1794890 - RNA, 19 nt, Artificial Sequence
  Description of Artificial Sequence: Synthetic oligonucleotide
  Antisense strand to SEQ ID NO: 1794889
uaucaccuuuacuggucaa

SEQ ID NO: 1794891 - RNA, 19 nt, Artificial Sequence
  Description of Artificial Sequence: Synthetic oligonucleotide
  Sense strand starting at position 2677 of SEQ ID NO: 1563096
gauggagcaggguguuaau

SEQ ID NO: 1794892 - RNA, 19 nt, Artificial Sequence
  Description of Artificial Sequence: Synthetic oligonucleotide
  Antisense strand to SEQ ID NO: 1794891
auuaacacccugcuccauc

SEQ ID NO: 1794893 - RNA, 19 nt, Artificial Sequence
  Description of Artificial Sequence: Synthetic oligonucleotide
  Sense strand starting at position 2687 of SEQ ID NO: 1563096
gguguuaaugccuacuucu

SEQ ID NO: 1794894 - RNA, 19 nt, Artificial Sequence
  Description of Artificial Sequence: Synthetic oligonucleotide
  Antisense strand to SEQ ID NO: 1794893
agaaguaggcauuaacacc

SEQ ID NO: 1794895 - RNA, 19 nt, Artificial Sequence
  Description of Artificial Sequence: Synthetic oligonucleotide
  Sense strand starting at position 2764 of SEQ ID NO: 1563096
ucacaagaaucugugcaca

SEQ ID NO: 1794896 - RNA, 19 nt, Artificial Sequence
  Description of Artificial Sequence: Synthetic oligonucleotide
  Antisense strand to SEQ ID NO: 1794895
ugugcacagauucuuguga

SEQ ID NO: 1794897 - RNA, 19 nt, Artificial Sequence
  Description of Artificial Sequence: Synthetic oligonucleotide
  Sense strand starting at position 2766 of SEQ ID NO: 1563096
acaagaaucugugcacauc

SEQ ID NO: 1794898 - RNA, 19 nt, Artificial Sequence
  Description of Artificial Sequence: Synthetic oligonucleotide
  Antisense strand to SEQ ID NO: 1794897
gaugugcacagauucuugu

SEQ ID NO: 1794899 - RNA, 19 nt, Artificial Sequence
  Description of Artificial Sequence: Synthetic oligonucleotide
  Sense strand starting at position 2786 of SEQ ID NO: 1563096
cuggaugcaccuuaaauca

SEQ ID NO: 1794900 - RNA, 19 nt, Artificial Sequence
  Description of Artificial Sequence: Synthetic oligonucleotide
  Antisense strand to SEQ ID NO: 1794899
ugauuuaaggugcauccag

SEQ ID NO: 1794901 - RNA, 19 nt, Artificial Sequence
  Description of Artificial Sequence: Synthetic oligonucleotide
  Sense strand starting at position 3087 of SEQ ID NO: 1563096
uugagcuaugauuaaagcu

SEQ ID NO: 1794902 - RNA, 19 nt, Artificial Sequence
  Description of Artificial Sequence: Synthetic oligonucleotide
  Antisense strand to SEQ ID NO: 1794901
agcuuuaaucauagcucaa

SEQ ID NO: 1794903 - RNA, 19 nt, Artificial Sequence
  Description of Artificial Sequence: Synthetic oligonucleotide
  Sense strand starting at position 3095 of SEQ ID NO: 1563096
ugauuaaagcugcaauaac

SEQ ID NO: 1794904 - RNA, 19 nt, Artificial Sequence
  Description of Artificial Sequence: Synthetic oligonucleotide
  Antisense strand to SEQ ID NO: 1794903
guuauugcagcuuuaauca

SEQ ID NO: 1794905 - RNA, 19 nt, Artificial Sequence
  Description of Artificial Sequence: Synthetic oligonucleotide
  Sense strand starting at position 3174 of SEQ ID NO: 1563096
cuguaugacguugaugaca

SEQ ID NO: 1794906 - RNA, 19 nt, Artificial Sequence
  Description of Artificial Sequence: Synthetic oligonucleotide
  Antisense strand to SEQ ID NO: 1794905
ugucaucaacgucauacag

SEQ ID NO: 1794907 - RNA, 19 nt, Artificial Sequence
  Description of Artificial Sequence: Synthetic oligonucleotide
  Sense strand starting at position 3221 of SEQ ID NO: 1563096
cgaucugaguaauuauaga

SEQ ID NO: 1794908 - RNA, 19 nt, Artificial Sequence
  Description of Artificial Sequence: Synthetic oligonucleotide
  Antisense strand to SEQ ID NO: 1794907
ucuauaauuacucagaucg

SEQ ID NO: 1794909 - RNA, 19 nt, Artificial Sequence
  Description of Artificial Sequence: Synthetic oligonucleotide
  Sense strand starting at position 3286 of SEQ ID NO: 1563096
cugggaggccugugacaga

SEQ ID NO: 1794910 - RNA, 19 nt, Artificial Sequence
  Description of Artificial Sequence: Synthetic oligonucleotide
  Antisense strand to SEQ ID NO: 1794909
ucugucacaggccucccag

SEQ ID NO: 1794911 - RNA, 19 nt, Artificial Sequence
  Description of Artificial Sequence: Synthetic oligonucleotide
  Sense strand starting at position 3364 of SEQ ID NO: 1563096
gcaacuuuggguuauccua

SEQ ID NO: 1794912 - RNA, 19 nt, Artificial Sequence
  Description of Artificial Sequence: Synthetic oligonucleotide
  Antisense strand to SEQ ID NO: 1794911
uaggauaacccaaaguugc

SEQ ID NO: 1794913 - RNA, 19 nt, Artificial Sequence
  Description of Artificial Sequence: Synthetic oligonucleotide
  Sense strand starting at position 3402 of SEQ ID NO: 1563096
ccagauucucacuguagga

SEQ ID NO: 1794914 - RNA, 19 nt, Artificial Sequence
  Description of Artificial Sequence: Synthetic oligonucleotide
  Antisense strand to SEQ ID NO: 1794913
uccuacagugagaaucugg

SEQ ID NO: 1794915 - RNA, 19 nt, Artificial Sequence
  Description of Artificial Sequence: Synthetic oligonucleotide
  Sense strand starting at position 3507 of SEQ ID NO: 1563096
uugguaucucuggauuaau

SEQ ID NO: 1794916 - RNA, 19 nt, Artificial Sequence
  Description of Artificial Sequence: Synthetic oligonucleotide
  Antisense strand to SEQ ID NO: 1794915
auuaauccagagauaccaa

SEQ ID NO: 1794917 - RNA, 19 nt, Artificial Sequence
  Description of Artificial Sequence: Synthetic oligonucleotide
  Sense strand starting at position 3510 of SEQ ID NO: 1563096
guaucucuggauuaaugua

SEQ ID NO: 1794918 - RNA, 19 nt, Artificial Sequence
  Description of Artificial Sequence: Synthetic oligonucleotide
  Antisense strand to SEQ ID NO: 1794917
uacauuaauccagagauac

SEQ ID NO: 1794919 - RNA, 19 nt, Artificial Sequence
  Description of Artificial Sequence: Synthetic oligonucleotide
  Sense strand starting at position 3518 of SEQ ID NO: 1563096
ggauuaauguaugucuugu

SEQ ID NO: 1794920 - RNA, 19 nt, Artificial Sequence
  Description of Artificial Sequence: Synthetic oligonucleotide
  Antisense strand to SEQ ID NO: 1794919
acaagacauacauuaaucc

SEQ ID NO: 1794921 - RNA, 19 nt, Artificial Sequence
  Description of Artificial Sequence: Synthetic oligonucleotide
  Sense strand starting at position 155 of SEQ ID NO: 1563097
ugcauaauucuuggcauuu

SEQ ID NO: 1794922 - RNA, 19 nt, Artificial Sequence
  Description of Artificial Sequence: Synthetic oligonucleotide
  Antisense strand to SEQ ID NO: 1794921
aaaugccaagaauuaugca

SEQ ID NO: 1794923 - RNA, 19 nt, Artificial Sequence
  Description of Artificial Sequence: Synthetic oligonucleotide
  Sense strand starting at position 246 of SEQ ID NO: 1563097
ucaguuugagauugaggga

SEQ ID NO: 1794924 - RNA, 19 nt, Artificial Sequence
  Description of Artificial Sequence: Synthetic oligonucleotide
  Antisense strand to SEQ ID NO: 1794923
ucccucaaucucaaacuga

SEQ ID NO: 1794925 - RNA, 19 nt, Artificial Sequence
  Description of Artificial Sequence: Synthetic oligonucleotide
  Sense strand starting at position 300 of SEQ ID NO: 1563097
ccuggaagaugucucaguu

SEQ ID NO: 1794926 - RNA, 19 nt, Artificial Sequence
  Description of Artificial Sequence: Synthetic oligonucleotide
  Antisense strand to SEQ ID NO: 1794925
aacugagacaucuuccagg

SEQ ID NO: 1794927 - RNA, 19 nt, Artificial Sequence
  Description of Artificial Sequence: Synthetic oligonucleotide
  Sense strand starting at position 304 of SEQ ID NO: 1563097
gaagaugucucaguucuuc

SEQ ID NO: 1794928 - RNA, 19 nt, Artificial Sequence
  Description of Artificial Sequence: Synthetic oligonucleotide
  Antisense strand to SEQ ID NO: 1794927
gaagaacugagacaucuuc

SEQ ID NO: 1794929 - RNA, 19 nt, Artificial Sequence
  Description of Artificial Sequence: Synthetic oligonucleotide
  Sense strand starting at position 341 of SEQ ID NO: 1563097
aagagauuauaagugcgua

SEQ ID NO: 1794930 - RNA, 19 nt, Artificial Sequence
  Description of Artificial Sequence: Synthetic oligonucleotide
  Antisense strand to SEQ ID NO: 1794929
uacgcacuuauaaucucuu

SEQ ID NO: 1794931 - RNA, 19 nt, Artificial Sequence
  Description of Artificial Sequence: Synthetic oligonucleotide
  Sense strand starting at position 402 of SEQ ID NO: 1563097
ggaccuaaauuggcugaaa

SEQ ID NO: 1794932 - RNA, 19 nt, Artificial Sequence
  Description of Artificial Sequence: Synthetic oligonucleotide
  Antisense strand to SEQ ID NO: 1794931
uuucagccaauuuaggucc

SEQ ID NO: 1794933 - RNA, 19 nt, Artificial Sequence
  Description of Artificial Sequence: Synthetic oligonucleotide
  Sense strand starting at position 786 of SEQ ID NO: 1563097
uuggaugucucuccagauc

SEQ ID NO: 1794934 - RNA, 19 nt, Artificial Sequence
  Description of Artificial Sequence: Synthetic oligonucleotide
  Antisense strand to SEQ ID NO: 1794933
gaucuggagagacauccaa

SEQ ID NO: 1794935 - RNA, 19 nt, Artificial Sequence
  Description of Artificial Sequence: Synthetic oligonucleotide
  Sense strand starting at position 795 of SEQ ID NO: 1563097
ucuccagaucaaugggagu

SEQ ID NO: 1794936 - RNA, 19 nt, Artificial Sequence
  Description of Artificial Sequence: Synthetic oligonucleotide
  Antisense strand to SEQ ID NO: 1794935
acucccauugaucuggaga

SEQ ID NO: 1794937 - RNA, 19 nt, Artificial Sequence
  Description of Artificial Sequence: Synthetic oligonucleotide
  Sense strand starting at position 801 of SEQ ID NO: 1563097
gaucaaugggagugguuaa

SEQ ID NO: 1794938 - RNA, 19 nt, Artificial Sequence
  Description of Artificial Sequence: Synthetic oligonucleotide
  Antisense strand to SEQ ID NO: 1794937
uuaaccacucccauugauc

SEQ ID NO: 1794939 - RNA, 19 nt, Artificial Sequence
  Description of Artificial Sequence: Synthetic oligonucleotide
  Sense strand starting at position 870 of SEQ ID NO: 1563097
ggaaguugcacuggucaca

SEQ ID NO: 1794940 - RNA, 19 nt, Artificial Sequence
  Description of Artificial Sequence: Synthetic oligonucleotide
  Antisense strand to SEQ ID NO: 1794939
ugugaccagugcaacuucc

SEQ ID NO: 1794941 - RNA, 19 nt, Artificial Sequence
  Description of Artificial Sequence: Synthetic oligonucleotide
  Sense strand starting at position 1041 of SEQ ID NO: 1563097
agcacagugcaugauacau

SEQ ID NO: 1794942 - RNA, 19 nt, Artificial Sequence
  Description of Artificial Sequence: Synthetic oligonucleotide
  Antisense strand to SEQ ID NO: 1794941
auguaucaugcacugugcu

SEQ ID NO: 1794943 - RNA, 19 nt, Artificial Sequence
  Description of Artificial Sequence: Synthetic oligonucleotide
  Sense strand starting at position 1101 of SEQ ID NO: 1563097
cuuucuccugaggaaugua

SEQ ID NO: 1794944 - RNA, 19 nt, Artificial Sequence
  Description of Artificial Sequence: Synthetic oligonucleotide
  Antisense strand to SEQ ID NO: 1794943
uacauuccucaggagaaag

SEQ ID NO: 1794945 - RNA, 19 nt, Artificial Sequence
  Description of Artificial Sequence: Synthetic oligonucleotide
  Sense strand starting at position 1109 of SEQ ID NO: 1563097
ugaggaauguaagcaauga

SEQ ID NO: 1794946 - RNA, 19 nt, Artificial Sequence
  Description of Artificial Sequence: Synthetic oligonucleotide
  Antisense strand to SEQ ID NO: 1794945
ucauugcuuacauuccuca

SEQ ID NO: 1794947 - RNA, 19 nt, Artificial Sequence
  Description of Artificial Sequence: Synthetic oligonucleotide
  Sense strand starting at position 1190 of SEQ ID NO: 1563097
cacaaucgugcucagguua

SEQ ID NO: 1794948 - RNA, 19 nt, Artificial Sequence
  Description of Artificial Sequence: Synthetic oligonucleotide
  Antisense strand to SEQ ID NO: 1794947
uaaccugagcacgauugug

SEQ ID NO: 1794949 - RNA, 19 nt, Artificial Sequence
  Description of Artificial Sequence: Synthetic oligonucleotide
  Sense strand starting at position 1197 of SEQ ID NO: 1563097
gugcucagguuacuauuaa

SEQ ID NO: 1794950 - RNA, 19 nt, Artificial Sequence
  Description of Artificial Sequence: Synthetic oligonucleotide
  Antisense strand to SEQ ID NO: 1794949
uuaauaguaaccugagcac

SEQ ID NO: 1794951 - RNA, 19 nt, Artificial Sequence
  Description of Artificial Sequence: Synthetic oligonucleotide
  Sense strand starting at position 1248 of SEQ ID NO: 1563097
agaagaaacuugcucaacu

SEQ ID NO: 1794952 - RNA, 19 nt, Artificial Sequence
  Description of Artificial Sequence: Synthetic oligonucleotide
  Antisense strand to SEQ ID NO: 1794951
aguugagcaaguuucuucu

SEQ ID NO: 1794953 - RNA, 19 nt, Artificial Sequence
  Description of Artificial Sequence: Synthetic oligonucleotide
  Sense strand starting at position 1289 of SEQ ID NO: 1563097
ggaccaguguuccuaucca

SEQ ID NO: 1794954 - RNA, 19 nt, Artificial Sequence
  Description of Artificial Sequence: Synthetic oligonucleotide
  Antisense strand to SEQ ID NO: 1794953
uggauaggaacacuggucc

SEQ ID NO: 1794955 - RNA, 19 nt, Artificial Sequence
  Description of Artificial Sequence: Synthetic oligonucleotide
  Sense strand starting at position 1349 of SEQ ID NO: 1563097
ccaacugucuacgugggaa

SEQ ID NO: 1794956 - RNA, 19 nt, Artificial Sequence
  Description of Artificial Sequence: Synthetic oligonucleotide
  Antisense strand to SEQ ID NO: 1794955
uucccacguagacaguugg

SEQ ID NO: 1794957 - RNA, 19 nt, Artificial Sequence
  Description of Artificial Sequence: Synthetic oligonucleotide
  Sense strand starting at position 1437 of SEQ ID NO: 1563097
gaccgucgccugcucaaau

SEQ ID NO: 1794958 - RNA, 19 nt, Artificial Sequence
  Description of Artificial Sequence: Synthetic oligonucleotide
  Antisense strand to SEQ ID NO: 1794957
auuugagcaggcgacgguc

SEQ ID NO: 1794959 - RNA, 19 nt, Artificial Sequence
  Description of Artificial Sequence: Synthetic oligonucleotide
  Sense strand starting at position 1448 of SEQ ID NO: 1563097
gcucaaaucugcccuugaa

SEQ ID NO: 1794960 - RNA, 19 nt, Artificial Sequence
  Description of Artificial Sequence: Synthetic oligonucleotide
  Antisense strand to SEQ ID NO: 1794959
uucaagggcagauuugagc

SEQ ID NO: 1794961 - RNA, 19 nt, Artificial Sequence
  Description of Artificial Sequence: Synthetic oligonucleotide
  Sense strand starting at position 2105 of SEQ ID NO: 1563097
agguauuccuauccuggga

SEQ ID NO: 1794962 - RNA, 19 nt, Artificial Sequence
  Description of Artificial Sequence: Synthetic oligonucleotide
  Antisense strand to SEQ ID NO: 1794961
ucccaggauaggaauaccu

SEQ ID NO: 1794963 - RNA, 19 nt, Artificial Sequence
  Description of Artificial Sequence: Synthetic oligonucleotide
  Sense strand starting at position 2109 of SEQ ID NO: 1563097
auuccuauccugggaauga

SEQ ID NO: 1794964 - RNA, 19 nt, Artificial Sequence
  Description of Artificial Sequence: Synthetic oligonucleotide
  Antisense strand to SEQ ID NO: 1794963
ucauucccaggauaggaau

SEQ ID NO: 1794965 - RNA, 19 nt, Artificial Sequence
  Description of Artificial Sequence: Synthetic oligonucleotide
  Sense strand starting at position 2204 of SEQ ID NO: 1563097
agaauuccuggcuguuaga

SEQ ID NO: 1794966 - RNA, 19 nt, Artificial Sequence
  Description of Artificial Sequence: Synthetic oligonucleotide
  Antisense strand to SEQ ID NO: 1794965
ucuaacagccaggaauucu

SEQ ID NO: 1794967 - RNA, 19 nt, Artificial Sequence
  Description of Artificial Sequence: Synthetic oligonucleotide
  Sense strand starting at position 2215 of SEQ ID NO: 1563097
cuguuagaauaugucaaac

SEQ ID NO: 1794968 - RNA, 19 nt, Artificial Sequence
  Description of Artificial Sequence: Synthetic oligonucleotide
  Antisense strand to SEQ ID NO: 1794967
guuugacauauucuaacag

SEQ ID NO: 1794969 - RNA, 19 nt, Artificial Sequence
  Description of Artificial Sequence: Synthetic oligonucleotide
  Sense strand starting at position 2301 of SEQ ID NO: 1563097
ucccaaagcucucugggaa

SEQ ID NO: 1794970 - RNA, 19 nt, Artificial Sequence
  Description of Artificial Sequence: Synthetic oligonucleotide
  Antisense strand to SEQ ID NO: 1794969
uucccagagagcuuuggga

SEQ ID NO: 1794971 - RNA, 19 nt, Artificial Sequence
  Description of Artificial Sequence: Synthetic oligonucleotide
  Sense strand starting at position 2653 of SEQ ID NO: 1563097
agucuuguccuggagguua

SEQ ID NO: 1794972 - RNA, 19 nt, Artificial Sequence
  Description of Artificial Sequence: Synthetic oligonucleotide
  Antisense strand to SEQ ID NO: 1794971
uaaccuccaggacaagacu

SEQ ID NO: 1794973 - RNA, 19 nt, Artificial Sequence
  Description of Artificial Sequence: Synthetic oligonucleotide
  Sense strand starting at position 2655 of SEQ ID NO: 1563097
ucuuguccuggagguuaaa

SEQ ID NO: 1794974 - RNA, 19 nt, Artificial Sequence
  Description of Artificial Sequence: Synthetic oligonucleotide
  Antisense strand to SEQ ID NO: 1794973
uuuaaccuccaggacaaga

SEQ ID NO: 1794975 - RNA, 19 nt, Artificial Sequence
  Description of Artificial Sequence: Synthetic oligonucleotide
  Sense strand starting at position 2800 of SEQ ID NO: 1563097
gagcaagggcuuuggagua

SEQ ID NO: 1794976 - RNA, 19 nt, Artificial Sequence
  Description of Artificial Sequence: Synthetic oligonucleotide
  Antisense strand to SEQ ID NO: 1794975
uacuccaaagcccuugcuc

SEQ ID NO: 1794977 - RNA, 19 nt, Artificial Sequence
  Description of Artificial Sequence: Synthetic oligonucleotide
  Sense strand starting at position 2953 of SEQ ID NO: 1563097
aacagauagugcuuugguu

SEQ ID NO: 1794978 - RNA, 19 nt, Artificial Sequence
  Description of Artificial Sequence: Synthetic oligonucleotide
  Antisense strand to SEQ ID NO: 1794977
aaccaaagcacuaucuguu

SEQ ID NO: 1794979 - RNA, 19 nt, Artificial Sequence
  Description of Artificial Sequence: Synthetic oligonucleotide
  Sense strand starting at position 2955 of SEQ ID NO: 1563097
cagauagugcuuugguuga

SEQ ID NO: 1794980 - RNA, 19 nt, Artificial Sequence
  Description of Artificial Sequence: Synthetic oligonucleotide
  Antisense strand to SEQ ID NO: 1794979
ucaaccaaagcacuaucug

SEQ ID NO: 1794981 - RNA, 19 nt, Artificial Sequence
  Description of Artificial Sequence: Synthetic oligonucleotide
  Sense strand starting at position 3106 of SEQ ID NO: 1563097
cugggauguuugagggaaa

SEQ ID NO: 1794982 - RNA, 19 nt, Artificial Sequence
  Description of Artificial Sequence: Synthetic oligonucleotide
  Antisense strand to SEQ ID NO: 1794981
uuucccucaaacaucccag

SEQ ID NO: 1794983 - RNA, 19 nt, Artificial Sequence
  Description of Artificial Sequence: Synthetic oligonucleotide
  Sense strand starting at position 3457 of SEQ ID NO: 1563097
guuauuguaguagaucauu

SEQ ID NO: 1794984 - RNA, 19 nt, Artificial Sequence
  Description of Artificial Sequence: Synthetic oligonucleotide
  Antisense strand to SEQ ID NO: 1794983
aaugaucuacuacaauaac

SEQ ID NO: 1794985 - RNA, 19 nt, Artificial Sequence
  Description of Artificial Sequence: Synthetic oligonucleotide
  Sense strand starting at position 3465 of SEQ ID NO: 1563097
aguagaucauuugagggaa

SEQ ID NO: 1794986 - RNA, 19 nt, Artificial Sequence
  Description of Artificial Sequence: Synthetic oligonucleotide
  Antisense strand to SEQ ID NO: 1794985
uucccucaaaugaucuacu

SEQ ID NO: 1794987 - RNA, 19 nt, Artificial Sequence
  Description of Artificial Sequence: Synthetic oligonucleotide
  Sense strand starting at position 3467 of SEQ ID NO: 1563097
uagaucauuugagggaaga

SEQ ID NO: 1794988 - RNA, 19 nt, Artificial Sequence
  Description of Artificial Sequence: Synthetic oligonucleotide
  Antisense strand to SEQ ID NO: 1794987
ucuucccucaaaugaucua

SEQ ID NO: 1794989 - RNA, 19 nt, Artificial Sequence
  Description of Artificial Sequence: Synthetic oligonucleotide
  Sense strand starting at position 3478 of SEQ ID NO: 1563097
agggaagaugggugguuau

SEQ ID NO: 1794990 - RNA, 19 nt, Artificial Sequence
  Description of Artificial Sequence: Synthetic oligonucleotide
  Antisense strand to SEQ ID NO: 1794989
auaaccacccaucuucccu

SEQ ID NO: 1794991 - RNA, 19 nt, Artificial Sequence
  Description of Artificial Sequence: Synthetic oligonucleotide
  Sense strand starting at position 3479 of SEQ ID NO: 1563097
gggaagaugggugguuauu

SEQ ID NO: 1794992 - RNA, 19 nt, Artificial Sequence
  Description of Artificial Sequence: Synthetic oligonucleotide
  Antisense strand to SEQ ID NO: 1794991
aauaaccacccaucuuccc

SEQ ID NO: 1794993 - RNA, 19 nt, Artificial Sequence
  Description of Artificial Sequence: Synthetic oligonucleotide
  Sense strand starting at position 3781 of SEQ ID NO: 1563097
ccugaugggugguaauuua

SEQ ID NO: 1794994 - RNA, 19 nt, Artificial Sequence
  Description of Artificial Sequence: Synthetic oligonucleotide
  Antisense strand to SEQ ID NO: 1794993
uaaauuaccacccaucagg

SEQ ID NO: 1794995 - RNA, 19 nt, Artificial Sequence
  Description of Artificial Sequence: Synthetic oligonucleotide
  Sense strand starting at position 3823 of SEQ ID NO: 1563097
ugaucagauuugggaugua

SEQ ID NO: 1794996 - RNA, 19 nt, Artificial Sequence
  Description of Artificial Sequence: Synthetic oligonucleotide
  Antisense strand to SEQ ID NO: 1794995
uacaucccaaaucugauca

SEQ ID NO: 1794997 - RNA, 19 nt, Artificial Sequence
  Description of Artificial Sequence: Synthetic oligonucleotide
  Sense strand starting at position 3835 of SEQ ID NO: 1563097
ggauguaauuugggaggga

SEQ ID NO: 1794998 - RNA, 19 nt, Artificial Sequence
  Description of Artificial Sequence: Synthetic oligonucleotide
  Antisense strand to SEQ ID NO: 1794997
ucccucccaaauuacaucc

SEQ ID NO: 1794999 - RNA, 19 nt, Artificial Sequence
  Description of Artificial Sequence: Synthetic oligonucleotide
  Sense strand starting at position 3836 of SEQ ID NO: 1563097
gauguaauuugggagggag

SEQ ID NO: 1795000 - RNA, 19 nt, Artificial Sequence
  Description of Artificial Sequence: Synthetic oligonucleotide
  Antisense strand to SEQ ID NO: 1794999
cucccucccaaauuacauc

SEQ ID NO: 1795001 - RNA, 19 nt, Artificial Sequence
  Description of Artificial Sequence: Synthetic oligonucleotide
  Sense strand starting at position 111 of SEQ ID NO: 1563098
guuugcaccguguuagcua

SEQ ID NO: 1795002 - RNA, 19 nt, Artificial Sequence
  Description of Artificial Sequence: Synthetic oligonucleotide
  Antisense strand to SEQ ID NO: 1795001
uagcuaacacggugcaaac

SEQ ID NO: 1795003 - RNA, 19 nt, Artificial Sequence
  Description of Artificial Sequence: Synthetic oligonucleotide
  Sense strand starting at position 224 of SEQ ID NO: 1563098
gcauuucuugaguaaucgu

SEQ ID NO: 1795004 - RNA, 19 nt, Artificial Sequence
  Description of Artificial Sequence: Synthetic oligonucleotide
  Antisense strand to SEQ ID NO: 1795003
acgauuacucaagaaaugc

SEQ ID NO: 1795005 - RNA, 19 nt, Artificial Sequence
  Description of Artificial Sequence: Synthetic oligonucleotide
  Sense strand starting at position 242 of SEQ ID NO: 1563098
uaauaugcggguuagaaca

SEQ ID NO: 1795006 - RNA, 19 nt, Artificial Sequence
  Description of Artificial Sequence: Synthetic oligonucleotide
  Antisense strand to SEQ ID NO: 1795005
uguucuaacccgcauauua

SEQ ID NO: 1795007 - RNA, 19 nt, Artificial Sequence
  Description of Artificial Sequence: Synthetic oligonucleotide
  Sense strand starting at position 354 of SEQ ID NO: 1563098
ggacuuaccuucuuugaaa

SEQ ID NO: 1795008 - RNA, 19 nt, Artificial Sequence
  Description of Artificial Sequence: Synthetic oligonucleotide
  Antisense strand to SEQ ID NO: 1795007
uuucaaagaagguaagucc

SEQ ID NO: 1795009 - RNA, 19 nt, Artificial Sequence
  Description of Artificial Sequence: Synthetic oligonucleotide
  Sense strand starting at position 365 of SEQ ID NO: 1563098
cuuugaaacuauguuuaug

SEQ ID NO: 1795010 - RNA, 19 nt, Artificial Sequence
  Description of Artificial Sequence: Synthetic oligonucleotide
  Antisense strand to SEQ ID NO: 1795009
cauaaacauaguuucaaag

SEQ ID NO: 1795011 - RNA, 19 nt, Artificial Sequence
  Description of Artificial Sequence: Synthetic oligonucleotide
  Sense strand starting at position 426 of SEQ ID NO: 1563098
gucagaacugugcaacaca

SEQ ID NO: 1795012 - RNA, 19 nt, Artificial Sequence
  Description of Artificial Sequence: Synthetic oligonucleotide
  Antisense strand to SEQ ID NO: 1795011
uguguugcacaguucugac

SEQ ID NO: 1795013 - RNA, 19 nt, Artificial Sequence
  Description of Artificial Sequence: Synthetic oligonucleotide
  Sense strand starting at position 788 of SEQ ID NO: 1563098
aagagagguuaagacuaaa

SEQ ID NO: 1795014 - RNA, 19 nt, Artificial Sequence
  Description of Artificial Sequence: Synthetic oligonucleotide
  Antisense strand to SEQ ID NO: 1795013
uuuagucuuaaccucucuu

SEQ ID NO: 1795015 - RNA, 19 nt, Artificial Sequence
  Description of Artificial Sequence: Synthetic oligonucleotide
  Sense strand starting at position 940 of SEQ ID NO: 1563098
gccguaucugugccaguaa

SEQ ID NO: 1795016 - RNA, 19 nt, Artificial Sequence
  Description of Artificial Sequence: Synthetic oligonucleotide
  Antisense strand to SEQ ID NO: 1795015
uuacuggcacagauacggc

SEQ ID NO: 1795017 - RNA, 19 nt, Artificial Sequence
  Description of Artificial Sequence: Synthetic oligonucleotide
  Sense strand starting at position 1486 of SEQ ID NO: 1563098
acacauuugucugcauugu

SEQ ID NO: 1795018 - RNA, 19 nt, Artificial Sequence
  Description of Artificial Sequence: Synthetic oligonucleotide
  Antisense strand to SEQ ID NO: 1795017
acaaugcagacaaaugugu

SEQ ID NO: 1795019 - RNA, 19 nt, Artificial Sequence
  Description of Artificial Sequence: Synthetic oligonucleotide
  Sense strand starting at position 1490 of SEQ ID NO: 1563098
auuugucugcauuguuuga

SEQ ID NO: 1795020 - RNA, 19 nt, Artificial Sequence
  Description of Artificial Sequence: Synthetic oligonucleotide
  Antisense strand to SEQ ID NO: 1795019
ucaaacaaugcagacaaau

SEQ ID NO: 1795021 - RNA, 19 nt, Artificial Sequence
  Description of Artificial Sequence: Synthetic oligonucleotide
  Sense strand starting at position 1632 of SEQ ID NO: 1563098
gcacguaguaaauacagau

SEQ ID NO: 1795022 - RNA, 19 nt, Artificial Sequence
  Description of Artificial Sequence: Synthetic oligonucleotide
  Antisense strand to SEQ ID NO: 1795021
aucuguauuuacuacgugc

SEQ ID NO: 1795023 - RNA, 19 nt, Artificial Sequence
  Description of Artificial Sequence: Synthetic oligonucleotide
  Sense strand starting at position 1691 of SEQ ID NO: 1563098
uuaauuaucugacuggcau

SEQ ID NO: 1795024 - RNA, 19 nt, Artificial Sequence
  Description of Artificial Sequence: Synthetic oligonucleotide
  Antisense strand to SEQ ID NO: 1795023
augccagucagauaauuaa

SEQ ID NO: 1795025 - RNA, 19 nt, Artificial Sequence
  Description of Artificial Sequence: Synthetic oligonucleotide
  Sense strand starting at position 1724 of SEQ ID NO: 1563098
augucugugcuagaaagaa

SEQ ID NO: 1795026 - RNA, 19 nt, Artificial Sequence
  Description of Artificial Sequence: Synthetic oligonucleotide
  Antisense strand to SEQ ID NO: 1795025
uucuuucuagcacagacau

SEQ ID NO: 1795027 - RNA, 19 nt, Artificial Sequence
  Description of Artificial Sequence: Synthetic oligonucleotide
  Sense strand starting at position 2385 of SEQ ID NO: 1563098
guuagagucauuuggcguu

SEQ ID NO: 1795028 - RNA, 19 nt, Artificial Sequence
  Description of Artificial Sequence: Synthetic oligonucleotide
  Antisense strand to SEQ ID NO: 1795027
aacgccaaaugacucuaac

SEQ ID NO: 1795029 - RNA, 19 nt, Artificial Sequence
  Description of Artificial Sequence: Synthetic oligonucleotide
  Sense strand starting at position 2440 of SEQ ID NO: 1563098
gcuauuguauuucuuggau

SEQ ID NO: 1795030 - RNA, 19 nt, Artificial Sequence
  Description of Artificial Sequence: Synthetic oligonucleotide
  Antisense strand to SEQ ID NO: 1795029
auccaagaaauacaauagc

SEQ ID NO: 1795031 - RNA, 19 nt, Artificial Sequence
  Description of Artificial Sequence: Synthetic oligonucleotide
  Sense strand starting at position 2870 of SEQ ID NO: 1563098
gaaacaucguaagugaaac

SEQ ID NO: 1795032 - RNA, 19 nt, Artificial Sequence
  Description of Artificial Sequence: Synthetic oligonucleotide
  Antisense strand to SEQ ID NO: 1795031
guuucacuuacgauguuuc

SEQ ID NO: 1795033 - RNA, 19 nt, Artificial Sequence
  Description of Artificial Sequence: Synthetic oligonucleotide
  Sense strand starting at position 2880 of SEQ ID NO: 1563098
aagugaaaccacgguaagu

SEQ ID NO: 1795034 - RNA, 19 nt, Artificial Sequence
  Description of Artificial Sequence: Synthetic oligonucleotide
  Antisense strand to SEQ ID NO: 1795033
acuuaccgugguuucacuu

SEQ ID NO: 1795035 - RNA, 19 nt, Artificial Sequence
  Description of Artificial Sequence: Synthetic oligonucleotide
  Sense strand starting at position 2899 of SEQ ID NO: 1563098
gauggaccaucuguguaua

SEQ ID NO: 1795036 - RNA, 19 nt, Artificial Sequence
  Description of Artificial Sequence: Synthetic oligonucleotide
  Antisense strand to SEQ ID NO: 1795035
uauacacagaugguccauc

SEQ ID NO: 1795037 - RNA, 19 nt, Artificial Sequence
  Description of Artificial Sequence: Synthetic oligonucleotide
  Sense strand starting at position 2900 of SEQ ID NO: 1563098
auggaccaucuguguauau

SEQ ID NO: 1795038 - RNA, 19 nt, Artificial Sequence
  Description of Artificial Sequence: Synthetic oligonucleotide
  Antisense strand to SEQ ID NO: 1795037
auauacacagaugguccau

SEQ ID NO: 1795039 - RNA, 19 nt, Artificial Sequence
  Description of Artificial Sequence: Synthetic oligonucleotide
  Sense strand starting at position 2901 of SEQ ID NO: 1563098
uggaccaucuguguauaua

SEQ ID NO: 1795040 - RNA, 19 nt, Artificial Sequence
  Description of Artificial Sequence: Synthetic oligonucleotide
  Antisense strand to SEQ ID NO: 1795039
uauauacacagauggucca

SEQ ID NO: 1795041 - RNA, 19 nt, Artificial Sequence
  Description of Artificial Sequence: Synthetic oligonucleotide
  Sense strand starting at position 2902 of SEQ ID NO: 1563098
ggaccaucuguguauauau

SEQ ID NO: 1795042 - RNA, 19 nt, Artificial Sequence
  Description of Artificial Sequence: Synthetic oligonucleotide
  Antisense strand to SEQ ID NO: 1795041
auauauacacagauggucc

SEQ ID NO: 1795043 - RNA, 19 nt, Artificial Sequence
  Description of Artificial Sequence: Synthetic oligonucleotide
  Sense strand starting at position 2923 of SEQ ID NO: 1563098
gguuaagagaucuguaaca

SEQ ID NO: 1795044 - RNA, 19 nt, Artificial Sequence
  Description of Artificial Sequence: Synthetic oligonucleotide
  Antisense strand to SEQ ID NO: 1795043
uguuacagaucucuuaacc

SEQ ID NO: 1795045 - RNA, 19 nt, Artificial Sequence
  Description of Artificial Sequence: Synthetic oligonucleotide
  Sense strand starting at position 2977 of SEQ ID NO: 1563098
guauuucuuguauguagac

SEQ ID NO: 1795046 - RNA, 19 nt, Artificial Sequence
  Description of Artificial Sequence: Synthetic oligonucleotide
  Antisense strand to SEQ ID NO: 1795045
gucuacauacaagaaauac

SEQ ID NO: 1795047 - RNA, 19 nt, Artificial Sequence
  Description of Artificial Sequence: Synthetic oligonucleotide
  Sense strand starting at position 3048 of SEQ ID NO: 1563098
gcuggaauuugcgcaggaa

SEQ ID NO: 1795048 - RNA, 19 nt, Artificial Sequence
  Description of Artificial Sequence: Synthetic oligonucleotide
  Antisense strand to SEQ ID NO: 1795047
uuccugcgcaaauuccagc

SEQ ID NO: 1795049 - RNA, 19 nt, Artificial Sequence
  Description of Artificial Sequence: Synthetic oligonucleotide
  Sense strand starting at position 3088 of SEQ ID NO: 1563098
agcgaucauucuuucugaa

SEQ ID NO: 1795050 - RNA, 19 nt, Artificial Sequence
  Description of Artificial Sequence: Synthetic oligonucleotide
  Antisense strand to SEQ ID NO: 1795049
uucagaaagaaugaucgcu

SEQ ID NO: 1795051 - RNA, 19 nt, Artificial Sequence
  Description of Artificial Sequence: Synthetic oligonucleotide
  Sense strand starting at position 3090 of SEQ ID NO: 1563098
cgaucauucuuucugaaag

SEQ ID NO: 1795052 - RNA, 19 nt, Artificial Sequence
  Description of Artificial Sequence: Synthetic oligonucleotide
  Antisense strand to SEQ ID NO: 1795051
cuuucagaaagaaugaucg

SEQ ID NO: 1795053 - RNA, 19 nt, Artificial Sequence
  Description of Artificial Sequence: Synthetic oligonucleotide
  Sense strand starting at position 3178 of SEQ ID NO: 1563098
uagggucugcaguaaggua

SEQ ID NO: 1795054 - RNA, 19 nt, Artificial Sequence
  Description of Artificial Sequence: Synthetic oligonucleotide
  Antisense strand to SEQ ID NO: 1795053
uaccuuacugcagacccua

SEQ ID NO: 1795055 - RNA, 19 nt, Artificial Sequence
  Description of Artificial Sequence: Synthetic oligonucleotide
  Sense strand starting at position 3206 of SEQ ID NO: 1563098
auggcaugaagauguauaa

SEQ ID NO: 1795056 - RNA, 19 nt, Artificial Sequence
  Description of Artificial Sequence: Synthetic oligonucleotide
  Antisense strand to SEQ ID NO: 1795055
uuauacaucuucaugccau

SEQ ID NO: 1795057 - RNA, 19 nt, Artificial Sequence
  Description of Artificial Sequence: Synthetic oligonucleotide
  Sense strand starting at position 3210 of SEQ ID NO: 1563098
caugaagauguauaaacgu

SEQ ID NO: 1795058 - RNA, 19 nt, Artificial Sequence
  Description of Artificial Sequence: Synthetic oligonucleotide
  Antisense strand to SEQ ID NO: 1795057
acguuuauacaucuucaug

SEQ ID NO: 1795059 - RNA, 19 nt, Artificial Sequence
  Description of Artificial Sequence: Synthetic oligonucleotide
  Sense strand starting at position 3238 of SEQ ID NO: 1563098
aggguggauguguguuaga

SEQ ID NO: 1795060 - RNA, 19 nt, Artificial Sequence
  Description of Artificial Sequence: Synthetic oligonucleotide
  Antisense strand to SEQ ID NO: 1795059
ucuaacacacauccacccu

SEQ ID NO: 1795061 - RNA, 19 nt, Artificial Sequence
  Description of Artificial Sequence: Synthetic oligonucleotide
  Sense strand starting at position 3239 of SEQ ID NO: 1563098
ggguggauguguguuagaa

SEQ ID NO: 1795062 - RNA, 19 nt, Artificial Sequence
  Description of Artificial Sequence: Synthetic oligonucleotide
  Antisense strand to SEQ ID NO: 1795061
uucuaacacacauccaccc

SEQ ID NO: 1795063 - RNA, 19 nt, Artificial Sequence
  Description of Artificial Sequence: Synthetic oligonucleotide
  Sense strand starting at position 3361 of SEQ ID NO: 1563098
gcauguucucccuggaagg

SEQ ID NO: 1795064 - RNA, 19 nt, Artificial Sequence
  Description of Artificial Sequence: Synthetic oligonucleotide
  Antisense strand to SEQ ID NO: 1795063
ccuuccagggagaacaugc

SEQ ID NO: 1795065 - RNA, 19 nt, Artificial Sequence
  Description of Artificial Sequence: Synthetic oligonucleotide
  Sense strand starting at position 3432 of SEQ ID NO: 1563098
aggguccguccucauuaua

SEQ ID NO: 1795066 - RNA, 19 nt, Artificial Sequence
  Description of Artificial Sequence: Synthetic oligonucleotide
  Antisense strand to SEQ ID NO: 1795065
uauaaugaggacggacccu

SEQ ID NO: 1795067 - RNA, 19 nt, Artificial Sequence
  Description of Artificial Sequence: Synthetic oligonucleotide
  Sense strand starting at position 3435 of SEQ ID NO: 1563098
guccguccucauuauauuu

SEQ ID NO: 1795068 - RNA, 19 nt, Artificial Sequence
  Description of Artificial Sequence: Synthetic oligonucleotide
  Antisense strand to SEQ ID NO: 1795067
aaauauaaugaggacggac

SEQ ID NO: 1795069 - RNA, 19 nt, Artificial Sequence
  Description of Artificial Sequence: Synthetic oligonucleotide
  Sense strand starting at position 3454 of SEQ ID NO: 1563098
gcugaccaaucaguuauau

SEQ ID NO: 1795070 - RNA, 19 nt, Artificial Sequence
  Description of Artificial Sequence: Synthetic oligonucleotide
  Antisense strand to SEQ ID NO: 1795069
auauaacugauuggucagc

SEQ ID NO: 1795071 - RNA, 19 nt, Artificial Sequence
  Description of Artificial Sequence: Synthetic oligonucleotide
  Sense strand starting at position 3492 of SEQ ID NO: 1563098
guaagucuuguccacaaac

SEQ ID NO: 1795072 - RNA, 19 nt, Artificial Sequence
  Description of Artificial Sequence: Synthetic oligonucleotide
  Antisense strand to SEQ ID NO: 1795071
guuuguggacaagacuuac

SEQ ID NO: 1795073 - RNA, 19 nt, Artificial Sequence
  Description of Artificial Sequence: Synthetic oligonucleotide
  Sense strand starting at position 3671 of SEQ ID NO: 1563098
aucugaaucuugguagguc

SEQ ID NO: 1795074 - RNA, 19 nt, Artificial Sequence
  Description of Artificial Sequence: Synthetic oligonucleotide
  Antisense strand to SEQ ID NO: 1795073
gaccuaccaagauucagau

SEQ ID NO: 1795075 - RNA, 19 nt, Artificial Sequence
  Description of Artificial Sequence: Synthetic oligonucleotide
  Sense strand starting at position 3818 of SEQ ID NO: 1563098
ugguacccuccugaacaau

SEQ ID NO: 1795076 - RNA, 19 nt, Artificial Sequence
  Description of Artificial Sequence: Synthetic oligonucleotide
  Antisense strand to SEQ ID NO: 1795075
auuguucaggaggguacca

SEQ ID NO: 1795077 - RNA, 19 nt, Artificial Sequence
  Description of Artificial Sequence: Synthetic oligonucleotide
  Sense strand starting at position 3866 of SEQ ID NO: 1563098
caaagugggcguuugugua

SEQ ID NO: 1795078 - RNA, 19 nt, Artificial Sequence
  Description of Artificial Sequence: Synthetic oligonucleotide
  Antisense strand to SEQ ID NO: 1795077
uacacaaacgcccacuuug

SEQ ID NO: 1795079 - RNA, 19 nt, Artificial Sequence
  Description of Artificial Sequence: Synthetic oligonucleotide
  Sense strand starting at position 3873 of SEQ ID NO: 1563098
ggcguuuguguaguauguu

SEQ ID NO: 1795080 - RNA, 19 nt, Artificial Sequence
  Description of Artificial Sequence: Synthetic oligonucleotide
  Antisense strand to SEQ ID NO: 1795079
aacauacuacacaaacgcc

SEQ ID NO: 1795081 - RNA, 19 nt, Artificial Sequence
  Description of Artificial Sequence: Synthetic oligonucleotide
  Sense strand starting at position 147 of SEQ ID NO: 1563099
ccaagcauggcuugcuuaa

SEQ ID NO: 1795082 - RNA, 19 nt, Artificial Sequence
  Description of Artificial Sequence: Synthetic oligonucleotide
  Antisense strand to SEQ ID NO: 1795081
uuaagcaagccaugcuugg

SEQ ID NO: 1795083 - RNA, 19 nt, Artificial Sequence
  Description of Artificial Sequence: Synthetic oligonucleotide
  Sense strand starting at position 247 of SEQ ID NO: 1563099
cccaucuguuucuguaaau

SEQ ID NO: 1795084 - RNA, 19 nt, Artificial Sequence
  Description of Artificial Sequence: Synthetic oligonucleotide
  Antisense strand to SEQ ID NO: 1795083
auuuacagaaacagauggg

SEQ ID NO: 1795085 - RNA, 19 nt, Artificial Sequence
  Description of Artificial Sequence: Synthetic oligonucleotide
  Sense strand starting at position 284 of SEQ ID NO: 1563099
agccaugccucuuuguuga

SEQ ID NO: 1795086 - RNA, 19 nt, Artificial Sequence
  Description of Artificial Sequence: Synthetic oligonucleotide
  Antisense strand to SEQ ID NO: 1795085
ucaacaaagaggcauggcu

SEQ ID NO: 1795087 - RNA, 19 nt, Artificial Sequence
  Description of Artificial Sequence: Synthetic oligonucleotide
  Sense strand starting at position 321 of SEQ ID NO: 1563099
cuuucuugcuacuaggaca

SEQ ID NO: 1795088 - RNA, 19 nt, Artificial Sequence
  Description of Artificial Sequence: Synthetic oligonucleotide
  Antisense strand to SEQ ID NO: 1795087
uguccuaguagcaagaaag

SEQ ID NO: 1795089 - RNA, 19 nt, Artificial Sequence
  Description of Artificial Sequence: Synthetic oligonucleotide
  Sense strand starting at position 342 of SEQ ID NO: 1563099
auugaacaguugugacaga

SEQ ID NO: 1795090 - RNA, 19 nt, Artificial Sequence
  Description of Artificial Sequence: Synthetic oligonucleotide
  Antisense strand to SEQ ID NO: 1795089
ucugucacaacuguucaau

SEQ ID NO: 1795091 - RNA, 19 nt, Artificial Sequence
  Description of Artificial Sequence: Synthetic oligonucleotide
  Sense strand starting at position 349 of SEQ ID NO: 1563099
aguugugacagagaucgca

SEQ ID NO: 1795092 - RNA, 19 nt, Artificial Sequence
  Description of Artificial Sequence: Synthetic oligonucleotide
  Antisense strand to SEQ ID NO: 1795091
ugcgaucucugucacaacu

SEQ ID NO: 1795093 - RNA, 19 nt, Artificial Sequence
  Description of Artificial Sequence: Synthetic oligonucleotide
  Sense strand starting at position 393 of SEQ ID NO: 1563099
ccaccuggcucuuuauaga

SEQ ID NO: 1795094 - RNA, 19 nt, Artificial Sequence
  Description of Artificial Sequence: Synthetic oligonucleotide
  Antisense strand to SEQ ID NO: 1795093
ucuauaaagagccaggugg

SEQ ID NO: 1795095 - RNA, 19 nt, Artificial Sequence
  Description of Artificial Sequence: Synthetic oligonucleotide
  Sense strand starting at position 795 of SEQ ID NO: 1563099
guucacaaucagugugagu

SEQ ID NO: 1795096 - RNA, 19 nt, Artificial Sequence
  Description of Artificial Sequence: Synthetic oligonucleotide
  Antisense strand to SEQ ID NO: 1795095
acucacacugauugugaac

SEQ ID NO: 1795097 - RNA, 19 nt, Artificial Sequence
  Description of Artificial Sequence: Synthetic oligonucleotide
  Sense strand starting at position 797 of SEQ ID NO: 1563099
ucacaaucagugugaguuu

SEQ ID NO: 1795098 - RNA, 19 nt, Artificial Sequence
  Description of Artificial Sequence: Synthetic oligonucleotide
  Antisense strand to SEQ ID NO: 1795097
aaacucacacugauuguga

SEQ ID NO: 1795099 - RNA, 19 nt, Artificial Sequence
  Description of Artificial Sequence: Synthetic oligonucleotide
  Sense strand starting at position 798 of SEQ ID NO: 1563099
cacaaucagugugaguuua

SEQ ID NO: 1795100 - RNA, 19 nt, Artificial Sequence
  Description of Artificial Sequence: Synthetic oligonucleotide
  Antisense strand to SEQ ID NO: 1795099
uaaacucacacugauugug

SEQ ID NO: 1795101 - RNA, 19 nt, Artificial Sequence
  Description of Artificial Sequence: Synthetic oligonucleotide
  Sense strand starting at position 1032 of SEQ ID NO: 1563099
cagaccaggugcuuucuaa

SEQ ID NO: 1795102 - RNA, 19 nt, Artificial Sequence
  Description of Artificial Sequence: Synthetic oligonucleotide
  Antisense strand to SEQ ID NO: 1795101
uuagaaagcaccuggucug

SEQ ID NO: 1795103 - RNA, 19 nt, Artificial Sequence
  Description of Artificial Sequence: Synthetic oligonucleotide
  Sense strand starting at position 1036 of SEQ ID NO: 1563099
ccaggugcuuucuaagcuu

SEQ ID NO: 1795104 - RNA, 19 nt, Artificial Sequence
  Description of Artificial Sequence: Synthetic oligonucleotide
  Antisense strand to SEQ ID NO: 1795103
aagcuuagaaagcaccugg

SEQ ID NO: 1795105 - RNA, 19 nt, Artificial Sequence
  Description of Artificial Sequence: Synthetic oligonucleotide
  Sense strand starting at position 1049 of SEQ ID NO: 1563099
aagcuuguuugcccuguaa

SEQ ID NO: 1795106 - RNA, 19 nt, Artificial Sequence
  Description of Artificial Sequence: Synthetic oligonucleotide
  Antisense strand to SEQ ID NO: 1795105
uuacagggcaaacaagcuu

SEQ ID NO: 1795107 - RNA, 19 nt, Artificial Sequence
  Description of Artificial Sequence: Synthetic oligonucleotide
  Sense strand starting at position 1182 of SEQ ID NO: 1563099
gagugcucaccacagugau

SEQ ID NO: 1795108 - RNA, 19 nt, Artificial Sequence
  Description of Artificial Sequence: Synthetic oligonucleotide
  Antisense strand to SEQ ID NO: 1795107
aucacuguggugagcacuc

SEQ ID NO: 1795109 - RNA, 19 nt, Artificial Sequence
  Description of Artificial Sequence: Synthetic oligonucleotide
  Sense strand starting at position 1254 of SEQ ID NO: 1563099
gcacaacagucagaccaaa

SEQ ID NO: 1795110 - RNA, 19 nt, Artificial Sequence
  Description of Artificial Sequence: Synthetic oligonucleotide
  Antisense strand to SEQ ID NO: 1795109
uuuggucugacuguugugc

SEQ ID NO: 1795111 - RNA, 19 nt, Artificial Sequence
  Description of Artificial Sequence: Synthetic oligonucleotide
  Sense strand starting at position 1897 of SEQ ID NO: 1563099
gcaggagucuuugggaucu

SEQ ID NO: 1795112 - RNA, 19 nt, Artificial Sequence
  Description of Artificial Sequence: Synthetic oligonucleotide
  Antisense strand to SEQ ID NO: 1795111
agaucccaaagacuccugc

SEQ ID NO: 1795113 - RNA, 19 nt, Artificial Sequence
  Description of Artificial Sequence: Synthetic oligonucleotide
  Sense strand starting at position 2152 of SEQ ID NO: 1563099
cagcauuuguggcucugau

SEQ ID NO: 1795114 - RNA, 19 nt, Artificial Sequence
  Description of Artificial Sequence: Synthetic oligonucleotide
  Antisense strand to SEQ ID NO: 1795113
aucagagccacaaaugcug

SEQ ID NO: 1795115 - RNA, 19 nt, Artificial Sequence
  Description of Artificial Sequence: Synthetic oligonucleotide
  Sense strand starting at position 2161 of SEQ ID NO: 1563099
uggcucugaucuugccaua

SEQ ID NO: 1795116 - RNA, 19 nt, Artificial Sequence
  Description of Artificial Sequence: Synthetic oligonucleotide
  Antisense strand to SEQ ID NO: 1795115
uauggcaagaucagagcca

SEQ ID NO: 1795117 - RNA, 19 nt, Artificial Sequence
  Description of Artificial Sequence: Synthetic oligonucleotide
  Sense strand starting at position 2166 of SEQ ID NO: 1563099
cugaucuugccauauggaa

SEQ ID NO: 1795118 - RNA, 19 nt, Artificial Sequence
  Description of Artificial Sequence: Synthetic oligonucleotide
  Antisense strand to SEQ ID NO: 1795117
uuccauauggcaagaucag

SEQ ID NO: 1795119 - RNA, 19 nt, Artificial Sequence
  Description of Artificial Sequence: Synthetic oligonucleotide
  Sense strand starting at position 2234 of SEQ ID NO: 1563099
aggccuuuggguuaaggua

SEQ ID NO: 1795120 - RNA, 19 nt, Artificial Sequence
  Description of Artificial Sequence: Synthetic oligonucleotide
  Antisense strand to SEQ ID NO: 1795119
uaccuuaacccaaaggccu

SEQ ID NO: 1795121 - RNA, 19 nt, Artificial Sequence
  Description of Artificial Sequence: Synthetic oligonucleotide
  Sense strand starting at position 2379 of SEQ ID NO: 1563099
ugcuuuguacagcagaaga

SEQ ID NO: 1795122 - RNA, 19 nt, Artificial Sequence
  Description of Artificial Sequence: Synthetic oligonucleotide
  Antisense strand to SEQ ID NO: 1795121
ucuucugcuguacaaagca

SEQ ID NO: 1795123 - RNA, 19 nt, Artificial Sequence
  Description of Artificial Sequence: Synthetic oligonucleotide
  Sense strand starting at position 2487 of SEQ ID NO: 1563099
aguagagugacucaggcau

SEQ ID NO: 1795124 - RNA, 19 nt, Artificial Sequence
  Description of Artificial Sequence: Synthetic oligonucleotide
  Antisense strand to SEQ ID NO: 1795123
augccugagucacucuacu

SEQ ID NO: 1795125 - RNA, 19 nt, Artificial Sequence
  Description of Artificial Sequence: Synthetic oligonucleotide
  Sense strand starting at position 2493 of SEQ ID NO: 1563099
gugacucaggcaugggaaa

SEQ ID NO: 1795126 - RNA, 19 nt, Artificial Sequence
  Description of Artificial Sequence: Synthetic oligonucleotide
  Antisense strand to SEQ ID NO: 1795125
uuucccaugccugagucac

SEQ ID NO: 1795127 - RNA, 19 nt, Artificial Sequence
  Description of Artificial Sequence: Synthetic oligonucleotide
  Sense strand starting at position 2566 of SEQ ID NO: 1563099
gcagcuuggcacugugaua

SEQ ID NO: 1795128 - RNA, 19 nt, Artificial Sequence
  Description of Artificial Sequence: Synthetic oligonucleotide
  Antisense strand to SEQ ID NO: 1795127
uaucacagugccaagcugc

SEQ ID NO: 1795129 - RNA, 19 nt, Artificial Sequence
  Description of Artificial Sequence: Synthetic oligonucleotide
  Sense strand starting at position 2663 of SEQ ID NO: 1563099
ggaguuaaugaagguuaga

SEQ ID NO: 1795130 - RNA, 19 nt, Artificial Sequence
  Description of Artificial Sequence: Synthetic oligonucleotide
  Antisense strand to SEQ ID NO: 1795129
ucuaaccuucauuaacucc

SEQ ID NO: 1795131 - RNA, 19 nt, Artificial Sequence
  Description of Artificial Sequence: Synthetic oligonucleotide
  Sense strand starting at position 3080 of SEQ ID NO: 1563099
gcauacuaccugcaagauu

SEQ ID NO: 1795132 - RNA, 19 nt, Artificial Sequence
  Description of Artificial Sequence: Synthetic oligonucleotide
  Antisense strand to SEQ ID NO: 1795131
aaucuugcagguaguaugc

SEQ ID NO: 1795133 - RNA, 19 nt, Artificial Sequence
  Description of Artificial Sequence: Synthetic oligonucleotide
  Sense strand starting at position 3193 of SEQ ID NO: 1563099
ugugcaggccugugaucaa

SEQ ID NO: 1795134 - RNA, 19 nt, Artificial Sequence
  Description of Artificial Sequence: Synthetic oligonucleotide
  Antisense strand to SEQ ID NO: 1795133
uugaucacaggccugcaca

SEQ ID NO: 1795135 - RNA, 19 nt, Artificial Sequence
  Description of Artificial Sequence: Synthetic oligonucleotide
  Sense strand starting at position 3200 of SEQ ID NO: 1563099
gccugugaucaaggcugaa

SEQ ID NO: 1795136 - RNA, 19 nt, Artificial Sequence
  Description of Artificial Sequence: Synthetic oligonucleotide
  Antisense strand to SEQ ID NO: 1795135
uucagccuugaucacaggc

SEQ ID NO: 1795137 - RNA, 19 nt, Artificial Sequence
  Description of Artificial Sequence: Synthetic oligonucleotide
  Sense strand starting at position 3265 of SEQ ID NO: 1563099
gggacuguuuacuugcaaa

SEQ ID NO: 1795138 - RNA, 19 nt, Artificial Sequence
  Description of Artificial Sequence: Synthetic oligonucleotide
  Antisense strand to SEQ ID NO: 1795137
uuugcaaguaaacaguccc

SEQ ID NO: 1795139 - RNA, 19 nt, Artificial Sequence
  Description of Artificial Sequence: Synthetic oligonucleotide
  Sense strand starting at position 3277 of SEQ ID NO: 1563099
uugcaaacacuuugauaga

SEQ ID NO: 1795140 - RNA, 19 nt, Artificial Sequence
  Description of Artificial Sequence: Synthetic oligonucleotide
  Antisense strand to SEQ ID NO: 1795139
ucuaucaaaguguuugcaa

SEQ ID NO: 1795141 - RNA, 19 nt, Artificial Sequence
  Description of Artificial Sequence: Synthetic oligonucleotide
  Sense strand starting at position 3674 of SEQ ID NO: 1563099
ucauguguugugcacguau

SEQ ID NO: 1795142 - RNA, 19 nt, Artificial Sequence
  Description of Artificial Sequence: Synthetic oligonucleotide
  Antisense strand to SEQ ID NO: 1795141
auacgugcacaacacauga

SEQ ID NO: 1795143 - RNA, 19 nt, Artificial Sequence
  Description of Artificial Sequence: Synthetic oligonucleotide
  Sense strand starting at position 3676 of SEQ ID NO: 1563099
auguguugugcacguauuu

SEQ ID NO: 1795144 - RNA, 19 nt, Artificial Sequence
  Description of Artificial Sequence: Synthetic oligonucleotide
  Antisense strand to SEQ ID NO: 1795143
aaauacgugcacaacacau

SEQ ID NO: 1795145 - RNA, 19 nt, Artificial Sequence
  Description of Artificial Sequence: Synthetic oligonucleotide
  Sense strand starting at position 3681 of SEQ ID NO: 1563099
uugugcacguauuugugaa

SEQ ID NO: 1795146 - RNA, 19 nt, Artificial Sequence
  Description of Artificial Sequence: Synthetic oligonucleotide
  Antisense strand to SEQ ID NO: 1795145
uucacaaauacgugcacaa

SEQ ID NO: 1795147 - RNA, 19 nt, Artificial Sequence
  Description of Artificial Sequence: Synthetic oligonucleotide
  Sense strand starting at position 3682 of SEQ ID NO: 1563099
ugugcacguauuugugaaa

SEQ ID NO: 1795148 - RNA, 19 nt, Artificial Sequence
  Description of Artificial Sequence: Synthetic oligonucleotide
  Antisense strand to SEQ ID NO: 1795147
uuucacaaauacgugcaca

SEQ ID NO: 1795149 - RNA, 19 nt, Artificial Sequence
  Description of Artificial Sequence: Synthetic oligonucleotide
  Sense strand starting at position 3685 of SEQ ID NO: 1563099
gcacguauuugugaaagag

SEQ ID NO: 1795150 - RNA, 19 nt, Artificial Sequence
  Description of Artificial Sequence: Synthetic oligonucleotide
  Antisense strand to SEQ ID NO: 1795149
cucuuucacaaauacgugc

SEQ ID NO: 1795151 - RNA, 19 nt, Artificial Sequence
  Description of Artificial Sequence: Synthetic oligonucleotide
  Sense strand starting at position 3730 of SEQ ID NO: 1563099
agcaccaguccuugggaau

SEQ ID NO: 1795152 - RNA, 19 nt, Artificial Sequence
  Description of Artificial Sequence: Synthetic oligonucleotide
  Antisense strand to SEQ ID NO: 1795151
auucccaaggacuggugcu

SEQ ID NO: 1795153 - RNA, 19 nt, Artificial Sequence
  Description of Artificial Sequence: Synthetic oligonucleotide
  Sense strand starting at position 3731 of SEQ ID NO: 1563099
gcaccaguccuugggaauc

SEQ ID NO: 1795154 - RNA, 19 nt, Artificial Sequence
  Description of Artificial Sequence: Synthetic oligonucleotide
  Antisense strand to SEQ ID NO: 1795153
gauucccaaggacuggugc

SEQ ID NO: 1795155 - RNA, 19 nt, Artificial Sequence
  Description of Artificial Sequence: Synthetic oligonucleotide
  Sense strand starting at position 3814 of SEQ ID NO: 1563099
cugacacugucagagcuuu

SEQ ID NO: 1795156 - RNA, 19 nt, Artificial Sequence
  Description of Artificial Sequence: Synthetic oligonucleotide
  Antisense strand to SEQ ID NO: 1795155
aaagcucugacagugucag

SEQ ID NO: 1795157 - RNA, 19 nt, Artificial Sequence
  Description of Artificial Sequence: Synthetic oligonucleotide
  Sense strand starting at position 3853 of SEQ ID NO: 1563099
gaggauagguguuucuacu

SEQ ID NO: 1795158 - RNA, 19 nt, Artificial Sequence
  Description of Artificial Sequence: Synthetic oligonucleotide
  Antisense strand to SEQ ID NO: 1795157
aguagaaacaccuauccuc

SEQ ID NO: 1795159 - RNA, 19 nt, Artificial Sequence
  Description of Artificial Sequence: Synthetic oligonucleotide
  Sense strand starting at position 3863 of SEQ ID NO: 1563099
guuucuacuugcucuuaca

SEQ ID NO: 1795160 - RNA, 19 nt, Artificial Sequence
  Description of Artificial Sequence: Synthetic oligonucleotide
  Antisense strand to SEQ ID NO: 1795159
uguaagagcaaguagaaac

SEQ ID NO: 1795161 - RNA, 19 nt, Artificial Sequence
  Description of Artificial Sequence: Synthetic oligonucleotide
  Sense strand starting at position 1 of SEQ ID NO: 1563100
gccauaacccuuggaccau

SEQ ID NO: 1795162 - RNA, 19 nt, Artificial Sequence
  Description of Artificial Sequence: Synthetic oligonucleotide
  Antisense strand to SEQ ID NO: 1795161
augguccaaggguuauggc

SEQ ID NO: 1795163 - RNA, 19 nt, Artificial Sequence
  Description of Artificial Sequence: Synthetic oligonucleotide
  Sense strand starting at position 303 of SEQ ID NO: 1563100
uguugacauguugaauauu

SEQ ID NO: 1795164 - RNA, 19 nt, Artificial Sequence
  Description of Artificial Sequence: Synthetic oligonucleotide
  Antisense strand to SEQ ID NO: 1795163
aauauucaacaugucaaca

SEQ ID NO: 1795165 - RNA, 19 nt, Artificial Sequence
  Description of Artificial Sequence: Synthetic oligonucleotide
  Sense strand starting at position 437 of SEQ ID NO: 1563100
ggacuaaagccguagccaa

SEQ ID NO: 1795166 - RNA, 19 nt, Artificial Sequence
  Description of Artificial Sequence: Synthetic oligonucleotide
  Antisense strand to SEQ ID NO: 1795165
uuggcuacggcuuuagucc

SEQ ID NO: 1795167 - RNA, 19 nt, Artificial Sequence
  Description of Artificial Sequence: Synthetic oligonucleotide
  Sense strand starting at position 452 of SEQ ID NO: 1563100
ccaacagagcaguaguaau

SEQ ID NO: 1795168 - RNA, 19 nt, Artificial Sequence
  Description of Artificial Sequence: Synthetic oligonucleotide
  Antisense strand to SEQ ID NO: 1795167
auuacuacugcucuguugg

SEQ ID NO: 1795169 - RNA, 19 nt, Artificial Sequence
  Description of Artificial Sequence: Synthetic oligonucleotide
  Sense strand starting at position 464 of SEQ ID NO: 1563100
uaguaauccgcgucgucuu

SEQ ID NO: 1795170 - RNA, 19 nt, Artificial Sequence
  Description of Artificial Sequence: Synthetic oligonucleotide
  Antisense strand to SEQ ID NO: 1795169
aagacgacgcggauuacua

SEQ ID NO: 1795171 - RNA, 19 nt, Artificial Sequence
  Description of Artificial Sequence: Synthetic oligonucleotide
  Sense strand starting at position 589 of SEQ ID NO: 1563100
gcgguaguagaggagauau

SEQ ID NO: 1795172 - RNA, 19 nt, Artificial Sequence
  Description of Artificial Sequence: Synthetic oligonucleotide
  Antisense strand to SEQ ID NO: 1795171
auaucuccucuacuaccgc

SEQ ID NO: 1795173 - RNA, 19 nt, Artificial Sequence
  Description of Artificial Sequence: Synthetic oligonucleotide
  Sense strand starting at position 698 of SEQ ID NO: 1563100
gccacuuggccugggaaga

SEQ ID NO: 1795174 - RNA, 19 nt, Artificial Sequence
  Description of Artificial Sequence: Synthetic oligonucleotide
  Antisense strand to SEQ ID NO: 1795173
ucuucccaggccaaguggc

SEQ ID NO: 1795175 - RNA, 19 nt, Artificial Sequence
  Description of Artificial Sequence: Synthetic oligonucleotide
  Sense strand starting at position 739 of SEQ ID NO: 1563100
caggacugucugggaaacu

SEQ ID NO: 1795176 - RNA, 19 nt, Artificial Sequence
  Description of Artificial Sequence: Synthetic oligonucleotide
  Antisense strand to SEQ ID NO: 1795175
aguuucccagacaguccug

SEQ ID NO: 1795177 - RNA, 19 nt, Artificial Sequence
  Description of Artificial Sequence: Synthetic oligonucleotide
  Sense strand starting at position 865 of SEQ ID NO: 1563100
gugcuaugggauuagcaau

SEQ ID NO: 1795178 - RNA, 19 nt, Artificial Sequence
  Description of Artificial Sequence: Synthetic oligonucleotide
  Antisense strand to SEQ ID NO: 1795177
auugcuaaucccauagcac

SEQ ID NO: 1795179 - RNA, 19 nt, Artificial Sequence
  Description of Artificial Sequence: Synthetic oligonucleotide
  Sense strand starting at position 990 of SEQ ID NO: 1563100
agugccauauccucaagga

SEQ ID NO: 1795180 - RNA, 19 nt, Artificial Sequence
  Description of Artificial Sequence: Synthetic oligonucleotide
  Antisense strand to SEQ ID NO: 1795179
uccuugaggauauggcacu

SEQ ID NO: 1795181 - RNA, 19 nt, Artificial Sequence
  Description of Artificial Sequence: Synthetic oligonucleotide
  Sense strand starting at position 991 of SEQ ID NO: 1563100
gugccauauccucaaggau

SEQ ID NO: 1795182 - RNA, 19 nt, Artificial Sequence
  Description of Artificial Sequence: Synthetic oligonucleotide
  Antisense strand to SEQ ID NO: 1795181
auccuugaggauauggcac

SEQ ID NO: 1795183 - RNA, 19 nt, Artificial Sequence
  Description of Artificial Sequence: Synthetic oligonucleotide
  Sense strand starting at position 1080 of SEQ ID NO: 1563100
cacguuucucugcagaacu

SEQ ID NO: 1795184 - RNA, 19 nt, Artificial Sequence
  Description of Artificial Sequence: Synthetic oligonucleotide
  Antisense strand to SEQ ID NO: 1795183
aguucugcagagaaacgug

SEQ ID NO: 1795185 - RNA, 19 nt, Artificial Sequence
  Description of Artificial Sequence: Synthetic oligonucleotide
  Sense strand starting at position 1329 of SEQ ID NO: 1563100
aguccagggcucuagugau

SEQ ID NO: 1795186 - RNA, 19 nt, Artificial Sequence
  Description of Artificial Sequence: Synthetic oligonucleotide
  Antisense strand to SEQ ID NO: 1795185
aucacuagagcccuggacu

SEQ ID NO: 1795187 - RNA, 19 nt, Artificial Sequence
  Description of Artificial Sequence: Synthetic oligonucleotide
  Sense strand starting at position 1343 of SEQ ID NO: 1563100
gugaucuggucauucacga

SEQ ID NO: 1795188 - RNA, 19 nt, Artificial Sequence
  Description of Artificial Sequence: Synthetic oligonucleotide
  Antisense strand to SEQ ID NO: 1795187
ucgugaaugaccagaucac

SEQ ID NO: 1795189 - RNA, 19 nt, Artificial Sequence
  Description of Artificial Sequence: Synthetic oligonucleotide
  Sense strand starting at position 1945 of SEQ ID NO: 1563100
guagaaguucugcaaggcu

SEQ ID NO: 1795190 - RNA, 19 nt, Artificial Sequence
  Description of Artificial Sequence: Synthetic oligonucleotide
  Antisense strand to SEQ ID NO: 1795189
agccuugcagaacuucuac

SEQ ID NO: 1795191 - RNA, 19 nt, Artificial Sequence
  Description of Artificial Sequence: Synthetic oligonucleotide
  Sense strand starting at position 1948 of SEQ ID NO: 1563100
gaaguucugcaaggcuaua

SEQ ID NO: 1795192 - RNA, 19 nt, Artificial Sequence
  Description of Artificial Sequence: Synthetic oligonucleotide
  Antisense strand to SEQ ID NO: 1795191
uauagccuugcagaacuuc

SEQ ID NO: 1795193 - RNA, 19 nt, Artificial Sequence
  Description of Artificial Sequence: Synthetic oligonucleotide
  Sense strand starting at position 2030 of SEQ ID NO: 1563100
cagccuauugacugaggaa

SEQ ID NO: 1795194 - RNA, 19 nt, Artificial Sequence
  Description of Artificial Sequence: Synthetic oligonucleotide
  Antisense strand to SEQ ID NO: 1795193
uuccucagucaauaggcug

SEQ ID NO: 1795195 - RNA, 19 nt, Artificial Sequence
  Description of Artificial Sequence: Synthetic oligonucleotide
  Sense strand starting at position 2156 of SEQ ID NO: 1563100
aguuauagcagguggaaau

SEQ ID NO: 1795196 - RNA, 19 nt, Artificial Sequence
  Description of Artificial Sequence: Synthetic oligonucleotide
  Antisense strand to SEQ ID NO: 1795195
auuuccaccugcuauaacu

SEQ ID NO: 1795197 - RNA, 19 nt, Artificial Sequence
  Description of Artificial Sequence: Synthetic oligonucleotide
  Sense strand starting at position 2225 of SEQ ID NO: 1563100
aagugcauagcuugaugau

SEQ ID NO: 1795198 - RNA, 19 nt, Artificial Sequence
  Description of Artificial Sequence: Synthetic oligonucleotide
  Antisense strand to SEQ ID NO: 1795197
aucaucaagcuaugcacuu

SEQ ID NO: 1795199 - RNA, 19 nt, Artificial Sequence
  Description of Artificial Sequence: Synthetic oligonucleotide
  Sense strand starting at position 2226 of SEQ ID NO: 1563100
agugcauagcuugaugauu

SEQ ID NO: 1795200 - RNA, 19 nt, Artificial Sequence
  Description of Artificial Sequence: Synthetic oligonucleotide
  Antisense strand to SEQ ID NO: 1795199
aaucaucaagcuaugcacu

SEQ ID NO: 1795201 - RNA, 19 nt, Artificial Sequence
  Description of Artificial Sequence: Synthetic oligonucleotide
  Sense strand starting at position 2358 of SEQ ID NO: 1563100
ccacccagaucaggauuua

SEQ ID NO: 1795202 - RNA, 19 nt, Artificial Sequence
  Description of Artificial Sequence: Synthetic oligonucleotide
  Antisense strand to SEQ ID NO: 1795201
uaaauccugaucugggugg

SEQ ID NO: 1795203 - RNA, 19 nt, Artificial Sequence
  Description of Artificial Sequence: Synthetic oligonucleotide
  Sense strand starting at position 2800 of SEQ ID NO: 1563100
cuuuaacuauaaguggaau

SEQ ID NO: 1795204 - RNA, 19 nt, Artificial Sequence
  Description of Artificial Sequence: Synthetic oligonucleotide
  Antisense strand to SEQ ID NO: 1795203
auuccacuuauaguuaaag

SEQ ID NO: 1795205 - RNA, 19 nt, Artificial Sequence
  Description of Artificial Sequence: Synthetic oligonucleotide
  Sense strand starting at position 2806 of SEQ ID NO: 1563100
cuauaaguggaaugauagu

SEQ ID NO: 1795206 - RNA, 19 nt, Artificial Sequence
  Description of Artificial Sequence: Synthetic oligonucleotide
  Antisense strand to SEQ ID NO: 1795205
acuaucauuccacuuauag

SEQ ID NO: 1795207 - RNA, 19 nt, Artificial Sequence
  Description of Artificial Sequence: Synthetic oligonucleotide
  Sense strand starting at position 2862 of SEQ ID NO: 1563100
augggagugauccaugugu

SEQ ID NO: 1795208 - RNA, 19 nt, Artificial Sequence
  Description of Artificial Sequence: Synthetic oligonucleotide
  Antisense strand to SEQ ID NO: 1795207
acacauggaucacucccau

SEQ ID NO: 1795209 - RNA, 19 nt, Artificial Sequence
  Description of Artificial Sequence: Synthetic oligonucleotide
  Sense strand starting at position 2905 of SEQ ID NO: 1563100
cauagcuguguguaaucca

SEQ ID NO: 1795210 - RNA, 19 nt, Artificial Sequence
  Description of Artificial Sequence: Synthetic oligonucleotide
  Antisense strand to SEQ ID NO: 1795209
uggauuacacacagcuaug

SEQ ID NO: 1795211 - RNA, 19 nt, Artificial Sequence
  Description of Artificial Sequence: Synthetic oligonucleotide
  Sense strand starting at position 2916 of SEQ ID NO: 1563100
guaauccauugugugaaug

SEQ ID NO: 1795212 - RNA, 19 nt, Artificial Sequence
  Description of Artificial Sequence: Synthetic oligonucleotide
  Antisense strand to SEQ ID NO: 1795211
cauucacacaauggauuac

SEQ ID NO: 1795213 - RNA, 19 nt, Artificial Sequence
  Description of Artificial Sequence: Synthetic oligonucleotide
  Sense strand starting at position 2928 of SEQ ID NO: 1563100
gugaaugcacuguaaucag

SEQ ID NO: 1795214 - RNA, 19 nt, Artificial Sequence
  Description of Artificial Sequence: Synthetic oligonucleotide
  Antisense strand to SEQ ID NO: 1795213
cugauuacagugcauucac

SEQ ID NO: 1795215 - RNA, 19 nt, Artificial Sequence
  Description of Artificial Sequence: Synthetic oligonucleotide
  Sense strand starting at position 2954 of SEQ ID NO: 1563100
auucuccuauuguuagaua

SEQ ID NO: 1795216 - RNA, 19 nt, Artificial Sequence
  Description of Artificial Sequence: Synthetic oligonucleotide
  Antisense strand to SEQ ID NO: 1795215
uaucuaacaauaggagaau

SEQ ID NO: 1795217 - RNA, 19 nt, Artificial Sequence
  Description of Artificial Sequence: Synthetic oligonucleotide
  Sense strand starting at position 2985 of SEQ ID NO: 1563100
ccagucuuuggccauuaca

SEQ ID NO: 1795218 - RNA, 19 nt, Artificial Sequence
  Description of Artificial Sequence: Synthetic oligonucleotide
  Antisense strand to SEQ ID NO: 1795217
uguaauggccaaagacugg

SEQ ID NO: 1795219 - RNA, 19 nt, Artificial Sequence
  Description of Artificial Sequence: Synthetic oligonucleotide
  Sense strand starting at position 2988 of SEQ ID NO: 1563100
gucuuuggccauuacaaau

SEQ ID NO: 1795220 - RNA, 19 nt, Artificial Sequence
  Description of Artificial Sequence: Synthetic oligonucleotide
  Antisense strand to SEQ ID NO: 1795219
auuuguaauggccaaagac

SEQ ID NO: 1795221 - RNA, 19 nt, Artificial Sequence
  Description of Artificial Sequence: Synthetic oligonucleotide
  Sense strand starting at position 3005 of SEQ ID NO: 1563100
auacaacuucugugaaugu

SEQ ID NO: 1795222 - RNA, 19 nt, Artificial Sequence
  Description of Artificial Sequence: Synthetic oligonucleotide
  Antisense strand to SEQ ID NO: 1795221
acauucacagaaguuguau

SEQ ID NO: 1795223 - RNA, 19 nt, Artificial Sequence
  Description of Artificial Sequence: Synthetic oligonucleotide
  Sense strand starting at position 3142 of SEQ ID NO: 1563100
ccugauguguuuguaacaa

SEQ ID NO: 1795224 - RNA, 19 nt, Artificial Sequence
  Description of Artificial Sequence: Synthetic oligonucleotide
  Antisense strand to SEQ ID NO: 1795223
uuguuacaaacacaucagg

SEQ ID NO: 1795225 - RNA, 19 nt, Artificial Sequence
  Description of Artificial Sequence: Synthetic oligonucleotide
  Sense strand starting at position 3154 of SEQ ID NO: 1563100
guaacaaucuggucuucca

SEQ ID NO: 1795226 - RNA, 19 nt, Artificial Sequence
  Description of Artificial Sequence: Synthetic oligonucleotide
  Antisense strand to SEQ ID NO: 1795225
uggaagaccagauuguuac

SEQ ID NO: 1795227 - RNA, 19 nt, Artificial Sequence
  Description of Artificial Sequence: Synthetic oligonucleotide
  Sense strand starting at position 3185 of SEQ ID NO: 1563100
gagaguuuacugugacuuc

SEQ ID NO: 1795228 - RNA, 19 nt, Artificial Sequence
  Description of Artificial Sequence: Synthetic oligonucleotide
  Antisense strand to SEQ ID NO: 1795227
gaagucacaguaaacucuc

SEQ ID NO: 1795229 - RNA, 19 nt, Artificial Sequence
  Description of Artificial Sequence: Synthetic oligonucleotide
  Sense strand starting at position 3384 of SEQ ID NO: 1563100
uaaugccagccugaggauu

SEQ ID NO: 1795230 - RNA, 19 nt, Artificial Sequence
  Description of Artificial Sequence: Synthetic oligonucleotide
  Antisense strand to SEQ ID NO: 1795229
aauccucaggcuggcauua

SEQ ID NO: 1795231 - RNA, 19 nt, Artificial Sequence
  Description of Artificial Sequence: Synthetic oligonucleotide
  Sense strand starting at position 3390 of SEQ ID NO: 1563100
cagccugaggauugugaaa

SEQ ID NO: 1795232 - RNA, 19 nt, Artificial Sequence
  Description of Artificial Sequence: Synthetic oligonucleotide
  Antisense strand to SEQ ID NO: 1795231
uuucacaauccucaggcug

SEQ ID NO: 1795233 - RNA, 19 nt, Artificial Sequence
  Description of Artificial Sequence: Synthetic oligonucleotide
  Sense strand starting at position 3451 of SEQ ID NO: 1563100
guggauuaaccaugucauu

SEQ ID NO: 1795234 - RNA, 19 nt, Artificial Sequence
  Description of Artificial Sequence: Synthetic oligonucleotide
  Antisense strand to SEQ ID NO: 1795233
aaugacaugguuaauccac

SEQ ID NO: 1795235 - RNA, 19 nt, Artificial Sequence
  Description of Artificial Sequence: Synthetic oligonucleotide
  Sense strand starting at position 3474 of SEQ ID NO: 1563100
uucuguauuccagugcugu

SEQ ID NO: 1795236 - RNA, 19 nt, Artificial Sequence
  Description of Artificial Sequence: Synthetic oligonucleotide
  Antisense strand to SEQ ID NO: 1795235
acagcacuggaauacagaa

SEQ ID NO: 1795237 - RNA, 19 nt, Artificial Sequence
  Description of Artificial Sequence: Synthetic oligonucleotide
  Sense strand starting at position 3477 of SEQ ID NO: 1563100
uguauuccagugcugugua

SEQ ID NO: 1795238 - RNA, 19 nt, Artificial Sequence
  Description of Artificial Sequence: Synthetic oligonucleotide
  Antisense strand to SEQ ID NO: 1795237
uacacagcacuggaauaca

SEQ ID NO: 1795239 - RNA, 19 nt, Artificial Sequence
  Description of Artificial Sequence: Synthetic oligonucleotide
  Sense strand starting at position 3539 of SEQ ID NO: 1563100
uuacccagucccuauagau

SEQ ID NO: 1795240 - RNA, 19 nt, Artificial Sequence
  Description of Artificial Sequence: Synthetic oligonucleotide
  Antisense strand to SEQ ID NO: 1795239
aucuauagggacuggguaa

SEQ ID NO: 1795241 - RNA, 19 nt, Artificial Sequence
  Description of Artificial Sequence: Synthetic oligonucleotide
  Sense strand starting at position 73 of SEQ ID NO: 1563101
cccggcuaucuugagcauu

SEQ ID NO: 1795242 - RNA, 19 nt, Artificial Sequence
  Description of Artificial Sequence: Synthetic oligonucleotide
  Antisense strand to SEQ ID NO: 1795241
aaugcucaagauagccggg

SEQ ID NO: 1795243 - RNA, 19 nt, Artificial Sequence
  Description of Artificial Sequence: Synthetic oligonucleotide
  Sense strand starting at position 75 of SEQ ID NO: 1563101
cggcuaucuugagcauucu

SEQ ID NO: 1795244 - RNA, 19 nt, Artificial Sequence
  Description of Artificial Sequence: Synthetic oligonucleotide
  Antisense strand to SEQ ID NO: 1795243
agaaugcucaagauagccg

SEQ ID NO: 1795245 - RNA, 19 nt, Artificial Sequence
  Description of Artificial Sequence: Synthetic oligonucleotide
  Sense strand starting at position 76 of SEQ ID NO: 1563101
ggcuaucuugagcauucuu

SEQ ID NO: 1795246 - RNA, 19 nt, Artificial Sequence
  Description of Artificial Sequence: Synthetic oligonucleotide
  Antisense strand to SEQ ID NO: 1795245
aagaaugcucaagauagcc

SEQ ID NO: 1795247 - RNA, 19 nt, Artificial Sequence
  Description of Artificial Sequence: Synthetic oligonucleotide
  Sense strand starting at position 96 of SEQ ID NO: 1563101
acagacuccucgcugucaa

SEQ ID NO: 1795248 - RNA, 19 nt, Artificial Sequence
  Description of Artificial Sequence: Synthetic oligonucleotide
  Antisense strand to SEQ ID NO: 1795247
uugacagcgaggagucugu

SEQ ID NO: 1795249 - RNA, 19 nt, Artificial Sequence
  Description of Artificial Sequence: Synthetic oligonucleotide
  Sense strand starting at position 97 of SEQ ID NO: 1563101
cagacuccucgcugucaau

SEQ ID NO: 1795250 - RNA, 19 nt, Artificial Sequence
  Description of Artificial Sequence: Synthetic oligonucleotide
  Antisense strand to SEQ ID NO: 1795249
auugacagcgaggagucug

SEQ ID NO: 1795251 - RNA, 19 nt, Artificial Sequence
  Description of Artificial Sequence: Synthetic oligonucleotide
  Sense strand starting at position 100 of SEQ ID NO: 1563101
acuccucgcugucaauuua

SEQ ID NO: 1795252 - RNA, 19 nt, Artificial Sequence
  Description of Artificial Sequence: Synthetic oligonucleotide
  Antisense strand to SEQ ID NO: 1795251
uaaauugacagcgaggagu

SEQ ID NO: 1795253 - RNA, 19 nt, Artificial Sequence
  Description of Artificial Sequence: Synthetic oligonucleotide
  Sense strand starting at position 114 of SEQ ID NO: 1563101
auuuaucaguggcaacuau

SEQ ID NO: 1795254 - RNA, 19 nt, Artificial Sequence
  Description of Artificial Sequence: Synthetic oligonucleotide
  Antisense strand to SEQ ID NO: 1795253
auaguugccacugauaaau

SEQ ID NO: 1795255 - RNA, 19 nt, Artificial Sequence
  Description of Artificial Sequence: Synthetic oligonucleotide
  Sense strand starting at position 159 of SEQ ID NO: 1563101
auagucaucugaccaguuu

SEQ ID NO: 1795256 - RNA, 19 nt, Artificial Sequence
  Description of Artificial Sequence: Synthetic oligonucleotide
  Antisense strand to SEQ ID NO: 1795255
aaacuggucagaugacuau

SEQ ID NO: 1795257 - RNA, 19 nt, Artificial Sequence
  Description of Artificial Sequence: Synthetic oligonucleotide
  Sense strand starting at position 186 of SEQ ID NO: 1563101
agccauuucuaugaugaug

SEQ ID NO: 1795258 - RNA, 19 nt, Artificial Sequence
  Description of Artificial Sequence: Synthetic oligonucleotide
  Antisense strand to SEQ ID NO: 1795257
caucaucauagaaauggcu

SEQ ID NO: 1795259 - RNA, 19 nt, Artificial Sequence
  Description of Artificial Sequence: Synthetic oligonucleotide
  Sense strand starting at position 188 of SEQ ID NO: 1563101
ccauuucuaugaugaugau

SEQ ID NO: 1795260 - RNA, 19 nt, Artificial Sequence
  Description of Artificial Sequence: Synthetic oligonucleotide
  Antisense strand to SEQ ID NO: 1795259
aucaucaucauagaaaugg

SEQ ID NO: 1795261 - RNA, 19 nt, Artificial Sequence
  Description of Artificial Sequence: Synthetic oligonucleotide
  Sense strand starting at position 323 of SEQ ID NO: 1563101
uggaaugacaagugcucaa

SEQ ID NO: 1795262 - RNA, 19 nt, Artificial Sequence
  Description of Artificial Sequence: Synthetic oligonucleotide
  Antisense strand to SEQ ID NO: 1795261
uugagcacuugucauucca

SEQ ID NO: 1795263 - RNA, 19 nt, Artificial Sequence
  Description of Artificial Sequence: Synthetic oligonucleotide
  Sense strand starting at position 378 of SEQ ID NO: 1563101
cagaguggugagcaaucau

SEQ ID NO: 1795264 - RNA, 19 nt, Artificial Sequence
  Description of Artificial Sequence: Synthetic oligonucleotide
  Antisense strand to SEQ ID NO: 1795263
augauugcucaccacucug

SEQ ID NO: 1795265 - RNA, 19 nt, Artificial Sequence
  Description of Artificial Sequence: Synthetic oligonucleotide
  Sense strand starting at position 547 of SEQ ID NO: 1563101
uucgaucuuccugacaacu

SEQ ID NO: 1795266 - RNA, 19 nt, Artificial Sequence
  Description of Artificial Sequence: Synthetic oligonucleotide
  Antisense strand to SEQ ID NO: 1795265
aguugucaggaagaucgaa

SEQ ID NO: 1795267 - RNA, 19 nt, Artificial Sequence
  Description of Artificial Sequence: Synthetic oligonucleotide
  Sense strand starting at position 549 of SEQ ID NO: 1563101
cgaucuuccugacaacuac

SEQ ID NO: 1795268 - RNA, 19 nt, Artificial Sequence
  Description of Artificial Sequence: Synthetic oligonucleotide
  Antisense strand to SEQ ID NO: 1795267
guaguugucaggaagaucg

SEQ ID NO: 1795269 - RNA, 19 nt, Artificial Sequence
  Description of Artificial Sequence: Synthetic oligonucleotide
  Sense strand starting at position 621 of SEQ ID NO: 1563101
caaugcugguugggagaaa

SEQ ID NO: 1795270 - RNA, 19 nt, Artificial Sequence
  Description of Artificial Sequence: Synthetic oligonucleotide
  Antisense strand to SEQ ID NO: 1795269
uuucucccaaccagcauug

SEQ ID NO: 1795271 - RNA, 19 nt, Artificial Sequence
  Description of Artificial Sequence: Synthetic oligonucleotide
  Sense strand starting at position 700 of SEQ ID NO: 1563101
gagacugaguuugagugua

SEQ ID NO: 1795272 - RNA, 19 nt, Artificial Sequence
  Description of Artificial Sequence: Synthetic oligonucleotide
  Antisense strand to SEQ ID NO: 1795271
uacacucaaacucagucuc

SEQ ID NO: 1795273 - RNA, 19 nt, Artificial Sequence
  Description of Artificial Sequence: Synthetic oligonucleotide
  Sense strand starting at position 705 of SEQ ID NO: 1563101
ugaguuugaguguaggaaa

SEQ ID NO: 1795274 - RNA, 19 nt, Artificial Sequence
  Description of Artificial Sequence: Synthetic oligonucleotide
  Antisense strand to SEQ ID NO: 1795273
uuuccuacacucaaacuca

SEQ ID NO: 1795275 - RNA, 19 nt, Artificial Sequence
  Description of Artificial Sequence: Synthetic oligonucleotide
  Sense strand starting at position 763 of SEQ ID NO: 1563101
ggagucaggccuuagugaa

SEQ ID NO: 1795276 - RNA, 19 nt, Artificial Sequence
  Description of Artificial Sequence: Synthetic oligonucleotide
  Antisense strand to SEQ ID NO: 1795275
uucacuaaggccugacucc

SEQ ID NO: 1795277 - RNA, 19 nt, Artificial Sequence
  Description of Artificial Sequence: Synthetic oligonucleotide
  Sense strand starting at position 770 of SEQ ID NO: 1563101
ggccuuagugaacaagugu

SEQ ID NO: 1795278 - RNA, 19 nt, Artificial Sequence
  Description of Artificial Sequence: Synthetic oligonucleotide
  Antisense strand to SEQ ID NO: 1795277
acacuuguucacuaaggcc

SEQ ID NO: 1795279 - RNA, 19 nt, Artificial Sequence
  Description of Artificial Sequence: Synthetic oligonucleotide
  Sense strand starting at position 777 of SEQ ID NO: 1563101
gugaacaagugugcuugaa

SEQ ID NO: 1795280 - RNA, 19 nt, Artificial Sequence
  Description of Artificial Sequence: Synthetic oligonucleotide
  Antisense strand to SEQ ID NO: 1795279
uucaagcacacuuguucac

SEQ ID NO: 1795281 - RNA, 19 nt, Artificial Sequence
  Description of Artificial Sequence: Synthetic oligonucleotide
  Sense strand starting at position 817 of SEQ ID NO: 1563101
ggcugagucugcuccagua

SEQ ID NO: 1795282 - RNA, 19 nt, Artificial Sequence
  Description of Artificial Sequence: Synthetic oligonucleotide
  Antisense strand to SEQ ID NO: 1795281
uacuggagcagacucagcc

SEQ ID NO: 1795283 - RNA, 19 nt, Artificial Sequence
  Description of Artificial Sequence: Synthetic oligonucleotide
  Sense strand starting at position 819 of SEQ ID NO: 1563101
cugagucugcuccaguaga

SEQ ID NO: 1795284 - RNA, 19 nt, Artificial Sequence
  Description of Artificial Sequence: Synthetic oligonucleotide
  Antisense strand to SEQ ID NO: 1795283
ucuacuggagcagacucag

SEQ ID NO: 1795285 - RNA, 19 nt, Artificial Sequence
  Description of Artificial Sequence: Synthetic oligonucleotide
  Sense strand starting at position 1181 of SEQ ID NO: 1563101
uucccaaacuguugggaua

SEQ ID NO: 1795286 - RNA, 19 nt, Artificial Sequence
  Description of Artificial Sequence: Synthetic oligonucleotide
  Antisense strand to SEQ ID NO: 1795285
uaucccaacaguuugggaa

SEQ ID NO: 1795287 - RNA, 19 nt, Artificial Sequence
  Description of Artificial Sequence: Synthetic oligonucleotide
  Sense strand starting at position 1184 of SEQ ID NO: 1563101
ccaaacuguugggauaaga

SEQ ID NO: 1795288 - RNA, 19 nt, Artificial Sequence
  Description of Artificial Sequence: Synthetic oligonucleotide
  Antisense strand to SEQ ID NO: 1795287
ucuuaucccaacaguuugg

SEQ ID NO: 1795289 - RNA, 19 nt, Artificial Sequence
  Description of Artificial Sequence: Synthetic oligonucleotide
  Sense strand starting at position 1255 of SEQ ID NO: 1563101
agacaucucccugguugga

SEQ ID NO: 1795290 - RNA, 19 nt, Artificial Sequence
  Description of Artificial Sequence: Synthetic oligonucleotide
  Antisense strand to SEQ ID NO: 1795289
uccaaccagggagaugucu

SEQ ID NO: 1795291 - RNA, 19 nt, Artificial Sequence
  Description of Artificial Sequence: Synthetic oligonucleotide
  Sense strand starting at position 1322 of SEQ ID NO: 1563101
cccacaacaguuugagauc

SEQ ID NO: 1795292 - RNA, 19 nt, Artificial Sequence
  Description of Artificial Sequence: Synthetic oligonucleotide
  Antisense strand to SEQ ID NO: 1795291
gaucucaaacuguuguggg

SEQ ID NO: 1795293 - RNA, 19 nt, Artificial Sequence
  Description of Artificial Sequence: Synthetic oligonucleotide
  Sense strand starting at position 1333 of SEQ ID NO: 1563101
uugagaucuuuccagaaug

SEQ ID NO: 1795294 - RNA, 19 nt, Artificial Sequence
  Description of Artificial Sequence: Synthetic oligonucleotide
  Antisense strand to SEQ ID NO: 1795293
cauucuggaaagaucucaa

SEQ ID NO: 1795295 - RNA, 19 nt, Artificial Sequence
  Description of Artificial Sequence: Synthetic oligonucleotide
  Sense strand starting at position 1392 of SEQ ID NO: 1563101
caccuuguucguggaagua

SEQ ID NO: 1795296 - RNA, 19 nt, Artificial Sequence
  Description of Artificial Sequence: Synthetic oligonucleotide
  Antisense strand to SEQ ID NO: 1795295
uacuuccacgaacaaggug

SEQ ID NO: 1795297 - RNA, 19 nt, Artificial Sequence
  Description of Artificial Sequence: Synthetic oligonucleotide
  Sense strand starting at position 1758 of SEQ ID NO: 1563101
cccugacucgcugagaguu

SEQ ID NO: 1795298 - RNA, 19 nt, Artificial Sequence
  Description of Artificial Sequence: Synthetic oligonucleotide
  Antisense strand to SEQ ID NO: 1795297
aacucucagcgagucaggg

SEQ ID NO: 1795299 - RNA, 19 nt, Artificial Sequence
  Description of Artificial Sequence: Synthetic oligonucleotide
  Sense strand starting at position 1989 of SEQ ID NO: 1563101
gggcggagauuaugacgua

SEQ ID NO: 1795300 - RNA, 19 nt, Artificial Sequence
  Description of Artificial Sequence: Synthetic oligonucleotide
  Antisense strand to SEQ ID NO: 1795299
uacgucauaaucuccgccc

SEQ ID NO: 1795301 - RNA, 19 nt, Artificial Sequence
  Description of Artificial Sequence: Synthetic oligonucleotide
  Sense strand starting at position 1990 of SEQ ID NO: 1563101
ggcggagauuaugacguaa

SEQ ID NO: 1795302 - RNA, 19 nt, Artificial Sequence
  Description of Artificial Sequence: Synthetic oligonucleotide
  Antisense strand to SEQ ID NO: 1795301
uuacgucauaaucuccgcc

SEQ ID NO: 1795303 - RNA, 19 nt, Artificial Sequence
  Description of Artificial Sequence: Synthetic oligonucleotide
  Sense strand starting at position 2144 of SEQ ID NO: 1563101
gggugagugauaggugagu

SEQ ID NO: 1795304 - RNA, 19 nt, Artificial Sequence
  Description of Artificial Sequence: Synthetic oligonucleotide
  Antisense strand to SEQ ID NO: 1795303
acucaccuaucacucaccc

SEQ ID NO: 1795305 - RNA, 19 nt, Artificial Sequence
  Description of Artificial Sequence: Synthetic oligonucleotide
  Sense strand starting at position 2218 of SEQ ID NO: 1563101
uugguccugucaggaauga

SEQ ID NO: 1795306 - RNA, 19 nt, Artificial Sequence
  Description of Artificial Sequence: Synthetic oligonucleotide
  Antisense strand to SEQ ID NO: 1795305
ucauuccugacaggaccaa

SEQ ID NO: 1795307 - RNA, 19 nt, Artificial Sequence
  Description of Artificial Sequence: Synthetic oligonucleotide
  Sense strand starting at position 2219 of SEQ ID NO: 1563101
ugguccugucaggaaugau

SEQ ID NO: 1795308 - RNA, 19 nt, Artificial Sequence
  Description of Artificial Sequence: Synthetic oligonucleotide
  Antisense strand to SEQ ID NO: 1795307
aucauuccugacaggacca

SEQ ID NO: 1795309 - RNA, 19 nt, Artificial Sequence
  Description of Artificial Sequence: Synthetic oligonucleotide
  Sense strand starting at position 2306 of SEQ ID NO: 1563101
ucacuuugguuaugaaaca

SEQ ID NO: 1795310 - RNA, 19 nt, Artificial Sequence
  Description of Artificial Sequence: Synthetic oligonucleotide
  Antisense strand to SEQ ID NO: 1795309
uguuucauaaccaaaguga

SEQ ID NO: 1795311 - RNA, 19 nt, Artificial Sequence
  Description of Artificial Sequence: Synthetic oligonucleotide
  Sense strand starting at position 2395 of SEQ ID NO: 1563101
cucuaauaucuguggcuau

SEQ ID NO: 1795312 - RNA, 19 nt, Artificial Sequence
  Description of Artificial Sequence: Synthetic oligonucleotide
  Antisense strand to SEQ ID NO: 1795311
auagccacagauauuagag

SEQ ID NO: 1795313 - RNA, 19 nt, Artificial Sequence
  Description of Artificial Sequence: Synthetic oligonucleotide
  Sense strand starting at position 2396 of SEQ ID NO: 1563101
ucuaauaucuguggcuauu

SEQ ID NO: 1795314 - RNA, 19 nt, Artificial Sequence
  Description of Artificial Sequence: Synthetic oligonucleotide
  Antisense strand to SEQ ID NO: 1795313
aauagccacagauauuaga

SEQ ID NO: 1795315 - RNA, 19 nt, Artificial Sequence
  Description of Artificial Sequence: Synthetic oligonucleotide
  Sense strand starting at position 2405 of SEQ ID NO: 1563101
uguggcuauuucuuaccaa

SEQ ID NO: 1795316 - RNA, 19 nt, Artificial Sequence
  Description of Artificial Sequence: Synthetic oligonucleotide
  Antisense strand to SEQ ID NO: 1795315
uugguaagaaauagccaca

SEQ ID NO: 1795317 - RNA, 19 nt, Artificial Sequence
  Description of Artificial Sequence: Synthetic oligonucleotide
  Sense strand starting at position 2406 of SEQ ID NO: 1563101
guggcuauuucuuaccaag

SEQ ID NO: 1795318 - RNA, 19 nt, Artificial Sequence
  Description of Artificial Sequence: Synthetic oligonucleotide
  Antisense strand to SEQ ID NO: 1795317
cuugguaagaaauagccac

SEQ ID NO: 1795319 - RNA, 19 nt, Artificial Sequence
  Description of Artificial Sequence: Synthetic oligonucleotide
  Sense strand starting at position 2409 of SEQ ID NO: 1563101
gcuauuucuuaccaagaga

SEQ ID NO: 1795320 - RNA, 19 nt, Artificial Sequence
  Description of Artificial Sequence: Synthetic oligonucleotide
  Antisense strand to SEQ ID NO: 1795319
ucucuugguaagaaauagc

SEQ ID NO: 1795321 - RNA, 19 nt, Artificial Sequence
  Description of Artificial Sequence: Synthetic oligonucleotide
  Sense strand starting at position 15 of SEQ ID NO: 1563102
ccuugaauccgggagagua

SEQ ID NO: 1795322 - RNA, 19 nt, Artificial Sequence
  Description of Artificial Sequence: Synthetic oligonucleotide
  Antisense strand to SEQ ID NO: 1795321
uacucucccggauucaagg

SEQ ID NO: 1795323 - RNA, 19 nt, Artificial Sequence
  Description of Artificial Sequence: Synthetic oligonucleotide
  Sense strand starting at position 71 of SEQ ID NO: 1563102
aggccucagcgcugagaau

SEQ ID NO: 1795324 - RNA, 19 nt, Artificial Sequence
  Description of Artificial Sequence: Synthetic oligonucleotide
  Antisense strand to SEQ ID NO: 1795323
auucucagcgcugaggccu

SEQ ID NO: 1795325 - RNA, 19 nt, Artificial Sequence
  Description of Artificial Sequence: Synthetic oligonucleotide
  Sense strand starting at position 741 of SEQ ID NO: 1563102
gagcgaagccgagacagau

SEQ ID NO: 1795326 - RNA, 19 nt, Artificial Sequence
  Description of Artificial Sequence: Synthetic oligonucleotide
  Antisense strand to SEQ ID NO: 1795325
aucugucucggcuucgcuc

SEQ ID NO: 1795327 - RNA, 19 nt, Artificial Sequence
  Description of Artificial Sequence: Synthetic oligonucleotide
  Sense strand starting at position 750 of SEQ ID NO: 1563102
cgagacagauucugucuaa

SEQ ID NO: 1795328 - RNA, 19 nt, Artificial Sequence
  Description of Artificial Sequence: Synthetic oligonucleotide
  Antisense strand to SEQ ID NO: 1795327
uuagacagaaucugucucg

SEQ ID NO: 1795329 - RNA, 19 nt, Artificial Sequence
  Description of Artificial Sequence: Synthetic oligonucleotide
  Sense strand starting at position 751 of SEQ ID NO: 1563102
gagacagauucugucuaaa

SEQ ID NO: 1795330 - RNA, 19 nt, Artificial Sequence
  Description of Artificial Sequence: Synthetic oligonucleotide
  Antisense strand to SEQ ID NO: 1795329
uuuagacagaaucugucuc

SEQ ID NO: 1795331 - RNA, 19 nt, Artificial Sequence
  Description of Artificial Sequence: Synthetic oligonucleotide
  Sense strand starting at position 753 of SEQ ID NO: 1563102
gacagauucugucuaaagg

SEQ ID NO: 1795332 - RNA, 19 nt, Artificial Sequence
  Description of Artificial Sequence: Synthetic oligonucleotide
  Antisense strand to SEQ ID NO: 1795331
ccuuuagacagaaucuguc

SEQ ID NO: 1795333 - RNA, 19 nt, Artificial Sequence
  Description of Artificial Sequence: Synthetic oligonucleotide
  Sense strand starting at position 802 of SEQ ID NO: 1563102
uggguucaggaauguggaa

SEQ ID NO: 1795334 - RNA, 19 nt, Artificial Sequence
  Description of Artificial Sequence: Synthetic oligonucleotide
  Antisense strand to SEQ ID NO: 1795333
uuccacauuccugaaccca

SEQ ID NO: 1795335 - RNA, 19 nt, Artificial Sequence
  Description of Artificial Sequence: Synthetic oligonucleotide
  Sense strand starting at position 817 of SEQ ID NO: 1563102
ggaaauacgacucggagca

SEQ ID NO: 1795336 - RNA, 19 nt, Artificial Sequence
  Description of Artificial Sequence: Synthetic oligonucleotide
  Antisense strand to SEQ ID NO: 1795335
ugcuccgagucguauuucc

SEQ ID NO: 1795337 - RNA, 19 nt, Artificial Sequence
  Description of Artificial Sequence: Synthetic oligonucleotide
  Sense strand starting at position 1012 of SEQ ID NO: 1563102
cggacgaguugucaaggua

SEQ ID NO: 1795338 - RNA, 19 nt, Artificial Sequence
  Description of Artificial Sequence: Synthetic oligonucleotide
  Antisense strand to SEQ ID NO: 1795337
uaccuugacaacucguccg

SEQ ID NO: 1795339 - RNA, 19 nt, Artificial Sequence
  Description of Artificial Sequence: Synthetic oligonucleotide
  Sense strand starting at position 1015 of SEQ ID NO: 1563102
acgaguugucaagguaauu

SEQ ID NO: 1795340 - RNA, 19 nt, Artificial Sequence
  Description of Artificial Sequence: Synthetic oligonucleotide
  Antisense strand to SEQ ID NO: 1795339
aauuaccuugacaacucgu

SEQ ID NO: 1795341 - RNA, 19 nt, Artificial Sequence
  Description of Artificial Sequence: Synthetic oligonucleotide
  Sense strand starting at position 1037 of SEQ ID NO: 1563102
acacgucugggugauggau

SEQ ID NO: 1795342 - RNA, 19 nt, Artificial Sequence
  Description of Artificial Sequence: Synthetic oligonucleotide
  Antisense strand to SEQ ID NO: 1795341
auccaucacccagacgugu

SEQ ID NO: 1795343 - RNA, 19 nt, Artificial Sequence
  Description of Artificial Sequence: Synthetic oligonucleotide
  Sense strand starting at position 1599 of SEQ ID NO: 1563102
aaauccacuugcgaaaguu

SEQ ID NO: 1795344 - RNA, 19 nt, Artificial Sequence
  Description of Artificial Sequence: Synthetic oligonucleotide
  Antisense strand to SEQ ID NO: 1795343
aacuuucgcaaguggauuu

SEQ ID NO: 1795345 - RNA, 19 nt, Artificial Sequence
  Description of Artificial Sequence: Synthetic oligonucleotide
  Sense strand starting at position 1607 of SEQ ID NO: 1563102
uugcgaaaguuucugugca

SEQ ID NO: 1795346 - RNA, 19 nt, Artificial Sequence
  Description of Artificial Sequence: Synthetic oligonucleotide
  Antisense strand to SEQ ID NO: 1795345
ugcacagaaacuuucgcaa

SEQ ID NO: 1795347 - RNA, 19 nt, Artificial Sequence
  Description of Artificial Sequence: Synthetic oligonucleotide
  Sense strand starting at position 1608 of SEQ ID NO: 1563102
ugcgaaaguuucugugcau

SEQ ID NO: 1795348 - RNA, 19 nt, Artificial Sequence
  Description of Artificial Sequence: Synthetic oligonucleotide
  Antisense strand to SEQ ID NO: 1795347
augcacagaaacuuucgca

SEQ ID NO: 1795349 - RNA, 19 nt, Artificial Sequence
  Description of Artificial Sequence: Synthetic oligonucleotide
  Sense strand starting at position 1609 of SEQ ID NO: 1563102
gcgaaaguuucugugcaug

SEQ ID NO: 1795350 - RNA, 19 nt, Artificial Sequence
  Description of Artificial Sequence: Synthetic oligonucleotide
  Antisense strand to SEQ ID NO: 1795349
caugcacagaaacuuucgc

SEQ ID NO: 1795351 - RNA, 19 nt, Artificial Sequence
  Description of Artificial Sequence: Synthetic oligonucleotide
  Sense strand starting at position 1611 of SEQ ID NO: 1563102
gaaaguuucugugcaugau

SEQ ID NO: 1795352 - RNA, 19 nt, Artificial Sequence
  Description of Artificial Sequence: Synthetic oligonucleotide
  Antisense strand to SEQ ID NO: 1795351
aucaugcacagaaacuuuc

SEQ ID NO: 1795353 - RNA, 19 nt, Artificial Sequence
  Description of Artificial Sequence: Synthetic oligonucleotide
  Sense strand starting at position 1612 of SEQ ID NO: 1563102
aaaguuucugugcaugauc

SEQ ID NO: 1795354 - RNA, 19 nt, Artificial Sequence
  Description of Artificial Sequence: Synthetic oligonucleotide
  Antisense strand to SEQ ID NO: 1795353
gaucaugcacagaaacuuu

SEQ ID NO: 1795355 - RNA, 19 nt, Artificial Sequence
  Description of Artificial Sequence: Synthetic oligonucleotide
  Sense strand starting at position 1614 of SEQ ID NO: 1563102
aguuucugugcaugaucca

SEQ ID NO: 1795356 - RNA, 19 nt, Artificial Sequence
  Description of Artificial Sequence: Synthetic oligonucleotide
  Antisense strand to SEQ ID NO: 1795355
uggaucaugcacagaaacu

SEQ ID NO: 1795357 - RNA, 19 nt, Artificial Sequence
  Description of Artificial Sequence: Synthetic oligonucleotide
  Sense strand starting at position 1995 of SEQ ID NO: 1563102
ggccaauguguccgcacuu

SEQ ID NO: 1795358 - RNA, 19 nt, Artificial Sequence
  Description of Artificial Sequence: Synthetic oligonucleotide
  Antisense strand to SEQ ID NO: 1795357
aagugcggacacauuggcc

SEQ ID NO: 1795359 - RNA, 19 nt, Artificial Sequence
  Description of Artificial Sequence: Synthetic oligonucleotide
  Sense strand starting at position 2362 of SEQ ID NO: 1563102
gcgggaaacuacugguaca

SEQ ID NO: 1795360 - RNA, 19 nt, Artificial Sequence
  Description of Artificial Sequence: Synthetic oligonucleotide
  Antisense strand to SEQ ID NO: 1795359
uguaccaguaguuucccgc

SEQ ID NO: 1795361 - RNA, 19 nt, Artificial Sequence
  Description of Artificial Sequence: Synthetic oligonucleotide
  Sense strand starting at position 2599 of SEQ ID NO: 1563102
agcuuugggaccugaaaga

SEQ ID NO: 1795362 - RNA, 19 nt, Artificial Sequence
  Description of Artificial Sequence: Synthetic oligonucleotide
  Antisense strand to SEQ ID NO: 1795361
ucuuucaggucccaaagcu

SEQ ID NO: 1795363 - RNA, 19 nt, Artificial Sequence
  Description of Artificial Sequence: Synthetic oligonucleotide
  Sense strand starting at position 2954 of SEQ ID NO: 1563102
gucuguccucagugggcaa

SEQ ID NO: 1795364 - RNA, 19 nt, Artificial Sequence
  Description of Artificial Sequence: Synthetic oligonucleotide
  Antisense strand to SEQ ID NO: 1795363
uugcccacugaggacagac

SEQ ID NO: 1795365 - RNA, 19 nt, Artificial Sequence
  Description of Artificial Sequence: Synthetic oligonucleotide
  Sense strand starting at position 3121 of SEQ ID NO: 1563102
gcgagagucuguguaugca

SEQ ID NO: 1795366 - RNA, 19 nt, Artificial Sequence
  Description of Artificial Sequence: Synthetic oligonucleotide
  Antisense strand to SEQ ID NO: 1795365
ugcauacacagacucucgc

SEQ ID NO: 1795367 - RNA, 19 nt, Artificial Sequence
  Description of Artificial Sequence: Synthetic oligonucleotide
  Sense strand starting at position 411 of SEQ ID NO: 1563103
ggaagcaaauaucagaaca

SEQ ID NO: 1795368 - RNA, 19 nt, Artificial Sequence
  Description of Artificial Sequence: Synthetic oligonucleotide
  Antisense strand to SEQ ID NO: 1795367
uguucugauauuugcuucc

SEQ ID NO: 1795369 - RNA, 19 nt, Artificial Sequence
  Description of Artificial Sequence: Synthetic oligonucleotide
  Sense strand starting at position 463 of SEQ ID NO: 1563103
guuugaccuuaaguaguuu

SEQ ID NO: 1795370 - RNA, 19 nt, Artificial Sequence
  Description of Artificial Sequence: Synthetic oligonucleotide
  Antisense strand to SEQ ID NO: 1795369
aaacuacuuaaggucaaac

SEQ ID NO: 1795371 - RNA, 19 nt, Artificial Sequence
  Description of Artificial Sequence: Synthetic oligonucleotide
  Sense strand starting at position 599 of SEQ ID NO: 1563103
auaccacacugagucauau

SEQ ID NO: 1795372 - RNA, 19 nt, Artificial Sequence
  Description of Artificial Sequence: Synthetic oligonucleotide
  Antisense strand to SEQ ID NO: 1795371
auaugacucagugugguau

SEQ ID NO: 1795373 - RNA, 19 nt, Artificial Sequence
  Description of Artificial Sequence: Synthetic oligonucleotide
  Sense strand starting at position 915 of SEQ ID NO: 1563103
ugucuccaguucucuuaaa

SEQ ID NO: 1795374 - RNA, 19 nt, Artificial Sequence
  Description of Artificial Sequence: Synthetic oligonucleotide
  Antisense strand to SEQ ID NO: 1795373
uuuaagagaacuggagaca

SEQ ID NO: 1795375 - RNA, 19 nt, Artificial Sequence
  Description of Artificial Sequence: Synthetic oligonucleotide
  Sense strand starting at position 916 of SEQ ID NO: 1563103
gucuccaguucucuuaaac

SEQ ID NO: 1795376 - RNA, 19 nt, Artificial Sequence
  Description of Artificial Sequence: Synthetic oligonucleotide
  Antisense strand to SEQ ID NO: 1795375
guuuaagagaacuggagac

SEQ ID NO: 1795377 - RNA, 19 nt, Artificial Sequence
  Description of Artificial Sequence: Synthetic oligonucleotide
  Sense strand starting at position 960 of SEQ ID NO: 1563103
uagugaaggcugcaaucuu

SEQ ID NO: 1795378 - RNA, 19 nt, Artificial Sequence
  Description of Artificial Sequence: Synthetic oligonucleotide
  Antisense strand to SEQ ID NO: 1795377
aagauugcagccuucacua

SEQ ID NO: 1795379 - RNA, 19 nt, Artificial Sequence
  Description of Artificial Sequence: Synthetic oligonucleotide
  Sense strand starting at position 971 of SEQ ID NO: 1563103
gcaaucuugcuaugacauc

SEQ ID NO: 1795380 - RNA, 19 nt, Artificial Sequence
  Description of Artificial Sequence: Synthetic oligonucleotide
  Antisense strand to SEQ ID NO: 1795379
gaugucauagcaagauugc

SEQ ID NO: 1795381 - RNA, 19 nt, Artificial Sequence
  Description of Artificial Sequence: Synthetic oligonucleotide
  Sense strand starting at position 1038 of SEQ ID NO: 1563103
cucccugaucucuaguguu

SEQ ID NO: 1795382 - RNA, 19 nt, Artificial Sequence
  Description of Artificial Sequence: Synthetic oligonucleotide
  Antisense strand to SEQ ID NO: 1795381
aacacuagagaucagggag

SEQ ID NO: 1795383 - RNA, 19 nt, Artificial Sequence
  Description of Artificial Sequence: Synthetic oligonucleotide
  Sense strand starting at position 1089 of SEQ ID NO: 1563103
gugucuguuggaggagaca

SEQ ID NO: 1795384 - RNA, 19 nt, Artificial Sequence
  Description of Artificial Sequence: Synthetic oligonucleotide
  Antisense strand to SEQ ID NO: 1795383
ugucuccuccaacagacac

SEQ ID NO: 1795385 - RNA, 19 nt, Artificial Sequence
  Description of Artificial Sequence: Synthetic oligonucleotide
  Sense strand starting at position 1196 of SEQ ID NO: 1563103
gacuaagugcuaggcacau

SEQ ID NO: 1795386 - RNA, 19 nt, Artificial Sequence
  Description of Artificial Sequence: Synthetic oligonucleotide
  Antisense strand to SEQ ID NO: 1795385
augugccuagcacuuaguc

SEQ ID NO: 1795387 - RNA, 19 nt, Artificial Sequence
  Description of Artificial Sequence: Synthetic oligonucleotide
  Sense strand starting at position 1200 of SEQ ID NO: 1563103
aagugcuaggcacauuaua

SEQ ID NO: 1795388 - RNA, 19 nt, Artificial Sequence
  Description of Artificial Sequence: Synthetic oligonucleotide
  Antisense strand to SEQ ID NO: 1795387
uauaaugugccuagcacuu

SEQ ID NO: 1795389 - RNA, 19 nt, Artificial Sequence
  Description of Artificial Sequence: Synthetic oligonucleotide
  Sense strand starting at position 1478 of SEQ ID NO: 1563103
caucucuaacgagagaguu

SEQ ID NO: 1795390 - RNA, 19 nt, Artificial Sequence
  Description of Artificial Sequence: Synthetic oligonucleotide
  Antisense strand to SEQ ID NO: 1795389
aacucucucguuagagaug

SEQ ID NO: 1795391 - RNA, 19 nt, Artificial Sequence
  Description of Artificial Sequence: Synthetic oligonucleotide
  Sense strand starting at position 2203 of SEQ ID NO: 1563103
gagcguguccuccacaaac

SEQ ID NO: 1795392 - RNA, 19 nt, Artificial Sequence
  Description of Artificial Sequence: Synthetic oligonucleotide
  Antisense strand to SEQ ID NO: 1795391
guuuguggaggacacgcuc

SEQ ID NO: 1795393 - RNA, 19 nt, Artificial Sequence
  Description of Artificial Sequence: Synthetic oligonucleotide
  Sense strand starting at position 2273 of SEQ ID NO: 1563103
auuccaaaccgagagcuuu

SEQ ID NO: 1795394 - RNA, 19 nt, Artificial Sequence
  Description of Artificial Sequence: Synthetic oligonucleotide
  Antisense strand to SEQ ID NO: 1795393
aaagcucucgguuuggaau

SEQ ID NO: 1795395 - RNA, 19 nt, Artificial Sequence
  Description of Artificial Sequence: Synthetic oligonucleotide
  Sense strand starting at position 2286 of SEQ ID NO: 1563103
agcuuuccagacugacgaa

SEQ ID NO: 1795396 - RNA, 19 nt, Artificial Sequence
  Description of Artificial Sequence: Synthetic oligonucleotide
  Antisense strand to SEQ ID NO: 1795395
uucgucagucuggaaagcu

SEQ ID NO: 1795397 - RNA, 19 nt, Artificial Sequence
  Description of Artificial Sequence: Synthetic oligonucleotide
  Sense strand starting at position 2287 of SEQ ID NO: 1563103
gcuuuccagacugacgaau

SEQ ID NO: 1795398 - RNA, 19 nt, Artificial Sequence
  Description of Artificial Sequence: Synthetic oligonucleotide
  Antisense strand to SEQ ID NO: 1795397
auucgucagucuggaaagc

SEQ ID NO: 1795399 - RNA, 19 nt, Artificial Sequence
  Description of Artificial Sequence: Synthetic oligonucleotide
  Sense strand starting at position 2527 of SEQ ID NO: 1563103
gaaagaaauucugcggaau

SEQ ID NO: 1795400 - RNA, 19 nt, Artificial Sequence
  Description of Artificial Sequence: Synthetic oligonucleotide
  Antisense strand to SEQ ID NO: 1795399
auuccgcagaauuucuuuc

SEQ ID NO: 1795401 - RNA, 19 nt, Artificial Sequence
  Description of Artificial Sequence: Synthetic oligonucleotide
  Sense strand starting at position 2528 of SEQ ID NO: 1563103
aaagaaauucugcggaaua

SEQ ID NO: 1795402 - RNA, 19 nt, Artificial Sequence
  Description of Artificial Sequence: Synthetic oligonucleotide
  Antisense strand to SEQ ID NO: 1795401
uauuccgcagaauuucuuu

SEQ ID NO: 1795403 - RNA, 19 nt, Artificial Sequence
  Description of Artificial Sequence: Synthetic oligonucleotide
  Sense strand starting at position 2546 of SEQ ID NO: 1563103
agaagucuuuaagaaauga

SEQ ID NO: 1795404 - RNA, 19 nt, Artificial Sequence
  Description of Artificial Sequence: Synthetic oligonucleotide
  Antisense strand to SEQ ID NO: 1795403
ucauuucuuaaagacuucu

SEQ ID NO: 1795405 - RNA, 19 nt, Artificial Sequence
  Description of Artificial Sequence: Synthetic oligonucleotide
  Sense strand starting at position 2561 of SEQ ID NO: 1563103
augagaucgugcccuuuaa

SEQ ID NO: 1795406 - RNA, 19 nt, Artificial Sequence
  Description of Artificial Sequence: Synthetic oligonucleotide
  Antisense strand to SEQ ID NO: 1795405
uuaaagggcacgaucucau

SEQ ID NO: 1795407 - RNA, 19 nt, Artificial Sequence
  Description of Artificial Sequence: Synthetic oligonucleotide
  Sense strand starting at position 2590 of SEQ ID NO: 1563103
aacaauagugagggcuuaa

SEQ ID NO: 1795408 - RNA, 19 nt, Artificial Sequence
  Description of Artificial Sequence: Synthetic oligonucleotide
  Antisense strand to SEQ ID NO: 1795407
uuaagcccucacuauuguu

SEQ ID NO: 1795409 - RNA, 19 nt, Artificial Sequence
  Description of Artificial Sequence: Synthetic oligonucleotide
  Sense strand starting at position 2602 of SEQ ID NO: 1563103
ggcuuaauaaacgauaggu

SEQ ID NO: 1795410 - RNA, 19 nt, Artificial Sequence
  Description of Artificial Sequence: Synthetic oligonucleotide
  Antisense strand to SEQ ID NO: 1795409
accuaucguuuauuaagcc

SEQ ID NO: 1795411 - RNA, 19 nt, Artificial Sequence
  Description of Artificial Sequence: Synthetic oligonucleotide
  Sense strand starting at position 2604 of SEQ ID NO: 1563103
cuuaauaaacgauaggugu

SEQ ID NO: 1795412 - RNA, 19 nt, Artificial Sequence
  Description of Artificial Sequence: Synthetic oligonucleotide
  Antisense strand to SEQ ID NO: 1795411
acaccuaucguuuauuaag

SEQ ID NO: 1795413 - RNA, 19 nt, Artificial Sequence
  Description of Artificial Sequence: Synthetic oligonucleotide
  Sense strand starting at position 2662 of SEQ ID NO: 1563103
uucguuccauuucuaaagu

SEQ ID NO: 1795414 - RNA, 19 nt, Artificial Sequence
  Description of Artificial Sequence: Synthetic oligonucleotide
  Antisense strand to SEQ ID NO: 1795413
acuuuagaaauggaacgaa

SEQ ID NO: 1795415 - RNA, 19 nt, Artificial Sequence
  Description of Artificial Sequence: Synthetic oligonucleotide
  Sense strand starting at position 2682 of SEQ ID NO: 1563103
uguacuaugagcgugcauu

SEQ ID NO: 1795416 - RNA, 19 nt, Artificial Sequence
  Description of Artificial Sequence: Synthetic oligonucleotide
  Antisense strand to SEQ ID NO: 1795415
aaugcacgcucauaguaca

SEQ ID NO: 1795417 - RNA, 19 nt, Artificial Sequence
  Description of Artificial Sequence: Synthetic oligonucleotide
  Sense strand starting at position 2683 of SEQ ID NO: 1563103
guacuaugagcgugcauuu

SEQ ID NO: 1795418 - RNA, 19 nt, Artificial Sequence
  Description of Artificial Sequence: Synthetic oligonucleotide
  Antisense strand to SEQ ID NO: 1795417
aaaugcacgcucauaguac

SEQ ID NO: 1795419 - RNA, 19 nt, Artificial Sequence
  Description of Artificial Sequence: Synthetic oligonucleotide
  Sense strand starting at position 2795 of SEQ ID NO: 1563103
cccgcuucggccucuauua

SEQ ID NO: 1795420 - RNA, 19 nt, Artificial Sequence
  Description of Artificial Sequence: Synthetic oligonucleotide
  Antisense strand to SEQ ID NO: 1795419
uaauagaggccgaagcggg

SEQ ID NO: 1795421 - RNA, 19 nt, Artificial Sequence
  Description of Artificial Sequence: Synthetic oligonucleotide
  Sense strand starting at position 2796 of SEQ ID NO: 1563103
ccgcuucggccucuauuau

SEQ ID NO: 1795422 - RNA, 19 nt, Artificial Sequence
  Description of Artificial Sequence: Synthetic oligonucleotide
  Antisense strand to SEQ ID NO: 1795421
auaauagaggccgaagcgg

SEQ ID NO: 1795423 - RNA, 19 nt, Artificial Sequence
  Description of Artificial Sequence: Synthetic oligonucleotide
  Sense strand starting at position 3390 of SEQ ID NO: 1563103
cccagaaaugcacagcaau

SEQ ID NO: 1795424 - RNA, 19 nt, Artificial Sequence
  Description of Artificial Sequence: Synthetic oligonucleotide
  Antisense strand to SEQ ID NO: 1795423
auugcugugcauuucuggg

SEQ ID NO: 1795425 - RNA, 19 nt, Artificial Sequence
  Description of Artificial Sequence: Synthetic oligonucleotide
  Sense strand starting at position 3450 of SEQ ID NO: 1563103
agcacuauuccagguucua

SEQ ID NO: 1795426 - RNA, 19 nt, Artificial Sequence
  Description of Artificial Sequence: Synthetic oligonucleotide
  Antisense strand to SEQ ID NO: 1795425
uagaaccuggaauagugcu

SEQ ID NO: 1795427 - RNA, 19 nt, Artificial Sequence
  Description of Artificial Sequence: Synthetic oligonucleotide
  Sense strand starting at position 3534 of SEQ ID NO: 1563103
gauagcagguuccuaagua

SEQ ID NO: 1795428 - RNA, 19 nt, Artificial Sequence
  Description of Artificial Sequence: Synthetic oligonucleotide
  Antisense strand to SEQ ID NO: 1795427
uacuuaggaaccugcuauc

SEQ ID NO: 1795429 - RNA, 19 nt, Artificial Sequence
  Description of Artificial Sequence: Synthetic oligonucleotide
  Sense strand starting at position 3538 of SEQ ID NO: 1563103
gcagguuccuaaguaauuc

SEQ ID NO: 1795430 - RNA, 19 nt, Artificial Sequence
  Description of Artificial Sequence: Synthetic oligonucleotide
  Antisense strand to SEQ ID NO: 1795429
gaauuacuuaggaaccugc

SEQ ID NO: 1795431 - RNA, 19 nt, Artificial Sequence
  Description of Artificial Sequence: Synthetic oligonucleotide
  Sense strand starting at position 3542 of SEQ ID NO: 1563103
guuccuaaguaauucuuua

SEQ ID NO: 1795432 - RNA, 19 nt, Artificial Sequence
  Description of Artificial Sequence: Synthetic oligonucleotide
  Antisense strand to SEQ ID NO: 1795431
uaaagaauuacuuaggaac

SEQ ID NO: 1795433 - RNA, 19 nt, Artificial Sequence
  Description of Artificial Sequence: Synthetic oligonucleotide
  Sense strand starting at position 3546 of SEQ ID NO: 1563103
cuaaguaauucuuuagugu

SEQ ID NO: 1795434 - RNA, 19 nt, Artificial Sequence
  Description of Artificial Sequence: Synthetic oligonucleotide
  Antisense strand to SEQ ID NO: 1795433
acacuaaagaauuacuuag

SEQ ID NO: 1795435 - RNA, 19 nt, Artificial Sequence
  Description of Artificial Sequence: Synthetic oligonucleotide
  Sense strand starting at position 3562 of SEQ ID NO: 1563103
uguuauuaagucggauuag

SEQ ID NO: 1795436 - RNA, 19 nt, Artificial Sequence
  Description of Artificial Sequence: Synthetic oligonucleotide
  Antisense strand to SEQ ID NO: 1795435
cuaauccgacuuaauaaca

SEQ ID NO: 1795437 - RNA, 19 nt, Artificial Sequence
  Description of Artificial Sequence: Synthetic oligonucleotide
  Sense strand starting at position 3573 of SEQ ID NO: 1563103
cggauuagcuggucaauuu

SEQ ID NO: 1795438 - RNA, 19 nt, Artificial Sequence
  Description of Artificial Sequence: Synthetic oligonucleotide
  Antisense strand to SEQ ID NO: 1795437
aaauugaccagcuaauccg

SEQ ID NO: 1795439 - RNA, 19 nt, Artificial Sequence
  Description of Artificial Sequence: Synthetic oligonucleotide
  Sense strand starting at position 3634 of SEQ ID NO: 1563103
gcaaguccaucucuugaua

SEQ ID NO: 1795440 - RNA, 19 nt, Artificial Sequence
  Description of Artificial Sequence: Synthetic oligonucleotide
  Antisense strand to SEQ ID NO: 1795439
uaucaagagauggacuugc

SEQ ID NO: 1795441 - RNA, 19 nt, Artificial Sequence
  Description of Artificial Sequence: Synthetic oligonucleotide
  Sense strand starting at position 3637 of SEQ ID NO: 1563103
aguccaucucuugauaucu

SEQ ID NO: 1795442 - RNA, 19 nt, Artificial Sequence
  Description of Artificial Sequence: Synthetic oligonucleotide
  Antisense strand to SEQ ID NO: 1795441
agauaucaagagauggacu

SEQ ID NO: 1795443 - RNA, 19 nt, Artificial Sequence
  Description of Artificial Sequence: Synthetic oligonucleotide
  Sense strand starting at position 3958 of SEQ ID NO: 1563103
gggagaagucuggaggugu

SEQ ID NO: 1795444 - RNA, 19 nt, Artificial Sequence
  Description of Artificial Sequence: Synthetic oligonucleotide
  Antisense strand to SEQ ID NO: 1795443
acaccuccagacuucuccc

SEQ ID NO: 1795445 - RNA, 19 nt, Artificial Sequence
  Description of Artificial Sequence: Synthetic oligonucleotide
  Sense strand starting at position 3976 of SEQ ID NO: 1563103
ucuucuagccgagaccuau

SEQ ID NO: 1795446 - RNA, 19 nt, Artificial Sequence
  Description of Artificial Sequence: Synthetic oligonucleotide
  Antisense strand to SEQ ID NO: 1795445
auaggucucggcuagaaga

SEQ ID NO: 1795447 - RNA, 19 nt, Artificial Sequence
  Description of Artificial Sequence: Synthetic oligonucleotide
  Sense strand starting at position 6 of SEQ ID NO: 1563104
guggcaaagaguuauugga

SEQ ID NO: 1795448 - RNA, 19 nt, Artificial Sequence
  Description of Artificial Sequence: Synthetic oligonucleotide
  Antisense strand to SEQ ID NO: 1795447
uccaauaacucuuugccac

SEQ ID NO: 1795449 - RNA, 19 nt, Artificial Sequence
  Description of Artificial Sequence: Synthetic oligonucleotide
  Sense strand starting at position 8 of SEQ ID NO: 1563104
ggcaaagaguuauuggauu

SEQ ID NO: 1795450 - RNA, 19 nt, Artificial Sequence
  Description of Artificial Sequence: Synthetic oligonucleotide
  Antisense strand to SEQ ID NO: 1795449
aauccaauaacucuuugcc

SEQ ID NO: 1795451 - RNA, 19 nt, Artificial Sequence
  Description of Artificial Sequence: Synthetic oligonucleotide
  Sense strand starting at position 16 of SEQ ID NO: 1563104
guuauuggauuugauacca

SEQ ID NO: 1795452 - RNA, 19 nt, Artificial Sequence
  Description of Artificial Sequence: Synthetic oligonucleotide
  Antisense strand to SEQ ID NO: 1795451
ugguaucaaauccaauaac

SEQ ID NO: 1795453 - RNA, 19 nt, Artificial Sequence
  Description of Artificial Sequence: Synthetic oligonucleotide
  Sense strand starting at position 156 of SEQ ID NO: 1563104
ugaaauguguacccaauua

SEQ ID NO: 1795454 - RNA, 19 nt, Artificial Sequence
  Description of Artificial Sequence: Synthetic oligonucleotide
  Antisense strand to SEQ ID NO: 1795453
uaauuggguacacauuuca

SEQ ID NO: 1795455 - RNA, 19 nt, Artificial Sequence
  Description of Artificial Sequence: Synthetic oligonucleotide
  Sense strand starting at position 381 of SEQ ID NO: 1563104
cguuguuugguggcaugua

SEQ ID NO: 1795456 - RNA, 19 nt, Artificial Sequence
  Description of Artificial Sequence: Synthetic oligonucleotide
  Antisense strand to SEQ ID NO: 1795455
uacaugccaccaaacaacg

SEQ ID NO: 1795457 - RNA, 19 nt, Artificial Sequence
  Description of Artificial Sequence: Synthetic oligonucleotide
  Sense strand starting at position 499 of SEQ ID NO: 1563104
acuguacaugaagguauaa

SEQ ID NO: 1795458 - RNA, 19 nt, Artificial Sequence
  Description of Artificial Sequence: Synthetic oligonucleotide
  Antisense strand to SEQ ID NO: 1795457
uuauaccuucauguacagu

SEQ ID NO: 1795459 - RNA, 19 nt, Artificial Sequence
  Description of Artificial Sequence: Synthetic oligonucleotide
  Sense strand starting at position 595 of SEQ ID NO: 1563104
guugcuacucagcaauaaa

SEQ ID NO: 1795460 - RNA, 19 nt, Artificial Sequence
  Description of Artificial Sequence: Synthetic oligonucleotide
  Antisense strand to SEQ ID NO: 1795459
uuuauugcugaguagcaac

SEQ ID NO: 1795461 - RNA, 19 nt, Artificial Sequence
  Description of Artificial Sequence: Synthetic oligonucleotide
  Sense strand starting at position 622 of SEQ ID NO: 1563104
agacuauuagcagguauaa

SEQ ID NO: 1795462 - RNA, 19 nt, Artificial Sequence
  Description of Artificial Sequence: Synthetic oligonucleotide
  Antisense strand to SEQ ID NO: 1795461
uuauaccugcuaauagucu

SEQ ID NO: 1795463 - RNA, 19 nt, Artificial Sequence
  Description of Artificial Sequence: Synthetic oligonucleotide
  Sense strand starting at position 631 of SEQ ID NO: 1563104
gcagguauaauuggaagaa

SEQ ID NO: 1795464 - RNA, 19 nt, Artificial Sequence
  Description of Artificial Sequence: Synthetic oligonucleotide
  Antisense strand to SEQ ID NO: 1795463
uucuuccaauuauaccugc

SEQ ID NO: 1795465 - RNA, 19 nt, Artificial Sequence
  Description of Artificial Sequence: Synthetic oligonucleotide
  Sense strand starting at position 670 of SEQ ID NO: 1563104
ugaggagucuuggcaggga

SEQ ID NO: 1795466 - RNA, 19 nt, Artificial Sequence
  Description of Artificial Sequence: Synthetic oligonucleotide
  Antisense strand to SEQ ID NO: 1795465
ucccugccaagacuccuca

SEQ ID NO: 1795467 - RNA, 19 nt, Artificial Sequence
  Description of Artificial Sequence: Synthetic oligonucleotide
  Sense strand starting at position 673 of SEQ ID NO: 1563104
ggagucuuggcagggaagu

SEQ ID NO: 1795468 - RNA, 19 nt, Artificial Sequence
  Description of Artificial Sequence: Synthetic oligonucleotide
  Antisense strand to SEQ ID NO: 1795467
acuucccugccaagacucc

SEQ ID NO: 1795469 - RNA, 19 nt, Artificial Sequence
  Description of Artificial Sequence: Synthetic oligonucleotide
  Sense strand starting at position 853 of SEQ ID NO: 1563104
aagguauugugguccaaau

SEQ ID NO: 1795470 - RNA, 19 nt, Artificial Sequence
  Description of Artificial Sequence: Synthetic oligonucleotide
  Antisense strand to SEQ ID NO: 1795469
auuuggaccacaauaccuu

SEQ ID NO: 1795471 - RNA, 19 nt, Artificial Sequence
  Description of Artificial Sequence: Synthetic oligonucleotide
  Sense strand starting at position 855 of SEQ ID NO: 1563104
gguauugugguccaaauau

SEQ ID NO: 1795472 - RNA, 19 nt, Artificial Sequence
  Description of Artificial Sequence: Synthetic oligonucleotide
  Antisense strand to SEQ ID NO: 1795471
auauuuggaccacaauacc

SEQ ID NO: 1795473 - RNA, 19 nt, Artificial Sequence
  Description of Artificial Sequence: Synthetic oligonucleotide
  Sense strand starting at position 901 of SEQ ID NO: 1563104
gcaugaaggccugacacuu

SEQ ID NO: 1795474 - RNA, 19 nt, Artificial Sequence
  Description of Artificial Sequence: Synthetic oligonucleotide
  Antisense strand to SEQ ID NO: 1795473
aagugucaggccuucaugc

SEQ ID NO: 1795475 - RNA, 19 nt, Artificial Sequence
  Description of Artificial Sequence: Synthetic oligonucleotide
  Sense strand starting at position 1025 of SEQ ID NO: 1563104
guugcauaauaucuaagaa

SEQ ID NO: 1795476 - RNA, 19 nt, Artificial Sequence
  Description of Artificial Sequence: Synthetic oligonucleotide
  Antisense strand to SEQ ID NO: 1795475
uucuuagauauuaugcaac

SEQ ID NO: 1795477 - RNA, 19 nt, Artificial Sequence
  Description of Artificial Sequence: Synthetic oligonucleotide
  Sense strand starting at position 1503 of SEQ ID NO: 1563104
cuaugauagcauugaccuu

SEQ ID NO: 1795478 - RNA, 19 nt, Artificial Sequence
  Description of Artificial Sequence: Synthetic oligonucleotide
  Antisense strand to SEQ ID NO: 1795477
aaggucaaugcuaucauag

SEQ ID NO: 1795479 - RNA, 19 nt, Artificial Sequence
  Description of Artificial Sequence: Synthetic oligonucleotide
  Sense strand starting at position 1574 of SEQ ID NO: 1563104
ucuagaaagcucuauuaug

SEQ ID NO: 1795480 - RNA, 19 nt, Artificial Sequence
  Description of Artificial Sequence: Synthetic oligonucleotide
  Antisense strand to SEQ ID NO: 1795479
cauaauagagcuuucuaga

SEQ ID NO: 1795481 - RNA, 19 nt, Artificial Sequence
  Description of Artificial Sequence: Synthetic oligonucleotide
  Sense strand starting at position 1699 of SEQ ID NO: 1563104
ucaggagccuaauuauaag

SEQ ID NO: 1795482 - RNA, 19 nt, Artificial Sequence
  Description of Artificial Sequence: Synthetic oligonucleotide
  Antisense strand to SEQ ID NO: 1795481
cuuauaauuaggcuccuga

SEQ ID NO: 1795483 - RNA, 19 nt, Artificial Sequence
  Description of Artificial Sequence: Synthetic oligonucleotide
  Sense strand starting at position 1784 of SEQ ID NO: 1563104
auuugcuuuccagguauau

SEQ ID NO: 1795484 - RNA, 19 nt, Artificial Sequence
  Description of Artificial Sequence: Synthetic oligonucleotide
  Antisense strand to SEQ ID NO: 1795483
auauaccuggaaagcaaau

SEQ ID NO: 1795485 - RNA, 19 nt, Artificial Sequence
  Description of Artificial Sequence: Synthetic oligonucleotide
  Sense strand starting at position 1793 of SEQ ID NO: 1563104
ccagguauauuggcaauaa

SEQ ID NO: 1795486 - RNA, 19 nt, Artificial Sequence
  Description of Artificial Sequence: Synthetic oligonucleotide
  Antisense strand to SEQ ID NO: 1795485
uuauugccaauauaccugg

SEQ ID NO: 1795487 - RNA, 19 nt, Artificial Sequence
  Description of Artificial Sequence: Synthetic oligonucleotide
  Sense strand starting at position 1854 of SEQ ID NO: 1563104
aguaauacucagcaagauu

SEQ ID NO: 1795488 - RNA, 19 nt, Artificial Sequence
  Description of Artificial Sequence: Synthetic oligonucleotide
  Antisense strand to SEQ ID NO: 1795487
aaucuugcugaguauuacu

SEQ ID NO: 1795489 - RNA, 19 nt, Artificial Sequence
  Description of Artificial Sequence: Synthetic oligonucleotide
  Sense strand starting at position 1970 of SEQ ID NO: 1563104
ugauacguucugcaucaga

SEQ ID NO: 1795490 - RNA, 19 nt, Artificial Sequence
  Description of Artificial Sequence: Synthetic oligonucleotide
  Antisense strand to SEQ ID NO: 1795489
ucugaugcagaacguauca

SEQ ID NO: 1795491 - RNA, 19 nt, Artificial Sequence
  Description of Artificial Sequence: Synthetic oligonucleotide
  Sense strand starting at position 2052 of SEQ ID NO: 1563104
gcagcagguaucuaggaaa

SEQ ID NO: 1795492 - RNA, 19 nt, Artificial Sequence
  Description of Artificial Sequence: Synthetic oligonucleotide
  Antisense strand to SEQ ID NO: 1795491
uuuccuagauaccugcugc

SEQ ID NO: 1795493 - RNA, 19 nt, Artificial Sequence
  Description of Artificial Sequence: Synthetic oligonucleotide
  Sense strand starting at position 2182 of SEQ ID NO: 1563104
guuacauggaguuacaguu

SEQ ID NO: 1795494 - RNA, 19 nt, Artificial Sequence
  Description of Artificial Sequence: Synthetic oligonucleotide
  Antisense strand to SEQ ID NO: 1795493
aacuguaacuccauguaac

SEQ ID NO: 1795495 - RNA, 19 nt, Artificial Sequence
  Description of Artificial Sequence: Synthetic oligonucleotide
  Sense strand starting at position 2298 of SEQ ID NO: 1563104
augacauucuuacuguauc

SEQ ID NO: 1795496 - RNA, 19 nt, Artificial Sequence
  Description of Artificial Sequence: Synthetic oligonucleotide
  Antisense strand to SEQ ID NO: 1795495
gauacaguaagaaugucau

SEQ ID NO: 1795497 - RNA, 19 nt, Artificial Sequence
  Description of Artificial Sequence: Synthetic oligonucleotide
  Sense strand starting at position 2328 of SEQ ID NO: 1563104
uuaucaaauggcugugaua

SEQ ID NO: 1795498 - RNA, 19 nt, Artificial Sequence
  Description of Artificial Sequence: Synthetic oligonucleotide
  Antisense strand to SEQ ID NO: 1795497
uaucacagccauuugauaa

SEQ ID NO: 1795499 - RNA, 19 nt, Artificial Sequence
  Description of Artificial Sequence: Synthetic oligonucleotide
  Sense strand starting at position 2789 of SEQ ID NO: 1563104
cuguaaauggcuuauauac

SEQ ID NO: 1795500 - RNA, 19 nt, Artificial Sequence
  Description of Artificial Sequence: Synthetic oligonucleotide
  Antisense strand to SEQ ID NO: 1795499
guauauaagccauuuacag

SEQ ID NO: 1795501 - RNA, 19 nt, Artificial Sequence
  Description of Artificial Sequence: Synthetic oligonucleotide
  Sense strand starting at position 2945 of SEQ ID NO: 1563104
uagugauaagacugcugga

SEQ ID NO: 1795502 - RNA, 19 nt, Artificial Sequence
  Description of Artificial Sequence: Synthetic oligonucleotide
  Antisense strand to SEQ ID NO: 1795501
uccagcagucuuaucacua

SEQ ID NO: 1795503 - RNA, 19 nt, Artificial Sequence
  Description of Artificial Sequence: Synthetic oligonucleotide
  Sense strand starting at position 3055 of SEQ ID NO: 1563104
gaaccagacuuucugaguu

SEQ ID NO: 1795504 - RNA, 19 nt, Artificial Sequence
  Description of Artificial Sequence: Synthetic oligonucleotide
  Antisense strand to SEQ ID NO: 1795503
aacucagaaagucugguuc

SEQ ID NO: 1795505 - RNA, 19 nt, Artificial Sequence
  Description of Artificial Sequence: Synthetic oligonucleotide
  Sense strand starting at position 3572 of SEQ ID NO: 1563104
gggagauagcaguguagag

SEQ ID NO: 1795506 - RNA, 19 nt, Artificial Sequence
  Description of Artificial Sequence: Synthetic oligonucleotide
  Antisense strand to SEQ ID NO: 1795505
cucuacacugcuaucuccc

SEQ ID NO: 1795507 - RNA, 19 nt, Artificial Sequence
  Description of Artificial Sequence: Synthetic oligonucleotide
  Sense strand starting at position 3611 of SEQ ID NO: 1563104
ggaagaagaguucguggua

SEQ ID NO: 1795508 - RNA, 19 nt, Artificial Sequence
  Description of Artificial Sequence: Synthetic oligonucleotide
  Antisense strand to SEQ ID NO: 1795507
uaccacgaacucuucuucc

SEQ ID NO: 1795509 - RNA, 19 nt, Artificial Sequence
  Description of Artificial Sequence: Synthetic oligonucleotide
  Sense strand starting at position 3624 of SEQ ID NO: 1563104
gugguacacagugaaguuu

SEQ ID NO: 1795510 - RNA, 19 nt, Artificial Sequence
  Description of Artificial Sequence: Synthetic oligonucleotide
  Antisense strand to SEQ ID NO: 1795509
aaacuucacuguguaccac

SEQ ID NO: 1795511 - RNA, 19 nt, Artificial Sequence
  Description of Artificial Sequence: Synthetic oligonucleotide
  Sense strand starting at position 3641 of SEQ ID NO: 1563104
uuggaaagguguuccuauu

SEQ ID NO: 1795512 - RNA, 19 nt, Artificial Sequence
  Description of Artificial Sequence: Synthetic oligonucleotide
  Antisense strand to SEQ ID NO: 1795511
aauaggaacaccuuuccaa

SEQ ID NO: 1795513 - RNA, 19 nt, Artificial Sequence
  Description of Artificial Sequence: Synthetic oligonucleotide
  Sense strand starting at position 3728 of SEQ ID NO: 1563104
aagaguauuugacagugaa

SEQ ID NO: 1795514 - RNA, 19 nt, Artificial Sequence
  Description of Artificial Sequence: Synthetic oligonucleotide
  Antisense strand to SEQ ID NO: 1795513
uucacugucaaauacucuu

SEQ ID NO: 1795515 - RNA, 19 nt, Artificial Sequence
  Description of Artificial Sequence: Synthetic oligonucleotide
  Sense strand starting at position 3756 of SEQ ID NO: 1563104
aagagauugccuuggucaa

SEQ ID NO: 1795516 - RNA, 19 nt, Artificial Sequence
  Description of Artificial Sequence: Synthetic oligonucleotide
  Antisense strand to SEQ ID NO: 1795515
uugaccaaggcaaucucuu

SEQ ID NO: 1795517 - RNA, 19 nt, Artificial Sequence
  Description of Artificial Sequence: Synthetic oligonucleotide
  Sense strand starting at position 3757 of SEQ ID NO: 1563104
agagauugccuuggucaau

SEQ ID NO: 1795518 - RNA, 19 nt, Artificial Sequence
  Description of Artificial Sequence: Synthetic oligonucleotide
  Antisense strand to SEQ ID NO: 1795517
auugaccaaggcaaucucu

SEQ ID NO: 1795519 - RNA, 19 nt, Artificial Sequence
  Description of Artificial Sequence: Synthetic oligonucleotide
  Sense strand starting at position 3768 of SEQ ID NO: 1563104
uggucaauucuugaguauc

SEQ ID NO: 1795520 - RNA, 19 nt, Artificial Sequence
  Description of Artificial Sequence: Synthetic oligonucleotide
  Antisense strand to SEQ ID NO: 1795519
gauacucaagaauugacca

SEQ ID NO: 1795521 - RNA, 19 nt, Artificial Sequence
  Description of Artificial Sequence: Synthetic oligonucleotide
  Sense strand starting at position 3779 of SEQ ID NO: 1563104
ugaguauccaucugguaga

SEQ ID NO: 1795522 - RNA, 19 nt, Artificial Sequence
  Description of Artificial Sequence: Synthetic oligonucleotide
  Antisense strand to SEQ ID NO: 1795521
ucuaccagauggauacuca

SEQ ID NO: 1795523 - RNA, 19 nt, Artificial Sequence
  Description of Artificial Sequence: Synthetic oligonucleotide
  Sense strand starting at position 3868 of SEQ ID NO: 1563104
aucugcgugauguacagaa

SEQ ID NO: 1795524 - RNA, 19 nt, Artificial Sequence
  Description of Artificial Sequence: Synthetic oligonucleotide
  Antisense strand to SEQ ID NO: 1795523
uucuguacaucacgcagau

SEQ ID NO: 1795525 - RNA, 19 nt, Artificial Sequence
  Description of Artificial Sequence: Synthetic oligonucleotide
  Sense strand starting at position 3941 of SEQ ID NO: 1563104
gcagcaucacaagacuagu

SEQ ID NO: 1795526 - RNA, 19 nt, Artificial Sequence
  Description of Artificial Sequence: Synthetic oligonucleotide
  Antisense strand to SEQ ID NO: 1795525
acuagucuugugaugcugc

SEQ ID NO: 1795527 - RNA, 19 nt, Artificial Sequence
  Description of Artificial Sequence: Synthetic oligonucleotide
  Sense strand starting at position 86 of SEQ ID NO: 1563105
ucaaguuuacuuugggcaa

SEQ ID NO: 1795528 - RNA, 19 nt, Artificial Sequence
  Description of Artificial Sequence: Synthetic oligonucleotide
  Antisense strand to SEQ ID NO: 1795527
uugcccaaaguaaacuuga

SEQ ID NO: 1795529 - RNA, 19 nt, Artificial Sequence
  Description of Artificial Sequence: Synthetic oligonucleotide
  Sense strand starting at position 89 of SEQ ID NO: 1563105
aguuuacuuugggcaacau

SEQ ID NO: 1795530 - RNA, 19 nt, Artificial Sequence
  Description of Artificial Sequence: Synthetic oligonucleotide
  Antisense strand to SEQ ID NO: 1795529
auguugcccaaaguaaacu

SEQ ID NO: 1795531 - RNA, 19 nt, Artificial Sequence
  Description of Artificial Sequence: Synthetic oligonucleotide
  Sense strand starting at position 176 of SEQ ID NO: 1563105
aguauuugaucacagaauc

SEQ ID NO: 1795532 - RNA, 19 nt, Artificial Sequence
  Description of Artificial Sequence: Synthetic oligonucleotide
  Antisense strand to SEQ ID NO: 1795531
gauucugugaucaaauacu

SEQ ID NO: 1795533 - RNA, 19 nt, Artificial Sequence
  Description of Artificial Sequence: Synthetic oligonucleotide
  Sense strand starting at position 993 of SEQ ID NO: 1563105
accuaaucccacggagagu

SEQ ID NO: 1795534 - RNA, 19 nt, Artificial Sequence
  Description of Artificial Sequence: Synthetic oligonucleotide
  Antisense strand to SEQ ID NO: 1795533
acucuccgugggauuaggu

SEQ ID NO: 1795535 - RNA, 19 nt, Artificial Sequence
  Description of Artificial Sequence: Synthetic oligonucleotide
  Sense strand starting at position 994 of SEQ ID NO: 1563105
ccuaaucccacggagaguu

SEQ ID NO: 1795536 - RNA, 19 nt, Artificial Sequence
  Description of Artificial Sequence: Synthetic oligonucleotide
  Antisense strand to SEQ ID NO: 1795535
aacucuccgugggauuagg

SEQ ID NO: 1795537 - RNA, 19 nt, Artificial Sequence
  Description of Artificial Sequence: Synthetic oligonucleotide
  Sense strand starting at position 1021 of SEQ ID NO: 1563105
gcagcuuuacuaugagaac

SEQ ID NO: 1795538 - RNA, 19 nt, Artificial Sequence
  Description of Artificial Sequence: Synthetic oligonucleotide
  Antisense strand to SEQ ID NO: 1795537
guucucauaguaaagcugc

SEQ ID NO: 1795539 - RNA, 19 nt, Artificial Sequence
  Description of Artificial Sequence: Synthetic oligonucleotide
  Sense strand starting at position 1051 of SEQ ID NO: 1563105
uucugugcacuggacaaua

SEQ ID NO: 1795540 - RNA, 19 nt, Artificial Sequence
  Description of Artificial Sequence: Synthetic oligonucleotide
  Antisense strand to SEQ ID NO: 1795539
uauuguccagugcacagaa

SEQ ID NO: 1795541 - RNA, 19 nt, Artificial Sequence
  Description of Artificial Sequence: Synthetic oligonucleotide
  Sense strand starting at position 1084 of SEQ ID NO: 1563105
auaguaagaagucgaugua

SEQ ID NO: 1795542 - RNA, 19 nt, Artificial Sequence
  Description of Artificial Sequence: Synthetic oligonucleotide
  Antisense strand to SEQ ID NO: 1795541
uacaucgacuucuuacuau

SEQ ID NO: 1795543 - RNA, 19 nt, Artificial Sequence
  Description of Artificial Sequence: Synthetic oligonucleotide
  Sense strand starting at position 1085 of SEQ ID NO: 1563105
uaguaagaagucgauguaa

SEQ ID NO: 1795544 - RNA, 19 nt, Artificial Sequence
  Description of Artificial Sequence: Synthetic oligonucleotide
  Antisense strand to SEQ ID NO: 1795543
uuacaucgacuucuuacua

SEQ ID NO: 1795545 - RNA, 19 nt, Artificial Sequence
  Description of Artificial Sequence: Synthetic oligonucleotide
  Sense strand starting at position 1154 of SEQ ID NO: 1563105
aagacauagcuuugauguc

SEQ ID NO: 1795546 - RNA, 19 nt, Artificial Sequence
  Description of Artificial Sequence: Synthetic oligonucleotide
  Antisense strand to SEQ ID NO: 1795545
gacaucaaagcuaugucuu

SEQ ID NO: 1795547 - RNA, 19 nt, Artificial Sequence
  Description of Artificial Sequence: Synthetic oligonucleotide
  Sense strand starting at position 1228 of SEQ ID NO: 1563105
auacgauccaauggcagau

SEQ ID NO: 1795548 - RNA, 19 nt, Artificial Sequence
  Description of Artificial Sequence: Synthetic oligonucleotide
  Antisense strand to SEQ ID NO: 1795547
aucugccauuggaucguau

SEQ ID NO: 1795549 - RNA, 19 nt, Artificial Sequence
  Description of Artificial Sequence: Synthetic oligonucleotide
  Sense strand starting at position 1277 of SEQ ID NO: 1563105
cugauuaagcuuuauguuc

SEQ ID NO: 1795550 - RNA, 19 nt, Artificial Sequence
  Description of Artificial Sequence: Synthetic oligonucleotide
  Antisense strand to SEQ ID NO: 1795549
gaacauaaagcuuaaucag

SEQ ID NO: 1795551 - RNA, 19 nt, Artificial Sequence
  Description of Artificial Sequence: Synthetic oligonucleotide
  Sense strand starting at position 1351 of SEQ ID NO: 1563105
cuucgucuugucuuugcaa

SEQ ID NO: 1795552 - RNA, 19 nt, Artificial Sequence
  Description of Artificial Sequence: Synthetic oligonucleotide
  Antisense strand to SEQ ID NO: 1795551
uugcaaagacaagacgaag

SEQ ID NO: 1795553 - RNA, 19 nt, Artificial Sequence
  Description of Artificial Sequence: Synthetic oligonucleotide
  Sense strand starting at position 1466 of SEQ ID NO: 1563105
guguauauucuggagcaag

SEQ ID NO: 1795554 - RNA, 19 nt, Artificial Sequence
  Description of Artificial Sequence: Synthetic oligonucleotide
  Antisense strand to SEQ ID NO: 1795553
cuugcuccagaauauacac

SEQ ID NO: 1795555 - RNA, 19 nt, Artificial Sequence
  Description of Artificial Sequence: Synthetic oligonucleotide
  Sense strand starting at position 1483 of SEQ ID NO: 1563105
agcucucacgccuaacaga

SEQ ID NO: 1795556 - RNA, 19 nt, Artificial Sequence
  Description of Artificial Sequence: Synthetic oligonucleotide
  Antisense strand to SEQ ID NO: 1795555
ucuguuaggcgugagagcu

SEQ ID NO: 1795557 - RNA, 19 nt, Artificial Sequence
  Description of Artificial Sequence: Synthetic oligonucleotide
  Sense strand starting at position 1508 of SEQ ID NO: 1563105
agcuacuugaugugagaca

SEQ ID NO: 1795558 - RNA, 19 nt, Artificial Sequence
  Description of Artificial Sequence: Synthetic oligonucleotide
  Antisense strand to SEQ ID NO: 1795557
ugucucacaucaaguagcu

SEQ ID NO: 1795559 - RNA, 19 nt, Artificial Sequence
  Description of Artificial Sequence: Synthetic oligonucleotide
  Sense strand starting at position 1519 of SEQ ID NO: 1563105
gugagacacuuugucacuu

SEQ ID NO: 1795560 - RNA, 19 nt, Artificial Sequence
  Description of Artificial Sequence: Synthetic oligonucleotide
  Antisense strand to SEQ ID NO: 1795559
aagugacaaagugucucac

SEQ ID NO: 1795561 - RNA, 19 nt, Artificial Sequence
  Description of Artificial Sequence: Synthetic oligonucleotide
  Sense strand starting at position 1520 of SEQ ID NO: 1563105
ugagacacuuugucacuua

SEQ ID NO: 1795562 - RNA, 19 nt, Artificial Sequence
  Description of Artificial Sequence: Synthetic oligonucleotide
  Antisense strand to SEQ ID NO: 1795561
uaagugacaaagugucuca

SEQ ID NO: 1795563 - RNA, 19 nt, Artificial Sequence
  Description of Artificial Sequence: Synthetic oligonucleotide
  Sense strand starting at position 1531 of SEQ ID NO: 1563105
gucacuuaagugugauaau

SEQ ID NO: 1795564 - RNA, 19 nt, Artificial Sequence
  Description of Artificial Sequence: Synthetic oligonucleotide
  Antisense strand to SEQ ID NO: 1795563
auuaucacacuuaagugac

SEQ ID NO: 1795565 - RNA, 19 nt, Artificial Sequence
  Description of Artificial Sequence: Synthetic oligonucleotide
  Sense strand starting at position 1565 of SEQ ID NO: 1563105
guccgaguaacuuggaaga

SEQ ID NO: 1795566 - RNA, 19 nt, Artificial Sequence
  Description of Artificial Sequence: Synthetic oligonucleotide
  Antisense strand to SEQ ID NO: 1795565
ucuuccaaguuacucggac

SEQ ID NO: 1795567 - RNA, 19 nt, Artificial Sequence
  Description of Artificial Sequence: Synthetic oligonucleotide
  Sense strand starting at position 1698 of SEQ ID NO: 1563105
aagaaauccgcggagcaca

SEQ ID NO: 1795568 - RNA, 19 nt, Artificial Sequence
  Description of Artificial Sequence: Synthetic oligonucleotide
  Antisense strand to SEQ ID NO: 1795567
ugugcuccgcggauuucuu

SEQ ID NO: 1795569 - RNA, 19 nt, Artificial Sequence
  Description of Artificial Sequence: Synthetic oligonucleotide
  Sense strand starting at position 2310 of SEQ ID NO: 1563105
acgcuucuagaagauucua

SEQ ID NO: 1795570 - RNA, 19 nt, Artificial Sequence
  Description of Artificial Sequence: Synthetic oligonucleotide
  Antisense strand to SEQ ID NO: 1795569
uagaaucuucuagaagcgu

SEQ ID NO: 1795571 - RNA, 19 nt, Artificial Sequence
  Description of Artificial Sequence: Synthetic oligonucleotide
  Sense strand starting at position 2883 of SEQ ID NO: 1563105
uguaucuugggcgaaauac

SEQ ID NO: 1795572 - RNA, 19 nt, Artificial Sequence
  Description of Artificial Sequence: Synthetic oligonucleotide
  Antisense strand to SEQ ID NO: 1795571
guauuucgcccaagauaca

SEQ ID NO: 1795573 - RNA, 19 nt, Artificial Sequence
  Description of Artificial Sequence: Synthetic oligonucleotide
  Sense strand starting at position 3008 of SEQ ID NO: 1563105
caggucucauugguacaua

SEQ ID NO: 1795574 - RNA, 19 nt, Artificial Sequence
  Description of Artificial Sequence: Synthetic oligonucleotide
  Antisense strand to SEQ ID NO: 1795573
uauguaccaaugagaccug

SEQ ID NO: 1795575 - RNA, 19 nt, Artificial Sequence
  Description of Artificial Sequence: Synthetic oligonucleotide
  Sense strand starting at position 3011 of SEQ ID NO: 1563105
gucucauugguacauagca

SEQ ID NO: 1795576 - RNA, 19 nt, Artificial Sequence
  Description of Artificial Sequence: Synthetic oligonucleotide
  Antisense strand to SEQ ID NO: 1795575
ugcuauguaccaaugagac

SEQ ID NO: 1795577 - RNA, 19 nt, Artificial Sequence
  Description of Artificial Sequence: Synthetic oligonucleotide
  Sense strand starting at position 3046 of SEQ ID NO: 1563105
uuccuuuacgucguguuau

SEQ ID NO: 1795578 - RNA, 19 nt, Artificial Sequence
  Description of Artificial Sequence: Synthetic oligonucleotide
  Antisense strand to SEQ ID NO: 1795577
auaacacgacguaaaggaa

SEQ ID NO: 1795579 - RNA, 19 nt, Artificial Sequence
  Description of Artificial Sequence: Synthetic oligonucleotide
  Sense strand starting at position 3048 of SEQ ID NO: 1563105
ccuuuacgucguguuauaa

SEQ ID NO: 1795580 - RNA, 19 nt, Artificial Sequence
  Description of Artificial Sequence: Synthetic oligonucleotide
  Antisense strand to SEQ ID NO: 1795579
uuauaacacgacguaaagg

SEQ ID NO: 1795581 - RNA, 19 nt, Artificial Sequence
  Description of Artificial Sequence: Synthetic oligonucleotide
  Sense strand starting at position 3049 of SEQ ID NO: 1563105
cuuuacgucguguuauaau

SEQ ID NO: 1795582 - RNA, 19 nt, Artificial Sequence
  Description of Artificial Sequence: Synthetic oligonucleotide
  Antisense strand to SEQ ID NO: 1795581
auuauaacacgacguaaag

SEQ ID NO: 1795583 - RNA, 19 nt, Artificial Sequence
  Description of Artificial Sequence: Synthetic oligonucleotide
  Sense strand starting at position 3202 of SEQ ID NO: 1563105
cguuacuuggcaguguuau

SEQ ID NO: 1795584 - RNA, 19 nt, Artificial Sequence
  Description of Artificial Sequence: Synthetic oligonucleotide
  Antisense strand to SEQ ID NO: 1795583
auaacacugccaaguaacg

SEQ ID NO: 1795585 - RNA, 19 nt, Artificial Sequence
  Description of Artificial Sequence: Synthetic oligonucleotide
  Sense strand starting at position 3214 of SEQ ID NO: 1563105
guguuaucacuccaaacac

SEQ ID NO: 1795586 - RNA, 19 nt, Artificial Sequence
  Description of Artificial Sequence: Synthetic oligonucleotide
  Antisense strand to SEQ ID NO: 1795585
guguuuggagugauaacac

SEQ ID NO: 1795587 - RNA, 19 nt, Artificial Sequence
  Description of Artificial Sequence: Synthetic oligonucleotide
  Sense strand starting at position 3224 of SEQ ID NO: 1563105
uccaaacacgucugagaaa

SEQ ID NO: 1795588 - RNA, 19 nt, Artificial Sequence
  Description of Artificial Sequence: Synthetic oligonucleotide
  Antisense strand to SEQ ID NO: 1795587
uuucucagacguguuugga

SEQ ID NO: 1795589 - RNA, 19 nt, Artificial Sequence
  Description of Artificial Sequence: Synthetic oligonucleotide
  Sense strand starting at position 3262 of SEQ ID NO: 1563105
gcauguuuccaggauauaa

SEQ ID NO: 1795590 - RNA, 19 nt, Artificial Sequence
  Description of Artificial Sequence: Synthetic oligonucleotide
  Antisense strand to SEQ ID NO: 1795589
uuauauccuggaaacaugc

SEQ ID NO: 1795591 - RNA, 19 nt, Artificial Sequence
  Description of Artificial Sequence: Synthetic oligonucleotide
  Sense strand starting at position 3287 of SEQ ID NO: 1563105
ugucuuuaacuguagagua

SEQ ID NO: 1795592 - RNA, 19 nt, Artificial Sequence
  Description of Artificial Sequence: Synthetic oligonucleotide
  Antisense strand to SEQ ID NO: 1795591
uacucuacaguuaaagaca

SEQ ID NO: 1795593 - RNA, 19 nt, Artificial Sequence
  Description of Artificial Sequence: Synthetic oligonucleotide
  Sense strand starting at position 3289 of SEQ ID NO: 1563105
ucuuuaacuguagaguacu

SEQ ID NO: 1795594 - RNA, 19 nt, Artificial Sequence
  Description of Artificial Sequence: Synthetic oligonucleotide
  Antisense strand to SEQ ID NO: 1795593
aguacucuacaguuaaaga

SEQ ID NO: 1795595 - RNA, 19 nt, Artificial Sequence
  Description of Artificial Sequence: Synthetic oligonucleotide
  Sense strand starting at position 3314 of SEQ ID NO: 1563105
cgugcaaggaguuaauuga

SEQ ID NO: 1795596 - RNA, 19 nt, Artificial Sequence
  Description of Artificial Sequence: Synthetic oligonucleotide
  Antisense strand to SEQ ID NO: 1795595
ucaauuaacuccuugcacg

SEQ ID NO: 1795597 - RNA, 19 nt, Artificial Sequence
  Description of Artificial Sequence: Synthetic oligonucleotide
  Sense strand starting at position 3348 of SEQ ID NO: 1563105
ggugcuaggaaacaguaua

SEQ ID NO: 1795598 - RNA, 19 nt, Artificial Sequence
  Description of Artificial Sequence: Synthetic oligonucleotide
  Antisense strand to SEQ ID NO: 1795597
uauacuguuuccuagcacc

SEQ ID NO: 1795599 - RNA, 19 nt, Artificial Sequence
  Description of Artificial Sequence: Synthetic oligonucleotide
  Sense strand starting at position 3474 of SEQ ID NO: 1563105
agggaagucuucccuaaga

SEQ ID NO: 1795600 - RNA, 19 nt, Artificial Sequence
  Description of Artificial Sequence: Synthetic oligonucleotide
  Antisense strand to SEQ ID NO: 1795599
ucuuagggaagacuucccu

SEQ ID NO: 1795601 - RNA, 19 nt, Artificial Sequence
  Description of Artificial Sequence: Synthetic oligonucleotide
  Sense strand starting at position 3598 of SEQ ID NO: 1563105
ggugcugcugugaacguua

SEQ ID NO: 1795602 - RNA, 19 nt, Artificial Sequence
  Description of Artificial Sequence: Synthetic oligonucleotide
  Antisense strand to SEQ ID NO: 1795601
uaacguucacagcagcacc

SEQ ID NO: 1795603 - RNA, 19 nt, Artificial Sequence
  Description of Artificial Sequence: Synthetic oligonucleotide
  Sense strand starting at position 3929 of SEQ ID NO: 1563105
augagcucaugauuaccaa

SEQ ID NO: 1795604 - RNA, 19 nt, Artificial Sequence
  Description of Artificial Sequence: Synthetic oligonucleotide
  Antisense strand to SEQ ID NO: 1795603
uugguaaucaugagcucau

SEQ ID NO: 1795605 - RNA, 19 nt, Artificial Sequence
  Description of Artificial Sequence: Synthetic oligonucleotide
  Sense strand starting at position 3970 of SEQ ID NO: 1563105
acaacaaucugguucuaag

SEQ ID NO: 1795606 - RNA, 19 nt, Artificial Sequence
  Description of Artificial Sequence: Synthetic oligonucleotide
  Antisense strand to SEQ ID NO: 1795605
cuuagaaccagauuguugu

SEQ ID NO: 1795607 - RNA, 19 nt, Artificial Sequence
  Description of Artificial Sequence: Synthetic oligonucleotide
  Sense strand starting at position 324 of SEQ ID NO: 1563106
uuguguuagagugguagau

SEQ ID NO: 1795608 - RNA, 19 nt, Artificial Sequence
  Description of Artificial Sequence: Synthetic oligonucleotide
  Antisense strand to SEQ ID NO: 1795607
aucuaccacucuaacacaa

SEQ ID NO: 1795609 - RNA, 19 nt, Artificial Sequence
  Description of Artificial Sequence: Synthetic oligonucleotide
  Sense strand starting at position 328 of SEQ ID NO: 1563106
guuagagugguagauuaua

SEQ ID NO: 1795610 - RNA, 19 nt, Artificial Sequence
  Description of Artificial Sequence: Synthetic oligonucleotide
  Antisense strand to SEQ ID NO: 1795609
uauaaucuaccacucuaac

SEQ ID NO: 1795611 - RNA, 19 nt, Artificial Sequence
  Description of Artificial Sequence: Synthetic oligonucleotide
  Sense strand starting at position 336 of SEQ ID NO: 1563106
gguagauuauagcaaauuu

SEQ ID NO: 1795612 - RNA, 19 nt, Artificial Sequence
  Description of Artificial Sequence: Synthetic oligonucleotide
  Antisense strand to SEQ ID NO: 1795611
aaauuugcuauaaucuacc

SEQ ID NO: 1795613 - RNA, 19 nt, Artificial Sequence
  Description of Artificial Sequence: Synthetic oligonucleotide
  Sense strand starting at position 364 of SEQ ID NO: 1563106
uuguauuuccuauguuucu

SEQ ID NO: 1795614 - RNA, 19 nt, Artificial Sequence
  Description of Artificial Sequence: Synthetic oligonucleotide
  Antisense strand to SEQ ID NO: 1795613
agaaacauaggaaauacaa

SEQ ID NO: 1795615 - RNA, 19 nt, Artificial Sequence
  Description of Artificial Sequence: Synthetic oligonucleotide
  Sense strand starting at position 827 of SEQ ID NO: 1563106
ggcuauagugagggaauca

SEQ ID NO: 1795616 - RNA, 19 nt, Artificial Sequence
  Description of Artificial Sequence: Synthetic oligonucleotide
  Antisense strand to SEQ ID NO: 1795615
ugauucccucacuauagcc

SEQ ID NO: 1795617 - RNA, 19 nt, Artificial Sequence
  Description of Artificial Sequence: Synthetic oligonucleotide
  Sense strand starting at position 846 of SEQ ID NO: 1563106
aucacuuuccuguaacugu

SEQ ID NO: 1795618 - RNA, 19 nt, Artificial Sequence
  Description of Artificial Sequence: Synthetic oligonucleotide
  Antisense strand to SEQ ID NO: 1795617
acaguuacaggaaagugau

SEQ ID NO: 1795619 - RNA, 19 nt, Artificial Sequence
  Description of Artificial Sequence: Synthetic oligonucleotide
  Sense strand starting at position 1075 of SEQ ID NO: 1563106
agaguaagaucugcauaua

SEQ ID NO: 1795620 - RNA, 19 nt, Artificial Sequence
  Description of Artificial Sequence: Synthetic oligonucleotide
  Antisense strand to SEQ ID NO: 1795619
uauaugcagaucuuacucu

SEQ ID NO: 1795621 - RNA, 19 nt, Artificial Sequence
  Description of Artificial Sequence: Synthetic oligonucleotide
  Sense strand starting at position 1140 of SEQ ID NO: 1563106
agaauuaucugggaggaga

SEQ ID NO: 1795622 - RNA, 19 nt, Artificial Sequence
  Description of Artificial Sequence: Synthetic oligonucleotide
  Antisense strand to SEQ ID NO: 1795621
ucuccucccagauaauucu

SEQ ID NO: 1795623 - RNA, 19 nt, Artificial Sequence
  Description of Artificial Sequence: Synthetic oligonucleotide
  Sense strand starting at position 1180 of SEQ ID NO: 1563106
aaguccauccagcagagau

SEQ ID NO: 1795624 - RNA, 19 nt, Artificial Sequence
  Description of Artificial Sequence: Synthetic oligonucleotide
  Antisense strand to SEQ ID NO: 1795623
aucucugcuggauggacuu

SEQ ID NO: 1795625 - RNA, 19 nt, Artificial Sequence
  Description of Artificial Sequence: Synthetic oligonucleotide
  Sense strand starting at position 1345 of SEQ ID NO: 1563106
uacugcucacuaggcgaaa

SEQ ID NO: 1795626 - RNA, 19 nt, Artificial Sequence
  Description of Artificial Sequence: Synthetic oligonucleotide
  Antisense strand to SEQ ID NO: 1795625
uuucgccuagugagcagua

SEQ ID NO: 1795627 - RNA, 19 nt, Artificial Sequence
  Description of Artificial Sequence: Synthetic oligonucleotide
  Sense strand starting at position 1363 of SEQ ID NO: 1563106
agacguuaacgucaguaac

SEQ ID NO: 1795628 - RNA, 19 nt, Artificial Sequence
  Description of Artificial Sequence: Synthetic oligonucleotide
  Antisense strand to SEQ ID NO: 1795627
guuacugacguuaacgucu

SEQ ID NO: 1795629 - RNA, 19 nt, Artificial Sequence
  Description of Artificial Sequence: Synthetic oligonucleotide
  Sense strand starting at position 1443 of SEQ ID NO: 1563106
uugguuaguagugaggaau

SEQ ID NO: 1795630 - RNA, 19 nt, Artificial Sequence
  Description of Artificial Sequence: Synthetic oligonucleotide
  Antisense strand to SEQ ID NO: 1795629
auuccucacuacuaaccaa

SEQ ID NO: 1795631 - RNA, 19 nt, Artificial Sequence
  Description of Artificial Sequence: Synthetic oligonucleotide
  Sense strand starting at position 1455 of SEQ ID NO: 1563106
gaggaauguggacgguaaa

SEQ ID NO: 1795632 - RNA, 19 nt, Artificial Sequence
  Description of Artificial Sequence: Synthetic oligonucleotide
  Antisense strand to SEQ ID NO: 1795631
uuuaccguccacauuccuc

SEQ ID NO: 1795633 - RNA, 19 nt, Artificial Sequence
  Description of Artificial Sequence: Synthetic oligonucleotide
  Sense strand starting at position 1456 of SEQ ID NO: 1563106
aggaauguggacgguaaau

SEQ ID NO: 1795634 - RNA, 19 nt, Artificial Sequence
  Description of Artificial Sequence: Synthetic oligonucleotide
  Antisense strand to SEQ ID NO: 1795633
auuuaccguccacauuccu

SEQ ID NO: 1795635 - RNA, 19 nt, Artificial Sequence
  Description of Artificial Sequence: Synthetic oligonucleotide
  Sense strand starting at position 1648 of SEQ ID NO: 1563106
ccaggauucuaugcugacu

SEQ ID NO: 1795636 - RNA, 19 nt, Artificial Sequence
  Description of Artificial Sequence: Synthetic oligonucleotide
  Antisense strand to SEQ ID NO: 1795635
agucagcauagaauccugg

SEQ ID NO: 1795637 - RNA, 19 nt, Artificial Sequence
  Description of Artificial Sequence: Synthetic oligonucleotide
  Sense strand starting at position 1651 of SEQ ID NO: 1563106
ggauucuaugcugacuaac

SEQ ID NO: 1795638 - RNA, 19 nt, Artificial Sequence
  Description of Artificial Sequence: Synthetic oligonucleotide
  Antisense strand to SEQ ID NO: 1795637
guuagucagcauagaaucc

SEQ ID NO: 1795639 - RNA, 19 nt, Artificial Sequence
  Description of Artificial Sequence: Synthetic oligonucleotide
  Sense strand starting at position 1866 of SEQ ID NO: 1563106
cucggauucgcacacuuaa

SEQ ID NO: 1795640 - RNA, 19 nt, Artificial Sequence
  Description of Artificial Sequence: Synthetic oligonucleotide
  Antisense strand to SEQ ID NO: 1795639
uuaagugugcgaauccgag

SEQ ID NO: 1795641 - RNA, 19 nt, Artificial Sequence
  Description of Artificial Sequence: Synthetic oligonucleotide
  Sense strand starting at position 2514 of SEQ ID NO: 1563106
cgaaucucuauccggugaa

SEQ ID NO: 1795642 - RNA, 19 nt, Artificial Sequence
  Description of Artificial Sequence: Synthetic oligonucleotide
  Antisense strand to SEQ ID NO: 1795641
uucaccggauagagauucg

SEQ ID NO: 1795643 - RNA, 19 nt, Artificial Sequence
  Description of Artificial Sequence: Synthetic oligonucleotide
  Sense strand starting at position 2526 of SEQ ID NO: 1563106
cggugaagcucuacgugua

SEQ ID NO: 1795644 - RNA, 19 nt, Artificial Sequence
  Description of Artificial Sequence: Synthetic oligonucleotide
  Antisense strand to SEQ ID NO: 1795643
uacacguagagcuucaccg

SEQ ID NO: 1795645 - RNA, 19 nt, Artificial Sequence
  Description of Artificial Sequence: Synthetic oligonucleotide
  Sense strand starting at position 2728 of SEQ ID NO: 1563106
aagagaguggucugaaguu

SEQ ID NO: 1795646 - RNA, 19 nt, Artificial Sequence
  Description of Artificial Sequence: Synthetic oligonucleotide
  Antisense strand to SEQ ID NO: 1795645
aacuucagaccacucucuu

SEQ ID NO: 1795647 - RNA, 19 nt, Artificial Sequence
  Description of Artificial Sequence: Synthetic oligonucleotide
  Sense strand starting at position 2740 of SEQ ID NO: 1563106
ugaaguuugggccaucuga

SEQ ID NO: 1795648 - RNA, 19 nt, Artificial Sequence
  Description of Artificial Sequence: Synthetic oligonucleotide
  Antisense strand to SEQ ID NO: 1795647
ucagauggcccaaacuuca

SEQ ID NO: 1795649 - RNA, 19 nt, Artificial Sequence
  Description of Artificial Sequence: Synthetic oligonucleotide
  Sense strand starting at position 2763 of SEQ ID NO: 1563106
cgcuuuagccucgcagaua

SEQ ID NO: 1795650 - RNA, 19 nt, Artificial Sequence
  Description of Artificial Sequence: Synthetic oligonucleotide
  Antisense strand to SEQ ID NO: 1795649
uaucugcgaggcuaaagcg

SEQ ID NO: 1795651 - RNA, 19 nt, Artificial Sequence
  Description of Artificial Sequence: Synthetic oligonucleotide
  Sense strand starting at position 3042 of SEQ ID NO: 1563106
cucggagaaccuugucuca

SEQ ID NO: 1795652 - RNA, 19 nt, Artificial Sequence
  Description of Artificial Sequence: Synthetic oligonucleotide
  Antisense strand to SEQ ID NO: 1795651
ugagacaagguucuccgag

SEQ ID NO: 1795653 - RNA, 19 nt, Artificial Sequence
  Description of Artificial Sequence: Synthetic oligonucleotide
  Sense strand starting at position 3044 of SEQ ID NO: 1563106
cggagaaccuugucucagu

SEQ ID NO: 1795654 - RNA, 19 nt, Artificial Sequence
  Description of Artificial Sequence: Synthetic oligonucleotide
  Antisense strand to SEQ ID NO: 1795653
acugagacaagguucuccg

SEQ ID NO: 1795655 - RNA, 19 nt, Artificial Sequence
  Description of Artificial Sequence: Synthetic oligonucleotide
  Sense strand starting at position 3270 of SEQ ID NO: 1563106
ggaugaggcugugugaaua

SEQ ID NO: 1795656 - RNA, 19 nt, Artificial Sequence
  Description of Artificial Sequence: Synthetic oligonucleotide
  Antisense strand to SEQ ID NO: 1795655
uauucacacagccucaucc

SEQ ID NO: 1795657 - RNA, 19 nt, Artificial Sequence
  Description of Artificial Sequence: Synthetic oligonucleotide
  Sense strand starting at position 3400 of SEQ ID NO: 1563106
gaaugucuuguguaacaca

SEQ ID NO: 1795658 - RNA, 19 nt, Artificial Sequence
  Description of Artificial Sequence: Synthetic oligonucleotide
  Antisense strand to SEQ ID NO: 1795657
uguguuacacaagacauuc

SEQ ID NO: 1795659 - RNA, 19 nt, Artificial Sequence
  Description of Artificial Sequence: Synthetic oligonucleotide
  Sense strand starting at position 3421 of SEQ ID NO: 1563106
aauugucagguuuguaauu

SEQ ID NO: 1795660 - RNA, 19 nt, Artificial Sequence
  Description of Artificial Sequence: Synthetic oligonucleotide
  Antisense strand to SEQ ID NO: 1795659
aauuacaaaccugacaauu

SEQ ID NO: 1795661 - RNA, 19 nt, Artificial Sequence
  Description of Artificial Sequence: Synthetic oligonucleotide
  Sense strand starting at position 3422 of SEQ ID NO: 1563106
auugucagguuuguaauuu

SEQ ID NO: 1795662 - RNA, 19 nt, Artificial Sequence
  Description of Artificial Sequence: Synthetic oligonucleotide
  Antisense strand to SEQ ID NO: 1795661
aaauuacaaaccugacaau

SEQ ID NO: 1795663 - RNA, 19 nt, Artificial Sequence
  Description of Artificial Sequence: Synthetic oligonucleotide
  Sense strand starting at position 3456 of SEQ ID NO: 1563106
aggaaagaauuccaauuau

SEQ ID NO: 1795664 - RNA, 19 nt, Artificial Sequence
  Description of Artificial Sequence: Synthetic oligonucleotide
  Antisense strand to SEQ ID NO: 1795663
auaauuggaauucuuuccu

SEQ ID NO: 1795665 - RNA, 19 nt, Artificial Sequence
  Description of Artificial Sequence: Synthetic oligonucleotide
  Sense strand starting at position 3553 of SEQ ID NO: 1563106
aguucaucucugugagacg

SEQ ID NO: 1795666 - RNA, 19 nt, Artificial Sequence
  Description of Artificial Sequence: Synthetic oligonucleotide
  Antisense strand to SEQ ID NO: 1795665
cgucucacagagaugaacu

SEQ ID NO: 1795667 - RNA, 19 nt, Artificial Sequence
  Description of Artificial Sequence: Synthetic oligonucleotide
  Sense strand starting at position 3622 of SEQ ID NO: 1563106
guccuugaguuucuaauau

SEQ ID NO: 1795668 - RNA, 19 nt, Artificial Sequence
  Description of Artificial Sequence: Synthetic oligonucleotide
  Antisense strand to SEQ ID NO: 1795667
auauuagaaacucaaggac

SEQ ID NO: 1795669 - RNA, 19 nt, Artificial Sequence
  Description of Artificial Sequence: Synthetic oligonucleotide
  Sense strand starting at position 3637 of SEQ ID NO: 1563106
auaugucguagugaauuga

SEQ ID NO: 1795670 - RNA, 19 nt, Artificial Sequence
  Description of Artificial Sequence: Synthetic oligonucleotide
  Antisense strand to SEQ ID NO: 1795669
ucaauucacuacgacauau

SEQ ID NO: 1795671 - RNA, 19 nt, Artificial Sequence
  Description of Artificial Sequence: Synthetic oligonucleotide
  Sense strand starting at position 3715 of SEQ ID NO: 1563106
caucuagggugcuuguuaa

SEQ ID NO: 1795672 - RNA, 19 nt, Artificial Sequence
  Description of Artificial Sequence: Synthetic oligonucleotide
  Antisense strand to SEQ ID NO: 1795671
uuaacaagcacccuagaug

SEQ ID NO: 1795673 - RNA, 19 nt, Artificial Sequence
  Description of Artificial Sequence: Synthetic oligonucleotide
  Sense strand starting at position 3788 of SEQ ID NO: 1563106
agguuagaauagcucuuua

SEQ ID NO: 1795674 - RNA, 19 nt, Artificial Sequence
  Description of Artificial Sequence: Synthetic oligonucleotide
  Antisense strand to SEQ ID NO: 1795673
uaaagagcuauucuaaccu

SEQ ID NO: 1795675 - RNA, 19 nt, Artificial Sequence
  Description of Artificial Sequence: Synthetic oligonucleotide
  Sense strand starting at position 3843 of SEQ ID NO: 1563106
ggcaaauaauuauccguaa

SEQ ID NO: 1795676 - RNA, 19 nt, Artificial Sequence
  Description of Artificial Sequence: Synthetic oligonucleotide
  Antisense strand to SEQ ID NO: 1795675
uuacggauaauuauuugcc

SEQ ID NO: 1795677 - RNA, 19 nt, Artificial Sequence
  Description of Artificial Sequence: Synthetic oligonucleotide
  Sense strand starting at position 3844 of SEQ ID NO: 1563106
gcaaauaauuauccguaag

SEQ ID NO: 1795678 - RNA, 19 nt, Artificial Sequence
  Description of Artificial Sequence: Synthetic oligonucleotide
  Antisense strand to SEQ ID NO: 1795677
cuuacggauaauuauuugc

SEQ ID NO: 1795679 - RNA, 19 nt, Artificial Sequence
  Description of Artificial Sequence: Synthetic oligonucleotide
  Sense strand starting at position 3882 of SEQ ID NO: 1563106
acagcaguagcuuauggaa

SEQ ID NO: 1795680 - RNA, 19 nt, Artificial Sequence
  Description of Artificial Sequence: Synthetic oligonucleotide
  Antisense strand to SEQ ID NO: 1795679
uuccauaagcuacugcugu

SEQ ID NO: 1795681 - RNA, 19 nt, Artificial Sequence
  Description of Artificial Sequence: Synthetic oligonucleotide
  Sense strand starting at position 3934 of SEQ ID NO: 1563106
agagaaacuuugcuguaaa

SEQ ID NO: 1795682 - RNA, 19 nt, Artificial Sequence
  Description of Artificial Sequence: Synthetic oligonucleotide
  Antisense strand to SEQ ID NO: 1795681
uuuacagcaaaguuucucu

SEQ ID NO: 1795683 - RNA, 19 nt, Artificial Sequence
  Description of Artificial Sequence: Synthetic oligonucleotide
  Sense strand starting at position 3937 of SEQ ID NO: 1563106
gaaacuuugcuguaaacug

SEQ ID NO: 1795684 - RNA, 19 nt, Artificial Sequence
  Description of Artificial Sequence: Synthetic oligonucleotide
  Antisense strand to SEQ ID NO: 1795683
caguuuacagcaaaguuuc

SEQ ID NO: 1795685 - RNA, 19 nt, Artificial Sequence
  Description of Artificial Sequence: Synthetic oligonucleotide
  Sense strand starting at position 3965 of SEQ ID NO: 1563106
ucuggaccuguguauuaca

SEQ ID NO: 1795686 - RNA, 19 nt, Artificial Sequence
  Description of Artificial Sequence: Synthetic oligonucleotide
  Antisense strand to SEQ ID NO: 1795685
uguaauacacagguccaga

SEQ ID NO: 1795687 - RNA, 19 nt, Artificial Sequence
  Description of Artificial Sequence: Synthetic oligonucleotide
  Sense strand starting at position 149 of SEQ ID NO: 1563107
guuagagugguagauuaua

SEQ ID NO: 1795688 - RNA, 19 nt, Artificial Sequence
  Description of Artificial Sequence: Synthetic oligonucleotide
  Antisense strand to SEQ ID NO: 1795687
uauaaucuaccacucuaac

SEQ ID NO: 1795689 - RNA, 19 nt, Artificial Sequence
  Description of Artificial Sequence: Synthetic oligonucleotide
  Sense strand starting at position 157 of SEQ ID NO: 1563107
gguagauuauagcaaauuu

SEQ ID NO: 1795690 - RNA, 19 nt, Artificial Sequence
  Description of Artificial Sequence: Synthetic oligonucleotide
  Antisense strand to SEQ ID NO: 1795689
aaauuugcuauaaucuacc

SEQ ID NO: 1795691 - RNA, 19 nt, Artificial Sequence
  Description of Artificial Sequence: Synthetic oligonucleotide
  Sense strand starting at position 185 of SEQ ID NO: 1563107
uuguauuuccuauguuucu

SEQ ID NO: 1795692 - RNA, 19 nt, Artificial Sequence
  Description of Artificial Sequence: Synthetic oligonucleotide
  Antisense strand to SEQ ID NO: 1795691
agaaacauaggaaauacaa

SEQ ID NO: 1795693 - RNA, 19 nt, Artificial Sequence
  Description of Artificial Sequence: Synthetic oligonucleotide
  Sense strand starting at position 648 of SEQ ID NO: 1563107
ggcuauagugagggaauca

SEQ ID NO: 1795694 - RNA, 19 nt, Artificial Sequence
  Description of Artificial Sequence: Synthetic oligonucleotide
  Antisense strand to SEQ ID NO: 1795693
ugauucccucacuauagcc

SEQ ID NO: 1795695 - RNA, 19 nt, Artificial Sequence
  Description of Artificial Sequence: Synthetic oligonucleotide
  Sense strand starting at position 667 of SEQ ID NO: 1563107
aucacuuuccuguaacugu

SEQ ID NO: 1795696 - RNA, 19 nt, Artificial Sequence
  Description of Artificial Sequence: Synthetic oligonucleotide
  Antisense strand to SEQ ID NO: 1795695
acaguuacaggaaagugau

SEQ ID NO: 1795697 - RNA, 19 nt, Artificial Sequence
  Description of Artificial Sequence: Synthetic oligonucleotide
  Sense strand starting at position 896 of SEQ ID NO: 1563107
agaguaagaucugcauaua

SEQ ID NO: 1795698 - RNA, 19 nt, Artificial Sequence
  Description of Artificial Sequence: Synthetic oligonucleotide
  Antisense strand to SEQ ID NO: 1795697
uauaugcagaucuuacucu

SEQ ID NO: 1795699 - RNA, 19 nt, Artificial Sequence
  Description of Artificial Sequence: Synthetic oligonucleotide
  Sense strand starting at position 961 of SEQ ID NO: 1563107
agaauuaucugggaggaga

SEQ ID NO: 1795700 - RNA, 19 nt, Artificial Sequence
  Description of Artificial Sequence: Synthetic oligonucleotide
  Antisense strand to SEQ ID NO: 1795699
ucuccucccagauaauucu

SEQ ID NO: 1795701 - RNA, 19 nt, Artificial Sequence
  Description of Artificial Sequence: Synthetic oligonucleotide
  Sense strand starting at position 1001 of SEQ ID NO: 1563107
aaguccauccagcagagau

SEQ ID NO: 1795702 - RNA, 19 nt, Artificial Sequence
  Description of Artificial Sequence: Synthetic oligonucleotide
  Antisense strand to SEQ ID NO: 1795701
aucucugcuggauggacuu

SEQ ID NO: 1795703 - RNA, 19 nt, Artificial Sequence
  Description of Artificial Sequence: Synthetic oligonucleotide
  Sense strand starting at position 1184 of SEQ ID NO: 1563107
agacguuaacgucaguaac

SEQ ID NO: 1795704 - RNA, 19 nt, Artificial Sequence
  Description of Artificial Sequence: Synthetic oligonucleotide
  Antisense strand to SEQ ID NO: 1795703
guuacugacguuaacgucu

SEQ ID NO: 1795705 - RNA, 19 nt, Artificial Sequence
  Description of Artificial Sequence: Synthetic oligonucleotide
  Sense strand starting at position 1264 of SEQ ID NO: 1563107
uugguuaguagugaggaau

SEQ ID NO: 1795706 - RNA, 19 nt, Artificial Sequence
  Description of Artificial Sequence: Synthetic oligonucleotide
  Antisense strand to SEQ ID NO: 1795705
auuccucacuacuaaccaa

SEQ ID NO: 1795707 - RNA, 19 nt, Artificial Sequence
  Description of Artificial Sequence: Synthetic oligonucleotide
  Sense strand starting at position 1276 of SEQ ID NO: 1563107
gaggaauguggacgguaaa

SEQ ID NO: 1795708 - RNA, 19 nt, Artificial Sequence
  Description of Artificial Sequence: Synthetic oligonucleotide
  Antisense strand to SEQ ID NO: 1795707
uuuaccguccacauuccuc

SEQ ID NO: 1795709 - RNA, 19 nt, Artificial Sequence
  Description of Artificial Sequence: Synthetic oligonucleotide
  Sense strand starting at position 1277 of SEQ ID NO: 1563107
aggaauguggacgguaaau

SEQ ID NO: 1795710 - RNA, 19 nt, Artificial Sequence
  Description of Artificial Sequence: Synthetic oligonucleotide
  Antisense strand to SEQ ID NO: 1795709
auuuaccguccacauuccu

SEQ ID NO: 1795711 - RNA, 19 nt, Artificial Sequence
  Description of Artificial Sequence: Synthetic oligonucleotide
  Sense strand starting at position 1469 of SEQ ID NO: 1563107
ccaggauucuaugcugacu

SEQ ID NO: 1795712 - RNA, 19 nt, Artificial Sequence
  Description of Artificial Sequence: Synthetic oligonucleotide
  Antisense strand to SEQ ID NO: 1795711
agucagcauagaauccugg

SEQ ID NO: 1795713 - RNA, 19 nt, Artificial Sequence
  Description of Artificial Sequence: Synthetic oligonucleotide
  Sense strand starting at position 1472 of SEQ ID NO: 1563107
ggauucuaugcugacuaac

SEQ ID NO: 1795714 - RNA, 19 nt, Artificial Sequence
  Description of Artificial Sequence: Synthetic oligonucleotide
  Antisense strand to SEQ ID NO: 1795713
guuagucagcauagaaucc

SEQ ID NO: 1795715 - RNA, 19 nt, Artificial Sequence
  Description of Artificial Sequence: Synthetic oligonucleotide
  Sense strand starting at position 1687 of SEQ ID NO: 1563107
cucggauucgcacacuuaa

SEQ ID NO: 1795716 - RNA, 19 nt, Artificial Sequence
  Description of Artificial Sequence: Synthetic oligonucleotide
  Antisense strand to SEQ ID NO: 1795715
uuaagugugcgaauccgag

SEQ ID NO: 1795717 - RNA, 19 nt, Artificial Sequence
  Description of Artificial Sequence: Synthetic oligonucleotide
  Sense strand starting at position 2335 of SEQ ID NO: 1563107
cgaaucucuauccggugaa

SEQ ID NO: 1795718 - RNA, 19 nt, Artificial Sequence
  Description of Artificial Sequence: Synthetic oligonucleotide
  Antisense strand to SEQ ID NO: 1795717
uucaccggauagagauucg

SEQ ID NO: 1795719 - RNA, 19 nt, Artificial Sequence
  Description of Artificial Sequence: Synthetic oligonucleotide
  Sense strand starting at position 2347 of SEQ ID NO: 1563107
cggugaagcucuacgugua

SEQ ID NO: 1795720 - RNA, 19 nt, Artificial Sequence
  Description of Artificial Sequence: Synthetic oligonucleotide
  Antisense strand to SEQ ID NO: 1795719
uacacguagagcuucaccg

SEQ ID NO: 1795721 - RNA, 19 nt, Artificial Sequence
  Description of Artificial Sequence: Synthetic oligonucleotide
  Sense strand starting at position 2549 of SEQ ID NO: 1563107
aagagaguggucugaaguu

SEQ ID NO: 1795722 - RNA, 19 nt, Artificial Sequence
  Description of Artificial Sequence: Synthetic oligonucleotide
  Antisense strand to SEQ ID NO: 1795721
aacuucagaccacucucuu

SEQ ID NO: 1795723 - RNA, 19 nt, Artificial Sequence
  Description of Artificial Sequence: Synthetic oligonucleotide
  Sense strand starting at position 2561 of SEQ ID NO: 1563107
ugaaguuugggccaucuga

SEQ ID NO: 1795724 - RNA, 19 nt, Artificial Sequence
  Description of Artificial Sequence: Synthetic oligonucleotide
  Antisense strand to SEQ ID NO: 1795723
ucagauggcccaaacuuca

SEQ ID NO: 1795725 - RNA, 19 nt, Artificial Sequence
  Description of Artificial Sequence: Synthetic oligonucleotide
  Sense strand starting at position 2584 of SEQ ID NO: 1563107
cgcuuuagccucgcagaua

SEQ ID NO: 1795726 - RNA, 19 nt, Artificial Sequence
  Description of Artificial Sequence: Synthetic oligonucleotide
  Antisense strand to SEQ ID NO: 1795725
uaucugcgaggcuaaagcg

SEQ ID NO: 1795727 - RNA, 19 nt, Artificial Sequence
  Description of Artificial Sequence: Synthetic oligonucleotide
  Sense strand starting at position 2863 of SEQ ID NO: 1563107
cucggagaaccuugucuca

SEQ ID NO: 1795728 - RNA, 19 nt, Artificial Sequence
  Description of Artificial Sequence: Synthetic oligonucleotide
  Antisense strand to SEQ ID NO: 1795727
ugagacaagguucuccgag

SEQ ID NO: 1795729 - RNA, 19 nt, Artificial Sequence
  Description of Artificial Sequence: Synthetic oligonucleotide
  Sense strand starting at position 2865 of SEQ ID NO: 1563107
cggagaaccuugucucagu

SEQ ID NO: 1795730 - RNA, 19 nt, Artificial Sequence
  Description of Artificial Sequence: Synthetic oligonucleotide
  Antisense strand to SEQ ID NO: 1795729
acugagacaagguucuccg

SEQ ID NO: 1795731 - RNA, 19 nt, Artificial Sequence
  Description of Artificial Sequence: Synthetic oligonucleotide
  Sense strand starting at position 3091 of SEQ ID NO: 1563107
ggaugaggcugugugaaua

SEQ ID NO: 1795732 - RNA, 19 nt, Artificial Sequence
  Description of Artificial Sequence: Synthetic oligonucleotide
  Antisense strand to SEQ ID NO: 1795731
uauucacacagccucaucc

SEQ ID NO: 1795733 - RNA, 19 nt, Artificial Sequence
  Description of Artificial Sequence: Synthetic oligonucleotide
  Sense strand starting at position 3221 of SEQ ID NO: 1563107
gaaugucuuguguaacaca

SEQ ID NO: 1795734 - RNA, 19 nt, Artificial Sequence
  Description of Artificial Sequence: Synthetic oligonucleotide
  Antisense strand to SEQ ID NO: 1795733
uguguuacacaagacauuc

SEQ ID NO: 1795735 - RNA, 19 nt, Artificial Sequence
  Description of Artificial Sequence: Synthetic oligonucleotide
  Sense strand starting at position 3242 of SEQ ID NO: 1563107
aauugucagguuuguaauu

SEQ ID NO: 1795736 - RNA, 19 nt, Artificial Sequence
  Description of Artificial Sequence: Synthetic oligonucleotide
  Antisense strand to SEQ ID NO: 1795735
aauuacaaaccugacaauu

SEQ ID NO: 1795737 - RNA, 19 nt, Artificial Sequence
  Description of Artificial Sequence: Synthetic oligonucleotide
  Sense strand starting at position 3243 of SEQ ID NO: 1563107
auugucagguuuguaauuu

SEQ ID NO: 1795738 - RNA, 19 nt, Artificial Sequence
  Description of Artificial Sequence: Synthetic oligonucleotide
  Antisense strand to SEQ ID NO: 1795737
aaauuacaaaccugacaau

SEQ ID NO: 1795739 - RNA, 19 nt, Artificial Sequence
  Description of Artificial Sequence: Synthetic oligonucleotide
  Sense strand starting at position 3277 of SEQ ID NO: 1563107
aggaaagaauuccaauuau

SEQ ID NO: 1795740 - RNA, 19 nt, Artificial Sequence
  Description of Artificial Sequence: Synthetic oligonucleotide
  Antisense strand to SEQ ID NO: 1795739
auaauuggaauucuuuccu

SEQ ID NO: 1795741 - RNA, 19 nt, Artificial Sequence
  Description of Artificial Sequence: Synthetic oligonucleotide
  Sense strand starting at position 3374 of SEQ ID NO: 1563107
aguucaucucugugagacg

SEQ ID NO: 1795742 - RNA, 19 nt, Artificial Sequence
  Description of Artificial Sequence: Synthetic oligonucleotide
  Antisense strand to SEQ ID NO: 1795741
cgucucacagagaugaacu

SEQ ID NO: 1795743 - RNA, 19 nt, Artificial Sequence
  Description of Artificial Sequence: Synthetic oligonucleotide
  Sense strand starting at position 3443 of SEQ ID NO: 1563107
guccuugaguuucuaauau

SEQ ID NO: 1795744 - RNA, 19 nt, Artificial Sequence
  Description of Artificial Sequence: Synthetic oligonucleotide
  Antisense strand to SEQ ID NO: 1795743
auauuagaaacucaaggac

SEQ ID NO: 1795745 - RNA, 19 nt, Artificial Sequence
  Description of Artificial Sequence: Synthetic oligonucleotide
  Sense strand starting at position 3458 of SEQ ID NO: 1563107
auaugucguagugaauuga

SEQ ID NO: 1795746 - RNA, 19 nt, Artificial Sequence
  Description of Artificial Sequence: Synthetic oligonucleotide
  Antisense strand to SEQ ID NO: 1795745
ucaauucacuacgacauau

SEQ ID NO: 1795747 - RNA, 19 nt, Artificial Sequence
  Description of Artificial Sequence: Synthetic oligonucleotide
  Sense strand starting at position 3609 of SEQ ID NO: 1563107
agguuagaauagcucuuua

SEQ ID NO: 1795748 - RNA, 19 nt, Artificial Sequence
  Description of Artificial Sequence: Synthetic oligonucleotide
  Antisense strand to SEQ ID NO: 1795747
uaaagagcuauucuaaccu

SEQ ID NO: 1795749 - RNA, 19 nt, Artificial Sequence
  Description of Artificial Sequence: Synthetic oligonucleotide
  Sense strand starting at position 3664 of SEQ ID NO: 1563107
ggcaaauaauuauccguaa

SEQ ID NO: 1795750 - RNA, 19 nt, Artificial Sequence
  Description of Artificial Sequence: Synthetic oligonucleotide
  Antisense strand to SEQ ID NO: 1795749
uuacggauaauuauuugcc

SEQ ID NO: 1795751 - RNA, 19 nt, Artificial Sequence
  Description of Artificial Sequence: Synthetic oligonucleotide
  Sense strand starting at position 3665 of SEQ ID NO: 1563107
gcaaauaauuauccguaag

SEQ ID NO: 1795752 - RNA, 19 nt, Artificial Sequence
  Description of Artificial Sequence: Synthetic oligonucleotide
  Antisense strand to SEQ ID NO: 1795751
cuuacggauaauuauuugc

SEQ ID NO: 1795753 - RNA, 19 nt, Artificial Sequence
  Description of Artificial Sequence: Synthetic oligonucleotide
  Sense strand starting at position 3703 of SEQ ID NO: 1563107
acagcaguagcuuauggaa

SEQ ID NO: 1795754 - RNA, 19 nt, Artificial Sequence
  Description of Artificial Sequence: Synthetic oligonucleotide
  Antisense strand to SEQ ID NO: 1795753
uuccauaagcuacugcugu

SEQ ID NO: 1795755 - RNA, 19 nt, Artificial Sequence
  Description of Artificial Sequence: Synthetic oligonucleotide
  Sense strand starting at position 3755 of SEQ ID NO: 1563107
agagaaacuuugcuguaaa

SEQ ID NO: 1795756 - RNA, 19 nt, Artificial Sequence
  Description of Artificial Sequence: Synthetic oligonucleotide
  Antisense strand to SEQ ID NO: 1795755
uuuacagcaaaguuucucu

SEQ ID NO: 1795757 - RNA, 19 nt, Artificial Sequence
  Description of Artificial Sequence: Synthetic oligonucleotide
  Sense strand starting at position 3758 of SEQ ID NO: 1563107
gaaacuuugcuguaaacug

SEQ ID NO: 1795758 - RNA, 19 nt, Artificial Sequence
  Description of Artificial Sequence: Synthetic oligonucleotide
  Antisense strand to SEQ ID NO: 1795757
caguuuacagcaaaguuuc

SEQ ID NO: 1795759 - RNA, 19 nt, Artificial Sequence
  Description of Artificial Sequence: Synthetic oligonucleotide
  Sense strand starting at position 3786 of SEQ ID NO: 1563107
ucuggaccuguguauuaca

SEQ ID NO: 1795760 - RNA, 19 nt, Artificial Sequence
  Description of Artificial Sequence: Synthetic oligonucleotide
  Antisense strand to SEQ ID NO: 1795759
uguaauacacagguccaga

SEQ ID NO: 1795761 - RNA, 19 nt, Artificial Sequence
  Description of Artificial Sequence: Synthetic oligonucleotide
  Sense strand starting at position 3874 of SEQ ID NO: 1563107
ucagaaucuccuggaguuu

SEQ ID NO: 1795762 - RNA, 19 nt, Artificial Sequence
  Description of Artificial Sequence: Synthetic oligonucleotide
  Antisense strand to SEQ ID NO: 1795761
aaacuccaggagauucuga

SEQ ID NO: 1795763 - RNA, 19 nt, Artificial Sequence
  Description of Artificial Sequence: Synthetic oligonucleotide
  Sense strand starting at position 3916 of SEQ ID NO: 1563107
augagcuuaucagcuaauu

SEQ ID NO: 1795764 - RNA, 19 nt, Artificial Sequence
  Description of Artificial Sequence: Synthetic oligonucleotide
  Antisense strand to SEQ ID NO: 1795763
aauuagcugauaagcucau

SEQ ID NO: 1795765 - RNA, 19 nt, Artificial Sequence
  Description of Artificial Sequence: Synthetic oligonucleotide
  Sense strand starting at position 3948 of SEQ ID NO: 1563107
cccauuauuugacagggau

SEQ ID NO: 1795766 - RNA, 19 nt, Artificial Sequence
  Description of Artificial Sequence: Synthetic oligonucleotide
  Antisense strand to SEQ ID NO: 1795765
aucccugucaaauaauggg

SEQ ID NO: 1795767 - RNA, 19 nt, Artificial Sequence
  Description of Artificial Sequence: Synthetic oligonucleotide
  Sense strand starting at position 37 of SEQ ID NO: 1563108
guuugaaagacacacguua

SEQ ID NO: 1795768 - RNA, 19 nt, Artificial Sequence
  Description of Artificial Sequence: Synthetic oligonucleotide
  Antisense strand to SEQ ID NO: 1795767
uaacgugugucuuucaaac

SEQ ID NO: 1795769 - RNA, 19 nt, Artificial Sequence
  Description of Artificial Sequence: Synthetic oligonucleotide
  Sense strand starting at position 92 of SEQ ID NO: 1563108
uggugaagguguuugcauu

SEQ ID NO: 1795770 - RNA, 19 nt, Artificial Sequence
  Description of Artificial Sequence: Synthetic oligonucleotide
  Antisense strand to SEQ ID NO: 1795769
aaugcaaacaccuucacca

SEQ ID NO: 1795771 - RNA, 19 nt, Artificial Sequence
  Description of Artificial Sequence: Synthetic oligonucleotide
  Sense strand starting at position 98 of SEQ ID NO: 1563108
agguguuugcauugcaaca

SEQ ID NO: 1795772 - RNA, 19 nt, Artificial Sequence
  Description of Artificial Sequence: Synthetic oligonucleotide
  Antisense strand to SEQ ID NO: 1795771
uguugcaaugcaaacaccu

SEQ ID NO: 1795773 - RNA, 19 nt, Artificial Sequence
  Description of Artificial Sequence: Synthetic oligonucleotide
  Sense strand starting at position 338 of SEQ ID NO: 1563108
gggauuagugcuugguugu

SEQ ID NO: 1795774 - RNA, 19 nt, Artificial Sequence
  Description of Artificial Sequence: Synthetic oligonucleotide
  Antisense strand to SEQ ID NO: 1795773
acaaccaagcacuaauccc

SEQ ID NO: 1795775 - RNA, 19 nt, Artificial Sequence
  Description of Artificial Sequence: Synthetic oligonucleotide
  Sense strand starting at position 861 of SEQ ID NO: 1563108
ucgcuuccggguugagaaa

SEQ ID NO: 1795776 - RNA, 19 nt, Artificial Sequence
  Description of Artificial Sequence: Synthetic oligonucleotide
  Antisense strand to SEQ ID NO: 1795775
uuucucaacccggaagcga

SEQ ID NO: 1795777 - RNA, 19 nt, Artificial Sequence
  Description of Artificial Sequence: Synthetic oligonucleotide
  Sense strand starting at position 917 of SEQ ID NO: 1563108
gacagaggcagcuauggua

SEQ ID NO: 1795778 - RNA, 19 nt, Artificial Sequence
  Description of Artificial Sequence: Synthetic oligonucleotide
  Antisense strand to SEQ ID NO: 1795777
uaccauagcugccucuguc

SEQ ID NO: 1795779 - RNA, 19 nt, Artificial Sequence
  Description of Artificial Sequence: Synthetic oligonucleotide
  Sense strand starting at position 1391 of SEQ ID NO: 1563108
ggaguagcugccgaggaua

SEQ ID NO: 1795780 - RNA, 19 nt, Artificial Sequence
  Description of Artificial Sequence: Synthetic oligonucleotide
  Antisense strand to SEQ ID NO: 1795779
uauccucggcagcuacucc

SEQ ID NO: 1795781 - RNA, 19 nt, Artificial Sequence
  Description of Artificial Sequence: Synthetic oligonucleotide
  Sense strand starting at position 1426 of SEQ ID NO: 1563108
gugugauggcuccaguguu

SEQ ID NO: 1795782 - RNA, 19 nt, Artificial Sequence
  Description of Artificial Sequence: Synthetic oligonucleotide
  Antisense strand to SEQ ID NO: 1795781
aacacuggagccaucacac

SEQ ID NO: 1795783 - RNA, 19 nt, Artificial Sequence
  Description of Artificial Sequence: Synthetic oligonucleotide
  Sense strand starting at position 1439 of SEQ ID NO: 1563108
aguguuugaaugcggaagu

SEQ ID NO: 1795784 - RNA, 19 nt, Artificial Sequence
  Description of Artificial Sequence: Synthetic oligonucleotide
  Antisense strand to SEQ ID NO: 1795783
acuuccgcauucaaacacu

SEQ ID NO: 1795785 - RNA, 19 nt, Artificial Sequence
  Description of Artificial Sequence: Synthetic oligonucleotide
  Sense strand starting at position 1595 of SEQ ID NO: 1563108
ccaucuugccaaggaagaa

SEQ ID NO: 1795786 - RNA, 19 nt, Artificial Sequence
  Description of Artificial Sequence: Synthetic oligonucleotide
  Antisense strand to SEQ ID NO: 1795785
uucuuccuuggcaagaugg

SEQ ID NO: 1795787 - RNA, 19 nt, Artificial Sequence
  Description of Artificial Sequence: Synthetic oligonucleotide
  Sense strand starting at position 1874 of SEQ ID NO: 1563108
cagaaaggccuccacgaua

SEQ ID NO: 1795788 - RNA, 19 nt, Artificial Sequence
  Description of Artificial Sequence: Synthetic oligonucleotide
  Antisense strand to SEQ ID NO: 1795787
uaucguggaggccuuucug

SEQ ID NO: 1795789 - RNA, 19 nt, Artificial Sequence
  Description of Artificial Sequence: Synthetic oligonucleotide
  Sense strand starting at position 2175 of SEQ ID NO: 1563108
ugcggaacuuuccuugacu

SEQ ID NO: 1795790 - RNA, 19 nt, Artificial Sequence
  Description of Artificial Sequence: Synthetic oligonucleotide
  Antisense strand to SEQ ID NO: 1795789
agucaaggaaaguuccgca

SEQ ID NO: 1795791 - RNA, 19 nt, Artificial Sequence
  Description of Artificial Sequence: Synthetic oligonucleotide
  Sense strand starting at position 2176 of SEQ ID NO: 1563108
gcggaacuuuccuugacug

SEQ ID NO: 1795792 - RNA, 19 nt, Artificial Sequence
  Description of Artificial Sequence: Synthetic oligonucleotide
  Antisense strand to SEQ ID NO: 1795791
cagucaaggaaaguuccgc

SEQ ID NO: 1795793 - RNA, 19 nt, Artificial Sequence
  Description of Artificial Sequence: Synthetic oligonucleotide
  Sense strand starting at position 2178 of SEQ ID NO: 1563108
ggaacuuuccuugacugca

SEQ ID NO: 1795794 - RNA, 19 nt, Artificial Sequence
  Description of Artificial Sequence: Synthetic oligonucleotide
  Antisense strand to SEQ ID NO: 1795793
ugcagucaaggaaaguucc

SEQ ID NO: 1795795 - RNA, 19 nt, Artificial Sequence
  Description of Artificial Sequence: Synthetic oligonucleotide
  Sense strand starting at position 2553 of SEQ ID NO: 1563108
agagauugccauuguaaac

SEQ ID NO: 1795796 - RNA, 19 nt, Artificial Sequence
  Description of Artificial Sequence: Synthetic oligonucleotide
  Antisense strand to SEQ ID NO: 1795795
guuuacaauggcaaucucu

SEQ ID NO: 1795797 - RNA, 19 nt, Artificial Sequence
  Description of Artificial Sequence: Synthetic oligonucleotide
  Sense strand starting at position 2563 of SEQ ID NO: 1563108
auuguaaacuuucuggguu

SEQ ID NO: 1795798 - RNA, 19 nt, Artificial Sequence
  Description of Artificial Sequence: Synthetic oligonucleotide
  Antisense strand to SEQ ID NO: 1795797
aacccagaaaguuuacaau

SEQ ID NO: 1795799 - RNA, 19 nt, Artificial Sequence
  Description of Artificial Sequence: Synthetic oligonucleotide
  Sense strand starting at position 2578 of SEQ ID NO: 1563108
gguuguguccuuccagugu

SEQ ID NO: 1795800 - RNA, 19 nt, Artificial Sequence
  Description of Artificial Sequence: Synthetic oligonucleotide
  Antisense strand to SEQ ID NO: 1795799
acacuggaaggacacaacc

SEQ ID NO: 1795801 - RNA, 19 nt, Artificial Sequence
  Description of Artificial Sequence: Synthetic oligonucleotide
  Sense strand starting at position 2696 of SEQ ID NO: 1563108
acauucuaguaguuucuua

SEQ ID NO: 1795802 - RNA, 19 nt, Artificial Sequence
  Description of Artificial Sequence: Synthetic oligonucleotide
  Antisense strand to SEQ ID NO: 1795801
uaagaaacuacuagaaugu

SEQ ID NO: 1795803 - RNA, 19 nt, Artificial Sequence
  Description of Artificial Sequence: Synthetic oligonucleotide
  Sense strand starting at position 2833 of SEQ ID NO: 1563108
uuucuugagcucuagacac

SEQ ID NO: 1795804 - RNA, 19 nt, Artificial Sequence
  Description of Artificial Sequence: Synthetic oligonucleotide
  Antisense strand to SEQ ID NO: 1795803
gugucuagagcucaagaaa

SEQ ID NO: 1795805 - RNA, 19 nt, Artificial Sequence
  Description of Artificial Sequence: Synthetic oligonucleotide
  Sense strand starting at position 2835 of SEQ ID NO: 1563108
ucuugagcucuagacacua

SEQ ID NO: 1795806 - RNA, 19 nt, Artificial Sequence
  Description of Artificial Sequence: Synthetic oligonucleotide
  Antisense strand to SEQ ID NO: 1795805
uagugucuagagcucaaga

SEQ ID NO: 1795807 - RNA, 19 nt, Artificial Sequence
  Description of Artificial Sequence: Synthetic oligonucleotide
  Sense strand starting at position 3037 of SEQ ID NO: 1563108
uuuccauugcaaugugaca

SEQ ID NO: 1795808 - RNA, 19 nt, Artificial Sequence
  Description of Artificial Sequence: Synthetic oligonucleotide
  Antisense strand to SEQ ID NO: 1795807
ugucacauugcaauggaaa

SEQ ID NO: 1795809 - RNA, 19 nt, Artificial Sequence
  Description of Artificial Sequence: Synthetic oligonucleotide
  Sense strand starting at position 3070 of SEQ ID NO: 1563108
cauggaaagugugguauuu

SEQ ID NO: 1795810 - RNA, 19 nt, Artificial Sequence
  Description of Artificial Sequence: Synthetic oligonucleotide
  Antisense strand to SEQ ID NO: 1795809
aaauaccacacuuuccaug

SEQ ID NO: 1795811 - RNA, 19 nt, Artificial Sequence
  Description of Artificial Sequence: Synthetic oligonucleotide
  Sense strand starting at position 3072 of SEQ ID NO: 1563108
uggaaagugugguauuugu

SEQ ID NO: 1795812 - RNA, 19 nt, Artificial Sequence
  Description of Artificial Sequence: Synthetic oligonucleotide
  Antisense strand to SEQ ID NO: 1795811
acaaauaccacacuuucca

SEQ ID NO: 1795813 - RNA, 19 nt, Artificial Sequence
  Description of Artificial Sequence: Synthetic oligonucleotide
  Sense strand starting at position 3082 of SEQ ID NO: 1563108
gguauuuguguccgggcua

SEQ ID NO: 1795814 - RNA, 19 nt, Artificial Sequence
  Description of Artificial Sequence: Synthetic oligonucleotide
  Antisense strand to SEQ ID NO: 1795813
uagcccggacacaaauacc

SEQ ID NO: 1795815 - RNA, 19 nt, Artificial Sequence
  Description of Artificial Sequence: Synthetic oligonucleotide
  Sense strand starting at position 3087 of SEQ ID NO: 1563108
uuguguccgggcuaugaaa

SEQ ID NO: 1795816 - RNA, 19 nt, Artificial Sequence
  Description of Artificial Sequence: Synthetic oligonucleotide
  Antisense strand to SEQ ID NO: 1795815
uuucauagcccggacacaa

SEQ ID NO: 1795817 - RNA, 19 nt, Artificial Sequence
  Description of Artificial Sequence: Synthetic oligonucleotide
  Sense strand starting at position 3089 of SEQ ID NO: 1563108
guguccgggcuaugaaauu

SEQ ID NO: 1795818 - RNA, 19 nt, Artificial Sequence
  Description of Artificial Sequence: Synthetic oligonucleotide
  Antisense strand to SEQ ID NO: 1795817
aauuucauagcccggacac

SEQ ID NO: 1795819 - RNA, 19 nt, Artificial Sequence
  Description of Artificial Sequence: Synthetic oligonucleotide
  Sense strand starting at position 3095 of SEQ ID NO: 1563108
gggcuaugaaauugguaau

SEQ ID NO: 1795820 - RNA, 19 nt, Artificial Sequence
  Description of Artificial Sequence: Synthetic oligonucleotide
  Antisense strand to SEQ ID NO: 1795819
auuaccaauuucauagccc

SEQ ID NO: 1795821 - RNA, 19 nt, Artificial Sequence
  Description of Artificial Sequence: Synthetic oligonucleotide
  Sense strand starting at position 3096 of SEQ ID NO: 1563108
ggcuaugaaauugguaaug

SEQ ID NO: 1795822 - RNA, 19 nt, Artificial Sequence
  Description of Artificial Sequence: Synthetic oligonucleotide
  Antisense strand to SEQ ID NO: 1795821
cauuaccaauuucauagcc

SEQ ID NO: 1795823 - RNA, 19 nt, Artificial Sequence
  Description of Artificial Sequence: Synthetic oligonucleotide
  Sense strand starting at position 3106 of SEQ ID NO: 1563108
uugguaaugucauuccugu

SEQ ID NO: 1795824 - RNA, 19 nt, Artificial Sequence
  Description of Artificial Sequence: Synthetic oligonucleotide
  Antisense strand to SEQ ID NO: 1795823
acaggaaugacauuaccaa

SEQ ID NO: 1795825 - RNA, 19 nt, Artificial Sequence
  Description of Artificial Sequence: Synthetic oligonucleotide
  Sense strand starting at position 3305 of SEQ ID NO: 1563108
ucgugaggcaugugaggau

SEQ ID NO: 1795826 - RNA, 19 nt, Artificial Sequence
  Description of Artificial Sequence: Synthetic oligonucleotide
  Antisense strand to SEQ ID NO: 1795825
auccucacaugccucacga

SEQ ID NO: 1795827 - RNA, 19 nt, Artificial Sequence
  Description of Artificial Sequence: Synthetic oligonucleotide
  Sense strand starting at position 3346 of SEQ ID NO: 1563108
agccaugcucuuggcauaa

SEQ ID NO: 1795828 - RNA, 19 nt, Artificial Sequence
  Description of Artificial Sequence: Synthetic oligonucleotide
  Antisense strand to SEQ ID NO: 1795827
uuaugccaagagcauggcu

SEQ ID NO: 1795829 - RNA, 19 nt, Artificial Sequence
  Description of Artificial Sequence: Synthetic oligonucleotide
  Sense strand starting at position 3358 of SEQ ID NO: 1563108
ggcauaaggacugaugugu

SEQ ID NO: 1795830 - RNA, 19 nt, Artificial Sequence
  Description of Artificial Sequence: Synthetic oligonucleotide
  Antisense strand to SEQ ID NO: 1795829
acacaucaguccuuaugcc

SEQ ID NO: 1795831 - RNA, 19 nt, Artificial Sequence
  Description of Artificial Sequence: Synthetic oligonucleotide
  Sense strand starting at position 3363 of SEQ ID NO: 1563108
aaggacugauguguuuaua

SEQ ID NO: 1795832 - RNA, 19 nt, Artificial Sequence
  Description of Artificial Sequence: Synthetic oligonucleotide
  Antisense strand to SEQ ID NO: 1795831
uauaaacacaucaguccuu

SEQ ID NO: 1795833 - RNA, 19 nt, Artificial Sequence
  Description of Artificial Sequence: Synthetic oligonucleotide
  Sense strand starting at position 3366 of SEQ ID NO: 1563108
gacugauguguuuauagug

SEQ ID NO: 1795834 - RNA, 19 nt, Artificial Sequence
  Description of Artificial Sequence: Synthetic oligonucleotide
  Antisense strand to SEQ ID NO: 1795833
cacuauaaacacaucaguc

SEQ ID NO: 1795835 - RNA, 19 nt, Artificial Sequence
  Description of Artificial Sequence: Synthetic oligonucleotide
  Sense strand starting at position 3374 of SEQ ID NO: 1563108
uguuuauagugacugguga

SEQ ID NO: 1795836 - RNA, 19 nt, Artificial Sequence
  Description of Artificial Sequence: Synthetic oligonucleotide
  Antisense strand to SEQ ID NO: 1795835
ucaccagucacuauaaaca

SEQ ID NO: 1795837 - RNA, 19 nt, Artificial Sequence
  Description of Artificial Sequence: Synthetic oligonucleotide
  Sense strand starting at position 3375 of SEQ ID NO: 1563108
guuuauagugacuggugaa

SEQ ID NO: 1795838 - RNA, 19 nt, Artificial Sequence
  Description of Artificial Sequence: Synthetic oligonucleotide
  Antisense strand to SEQ ID NO: 1795837
uucaccagucacuauaaac

SEQ ID NO: 1795839 - RNA, 19 nt, Artificial Sequence
  Description of Artificial Sequence: Synthetic oligonucleotide
  Sense strand starting at position 3376 of SEQ ID NO: 1563108
uuuauagugacuggugaau

SEQ ID NO: 1795840 - RNA, 19 nt, Artificial Sequence
  Description of Artificial Sequence: Synthetic oligonucleotide
  Antisense strand to SEQ ID NO: 1795839
auucaccagucacuauaaa

SEQ ID NO: 1795841 - RNA, 19 nt, Artificial Sequence
  Description of Artificial Sequence: Synthetic oligonucleotide
  Sense strand starting at position 3518 of SEQ ID NO: 1563108
cacugaaaguauuagagau

SEQ ID NO: 1795842 - RNA, 19 nt, Artificial Sequence
  Description of Artificial Sequence: Synthetic oligonucleotide
  Antisense strand to SEQ ID NO: 1795841
aucucuaauacuuucagug

SEQ ID NO: 1795843 - RNA, 19 nt, Artificial Sequence
  Description of Artificial Sequence: Synthetic oligonucleotide
  Sense strand starting at position 3520 of SEQ ID NO: 1563108
cugaaaguauuagagauua

SEQ ID NO: 1795844 - RNA, 19 nt, Artificial Sequence
  Description of Artificial Sequence: Synthetic oligonucleotide
  Antisense strand to SEQ ID NO: 1795843
uaaucucuaauacuuucag

SEQ ID NO: 1795845 - RNA, 19 nt, Artificial Sequence
  Description of Artificial Sequence: Synthetic oligonucleotide
  Sense strand starting at position 3699 of SEQ ID NO: 1563108
ggguauuacugagcaaagg

SEQ ID NO: 1795846 - RNA, 19 nt, Artificial Sequence
  Description of Artificial Sequence: Synthetic oligonucleotide
  Antisense strand to SEQ ID NO: 1795845
ccuuugcucaguaauaccc

SEQ ID NO: 1795847 - RNA, 19 nt, Artificial Sequence
  Description of Artificial Sequence: Synthetic oligonucleotide
  Sense strand starting at position 66 of SEQ ID NO: 1563109
gcugguggaacuuagugaa

SEQ ID NO: 1795848 - RNA, 19 nt, Artificial Sequence
  Description of Artificial Sequence: Synthetic oligonucleotide
  Antisense strand to SEQ ID NO: 1795847
uucacuaaguuccaccagc

SEQ ID NO: 1795849 - RNA, 19 nt, Artificial Sequence
  Description of Artificial Sequence: Synthetic oligonucleotide
  Sense strand starting at position 142 of SEQ ID NO: 1563109
uagcuuuauggugagguau

SEQ ID NO: 1795850 - RNA, 19 nt, Artificial Sequence
  Description of Artificial Sequence: Synthetic oligonucleotide
  Antisense strand to SEQ ID NO: 1795849
auaccucaccauaaagcua

SEQ ID NO: 1795851 - RNA, 19 nt, Artificial Sequence
  Description of Artificial Sequence: Synthetic oligonucleotide
  Sense strand starting at position 506 of SEQ ID NO: 1563109
acaguuuagugacaagaau

SEQ ID NO: 1795852 - RNA, 19 nt, Artificial Sequence
  Description of Artificial Sequence: Synthetic oligonucleotide
  Antisense strand to SEQ ID NO: 1795851
auucuugucacuaaacugu

SEQ ID NO: 1795853 - RNA, 19 nt, Artificial Sequence
  Description of Artificial Sequence: Synthetic oligonucleotide
  Sense strand starting at position 588 of SEQ ID NO: 1563109
gagcacuggguguaggaua

SEQ ID NO: 1795854 - RNA, 19 nt, Artificial Sequence
  Description of Artificial Sequence: Synthetic oligonucleotide
  Antisense strand to SEQ ID NO: 1795853
uauccuacacccagugcuc

SEQ ID NO: 1795855 - RNA, 19 nt, Artificial Sequence
  Description of Artificial Sequence: Synthetic oligonucleotide
  Sense strand starting at position 599 of SEQ ID NO: 1563109
guaggauauauugggauug

SEQ ID NO: 1795856 - RNA, 19 nt, Artificial Sequence
  Description of Artificial Sequence: Synthetic oligonucleotide
  Antisense strand to SEQ ID NO: 1795855
caaucccaauauauccuac

SEQ ID NO: 1795857 - RNA, 19 nt, Artificial Sequence
  Description of Artificial Sequence: Synthetic oligonucleotide
  Sense strand starting at position 600 of SEQ ID NO: 1563109
uaggauauauugggauugu

SEQ ID NO: 1795858 - RNA, 19 nt, Artificial Sequence
  Description of Artificial Sequence: Synthetic oligonucleotide
  Antisense strand to SEQ ID NO: 1795857
acaaucccaauauauccua

SEQ ID NO: 1795859 - RNA, 19 nt, Artificial Sequence
  Description of Artificial Sequence: Synthetic oligonucleotide
  Sense strand starting at position 601 of SEQ ID NO: 1563109
aggauauauugggauuguc

SEQ ID NO: 1795860 - RNA, 19 nt, Artificial Sequence
  Description of Artificial Sequence: Synthetic oligonucleotide
  Antisense strand to SEQ ID NO: 1795859
gacaaucccaauauauccu

SEQ ID NO: 1795861 - RNA, 19 nt, Artificial Sequence
  Description of Artificial Sequence: Synthetic oligonucleotide
  Sense strand starting at position 609 of SEQ ID NO: 1563109
uugggauugucuguacuau

SEQ ID NO: 1795862 - RNA, 19 nt, Artificial Sequence
  Description of Artificial Sequence: Synthetic oligonucleotide
  Antisense strand to SEQ ID NO: 1795861
auaguacagacaaucccaa

SEQ ID NO: 1795863 - RNA, 19 nt, Artificial Sequence
  Description of Artificial Sequence: Synthetic oligonucleotide
  Sense strand starting at position 610 of SEQ ID NO: 1563109
ugggauugucuguacuauc

SEQ ID NO: 1795864 - RNA, 19 nt, Artificial Sequence
  Description of Artificial Sequence: Synthetic oligonucleotide
  Antisense strand to SEQ ID NO: 1795863
gauaguacagacaauccca

SEQ ID NO: 1795865 - RNA, 19 nt, Artificial Sequence
  Description of Artificial Sequence: Synthetic oligonucleotide
  Sense strand starting at position 683 of SEQ ID NO: 1563109
agaagacuauugcucagau

SEQ ID NO: 1795866 - RNA, 19 nt, Artificial Sequence
  Description of Artificial Sequence: Synthetic oligonucleotide
  Antisense strand to SEQ ID NO: 1795865
aucugagcaauagucuucu

SEQ ID NO: 1795867 - RNA, 19 nt, Artificial Sequence
  Description of Artificial Sequence: Synthetic oligonucleotide
  Sense strand starting at position 687 of SEQ ID NO: 1563109
gacuauugcucagauuggu

SEQ ID NO: 1795868 - RNA, 19 nt, Artificial Sequence
  Description of Artificial Sequence: Synthetic oligonucleotide
  Antisense strand to SEQ ID NO: 1795867
accaaucugagcaauaguc

SEQ ID NO: 1795869 - RNA, 19 nt, Artificial Sequence
  Description of Artificial Sequence: Synthetic oligonucleotide
  Sense strand starting at position 690 of SEQ ID NO: 1563109
uauugcucagauugguaau

SEQ ID NO: 1795870 - RNA, 19 nt, Artificial Sequence
  Description of Artificial Sequence: Synthetic oligonucleotide
  Antisense strand to SEQ ID NO: 1795869
auuaccaaucugagcaaua

SEQ ID NO: 1795871 - RNA, 19 nt, Artificial Sequence
  Description of Artificial Sequence: Synthetic oligonucleotide
  Sense strand starting at position 692 of SEQ ID NO: 1563109
uugcucagauugguaauua

SEQ ID NO: 1795872 - RNA, 19 nt, Artificial Sequence
  Description of Artificial Sequence: Synthetic oligonucleotide
  Antisense strand to SEQ ID NO: 1795871
uaauuaccaaucugagcaa

SEQ ID NO: 1795873 - RNA, 19 nt, Artificial Sequence
  Description of Artificial Sequence: Synthetic oligonucleotide
  Sense strand starting at position 713 of SEQ ID NO: 1563109
agcgcucaguuauuauaua

SEQ ID NO: 1795874 - RNA, 19 nt, Artificial Sequence
  Description of Artificial Sequence: Synthetic oligonucleotide
  Antisense strand to SEQ ID NO: 1795873
uauauaauaacugagcgcu

SEQ ID NO: 1795875 - RNA, 19 nt, Artificial Sequence
  Description of Artificial Sequence: Synthetic oligonucleotide
  Sense strand starting at position 822 of SEQ ID NO: 1563109
uggagauccucuuauuccu

SEQ ID NO: 1795876 - RNA, 19 nt, Artificial Sequence
  Description of Artificial Sequence: Synthetic oligonucleotide
  Antisense strand to SEQ ID NO: 1795875
aggaauaagaggaucucca

SEQ ID NO: 1795877 - RNA, 19 nt, Artificial Sequence
  Description of Artificial Sequence: Synthetic oligonucleotide
  Sense strand starting at position 852 of SEQ ID NO: 1563109
cuaccauugccucgcaaga

SEQ ID NO: 1795878 - RNA, 19 nt, Artificial Sequence
  Description of Artificial Sequence: Synthetic oligonucleotide
  Antisense strand to SEQ ID NO: 1795877
ucuugcgaggcaaugguag

SEQ ID NO: 1795879 - RNA, 19 nt, Artificial Sequence
  Description of Artificial Sequence: Synthetic oligonucleotide
  Sense strand starting at position 881 of SEQ ID NO: 1563109
ggaccagugcaugauugua

SEQ ID NO: 1795880 - RNA, 19 nt, Artificial Sequence
  Description of Artificial Sequence: Synthetic oligonucleotide
  Antisense strand to SEQ ID NO: 1795879
uacaaucaugcacuggucc

SEQ ID NO: 1795881 - RNA, 19 nt, Artificial Sequence
  Description of Artificial Sequence: Synthetic oligonucleotide
  Sense strand starting at position 886 of SEQ ID NO: 1563109
agugcaugauuguaagaca

SEQ ID NO: 1795882 - RNA, 19 nt, Artificial Sequence
  Description of Artificial Sequence: Synthetic oligonucleotide
  Antisense strand to SEQ ID NO: 1795881
ugucuuacaaucaugcacu

SEQ ID NO: 1795883 - RNA, 19 nt, Artificial Sequence
  Description of Artificial Sequence: Synthetic oligonucleotide
  Sense strand starting at position 984 of SEQ ID NO: 1563109
ggugaggugccuggaaagu

SEQ ID NO: 1795884 - RNA, 19 nt, Artificial Sequence
  Description of Artificial Sequence: Synthetic oligonucleotide
  Antisense strand to SEQ ID NO: 1795883
acuuuccaggcaccucacc

SEQ ID NO: 1795885 - RNA, 19 nt, Artificial Sequence
  Description of Artificial Sequence: Synthetic oligonucleotide
  Sense strand starting at position 1031 of SEQ ID NO: 1563109
ggaccugaguagggaauua

SEQ ID NO: 1795886 - RNA, 19 nt, Artificial Sequence
  Description of Artificial Sequence: Synthetic oligonucleotide
  Antisense strand to SEQ ID NO: 1795885
uaauucccuacucaggucc

SEQ ID NO: 1795887 - RNA, 19 nt, Artificial Sequence
  Description of Artificial Sequence: Synthetic oligonucleotide
  Sense strand starting at position 1106 of SEQ ID NO: 1563109
gguuaagguggguauguuu

SEQ ID NO: 1795888 - RNA, 19 nt, Artificial Sequence
  Description of Artificial Sequence: Synthetic oligonucleotide
  Antisense strand to SEQ ID NO: 1795887
aaacauacccaccuuaacc

SEQ ID NO: 1795889 - RNA, 19 nt, Artificial Sequence
  Description of Artificial Sequence: Synthetic oligonucleotide
  Sense strand starting at position 1173 of SEQ ID NO: 1563109
ggaaauugaugucuuccau

SEQ ID NO: 1795890 - RNA, 19 nt, Artificial Sequence
  Description of Artificial Sequence: Synthetic oligonucleotide
  Antisense strand to SEQ ID NO: 1795889
auggaagacaucaauuucc

SEQ ID NO: 1795891 - RNA, 19 nt, Artificial Sequence
  Description of Artificial Sequence: Synthetic oligonucleotide
  Sense strand starting at position 1246 of SEQ ID NO: 1563109
gcacauaauuuggacauca

SEQ ID NO: 1795892 - RNA, 19 nt, Artificial Sequence
  Description of Artificial Sequence: Synthetic oligonucleotide
  Antisense strand to SEQ ID NO: 1795891
ugauguccaaauuaugugc

SEQ ID NO: 1795893 - RNA, 19 nt, Artificial Sequence
  Description of Artificial Sequence: Synthetic oligonucleotide
  Sense strand starting at position 1266 of SEQ ID NO: 1563109
agaugucaaucagagccaa

SEQ ID NO: 1795894 - RNA, 19 nt, Artificial Sequence
  Description of Artificial Sequence: Synthetic oligonucleotide
  Antisense strand to SEQ ID NO: 1795893
uuggcucugauugacaucu

SEQ ID NO: 1795895 - RNA, 19 nt, Artificial Sequence
  Description of Artificial Sequence: Synthetic oligonucleotide
  Sense strand starting at position 1295 of SEQ ID NO: 1563109
ggcggacccuguuuagauc

SEQ ID NO: 1795896 - RNA, 19 nt, Artificial Sequence
  Description of Artificial Sequence: Synthetic oligonucleotide
  Antisense strand to SEQ ID NO: 1795895
gaucuaaacaggguccgcc

SEQ ID NO: 1795897 - RNA, 19 nt, Artificial Sequence
  Description of Artificial Sequence: Synthetic oligonucleotide
  Sense strand starting at position 1304 of SEQ ID NO: 1563109
uguuuagaucucugaagcu

SEQ ID NO: 1795898 - RNA, 19 nt, Artificial Sequence
  Description of Artificial Sequence: Synthetic oligonucleotide
  Antisense strand to SEQ ID NO: 1795897
agcuucagagaucuaaaca

SEQ ID NO: 1795899 - RNA, 19 nt, Artificial Sequence
  Description of Artificial Sequence: Synthetic oligonucleotide
  Sense strand starting at position 1390 of SEQ ID NO: 1563109
uagucaugaucuuuaugug

SEQ ID NO: 1795900 - RNA, 19 nt, Artificial Sequence
  Description of Artificial Sequence: Synthetic oligonucleotide
  Antisense strand to SEQ ID NO: 1795899
cacauaaagaucaugacua

SEQ ID NO: 1795901 - RNA, 19 nt, Artificial Sequence
  Description of Artificial Sequence: Synthetic oligonucleotide
  Sense strand starting at position 1624 of SEQ ID NO: 1563109
cguuguugucugugccaaa

SEQ ID NO: 1795902 - RNA, 19 nt, Artificial Sequence
  Description of Artificial Sequence: Synthetic oligonucleotide
  Antisense strand to SEQ ID NO: 1795901
uuuggcacagacaacaacg

SEQ ID NO: 1795903 - RNA, 19 nt, Artificial Sequence
  Description of Artificial Sequence: Synthetic oligonucleotide
  Sense strand starting at position 1646 of SEQ ID NO: 1563109
gagugagcccaauaucaac

SEQ ID NO: 1795904 - RNA, 19 nt, Artificial Sequence
  Description of Artificial Sequence: Synthetic oligonucleotide
  Antisense strand to SEQ ID NO: 1795903
guugauauugggcucacuc

SEQ ID NO: 1795905 - RNA, 19 nt, Artificial Sequence
  Description of Artificial Sequence: Synthetic oligonucleotide
  Sense strand starting at position 3066 of SEQ ID NO: 1563109
gaaagaaauuaggcauggu

SEQ ID NO: 1795906 - RNA, 19 nt, Artificial Sequence
  Description of Artificial Sequence: Synthetic oligonucleotide
  Antisense strand to SEQ ID NO: 1795905
accaugccuaauuucuuuc

SEQ ID NO: 1795907 - RNA, 19 nt, Artificial Sequence
  Description of Artificial Sequence: Synthetic oligonucleotide
  Sense strand starting at position 3205 of SEQ ID NO: 1563109
cgagacccuuccucuugaa

SEQ ID NO: 1795908 - RNA, 19 nt, Artificial Sequence
  Description of Artificial Sequence: Synthetic oligonucleotide
  Antisense strand to SEQ ID NO: 1795907
uucaagaggaagggucucg

SEQ ID NO: 1795909 - RNA, 19 nt, Artificial Sequence
  Description of Artificial Sequence: Synthetic oligonucleotide
  Sense strand starting at position 3293 of SEQ ID NO: 1563109
auaacauuguuaucagcgu

SEQ ID NO: 1795910 - RNA, 19 nt, Artificial Sequence
  Description of Artificial Sequence: Synthetic oligonucleotide
  Antisense strand to SEQ ID NO: 1795909
acgcugauaacaauguuau

SEQ ID NO: 1795911 - RNA, 19 nt, Artificial Sequence
  Description of Artificial Sequence: Synthetic oligonucleotide
  Sense strand starting at position 3342 of SEQ ID NO: 1563109
cccacuguguauguaaaga

SEQ ID NO: 1795912 - RNA, 19 nt, Artificial Sequence
  Description of Artificial Sequence: Synthetic oligonucleotide
  Antisense strand to SEQ ID NO: 1795911
ucuuuacauacacaguggg

SEQ ID NO: 1795913 - RNA, 19 nt, Artificial Sequence
  Description of Artificial Sequence: Synthetic oligonucleotide
  Sense strand starting at position 3397 of SEQ ID NO: 1563109
cuuagauuguggcuggaug

SEQ ID NO: 1795914 - RNA, 19 nt, Artificial Sequence
  Description of Artificial Sequence: Synthetic oligonucleotide
  Antisense strand to SEQ ID NO: 1795913
cauccagccacaaucuaag

SEQ ID NO: 1795915 - RNA, 19 nt, Artificial Sequence
  Description of Artificial Sequence: Synthetic oligonucleotide
  Sense strand starting at position 3398 of SEQ ID NO: 1563109
uuagauuguggcuggaugu

SEQ ID NO: 1795916 - RNA, 19 nt, Artificial Sequence
  Description of Artificial Sequence: Synthetic oligonucleotide
  Antisense strand to SEQ ID NO: 1795915
acauccagccacaaucuaa

SEQ ID NO: 1795917 - RNA, 19 nt, Artificial Sequence
  Description of Artificial Sequence: Synthetic oligonucleotide
  Sense strand starting at position 3399 of SEQ ID NO: 1563109
uagauuguggcuggauguu

SEQ ID NO: 1795918 - RNA, 19 nt, Artificial Sequence
  Description of Artificial Sequence: Synthetic oligonucleotide
  Antisense strand to SEQ ID NO: 1795917
aacauccagccacaaucua

SEQ ID NO: 1795919 - RNA, 19 nt, Artificial Sequence
  Description of Artificial Sequence: Synthetic oligonucleotide
  Sense strand starting at position 3830 of SEQ ID NO: 1563109
aaguaaagcucuggacuca

SEQ ID NO: 1795920 - RNA, 19 nt, Artificial Sequence
  Description of Artificial Sequence: Synthetic oligonucleotide
  Antisense strand to SEQ ID NO: 1795919
ugaguccagagcuuuacuu

SEQ ID NO: 1795921 - RNA, 19 nt, Artificial Sequence
  Description of Artificial Sequence: Synthetic oligonucleotide
  Sense strand starting at position 3831 of SEQ ID NO: 1563109
aguaaagcucuggacucaa

SEQ ID NO: 1795922 - RNA, 19 nt, Artificial Sequence
  Description of Artificial Sequence: Synthetic oligonucleotide
  Antisense strand to SEQ ID NO: 1795921
uugaguccagagcuuuacu

SEQ ID NO: 1795923 - RNA, 19 nt, Artificial Sequence
  Description of Artificial Sequence: Synthetic oligonucleotide
  Sense strand starting at position 3917 of SEQ ID NO: 1563109
gagcuugacugcucuaggu

SEQ ID NO: 1795924 - RNA, 19 nt, Artificial Sequence
  Description of Artificial Sequence: Synthetic oligonucleotide
  Antisense strand to SEQ ID NO: 1795923
accuagagcagucaagcuc

SEQ ID NO: 1795925 - RNA, 19 nt, Artificial Sequence
  Description of Artificial Sequence: Synthetic oligonucleotide
  Sense strand starting at position 3935 of SEQ ID NO: 1563109
ugccucacauaagugaaau

SEQ ID NO: 1795926 - RNA, 19 nt, Artificial Sequence
  Description of Artificial Sequence: Synthetic oligonucleotide
  Antisense strand to SEQ ID NO: 1795925
auuucacuuaugugaggca

SEQ ID NO: 1795927 - RNA, 19 nt, Artificial Sequence
  Description of Artificial Sequence: Synthetic oligonucleotide
  Sense strand starting at position 13 of SEQ ID NO: 1563110
gaggccucagccugcauaa

SEQ ID NO: 1795928 - RNA, 19 nt, Artificial Sequence
  Description of Artificial Sequence: Synthetic oligonucleotide
  Antisense strand to SEQ ID NO: 1795927
uuaugcaggcugaggccuc

SEQ ID NO: 1795929 - RNA, 19 nt, Artificial Sequence
  Description of Artificial Sequence: Synthetic oligonucleotide
  Sense strand starting at position 135 of SEQ ID NO: 1563110
aggaaaugcauucgucagu

SEQ ID NO: 1795930 - RNA, 19 nt, Artificial Sequence
  Description of Artificial Sequence: Synthetic oligonucleotide
  Antisense strand to SEQ ID NO: 1795929
acugacgaaugcauuuccu

SEQ ID NO: 1795931 - RNA, 19 nt, Artificial Sequence
  Description of Artificial Sequence: Synthetic oligonucleotide
  Sense strand starting at position 287 of SEQ ID NO: 1563110
gcuaauagugcucaaguca

SEQ ID NO: 1795932 - RNA, 19 nt, Artificial Sequence
  Description of Artificial Sequence: Synthetic oligonucleotide
  Antisense strand to SEQ ID NO: 1795931
ugacuugagcacuauuagc

SEQ ID NO: 1795933 - RNA, 19 nt, Artificial Sequence
  Description of Artificial Sequence: Synthetic oligonucleotide
  Sense strand starting at position 338 of SEQ ID NO: 1563110
uguugcugguuuccaaaca

SEQ ID NO: 1795934 - RNA, 19 nt, Artificial Sequence
  Description of Artificial Sequence: Synthetic oligonucleotide
  Antisense strand to SEQ ID NO: 1795933
uguuuggaaaccagcaaca

SEQ ID NO: 1795935 - RNA, 19 nt, Artificial Sequence
  Description of Artificial Sequence: Synthetic oligonucleotide
  Sense strand starting at position 359 of SEQ ID NO: 1563110
cccaguuauguguguaaca

SEQ ID NO: 1795936 - RNA, 19 nt, Artificial Sequence
  Description of Artificial Sequence: Synthetic oligonucleotide
  Antisense strand to SEQ ID NO: 1795935
uguuacacacauaacuggg

SEQ ID NO: 1795937 - RNA, 19 nt, Artificial Sequence
  Description of Artificial Sequence: Synthetic oligonucleotide
  Sense strand starting at position 360 of SEQ ID NO: 1563110
ccaguuauguguguaacaa

SEQ ID NO: 1795938 - RNA, 19 nt, Artificial Sequence
  Description of Artificial Sequence: Synthetic oligonucleotide
  Antisense strand to SEQ ID NO: 1795937
uuguuacacacauaacugg

SEQ ID NO: 1795939 - RNA, 19 nt, Artificial Sequence
  Description of Artificial Sequence: Synthetic oligonucleotide
  Sense strand starting at position 361 of SEQ ID NO: 1563110
caguuauguguguaacaag

SEQ ID NO: 1795940 - RNA, 19 nt, Artificial Sequence
  Description of Artificial Sequence: Synthetic oligonucleotide
  Antisense strand to SEQ ID NO: 1795939
cuuguuacacacauaacug

SEQ ID NO: 1795941 - RNA, 19 nt, Artificial Sequence
  Description of Artificial Sequence: Synthetic oligonucleotide
  Sense strand starting at position 581 of SEQ ID NO: 1563110
cuauaaucaugggcaguaa

SEQ ID NO: 1795942 - RNA, 19 nt, Artificial Sequence
  Description of Artificial Sequence: Synthetic oligonucleotide
  Antisense strand to SEQ ID NO: 1795941
uuacugcccaugauuauag

SEQ ID NO: 1795943 - RNA, 19 nt, Artificial Sequence
  Description of Artificial Sequence: Synthetic oligonucleotide
  Sense strand starting at position 582 of SEQ ID NO: 1563110
uauaaucaugggcaguaau

SEQ ID NO: 1795944 - RNA, 19 nt, Artificial Sequence
  Description of Artificial Sequence: Synthetic oligonucleotide
  Antisense strand to SEQ ID NO: 1795943
auuacugcccaugauuaua

SEQ ID NO: 1795945 - RNA, 19 nt, Artificial Sequence
  Description of Artificial Sequence: Synthetic oligonucleotide
  Sense strand starting at position 631 of SEQ ID NO: 1563110
gugagagcugguuacaaug

SEQ ID NO: 1795946 - RNA, 19 nt, Artificial Sequence
  Description of Artificial Sequence: Synthetic oligonucleotide
  Antisense strand to SEQ ID NO: 1795945
cauuguaaccagcucucac

SEQ ID NO: 1795947 - RNA, 19 nt, Artificial Sequence
  Description of Artificial Sequence: Synthetic oligonucleotide
  Sense strand starting at position 730 of SEQ ID NO: 1563110
gagguuguacacugaacau

SEQ ID NO: 1795948 - RNA, 19 nt, Artificial Sequence
  Description of Artificial Sequence: Synthetic oligonucleotide
  Antisense strand to SEQ ID NO: 1795947
auguucaguguacaaccuc

SEQ ID NO: 1795949 - RNA, 19 nt, Artificial Sequence
  Description of Artificial Sequence: Synthetic oligonucleotide
  Sense strand starting at position 918 of SEQ ID NO: 1563110
cgacucauccaccggagaa

SEQ ID NO: 1795950 - RNA, 19 nt, Artificial Sequence
  Description of Artificial Sequence: Synthetic oligonucleotide
  Antisense strand to SEQ ID NO: 1795949
uucuccgguggaugagucg

SEQ ID NO: 1795951 - RNA, 19 nt, Artificial Sequence
  Description of Artificial Sequence: Synthetic oligonucleotide
  Sense strand starting at position 982 of SEQ ID NO: 1563110
agauucgucucaccuagaa

SEQ ID NO: 1795952 - RNA, 19 nt, Artificial Sequence
  Description of Artificial Sequence: Synthetic oligonucleotide
  Antisense strand to SEQ ID NO: 1795951
uucuaggugagacgaaucu

SEQ ID NO: 1795953 - RNA, 19 nt, Artificial Sequence
  Description of Artificial Sequence: Synthetic oligonucleotide
  Sense strand starting at position 986 of SEQ ID NO: 1563110
ucgucucaccuagaaguca

SEQ ID NO: 1795954 - RNA, 19 nt, Artificial Sequence
  Description of Artificial Sequence: Synthetic oligonucleotide
  Antisense strand to SEQ ID NO: 1795953
ugacuucuaggugagacga

SEQ ID NO: 1795955 - RNA, 19 nt, Artificial Sequence
  Description of Artificial Sequence: Synthetic oligonucleotide
  Sense strand starting at position 1249 of SEQ ID NO: 1563110
cgccacuuacuaggugauu

SEQ ID NO: 1795956 - RNA, 19 nt, Artificial Sequence
  Description of Artificial Sequence: Synthetic oligonucleotide
  Antisense strand to SEQ ID NO: 1795955
aaucaccuaguaaguggcg

SEQ ID NO: 1795957 - RNA, 19 nt, Artificial Sequence
  Description of Artificial Sequence: Synthetic oligonucleotide
  Sense strand starting at position 1254 of SEQ ID NO: 1563110
cuuacuaggugauucuuua

SEQ ID NO: 1795958 - RNA, 19 nt, Artificial Sequence
  Description of Artificial Sequence: Synthetic oligonucleotide
  Antisense strand to SEQ ID NO: 1795957
uaaagaaucaccuaguaag

SEQ ID NO: 1795959 - RNA, 19 nt, Artificial Sequence
  Description of Artificial Sequence: Synthetic oligonucleotide
  Sense strand starting at position 1261 of SEQ ID NO: 1563110
ggugauucuuuauuccaag

SEQ ID NO: 1795960 - RNA, 19 nt, Artificial Sequence
  Description of Artificial Sequence: Synthetic oligonucleotide
  Antisense strand to SEQ ID NO: 1795959
cuuggaauaaagaaucacc

SEQ ID NO: 1795961 - RNA, 19 nt, Artificial Sequence
  Description of Artificial Sequence: Synthetic oligonucleotide
  Sense strand starting at position 1262 of SEQ ID NO: 1563110
gugauucuuuauuccaagu

SEQ ID NO: 1795962 - RNA, 19 nt, Artificial Sequence
  Description of Artificial Sequence: Synthetic oligonucleotide
  Antisense strand to SEQ ID NO: 1795961
acuuggaauaaagaaucac

SEQ ID NO: 1795963 - RNA, 19 nt, Artificial Sequence
  Description of Artificial Sequence: Synthetic oligonucleotide
  Sense strand starting at position 1321 of SEQ ID NO: 1563110
ggugaaacgcucuaggaga

SEQ ID NO: 1795964 - RNA, 19 nt, Artificial Sequence
  Description of Artificial Sequence: Synthetic oligonucleotide
  Antisense strand to SEQ ID NO: 1795963
ucuccuagagcguuucacc

SEQ ID NO: 1795965 - RNA, 19 nt, Artificial Sequence
  Description of Artificial Sequence: Synthetic oligonucleotide
  Sense strand starting at position 1323 of SEQ ID NO: 1563110
ugaaacgcucuaggagaaa

SEQ ID NO: 1795966 - RNA, 19 nt, Artificial Sequence
  Description of Artificial Sequence: Synthetic oligonucleotide
  Antisense strand to SEQ ID NO: 1795965
uuucuccuagagcguuuca

SEQ ID NO: 1795967 - RNA, 19 nt, Artificial Sequence
  Description of Artificial Sequence: Synthetic oligonucleotide
  Sense strand starting at position 2119 of SEQ ID NO: 1563110
ggugacgucaccuacuaua

SEQ ID NO: 1795968 - RNA, 19 nt, Artificial Sequence
  Description of Artificial Sequence: Synthetic oligonucleotide
  Antisense strand to SEQ ID NO: 1795967
uauaguaggugacgucacc

SEQ ID NO: 1795969 - RNA, 19 nt, Artificial Sequence
  Description of Artificial Sequence: Synthetic oligonucleotide
  Sense strand starting at position 2330 of SEQ ID NO: 1563110
cuccauccacguuagagau

SEQ ID NO: 1795970 - RNA, 19 nt, Artificial Sequence
  Description of Artificial Sequence: Synthetic oligonucleotide
  Antisense strand to SEQ ID NO: 1795969
aucucuaacguggauggag

SEQ ID NO: 1795971 - RNA, 19 nt, Artificial Sequence
  Description of Artificial Sequence: Synthetic oligonucleotide
  Sense strand starting at position 2343 of SEQ ID NO: 1563110
agagaucuggcuugagaag

SEQ ID NO: 1795972 - RNA, 19 nt, Artificial Sequence
  Description of Artificial Sequence: Synthetic oligonucleotide
  Antisense strand to SEQ ID NO: 1795971
cuucucaagccagaucucu

SEQ ID NO: 1795973 - RNA, 19 nt, Artificial Sequence
  Description of Artificial Sequence: Synthetic oligonucleotide
  Sense strand starting at position 2786 of SEQ ID NO: 1563110
uagugacuugcucaggguu

SEQ ID NO: 1795974 - RNA, 19 nt, Artificial Sequence
  Description of Artificial Sequence: Synthetic oligonucleotide
  Antisense strand to SEQ ID NO: 1795973
aacccugagcaagucacua

SEQ ID NO: 1795975 - RNA, 19 nt, Artificial Sequence
  Description of Artificial Sequence: Synthetic oligonucleotide
  Sense strand starting at position 2910 of SEQ ID NO: 1563110
ucccaauccuggcugguau

SEQ ID NO: 1795976 - RNA, 19 nt, Artificial Sequence
  Description of Artificial Sequence: Synthetic oligonucleotide
  Antisense strand to SEQ ID NO: 1795975
auaccagccaggauuggga

SEQ ID NO: 1795977 - RNA, 19 nt, Artificial Sequence
  Description of Artificial Sequence: Synthetic oligonucleotide
  Sense strand starting at position 3101 of SEQ ID NO: 1563110
cagggauaagcuggaucuu

SEQ ID NO: 1795978 - RNA, 19 nt, Artificial Sequence
  Description of Artificial Sequence: Synthetic oligonucleotide
  Antisense strand to SEQ ID NO: 1795977
aagauccagcuuaucccug

SEQ ID NO: 1795979 - RNA, 19 nt, Artificial Sequence
  Description of Artificial Sequence: Synthetic oligonucleotide
  Sense strand starting at position 3185 of SEQ ID NO: 1563110
gggagauggugagaagaga

SEQ ID NO: 1795980 - RNA, 19 nt, Artificial Sequence
  Description of Artificial Sequence: Synthetic oligonucleotide
  Antisense strand to SEQ ID NO: 1795979
ucucuucucaccaucuccc

SEQ ID NO: 1795981 - RNA, 19 nt, Artificial Sequence
  Description of Artificial Sequence: Synthetic oligonucleotide
  Sense strand starting at position 3215 of SEQ ID NO: 1563110
gggaagugagguuggguaa

SEQ ID NO: 1795982 - RNA, 19 nt, Artificial Sequence
  Description of Artificial Sequence: Synthetic oligonucleotide
  Antisense strand to SEQ ID NO: 1795981
uuacccaaccucacuuccc

SEQ ID NO: 1795983 - RNA, 19 nt, Artificial Sequence
  Description of Artificial Sequence: Synthetic oligonucleotide
  Sense strand starting at position 3216 of SEQ ID NO: 1563110
ggaagugagguuggguaaa

SEQ ID NO: 1795984 - RNA, 19 nt, Artificial Sequence
  Description of Artificial Sequence: Synthetic oligonucleotide
  Antisense strand to SEQ ID NO: 1795983
uuuacccaaccucacuucc

SEQ ID NO: 1795985 - RNA, 19 nt, Artificial Sequence
  Description of Artificial Sequence: Synthetic oligonucleotide
  Sense strand starting at position 3315 of SEQ ID NO: 1563110
ccuggaaucuugcucuaga

SEQ ID NO: 1795986 - RNA, 19 nt, Artificial Sequence
  Description of Artificial Sequence: Synthetic oligonucleotide
  Antisense strand to SEQ ID NO: 1795985
ucuagagcaagauuccagg

SEQ ID NO: 1795987 - RNA, 19 nt, Artificial Sequence
  Description of Artificial Sequence: Synthetic oligonucleotide
  Sense strand starting at position 3316 of SEQ ID NO: 1563110
cuggaaucuugcucuagag

SEQ ID NO: 1795988 - RNA, 19 nt, Artificial Sequence
  Description of Artificial Sequence: Synthetic oligonucleotide
  Antisense strand to SEQ ID NO: 1795987
cucuagagcaagauuccag

SEQ ID NO: 1795989 - RNA, 19 nt, Artificial Sequence
  Description of Artificial Sequence: Synthetic oligonucleotide
  Sense strand starting at position 3320 of SEQ ID NO: 1563110
aaucuugcucuagagagua

SEQ ID NO: 1795990 - RNA, 19 nt, Artificial Sequence
  Description of Artificial Sequence: Synthetic oligonucleotide
  Antisense strand to SEQ ID NO: 1795989
uacucucuagagcaagauu

SEQ ID NO: 1795991 - RNA, 19 nt, Artificial Sequence
  Description of Artificial Sequence: Synthetic oligonucleotide
  Sense strand starting at position 3332 of SEQ ID NO: 1563110
gagaguaagacauguucga

SEQ ID NO: 1795992 - RNA, 19 nt, Artificial Sequence
  Description of Artificial Sequence: Synthetic oligonucleotide
  Antisense strand to SEQ ID NO: 1795991
ucgaacaugucuuacucuc

SEQ ID NO: 1795993 - RNA, 19 nt, Artificial Sequence
  Description of Artificial Sequence: Synthetic oligonucleotide
  Sense strand starting at position 3402 of SEQ ID NO: 1563110
ucuggagaauuggacuuaa

SEQ ID NO: 1795994 - RNA, 19 nt, Artificial Sequence
  Description of Artificial Sequence: Synthetic oligonucleotide
  Antisense strand to SEQ ID NO: 1795993
uuaaguccaauucuccaga

SEQ ID NO: 1795995 - RNA, 19 nt, Artificial Sequence
  Description of Artificial Sequence: Synthetic oligonucleotide
  Sense strand starting at position 3628 of SEQ ID NO: 1563110
ugcuaugaugcugaaacga

SEQ ID NO: 1795996 - RNA, 19 nt, Artificial Sequence
  Description of Artificial Sequence: Synthetic oligonucleotide
  Antisense strand to SEQ ID NO: 1795995
ucguuucagcaucauagca

SEQ ID NO: 1795997 - RNA, 19 nt, Artificial Sequence
  Description of Artificial Sequence: Synthetic oligonucleotide
  Sense strand starting at position 3636 of SEQ ID NO: 1563110
ugcugaaacgaucacacuu

SEQ ID NO: 1795998 - RNA, 19 nt, Artificial Sequence
  Description of Artificial Sequence: Synthetic oligonucleotide
  Antisense strand to SEQ ID NO: 1795997
aagugugaucguuucagca

SEQ ID NO: 1795999 - RNA, 19 nt, Artificial Sequence
  Description of Artificial Sequence: Synthetic oligonucleotide
  Sense strand starting at position 3741 of SEQ ID NO: 1563110
gcuguuggaaucgagguua

SEQ ID NO: 1796000 - RNA, 19 nt, Artificial Sequence
  Description of Artificial Sequence: Synthetic oligonucleotide
  Antisense strand to SEQ ID NO: 1795999
uaaccucgauuccaacagc

SEQ ID NO: 1796001 - RNA, 19 nt, Artificial Sequence
  Description of Artificial Sequence: Synthetic oligonucleotide
  Sense strand starting at position 3798 of SEQ ID NO: 1563110
aagagcaugcuagauagua

SEQ ID NO: 1796002 - RNA, 19 nt, Artificial Sequence
  Description of Artificial Sequence: Synthetic oligonucleotide
  Antisense strand to SEQ ID NO: 1796001
uacuaucuagcaugcucuu

SEQ ID NO: 1796003 - RNA, 19 nt, Artificial Sequence
  Description of Artificial Sequence: Synthetic oligonucleotide
  Sense strand starting at position 3910 of SEQ ID NO: 1563110
cuagcucuuagagggcuua

SEQ ID NO: 1796004 - RNA, 19 nt, Artificial Sequence
  Description of Artificial Sequence: Synthetic oligonucleotide
  Antisense strand to SEQ ID NO: 1796003
uaagcccucuaagagcuag

SEQ ID NO: 1796005 - RNA, 19 nt, Artificial Sequence
  Description of Artificial Sequence: Synthetic oligonucleotide
  Sense strand starting at position 3944 of SEQ ID NO: 1563110
uucugaugagguuggacua

SEQ ID NO: 1796006 - RNA, 19 nt, Artificial Sequence
  Description of Artificial Sequence: Synthetic oligonucleotide
  Antisense strand to SEQ ID NO: 1796005
uaguccaaccucaucagaa

SEQ ID NO: 1796007 - RNA, 19 nt, Artificial Sequence
  Description of Artificial Sequence: Synthetic oligonucleotide
  Sense strand starting at position 263 of SEQ ID NO: 1563111
acacaccuuucgcuaaaga

SEQ ID NO: 1796008 - RNA, 19 nt, Artificial Sequence
  Description of Artificial Sequence: Synthetic oligonucleotide
  Antisense strand to SEQ ID NO: 1796007
ucuuuagcgaaaggugugu

SEQ ID NO: 1796009 - RNA, 19 nt, Artificial Sequence
  Description of Artificial Sequence: Synthetic oligonucleotide
  Sense strand starting at position 341 of SEQ ID NO: 1563111
uuuagucuuucugcaaggu

SEQ ID NO: 1796010 - RNA, 19 nt, Artificial Sequence
  Description of Artificial Sequence: Synthetic oligonucleotide
  Antisense strand to SEQ ID NO: 1796009
accuugcagaaagacuaaa

SEQ ID NO: 1796011 - RNA, 19 nt, Artificial Sequence
  Description of Artificial Sequence: Synthetic oligonucleotide
  Sense strand starting at position 345 of SEQ ID NO: 1563111
gucuuucugcaagguguua

SEQ ID NO: 1796012 - RNA, 19 nt, Artificial Sequence
  Description of Artificial Sequence: Synthetic oligonucleotide
  Antisense strand to SEQ ID NO: 1796011
uaacaccuugcagaaagac

SEQ ID NO: 1796013 - RNA, 19 nt, Artificial Sequence
  Description of Artificial Sequence: Synthetic oligonucleotide
  Sense strand starting at position 356 of SEQ ID NO: 1563111
agguguuauggacauacuu

SEQ ID NO: 1796014 - RNA, 19 nt, Artificial Sequence
  Description of Artificial Sequence: Synthetic oligonucleotide
  Antisense strand to SEQ ID NO: 1796013
aaguauguccauaacaccu

SEQ ID NO: 1796015 - RNA, 19 nt, Artificial Sequence
  Description of Artificial Sequence: Synthetic oligonucleotide
  Sense strand starting at position 358 of SEQ ID NO: 1563111
guguuauggacauacuuug

SEQ ID NO: 1796016 - RNA, 19 nt, Artificial Sequence
  Description of Artificial Sequence: Synthetic oligonucleotide
  Antisense strand to SEQ ID NO: 1796015
caaaguauguccauaacac

SEQ ID NO: 1796017 - RNA, 19 nt, Artificial Sequence
  Description of Artificial Sequence: Synthetic oligonucleotide
  Sense strand starting at position 383 of SEQ ID NO: 1563111
ugaguuacucacugugugu

SEQ ID NO: 1796018 - RNA, 19 nt, Artificial Sequence
  Description of Artificial Sequence: Synthetic oligonucleotide
  Antisense strand to SEQ ID NO: 1796017
acacacagugaguaacuca

SEQ ID NO: 1796019 - RNA, 19 nt, Artificial Sequence
  Description of Artificial Sequence: Synthetic oligonucleotide
  Sense strand starting at position 541 of SEQ ID NO: 1563111
gucuuagguuucuuuccau

SEQ ID NO: 1796020 - RNA, 19 nt, Artificial Sequence
  Description of Artificial Sequence: Synthetic oligonucleotide
  Antisense strand to SEQ ID NO: 1796019
auggaaagaaaccuaagac

SEQ ID NO: 1796021 - RNA, 19 nt, Artificial Sequence
  Description of Artificial Sequence: Synthetic oligonucleotide
  Sense strand starting at position 544 of SEQ ID NO: 1563111
uuagguuucuuuccauaua

SEQ ID NO: 1796022 - RNA, 19 nt, Artificial Sequence
  Description of Artificial Sequence: Synthetic oligonucleotide
  Antisense strand to SEQ ID NO: 1796021
uauauggaaagaaaccuaa

SEQ ID NO: 1796023 - RNA, 19 nt, Artificial Sequence
  Description of Artificial Sequence: Synthetic oligonucleotide
  Sense strand starting at position 547 of SEQ ID NO: 1563111
gguuucuuuccauauagau

SEQ ID NO: 1796024 - RNA, 19 nt, Artificial Sequence
  Description of Artificial Sequence: Synthetic oligonucleotide
  Antisense strand to SEQ ID NO: 1796023
aucuauauggaaagaaacc

SEQ ID NO: 1796025 - RNA, 19 nt, Artificial Sequence
  Description of Artificial Sequence: Synthetic oligonucleotide
  Sense strand starting at position 625 of SEQ ID NO: 1563111
ucucuuaacuugugcuaga

SEQ ID NO: 1796026 - RNA, 19 nt, Artificial Sequence
  Description of Artificial Sequence: Synthetic oligonucleotide
  Antisense strand to SEQ ID NO: 1796025
ucuagcacaaguuaagaga

SEQ ID NO: 1796027 - RNA, 19 nt, Artificial Sequence
  Description of Artificial Sequence: Synthetic oligonucleotide
  Sense strand starting at position 626 of SEQ ID NO: 1563111
cucuuaacuugugcuagau

SEQ ID NO: 1796028 - RNA, 19 nt, Artificial Sequence
  Description of Artificial Sequence: Synthetic oligonucleotide
  Antisense strand to SEQ ID NO: 1796027
aucuagcacaaguuaagag

SEQ ID NO: 1796029 - RNA, 19 nt, Artificial Sequence
  Description of Artificial Sequence: Synthetic oligonucleotide
  Sense strand starting at position 628 of SEQ ID NO: 1563111
cuuaacuugugcuagaucu

SEQ ID NO: 1796030 - RNA, 19 nt, Artificial Sequence
  Description of Artificial Sequence: Synthetic oligonucleotide
  Antisense strand to SEQ ID NO: 1796029
agaucuagcacaaguuaag

SEQ ID NO: 1796031 - RNA, 19 nt, Artificial Sequence
  Description of Artificial Sequence: Synthetic oligonucleotide
  Sense strand starting at position 676 of SEQ ID NO: 1563111
cagauauaauccguuuaag

SEQ ID NO: 1796032 - RNA, 19 nt, Artificial Sequence
  Description of Artificial Sequence: Synthetic oligonucleotide
  Antisense strand to SEQ ID NO: 1796031
cuuaaacggauuauaucug

SEQ ID NO: 1796033 - RNA, 19 nt, Artificial Sequence
  Description of Artificial Sequence: Synthetic oligonucleotide
  Sense strand starting at position 679 of SEQ ID NO: 1563111
auauaauccguuuaaggac

SEQ ID NO: 1796034 - RNA, 19 nt, Artificial Sequence
  Description of Artificial Sequence: Synthetic oligonucleotide
  Antisense strand to SEQ ID NO: 1796033
guccuuaaacggauuauau

SEQ ID NO: 1796035 - RNA, 19 nt, Artificial Sequence
  Description of Artificial Sequence: Synthetic oligonucleotide
  Sense strand starting at position 731 of SEQ ID NO: 1563111
auuggaaacccucggagua

SEQ ID NO: 1796036 - RNA, 19 nt, Artificial Sequence
  Description of Artificial Sequence: Synthetic oligonucleotide
  Antisense strand to SEQ ID NO: 1796035
uacuccgaggguuuccaau

SEQ ID NO: 1796037 - RNA, 19 nt, Artificial Sequence
  Description of Artificial Sequence: Synthetic oligonucleotide
  Sense strand starting at position 732 of SEQ ID NO: 1563111
uuggaaacccucggaguau

SEQ ID NO: 1796038 - RNA, 19 nt, Artificial Sequence
  Description of Artificial Sequence: Synthetic oligonucleotide
  Antisense strand to SEQ ID NO: 1796037
auacuccgaggguuuccaa

SEQ ID NO: 1796039 - RNA, 19 nt, Artificial Sequence
  Description of Artificial Sequence: Synthetic oligonucleotide
  Sense strand starting at position 885 of SEQ ID NO: 1563111
ugucacuaugaaugacaua

SEQ ID NO: 1796040 - RNA, 19 nt, Artificial Sequence
  Description of Artificial Sequence: Synthetic oligonucleotide
  Antisense strand to SEQ ID NO: 1796039
uaugucauucauagugaca

SEQ ID NO: 1796041 - RNA, 19 nt, Artificial Sequence
  Description of Artificial Sequence: Synthetic oligonucleotide
  Sense strand starting at position 941 of SEQ ID NO: 1563111
gcaggaugcccuugcuuua

SEQ ID NO: 1796042 - RNA, 19 nt, Artificial Sequence
  Description of Artificial Sequence: Synthetic oligonucleotide
  Antisense strand to SEQ ID NO: 1796041
uaaagcaagggcauccugc

SEQ ID NO: 1796043 - RNA, 19 nt, Artificial Sequence
  Description of Artificial Sequence: Synthetic oligonucleotide
  Sense strand starting at position 1000 of SEQ ID NO: 1563111
aacguaaucugaucagagu

SEQ ID NO: 1796044 - RNA, 19 nt, Artificial Sequence
  Description of Artificial Sequence: Synthetic oligonucleotide
  Antisense strand to SEQ ID NO: 1796043
acucugaucagauuacguu

SEQ ID NO: 1796045 - RNA, 19 nt, Artificial Sequence
  Description of Artificial Sequence: Synthetic oligonucleotide
  Sense strand starting at position 1001 of SEQ ID NO: 1563111
acguaaucugaucagaguu

SEQ ID NO: 1796046 - RNA, 19 nt, Artificial Sequence
  Description of Artificial Sequence: Synthetic oligonucleotide
  Antisense strand to SEQ ID NO: 1796045
aacucugaucagauuacgu

SEQ ID NO: 1796047 - RNA, 19 nt, Artificial Sequence
  Description of Artificial Sequence: Synthetic oligonucleotide
  Sense strand starting at position 1003 of SEQ ID NO: 1563111
guaaucugaucagaguuaa

SEQ ID NO: 1796048 - RNA, 19 nt, Artificial Sequence
  Description of Artificial Sequence: Synthetic oligonucleotide
  Antisense strand to SEQ ID NO: 1796047
uuaacucugaucagauuac

SEQ ID NO: 1796049 - RNA, 19 nt, Artificial Sequence
  Description of Artificial Sequence: Synthetic oligonucleotide
  Sense strand starting at position 1170 of SEQ ID NO: 1563111
ggcugcgauucucuuagca

SEQ ID NO: 1796050 - RNA, 19 nt, Artificial Sequence
  Description of Artificial Sequence: Synthetic oligonucleotide
  Antisense strand to SEQ ID NO: 1796049
ugcuaagagaaucgcagcc

SEQ ID NO: 1796051 - RNA, 19 nt, Artificial Sequence
  Description of Artificial Sequence: Synthetic oligonucleotide
  Sense strand starting at position 1174 of SEQ ID NO: 1563111
gcgauucucuuagcaacga

SEQ ID NO: 1796052 - RNA, 19 nt, Artificial Sequence
  Description of Artificial Sequence: Synthetic oligonucleotide
  Antisense strand to SEQ ID NO: 1796051
ucguugcuaagagaaucgc

SEQ ID NO: 1796053 - RNA, 19 nt, Artificial Sequence
  Description of Artificial Sequence: Synthetic oligonucleotide
  Sense strand starting at position 1175 of SEQ ID NO: 1563111
cgauucucuuagcaacgaa

SEQ ID NO: 1796054 - RNA, 19 nt, Artificial Sequence
  Description of Artificial Sequence: Synthetic oligonucleotide
  Antisense strand to SEQ ID NO: 1796053
uucguugcuaagagaaucg

SEQ ID NO: 1796055 - RNA, 19 nt, Artificial Sequence
  Description of Artificial Sequence: Synthetic oligonucleotide
  Sense strand starting at position 1286 of SEQ ID NO: 1563111
uugaaauuaugguucgcaa

SEQ ID NO: 1796056 - RNA, 19 nt, Artificial Sequence
  Description of Artificial Sequence: Synthetic oligonucleotide
  Antisense strand to SEQ ID NO: 1796055
uugcgaaccauaauuucaa

SEQ ID NO: 1796057 - RNA, 19 nt, Artificial Sequence
  Description of Artificial Sequence: Synthetic oligonucleotide
  Sense strand starting at position 1290 of SEQ ID NO: 1563111
aauuaugguucgcaaggca

SEQ ID NO: 1796058 - RNA, 19 nt, Artificial Sequence
  Description of Artificial Sequence: Synthetic oligonucleotide
  Antisense strand to SEQ ID NO: 1796057
ugccuugcgaaccauaauu

SEQ ID NO: 1796059 - RNA, 19 nt, Artificial Sequence
  Description of Artificial Sequence: Synthetic oligonucleotide
  Sense strand starting at position 1325 of SEQ ID NO: 1563111
auuaaaugugaacggucau

SEQ ID NO: 1796060 - RNA, 19 nt, Artificial Sequence
  Description of Artificial Sequence: Synthetic oligonucleotide
  Antisense strand to SEQ ID NO: 1796059
augaccguucacauuuaau

SEQ ID NO: 1796061 - RNA, 19 nt, Artificial Sequence
  Description of Artificial Sequence: Synthetic oligonucleotide
  Sense strand starting at position 1450 of SEQ ID NO: 1563111
augacacguccagagaagu

SEQ ID NO: 1796062 - RNA, 19 nt, Artificial Sequence
  Description of Artificial Sequence: Synthetic oligonucleotide
  Antisense strand to SEQ ID NO: 1796061
acuucucuggacgugucau

SEQ ID NO: 1796063 - RNA, 19 nt, Artificial Sequence
  Description of Artificial Sequence: Synthetic oligonucleotide
  Sense strand starting at position 2674 of SEQ ID NO: 1563111
uguguuauuuccuaacaca

SEQ ID NO: 1796064 - RNA, 19 nt, Artificial Sequence
  Description of Artificial Sequence: Synthetic oligonucleotide
  Antisense strand to SEQ ID NO: 1796063
uguguuaggaaauaacaca

SEQ ID NO: 1796065 - RNA, 19 nt, Artificial Sequence
  Description of Artificial Sequence: Synthetic oligonucleotide
  Sense strand starting at position 2688 of SEQ ID NO: 1563111
acacaaauguuugagcaga

SEQ ID NO: 1796066 - RNA, 19 nt, Artificial Sequence
  Description of Artificial Sequence: Synthetic oligonucleotide
  Antisense strand to SEQ ID NO: 1796065
ucugcucaaacauuugugu

SEQ ID NO: 1796067 - RNA, 19 nt, Artificial Sequence
  Description of Artificial Sequence: Synthetic oligonucleotide
  Sense strand starting at position 2711 of SEQ ID NO: 1563111
auaaacucugcaugcugaa

SEQ ID NO: 1796068 - RNA, 19 nt, Artificial Sequence
  Description of Artificial Sequence: Synthetic oligonucleotide
  Antisense strand to SEQ ID NO: 1796067
uucagcaugcagaguuuau

SEQ ID NO: 1796069 - RNA, 19 nt, Artificial Sequence
  Description of Artificial Sequence: Synthetic oligonucleotide
  Sense strand starting at position 2827 of SEQ ID NO: 1563111
gcgggagcguggaguuauc

SEQ ID NO: 1796070 - RNA, 19 nt, Artificial Sequence
  Description of Artificial Sequence: Synthetic oligonucleotide
  Antisense strand to SEQ ID NO: 1796069
gauaacuccacgcucccgc

SEQ ID NO: 1796071 - RNA, 19 nt, Artificial Sequence
  Description of Artificial Sequence: Synthetic oligonucleotide
  Sense strand starting at position 2945 of SEQ ID NO: 1563111
uucuauggugccugagcua

SEQ ID NO: 1796072 - RNA, 19 nt, Artificial Sequence
  Description of Artificial Sequence: Synthetic oligonucleotide
  Antisense strand to SEQ ID NO: 1796071
uagcucaggcaccauagaa

SEQ ID NO: 1796073 - RNA, 19 nt, Artificial Sequence
  Description of Artificial Sequence: Synthetic oligonucleotide
  Sense strand starting at position 2948 of SEQ ID NO: 1563111
uauggugccugagcuaaga

SEQ ID NO: 1796074 - RNA, 19 nt, Artificial Sequence
  Description of Artificial Sequence: Synthetic oligonucleotide
  Antisense strand to SEQ ID NO: 1796073
ucuuagcucaggcaccaua

SEQ ID NO: 1796075 - RNA, 19 nt, Artificial Sequence
  Description of Artificial Sequence: Synthetic oligonucleotide
  Sense strand starting at position 2950 of SEQ ID NO: 1563111
uggugccugagcuaagaau

SEQ ID NO: 1796076 - RNA, 19 nt, Artificial Sequence
  Description of Artificial Sequence: Synthetic oligonucleotide
  Antisense strand to SEQ ID NO: 1796075
auucuuagcucaggcacca

SEQ ID NO: 1796077 - RNA, 19 nt, Artificial Sequence
  Description of Artificial Sequence: Synthetic oligonucleotide
  Sense strand starting at position 3432 of SEQ ID NO: 1563111
ccaccauagcuauggaguu

SEQ ID NO: 1796078 - RNA, 19 nt, Artificial Sequence
  Description of Artificial Sequence: Synthetic oligonucleotide
  Antisense strand to SEQ ID NO: 1796077
aacuccauagcuauggugg

SEQ ID NO: 1796079 - RNA, 19 nt, Artificial Sequence
  Description of Artificial Sequence: Synthetic oligonucleotide
  Sense strand starting at position 3972 of SEQ ID NO: 1563111
gacggcugcccauauguca

SEQ ID NO: 1796080 - RNA, 19 nt, Artificial Sequence
  Description of Artificial Sequence: Synthetic oligonucleotide
  Antisense strand to SEQ ID NO: 1796079
ugacauaugggcagccguc

SEQ ID NO: 1796081 - RNA, 19 nt, Artificial Sequence
  Description of Artificial Sequence: Synthetic oligonucleotide
  Sense strand starting at position 3977 of SEQ ID NO: 1563111
cugcccauaugucagcaua

SEQ ID NO: 1796082 - RNA, 19 nt, Artificial Sequence
  Description of Artificial Sequence: Synthetic oligonucleotide
  Antisense strand to SEQ ID NO: 1796081
uaugcugacauaugggcag

SEQ ID NO: 1796083 - RNA, 19 nt, Artificial Sequence
  Description of Artificial Sequence: Synthetic oligonucleotide
  Sense strand starting at position 3979 of SEQ ID NO: 1563111
gcccauaugucagcauagu

SEQ ID NO: 1796084 - RNA, 19 nt, Artificial Sequence
  Description of Artificial Sequence: Synthetic oligonucleotide
  Antisense strand to SEQ ID NO: 1796083
acuaugcugacauaugggc

SEQ ID NO: 1796085 - RNA, 19 nt, Artificial Sequence
  Description of Artificial Sequence: Synthetic oligonucleotide
  Sense strand starting at position 3980 of SEQ ID NO: 1563111
cccauaugucagcauagug

SEQ ID NO: 1796086 - RNA, 19 nt, Artificial Sequence
  Description of Artificial Sequence: Synthetic oligonucleotide
  Antisense strand to SEQ ID NO: 1796085
cacuaugcugacauauggg

SEQ ID NO: 1796087 - RNA, 19 nt, Artificial Sequence
  Description of Artificial Sequence: Synthetic oligonucleotide
  Sense strand starting at position 60 of SEQ ID NO: 1563112
ccuacuaagacucgagaga

SEQ ID NO: 1796088 - RNA, 19 nt, Artificial Sequence
  Description of Artificial Sequence: Synthetic oligonucleotide
  Antisense strand to SEQ ID NO: 1796087
ucucucgagucuuaguagg

SEQ ID NO: 1796089 - RNA, 19 nt, Artificial Sequence
  Description of Artificial Sequence: Synthetic oligonucleotide
  Sense strand starting at position 308 of SEQ ID NO: 1563112
aacuguugaccagguguca

SEQ ID NO: 1796090 - RNA, 19 nt, Artificial Sequence
  Description of Artificial Sequence: Synthetic oligonucleotide
  Antisense strand to SEQ ID NO: 1796089
ugacaccuggucaacaguu

SEQ ID NO: 1796091 - RNA, 19 nt, Artificial Sequence
  Description of Artificial Sequence: Synthetic oligonucleotide
  Sense strand starting at position 395 of SEQ ID NO: 1563112
gcuguauguguguagagga

SEQ ID NO: 1796092 - RNA, 19 nt, Artificial Sequence
  Description of Artificial Sequence: Synthetic oligonucleotide
  Antisense strand to SEQ ID NO: 1796091
uccucuacacacauacagc

SEQ ID NO: 1796093 - RNA, 19 nt, Artificial Sequence
  Description of Artificial Sequence: Synthetic oligonucleotide
  Sense strand starting at position 396 of SEQ ID NO: 1563112
cuguauguguguagaggaa

SEQ ID NO: 1796094 - RNA, 19 nt, Artificial Sequence
  Description of Artificial Sequence: Synthetic oligonucleotide
  Antisense strand to SEQ ID NO: 1796093
uuccucuacacacauacag

SEQ ID NO: 1796095 - RNA, 19 nt, Artificial Sequence
  Description of Artificial Sequence: Synthetic oligonucleotide
  Sense strand starting at position 398 of SEQ ID NO: 1563112
guauguguguagaggaagu

SEQ ID NO: 1796096 - RNA, 19 nt, Artificial Sequence
  Description of Artificial Sequence: Synthetic oligonucleotide
  Antisense strand to SEQ ID NO: 1796095
acuuccucuacacacauac

SEQ ID NO: 1796097 - RNA, 19 nt, Artificial Sequence
  Description of Artificial Sequence: Synthetic oligonucleotide
  Sense strand starting at position 400 of SEQ ID NO: 1563112
auguguguagaggaaguau

SEQ ID NO: 1796098 - RNA, 19 nt, Artificial Sequence
  Description of Artificial Sequence: Synthetic oligonucleotide
  Antisense strand to SEQ ID NO: 1796097
auacuuccucuacacacau

SEQ ID NO: 1796099 - RNA, 19 nt, Artificial Sequence
  Description of Artificial Sequence: Synthetic oligonucleotide
  Sense strand starting at position 408 of SEQ ID NO: 1563112
agaggaaguauugguagua

SEQ ID NO: 1796100 - RNA, 19 nt, Artificial Sequence
  Description of Artificial Sequence: Synthetic oligonucleotide
  Antisense strand to SEQ ID NO: 1796099
uacuaccaauacuuccucu

SEQ ID NO: 1796101 - RNA, 19 nt, Artificial Sequence
  Description of Artificial Sequence: Synthetic oligonucleotide
  Sense strand starting at position 483 of SEQ ID NO: 1563112
uuaucucauuugugugaaa

SEQ ID NO: 1796102 - RNA, 19 nt, Artificial Sequence
  Description of Artificial Sequence: Synthetic oligonucleotide
  Antisense strand to SEQ ID NO: 1796101
uuucacacaaaugagauaa

SEQ ID NO: 1796103 - RNA, 19 nt, Artificial Sequence
  Description of Artificial Sequence: Synthetic oligonucleotide
  Sense strand starting at position 540 of SEQ ID NO: 1563112
acugcagaugcugaggaau

SEQ ID NO: 1796104 - RNA, 19 nt, Artificial Sequence
  Description of Artificial Sequence: Synthetic oligonucleotide
  Antisense strand to SEQ ID NO: 1796103
auuccucagcaucugcagu

SEQ ID NO: 1796105 - RNA, 19 nt, Artificial Sequence
  Description of Artificial Sequence: Synthetic oligonucleotide
  Sense strand starting at position 551 of SEQ ID NO: 1563112
ugaggaauauggcaagaag

SEQ ID NO: 1796106 - RNA, 19 nt, Artificial Sequence
  Description of Artificial Sequence: Synthetic oligonucleotide
  Antisense strand to SEQ ID NO: 1796105
cuucuugccauauuccuca

SEQ ID NO: 1796107 - RNA, 19 nt, Artificial Sequence
  Description of Artificial Sequence: Synthetic oligonucleotide
  Sense strand starting at position 737 of SEQ ID NO: 1563112
guucuaucagagugagcug

SEQ ID NO: 1796108 - RNA, 19 nt, Artificial Sequence
  Description of Artificial Sequence: Synthetic oligonucleotide
  Antisense strand to SEQ ID NO: 1796107
cagcucacucugauagaac

SEQ ID NO: 1796109 - RNA, 19 nt, Artificial Sequence
  Description of Artificial Sequence: Synthetic oligonucleotide
  Sense strand starting at position 740 of SEQ ID NO: 1563112
cuaucagagugagcuguuu

SEQ ID NO: 1796110 - RNA, 19 nt, Artificial Sequence
  Description of Artificial Sequence: Synthetic oligonucleotide
  Antisense strand to SEQ ID NO: 1796109
aaacagcucacucugauag

SEQ ID NO: 1796111 - RNA, 19 nt, Artificial Sequence
  Description of Artificial Sequence: Synthetic oligonucleotide
  Sense strand starting at position 786 of SEQ ID NO: 1563112
gacggcuuugucugugaaa

SEQ ID NO: 1796112 - RNA, 19 nt, Artificial Sequence
  Description of Artificial Sequence: Synthetic oligonucleotide
  Antisense strand to SEQ ID NO: 1796111
uuucacagacaaagccguc

SEQ ID NO: 1796113 - RNA, 19 nt, Artificial Sequence
  Description of Artificial Sequence: Synthetic oligonucleotide
  Sense strand starting at position 787 of SEQ ID NO: 1563112
acggcuuugucugugaaag

SEQ ID NO: 1796114 - RNA, 19 nt, Artificial Sequence
  Description of Artificial Sequence: Synthetic oligonucleotide
  Antisense strand to SEQ ID NO: 1796113
cuuucacagacaaagccgu

SEQ ID NO: 1796115 - RNA, 19 nt, Artificial Sequence
  Description of Artificial Sequence: Synthetic oligonucleotide
  Sense strand starting at position 788 of SEQ ID NO: 1563112
cggcuuugucugugaaagu

SEQ ID NO: 1796116 - RNA, 19 nt, Artificial Sequence
  Description of Artificial Sequence: Synthetic oligonucleotide
  Antisense strand to SEQ ID NO: 1796115
acuuucacagacaaagccg

SEQ ID NO: 1796117 - RNA, 19 nt, Artificial Sequence
  Description of Artificial Sequence: Synthetic oligonucleotide
  Sense strand starting at position 2119 of SEQ ID NO: 1563112
gaaagcucaugccuggaau

SEQ ID NO: 1796118 - RNA, 19 nt, Artificial Sequence
  Description of Artificial Sequence: Synthetic oligonucleotide
  Antisense strand to SEQ ID NO: 1796117
auuccaggcaugagcuuuc

SEQ ID NO: 1796119 - RNA, 19 nt, Artificial Sequence
  Description of Artificial Sequence: Synthetic oligonucleotide
  Sense strand starting at position 2194 of SEQ ID NO: 1563112
ucugcauuucugggcugau

SEQ ID NO: 1796120 - RNA, 19 nt, Artificial Sequence
  Description of Artificial Sequence: Synthetic oligonucleotide
  Antisense strand to SEQ ID NO: 1796119
aucagcccagaaaugcaga

SEQ ID NO: 1796121 - RNA, 19 nt, Artificial Sequence
  Description of Artificial Sequence: Synthetic oligonucleotide
  Sense strand starting at position 2195 of SEQ ID NO: 1563112
cugcauuucugggcugaug

SEQ ID NO: 1796122 - RNA, 19 nt, Artificial Sequence
  Description of Artificial Sequence: Synthetic oligonucleotide
  Antisense strand to SEQ ID NO: 1796121
caucagcccagaaaugcag

SEQ ID NO: 1796123 - RNA, 19 nt, Artificial Sequence
  Description of Artificial Sequence: Synthetic oligonucleotide
  Sense strand starting at position 2329 of SEQ ID NO: 1563112
gcccuucucauagauggga

SEQ ID NO: 1796124 - RNA, 19 nt, Artificial Sequence
  Description of Artificial Sequence: Synthetic oligonucleotide
  Antisense strand to SEQ ID NO: 1796123
ucccaucuaugagaagggc

SEQ ID NO: 1796125 - RNA, 19 nt, Artificial Sequence
  Description of Artificial Sequence: Synthetic oligonucleotide
  Sense strand starting at position 2447 of SEQ ID NO: 1563112
ccgacuuuauuggcaucau

SEQ ID NO: 1796126 - RNA, 19 nt, Artificial Sequence
  Description of Artificial Sequence: Synthetic oligonucleotide
  Antisense strand to SEQ ID NO: 1796125
augaugccaauaaagucgg

SEQ ID NO: 1796127 - RNA, 19 nt, Artificial Sequence
  Description of Artificial Sequence: Synthetic oligonucleotide
  Sense strand starting at position 2451 of SEQ ID NO: 1563112
cuuuauuggcaucaugaug

SEQ ID NO: 1796128 - RNA, 19 nt, Artificial Sequence
  Description of Artificial Sequence: Synthetic oligonucleotide
  Antisense strand to SEQ ID NO: 1796127
caucaugaugccaauaaag

SEQ ID NO: 1796129 - RNA, 19 nt, Artificial Sequence
  Description of Artificial Sequence: Synthetic oligonucleotide
  Sense strand starting at position 2496 of SEQ ID NO: 1563112
ugcggucagggagaguauu

SEQ ID NO: 1796130 - RNA, 19 nt, Artificial Sequence
  Description of Artificial Sequence: Synthetic oligonucleotide
  Antisense strand to SEQ ID NO: 1796129
aauacucucccugaccgca

SEQ ID NO: 1796131 - RNA, 19 nt, Artificial Sequence
  Description of Artificial Sequence: Synthetic oligonucleotide
  Sense strand starting at position 2504 of SEQ ID NO: 1563112
gggagaguauuugggcuca

SEQ ID NO: 1796132 - RNA, 19 nt, Artificial Sequence
  Description of Artificial Sequence: Synthetic oligonucleotide
  Antisense strand to SEQ ID NO: 1796131
ugagcccaaauacucuccc

SEQ ID NO: 1796133 - RNA, 19 nt, Artificial Sequence
  Description of Artificial Sequence: Synthetic oligonucleotide
  Sense strand starting at position 2526 of SEQ ID NO: 1563112
cagaaaucagcaugggcaa

SEQ ID NO: 1796134 - RNA, 19 nt, Artificial Sequence
  Description of Artificial Sequence: Synthetic oligonucleotide
  Antisense strand to SEQ ID NO: 1796133
uugcccaugcugauuucug

SEQ ID NO: 1796135 - RNA, 19 nt, Artificial Sequence
  Description of Artificial Sequence: Synthetic oligonucleotide
  Sense strand starting at position 2547 of SEQ ID NO: 1563112
gggaauuuaugaggaagga

SEQ ID NO: 1796136 - RNA, 19 nt, Artificial Sequence
  Description of Artificial Sequence: Synthetic oligonucleotide
  Antisense strand to SEQ ID NO: 1796135
uccuuccucauaaauuccc

SEQ ID NO: 1796137 - RNA, 19 nt, Artificial Sequence
  Description of Artificial Sequence: Synthetic oligonucleotide
  Sense strand starting at position 2599 of SEQ ID NO: 1563112
gaaacugcaucagagauga

SEQ ID NO: 1796138 - RNA, 19 nt, Artificial Sequence
  Description of Artificial Sequence: Synthetic oligonucleotide
  Antisense strand to SEQ ID NO: 1796137
ucaucucugaugcaguuuc

SEQ ID NO: 1796139 - RNA, 19 nt, Artificial Sequence
  Description of Artificial Sequence: Synthetic oligonucleotide
  Sense strand starting at position 2614 of SEQ ID NO: 1563112
augagaggauucucgcuua

SEQ ID NO: 1796140 - RNA, 19 nt, Artificial Sequence
  Description of Artificial Sequence: Synthetic oligonucleotide
  Antisense strand to SEQ ID NO: 1796139
uaagcgagaauccucucau

SEQ ID NO: 1796141 - RNA, 19 nt, Artificial Sequence
  Description of Artificial Sequence: Synthetic oligonucleotide
  Sense strand starting at position 2617 of SEQ ID NO: 1563112
agaggauucucgcuuaaac

SEQ ID NO: 1796142 - RNA, 19 nt, Artificial Sequence
  Description of Artificial Sequence: Synthetic oligonucleotide
  Antisense strand to SEQ ID NO: 1796141
guuuaagcgagaauccucu

SEQ ID NO: 1796143 - RNA, 19 nt, Artificial Sequence
  Description of Artificial Sequence: Synthetic oligonucleotide
  Sense strand starting at position 2712 of SEQ ID NO: 1563112
cugauuagauauugacaau

SEQ ID NO: 1796144 - RNA, 19 nt, Artificial Sequence
  Description of Artificial Sequence: Synthetic oligonucleotide
  Antisense strand to SEQ ID NO: 1796143
auugucaauaucuaaucag

SEQ ID NO: 1796145 - RNA, 19 nt, Artificial Sequence
  Description of Artificial Sequence: Synthetic oligonucleotide
  Sense strand starting at position 2715 of SEQ ID NO: 1563112
auuagauauugacaaucag

SEQ ID NO: 1796146 - RNA, 19 nt, Artificial Sequence
  Description of Artificial Sequence: Synthetic oligonucleotide
  Antisense strand to SEQ ID NO: 1796145
cugauugucaauaucuaau

SEQ ID NO: 1796147 - RNA, 19 nt, Artificial Sequence
  Description of Artificial Sequence: Synthetic oligonucleotide
  Sense strand starting at position 3012 of SEQ ID NO: 1563112
uccagaaauauaugugugu

SEQ ID NO: 1796148 - RNA, 19 nt, Artificial Sequence
  Description of Artificial Sequence: Synthetic oligonucleotide
  Antisense strand to SEQ ID NO: 1796147
acacacauauauuucugga

SEQ ID NO: 1796149 - RNA, 19 nt, Artificial Sequence
  Description of Artificial Sequence: Synthetic oligonucleotide
  Sense strand starting at position 3069 of SEQ ID NO: 1563112
gugugugaguucccaauac

SEQ ID NO: 1796150 - RNA, 19 nt, Artificial Sequence
  Description of Artificial Sequence: Synthetic oligonucleotide
  Antisense strand to SEQ ID NO: 1796149
guauugggaacucacacac

SEQ ID NO: 1796151 - RNA, 19 nt, Artificial Sequence
  Description of Artificial Sequence: Synthetic oligonucleotide
  Sense strand starting at position 3142 of SEQ ID NO: 1563112
ugguuauuaucacucucau

SEQ ID NO: 1796152 - RNA, 19 nt, Artificial Sequence
  Description of Artificial Sequence: Synthetic oligonucleotide
  Antisense strand to SEQ ID NO: 1796151
augagagugauaauaacca

SEQ ID NO: 1796153 - RNA, 19 nt, Artificial Sequence
  Description of Artificial Sequence: Synthetic oligonucleotide
  Sense strand starting at position 3210 of SEQ ID NO: 1563112
agugaacuagauggcaaau

SEQ ID NO: 1796154 - RNA, 19 nt, Artificial Sequence
  Description of Artificial Sequence: Synthetic oligonucleotide
  Antisense strand to SEQ ID NO: 1796153
auuugccaucuaguucacu

SEQ ID NO: 1796155 - RNA, 19 nt, Artificial Sequence
  Description of Artificial Sequence: Synthetic oligonucleotide
  Sense strand starting at position 3221 of SEQ ID NO: 1563112
uggcaaauggucuggugau

SEQ ID NO: 1796156 - RNA, 19 nt, Artificial Sequence
  Description of Artificial Sequence: Synthetic oligonucleotide
  Antisense strand to SEQ ID NO: 1796155
aucaccagaccauuugcca

SEQ ID NO: 1796157 - RNA, 19 nt, Artificial Sequence
  Description of Artificial Sequence: Synthetic oligonucleotide
  Sense strand starting at position 3250 of SEQ ID NO: 1563112
cagguugcuggugaaauaa

SEQ ID NO: 1796158 - RNA, 19 nt, Artificial Sequence
  Description of Artificial Sequence: Synthetic oligonucleotide
  Antisense strand to SEQ ID NO: 1796157
uuauuucaccagcaaccug

SEQ ID NO: 1796159 - RNA, 19 nt, Artificial Sequence
  Description of Artificial Sequence: Synthetic oligonucleotide
  Sense strand starting at position 3363 of SEQ ID NO: 1563112
aauuguuugggcugccuaa

SEQ ID NO: 1796160 - RNA, 19 nt, Artificial Sequence
  Description of Artificial Sequence: Synthetic oligonucleotide
  Antisense strand to SEQ ID NO: 1796159
uuaggcagcccaaacaauu

SEQ ID NO: 1796161 - RNA, 19 nt, Artificial Sequence
  Description of Artificial Sequence: Synthetic oligonucleotide
  Sense strand starting at position 3372 of SEQ ID NO: 1563112
ggcugccuaagaugguaaa

SEQ ID NO: 1796162 - RNA, 19 nt, Artificial Sequence
  Description of Artificial Sequence: Synthetic oligonucleotide
  Antisense strand to SEQ ID NO: 1796161
uuuaccaucuuaggcagcc

SEQ ID NO: 1796163 - RNA, 19 nt, Artificial Sequence
  Description of Artificial Sequence: Synthetic oligonucleotide
  Sense strand starting at position 3774 of SEQ ID NO: 1563112
ucgguaggcuuucugggaa

SEQ ID NO: 1796164 - RNA, 19 nt, Artificial Sequence
  Description of Artificial Sequence: Synthetic oligonucleotide
  Antisense strand to SEQ ID NO: 1796163
uucccagaaagccuaccga

SEQ ID NO: 1796165 - RNA, 19 nt, Artificial Sequence
  Description of Artificial Sequence: Synthetic oligonucleotide
  Sense strand starting at position 3872 of SEQ ID NO: 1563112
gcuucuuuacuaugagcca

SEQ ID NO: 1796166 - RNA, 19 nt, Artificial Sequence
  Description of Artificial Sequence: Synthetic oligonucleotide
  Antisense strand to SEQ ID NO: 1796165
uggcucauaguaaagaagc

SEQ ID NO: 1796167 - RNA, 19 nt, Artificial Sequence
  Description of Artificial Sequence: Synthetic oligonucleotide
  Sense strand starting at position 428 of SEQ ID NO: 1563113
acugaauugcauggacaga

SEQ ID NO: 1796168 - RNA, 19 nt, Artificial Sequence
  Description of Artificial Sequence: Synthetic oligonucleotide
  Antisense strand to SEQ ID NO: 1796167
ucuguccaugcaauucagu

SEQ ID NO: 1796169 - RNA, 19 nt, Artificial Sequence
  Description of Artificial Sequence: Synthetic oligonucleotide
  Sense strand starting at position 744 of SEQ ID NO: 1563113
cccgauucagccuugcgau

SEQ ID NO: 1796170 - RNA, 19 nt, Artificial Sequence
  Description of Artificial Sequence: Synthetic oligonucleotide
  Antisense strand to SEQ ID NO: 1796169
aucgcaaggcugaaucggg

SEQ ID NO: 1796171 - RNA, 19 nt, Artificial Sequence
  Description of Artificial Sequence: Synthetic oligonucleotide
  Sense strand starting at position 745 of SEQ ID NO: 1563113
ccgauucagccuugcgaug

SEQ ID NO: 1796172 - RNA, 19 nt, Artificial Sequence
  Description of Artificial Sequence: Synthetic oligonucleotide
  Antisense strand to SEQ ID NO: 1796171
caucgcaaggcugaaucgg

SEQ ID NO: 1796173 - RNA, 19 nt, Artificial Sequence
  Description of Artificial Sequence: Synthetic oligonucleotide
  Sense strand starting at position 932 of SEQ ID NO: 1563113
gguugaagaucugugcaac

SEQ ID NO: 1796174 - RNA, 19 nt, Artificial Sequence
  Description of Artificial Sequence: Synthetic oligonucleotide
  Antisense strand to SEQ ID NO: 1796173
guugcacagaucuucaacc

SEQ ID NO: 1796175 - RNA, 19 nt, Artificial Sequence
  Description of Artificial Sequence: Synthetic oligonucleotide
  Sense strand starting at position 935 of SEQ ID NO: 1563113
ugaagaucugugcaaccga

SEQ ID NO: 1796176 - RNA, 19 nt, Artificial Sequence
  Description of Artificial Sequence: Synthetic oligonucleotide
  Antisense strand to SEQ ID NO: 1796175
ucgguugcacagaucuuca

SEQ ID NO: 1796177 - RNA, 19 nt, Artificial Sequence
  Description of Artificial Sequence: Synthetic oligonucleotide
  Sense strand starting at position 971 of SEQ ID NO: 1563113
ccuccuugugccugaagga

SEQ ID NO: 1796178 - RNA, 19 nt, Artificial Sequence
  Description of Artificial Sequence: Synthetic oligonucleotide
  Antisense strand to SEQ ID NO: 1796177
uccuucaggcacaaggagg

SEQ ID NO: 1796179 - RNA, 19 nt, Artificial Sequence
  Description of Artificial Sequence: Synthetic oligonucleotide
  Sense strand starting at position 1056 of SEQ ID NO: 1563113
cagccuguaucuuggguga

SEQ ID NO: 1796180 - RNA, 19 nt, Artificial Sequence
  Description of Artificial Sequence: Synthetic oligonucleotide
  Antisense strand to SEQ ID NO: 1796179
ucacccaagauacaggcug

SEQ ID NO: 1796181 - RNA, 19 nt, Artificial Sequence
  Description of Artificial Sequence: Synthetic oligonucleotide
  Sense strand starting at position 1058 of SEQ ID NO: 1563113
gccuguaucuugggugaag

SEQ ID NO: 1796182 - RNA, 19 nt, Artificial Sequence
  Description of Artificial Sequence: Synthetic oligonucleotide
  Antisense strand to SEQ ID NO: 1796181
cuucacccaagauacaggc

SEQ ID NO: 1796183 - RNA, 19 nt, Artificial Sequence
  Description of Artificial Sequence: Synthetic oligonucleotide
  Sense strand starting at position 1059 of SEQ ID NO: 1563113
ccuguaucuugggugaaga

SEQ ID NO: 1796184 - RNA, 19 nt, Artificial Sequence
  Description of Artificial Sequence: Synthetic oligonucleotide
  Antisense strand to SEQ ID NO: 1796183
ucuucacccaagauacagg

SEQ ID NO: 1796185 - RNA, 19 nt, Artificial Sequence
  Description of Artificial Sequence: Synthetic oligonucleotide
  Sense strand starting at position 1060 of SEQ ID NO: 1563113
cuguaucuugggugaagaa

SEQ ID NO: 1796186 - RNA, 19 nt, Artificial Sequence
  Description of Artificial Sequence: Synthetic oligonucleotide
  Antisense strand to SEQ ID NO: 1796185
uucuucacccaagauacag

SEQ ID NO: 1796187 - RNA, 19 nt, Artificial Sequence
  Description of Artificial Sequence: Synthetic oligonucleotide
  Sense strand starting at position 1242 of SEQ ID NO: 1563113
gggucuuccugagaaggag

SEQ ID NO: 1796188 - RNA, 19 nt, Artificial Sequence
  Description of Artificial Sequence: Synthetic oligonucleotide
  Antisense strand to SEQ ID NO: 1796187
cuccuucucaggaagaccc

SEQ ID NO: 1796189 - RNA, 19 nt, Artificial Sequence
  Description of Artificial Sequence: Synthetic oligonucleotide
  Sense strand starting at position 1404 of SEQ ID NO: 1563113
agagaagacucaugguugu

SEQ ID NO: 1796190 - RNA, 19 nt, Artificial Sequence
  Description of Artificial Sequence: Synthetic oligonucleotide
  Antisense strand to SEQ ID NO: 1796189
acaaccaugagucuucucu

SEQ ID NO: 1796191 - RNA, 19 nt, Artificial Sequence
  Description of Artificial Sequence: Synthetic oligonucleotide
  Sense strand starting at position 2778 of SEQ ID NO: 1563113
gcgggagacccucagucaa

SEQ ID NO: 1796192 - RNA, 19 nt, Artificial Sequence
  Description of Artificial Sequence: Synthetic oligonucleotide
  Antisense strand to SEQ ID NO: 1796191
uugacugagggucucccgc

SEQ ID NO: 1796193 - RNA, 19 nt, Artificial Sequence
  Description of Artificial Sequence: Synthetic oligonucleotide
  Sense strand starting at position 2818 of SEQ ID NO: 1563113
gggucauuguccucggcca

SEQ ID NO: 1796194 - RNA, 19 nt, Artificial Sequence
  Description of Artificial Sequence: Synthetic oligonucleotide
  Antisense strand to SEQ ID NO: 1796193
uggccgaggacaaugaccc

SEQ ID NO: 1796195 - RNA, 19 nt, Artificial Sequence
  Description of Artificial Sequence: Synthetic oligonucleotide
  Sense strand starting at position 2940 of SEQ ID NO: 1563113
agugucugcuccucugcaa

SEQ ID NO: 1796196 - RNA, 19 nt, Artificial Sequence
  Description of Artificial Sequence: Synthetic oligonucleotide
  Antisense strand to SEQ ID NO: 1796195
uugcagaggagcagacacu

SEQ ID NO: 1796197 - RNA, 19 nt, Artificial Sequence
  Description of Artificial Sequence: Synthetic oligonucleotide
  Sense strand starting at position 3069 of SEQ ID NO: 1563113
caggguuguggcuauugga

SEQ ID NO: 1796198 - RNA, 19 nt, Artificial Sequence
  Description of Artificial Sequence: Synthetic oligonucleotide
  Antisense strand to SEQ ID NO: 1796197
uccaauagccacaacccug

SEQ ID NO: 1796199 - RNA, 19 nt, Artificial Sequence
  Description of Artificial Sequence: Synthetic oligonucleotide
  Sense strand starting at position 3147 of SEQ ID NO: 1563113
cagaaauggugaugggcuu

SEQ ID NO: 1796200 - RNA, 19 nt, Artificial Sequence
  Description of Artificial Sequence: Synthetic oligonucleotide
  Antisense strand to SEQ ID NO: 1796199
aagcccaucaccauuucug

SEQ ID NO: 1796201 - RNA, 19 nt, Artificial Sequence
  Description of Artificial Sequence: Synthetic oligonucleotide
  Sense strand starting at position 3183 of SEQ ID NO: 1563113
gugguaagcucuguucuca

SEQ ID NO: 1796202 - RNA, 19 nt, Artificial Sequence
  Description of Artificial Sequence: Synthetic oligonucleotide
  Antisense strand to SEQ ID NO: 1796201
ugagaacagagcuuaccac

SEQ ID NO: 1796203 - RNA, 19 nt, Artificial Sequence
  Description of Artificial Sequence: Synthetic oligonucleotide
  Sense strand starting at position 3282 of SEQ ID NO: 1563113
gcacaauggugagccuaga

SEQ ID NO: 1796204 - RNA, 19 nt, Artificial Sequence
  Description of Artificial Sequence: Synthetic oligonucleotide
  Antisense strand to SEQ ID NO: 1796203
ucuaggcucaccauugugc

SEQ ID NO: 1796205 - RNA, 19 nt, Artificial Sequence
  Description of Artificial Sequence: Synthetic oligonucleotide
  Sense strand starting at position 3534 of SEQ ID NO: 1563113
ccagcugaacccuggagua

SEQ ID NO: 1796206 - RNA, 19 nt, Artificial Sequence
  Description of Artificial Sequence: Synthetic oligonucleotide
  Antisense strand to SEQ ID NO: 1796205
uacuccaggguucagcugg

SEQ ID NO: 1796207 - RNA, 19 nt, Artificial Sequence
  Description of Artificial Sequence: Synthetic oligonucleotide
  Sense strand starting at position 3589 of SEQ ID NO: 1563113
aggccuacuuggugagauc

SEQ ID NO: 1796208 - RNA, 19 nt, Artificial Sequence
  Description of Artificial Sequence: Synthetic oligonucleotide
  Antisense strand to SEQ ID NO: 1796207
gaucucaccaaguaggccu

SEQ ID NO: 1796209 - RNA, 19 nt, Artificial Sequence
  Description of Artificial Sequence: Synthetic oligonucleotide
  Sense strand starting at position 3796 of SEQ ID NO: 1563113
gagauagggucucucacua

SEQ ID NO: 1796210 - RNA, 19 nt, Artificial Sequence
  Description of Artificial Sequence: Synthetic oligonucleotide
  Antisense strand to SEQ ID NO: 1796209
uagugagagacccuaucuc

SEQ ID NO: 1796211 - RNA, 19 nt, Artificial Sequence
  Description of Artificial Sequence: Synthetic oligonucleotide
  Sense strand starting at position 3884 of SEQ ID NO: 1563113
ggugacaggugucaaccau

SEQ ID NO: 1796212 - RNA, 19 nt, Artificial Sequence
  Description of Artificial Sequence: Synthetic oligonucleotide
  Antisense strand to SEQ ID NO: 1796211
augguugacaccugucacc

SEQ ID NO: 1796213 - RNA, 19 nt, Artificial Sequence
  Description of Artificial Sequence: Synthetic oligonucleotide
  Sense strand starting at position 3891 of SEQ ID NO: 1563113
ggugucaaccauugcaucu

SEQ ID NO: 1796214 - RNA, 19 nt, Artificial Sequence
  Description of Artificial Sequence: Synthetic oligonucleotide
  Antisense strand to SEQ ID NO: 1796213
agaugcaaugguugacacc

SEQ ID NO: 1796215 - RNA, 19 nt, Artificial Sequence
  Description of Artificial Sequence: Synthetic oligonucleotide
  Sense strand starting at position 24 of SEQ ID NO: 1563114
acagauccauguccucauu

SEQ ID NO: 1796216 - RNA, 19 nt, Artificial Sequence
  Description of Artificial Sequence: Synthetic oligonucleotide
  Antisense strand to SEQ ID NO: 1796215
aaugaggacauggaucugu

SEQ ID NO: 1796217 - RNA, 19 nt, Artificial Sequence
  Description of Artificial Sequence: Synthetic oligonucleotide
  Sense strand starting at position 34 of SEQ ID NO: 1563114
guccucauuugccucuaga

SEQ ID NO: 1796218 - RNA, 19 nt, Artificial Sequence
  Description of Artificial Sequence: Synthetic oligonucleotide
  Antisense strand to SEQ ID NO: 1796217
ucuagaggcaaaugaggac

SEQ ID NO: 1796219 - RNA, 19 nt, Artificial Sequence
  Description of Artificial Sequence: Synthetic oligonucleotide
  Sense strand starting at position 302 of SEQ ID NO: 1563114
guuggcauccgcuuguaau

SEQ ID NO: 1796220 - RNA, 19 nt, Artificial Sequence
  Description of Artificial Sequence: Synthetic oligonucleotide
  Antisense strand to SEQ ID NO: 1796219
auuacaagcggaugccaac

SEQ ID NO: 1796221 - RNA, 19 nt, Artificial Sequence
  Description of Artificial Sequence: Synthetic oligonucleotide
  Sense strand starting at position 966 of SEQ ID NO: 1563114
ccaggaugaugacauuaaa

SEQ ID NO: 1796222 - RNA, 19 nt, Artificial Sequence
  Description of Artificial Sequence: Synthetic oligonucleotide
  Antisense strand to SEQ ID NO: 1796221
uuuaaugucaucauccugg

SEQ ID NO: 1796223 - RNA, 19 nt, Artificial Sequence
  Description of Artificial Sequence: Synthetic oligonucleotide
  Sense strand starting at position 1000 of SEQ ID NO: 1563114
ugucgcauuucuccugaaa

SEQ ID NO: 1796224 - RNA, 19 nt, Artificial Sequence
  Description of Artificial Sequence: Synthetic oligonucleotide
  Antisense strand to SEQ ID NO: 1796223
uuucaggagaaaugcgaca

SEQ ID NO: 1796225 - RNA, 19 nt, Artificial Sequence
  Description of Artificial Sequence: Synthetic oligonucleotide
  Sense strand starting at position 1054 of SEQ ID NO: 1563114
acaagacuccuuggccaga

SEQ ID NO: 1796226 - RNA, 19 nt, Artificial Sequence
  Description of Artificial Sequence: Synthetic oligonucleotide
  Antisense strand to SEQ ID NO: 1796225
ucuggccaaggagucuugu

SEQ ID NO: 1796227 - RNA, 19 nt, Artificial Sequence
  Description of Artificial Sequence: Synthetic oligonucleotide
  Sense strand starting at position 1388 of SEQ ID NO: 1563114
gugcaaugucaccaccacu

SEQ ID NO: 1796228 - RNA, 19 nt, Artificial Sequence
  Description of Artificial Sequence: Synthetic oligonucleotide
  Antisense strand to SEQ ID NO: 1796227
agugguggugacauugcac

SEQ ID NO: 1796229 - RNA, 19 nt, Artificial Sequence
  Description of Artificial Sequence: Synthetic oligonucleotide
  Sense strand starting at position 1469 of SEQ ID NO: 1563114
cguagauugagcgcucugu

SEQ ID NO: 1796230 - RNA, 19 nt, Artificial Sequence
  Description of Artificial Sequence: Synthetic oligonucleotide
  Antisense strand to SEQ ID NO: 1796229
acagagcgcucaaucuacg

SEQ ID NO: 1796231 - RNA, 19 nt, Artificial Sequence
  Description of Artificial Sequence: Synthetic oligonucleotide
  Sense strand starting at position 1695 of SEQ ID NO: 1563114
gcccuuaauccagggugaa

SEQ ID NO: 1796232 - RNA, 19 nt, Artificial Sequence
  Description of Artificial Sequence: Synthetic oligonucleotide
  Antisense strand to SEQ ID NO: 1796231
uucacccuggauuaagggc

SEQ ID NO: 1796233 - RNA, 19 nt, Artificial Sequence
  Description of Artificial Sequence: Synthetic oligonucleotide
  Sense strand starting at position 1696 of SEQ ID NO: 1563114
cccuuaauccagggugaag

SEQ ID NO: 1796234 - RNA, 19 nt, Artificial Sequence
  Description of Artificial Sequence: Synthetic oligonucleotide
  Antisense strand to SEQ ID NO: 1796233
cuucacccuggauuaaggg

SEQ ID NO: 1796235 - RNA, 19 nt, Artificial Sequence
  Description of Artificial Sequence: Synthetic oligonucleotide
  Sense strand starting at position 1909 of SEQ ID NO: 1563114
agucuuccagugcggagaa

SEQ ID NO: 1796236 - RNA, 19 nt, Artificial Sequence
  Description of Artificial Sequence: Synthetic oligonucleotide
  Antisense strand to SEQ ID NO: 1796235
uucuccgcacuggaagacu

SEQ ID NO: 1796237 - RNA, 19 nt, Artificial Sequence
  Description of Artificial Sequence: Synthetic oligonucleotide
  Sense strand starting at position 2073 of SEQ ID NO: 1563114
cccagagagcuuugggaau

SEQ ID NO: 1796238 - RNA, 19 nt, Artificial Sequence
  Description of Artificial Sequence: Synthetic oligonucleotide
  Antisense strand to SEQ ID NO: 1796237
auucccaaagcucucuggg

SEQ ID NO: 1796239 - RNA, 19 nt, Artificial Sequence
  Description of Artificial Sequence: Synthetic oligonucleotide
  Sense strand starting at position 2225 of SEQ ID NO: 1563114
cugggcuguccugauauga

SEQ ID NO: 1796240 - RNA, 19 nt, Artificial Sequence
  Description of Artificial Sequence: Synthetic oligonucleotide
  Antisense strand to SEQ ID NO: 1796239
ucauaucaggacagcccag

SEQ ID NO: 1796241 - RNA, 19 nt, Artificial Sequence
  Description of Artificial Sequence: Synthetic oligonucleotide
  Sense strand starting at position 2275 of SEQ ID NO: 1563114
uaggaauaccucugugguu

SEQ ID NO: 1796242 - RNA, 19 nt, Artificial Sequence
  Description of Artificial Sequence: Synthetic oligonucleotide
  Antisense strand to SEQ ID NO: 1796241
aaccacagagguauuccua

SEQ ID NO: 1796243 - RNA, 19 nt, Artificial Sequence
  Description of Artificial Sequence: Synthetic oligonucleotide
  Sense strand starting at position 2743 of SEQ ID NO: 1563114
aagcgagguuaauauauuu

SEQ ID NO: 1796244 - RNA, 19 nt, Artificial Sequence
  Description of Artificial Sequence: Synthetic oligonucleotide
  Antisense strand to SEQ ID NO: 1796243
aaauauauuaaccucgcuu

SEQ ID NO: 1796245 - RNA, 19 nt, Artificial Sequence
  Description of Artificial Sequence: Synthetic oligonucleotide
  Sense strand starting at position 3027 of SEQ ID NO: 1563114
cacguagacaguugguauu

SEQ ID NO: 1796246 - RNA, 19 nt, Artificial Sequence
  Description of Artificial Sequence: Synthetic oligonucleotide
  Antisense strand to SEQ ID NO: 1796245
aauaccaacugucuacgug

SEQ ID NO: 1796247 - RNA, 19 nt, Artificial Sequence
  Description of Artificial Sequence: Synthetic oligonucleotide
  Sense strand starting at position 3029 of SEQ ID NO: 1563114
cguagacaguugguauuaa

SEQ ID NO: 1796248 - RNA, 19 nt, Artificial Sequence
  Description of Artificial Sequence: Synthetic oligonucleotide
  Antisense strand to SEQ ID NO: 1796247
uuaauaccaacugucuacg

SEQ ID NO: 1796249 - RNA, 19 nt, Artificial Sequence
  Description of Artificial Sequence: Synthetic oligonucleotide
  Sense strand starting at position 3039 of SEQ ID NO: 1563114
ugguauuaaugguugagag

SEQ ID NO: 1796250 - RNA, 19 nt, Artificial Sequence
  Description of Artificial Sequence: Synthetic oligonucleotide
  Antisense strand to SEQ ID NO: 1796249
cucucaaccauuaauacca

SEQ ID NO: 1796251 - RNA, 19 nt, Artificial Sequence
  Description of Artificial Sequence: Synthetic oligonucleotide
  Sense strand starting at position 3040 of SEQ ID NO: 1563114
gguauuaaugguugagagu

SEQ ID NO: 1796252 - RNA, 19 nt, Artificial Sequence
  Description of Artificial Sequence: Synthetic oligonucleotide
  Antisense strand to SEQ ID NO: 1796251
acucucaaccauuaauacc

SEQ ID NO: 1796253 - RNA, 19 nt, Artificial Sequence
  Description of Artificial Sequence: Synthetic oligonucleotide
  Sense strand starting at position 3041 of SEQ ID NO: 1563114
guauuaaugguugagagug

SEQ ID NO: 1796254 - RNA, 19 nt, Artificial Sequence
  Description of Artificial Sequence: Synthetic oligonucleotide
  Antisense strand to SEQ ID NO: 1796253
cacucucaaccauuaauac

SEQ ID NO: 1796255 - RNA, 19 nt, Artificial Sequence
  Description of Artificial Sequence: Synthetic oligonucleotide
  Sense strand starting at position 3071 of SEQ ID NO: 1563114
aucagaaagccuuggauag

SEQ ID NO: 1796256 - RNA, 19 nt, Artificial Sequence
  Description of Artificial Sequence: Synthetic oligonucleotide
  Antisense strand to SEQ ID NO: 1796255
cuauccaaggcuuucugau

SEQ ID NO: 1796257 - RNA, 19 nt, Artificial Sequence
  Description of Artificial Sequence: Synthetic oligonucleotide
  Sense strand starting at position 3096 of SEQ ID NO: 1563114
ugguccuugucacuuaacu

SEQ ID NO: 1796258 - RNA, 19 nt, Artificial Sequence
  Description of Artificial Sequence: Synthetic oligonucleotide
  Antisense strand to SEQ ID NO: 1796257
aguuaagugacaaggacca

SEQ ID NO: 1796259 - RNA, 19 nt, Artificial Sequence
  Description of Artificial Sequence: Synthetic oligonucleotide
  Sense strand starting at position 3104 of SEQ ID NO: 1563114
gucacuuaacuguggcauu

SEQ ID NO: 1796260 - RNA, 19 nt, Artificial Sequence
  Description of Artificial Sequence: Synthetic oligonucleotide
  Antisense strand to SEQ ID NO: 1796259
aaugccacaguuaagugac

SEQ ID NO: 1796261 - RNA, 19 nt, Artificial Sequence
  Description of Artificial Sequence: Synthetic oligonucleotide
  Sense strand starting at position 3115 of SEQ ID NO: 1563114
guggcauuaaguugagcaa

SEQ ID NO: 1796262 - RNA, 19 nt, Artificial Sequence
  Description of Artificial Sequence: Synthetic oligonucleotide
  Antisense strand to SEQ ID NO: 1796261
uugcucaacuuaaugccac

SEQ ID NO: 1796263 - RNA, 19 nt, Artificial Sequence
  Description of Artificial Sequence: Synthetic oligonucleotide
  Sense strand starting at position 3118 of SEQ ID NO: 1563114
gcauuaaguugagcaaguu

SEQ ID NO: 1796264 - RNA, 19 nt, Artificial Sequence
  Description of Artificial Sequence: Synthetic oligonucleotide
  Antisense strand to SEQ ID NO: 1796263
aacuugcucaacuuaaugc

SEQ ID NO: 1796265 - RNA, 19 nt, Artificial Sequence
  Description of Artificial Sequence: Synthetic oligonucleotide
  Sense strand starting at position 3119 of SEQ ID NO: 1563114
cauuaaguugagcaaguuu

SEQ ID NO: 1796266 - RNA, 19 nt, Artificial Sequence
  Description of Artificial Sequence: Synthetic oligonucleotide
  Antisense strand to SEQ ID NO: 1796265
aaacuugcucaacuuaaug

SEQ ID NO: 1796267 - RNA, 19 nt, Artificial Sequence
  Description of Artificial Sequence: Synthetic oligonucleotide
  Sense strand starting at position 3128 of SEQ ID NO: 1563114
gagcaaguuucuucucuga

SEQ ID NO: 1796268 - RNA, 19 nt, Artificial Sequence
  Description of Artificial Sequence: Synthetic oligonucleotide
  Antisense strand to SEQ ID NO: 1796267
ucagagaagaaacuugcuc

SEQ ID NO: 1796269 - RNA, 19 nt, Artificial Sequence
  Description of Artificial Sequence: Synthetic oligonucleotide
  Sense strand starting at position 3130 of SEQ ID NO: 1563114
gcaaguuucuucucugaac

SEQ ID NO: 1796270 - RNA, 19 nt, Artificial Sequence
  Description of Artificial Sequence: Synthetic oligonucleotide
  Antisense strand to SEQ ID NO: 1796269
guucagagaagaaacuugc

SEQ ID NO: 1796271 - RNA, 19 nt, Artificial Sequence
  Description of Artificial Sequence: Synthetic oligonucleotide
  Sense strand starting at position 3167 of SEQ ID NO: 1563114
uggagauauuaauaguaac

SEQ ID NO: 1796272 - RNA, 19 nt, Artificial Sequence
  Description of Artificial Sequence: Synthetic oligonucleotide
  Antisense strand to SEQ ID NO: 1796271
guuacuauuaauaucucca

SEQ ID NO: 1796273 - RNA, 19 nt, Artificial Sequence
  Description of Artificial Sequence: Synthetic oligonucleotide
  Sense strand starting at position 3179 of SEQ ID NO: 1563114
uaguaaccugagcacgauu

SEQ ID NO: 1796274 - RNA, 19 nt, Artificial Sequence
  Description of Artificial Sequence: Synthetic oligonucleotide
  Antisense strand to SEQ ID NO: 1796273
aaucgugcucagguuacua

SEQ ID NO: 1796275 - RNA, 19 nt, Artificial Sequence
  Description of Artificial Sequence: Synthetic oligonucleotide
  Sense strand starting at position 3268 of SEQ ID NO: 1563114
gcuuacauuccucaggaga

SEQ ID NO: 1796276 - RNA, 19 nt, Artificial Sequence
  Description of Artificial Sequence: Synthetic oligonucleotide
  Antisense strand to SEQ ID NO: 1796275
ucuccugaggaauguaagc

SEQ ID NO: 1796277 - RNA, 19 nt, Artificial Sequence
  Description of Artificial Sequence: Synthetic oligonucleotide
  Sense strand starting at position 3351 of SEQ ID NO: 1563114
ggugcagugcaugcuuuau

SEQ ID NO: 1796278 - RNA, 19 nt, Artificial Sequence
  Description of Artificial Sequence: Synthetic oligonucleotide
  Antisense strand to SEQ ID NO: 1796277
auaaagcaugcacugcacc

SEQ ID NO: 1796279 - RNA, 19 nt, Artificial Sequence
  Description of Artificial Sequence: Synthetic oligonucleotide
  Sense strand starting at position 3363 of SEQ ID NO: 1563114
gcuuuauaucgcuaaauua

SEQ ID NO: 1796280 - RNA, 19 nt, Artificial Sequence
  Description of Artificial Sequence: Synthetic oligonucleotide
  Antisense strand to SEQ ID NO: 1796279
uaauuuagcgauauaaagc

SEQ ID NO: 1796281 - RNA, 19 nt, Artificial Sequence
  Description of Artificial Sequence: Synthetic oligonucleotide
  Sense strand starting at position 3376 of SEQ ID NO: 1563114
aaauuaugacugugcugga

SEQ ID NO: 1796282 - RNA, 19 nt, Artificial Sequence
  Description of Artificial Sequence: Synthetic oligonucleotide
  Antisense strand to SEQ ID NO: 1796281
uccagcacagucauaauuu

SEQ ID NO: 1796283 - RNA, 19 nt, Artificial Sequence
  Description of Artificial Sequence: Synthetic oligonucleotide
  Sense strand starting at position 3391 of SEQ ID NO: 1563114
uggaguaggccuuauacau

SEQ ID NO: 1796284 - RNA, 19 nt, Artificial Sequence
  Description of Artificial Sequence: Synthetic oligonucleotide
  Antisense strand to SEQ ID NO: 1796283
auguauaaggccuacucca

SEQ ID NO: 1796285 - RNA, 19 nt, Artificial Sequence
  Description of Artificial Sequence: Synthetic oligonucleotide
  Sense strand starting at position 3488 of SEQ ID NO: 1563114
agugcuaugcugccuguga

SEQ ID NO: 1796286 - RNA, 19 nt, Artificial Sequence
  Description of Artificial Sequence: Synthetic oligonucleotide
  Antisense strand to SEQ ID NO: 1796285
ucacaggcagcauagcacu

SEQ ID NO: 1796287 - RNA, 19 nt, Artificial Sequence
  Description of Artificial Sequence: Synthetic oligonucleotide
  Sense strand starting at position 3578 of SEQ ID NO: 1563114
cucccauugaucuggagag

SEQ ID NO: 1796288 - RNA, 19 nt, Artificial Sequence
  Description of Artificial Sequence: Synthetic oligonucleotide
  Antisense strand to SEQ ID NO: 1796287
cucuccagaucaaugggag

SEQ ID NO: 1796289 - RNA, 19 nt, Artificial Sequence
  Description of Artificial Sequence: Synthetic oligonucleotide
  Sense strand starting at position 3601 of SEQ ID NO: 1563114
ccaaguauguuguuauaac

SEQ ID NO: 1796290 - RNA, 19 nt, Artificial Sequence
  Description of Artificial Sequence: Synthetic oligonucleotide
  Antisense strand to SEQ ID NO: 1796289
guuauaacaacauacuugg

SEQ ID NO: 1796291 - RNA, 19 nt, Artificial Sequence
  Description of Artificial Sequence: Synthetic oligonucleotide
  Sense strand starting at position 3952 of SEQ ID NO: 1563114
ugcuucugggaaugagaau

SEQ ID NO: 1796292 - RNA, 19 nt, Artificial Sequence
  Description of Artificial Sequence: Synthetic oligonucleotide
  Antisense strand to SEQ ID NO: 1796291
auucucauucccagaagca

SEQ ID NO: 1796293 - RNA, 19 nt, Artificial Sequence
  Description of Artificial Sequence: Synthetic oligonucleotide
  Sense strand starting at position 3977 of SEQ ID NO: 1563114
caauuuaggucccaggaaa

SEQ ID NO: 1796294 - RNA, 19 nt, Artificial Sequence
  Description of Artificial Sequence: Synthetic oligonucleotide
  Antisense strand to SEQ ID NO: 1796293
uuuccugggaccuaaauug

SEQ ID NO: 1796295 - RNA, 19 nt, Artificial Sequence
  Description of Artificial Sequence: Synthetic oligonucleotide
  Sense strand starting at position 14 of SEQ ID NO: 1563115
uuuguaguucucuaaugga

SEQ ID NO: 1796296 - RNA, 19 nt, Artificial Sequence
  Description of Artificial Sequence: Synthetic oligonucleotide
  Antisense strand to SEQ ID NO: 1796295
uccauuagagaacuacaaa

SEQ ID NO: 1796297 - RNA, 19 nt, Artificial Sequence
  Description of Artificial Sequence: Synthetic oligonucleotide
  Sense strand starting at position 48 of SEQ ID NO: 1563115
ggcaaacaaugguuuaaga

SEQ ID NO: 1796298 - RNA, 19 nt, Artificial Sequence
  Description of Artificial Sequence: Synthetic oligonucleotide
  Antisense strand to SEQ ID NO: 1796297
ucuuaaaccauuguuugcc

SEQ ID NO: 1796299 - RNA, 19 nt, Artificial Sequence
  Description of Artificial Sequence: Synthetic oligonucleotide
  Sense strand starting at position 580 of SEQ ID NO: 1563115
uaaaguguuguggaacaca

SEQ ID NO: 1796300 - RNA, 19 nt, Artificial Sequence
  Description of Artificial Sequence: Synthetic oligonucleotide
  Antisense strand to SEQ ID NO: 1796299
uguguuccacaacacuuua

SEQ ID NO: 1796301 - RNA, 19 nt, Artificial Sequence
  Description of Artificial Sequence: Synthetic oligonucleotide
  Sense strand starting at position 651 of SEQ ID NO: 1563115
gacacaguugaguacagua

SEQ ID NO: 1796302 - RNA, 19 nt, Artificial Sequence
  Description of Artificial Sequence: Synthetic oligonucleotide
  Antisense strand to SEQ ID NO: 1796301
uacuguacucaacuguguc

SEQ ID NO: 1796303 - RNA, 19 nt, Artificial Sequence
  Description of Artificial Sequence: Synthetic oligonucleotide
  Sense strand starting at position 772 of SEQ ID NO: 1563115
guacauaccuaugaucaag

SEQ ID NO: 1796304 - RNA, 19 nt, Artificial Sequence
  Description of Artificial Sequence: Synthetic oligonucleotide
  Antisense strand to SEQ ID NO: 1796303
cuugaucauagguauguac

SEQ ID NO: 1796305 - RNA, 19 nt, Artificial Sequence
  Description of Artificial Sequence: Synthetic oligonucleotide
  Sense strand starting at position 809 of SEQ ID NO: 1563115
acaguaagagguuaagcau

SEQ ID NO: 1796306 - RNA, 19 nt, Artificial Sequence
  Description of Artificial Sequence: Synthetic oligonucleotide
  Antisense strand to SEQ ID NO: 1796305
augcuuaaccucuuacugu

SEQ ID NO: 1796307 - RNA, 19 nt, Artificial Sequence
  Description of Artificial Sequence: Synthetic oligonucleotide
  Sense strand starting at position 1175 of SEQ ID NO: 1563115
aauuaaagguaugugaaug

SEQ ID NO: 1796308 - RNA, 19 nt, Artificial Sequence
  Description of Artificial Sequence: Synthetic oligonucleotide
  Antisense strand to SEQ ID NO: 1796307
cauucacauaccuuuaauu

SEQ ID NO: 1796309 - RNA, 19 nt, Artificial Sequence
  Description of Artificial Sequence: Synthetic oligonucleotide
  Sense strand starting at position 1180 of SEQ ID NO: 1563115
aagguaugugaaugcaauc

SEQ ID NO: 1796310 - RNA, 19 nt, Artificial Sequence
  Description of Artificial Sequence: Synthetic oligonucleotide
  Antisense strand to SEQ ID NO: 1796309
gauugcauucacauaccuu

SEQ ID NO: 1796311 - RNA, 19 nt, Artificial Sequence
  Description of Artificial Sequence: Synthetic oligonucleotide
  Sense strand starting at position 1192 of SEQ ID NO: 1563115
ugcaaucucucgcugacaa

SEQ ID NO: 1796312 - RNA, 19 nt, Artificial Sequence
  Description of Artificial Sequence: Synthetic oligonucleotide
  Antisense strand to SEQ ID NO: 1796311
uugucagcgagagauugca

SEQ ID NO: 1796313 - RNA, 19 nt, Artificial Sequence
  Description of Artificial Sequence: Synthetic oligonucleotide
  Sense strand starting at position 1193 of SEQ ID NO: 1563115
gcaaucucucgcugacaaa

SEQ ID NO: 1796314 - RNA, 19 nt, Artificial Sequence
  Description of Artificial Sequence: Synthetic oligonucleotide
  Antisense strand to SEQ ID NO: 1796313
uuugucagcgagagauugc

SEQ ID NO: 1796315 - RNA, 19 nt, Artificial Sequence
  Description of Artificial Sequence: Synthetic oligonucleotide
  Sense strand starting at position 1216 of SEQ ID NO: 1563115
cuuuauguacuguagaucu

SEQ ID NO: 1796316 - RNA, 19 nt, Artificial Sequence
  Description of Artificial Sequence: Synthetic oligonucleotide
  Antisense strand to SEQ ID NO: 1796315
agaucuacaguacauaaag

SEQ ID NO: 1796317 - RNA, 19 nt, Artificial Sequence
  Description of Artificial Sequence: Synthetic oligonucleotide
  Sense strand starting at position 1237 of SEQ ID NO: 1563115
gcaaccuuagcauacgauu

SEQ ID NO: 1796318 - RNA, 19 nt, Artificial Sequence
  Description of Artificial Sequence: Synthetic oligonucleotide
  Antisense strand to SEQ ID NO: 1796317
aaucguaugcuaagguugc

SEQ ID NO: 1796319 - RNA, 19 nt, Artificial Sequence
  Description of Artificial Sequence: Synthetic oligonucleotide
  Sense strand starting at position 1335 of SEQ ID NO: 1563115
auauuugaaucgccagcau

SEQ ID NO: 1796320 - RNA, 19 nt, Artificial Sequence
  Description of Artificial Sequence: Synthetic oligonucleotide
  Antisense strand to SEQ ID NO: 1796319
augcuggcgauucaaauau

SEQ ID NO: 1796321 - RNA, 19 nt, Artificial Sequence
  Description of Artificial Sequence: Synthetic oligonucleotide
  Sense strand starting at position 1455 of SEQ ID NO: 1563115
cuccuaagugacuaaggua

SEQ ID NO: 1796322 - RNA, 19 nt, Artificial Sequence
  Description of Artificial Sequence: Synthetic oligonucleotide
  Antisense strand to SEQ ID NO: 1796321
uaccuuagucacuuaggag

SEQ ID NO: 1796323 - RNA, 19 nt, Artificial Sequence
  Description of Artificial Sequence: Synthetic oligonucleotide
  Sense strand starting at position 1689 of SEQ ID NO: 1563115
guaguugaagcagagaauu

SEQ ID NO: 1796324 - RNA, 19 nt, Artificial Sequence
  Description of Artificial Sequence: Synthetic oligonucleotide
  Antisense strand to SEQ ID NO: 1796323
aauucucugcuucaacuac

SEQ ID NO: 1796325 - RNA, 19 nt, Artificial Sequence
  Description of Artificial Sequence: Synthetic oligonucleotide
  Sense strand starting at position 1700 of SEQ ID NO: 1563115
agagaauugcaaugccuaa

SEQ ID NO: 1796326 - RNA, 19 nt, Artificial Sequence
  Description of Artificial Sequence: Synthetic oligonucleotide
  Antisense strand to SEQ ID NO: 1796325
uuaggcauugcaauucucu

SEQ ID NO: 1796327 - RNA, 19 nt, Artificial Sequence
  Description of Artificial Sequence: Synthetic oligonucleotide
  Sense strand starting at position 1904 of SEQ ID NO: 1563115
cuccaccucccggagaaau

SEQ ID NO: 1796328 - RNA, 19 nt, Artificial Sequence
  Description of Artificial Sequence: Synthetic oligonucleotide
  Antisense strand to SEQ ID NO: 1796327
auuucuccgggagguggag

SEQ ID NO: 1796329 - RNA, 19 nt, Artificial Sequence
  Description of Artificial Sequence: Synthetic oligonucleotide
  Sense strand starting at position 2052 of SEQ ID NO: 1563115
acgugucugaagcaguuua

SEQ ID NO: 1796330 - RNA, 19 nt, Artificial Sequence
  Description of Artificial Sequence: Synthetic oligonucleotide
  Antisense strand to SEQ ID NO: 1796329
uaaacugcuucagacacgu

SEQ ID NO: 1796331 - RNA, 19 nt, Artificial Sequence
  Description of Artificial Sequence: Synthetic oligonucleotide
  Sense strand starting at position 2060 of SEQ ID NO: 1563115
gaagcaguuuauccugauu

SEQ ID NO: 1796332 - RNA, 19 nt, Artificial Sequence
  Description of Artificial Sequence: Synthetic oligonucleotide
  Antisense strand to SEQ ID NO: 1796331
aaucaggauaaacugcuuc

SEQ ID NO: 1796333 - RNA, 19 nt, Artificial Sequence
  Description of Artificial Sequence: Synthetic oligonucleotide
  Sense strand starting at position 2063 of SEQ ID NO: 1563115
gcaguuuauccugauugga

SEQ ID NO: 1796334 - RNA, 19 nt, Artificial Sequence
  Description of Artificial Sequence: Synthetic oligonucleotide
  Antisense strand to SEQ ID NO: 1796333
uccaaucaggauaaacugc

SEQ ID NO: 1796335 - RNA, 19 nt, Artificial Sequence
  Description of Artificial Sequence: Synthetic oligonucleotide
  Sense strand starting at position 2175 of SEQ ID NO: 1563115
gguugauugagcuggugau

SEQ ID NO: 1796336 - RNA, 19 nt, Artificial Sequence
  Description of Artificial Sequence: Synthetic oligonucleotide
  Antisense strand to SEQ ID NO: 1796335
aucaccagcucaaucaacc

SEQ ID NO: 1796337 - RNA, 19 nt, Artificial Sequence
  Description of Artificial Sequence: Synthetic oligonucleotide
  Sense strand starting at position 2176 of SEQ ID NO: 1563115
guugauugagcuggugaug

SEQ ID NO: 1796338 - RNA, 19 nt, Artificial Sequence
  Description of Artificial Sequence: Synthetic oligonucleotide
  Antisense strand to SEQ ID NO: 1796337
caucaccagcucaaucaac

SEQ ID NO: 1796339 - RNA, 19 nt, Artificial Sequence
  Description of Artificial Sequence: Synthetic oligonucleotide
  Sense strand starting at position 2299 of SEQ ID NO: 1563115
guccacaugucuguuccaa

SEQ ID NO: 1796340 - RNA, 19 nt, Artificial Sequence
  Description of Artificial Sequence: Synthetic oligonucleotide
  Antisense strand to SEQ ID NO: 1796339
uuggaacagacauguggac

SEQ ID NO: 1796341 - RNA, 19 nt, Artificial Sequence
  Description of Artificial Sequence: Synthetic oligonucleotide
  Sense strand starting at position 2301 of SEQ ID NO: 1563115
ccacaugucuguuccaaca

SEQ ID NO: 1796342 - RNA, 19 nt, Artificial Sequence
  Description of Artificial Sequence: Synthetic oligonucleotide
  Antisense strand to SEQ ID NO: 1796341
uguuggaacagacaugugg

SEQ ID NO: 1796343 - RNA, 19 nt, Artificial Sequence
  Description of Artificial Sequence: Synthetic oligonucleotide
  Sense strand starting at position 2424 of SEQ ID NO: 1563115
ggaguuuccagguguccaa

SEQ ID NO: 1796344 - RNA, 19 nt, Artificial Sequence
  Description of Artificial Sequence: Synthetic oligonucleotide
  Antisense strand to SEQ ID NO: 1796343
uuggacaccuggaaacucc

SEQ ID NO: 1796345 - RNA, 19 nt, Artificial Sequence
  Description of Artificial Sequence: Synthetic oligonucleotide
  Sense strand starting at position 2608 of SEQ ID NO: 1563115
ggaaccuucucagcugaau

SEQ ID NO: 1796346 - RNA, 19 nt, Artificial Sequence
  Description of Artificial Sequence: Synthetic oligonucleotide
  Antisense strand to SEQ ID NO: 1796345
auucagcugagaagguucc

SEQ ID NO: 1796347 - RNA, 19 nt, Artificial Sequence
  Description of Artificial Sequence: Synthetic oligonucleotide
  Sense strand starting at position 2694 of SEQ ID NO: 1563115
ccucaagagucccuugaca

SEQ ID NO: 1796348 - RNA, 19 nt, Artificial Sequence
  Description of Artificial Sequence: Synthetic oligonucleotide
  Antisense strand to SEQ ID NO: 1796347
ugucaagggacucuugagg

SEQ ID NO: 1796349 - RNA, 19 nt, Artificial Sequence
  Description of Artificial Sequence: Synthetic oligonucleotide
  Sense strand starting at position 2701 of SEQ ID NO: 1563115
agucccuugacagguaaga

SEQ ID NO: 1796350 - RNA, 19 nt, Artificial Sequence
  Description of Artificial Sequence: Synthetic oligonucleotide
  Antisense strand to SEQ ID NO: 1796349
ucuuaccugucaagggacu

SEQ ID NO: 1796351 - RNA, 19 nt, Artificial Sequence
  Description of Artificial Sequence: Synthetic oligonucleotide
  Sense strand starting at position 2706 of SEQ ID NO: 1563115
cuugacagguaagaaauau

SEQ ID NO: 1796352 - RNA, 19 nt, Artificial Sequence
  Description of Artificial Sequence: Synthetic oligonucleotide
  Antisense strand to SEQ ID NO: 1796351
auauuucuuaccugucaag

SEQ ID NO: 1796353 - RNA, 19 nt, Artificial Sequence
  Description of Artificial Sequence: Synthetic oligonucleotide
  Sense strand starting at position 3092 of SEQ ID NO: 1563115
gugugugacccauggucuu

SEQ ID NO: 1796354 - RNA, 19 nt, Artificial Sequence
  Description of Artificial Sequence: Synthetic oligonucleotide
  Antisense strand to SEQ ID NO: 1796353
aagaccaugggucacacac

SEQ ID NO: 1796355 - RNA, 19 nt, Artificial Sequence
  Description of Artificial Sequence: Synthetic oligonucleotide
  Sense strand starting at position 3104 of SEQ ID NO: 1563115
uggucuuuauucuugucua

SEQ ID NO: 1796356 - RNA, 19 nt, Artificial Sequence
  Description of Artificial Sequence: Synthetic oligonucleotide
  Antisense strand to SEQ ID NO: 1796355
uagacaagaauaaagacca

SEQ ID NO: 1796357 - RNA, 19 nt, Artificial Sequence
  Description of Artificial Sequence: Synthetic oligonucleotide
  Sense strand starting at position 3108 of SEQ ID NO: 1563115
cuuuauucuugucuaggga

SEQ ID NO: 1796358 - RNA, 19 nt, Artificial Sequence
  Description of Artificial Sequence: Synthetic oligonucleotide
  Antisense strand to SEQ ID NO: 1796357
ucccuagacaagaauaaag

SEQ ID NO: 1796359 - RNA, 19 nt, Artificial Sequence
  Description of Artificial Sequence: Synthetic oligonucleotide
  Sense strand starting at position 3444 of SEQ ID NO: 1563115
auacuuuagccuggaugga

SEQ ID NO: 1796360 - RNA, 19 nt, Artificial Sequence
  Description of Artificial Sequence: Synthetic oligonucleotide
  Antisense strand to SEQ ID NO: 1796359
uccauccaggcuaaaguau

SEQ ID NO: 1796361 - RNA, 19 nt, Artificial Sequence
  Description of Artificial Sequence: Synthetic oligonucleotide
  Sense strand starting at position 3466 of SEQ ID NO: 1563115
gagagaccuugucucauuc

SEQ ID NO: 1796362 - RNA, 19 nt, Artificial Sequence
  Description of Artificial Sequence: Synthetic oligonucleotide
  Antisense strand to SEQ ID NO: 1796361
gaaugagacaaggucucuc

SEQ ID NO: 1796363 - RNA, 19 nt, Artificial Sequence
  Description of Artificial Sequence: Synthetic oligonucleotide
  Sense strand starting at position 3513 of SEQ ID NO: 1563115
agugaaaugaagugcaaga

SEQ ID NO: 1796364 - RNA, 19 nt, Artificial Sequence
  Description of Artificial Sequence: Synthetic oligonucleotide
  Antisense strand to SEQ ID NO: 1796363
ucuugcacuucauuucacu

SEQ ID NO: 1796365 - RNA, 19 nt, Artificial Sequence
  Description of Artificial Sequence: Synthetic oligonucleotide
  Sense strand starting at position 3803 of SEQ ID NO: 1563115
ggaaauguguauucugcag

SEQ ID NO: 1796366 - RNA, 19 nt, Artificial Sequence
  Description of Artificial Sequence: Synthetic oligonucleotide
  Antisense strand to SEQ ID NO: 1796365
cugcagaauacacauuucc

SEQ ID NO: 1796367 - RNA, 19 nt, Artificial Sequence
  Description of Artificial Sequence: Synthetic oligonucleotide
  Sense strand starting at position 3807 of SEQ ID NO: 1563115
auguguauucugcagaacu

SEQ ID NO: 1796368 - RNA, 19 nt, Artificial Sequence
  Description of Artificial Sequence: Synthetic oligonucleotide
  Antisense strand to SEQ ID NO: 1796367
aguucugcagaauacacau

SEQ ID NO: 1796369 - RNA, 19 nt, Artificial Sequence
  Description of Artificial Sequence: Synthetic oligonucleotide
  Sense strand starting at position 3809 of SEQ ID NO: 1563115
guguauucugcagaacuga

SEQ ID NO: 1796370 - RNA, 19 nt, Artificial Sequence
  Description of Artificial Sequence: Synthetic oligonucleotide
  Antisense strand to SEQ ID NO: 1796369
ucaguucugcagaauacac

SEQ ID NO: 1796371 - RNA, 19 nt, Artificial Sequence
  Description of Artificial Sequence: Synthetic oligonucleotide
  Sense strand starting at position 3856 of SEQ ID NO: 1563115
agaauccugcuaggaagau

SEQ ID NO: 1796372 - RNA, 19 nt, Artificial Sequence
  Description of Artificial Sequence: Synthetic oligonucleotide
  Antisense strand to SEQ ID NO: 1796371
aucuuccuagcaggauucu

SEQ ID NO: 1796373 - RNA, 19 nt, Artificial Sequence
  Description of Artificial Sequence: Synthetic oligonucleotide
  Sense strand starting at position 3958 of SEQ ID NO: 1563115
gcuugugggaggugagaaa

SEQ ID NO: 1796374 - RNA, 19 nt, Artificial Sequence
  Description of Artificial Sequence: Synthetic oligonucleotide
  Antisense strand to SEQ ID NO: 1796373
uuucucaccucccacaagc

SEQ ID NO: 1796375 - RNA, 19 nt, Artificial Sequence
  Description of Artificial Sequence: Synthetic oligonucleotide
  Sense strand starting at position 41 of SEQ ID NO: 1563116
gagugaccuugagccagaa

SEQ ID NO: 1796376 - RNA, 19 nt, Artificial Sequence
  Description of Artificial Sequence: Synthetic oligonucleotide
  Antisense strand to SEQ ID NO: 1796375
uucuggcucaaggucacuc

SEQ ID NO: 1796377 - RNA, 19 nt, Artificial Sequence
  Description of Artificial Sequence: Synthetic oligonucleotide
  Sense strand starting at position 150 of SEQ ID NO: 1563116
guuacacggcaauagauaa

SEQ ID NO: 1796378 - RNA, 19 nt, Artificial Sequence
  Description of Artificial Sequence: Synthetic oligonucleotide
  Antisense strand to SEQ ID NO: 1796377
uuaucuauugccguguaac

SEQ ID NO: 1796379 - RNA, 19 nt, Artificial Sequence
  Description of Artificial Sequence: Synthetic oligonucleotide
  Sense strand starting at position 296 of SEQ ID NO: 1563116
gaaauacagucgcugagaa

SEQ ID NO: 1796380 - RNA, 19 nt, Artificial Sequence
  Description of Artificial Sequence: Synthetic oligonucleotide
  Antisense strand to SEQ ID NO: 1796379
uucucagcgacuguauuuc

SEQ ID NO: 1796381 - RNA, 19 nt, Artificial Sequence
  Description of Artificial Sequence: Synthetic oligonucleotide
  Sense strand starting at position 297 of SEQ ID NO: 1563116
aaauacagucgcugagaaa

SEQ ID NO: 1796382 - RNA, 19 nt, Artificial Sequence
  Description of Artificial Sequence: Synthetic oligonucleotide
  Antisense strand to SEQ ID NO: 1796381
uuucucagcgacuguauuu

SEQ ID NO: 1796383 - RNA, 19 nt, Artificial Sequence
  Description of Artificial Sequence: Synthetic oligonucleotide
  Sense strand starting at position 298 of SEQ ID NO: 1563116
aauacagucgcugagaaag

SEQ ID NO: 1796384 - RNA, 19 nt, Artificial Sequence
  Description of Artificial Sequence: Synthetic oligonucleotide
  Antisense strand to SEQ ID NO: 1796383
cuuucucagcgacuguauu

SEQ ID NO: 1796385 - RNA, 19 nt, Artificial Sequence
  Description of Artificial Sequence: Synthetic oligonucleotide
  Sense strand starting at position 330 of SEQ ID NO: 1563116
aggagucagcuuuauauaa

SEQ ID NO: 1796386 - RNA, 19 nt, Artificial Sequence
  Description of Artificial Sequence: Synthetic oligonucleotide
  Antisense strand to SEQ ID NO: 1796385
uuauauaaagcugacuccu

SEQ ID NO: 1796387 - RNA, 19 nt, Artificial Sequence
  Description of Artificial Sequence: Synthetic oligonucleotide
  Sense strand starting at position 441 of SEQ ID NO: 1563116
aggguucccgaaugaccua

SEQ ID NO: 1796388 - RNA, 19 nt, Artificial Sequence
  Description of Artificial Sequence: Synthetic oligonucleotide
  Antisense strand to SEQ ID NO: 1796387
uaggucauucgggaacccu

SEQ ID NO: 1796389 - RNA, 19 nt, Artificial Sequence
  Description of Artificial Sequence: Synthetic oligonucleotide
  Sense strand starting at position 619 of SEQ ID NO: 1563116
uuaccucagguuuauuaca

SEQ ID NO: 1796390 - RNA, 19 nt, Artificial Sequence
  Description of Artificial Sequence: Synthetic oligonucleotide
  Antisense strand to SEQ ID NO: 1796389
uguaauaaaccugagguaa

SEQ ID NO: 1796391 - RNA, 19 nt, Artificial Sequence
  Description of Artificial Sequence: Synthetic oligonucleotide
  Sense strand starting at position 627 of SEQ ID NO: 1563116
gguuuauuacaacgcaacu

SEQ ID NO: 1796392 - RNA, 19 nt, Artificial Sequence
  Description of Artificial Sequence: Synthetic oligonucleotide
  Antisense strand to SEQ ID NO: 1796391
aguugcguuguaauaaacc

SEQ ID NO: 1796393 - RNA, 19 nt, Artificial Sequence
  Description of Artificial Sequence: Synthetic oligonucleotide
  Sense strand starting at position 647 of SEQ ID NO: 1563116
uuaagaacuugagcuauuc

SEQ ID NO: 1796394 - RNA, 19 nt, Artificial Sequence
  Description of Artificial Sequence: Synthetic oligonucleotide
  Antisense strand to SEQ ID NO: 1796393
gaauagcucaaguucuuaa

SEQ ID NO: 1796395 - RNA, 19 nt, Artificial Sequence
  Description of Artificial Sequence: Synthetic oligonucleotide
  Sense strand starting at position 656 of SEQ ID NO: 1563116
ugagcuauuccaggcagaa

SEQ ID NO: 1796396 - RNA, 19 nt, Artificial Sequence
  Description of Artificial Sequence: Synthetic oligonucleotide
  Antisense strand to SEQ ID NO: 1796395
uucugccuggaauagcuca

SEQ ID NO: 1796397 - RNA, 19 nt, Artificial Sequence
  Description of Artificial Sequence: Synthetic oligonucleotide
  Sense strand starting at position 674 of SEQ ID NO: 1563116
aggucacauccuugaggua

SEQ ID NO: 1796398 - RNA, 19 nt, Artificial Sequence
  Description of Artificial Sequence: Synthetic oligonucleotide
  Antisense strand to SEQ ID NO: 1796397
uaccucaaggaugugaccu

SEQ ID NO: 1796399 - RNA, 19 nt, Artificial Sequence
  Description of Artificial Sequence: Synthetic oligonucleotide
  Sense strand starting at position 675 of SEQ ID NO: 1563116
ggucacauccuugagguaa

SEQ ID NO: 1796400 - RNA, 19 nt, Artificial Sequence
  Description of Artificial Sequence: Synthetic oligonucleotide
  Antisense strand to SEQ ID NO: 1796399
uuaccucaaggaugugacc

SEQ ID NO: 1796401 - RNA, 19 nt, Artificial Sequence
  Description of Artificial Sequence: Synthetic oligonucleotide
  Sense strand starting at position 698 of SEQ ID NO: 1563116
agagaagcauuaguuacuu

SEQ ID NO: 1796402 - RNA, 19 nt, Artificial Sequence
  Description of Artificial Sequence: Synthetic oligonucleotide
  Antisense strand to SEQ ID NO: 1796401
aaguaacuaaugcuucucu

SEQ ID NO: 1796403 - RNA, 19 nt, Artificial Sequence
  Description of Artificial Sequence: Synthetic oligonucleotide
  Sense strand starting at position 1049 of SEQ ID NO: 1563116
ccuacaggucuccagaacu

SEQ ID NO: 1796404 - RNA, 19 nt, Artificial Sequence
  Description of Artificial Sequence: Synthetic oligonucleotide
  Antisense strand to SEQ ID NO: 1796403
aguucuggagaccuguagg

SEQ ID NO: 1796405 - RNA, 19 nt, Artificial Sequence
  Description of Artificial Sequence: Synthetic oligonucleotide
  Sense strand starting at position 1232 of SEQ ID NO: 1563116
ggaguggaggcugauguaa

SEQ ID NO: 1796406 - RNA, 19 nt, Artificial Sequence
  Description of Artificial Sequence: Synthetic oligonucleotide
  Antisense strand to SEQ ID NO: 1796405
uuacaucagccuccacucc

SEQ ID NO: 1796407 - RNA, 19 nt, Artificial Sequence
  Description of Artificial Sequence: Synthetic oligonucleotide
  Sense strand starting at position 1716 of SEQ ID NO: 1563116
ggguuaaauugagaaggag

SEQ ID NO: 1796408 - RNA, 19 nt, Artificial Sequence
  Description of Artificial Sequence: Synthetic oligonucleotide
  Antisense strand to SEQ ID NO: 1796407
cuccuucucaauuuaaccc

SEQ ID NO: 1796409 - RNA, 19 nt, Artificial Sequence
  Description of Artificial Sequence: Synthetic oligonucleotide
  Sense strand starting at position 1990 of SEQ ID NO: 1563116
cuguuauaauucucaggug

SEQ ID NO: 1796410 - RNA, 19 nt, Artificial Sequence
  Description of Artificial Sequence: Synthetic oligonucleotide
  Antisense strand to SEQ ID NO: 1796409
caccugagaauuauaacag

SEQ ID NO: 1796411 - RNA, 19 nt, Artificial Sequence
  Description of Artificial Sequence: Synthetic oligonucleotide
  Sense strand starting at position 2019 of SEQ ID NO: 1563116
guugacuauccaugcuuaa

SEQ ID NO: 1796412 - RNA, 19 nt, Artificial Sequence
  Description of Artificial Sequence: Synthetic oligonucleotide
  Antisense strand to SEQ ID NO: 1796411
uuaagcauggauagucaac

SEQ ID NO: 1796413 - RNA, 19 nt, Artificial Sequence
  Description of Artificial Sequence: Synthetic oligonucleotide
  Sense strand starting at position 2036 of SEQ ID NO: 1563116
aagggauugugaggaaaca

SEQ ID NO: 1796414 - RNA, 19 nt, Artificial Sequence
  Description of Artificial Sequence: Synthetic oligonucleotide
  Antisense strand to SEQ ID NO: 1796413
uguuuccucacaaucccuu

SEQ ID NO: 1796415 - RNA, 19 nt, Artificial Sequence
  Description of Artificial Sequence: Synthetic oligonucleotide
  Sense strand starting at position 2071 of SEQ ID NO: 1563116
guccucuucuaguuacauc

SEQ ID NO: 1796416 - RNA, 19 nt, Artificial Sequence
  Description of Artificial Sequence: Synthetic oligonucleotide
  Antisense strand to SEQ ID NO: 1796415
gauguaacuagaagaggac

SEQ ID NO: 1796417 - RNA, 19 nt, Artificial Sequence
  Description of Artificial Sequence: Synthetic oligonucleotide
  Sense strand starting at position 2264 of SEQ ID NO: 1563116
ccauuccuuucgguauuau

SEQ ID NO: 1796418 - RNA, 19 nt, Artificial Sequence
  Description of Artificial Sequence: Synthetic oligonucleotide
  Antisense strand to SEQ ID NO: 1796417
auaauaccgaaaggaaugg

SEQ ID NO: 1796419 - RNA, 19 nt, Artificial Sequence
  Description of Artificial Sequence: Synthetic oligonucleotide
  Sense strand starting at position 2268 of SEQ ID NO: 1563116
uccuuucgguauuauuuau

SEQ ID NO: 1796420 - RNA, 19 nt, Artificial Sequence
  Description of Artificial Sequence: Synthetic oligonucleotide
  Antisense strand to SEQ ID NO: 1796419
auaaauaauaccgaaagga

SEQ ID NO: 1796421 - RNA, 19 nt, Artificial Sequence
  Description of Artificial Sequence: Synthetic oligonucleotide
  Sense strand starting at position 2275 of SEQ ID NO: 1563116
gguauuauuuaugccuguu

SEQ ID NO: 1796422 - RNA, 19 nt, Artificial Sequence
  Description of Artificial Sequence: Synthetic oligonucleotide
  Antisense strand to SEQ ID NO: 1796421
aacaggcauaaauaauacc

SEQ ID NO: 1796423 - RNA, 19 nt, Artificial Sequence
  Description of Artificial Sequence: Synthetic oligonucleotide
  Sense strand starting at position 2306 of SEQ ID NO: 1563116
cagcaaaguugauuaauug

SEQ ID NO: 1796424 - RNA, 19 nt, Artificial Sequence
  Description of Artificial Sequence: Synthetic oligonucleotide
  Antisense strand to SEQ ID NO: 1796423
caauuaaucaacuuugcug

SEQ ID NO: 1796425 - RNA, 19 nt, Artificial Sequence
  Description of Artificial Sequence: Synthetic oligonucleotide
  Sense strand starting at position 2313 of SEQ ID NO: 1563116
guugauuaauugccagaga

SEQ ID NO: 1796426 - RNA, 19 nt, Artificial Sequence
  Description of Artificial Sequence: Synthetic oligonucleotide
  Antisense strand to SEQ ID NO: 1796425
ucucuggcaauuaaucaac

SEQ ID NO: 1796427 - RNA, 19 nt, Artificial Sequence
  Description of Artificial Sequence: Synthetic oligonucleotide
  Sense strand starting at position 2568 of SEQ ID NO: 1563116
uaggcuuguucuguuacuu

SEQ ID NO: 1796428 - RNA, 19 nt, Artificial Sequence
  Description of Artificial Sequence: Synthetic oligonucleotide
  Antisense strand to SEQ ID NO: 1796427
aaguaacagaacaagccua

SEQ ID NO: 1796429 - RNA, 19 nt, Artificial Sequence
  Description of Artificial Sequence: Synthetic oligonucleotide
  Sense strand starting at position 2615 of SEQ ID NO: 1563116
uaccucguuugcuuguaaa

SEQ ID NO: 1796430 - RNA, 19 nt, Artificial Sequence
  Description of Artificial Sequence: Synthetic oligonucleotide
  Antisense strand to SEQ ID NO: 1796429
uuuacaagcaaacgaggua

SEQ ID NO: 1796431 - RNA, 19 nt, Artificial Sequence
  Description of Artificial Sequence: Synthetic oligonucleotide
  Sense strand starting at position 2681 of SEQ ID NO: 1563116
ccaguuuaacugugucuca

SEQ ID NO: 1796432 - RNA, 19 nt, Artificial Sequence
  Description of Artificial Sequence: Synthetic oligonucleotide
  Antisense strand to SEQ ID NO: 1796431
ugagacacaguuaaacugg

SEQ ID NO: 1796433 - RNA, 19 nt, Artificial Sequence
  Description of Artificial Sequence: Synthetic oligonucleotide
  Sense strand starting at position 2699 of SEQ ID NO: 1563116
accaguccgcuugguaaua

SEQ ID NO: 1796434 - RNA, 19 nt, Artificial Sequence
  Description of Artificial Sequence: Synthetic oligonucleotide
  Antisense strand to SEQ ID NO: 1796433
uauuaccaagcggacuggu

SEQ ID NO: 1796435 - RNA, 19 nt, Artificial Sequence
  Description of Artificial Sequence: Synthetic oligonucleotide
  Sense strand starting at position 2700 of SEQ ID NO: 1563116
ccaguccgcuugguaauau

SEQ ID NO: 1796436 - RNA, 19 nt, Artificial Sequence
  Description of Artificial Sequence: Synthetic oligonucleotide
  Antisense strand to SEQ ID NO: 1796435
auauuaccaagcggacugg

SEQ ID NO: 1796437 - RNA, 19 nt, Artificial Sequence
  Description of Artificial Sequence: Synthetic oligonucleotide
  Sense strand starting at position 2757 of SEQ ID NO: 1563116
aguuguuagaaaugcuugu

SEQ ID NO: 1796438 - RNA, 19 nt, Artificial Sequence
  Description of Artificial Sequence: Synthetic oligonucleotide
  Antisense strand to SEQ ID NO: 1796437
acaagcauuucuaacaacu

SEQ ID NO: 1796439 - RNA, 19 nt, Artificial Sequence
  Description of Artificial Sequence: Synthetic oligonucleotide
  Sense strand starting at position 3292 of SEQ ID NO: 1563116
cguaauuagacagggagga

SEQ ID NO: 1796440 - RNA, 19 nt, Artificial Sequence
  Description of Artificial Sequence: Synthetic oligonucleotide
  Antisense strand to SEQ ID NO: 1796439
uccucccugucuaauuacg

SEQ ID NO: 1796441 - RNA, 19 nt, Artificial Sequence
  Description of Artificial Sequence: Synthetic oligonucleotide
  Sense strand starting at position 3352 of SEQ ID NO: 1563116
uuucuaacacaaggguuau

SEQ ID NO: 1796442 - RNA, 19 nt, Artificial Sequence
  Description of Artificial Sequence: Synthetic oligonucleotide
  Antisense strand to SEQ ID NO: 1796441
auaacccuuguguuagaaa

SEQ ID NO: 1796443 - RNA, 19 nt, Artificial Sequence
  Description of Artificial Sequence: Synthetic oligonucleotide
  Sense strand starting at position 3358 of SEQ ID NO: 1563116
acacaaggguuauauagua

SEQ ID NO: 1796444 - RNA, 19 nt, Artificial Sequence
  Description of Artificial Sequence: Synthetic oligonucleotide
  Antisense strand to SEQ ID NO: 1796443
uacuauauaacccuugugu

SEQ ID NO: 1796445 - RNA, 19 nt, Artificial Sequence
  Description of Artificial Sequence: Synthetic oligonucleotide
  Sense strand starting at position 3463 of SEQ ID NO: 1563116
acccuugcauuugaagauu

SEQ ID NO: 1796446 - RNA, 19 nt, Artificial Sequence
  Description of Artificial Sequence: Synthetic oligonucleotide
  Antisense strand to SEQ ID NO: 1796445
aaucuucaaaugcaagggu

SEQ ID NO: 1796447 - RNA, 19 nt, Artificial Sequence
  Description of Artificial Sequence: Synthetic oligonucleotide
  Sense strand starting at position 3491 of SEQ ID NO: 1563116
ugaaguguaccauagucaa

SEQ ID NO: 1796448 - RNA, 19 nt, Artificial Sequence
  Description of Artificial Sequence: Synthetic oligonucleotide
  Antisense strand to SEQ ID NO: 1796447
uugacuaugguacacuuca

SEQ ID NO: 1796449 - RNA, 19 nt, Artificial Sequence
  Description of Artificial Sequence: Synthetic oligonucleotide
  Sense strand starting at position 3558 of SEQ ID NO: 1563116
uauauaugaggcugauaug

SEQ ID NO: 1796450 - RNA, 19 nt, Artificial Sequence
  Description of Artificial Sequence: Synthetic oligonucleotide
  Antisense strand to SEQ ID NO: 1796449
cauaucagccucauauaua

SEQ ID NO: 1796451 - RNA, 19 nt, Artificial Sequence
  Description of Artificial Sequence: Synthetic oligonucleotide
  Sense strand starting at position 3559 of SEQ ID NO: 1563116
auauaugaggcugauaugu

SEQ ID NO: 1796452 - RNA, 19 nt, Artificial Sequence
  Description of Artificial Sequence: Synthetic oligonucleotide
  Antisense strand to SEQ ID NO: 1796451
acauaucagccucauauau

SEQ ID NO: 1796453 - RNA, 19 nt, Artificial Sequence
  Description of Artificial Sequence: Synthetic oligonucleotide
  Sense strand starting at position 3564 of SEQ ID NO: 1563116
ugaggcugauauguaaaga

SEQ ID NO: 1796454 - RNA, 19 nt, Artificial Sequence
  Description of Artificial Sequence: Synthetic oligonucleotide
  Antisense strand to SEQ ID NO: 1796453
ucuuuacauaucagccuca

SEQ ID NO: 1796455 - RNA, 19 nt, Artificial Sequence
  Description of Artificial Sequence: Synthetic oligonucleotide
  Sense strand starting at position 118 of SEQ ID NO: 1563117
aauuacagcgcgucuguaa

SEQ ID NO: 1796456 - RNA, 19 nt, Artificial Sequence
  Description of Artificial Sequence: Synthetic oligonucleotide
  Antisense strand to SEQ ID NO: 1796455
uuacagacgcgcuguaauu

SEQ ID NO: 1796457 - RNA, 19 nt, Artificial Sequence
  Description of Artificial Sequence: Synthetic oligonucleotide
  Sense strand starting at position 119 of SEQ ID NO: 1563117
auuacagcgcgucuguaau

SEQ ID NO: 1796458 - RNA, 19 nt, Artificial Sequence
  Description of Artificial Sequence: Synthetic oligonucleotide
  Antisense strand to SEQ ID NO: 1796457
auuacagacgcgcuguaau

SEQ ID NO: 1796459 - RNA, 19 nt, Artificial Sequence
  Description of Artificial Sequence: Synthetic oligonucleotide
  Sense strand starting at position 549 of SEQ ID NO: 1563117
gcagacuggucucgaauuu

SEQ ID NO: 1796460 - RNA, 19 nt, Artificial Sequence
  Description of Artificial Sequence: Synthetic oligonucleotide
  Antisense strand to SEQ ID NO: 1796459
aaauucgagaccagucugc

SEQ ID NO: 1796461 - RNA, 19 nt, Artificial Sequence
  Description of Artificial Sequence: Synthetic oligonucleotide
  Sense strand starting at position 918 of SEQ ID NO: 1563117
ccagucuucucggccaguu

SEQ ID NO: 1796462 - RNA, 19 nt, Artificial Sequence
  Description of Artificial Sequence: Synthetic oligonucleotide
  Antisense strand to SEQ ID NO: 1796461
aacuggccgagaagacugg

SEQ ID NO: 1796463 - RNA, 19 nt, Artificial Sequence
  Description of Artificial Sequence: Synthetic oligonucleotide
  Sense strand starting at position 933 of SEQ ID NO: 1563117
aguuccuccuaaguuguua

SEQ ID NO: 1796464 - RNA, 19 nt, Artificial Sequence
  Description of Artificial Sequence: Synthetic oligonucleotide
  Antisense strand to SEQ ID NO: 1796463
uaacaacuuaggaggaacu

SEQ ID NO: 1796465 - RNA, 19 nt, Artificial Sequence
  Description of Artificial Sequence: Synthetic oligonucleotide
  Sense strand starting at position 937 of SEQ ID NO: 1563117
ccuccuaaguuguuaaaug

SEQ ID NO: 1796466 - RNA, 19 nt, Artificial Sequence
  Description of Artificial Sequence: Synthetic oligonucleotide
  Antisense strand to SEQ ID NO: 1796465
cauuuaacaacuuaggagg

SEQ ID NO: 1796467 - RNA, 19 nt, Artificial Sequence
  Description of Artificial Sequence: Synthetic oligonucleotide
  Sense strand starting at position 938 of SEQ ID NO: 1563117
cuccuaaguuguuaaaugu

SEQ ID NO: 1796468 - RNA, 19 nt, Artificial Sequence
  Description of Artificial Sequence: Synthetic oligonucleotide
  Antisense strand to SEQ ID NO: 1796467
acauuuaacaacuuaggag

SEQ ID NO: 1796469 - RNA, 19 nt, Artificial Sequence
  Description of Artificial Sequence: Synthetic oligonucleotide
  Sense strand starting at position 947 of SEQ ID NO: 1563117
uguuaaauguugccaagaa

SEQ ID NO: 1796470 - RNA, 19 nt, Artificial Sequence
  Description of Artificial Sequence: Synthetic oligonucleotide
  Antisense strand to SEQ ID NO: 1796469
uucuuggcaacauuuaaca

SEQ ID NO: 1796471 - RNA, 19 nt, Artificial Sequence
  Description of Artificial Sequence: Synthetic oligonucleotide
  Sense strand starting at position 948 of SEQ ID NO: 1563117
guuaaauguugccaagaaa

SEQ ID NO: 1796472 - RNA, 19 nt, Artificial Sequence
  Description of Artificial Sequence: Synthetic oligonucleotide
  Antisense strand to SEQ ID NO: 1796471
uuucuuggcaacauuuaac

SEQ ID NO: 1796473 - RNA, 19 nt, Artificial Sequence
  Description of Artificial Sequence: Synthetic oligonucleotide
  Sense strand starting at position 990 of SEQ ID NO: 1563117
cacgacaaauuucgaguuu

SEQ ID NO: 1796474 - RNA, 19 nt, Artificial Sequence
  Description of Artificial Sequence: Synthetic oligonucleotide
  Antisense strand to SEQ ID NO: 1796473
aaacucgaaauuugucgug

SEQ ID NO: 1796475 - RNA, 19 nt, Artificial Sequence
  Description of Artificial Sequence: Synthetic oligonucleotide
  Sense strand starting at position 1159 of SEQ ID NO: 1563117
gccugaagauccugcuaug

SEQ ID NO: 1796476 - RNA, 19 nt, Artificial Sequence
  Description of Artificial Sequence: Synthetic oligonucleotide
  Antisense strand to SEQ ID NO: 1796475
cauagcaggaucuucaggc

SEQ ID NO: 1796477 - RNA, 19 nt, Artificial Sequence
  Description of Artificial Sequence: Synthetic oligonucleotide
  Sense strand starting at position 1162 of SEQ ID NO: 1563117
ugaagauccugcuauguua

SEQ ID NO: 1796478 - RNA, 19 nt, Artificial Sequence
  Description of Artificial Sequence: Synthetic oligonucleotide
  Antisense strand to SEQ ID NO: 1796477
uaacauagcaggaucuuca

SEQ ID NO: 1796479 - RNA, 19 nt, Artificial Sequence
  Description of Artificial Sequence: Synthetic oligonucleotide
  Sense strand starting at position 1176 of SEQ ID NO: 1563117
uguuauguuuggcucucga

SEQ ID NO: 1796480 - RNA, 19 nt, Artificial Sequence
  Description of Artificial Sequence: Synthetic oligonucleotide
  Antisense strand to SEQ ID NO: 1796479
ucgagagccaaacauaaca

SEQ ID NO: 1796481 - RNA, 19 nt, Artificial Sequence
  Description of Artificial Sequence: Synthetic oligonucleotide
  Sense strand starting at position 1180 of SEQ ID NO: 1563117
auguuuggcucucgaagag

SEQ ID NO: 1796482 - RNA, 19 nt, Artificial Sequence
  Description of Artificial Sequence: Synthetic oligonucleotide
  Antisense strand to SEQ ID NO: 1796481
cucuucgagagccaaacau

SEQ ID NO: 1796483 - RNA, 19 nt, Artificial Sequence
  Description of Artificial Sequence: Synthetic oligonucleotide
  Sense strand starting at position 1189 of SEQ ID NO: 1563117
ucucgaagaguuuggcuuu

SEQ ID NO: 1796484 - RNA, 19 nt, Artificial Sequence
  Description of Artificial Sequence: Synthetic oligonucleotide
  Antisense strand to SEQ ID NO: 1796483
aaagccaaacucuucgaga

SEQ ID NO: 1796485 - RNA, 19 nt, Artificial Sequence
  Description of Artificial Sequence: Synthetic oligonucleotide
  Sense strand starting at position 1271 of SEQ ID NO: 1563117
aaacgaagaugugacaaua

SEQ ID NO: 1796486 - RNA, 19 nt, Artificial Sequence
  Description of Artificial Sequence: Synthetic oligonucleotide
  Antisense strand to SEQ ID NO: 1796485
uauugucacaucuucguuu

SEQ ID NO: 1796487 - RNA, 19 nt, Artificial Sequence
  Description of Artificial Sequence: Synthetic oligonucleotide
  Sense strand starting at position 1322 of SEQ ID NO: 1563117
gcaugaaagcuuugagcua

SEQ ID NO: 1796488 - RNA, 19 nt, Artificial Sequence
  Description of Artificial Sequence: Synthetic oligonucleotide
  Antisense strand to SEQ ID NO: 1796487
uagcucaaagcuuucaugc

SEQ ID NO: 1796489 - RNA, 19 nt, Artificial Sequence
  Description of Artificial Sequence: Synthetic oligonucleotide
  Sense strand starting at position 1393 of SEQ ID NO: 1563117
aguucucuuucuugauauc

SEQ ID NO: 1796490 - RNA, 19 nt, Artificial Sequence
  Description of Artificial Sequence: Synthetic oligonucleotide
  Antisense strand to SEQ ID NO: 1796489
gauaucaagaaagagaacu

SEQ ID NO: 1796491 - RNA, 19 nt, Artificial Sequence
  Description of Artificial Sequence: Synthetic oligonucleotide
  Sense strand starting at position 1394 of SEQ ID NO: 1563117
guucucuuucuugauaucu

SEQ ID NO: 1796492 - RNA, 19 nt, Artificial Sequence
  Description of Artificial Sequence: Synthetic oligonucleotide
  Antisense strand to SEQ ID NO: 1796491
agauaucaagaaagagaac

SEQ ID NO: 1796493 - RNA, 19 nt, Artificial Sequence
  Description of Artificial Sequence: Synthetic oligonucleotide
  Sense strand starting at position 1404 of SEQ ID NO: 1563117
uugauaucuuuagauugca

SEQ ID NO: 1796494 - RNA, 19 nt, Artificial Sequence
  Description of Artificial Sequence: Synthetic oligonucleotide
  Antisense strand to SEQ ID NO: 1796493
ugcaaucuaaagauaucaa

SEQ ID NO: 1796495 - RNA, 19 nt, Artificial Sequence
  Description of Artificial Sequence: Synthetic oligonucleotide
  Sense strand starting at position 1440 of SEQ ID NO: 1563117
ccauuaaguccugguguuc

SEQ ID NO: 1796496 - RNA, 19 nt, Artificial Sequence
  Description of Artificial Sequence: Synthetic oligonucleotide
  Antisense strand to SEQ ID NO: 1796495
gaacaccaggacuuaaugg

SEQ ID NO: 1796497 - RNA, 19 nt, Artificial Sequence
  Description of Artificial Sequence: Synthetic oligonucleotide
  Sense strand starting at position 1445 of SEQ ID NO: 1563117
aaguccugguguucucaaa

SEQ ID NO: 1796498 - RNA, 19 nt, Artificial Sequence
  Description of Artificial Sequence: Synthetic oligonucleotide
  Antisense strand to SEQ ID NO: 1796497
uuugagaacaccaggacuu

SEQ ID NO: 1796499 - RNA, 19 nt, Artificial Sequence
  Description of Artificial Sequence: Synthetic oligonucleotide
  Sense strand starting at position 1693 of SEQ ID NO: 1563117
ccugcaaacucuuagugca

SEQ ID NO: 1796500 - RNA, 19 nt, Artificial Sequence
  Description of Artificial Sequence: Synthetic oligonucleotide
  Antisense strand to SEQ ID NO: 1796499
ugcacuaagaguuugcagg

SEQ ID NO: 1796501 - RNA, 19 nt, Artificial Sequence
  Description of Artificial Sequence: Synthetic oligonucleotide
  Sense strand starting at position 2613 of SEQ ID NO: 1563117
ggcugacuucgacaugaag

SEQ ID NO: 1796502 - RNA, 19 nt, Artificial Sequence
  Description of Artificial Sequence: Synthetic oligonucleotide
  Antisense strand to SEQ ID NO: 1796501
cuucaugucgaagucagcc

SEQ ID NO: 1796503 - RNA, 19 nt, Artificial Sequence
  Description of Artificial Sequence: Synthetic oligonucleotide
  Sense strand starting at position 2657 of SEQ ID NO: 1563117
ggaagaggaauguguucuu

SEQ ID NO: 1796504 - RNA, 19 nt, Artificial Sequence
  Description of Artificial Sequence: Synthetic oligonucleotide
  Antisense strand to SEQ ID NO: 1796503
aagaacacauuccucuucc

SEQ ID NO: 1796505 - RNA, 19 nt, Artificial Sequence
  Description of Artificial Sequence: Synthetic oligonucleotide
  Sense strand starting at position 2660 of SEQ ID NO: 1563117
agaggaauguguucuugaa

SEQ ID NO: 1796506 - RNA, 19 nt, Artificial Sequence
  Description of Artificial Sequence: Synthetic oligonucleotide
  Antisense strand to SEQ ID NO: 1796505
uucaagaacacauuccucu

SEQ ID NO: 1796507 - RNA, 19 nt, Artificial Sequence
  Description of Artificial Sequence: Synthetic oligonucleotide
  Sense strand starting at position 2664 of SEQ ID NO: 1563117
gaauguguucuugaaaugg

SEQ ID NO: 1796508 - RNA, 19 nt, Artificial Sequence
  Description of Artificial Sequence: Synthetic oligonucleotide
  Antisense strand to SEQ ID NO: 1796507
ccauuucaagaacacauuc

SEQ ID NO: 1796509 - RNA, 19 nt, Artificial Sequence
  Description of Artificial Sequence: Synthetic oligonucleotide
  Sense strand starting at position 3033 of SEQ ID NO: 1563117
caguguucugcccaugaca

SEQ ID NO: 1796510 - RNA, 19 nt, Artificial Sequence
  Description of Artificial Sequence: Synthetic oligonucleotide
  Antisense strand to SEQ ID NO: 1796509
ugucaugggcagaacacug

SEQ ID NO: 1796511 - RNA, 19 nt, Artificial Sequence
  Description of Artificial Sequence: Synthetic oligonucleotide
  Sense strand starting at position 3133 of SEQ ID NO: 1563117
acacacugucccugggaaa

SEQ ID NO: 1796512 - RNA, 19 nt, Artificial Sequence
  Description of Artificial Sequence: Synthetic oligonucleotide
  Antisense strand to SEQ ID NO: 1796511
uuucccagggacagugugu

SEQ ID NO: 1796513 - RNA, 19 nt, Artificial Sequence
  Description of Artificial Sequence: Synthetic oligonucleotide
  Sense strand starting at position 3352 of SEQ ID NO: 1563117
gccauaacccuuggaccau

SEQ ID NO: 1796514 - RNA, 19 nt, Artificial Sequence
  Description of Artificial Sequence: Synthetic oligonucleotide
  Antisense strand to SEQ ID NO: 1796513
augguccaaggguuauggc

SEQ ID NO: 1796515 - RNA, 19 nt, Artificial Sequence
  Description of Artificial Sequence: Synthetic oligonucleotide
  Sense strand starting at position 3511 of SEQ ID NO: 1563117
ucaggugcuuccucuuuga

SEQ ID NO: 1796516 - RNA, 19 nt, Artificial Sequence
  Description of Artificial Sequence: Synthetic oligonucleotide
  Antisense strand to SEQ ID NO: 1796515
ucaaagaggaagcaccuga

SEQ ID NO: 1796517 - RNA, 19 nt, Artificial Sequence
  Description of Artificial Sequence: Synthetic oligonucleotide
  Sense strand starting at position 3514 of SEQ ID NO: 1563117
ggugcuuccucuuugacaa

SEQ ID NO: 1796518 - RNA, 19 nt, Artificial Sequence
  Description of Artificial Sequence: Synthetic oligonucleotide
  Antisense strand to SEQ ID NO: 1796517
uugucaaagaggaagcacc

SEQ ID NO: 1796519 - RNA, 19 nt, Artificial Sequence
  Description of Artificial Sequence: Synthetic oligonucleotide
  Sense strand starting at position 3515 of SEQ ID NO: 1563117
gugcuuccucuuugacaac

SEQ ID NO: 1796520 - RNA, 19 nt, Artificial Sequence
  Description of Artificial Sequence: Synthetic oligonucleotide
  Antisense strand to SEQ ID NO: 1796519
guugucaaagaggaagcac

SEQ ID NO: 1796521 - RNA, 19 nt, Artificial Sequence
  Description of Artificial Sequence: Synthetic oligonucleotide
  Sense strand starting at position 3654 of SEQ ID NO: 1563117
uguugacauguugaauauu

SEQ ID NO: 1796522 - RNA, 19 nt, Artificial Sequence
  Description of Artificial Sequence: Synthetic oligonucleotide
  Antisense strand to SEQ ID NO: 1796521
aauauucaacaugucaaca

SEQ ID NO: 1796523 - RNA, 19 nt, Artificial Sequence
  Description of Artificial Sequence: Synthetic oligonucleotide
  Sense strand starting at position 3788 of SEQ ID NO: 1563117
ggacuaaagccguagccaa

SEQ ID NO: 1796524 - RNA, 19 nt, Artificial Sequence
  Description of Artificial Sequence: Synthetic oligonucleotide
  Antisense strand to SEQ ID NO: 1796523
uuggcuacggcuuuagucc

SEQ ID NO: 1796525 - RNA, 19 nt, Artificial Sequence
  Description of Artificial Sequence: Synthetic oligonucleotide
  Sense strand starting at position 3803 of SEQ ID NO: 1563117
ccaacagagcaguaguaau

SEQ ID NO: 1796526 - RNA, 19 nt, Artificial Sequence
  Description of Artificial Sequence: Synthetic oligonucleotide
  Antisense strand to SEQ ID NO: 1796525
auuacuacugcucuguugg

SEQ ID NO: 1796527 - RNA, 19 nt, Artificial Sequence
  Description of Artificial Sequence: Synthetic oligonucleotide
  Sense strand starting at position 3814 of SEQ ID NO: 1563117
guaguaauccgcgucgucu

SEQ ID NO: 1796528 - RNA, 19 nt, Artificial Sequence
  Description of Artificial Sequence: Synthetic oligonucleotide
  Antisense strand to SEQ ID NO: 1796527
agacgacgcggauuacuac

SEQ ID NO: 1796529 - RNA, 19 nt, Artificial Sequence
  Description of Artificial Sequence: Synthetic oligonucleotide
  Sense strand starting at position 3815 of SEQ ID NO: 1563117
uaguaauccgcgucgucuu

SEQ ID NO: 1796530 - RNA, 19 nt, Artificial Sequence
  Description of Artificial Sequence: Synthetic oligonucleotide
  Antisense strand to SEQ ID NO: 1796529
aagacgacgcggauuacua

SEQ ID NO: 1796531 - RNA, 19 nt, Artificial Sequence
  Description of Artificial Sequence: Synthetic oligonucleotide
  Sense strand starting at position 3846 of SEQ ID NO: 1563117
gacuaauggugaggacaca

SEQ ID NO: 1796532 - RNA, 19 nt, Artificial Sequence
  Description of Artificial Sequence: Synthetic oligonucleotide
  Antisense strand to SEQ ID NO: 1796531
uguguccucaccauuaguc

SEQ ID NO: 1796533 - RNA, 19 nt, Artificial Sequence
  Description of Artificial Sequence: Synthetic oligonucleotide
  Sense strand starting at position 3940 of SEQ ID NO: 1563117
gcgguaguagaggagauau

SEQ ID NO: 1796534 - RNA, 19 nt, Artificial Sequence
  Description of Artificial Sequence: Synthetic oligonucleotide
  Antisense strand to SEQ ID NO: 1796533
auaucuccucuacuaccgc

SEQ ID NO: 1796535 - RNA, 19 nt, Artificial Sequence
  Description of Artificial Sequence: Synthetic oligonucleotide
  Sense strand starting at position 37 of SEQ ID NO: 1563118
ugaggugguugcgguagaa

SEQ ID NO: 1796536 - RNA, 19 nt, Artificial Sequence
  Description of Artificial Sequence: Synthetic oligonucleotide
  Antisense strand to SEQ ID NO: 1796535
uucuaccgcaaccaccuca

SEQ ID NO: 1796537 - RNA, 19 nt, Artificial Sequence
  Description of Artificial Sequence: Synthetic oligonucleotide
  Sense strand starting at position 104 of SEQ ID NO: 1563118
gucccauuuggcugcagaa

SEQ ID NO: 1796538 - RNA, 19 nt, Artificial Sequence
  Description of Artificial Sequence: Synthetic oligonucleotide
  Antisense strand to SEQ ID NO: 1796537
uucugcagccaaaugggac

SEQ ID NO: 1796539 - RNA, 19 nt, Artificial Sequence
  Description of Artificial Sequence: Synthetic oligonucleotide
  Sense strand starting at position 119 of SEQ ID NO: 1563118
agaaguucccagggccaau

SEQ ID NO: 1796540 - RNA, 19 nt, Artificial Sequence
  Description of Artificial Sequence: Synthetic oligonucleotide
  Antisense strand to SEQ ID NO: 1796539
auuggcccugggaacuucu

SEQ ID NO: 1796541 - RNA, 19 nt, Artificial Sequence
  Description of Artificial Sequence: Synthetic oligonucleotide
  Sense strand starting at position 302 of SEQ ID NO: 1563118
ugauuccagucccaguaaa

SEQ ID NO: 1796542 - RNA, 19 nt, Artificial Sequence
  Description of Artificial Sequence: Synthetic oligonucleotide
  Antisense strand to SEQ ID NO: 1796541
uuuacugggacuggaauca

SEQ ID NO: 1796543 - RNA, 19 nt, Artificial Sequence
  Description of Artificial Sequence: Synthetic oligonucleotide
  Sense strand starting at position 388 of SEQ ID NO: 1563118
gccgucaacuacuuucuca

SEQ ID NO: 1796544 - RNA, 19 nt, Artificial Sequence
  Description of Artificial Sequence: Synthetic oligonucleotide
  Antisense strand to SEQ ID NO: 1796543
ugagaaaguaguugacggc

SEQ ID NO: 1796545 - RNA, 19 nt, Artificial Sequence
  Description of Artificial Sequence: Synthetic oligonucleotide
  Sense strand starting at position 605 of SEQ ID NO: 1563118
cgggugaaggucuguggaa

SEQ ID NO: 1796546 - RNA, 19 nt, Artificial Sequence
  Description of Artificial Sequence: Synthetic oligonucleotide
  Antisense strand to SEQ ID NO: 1796545
uuccacagaccuucacccg

SEQ ID NO: 1796547 - RNA, 19 nt, Artificial Sequence
  Description of Artificial Sequence: Synthetic oligonucleotide
  Sense strand starting at position 945 of SEQ ID NO: 1563118
cgaggaauaaucugccugu

SEQ ID NO: 1796548 - RNA, 19 nt, Artificial Sequence
  Description of Artificial Sequence: Synthetic oligonucleotide
  Antisense strand to SEQ ID NO: 1796547
acaggcagauuauuccucg

SEQ ID NO: 1796549 - RNA, 19 nt, Artificial Sequence
  Description of Artificial Sequence: Synthetic oligonucleotide
  Sense strand starting at position 948 of SEQ ID NO: 1563118
ggaauaaucugccuguguc

SEQ ID NO: 1796550 - RNA, 19 nt, Artificial Sequence
  Description of Artificial Sequence: Synthetic oligonucleotide
  Antisense strand to SEQ ID NO: 1796549
gacacaggcagauuauucc

SEQ ID NO: 1796551 - RNA, 19 nt, Artificial Sequence
  Description of Artificial Sequence: Synthetic oligonucleotide
  Sense strand starting at position 949 of SEQ ID NO: 1563118
gaauaaucugccugugucu

SEQ ID NO: 1796552 - RNA, 19 nt, Artificial Sequence
  Description of Artificial Sequence: Synthetic oligonucleotide
  Antisense strand to SEQ ID NO: 1796551
agacacaggcagauuauuc

SEQ ID NO: 1796553 - RNA, 19 nt, Artificial Sequence
  Description of Artificial Sequence: Synthetic oligonucleotide
  Sense strand starting at position 1015 of SEQ ID NO: 1563118
acgucugagugggaacaaa

SEQ ID NO: 1796554 - RNA, 19 nt, Artificial Sequence
  Description of Artificial Sequence: Synthetic oligonucleotide
  Antisense strand to SEQ ID NO: 1796553
uuuguucccacucagacgu

SEQ ID NO: 1796555 - RNA, 19 nt, Artificial Sequence
  Description of Artificial Sequence: Synthetic oligonucleotide
  Sense strand starting at position 1358 of SEQ ID NO: 1563118
gcuggaugcuucugggaaa

SEQ ID NO: 1796556 - RNA, 19 nt, Artificial Sequence
  Description of Artificial Sequence: Synthetic oligonucleotide
  Antisense strand to SEQ ID NO: 1796555
uuucccagaagcauccagc

SEQ ID NO: 1796557 - RNA, 19 nt, Artificial Sequence
  Description of Artificial Sequence: Synthetic oligonucleotide
  Sense strand starting at position 1361 of SEQ ID NO: 1563118
ggaugcuucugggaaacug

SEQ ID NO: 1796558 - RNA, 19 nt, Artificial Sequence
  Description of Artificial Sequence: Synthetic oligonucleotide
  Antisense strand to SEQ ID NO: 1796557
caguuucccagaagcaucc

SEQ ID NO: 1796559 - RNA, 19 nt, Artificial Sequence
  Description of Artificial Sequence: Synthetic oligonucleotide
  Sense strand starting at position 1371 of SEQ ID NO: 1563118
gggaaacuggccugaucuc

SEQ ID NO: 1796560 - RNA, 19 nt, Artificial Sequence
  Description of Artificial Sequence: Synthetic oligonucleotide
  Antisense strand to SEQ ID NO: 1796559
gagaucaggccaguuuccc

SEQ ID NO: 1796561 - RNA, 19 nt, Artificial Sequence
  Description of Artificial Sequence: Synthetic oligonucleotide
  Sense strand starting at position 1380 of SEQ ID NO: 1563118
gccugaucucucugagugu

SEQ ID NO: 1796562 - RNA, 19 nt, Artificial Sequence
  Description of Artificial Sequence: Synthetic oligonucleotide
  Antisense strand to SEQ ID NO: 1796561
acacucagagagaucaggc

SEQ ID NO: 1796563 - RNA, 19 nt, Artificial Sequence
  Description of Artificial Sequence: Synthetic oligonucleotide
  Sense strand starting at position 1383 of SEQ ID NO: 1563118
ugaucucucugagugucaa

SEQ ID NO: 1796564 - RNA, 19 nt, Artificial Sequence
  Description of Artificial Sequence: Synthetic oligonucleotide
  Antisense strand to SEQ ID NO: 1796563
uugacacucagagagauca

SEQ ID NO: 1796565 - RNA, 19 nt, Artificial Sequence
  Description of Artificial Sequence: Synthetic oligonucleotide
  Sense strand starting at position 1384 of SEQ ID NO: 1563118
gaucucucugagugucaau

SEQ ID NO: 1796566 - RNA, 19 nt, Artificial Sequence
  Description of Artificial Sequence: Synthetic oligonucleotide
  Antisense strand to SEQ ID NO: 1796565
auugacacucagagagauc

SEQ ID NO: 1796567 - RNA, 19 nt, Artificial Sequence
  Description of Artificial Sequence: Synthetic oligonucleotide
  Sense strand starting at position 1395 of SEQ ID NO: 1563118
gugucaauauccucaagug

SEQ ID NO: 1796568 - RNA, 19 nt, Artificial Sequence
  Description of Artificial Sequence: Synthetic oligonucleotide
  Antisense strand to SEQ ID NO: 1796567
cacuugaggauauugacac

SEQ ID NO: 1796569 - RNA, 19 nt, Artificial Sequence
  Description of Artificial Sequence: Synthetic oligonucleotide
  Sense strand starting at position 1410 of SEQ ID NO: 1563118
agugcaaauccacagacau

SEQ ID NO: 1796570 - RNA, 19 nt, Artificial Sequence
  Description of Artificial Sequence: Synthetic oligonucleotide
  Antisense strand to SEQ ID NO: 1796569
augucuguggauuugcacu

SEQ ID NO: 1796571 - RNA, 19 nt, Artificial Sequence
  Description of Artificial Sequence: Synthetic oligonucleotide
  Sense strand starting at position 2096 of SEQ ID NO: 1563118
agcacauccuucuaggaaa

SEQ ID NO: 1796572 - RNA, 19 nt, Artificial Sequence
  Description of Artificial Sequence: Synthetic oligonucleotide
  Antisense strand to SEQ ID NO: 1796571
uuuccuagaaggaugugcu

SEQ ID NO: 1796573 - RNA, 19 nt, Artificial Sequence
  Description of Artificial Sequence: Synthetic oligonucleotide
  Sense strand starting at position 2099 of SEQ ID NO: 1563118
acauccuucuaggaaaugu

SEQ ID NO: 1796574 - RNA, 19 nt, Artificial Sequence
  Description of Artificial Sequence: Synthetic oligonucleotide
  Antisense strand to SEQ ID NO: 1796573
acauuuccuagaaggaugu

SEQ ID NO: 1796575 - RNA, 19 nt, Artificial Sequence
  Description of Artificial Sequence: Synthetic oligonucleotide
  Sense strand starting at position 2166 of SEQ ID NO: 1563118
gggcggaugucgcugugua

SEQ ID NO: 1796576 - RNA, 19 nt, Artificial Sequence
  Description of Artificial Sequence: Synthetic oligonucleotide
  Antisense strand to SEQ ID NO: 1796575
uacacagcgacauccgccc

SEQ ID NO: 1796577 - RNA, 19 nt, Artificial Sequence
  Description of Artificial Sequence: Synthetic oligonucleotide
  Sense strand starting at position 2167 of SEQ ID NO: 1563118
ggcggaugucgcuguguau

SEQ ID NO: 1796578 - RNA, 19 nt, Artificial Sequence
  Description of Artificial Sequence: Synthetic oligonucleotide
  Antisense strand to SEQ ID NO: 1796577
auacacagcgacauccgcc

SEQ ID NO: 1796579 - RNA, 19 nt, Artificial Sequence
  Description of Artificial Sequence: Synthetic oligonucleotide
  Sense strand starting at position 2211 of SEQ ID NO: 1563118
cgcugcaugggugucuaau

SEQ ID NO: 1796580 - RNA, 19 nt, Artificial Sequence
  Description of Artificial Sequence: Synthetic oligonucleotide
  Antisense strand to SEQ ID NO: 1796579
auuagacacccaugcagcg

SEQ ID NO: 1796581 - RNA, 19 nt, Artificial Sequence
  Description of Artificial Sequence: Synthetic oligonucleotide
  Sense strand starting at position 2220 of SEQ ID NO: 1563118
ggugucuaauugcgaggau

SEQ ID NO: 1796582 - RNA, 19 nt, Artificial Sequence
  Description of Artificial Sequence: Synthetic oligonucleotide
  Antisense strand to SEQ ID NO: 1796581
auccucgcaauuagacacc

SEQ ID NO: 1796583 - RNA, 19 nt, Artificial Sequence
  Description of Artificial Sequence: Synthetic oligonucleotide
  Sense strand starting at position 2221 of SEQ ID NO: 1563118
gugucuaauugcgaggaua

SEQ ID NO: 1796584 - RNA, 19 nt, Artificial Sequence
  Description of Artificial Sequence: Synthetic oligonucleotide
  Antisense strand to SEQ ID NO: 1796583
uauccucgcaauuagacac

SEQ ID NO: 1796585 - RNA, 19 nt, Artificial Sequence
  Description of Artificial Sequence: Synthetic oligonucleotide
  Sense strand starting at position 2223 of SEQ ID NO: 1563118
gucuaauugcgaggauacu

SEQ ID NO: 1796586 - RNA, 19 nt, Artificial Sequence
  Description of Artificial Sequence: Synthetic oligonucleotide
  Antisense strand to SEQ ID NO: 1796585
aguauccucgcaauuagac

SEQ ID NO: 1796587 - RNA, 19 nt, Artificial Sequence
  Description of Artificial Sequence: Synthetic oligonucleotide
  Sense strand starting at position 2246 of SEQ ID NO: 1563118
gggcgguguccaggaacua

SEQ ID NO: 1796588 - RNA, 19 nt, Artificial Sequence
  Description of Artificial Sequence: Synthetic oligonucleotide
  Antisense strand to SEQ ID NO: 1796587
uaguuccuggacaccgccc

SEQ ID NO: 1796589 - RNA, 19 nt, Artificial Sequence
  Description of Artificial Sequence: Synthetic oligonucleotide
  Sense strand starting at position 2263 of SEQ ID NO: 1563118
uagaauuuguccuguuagu

SEQ ID NO: 1796590 - RNA, 19 nt, Artificial Sequence
  Description of Artificial Sequence: Synthetic oligonucleotide
  Antisense strand to SEQ ID NO: 1796589
acuaacaggacaaauucua

SEQ ID NO: 1796591 - RNA, 19 nt, Artificial Sequence
  Description of Artificial Sequence: Synthetic oligonucleotide
  Sense strand starting at position 2325 of SEQ ID NO: 1563118
ccacaucugucugcaggaa

SEQ ID NO: 1796592 - RNA, 19 nt, Artificial Sequence
  Description of Artificial Sequence: Synthetic oligonucleotide
  Antisense strand to SEQ ID NO: 1796591
uuccugcagacagaugugg

SEQ ID NO: 1796593 - RNA, 19 nt, Artificial Sequence
  Description of Artificial Sequence: Synthetic oligonucleotide
  Sense strand starting at position 2326 of SEQ ID NO: 1563118
cacaucugucugcaggaaa

SEQ ID NO: 1796594 - RNA, 19 nt, Artificial Sequence
  Description of Artificial Sequence: Synthetic oligonucleotide
  Antisense strand to SEQ ID NO: 1796593
uuuccugcagacagaugug

SEQ ID NO: 1796595 - RNA, 19 nt, Artificial Sequence
  Description of Artificial Sequence: Synthetic oligonucleotide
  Sense strand starting at position 2474 of SEQ ID NO: 1563118
gugggagagccuuggccua

SEQ ID NO: 1796596 - RNA, 19 nt, Artificial Sequence
  Description of Artificial Sequence: Synthetic oligonucleotide
  Antisense strand to SEQ ID NO: 1796595
uaggccaaggcucucccac

SEQ ID NO: 1796597 - RNA, 19 nt, Artificial Sequence
  Description of Artificial Sequence: Synthetic oligonucleotide
  Sense strand starting at position 2574 of SEQ ID NO: 1563118
agagcucugccaugaacac

SEQ ID NO: 1796598 - RNA, 19 nt, Artificial Sequence
  Description of Artificial Sequence: Synthetic oligonucleotide
  Antisense strand to SEQ ID NO: 1796597
guguucauggcagagcucu

SEQ ID NO: 1796599 - RNA, 19 nt, Artificial Sequence
  Description of Artificial Sequence: Synthetic oligonucleotide
  Sense strand starting at position 2684 of SEQ ID NO: 1563118
gcagaaugcucacagcagu

SEQ ID NO: 1796600 - RNA, 19 nt, Artificial Sequence
  Description of Artificial Sequence: Synthetic oligonucleotide
  Antisense strand to SEQ ID NO: 1796599
acugcugugagcauucugc

SEQ ID NO: 1796601 - RNA, 19 nt, Artificial Sequence
  Description of Artificial Sequence: Synthetic oligonucleotide
  Sense strand starting at position 2704 of SEQ ID NO: 1563118
cagggagguuugcuaacua

SEQ ID NO: 1796602 - RNA, 19 nt, Artificial Sequence
  Description of Artificial Sequence: Synthetic oligonucleotide
  Antisense strand to SEQ ID NO: 1796601
uaguuagcaaaccucccug

SEQ ID NO: 1796603 - RNA, 19 nt, Artificial Sequence
  Description of Artificial Sequence: Synthetic oligonucleotide
  Sense strand starting at position 2708 of SEQ ID NO: 1563118
gagguuugcuaacuacugu

SEQ ID NO: 1796604 - RNA, 19 nt, Artificial Sequence
  Description of Artificial Sequence: Synthetic oligonucleotide
  Antisense strand to SEQ ID NO: 1796603
acaguaguuagcaaaccuc

SEQ ID NO: 1796605 - RNA, 19 nt, Artificial Sequence
  Description of Artificial Sequence: Synthetic oligonucleotide
  Sense strand starting at position 2770 of SEQ ID NO: 1563118
gguaacgugucgcaaauca

SEQ ID NO: 1796606 - RNA, 19 nt, Artificial Sequence
  Description of Artificial Sequence: Synthetic oligonucleotide
  Antisense strand to SEQ ID NO: 1796605
ugauuugcgacacguuacc

SEQ ID NO: 1796607 - RNA, 19 nt, Artificial Sequence
  Description of Artificial Sequence: Synthetic oligonucleotide
  Sense strand starting at position 2800 of SEQ ID NO: 1563118
guaggaauccagcaccgaa

SEQ ID NO: 1796608 - RNA, 19 nt, Artificial Sequence
  Description of Artificial Sequence: Synthetic oligonucleotide
  Antisense strand to SEQ ID NO: 1796607
uucggugcuggauuccuac

SEQ ID NO: 1796609 - RNA, 19 nt, Artificial Sequence
  Description of Artificial Sequence: Synthetic oligonucleotide
  Sense strand starting at position 3921 of SEQ ID NO: 1563118
ugcaucaaucgacacugua

SEQ ID NO: 1796610 - RNA, 19 nt, Artificial Sequence
  Description of Artificial Sequence: Synthetic oligonucleotide
  Antisense strand to SEQ ID NO: 1796609
uacagugucgauugaugca

SEQ ID NO: 1796611 - RNA, 19 nt, Artificial Sequence
  Description of Artificial Sequence: Synthetic oligonucleotide
  Sense strand starting at position 175 of SEQ ID NO: 1563119
uuuagaaggcuguaaauca

SEQ ID NO: 1796612 - RNA, 19 nt, Artificial Sequence
  Description of Artificial Sequence: Synthetic oligonucleotide
  Antisense strand to SEQ ID NO: 1796611
ugauuuacagccuucuaaa

SEQ ID NO: 1796613 - RNA, 19 nt, Artificial Sequence
  Description of Artificial Sequence: Synthetic oligonucleotide
  Sense strand starting at position 366 of SEQ ID NO: 1563119
gggcucaaugaaggaguuu

SEQ ID NO: 1796614 - RNA, 19 nt, Artificial Sequence
  Description of Artificial Sequence: Synthetic oligonucleotide
  Antisense strand to SEQ ID NO: 1796613
aaacuccuucauugagccc

SEQ ID NO: 1796615 - RNA, 19 nt, Artificial Sequence
  Description of Artificial Sequence: Synthetic oligonucleotide
  Sense strand starting at position 375 of SEQ ID NO: 1563119
gaaggaguuuccucuucua

SEQ ID NO: 1796616 - RNA, 19 nt, Artificial Sequence
  Description of Artificial Sequence: Synthetic oligonucleotide
  Antisense strand to SEQ ID NO: 1796615
uagaagaggaaacuccuuc

SEQ ID NO: 1796617 - RNA, 19 nt, Artificial Sequence
  Description of Artificial Sequence: Synthetic oligonucleotide
  Sense strand starting at position 437 of SEQ ID NO: 1563119
ggcaaugcugcugauuaau

SEQ ID NO: 1796618 - RNA, 19 nt, Artificial Sequence
  Description of Artificial Sequence: Synthetic oligonucleotide
  Antisense strand to SEQ ID NO: 1796617
auuaaucagcagcauugcc

SEQ ID NO: 1796619 - RNA, 19 nt, Artificial Sequence
  Description of Artificial Sequence: Synthetic oligonucleotide
  Sense strand starting at position 614 of SEQ ID NO: 1563119
gcaaucauuccauggaguc

SEQ ID NO: 1796620 - RNA, 19 nt, Artificial Sequence
  Description of Artificial Sequence: Synthetic oligonucleotide
  Antisense strand to SEQ ID NO: 1796619
gacuccauggaaugauugc

SEQ ID NO: 1796621 - RNA, 19 nt, Artificial Sequence
  Description of Artificial Sequence: Synthetic oligonucleotide
  Sense strand starting at position 787 of SEQ ID NO: 1563119
gugcgcuggcugucuagua

SEQ ID NO: 1796622 - RNA, 19 nt, Artificial Sequence
  Description of Artificial Sequence: Synthetic oligonucleotide
  Antisense strand to SEQ ID NO: 1796621
uacuagacagccagcgcac

SEQ ID NO: 1796623 - RNA, 19 nt, Artificial Sequence
  Description of Artificial Sequence: Synthetic oligonucleotide
  Sense strand starting at position 864 of SEQ ID NO: 1563119
gcagaagcuucaguugaga

SEQ ID NO: 1796624 - RNA, 19 nt, Artificial Sequence
  Description of Artificial Sequence: Synthetic oligonucleotide
  Antisense strand to SEQ ID NO: 1796623
ucucaacugaagcuucugc

SEQ ID NO: 1796625 - RNA, 19 nt, Artificial Sequence
  Description of Artificial Sequence: Synthetic oligonucleotide
  Sense strand starting at position 879 of SEQ ID NO: 1563119
gagagucccuccuccaaag

SEQ ID NO: 1796626 - RNA, 19 nt, Artificial Sequence
  Description of Artificial Sequence: Synthetic oligonucleotide
  Antisense strand to SEQ ID NO: 1796625
cuuuggaggagggacucuc

SEQ ID NO: 1796627 - RNA, 19 nt, Artificial Sequence
  Description of Artificial Sequence: Synthetic oligonucleotide
  Sense strand starting at position 895 of SEQ ID NO: 1563119
aagaguaggcacggcuuaa

SEQ ID NO: 1796628 - RNA, 19 nt, Artificial Sequence
  Description of Artificial Sequence: Synthetic oligonucleotide
  Antisense strand to SEQ ID NO: 1796627
uuaagccgugccuacucuu

SEQ ID NO: 1796629 - RNA, 19 nt, Artificial Sequence
  Description of Artificial Sequence: Synthetic oligonucleotide
  Sense strand starting at position 923 of SEQ ID NO: 1563119
uagccaguuuccuuuggaa

SEQ ID NO: 1796630 - RNA, 19 nt, Artificial Sequence
  Description of Artificial Sequence: Synthetic oligonucleotide
  Antisense strand to SEQ ID NO: 1796629
uuccaaaggaaacuggcua

SEQ ID NO: 1796631 - RNA, 19 nt, Artificial Sequence
  Description of Artificial Sequence: Synthetic oligonucleotide
  Sense strand starting at position 925 of SEQ ID NO: 1563119
gccaguuuccuuuggaaug

SEQ ID NO: 1796632 - RNA, 19 nt, Artificial Sequence
  Description of Artificial Sequence: Synthetic oligonucleotide
  Antisense strand to SEQ ID NO: 1796631
cauuccaaaggaaacuggc

SEQ ID NO: 1796633 - RNA, 19 nt, Artificial Sequence
  Description of Artificial Sequence: Synthetic oligonucleotide
  Sense strand starting at position 930 of SEQ ID NO: 1563119
uuuccuuuggaauguagau

SEQ ID NO: 1796634 - RNA, 19 nt, Artificial Sequence
  Description of Artificial Sequence: Synthetic oligonucleotide
  Antisense strand to SEQ ID NO: 1796633
aucuacauuccaaaggaaa

SEQ ID NO: 1796635 - RNA, 19 nt, Artificial Sequence
  Description of Artificial Sequence: Synthetic oligonucleotide
  Sense strand starting at position 971 of SEQ ID NO: 1563119
gagguccugucagugagau

SEQ ID NO: 1796636 - RNA, 19 nt, Artificial Sequence
  Description of Artificial Sequence: Synthetic oligonucleotide
  Antisense strand to SEQ ID NO: 1796635
aucucacugacaggaccuc

SEQ ID NO: 1796637 - RNA, 19 nt, Artificial Sequence
  Description of Artificial Sequence: Synthetic oligonucleotide
  Sense strand starting at position 972 of SEQ ID NO: 1563119
agguccugucagugagaua

SEQ ID NO: 1796638 - RNA, 19 nt, Artificial Sequence
  Description of Artificial Sequence: Synthetic oligonucleotide
  Antisense strand to SEQ ID NO: 1796637
uaucucacugacaggaccu

SEQ ID NO: 1796639 - RNA, 19 nt, Artificial Sequence
  Description of Artificial Sequence: Synthetic oligonucleotide
  Sense strand starting at position 973 of SEQ ID NO: 1563119
gguccugucagugagauac

SEQ ID NO: 1796640 - RNA, 19 nt, Artificial Sequence
  Description of Artificial Sequence: Synthetic oligonucleotide
  Antisense strand to SEQ ID NO: 1796639
guaucucacugacaggacc

SEQ ID NO: 1796641 - RNA, 19 nt, Artificial Sequence
  Description of Artificial Sequence: Synthetic oligonucleotide
  Sense strand starting at position 1372 of SEQ ID NO: 1563119
cagguaguucccgggacuu

SEQ ID NO: 1796642 - RNA, 19 nt, Artificial Sequence
  Description of Artificial Sequence: Synthetic oligonucleotide
  Antisense strand to SEQ ID NO: 1796641
aagucccgggaacuaccug

SEQ ID NO: 1796643 - RNA, 19 nt, Artificial Sequence
  Description of Artificial Sequence: Synthetic oligonucleotide
  Sense strand starting at position 1384 of SEQ ID NO: 1563119
gggacuuccaccugaggca

SEQ ID NO: 1796644 - RNA, 19 nt, Artificial Sequence
  Description of Artificial Sequence: Synthetic oligonucleotide
  Antisense strand to SEQ ID NO: 1796643
ugccucagguggaaguccc

SEQ ID NO: 1796645 - RNA, 19 nt, Artificial Sequence
  Description of Artificial Sequence: Synthetic oligonucleotide
  Sense strand starting at position 2581 of SEQ ID NO: 1563119
agacauuucuccucgcggu

SEQ ID NO: 1796646 - RNA, 19 nt, Artificial Sequence
  Description of Artificial Sequence: Synthetic oligonucleotide
  Antisense strand to SEQ ID NO: 1796645
accgcgaggagaaaugucu

SEQ ID NO: 1796647 - RNA, 19 nt, Artificial Sequence
  Description of Artificial Sequence: Synthetic oligonucleotide
  Sense strand starting at position 2582 of SEQ ID NO: 1563119
gacauuucuccucgcgguu

SEQ ID NO: 1796648 - RNA, 19 nt, Artificial Sequence
  Description of Artificial Sequence: Synthetic oligonucleotide
  Antisense strand to SEQ ID NO: 1796647
aaccgcgaggagaaauguc

SEQ ID NO: 1796649 - RNA, 19 nt, Artificial Sequence
  Description of Artificial Sequence: Synthetic oligonucleotide
  Sense strand starting at position 2747 of SEQ ID NO: 1563119
cacaguucccaggaagcuu

SEQ ID NO: 1796650 - RNA, 19 nt, Artificial Sequence
  Description of Artificial Sequence: Synthetic oligonucleotide
  Antisense strand to SEQ ID NO: 1796649
aagcuuccugggaacugug

SEQ ID NO: 1796651 - RNA, 19 nt, Artificial Sequence
  Description of Artificial Sequence: Synthetic oligonucleotide
  Sense strand starting at position 2883 of SEQ ID NO: 1563119
ccuagacaguuucucugua

SEQ ID NO: 1796652 - RNA, 19 nt, Artificial Sequence
  Description of Artificial Sequence: Synthetic oligonucleotide
  Antisense strand to SEQ ID NO: 1796651
uacagagaaacugucuagg

SEQ ID NO: 1796653 - RNA, 19 nt, Artificial Sequence
  Description of Artificial Sequence: Synthetic oligonucleotide
  Sense strand starting at position 2884 of SEQ ID NO: 1563119
cuagacaguuucucuguau

SEQ ID NO: 1796654 - RNA, 19 nt, Artificial Sequence
  Description of Artificial Sequence: Synthetic oligonucleotide
  Antisense strand to SEQ ID NO: 1796653
auacagagaaacugucuag

SEQ ID NO: 1796655 - RNA, 19 nt, Artificial Sequence
  Description of Artificial Sequence: Synthetic oligonucleotide
  Sense strand starting at position 2885 of SEQ ID NO: 1563119
uagacaguuucucuguaug

SEQ ID NO: 1796656 - RNA, 19 nt, Artificial Sequence
  Description of Artificial Sequence: Synthetic oligonucleotide
  Antisense strand to SEQ ID NO: 1796655
cauacagagaaacugucua

SEQ ID NO: 1796657 - RNA, 19 nt, Artificial Sequence
  Description of Artificial Sequence: Synthetic oligonucleotide
  Sense strand starting at position 2887 of SEQ ID NO: 1563119
gacaguuucucuguaugaa

SEQ ID NO: 1796658 - RNA, 19 nt, Artificial Sequence
  Description of Artificial Sequence: Synthetic oligonucleotide
  Antisense strand to SEQ ID NO: 1796657
uucauacagagaaacuguc

SEQ ID NO: 1796659 - RNA, 19 nt, Artificial Sequence
  Description of Artificial Sequence: Synthetic oligonucleotide
  Sense strand starting at position 2888 of SEQ ID NO: 1563119
acaguuucucuguaugaag

SEQ ID NO: 1796660 - RNA, 19 nt, Artificial Sequence
  Description of Artificial Sequence: Synthetic oligonucleotide
  Antisense strand to SEQ ID NO: 1796659
cuucauacagagaaacugu

SEQ ID NO: 1796661 - RNA, 19 nt, Artificial Sequence
  Description of Artificial Sequence: Synthetic oligonucleotide
  Sense strand starting at position 2899 of SEQ ID NO: 1563119
guaugaagucugcacugaa

SEQ ID NO: 1796662 - RNA, 19 nt, Artificial Sequence
  Description of Artificial Sequence: Synthetic oligonucleotide
  Antisense strand to SEQ ID NO: 1796661
uucagugcagacuucauac

SEQ ID NO: 1796663 - RNA, 19 nt, Artificial Sequence
  Description of Artificial Sequence: Synthetic oligonucleotide
  Sense strand starting at position 2902 of SEQ ID NO: 1563119
ugaagucugcacugaagga

SEQ ID NO: 1796664 - RNA, 19 nt, Artificial Sequence
  Description of Artificial Sequence: Synthetic oligonucleotide
  Antisense strand to SEQ ID NO: 1796663
uccuucagugcagacuuca

SEQ ID NO: 1796665 - RNA, 19 nt, Artificial Sequence
  Description of Artificial Sequence: Synthetic oligonucleotide
  Sense strand starting at position 2931 of SEQ ID NO: 1563119
ccuugaggaucuucugaug

SEQ ID NO: 1796666 - RNA, 19 nt, Artificial Sequence
  Description of Artificial Sequence: Synthetic oligonucleotide
  Antisense strand to SEQ ID NO: 1796665
caucagaagauccucaagg

SEQ ID NO: 1796667 - RNA, 19 nt, Artificial Sequence
  Description of Artificial Sequence: Synthetic oligonucleotide
  Sense strand starting at position 2937 of SEQ ID NO: 1563119
ggaucuucugauggaguuc

SEQ ID NO: 1796668 - RNA, 19 nt, Artificial Sequence
  Description of Artificial Sequence: Synthetic oligonucleotide
  Antisense strand to SEQ ID NO: 1796667
gaacuccaucagaagaucc

SEQ ID NO: 1796669 - RNA, 19 nt, Artificial Sequence
  Description of Artificial Sequence: Synthetic oligonucleotide
  Sense strand starting at position 3195 of SEQ ID NO: 1563119
cucaucuaguccucugaga

SEQ ID NO: 1796670 - RNA, 19 nt, Artificial Sequence
  Description of Artificial Sequence: Synthetic oligonucleotide
  Antisense strand to SEQ ID NO: 1796669
ucucagaggacuagaugag

SEQ ID NO: 1796671 - RNA, 19 nt, Artificial Sequence
  Description of Artificial Sequence: Synthetic oligonucleotide
  Sense strand starting at position 3307 of SEQ ID NO: 1563119
aauauuugguuaggaugaa

SEQ ID NO: 1796672 - RNA, 19 nt, Artificial Sequence
  Description of Artificial Sequence: Synthetic oligonucleotide
  Antisense strand to SEQ ID NO: 1796671
uucauccuaaccaaauauu

SEQ ID NO: 1796673 - RNA, 19 nt, Artificial Sequence
  Description of Artificial Sequence: Synthetic oligonucleotide
  Sense strand starting at position 3308 of SEQ ID NO: 1563119
auauuugguuaggaugaau

SEQ ID NO: 1796674 - RNA, 19 nt, Artificial Sequence
  Description of Artificial Sequence: Synthetic oligonucleotide
  Antisense strand to SEQ ID NO: 1796673
auucauccuaaccaaauau

SEQ ID NO: 1796675 - RNA, 19 nt, Artificial Sequence
  Description of Artificial Sequence: Synthetic oligonucleotide
  Sense strand starting at position 3319 of SEQ ID NO: 1563119
ggaugaaucugcuucuacu

SEQ ID NO: 1796676 - RNA, 19 nt, Artificial Sequence
  Description of Artificial Sequence: Synthetic oligonucleotide
  Antisense strand to SEQ ID NO: 1796675
aguagaagcagauucaucc

SEQ ID NO: 1796677 - RNA, 19 nt, Artificial Sequence
  Description of Artificial Sequence: Synthetic oligonucleotide
  Sense strand starting at position 3744 of SEQ ID NO: 1563119
gaacuucugugcccaagua

SEQ ID NO: 1796678 - RNA, 19 nt, Artificial Sequence
  Description of Artificial Sequence: Synthetic oligonucleotide
  Antisense strand to SEQ ID NO: 1796677
uacuugggcacagaaguuc

SEQ ID NO: 1796679 - RNA, 19 nt, Artificial Sequence
  Description of Artificial Sequence: Synthetic oligonucleotide
  Sense strand starting at position 3841 of SEQ ID NO: 1563119
agggcaaaucucuauagcu

SEQ ID NO: 1796680 - RNA, 19 nt, Artificial Sequence
  Description of Artificial Sequence: Synthetic oligonucleotide
  Antisense strand to SEQ ID NO: 1796679
agcuauagagauuugcccu

SEQ ID NO: 1796681 - RNA, 19 nt, Artificial Sequence
  Description of Artificial Sequence: Synthetic oligonucleotide
  Sense strand starting at position 3843 of SEQ ID NO: 1563119
ggcaaaucucuauagcuca

SEQ ID NO: 1796682 - RNA, 19 nt, Artificial Sequence
  Description of Artificial Sequence: Synthetic oligonucleotide
  Antisense strand to SEQ ID NO: 1796681
ugagcuauagagauuugcc

SEQ ID NO: 1796683 - RNA, 19 nt, Artificial Sequence
  Description of Artificial Sequence: Synthetic oligonucleotide
  Sense strand starting at position 3848 of SEQ ID NO: 1563119
aucucuauagcucauggau

SEQ ID NO: 1796684 - RNA, 19 nt, Artificial Sequence
  Description of Artificial Sequence: Synthetic oligonucleotide
  Antisense strand to SEQ ID NO: 1796683
auccaugagcuauagagau

SEQ ID NO: 1796685 - RNA, 19 nt, Artificial Sequence
  Description of Artificial Sequence: Synthetic oligonucleotide
  Sense strand starting at position 3863 of SEQ ID NO: 1563119
ggaugacacuuugcgauau

SEQ ID NO: 1796686 - RNA, 19 nt, Artificial Sequence
  Description of Artificial Sequence: Synthetic oligonucleotide
  Antisense strand to SEQ ID NO: 1796685
auaucgcaaagugucaucc

SEQ ID NO: 1796687 - RNA, 19 nt, Artificial Sequence
  Description of Artificial Sequence: Synthetic oligonucleotide
  Sense strand starting at position 3932 of SEQ ID NO: 1563119
ggucuaucccugcaaugag

SEQ ID NO: 1796688 - RNA, 19 nt, Artificial Sequence
  Description of Artificial Sequence: Synthetic oligonucleotide
  Antisense strand to SEQ ID NO: 1796687
cucauugcagggauagacc

SEQ ID NO: 1796689 - RNA, 19 nt, Artificial Sequence
  Description of Artificial Sequence: Synthetic oligonucleotide
  Sense strand starting at position 3935 of SEQ ID NO: 1563119
cuaucccugcaaugagaua

SEQ ID NO: 1796690 - RNA, 19 nt, Artificial Sequence
  Description of Artificial Sequence: Synthetic oligonucleotide
  Antisense strand to SEQ ID NO: 1796689
uaucucauugcagggauag

SEQ ID NO: 1796691 - RNA, 19 nt, Artificial Sequence
  Description of Artificial Sequence: Synthetic oligonucleotide
  Sense strand starting at position 23 of SEQ ID NO: 1563120
uugggugcuuaacccaaua

SEQ ID NO: 1796692 - RNA, 19 nt, Artificial Sequence
  Description of Artificial Sequence: Synthetic oligonucleotide
  Antisense strand to SEQ ID NO: 1796691
uauuggguuaagcacccaa

SEQ ID NO: 1796693 - RNA, 19 nt, Artificial Sequence
  Description of Artificial Sequence: Synthetic oligonucleotide
  Sense strand starting at position 61 of SEQ ID NO: 1563120
aaauguuagcucuauggua

SEQ ID NO: 1796694 - RNA, 19 nt, Artificial Sequence
  Description of Artificial Sequence: Synthetic oligonucleotide
  Antisense strand to SEQ ID NO: 1796693
uaccauagagcuaacauuu

SEQ ID NO: 1796695 - RNA, 19 nt, Artificial Sequence
  Description of Artificial Sequence: Synthetic oligonucleotide
  Sense strand starting at position 97 of SEQ ID NO: 1563120
aagggacacuccuugucua

SEQ ID NO: 1796696 - RNA, 19 nt, Artificial Sequence
  Description of Artificial Sequence: Synthetic oligonucleotide
  Antisense strand to SEQ ID NO: 1796695
uagacaaggagugucccuu

SEQ ID NO: 1796697 - RNA, 19 nt, Artificial Sequence
  Description of Artificial Sequence: Synthetic oligonucleotide
  Sense strand starting at position 98 of SEQ ID NO: 1563120
agggacacuccuugucuaa

SEQ ID NO: 1796698 - RNA, 19 nt, Artificial Sequence
  Description of Artificial Sequence: Synthetic oligonucleotide
  Antisense strand to SEQ ID NO: 1796697
uuagacaaggagugucccu

SEQ ID NO: 1796699 - RNA, 19 nt, Artificial Sequence
  Description of Artificial Sequence: Synthetic oligonucleotide
  Sense strand starting at position 131 of SEQ ID NO: 1563120
aguguaauaagauguaaga

SEQ ID NO: 1796700 - RNA, 19 nt, Artificial Sequence
  Description of Artificial Sequence: Synthetic oligonucleotide
  Antisense strand to SEQ ID NO: 1796699
ucuuacaucuuauuacacu

SEQ ID NO: 1796701 - RNA, 19 nt, Artificial Sequence
  Description of Artificial Sequence: Synthetic oligonucleotide
  Sense strand starting at position 241 of SEQ ID NO: 1563120
uuggcauucuucucuagaa

SEQ ID NO: 1796702 - RNA, 19 nt, Artificial Sequence
  Description of Artificial Sequence: Synthetic oligonucleotide
  Antisense strand to SEQ ID NO: 1796701
uucuagagaagaaugccaa

SEQ ID NO: 1796703 - RNA, 19 nt, Artificial Sequence
  Description of Artificial Sequence: Synthetic oligonucleotide
  Sense strand starting at position 242 of SEQ ID NO: 1563120
uggcauucuucucuagaaa

SEQ ID NO: 1796704 - RNA, 19 nt, Artificial Sequence
  Description of Artificial Sequence: Synthetic oligonucleotide
  Antisense strand to SEQ ID NO: 1796703
uuucuagagaagaaugcca

SEQ ID NO: 1796705 - RNA, 19 nt, Artificial Sequence
  Description of Artificial Sequence: Synthetic oligonucleotide
  Sense strand starting at position 337 of SEQ ID NO: 1563120
agcuuuguuccgucucauu

SEQ ID NO: 1796706 - RNA, 19 nt, Artificial Sequence
  Description of Artificial Sequence: Synthetic oligonucleotide
  Antisense strand to SEQ ID NO: 1796705
aaugagacggaacaaagcu

SEQ ID NO: 1796707 - RNA, 19 nt, Artificial Sequence
  Description of Artificial Sequence: Synthetic oligonucleotide
  Sense strand starting at position 349 of SEQ ID NO: 1563120
ucucauuucugcucuggca

SEQ ID NO: 1796708 - RNA, 19 nt, Artificial Sequence
  Description of Artificial Sequence: Synthetic oligonucleotide
  Antisense strand to SEQ ID NO: 1796707
ugccagagcagaaaugaga

SEQ ID NO: 1796709 - RNA, 19 nt, Artificial Sequence
  Description of Artificial Sequence: Synthetic oligonucleotide
  Sense strand starting at position 351 of SEQ ID NO: 1563120
ucauuucugcucuggcauu

SEQ ID NO: 1796710 - RNA, 19 nt, Artificial Sequence
  Description of Artificial Sequence: Synthetic oligonucleotide
  Antisense strand to SEQ ID NO: 1796709
aaugccagagcagaaauga

SEQ ID NO: 1796711 - RNA, 19 nt, Artificial Sequence
  Description of Artificial Sequence: Synthetic oligonucleotide
  Sense strand starting at position 396 of SEQ ID NO: 1563120
ugccauuucugcucaacug

SEQ ID NO: 1796712 - RNA, 19 nt, Artificial Sequence
  Description of Artificial Sequence: Synthetic oligonucleotide
  Antisense strand to SEQ ID NO: 1796711
caguugagcagaaauggca

SEQ ID NO: 1796713 - RNA, 19 nt, Artificial Sequence
  Description of Artificial Sequence: Synthetic oligonucleotide
  Sense strand starting at position 417 of SEQ ID NO: 1563120
ggcuuuacaguagagaagu

SEQ ID NO: 1796714 - RNA, 19 nt, Artificial Sequence
  Description of Artificial Sequence: Synthetic oligonucleotide
  Antisense strand to SEQ ID NO: 1796713
acuucucuacuguaaagcc

SEQ ID NO: 1796715 - RNA, 19 nt, Artificial Sequence
  Description of Artificial Sequence: Synthetic oligonucleotide
  Sense strand starting at position 561 of SEQ ID NO: 1563120
gugcuuugaccugaaucag

SEQ ID NO: 1796716 - RNA, 19 nt, Artificial Sequence
  Description of Artificial Sequence: Synthetic oligonucleotide
  Antisense strand to SEQ ID NO: 1796715
cugauucaggucaaagcac

SEQ ID NO: 1796717 - RNA, 19 nt, Artificial Sequence
  Description of Artificial Sequence: Synthetic oligonucleotide
  Sense strand starting at position 935 of SEQ ID NO: 1563120
ggcuccaagcuguaacuau

SEQ ID NO: 1796718 - RNA, 19 nt, Artificial Sequence
  Description of Artificial Sequence: Synthetic oligonucleotide
  Antisense strand to SEQ ID NO: 1796717
auaguuacagcuuggagcc

SEQ ID NO: 1796719 - RNA, 19 nt, Artificial Sequence
  Description of Artificial Sequence: Synthetic oligonucleotide
  Sense strand starting at position 1340 of SEQ ID NO: 1563120
gcaaacagcuaguuauaaa

SEQ ID NO: 1796720 - RNA, 19 nt, Artificial Sequence
  Description of Artificial Sequence: Synthetic oligonucleotide
  Antisense strand to SEQ ID NO: 1796719
uuuauaacuagcuguuugc

SEQ ID NO: 1796721 - RNA, 19 nt, Artificial Sequence
  Description of Artificial Sequence: Synthetic oligonucleotide
  Sense strand starting at position 1610 of SEQ ID NO: 1563120
cucacuguguacucugaau

SEQ ID NO: 1796722 - RNA, 19 nt, Artificial Sequence
  Description of Artificial Sequence: Synthetic oligonucleotide
  Antisense strand to SEQ ID NO: 1796721
auucagaguacacagugag

SEQ ID NO: 1796723 - RNA, 19 nt, Artificial Sequence
  Description of Artificial Sequence: Synthetic oligonucleotide
  Sense strand starting at position 1901 of SEQ ID NO: 1563120
ucaguuaccuuguugaaau

SEQ ID NO: 1796724 - RNA, 19 nt, Artificial Sequence
  Description of Artificial Sequence: Synthetic oligonucleotide
  Antisense strand to SEQ ID NO: 1796723
auuucaacaagguaacuga

SEQ ID NO: 1796725 - RNA, 19 nt, Artificial Sequence
  Description of Artificial Sequence: Synthetic oligonucleotide
  Sense strand starting at position 2030 of SEQ ID NO: 1563120
ggaguuggcaguuagauca

SEQ ID NO: 1796726 - RNA, 19 nt, Artificial Sequence
  Description of Artificial Sequence: Synthetic oligonucleotide
  Antisense strand to SEQ ID NO: 1796725
ugaucuaacugccaacucc

SEQ ID NO: 1796727 - RNA, 19 nt, Artificial Sequence
  Description of Artificial Sequence: Synthetic oligonucleotide
  Sense strand starting at position 2040 of SEQ ID NO: 1563120
guuagaucagaaugggcuu

SEQ ID NO: 1796728 - RNA, 19 nt, Artificial Sequence
  Description of Artificial Sequence: Synthetic oligonucleotide
  Antisense strand to SEQ ID NO: 1796727
aagcccauucugaucuaac

SEQ ID NO: 1796729 - RNA, 19 nt, Artificial Sequence
  Description of Artificial Sequence: Synthetic oligonucleotide
  Sense strand starting at position 2054 of SEQ ID NO: 1563120
ggcuucucucaagagcaca

SEQ ID NO: 1796730 - RNA, 19 nt, Artificial Sequence
  Description of Artificial Sequence: Synthetic oligonucleotide
  Antisense strand to SEQ ID NO: 1796729
ugugcucuugagagaagcc

SEQ ID NO: 1796731 - RNA, 19 nt, Artificial Sequence
  Description of Artificial Sequence: Synthetic oligonucleotide
  Sense strand starting at position 2355 of SEQ ID NO: 1563120
ugcuauaaauaguugguau

SEQ ID NO: 1796732 - RNA, 19 nt, Artificial Sequence
  Description of Artificial Sequence: Synthetic oligonucleotide
  Antisense strand to SEQ ID NO: 1796731
auaccaacuauuuauagca

SEQ ID NO: 1796733 - RNA, 19 nt, Artificial Sequence
  Description of Artificial Sequence: Synthetic oligonucleotide
  Sense strand starting at position 2438 of SEQ ID NO: 1563120
gcaucuaaaggcuacaauu

SEQ ID NO: 1796734 - RNA, 19 nt, Artificial Sequence
  Description of Artificial Sequence: Synthetic oligonucleotide
  Antisense strand to SEQ ID NO: 1796733
aauuguagccuuuagaugc

SEQ ID NO: 1796735 - RNA, 19 nt, Artificial Sequence
  Description of Artificial Sequence: Synthetic oligonucleotide
  Sense strand starting at position 2456 of SEQ ID NO: 1563120
uuggaaauccugggcggua

SEQ ID NO: 1796736 - RNA, 19 nt, Artificial Sequence
  Description of Artificial Sequence: Synthetic oligonucleotide
  Antisense strand to SEQ ID NO: 1796735
uaccgcccaggauuuccaa

SEQ ID NO: 1796737 - RNA, 19 nt, Artificial Sequence
  Description of Artificial Sequence: Synthetic oligonucleotide
  Sense strand starting at position 2457 of SEQ ID NO: 1563120
uggaaauccugggcgguau

SEQ ID NO: 1796738 - RNA, 19 nt, Artificial Sequence
  Description of Artificial Sequence: Synthetic oligonucleotide
  Antisense strand to SEQ ID NO: 1796737
auaccgcccaggauuucca

SEQ ID NO: 1796739 - RNA, 19 nt, Artificial Sequence
  Description of Artificial Sequence: Synthetic oligonucleotide
  Sense strand starting at position 2458 of SEQ ID NO: 1563120
ggaaauccugggcgguaua

SEQ ID NO: 1796740 - RNA, 19 nt, Artificial Sequence
  Description of Artificial Sequence: Synthetic oligonucleotide
  Antisense strand to SEQ ID NO: 1796739
uauaccgcccaggauuucc

SEQ ID NO: 1796741 - RNA, 19 nt, Artificial Sequence
  Description of Artificial Sequence: Synthetic oligonucleotide
  Sense strand starting at position 2661 of SEQ ID NO: 1563120
cggccagaauaaucccuaa

SEQ ID NO: 1796742 - RNA, 19 nt, Artificial Sequence
  Description of Artificial Sequence: Synthetic oligonucleotide
  Antisense strand to SEQ ID NO: 1796741
uuagggauuauucuggccg

SEQ ID NO: 1796743 - RNA, 19 nt, Artificial Sequence
  Description of Artificial Sequence: Synthetic oligonucleotide
  Sense strand starting at position 2714 of SEQ ID NO: 1563120
ggaugcuccugauuaaaua

SEQ ID NO: 1796744 - RNA, 19 nt, Artificial Sequence
  Description of Artificial Sequence: Synthetic oligonucleotide
  Antisense strand to SEQ ID NO: 1796743
uauuuaaucaggagcaucc

SEQ ID NO: 1796745 - RNA, 19 nt, Artificial Sequence
  Description of Artificial Sequence: Synthetic oligonucleotide
  Sense strand starting at position 2742 of SEQ ID NO: 1563120
ugauuaagaggaugccuuu

SEQ ID NO: 1796746 - RNA, 19 nt, Artificial Sequence
  Description of Artificial Sequence: Synthetic oligonucleotide
  Antisense strand to SEQ ID NO: 1796745
aaaggcauccucuuaauca

SEQ ID NO: 1796747 - RNA, 19 nt, Artificial Sequence
  Description of Artificial Sequence: Synthetic oligonucleotide
  Sense strand starting at position 2745 of SEQ ID NO: 1563120
uuaagaggaugccuuuagu

SEQ ID NO: 1796748 - RNA, 19 nt, Artificial Sequence
  Description of Artificial Sequence: Synthetic oligonucleotide
  Antisense strand to SEQ ID NO: 1796747
acuaaaggcauccucuuaa

SEQ ID NO: 1796749 - RNA, 19 nt, Artificial Sequence
  Description of Artificial Sequence: Synthetic oligonucleotide
  Sense strand starting at position 2748 of SEQ ID NO: 1563120
agaggaugccuuuagucac

SEQ ID NO: 1796750 - RNA, 19 nt, Artificial Sequence
  Description of Artificial Sequence: Synthetic oligonucleotide
  Antisense strand to SEQ ID NO: 1796749
gugacuaaaggcauccucu

SEQ ID NO: 1796751 - RNA, 19 nt, Artificial Sequence
  Description of Artificial Sequence: Synthetic oligonucleotide
  Sense strand starting at position 2751 of SEQ ID NO: 1563120
ggaugccuuuagucacuca

SEQ ID NO: 1796752 - RNA, 19 nt, Artificial Sequence
  Description of Artificial Sequence: Synthetic oligonucleotide
  Antisense strand to SEQ ID NO: 1796751
ugagugacuaaaggcaucc

SEQ ID NO: 1796753 - RNA, 19 nt, Artificial Sequence
  Description of Artificial Sequence: Synthetic oligonucleotide
  Sense strand starting at position 2928 of SEQ ID NO: 1563120
acagguuggcaugacauua

SEQ ID NO: 1796754 - RNA, 19 nt, Artificial Sequence
  Description of Artificial Sequence: Synthetic oligonucleotide
  Antisense strand to SEQ ID NO: 1796753
uaaugucaugccaaccugu

SEQ ID NO: 1796755 - RNA, 19 nt, Artificial Sequence
  Description of Artificial Sequence: Synthetic oligonucleotide
  Sense strand starting at position 2958 of SEQ ID NO: 1563120
ugaguuauacuccaguaac

SEQ ID NO: 1796756 - RNA, 19 nt, Artificial Sequence
  Description of Artificial Sequence: Synthetic oligonucleotide
  Antisense strand to SEQ ID NO: 1796755
guuacuggaguauaacuca

SEQ ID NO: 1796757 - RNA, 19 nt, Artificial Sequence
  Description of Artificial Sequence: Synthetic oligonucleotide
  Sense strand starting at position 2961 of SEQ ID NO: 1563120
guuauacuccaguaacuga

SEQ ID NO: 1796758 - RNA, 19 nt, Artificial Sequence
  Description of Artificial Sequence: Synthetic oligonucleotide
  Antisense strand to SEQ ID NO: 1796757
ucaguuacuggaguauaac

SEQ ID NO: 1796759 - RNA, 19 nt, Artificial Sequence
  Description of Artificial Sequence: Synthetic oligonucleotide
  Sense strand starting at position 3078 of SEQ ID NO: 1563120
ugagucugaucccuugagu

SEQ ID NO: 1796760 - RNA, 19 nt, Artificial Sequence
  Description of Artificial Sequence: Synthetic oligonucleotide
  Antisense strand to SEQ ID NO: 1796759
acucaagggaucagacuca

SEQ ID NO: 1796761 - RNA, 19 nt, Artificial Sequence
  Description of Artificial Sequence: Synthetic oligonucleotide
  Sense strand starting at position 3081 of SEQ ID NO: 1563120
gucugaucccuugagucua

SEQ ID NO: 1796762 - RNA, 19 nt, Artificial Sequence
  Description of Artificial Sequence: Synthetic oligonucleotide
  Antisense strand to SEQ ID NO: 1796761
uagacucaagggaucagac

SEQ ID NO: 1796763 - RNA, 19 nt, Artificial Sequence
  Description of Artificial Sequence: Synthetic oligonucleotide
  Sense strand starting at position 3471 of SEQ ID NO: 1563120
aacguaaaugcuuaaguca

SEQ ID NO: 1796764 - RNA, 19 nt, Artificial Sequence
  Description of Artificial Sequence: Synthetic oligonucleotide
  Antisense strand to SEQ ID NO: 1796763
ugacuuaagcauuuacguu

SEQ ID NO: 1796765 - RNA, 19 nt, Artificial Sequence
  Description of Artificial Sequence: Synthetic oligonucleotide
  Sense strand starting at position 3668 of SEQ ID NO: 1563120
uuugcuugggcagacauua

SEQ ID NO: 1796766 - RNA, 19 nt, Artificial Sequence
  Description of Artificial Sequence: Synthetic oligonucleotide
  Antisense strand to SEQ ID NO: 1796765
uaaugucugcccaagcaaa

SEQ ID NO: 1796767 - RNA, 19 nt, Artificial Sequence
  Description of Artificial Sequence: Synthetic oligonucleotide
  Sense strand starting at position 3700 of SEQ ID NO: 1563120
cuauaauaucacggguagu

SEQ ID NO: 1796768 - RNA, 19 nt, Artificial Sequence
  Description of Artificial Sequence: Synthetic oligonucleotide
  Antisense strand to SEQ ID NO: 1796767
acuacccgugauauuauag

SEQ ID NO: 1796769 - RNA, 19 nt, Artificial Sequence
  Description of Artificial Sequence: Synthetic oligonucleotide
  Sense strand starting at position 3878 of SEQ ID NO: 1563120
gggucaucaugucuuaaug

SEQ ID NO: 1796770 - RNA, 19 nt, Artificial Sequence
  Description of Artificial Sequence: Synthetic oligonucleotide
  Antisense strand to SEQ ID NO: 1796769
cauuaagacaugaugaccc

SEQ ID NO: 1796771 - RNA, 19 nt, Artificial Sequence
  Description of Artificial Sequence: Synthetic oligonucleotide
  Sense strand starting at position 74 of SEQ ID NO: 1563121
ucaucugccuuauuggaga

SEQ ID NO: 1796772 - RNA, 19 nt, Artificial Sequence
  Description of Artificial Sequence: Synthetic oligonucleotide
  Antisense strand to SEQ ID NO: 1796771
ucuccaauaaggcagauga

SEQ ID NO: 1796773 - RNA, 19 nt, Artificial Sequence
  Description of Artificial Sequence: Synthetic oligonucleotide
  Sense strand starting at position 79 of SEQ ID NO: 1563121
ugccuuauuggagaacuac

SEQ ID NO: 1796774 - RNA, 19 nt, Artificial Sequence
  Description of Artificial Sequence: Synthetic oligonucleotide
  Antisense strand to SEQ ID NO: 1796773
guaguucuccaauaaggca

SEQ ID NO: 1796775 - RNA, 19 nt, Artificial Sequence
  Description of Artificial Sequence: Synthetic oligonucleotide
  Sense strand starting at position 116 of SEQ ID NO: 1563121
aagagaucauguguuagaa

SEQ ID NO: 1796776 - RNA, 19 nt, Artificial Sequence
  Description of Artificial Sequence: Synthetic oligonucleotide
  Antisense strand to SEQ ID NO: 1796775
uucuaacacaugaucucuu

SEQ ID NO: 1796777 - RNA, 19 nt, Artificial Sequence
  Description of Artificial Sequence: Synthetic oligonucleotide
  Sense strand starting at position 216 of SEQ ID NO: 1563121
uugaaugacucacuacagu

SEQ ID NO: 1796778 - RNA, 19 nt, Artificial Sequence
  Description of Artificial Sequence: Synthetic oligonucleotide
  Antisense strand to SEQ ID NO: 1796777
acuguagugagucauucaa

SEQ ID NO: 1796779 - RNA, 19 nt, Artificial Sequence
  Description of Artificial Sequence: Synthetic oligonucleotide
  Sense strand starting at position 809 of SEQ ID NO: 1563121
uguacaauccuugaaggca

SEQ ID NO: 1796780 - RNA, 19 nt, Artificial Sequence
  Description of Artificial Sequence: Synthetic oligonucleotide
  Antisense strand to SEQ ID NO: 1796779
ugccuucaaggauuguaca

SEQ ID NO: 1796781 - RNA, 19 nt, Artificial Sequence
  Description of Artificial Sequence: Synthetic oligonucleotide
  Sense strand starting at position 877 of SEQ ID NO: 1563121
caagguagacguuaaauau

SEQ ID NO: 1796782 - RNA, 19 nt, Artificial Sequence
  Description of Artificial Sequence: Synthetic oligonucleotide
  Antisense strand to SEQ ID NO: 1796781
auauuuaacgucuaccuug

SEQ ID NO: 1796783 - RNA, 19 nt, Artificial Sequence
  Description of Artificial Sequence: Synthetic oligonucleotide
  Sense strand starting at position 920 of SEQ ID NO: 1563121
agagguuguuucucauaca

SEQ ID NO: 1796784 - RNA, 19 nt, Artificial Sequence
  Description of Artificial Sequence: Synthetic oligonucleotide
  Antisense strand to SEQ ID NO: 1796783
uguaugagaaacaaccucu

SEQ ID NO: 1796785 - RNA, 19 nt, Artificial Sequence
  Description of Artificial Sequence: Synthetic oligonucleotide
  Sense strand starting at position 1017 of SEQ ID NO: 1563121
agauauacuuuaguacagu

SEQ ID NO: 1796786 - RNA, 19 nt, Artificial Sequence
  Description of Artificial Sequence: Synthetic oligonucleotide
  Antisense strand to SEQ ID NO: 1796785
acuguacuaaaguauaucu

SEQ ID NO: 1796787 - RNA, 19 nt, Artificial Sequence
  Description of Artificial Sequence: Synthetic oligonucleotide
  Sense strand starting at position 1065 of SEQ ID NO: 1563121
uccugagugagagguaaua

SEQ ID NO: 1796788 - RNA, 19 nt, Artificial Sequence
  Description of Artificial Sequence: Synthetic oligonucleotide
  Antisense strand to SEQ ID NO: 1796787
uauuaccucucacucagga

SEQ ID NO: 1796789 - RNA, 19 nt, Artificial Sequence
  Description of Artificial Sequence: Synthetic oligonucleotide
  Sense strand starting at position 1136 of SEQ ID NO: 1563121
ggauaaguagccuauggcu

SEQ ID NO: 1796790 - RNA, 19 nt, Artificial Sequence
  Description of Artificial Sequence: Synthetic oligonucleotide
  Antisense strand to SEQ ID NO: 1796789
agccauaggcuacuuaucc

SEQ ID NO: 1796791 - RNA, 19 nt, Artificial Sequence
  Description of Artificial Sequence: Synthetic oligonucleotide
  Sense strand starting at position 1245 of SEQ ID NO: 1563121
uggaaagauaguuacgguu

SEQ ID NO: 1796792 - RNA, 19 nt, Artificial Sequence
  Description of Artificial Sequence: Synthetic oligonucleotide
  Antisense strand to SEQ ID NO: 1796791
aaccguaacuaucuuucca

SEQ ID NO: 1796793 - RNA, 19 nt, Artificial Sequence
  Description of Artificial Sequence: Synthetic oligonucleotide
  Sense strand starting at position 1436 of SEQ ID NO: 1563121
cuuccucgucuuuagaaag

SEQ ID NO: 1796794 - RNA, 19 nt, Artificial Sequence
  Description of Artificial Sequence: Synthetic oligonucleotide
  Antisense strand to SEQ ID NO: 1796793
cuuucuaaagacgaggaag

SEQ ID NO: 1796795 - RNA, 19 nt, Artificial Sequence
  Description of Artificial Sequence: Synthetic oligonucleotide
  Sense strand starting at position 1928 of SEQ ID NO: 1563121
gccaucuugagcgaggaaa

SEQ ID NO: 1796796 - RNA, 19 nt, Artificial Sequence
  Description of Artificial Sequence: Synthetic oligonucleotide
  Antisense strand to SEQ ID NO: 1796795
uuuccucgcucaagauggc

SEQ ID NO: 1796797 - RNA, 19 nt, Artificial Sequence
  Description of Artificial Sequence: Synthetic oligonucleotide
  Sense strand starting at position 1930 of SEQ ID NO: 1563121
caucuugagcgaggaaaga

SEQ ID NO: 1796798 - RNA, 19 nt, Artificial Sequence
  Description of Artificial Sequence: Synthetic oligonucleotide
  Antisense strand to SEQ ID NO: 1796797
ucuuuccucgcucaagaug

SEQ ID NO: 1796799 - RNA, 19 nt, Artificial Sequence
  Description of Artificial Sequence: Synthetic oligonucleotide
  Sense strand starting at position 1984 of SEQ ID NO: 1563121
acugaauucggcuaccuua

SEQ ID NO: 1796800 - RNA, 19 nt, Artificial Sequence
  Description of Artificial Sequence: Synthetic oligonucleotide
  Antisense strand to SEQ ID NO: 1796799
uaagguagccgaauucagu

SEQ ID NO: 1796801 - RNA, 19 nt, Artificial Sequence
  Description of Artificial Sequence: Synthetic oligonucleotide
  Sense strand starting at position 2045 of SEQ ID NO: 1563121
aauggauucuguuugaaga

SEQ ID NO: 1796802 - RNA, 19 nt, Artificial Sequence
  Description of Artificial Sequence: Synthetic oligonucleotide
  Antisense strand to SEQ ID NO: 1796801
ucuucaaacagaauccauu

SEQ ID NO: 1796803 - RNA, 19 nt, Artificial Sequence
  Description of Artificial Sequence: Synthetic oligonucleotide
  Sense strand starting at position 2046 of SEQ ID NO: 1563121
auggauucuguuugaagau

SEQ ID NO: 1796804 - RNA, 19 nt, Artificial Sequence
  Description of Artificial Sequence: Synthetic oligonucleotide
  Antisense strand to SEQ ID NO: 1796803
aucuucaaacagaauccau

SEQ ID NO: 1796805 - RNA, 19 nt, Artificial Sequence
  Description of Artificial Sequence: Synthetic oligonucleotide
  Sense strand starting at position 2177 of SEQ ID NO: 1563121
ggaguugccagaugaaaua

SEQ ID NO: 1796806 - RNA, 19 nt, Artificial Sequence
  Description of Artificial Sequence: Synthetic oligonucleotide
  Antisense strand to SEQ ID NO: 1796805
uauuucaucuggcaacucc

SEQ ID NO: 1796807 - RNA, 19 nt, Artificial Sequence
  Description of Artificial Sequence: Synthetic oligonucleotide
  Sense strand starting at position 2448 of SEQ ID NO: 1563121
cuguaagauuuacugcuuu

SEQ ID NO: 1796808 - RNA, 19 nt, Artificial Sequence
  Description of Artificial Sequence: Synthetic oligonucleotide
  Antisense strand to SEQ ID NO: 1796807
aaagcaguaaaucuuacag

SEQ ID NO: 1796809 - RNA, 19 nt, Artificial Sequence
  Description of Artificial Sequence: Synthetic oligonucleotide
  Sense strand starting at position 2473 of SEQ ID NO: 1563121
cuguaaggacuuuaacuuu

SEQ ID NO: 1796810 - RNA, 19 nt, Artificial Sequence
  Description of Artificial Sequence: Synthetic oligonucleotide
  Antisense strand to SEQ ID NO: 1796809
aaaguuaaaguccuuacag

SEQ ID NO: 1796811 - RNA, 19 nt, Artificial Sequence
  Description of Artificial Sequence: Synthetic oligonucleotide
  Sense strand starting at position 2495 of SEQ ID NO: 1563121
gauuguucucuguugcgca

SEQ ID NO: 1796812 - RNA, 19 nt, Artificial Sequence
  Description of Artificial Sequence: Synthetic oligonucleotide
  Antisense strand to SEQ ID NO: 1796811
ugcgcaacagagaacaauc

SEQ ID NO: 1796813 - RNA, 19 nt, Artificial Sequence
  Description of Artificial Sequence: Synthetic oligonucleotide
  Sense strand starting at position 2497 of SEQ ID NO: 1563121
uuguucucuguugcgcaaa

SEQ ID NO: 1796814 - RNA, 19 nt, Artificial Sequence
  Description of Artificial Sequence: Synthetic oligonucleotide
  Antisense strand to SEQ ID NO: 1796813
uuugcgcaacagagaacaa

SEQ ID NO: 1796815 - RNA, 19 nt, Artificial Sequence
  Description of Artificial Sequence: Synthetic oligonucleotide
  Sense strand starting at position 2786 of SEQ ID NO: 1563121
guuuacaguuaucuaggaa

SEQ ID NO: 1796816 - RNA, 19 nt, Artificial Sequence
  Description of Artificial Sequence: Synthetic oligonucleotide
  Antisense strand to SEQ ID NO: 1796815
uuccuagauaacuguaaac

SEQ ID NO: 1796817 - RNA, 19 nt, Artificial Sequence
  Description of Artificial Sequence: Synthetic oligonucleotide
  Sense strand starting at position 2818 of SEQ ID NO: 1563121
uuguaaauguuaccugaaa

SEQ ID NO: 1796818 - RNA, 19 nt, Artificial Sequence
  Description of Artificial Sequence: Synthetic oligonucleotide
  Antisense strand to SEQ ID NO: 1796817
uuucagguaacauuuacaa

SEQ ID NO: 1796819 - RNA, 19 nt, Artificial Sequence
  Description of Artificial Sequence: Synthetic oligonucleotide
  Sense strand starting at position 2935 of SEQ ID NO: 1563121
gguacuuuggacuaguaag

SEQ ID NO: 1796820 - RNA, 19 nt, Artificial Sequence
  Description of Artificial Sequence: Synthetic oligonucleotide
  Antisense strand to SEQ ID NO: 1796819
cuuacuaguccaaaguacc

SEQ ID NO: 1796821 - RNA, 19 nt, Artificial Sequence
  Description of Artificial Sequence: Synthetic oligonucleotide
  Sense strand starting at position 3075 of SEQ ID NO: 1563121
acuggaauuacacguaaag

SEQ ID NO: 1796822 - RNA, 19 nt, Artificial Sequence
  Description of Artificial Sequence: Synthetic oligonucleotide
  Antisense strand to SEQ ID NO: 1796821
cuuuacguguaauuccagu

SEQ ID NO: 1796823 - RNA, 19 nt, Artificial Sequence
  Description of Artificial Sequence: Synthetic oligonucleotide
  Sense strand starting at position 3147 of SEQ ID NO: 1563121
gucuauggaguuugggaaa

SEQ ID NO: 1796824 - RNA, 19 nt, Artificial Sequence
  Description of Artificial Sequence: Synthetic oligonucleotide
  Antisense strand to SEQ ID NO: 1796823
uuucccaaacuccauagac

SEQ ID NO: 1796825 - RNA, 19 nt, Artificial Sequence
  Description of Artificial Sequence: Synthetic oligonucleotide
  Sense strand starting at position 3174 of SEQ ID NO: 1563121
agguuaaccugagugaaca

SEQ ID NO: 1796826 - RNA, 19 nt, Artificial Sequence
  Description of Artificial Sequence: Synthetic oligonucleotide
  Antisense strand to SEQ ID NO: 1796825
uguucacucagguuaaccu

SEQ ID NO: 1796827 - RNA, 19 nt, Artificial Sequence
  Description of Artificial Sequence: Synthetic oligonucleotide
  Sense strand starting at position 3175 of SEQ ID NO: 1563121
gguuaaccugagugaacag

SEQ ID NO: 1796828 - RNA, 19 nt, Artificial Sequence
  Description of Artificial Sequence: Synthetic oligonucleotide
  Antisense strand to SEQ ID NO: 1796827
cuguucacucagguuaacc

SEQ ID NO: 1796829 - RNA, 19 nt, Artificial Sequence
  Description of Artificial Sequence: Synthetic oligonucleotide
  Sense strand starting at position 3245 of SEQ ID NO: 1563121
uccuauaaccagugaagag

SEQ ID NO: 1796830 - RNA, 19 nt, Artificial Sequence
  Description of Artificial Sequence: Synthetic oligonucleotide
  Antisense strand to SEQ ID NO: 1796829
cucuucacugguuauagga

SEQ ID NO: 1796831 - RNA, 19 nt, Artificial Sequence
  Description of Artificial Sequence: Synthetic oligonucleotide
  Sense strand starting at position 3457 of SEQ ID NO: 1563121
uggcaagacuuagugacua

SEQ ID NO: 1796832 - RNA, 19 nt, Artificial Sequence
  Description of Artificial Sequence: Synthetic oligonucleotide
  Antisense strand to SEQ ID NO: 1796831
uagucacuaagucuugcca

SEQ ID NO: 1796833 - RNA, 19 nt, Artificial Sequence
  Description of Artificial Sequence: Synthetic oligonucleotide
  Sense strand starting at position 3470 of SEQ ID NO: 1563121
ugacuaauuggauguuucu

SEQ ID NO: 1796834 - RNA, 19 nt, Artificial Sequence
  Description of Artificial Sequence: Synthetic oligonucleotide
  Antisense strand to SEQ ID NO: 1796833
agaaacauccaauuaguca

SEQ ID NO: 1796835 - RNA, 19 nt, Artificial Sequence
  Description of Artificial Sequence: Synthetic oligonucleotide
  Sense strand starting at position 3496 of SEQ ID NO: 1563121
uauuguauuguugacagua

SEQ ID NO: 1796836 - RNA, 19 nt, Artificial Sequence
  Description of Artificial Sequence: Synthetic oligonucleotide
  Antisense strand to SEQ ID NO: 1796835
uacugucaacaauacaaua

SEQ ID NO: 1796837 - RNA, 19 nt, Artificial Sequence
  Description of Artificial Sequence: Synthetic oligonucleotide
  Sense strand starting at position 3501 of SEQ ID NO: 1563121
uauuguugacaguagauca

SEQ ID NO: 1796838 - RNA, 19 nt, Artificial Sequence
  Description of Artificial Sequence: Synthetic oligonucleotide
  Antisense strand to SEQ ID NO: 1796837
ugaucuacugucaacaaua

SEQ ID NO: 1796839 - RNA, 19 nt, Artificial Sequence
  Description of Artificial Sequence: Synthetic oligonucleotide
  Sense strand starting at position 3583 of SEQ ID NO: 1563121
guuagacagcuacaguaua

SEQ ID NO: 1796840 - RNA, 19 nt, Artificial Sequence
  Description of Artificial Sequence: Synthetic oligonucleotide
  Antisense strand to SEQ ID NO: 1796839
uauacuguagcugucuaac

SEQ ID NO: 1796841 - RNA, 19 nt, Artificial Sequence
  Description of Artificial Sequence: Synthetic oligonucleotide
  Sense strand starting at position 3634 of SEQ ID NO: 1563121
ucucuuagggcugaauauu

SEQ ID NO: 1796842 - RNA, 19 nt, Artificial Sequence
  Description of Artificial Sequence: Synthetic oligonucleotide
  Antisense strand to SEQ ID NO: 1796841
aauauucagcccuaagaga

SEQ ID NO: 1796843 - RNA, 19 nt, Artificial Sequence
  Description of Artificial Sequence: Synthetic oligonucleotide
  Sense strand starting at position 3675 of SEQ ID NO: 1563121
uuguaaagucuuugaaugg

SEQ ID NO: 1796844 - RNA, 19 nt, Artificial Sequence
  Description of Artificial Sequence: Synthetic oligonucleotide
  Antisense strand to SEQ ID NO: 1796843
ccauucaaagacuuuacaa

SEQ ID NO: 1796845 - RNA, 19 nt, Artificial Sequence
  Description of Artificial Sequence: Synthetic oligonucleotide
  Sense strand starting at position 3783 of SEQ ID NO: 1563121
uuacucuaugaugagcuaa

SEQ ID NO: 1796846 - RNA, 19 nt, Artificial Sequence
  Description of Artificial Sequence: Synthetic oligonucleotide
  Antisense strand to SEQ ID NO: 1796845
uuagcucaucauagaguaa

SEQ ID NO: 1796847 - RNA, 19 nt, Artificial Sequence
  Description of Artificial Sequence: Synthetic oligonucleotide
  Sense strand starting at position 3797 of SEQ ID NO: 1563121
gcuaaagugaggcaaauau

SEQ ID NO: 1796848 - RNA, 19 nt, Artificial Sequence
  Description of Artificial Sequence: Synthetic oligonucleotide
  Antisense strand to SEQ ID NO: 1796847
auauuugccucacuuuagc

SEQ ID NO: 1796849 - RNA, 19 nt, Artificial Sequence
  Description of Artificial Sequence: Synthetic oligonucleotide
  Sense strand starting at position 3822 of SEQ ID NO: 1563121
gccaaauaagccgaagaaa

SEQ ID NO: 1796850 - RNA, 19 nt, Artificial Sequence
  Description of Artificial Sequence: Synthetic oligonucleotide
  Antisense strand to SEQ ID NO: 1796849
uuucuucggcuuauuuggc

SEQ ID NO: 1796851 - RNA, 19 nt, Artificial Sequence
  Description of Artificial Sequence: Synthetic oligonucleotide
  Sense strand starting at position 202 of SEQ ID NO: 1563122
ugggcugagucaugcccau

SEQ ID NO: 1796852 - RNA, 19 nt, Artificial Sequence
  Description of Artificial Sequence: Synthetic oligonucleotide
  Antisense strand to SEQ ID NO: 1796851
augggcaugacucagccca

SEQ ID NO: 1796853 - RNA, 19 nt, Artificial Sequence
  Description of Artificial Sequence: Synthetic oligonucleotide
  Sense strand starting at position 206 of SEQ ID NO: 1563122
cugagucaugcccauaaug

SEQ ID NO: 1796854 - RNA, 19 nt, Artificial Sequence
  Description of Artificial Sequence: Synthetic oligonucleotide
  Antisense strand to SEQ ID NO: 1796853
cauuaugggcaugacucag

SEQ ID NO: 1796855 - RNA, 19 nt, Artificial Sequence
  Description of Artificial Sequence: Synthetic oligonucleotide
  Sense strand starting at position 2482 of SEQ ID NO: 1563122
gugggagaguucuguugcu

SEQ ID NO: 1796856 - RNA, 19 nt, Artificial Sequence
  Description of Artificial Sequence: Synthetic oligonucleotide
  Antisense strand to SEQ ID NO: 1796855
agcaacagaacucucccac

SEQ ID NO: 1796857 - RNA, 19 nt, Artificial Sequence
  Description of Artificial Sequence: Synthetic oligonucleotide
  Sense strand starting at position 2513 of SEQ ID NO: 1563122
gcacguugacugugggaaa

SEQ ID NO: 1796858 - RNA, 19 nt, Artificial Sequence
  Description of Artificial Sequence: Synthetic oligonucleotide
  Antisense strand to SEQ ID NO: 1796857
uuucccacagucaacgugc

SEQ ID NO: 1796859 - RNA, 19 nt, Artificial Sequence
  Description of Artificial Sequence: Synthetic oligonucleotide
  Sense strand starting at position 2863 of SEQ ID NO: 1563122
ccuggcuucugaggauacu

SEQ ID NO: 1796860 - RNA, 19 nt, Artificial Sequence
  Description of Artificial Sequence: Synthetic oligonucleotide
  Antisense strand to SEQ ID NO: 1796859
aguauccucagaagccagg

SEQ ID NO: 1796861 - RNA, 19 nt, Artificial Sequence
  Description of Artificial Sequence: Synthetic oligonucleotide
  Sense strand starting at position 2872 of SEQ ID NO: 1563122
ugaggauacugcgucuaga

SEQ ID NO: 1796862 - RNA, 19 nt, Artificial Sequence
  Description of Artificial Sequence: Synthetic oligonucleotide
  Antisense strand to SEQ ID NO: 1796861
ucuagacgcaguauccuca

SEQ ID NO: 1796863 - RNA, 19 nt, Artificial Sequence
  Description of Artificial Sequence: Synthetic oligonucleotide
  Sense strand starting at position 2875 of SEQ ID NO: 1563122
ggauacugcgucuagaacu

SEQ ID NO: 1796864 - RNA, 19 nt, Artificial Sequence
  Description of Artificial Sequence: Synthetic oligonucleotide
  Antisense strand to SEQ ID NO: 1796863
aguucuagacgcaguaucc

SEQ ID NO: 1796865 - RNA, 19 nt, Artificial Sequence
  Description of Artificial Sequence: Synthetic oligonucleotide
  Sense strand starting at position 2885 of SEQ ID NO: 1563122
ucuagaacuuucuccguau

SEQ ID NO: 1796866 - RNA, 19 nt, Artificial Sequence
  Description of Artificial Sequence: Synthetic oligonucleotide
  Antisense strand to SEQ ID NO: 1796865
auacggagaaaguucuaga

SEQ ID NO: 1796867 - RNA, 19 nt, Artificial Sequence
  Description of Artificial Sequence: Synthetic oligonucleotide
  Sense strand starting at position 2886 of SEQ ID NO: 1563122
cuagaacuuucuccguaug

SEQ ID NO: 1796868 - RNA, 19 nt, Artificial Sequence
  Description of Artificial Sequence: Synthetic oligonucleotide
  Antisense strand to SEQ ID NO: 1796867
cauacggagaaaguucuag

SEQ ID NO: 1796869 - RNA, 19 nt, Artificial Sequence
  Description of Artificial Sequence: Synthetic oligonucleotide
  Sense strand starting at position 3241 of SEQ ID NO: 1563122
acugcucuucccgaagaac

SEQ ID NO: 1796870 - RNA, 19 nt, Artificial Sequence
  Description of Artificial Sequence: Synthetic oligonucleotide
  Antisense strand to SEQ ID NO: 1796869
guucuucgggaagagcagu

SEQ ID NO: 1796871 - RNA, 19 nt, Artificial Sequence
  Description of Artificial Sequence: Synthetic oligonucleotide
  Sense strand starting at position 3359 of SEQ ID NO: 1563122
cagguaauugaccagcgaa

SEQ ID NO: 1796872 - RNA, 19 nt, Artificial Sequence
  Description of Artificial Sequence: Synthetic oligonucleotide
  Antisense strand to SEQ ID NO: 1796871
uucgcuggucaauuaccug

SEQ ID NO: 1796873 - RNA, 19 nt, Artificial Sequence
  Description of Artificial Sequence: Synthetic oligonucleotide
  Sense strand starting at position 3451 of SEQ ID NO: 1563122
aucagagacuuugaagcaa

SEQ ID NO: 1796874 - RNA, 19 nt, Artificial Sequence
  Description of Artificial Sequence: Synthetic oligonucleotide
  Antisense strand to SEQ ID NO: 1796873
uugcuucaaagucucugau

SEQ ID NO: 1796875 - RNA, 19 nt, Artificial Sequence
  Description of Artificial Sequence: Synthetic oligonucleotide
  Sense strand starting at position 3549 of SEQ ID NO: 1563122
uuacaagucccguaccuuu

SEQ ID NO: 1796876 - RNA, 19 nt, Artificial Sequence
  Description of Artificial Sequence: Synthetic oligonucleotide
  Antisense strand to SEQ ID NO: 1796875
aaagguacgggacuuguaa

SEQ ID NO: 1796877 - RNA, 19 nt, Artificial Sequence
  Description of Artificial Sequence: Synthetic oligonucleotide
  Sense strand starting at position 3589 of SEQ ID NO: 1563122
cucacaucuuccuguggga

SEQ ID NO: 1796878 - RNA, 19 nt, Artificial Sequence
  Description of Artificial Sequence: Synthetic oligonucleotide
  Antisense strand to SEQ ID NO: 1796877
ucccacaggaagaugugag

SEQ ID NO: 1796879 - RNA, 19 nt, Artificial Sequence
  Description of Artificial Sequence: Synthetic oligonucleotide
  Sense strand starting at position 3591 of SEQ ID NO: 1563122
cacaucuuccugugggaaa

SEQ ID NO: 1796880 - RNA, 19 nt, Artificial Sequence
  Description of Artificial Sequence: Synthetic oligonucleotide
  Antisense strand to SEQ ID NO: 1796879
uuucccacaggaagaugug

SEQ ID NO: 1796881 - RNA, 19 nt, Artificial Sequence
  Description of Artificial Sequence: Synthetic oligonucleotide
  Sense strand starting at position 3592 of SEQ ID NO: 1563122
acaucuuccugugggaaac

SEQ ID NO: 1796882 - RNA, 19 nt, Artificial Sequence
  Description of Artificial Sequence: Synthetic oligonucleotide
  Antisense strand to SEQ ID NO: 1796881
guuucccacaggaagaugu

SEQ ID NO: 1796883 - RNA, 19 nt, Artificial Sequence
  Description of Artificial Sequence: Synthetic oligonucleotide
  Sense strand starting at position 3603 of SEQ ID NO: 1563122
ugggaaaccuucuagcaac

SEQ ID NO: 1796884 - RNA, 19 nt, Artificial Sequence
  Description of Artificial Sequence: Synthetic oligonucleotide
  Antisense strand to SEQ ID NO: 1796883
guugcuagaagguuuccca

SEQ ID NO: 1796885 - RNA, 19 nt, Artificial Sequence
  Description of Artificial Sequence: Synthetic oligonucleotide
  Sense strand starting at position 3623 of SEQ ID NO: 1563122
ggaugagucugcaguggac

SEQ ID NO: 1796886 - RNA, 19 nt, Artificial Sequence
  Description of Artificial Sequence: Synthetic oligonucleotide
  Antisense strand to SEQ ID NO: 1796885
guccacugcagacucaucc

SEQ ID NO: 1796887 - RNA, 19 nt, Artificial Sequence
  Description of Artificial Sequence: Synthetic oligonucleotide
  Sense strand starting at position 3791 of SEQ ID NO: 1563122
gcugguggacccuggaauu

SEQ ID NO: 1796888 - RNA, 19 nt, Artificial Sequence
  Description of Artificial Sequence: Synthetic oligonucleotide
  Antisense strand to SEQ ID NO: 1796887
aauuccaggguccaccagc

SEQ ID NO: 1796889 - RNA, 19 nt, Artificial Sequence
  Description of Artificial Sequence: Synthetic oligonucleotide
  Sense strand starting at position 3859 of SEQ ID NO: 1563122
uuguguuuguuauugccaa

SEQ ID NO: 1796890 - RNA, 19 nt, Artificial Sequence
  Description of Artificial Sequence: Synthetic oligonucleotide
  Antisense strand to SEQ ID NO: 1796889
uuggcaauaacaaacacaa

SEQ ID NO: 1796891 - RNA, 19 nt, Artificial Sequence
  Description of Artificial Sequence: Synthetic oligonucleotide
  Sense strand starting at position 3863 of SEQ ID NO: 1563122
guuuguuauugccaacccu

SEQ ID NO: 1796892 - RNA, 19 nt, Artificial Sequence
  Description of Artificial Sequence: Synthetic oligonucleotide
  Antisense strand to SEQ ID NO: 1796891
aggguuggcaauaacaaac

SEQ ID NO: 1796893 - RNA, 19 nt, Artificial Sequence
  Description of Artificial Sequence: Synthetic oligonucleotide
  Sense strand starting at position 3887 of SEQ ID NO: 1563122
ggguucugcuucgucauga

SEQ ID NO: 1796894 - RNA, 19 nt, Artificial Sequence
  Description of Artificial Sequence: Synthetic oligonucleotide
  Antisense strand to SEQ ID NO: 1796893
ucaugacgaagcagaaccc

SEQ ID NO: 1796895 - RNA, 19 nt, Artificial Sequence
  Description of Artificial Sequence: Synthetic oligonucleotide
  Sense strand starting at position 3898 of SEQ ID NO: 1563122
cgucaugacuugcucaguu

SEQ ID NO: 1796896 - RNA, 19 nt, Artificial Sequence
  Description of Artificial Sequence: Synthetic oligonucleotide
  Antisense strand to SEQ ID NO: 1796895
aacugagcaagucaugacg

SEQ ID NO: 1796897 - RNA, 19 nt, Artificial Sequence
  Description of Artificial Sequence: Synthetic oligonucleotide
  Sense strand starting at position 3966 of SEQ ID NO: 1563122
caggaagaucuauguuaca

SEQ ID NO: 1796898 - RNA, 19 nt, Artificial Sequence
  Description of Artificial Sequence: Synthetic oligonucleotide
  Antisense strand to SEQ ID NO: 1796897
uguaacauagaucuuccug

SEQ ID NO: 1796899 - RNA, 19 nt, Artificial Sequence
  Description of Artificial Sequence: Synthetic oligonucleotide
  Sense strand starting at position 3969 of SEQ ID NO: 1563122
gaagaucuauguuacaguu

SEQ ID NO: 1796900 - RNA, 19 nt, Artificial Sequence
  Description of Artificial Sequence: Synthetic oligonucleotide
  Antisense strand to SEQ ID NO: 1796899
aacuguaacauagaucuuc

SEQ ID NO: 1796901 - RNA, 19 nt, Artificial Sequence
  Description of Artificial Sequence: Synthetic oligonucleotide
  Sense strand starting at position 3977 of SEQ ID NO: 1563122
auguuacaguucuggaaau

SEQ ID NO: 1796902 - RNA, 19 nt, Artificial Sequence
  Description of Artificial Sequence: Synthetic oligonucleotide
  Antisense strand to SEQ ID NO: 1796901
auuuccagaacuguaacau

SEQ ID NO: 1796903 - RNA, 19 nt, Artificial Sequence
  Description of Artificial Sequence: Synthetic oligonucleotide
  Sense strand starting at position 3978 of SEQ ID NO: 1563122
uguuacaguucuggaaaug

SEQ ID NO: 1796904 - RNA, 19 nt, Artificial Sequence
  Description of Artificial Sequence: Synthetic oligonucleotide
  Antisense strand to SEQ ID NO: 1796903
cauuuccagaacuguaaca

SEQ ID NO: 1796905 - RNA, 19 nt, Artificial Sequence
  Description of Artificial Sequence: Synthetic oligonucleotide
  Sense strand starting at position 162 of SEQ ID NO: 1563123
cuuggaggucugugacaaa

SEQ ID NO: 1796906 - RNA, 19 nt, Artificial Sequence
  Description of Artificial Sequence: Synthetic oligonucleotide
  Antisense strand to SEQ ID NO: 1796905
uuugucacagaccuccaag

SEQ ID NO: 1796907 - RNA, 19 nt, Artificial Sequence
  Description of Artificial Sequence: Synthetic oligonucleotide
  Sense strand starting at position 284 of SEQ ID NO: 1563123
uguagagaaucuuuagaua

SEQ ID NO: 1796908 - RNA, 19 nt, Artificial Sequence
  Description of Artificial Sequence: Synthetic oligonucleotide
  Antisense strand to SEQ ID NO: 1796907
uaucuaaagauucucuaca

SEQ ID NO: 1796909 - RNA, 19 nt, Artificial Sequence
  Description of Artificial Sequence: Synthetic oligonucleotide
  Sense strand starting at position 308 of SEQ ID NO: 1563123
auugauauuguaggcuaaa

SEQ ID NO: 1796910 - RNA, 19 nt, Artificial Sequence
  Description of Artificial Sequence: Synthetic oligonucleotide
  Antisense strand to SEQ ID NO: 1796909
uuuagccuacaauaucaau

SEQ ID NO: 1796911 - RNA, 19 nt, Artificial Sequence
  Description of Artificial Sequence: Synthetic oligonucleotide
  Sense strand starting at position 309 of SEQ ID NO: 1563123
uugauauuguaggcuaaag

SEQ ID NO: 1796912 - RNA, 19 nt, Artificial Sequence
  Description of Artificial Sequence: Synthetic oligonucleotide
  Antisense strand to SEQ ID NO: 1796911
cuuuagccuacaauaucaa

SEQ ID NO: 1796913 - RNA, 19 nt, Artificial Sequence
  Description of Artificial Sequence: Synthetic oligonucleotide
  Sense strand starting at position 369 of SEQ ID NO: 1563123
cuuugaaauccugacugug

SEQ ID NO: 1796914 - RNA, 19 nt, Artificial Sequence
  Description of Artificial Sequence: Synthetic oligonucleotide
  Antisense strand to SEQ ID NO: 1796913
cacagucaggauuucaaag

SEQ ID NO: 1796915 - RNA, 19 nt, Artificial Sequence
  Description of Artificial Sequence: Synthetic oligonucleotide
  Sense strand starting at position 371 of SEQ ID NO: 1563123
uugaaauccugacugugau

SEQ ID NO: 1796916 - RNA, 19 nt, Artificial Sequence
  Description of Artificial Sequence: Synthetic oligonucleotide
  Antisense strand to SEQ ID NO: 1796915
aucacagucaggauuucaa

SEQ ID NO: 1796917 - RNA, 19 nt, Artificial Sequence
  Description of Artificial Sequence: Synthetic oligonucleotide
  Sense strand starting at position 372 of SEQ ID NO: 1563123
ugaaauccugacugugaug

SEQ ID NO: 1796918 - RNA, 19 nt, Artificial Sequence
  Description of Artificial Sequence: Synthetic oligonucleotide
  Antisense strand to SEQ ID NO: 1796917
caucacagucaggauuuca

SEQ ID NO: 1796919 - RNA, 19 nt, Artificial Sequence
  Description of Artificial Sequence: Synthetic oligonucleotide
  Sense strand starting at position 390 of SEQ ID NO: 1563123
gagaauuauggugguaacu

SEQ ID NO: 1796920 - RNA, 19 nt, Artificial Sequence
  Description of Artificial Sequence: Synthetic oligonucleotide
  Antisense strand to SEQ ID NO: 1796919
aguuaccaccauaauucuc

SEQ ID NO: 1796921 - RNA, 19 nt, Artificial Sequence
  Description of Artificial Sequence: Synthetic oligonucleotide
  Sense strand starting at position 499 of SEQ ID NO: 1563123
uaaguuuaguuaucuggga

SEQ ID NO: 1796922 - RNA, 19 nt, Artificial Sequence
  Description of Artificial Sequence: Synthetic oligonucleotide
  Antisense strand to SEQ ID NO: 1796921
ucccagauaacuaaacuua

SEQ ID NO: 1796923 - RNA, 19 nt, Artificial Sequence
  Description of Artificial Sequence: Synthetic oligonucleotide
  Sense strand starting at position 603 of SEQ ID NO: 1563123
guaaucuaaucuuuaagag

SEQ ID NO: 1796924 - RNA, 19 nt, Artificial Sequence
  Description of Artificial Sequence: Synthetic oligonucleotide
  Antisense strand to SEQ ID NO: 1796923
cucuuaaagauuagauuac

SEQ ID NO: 1796925 - RNA, 19 nt, Artificial Sequence
  Description of Artificial Sequence: Synthetic oligonucleotide
  Sense strand starting at position 632 of SEQ ID NO: 1563123
gcccaauagagccaugaga

SEQ ID NO: 1796926 - RNA, 19 nt, Artificial Sequence
  Description of Artificial Sequence: Synthetic oligonucleotide
  Antisense strand to SEQ ID NO: 1796925
ucucauggcucuauugggc

SEQ ID NO: 1796927 - RNA, 19 nt, Artificial Sequence
  Description of Artificial Sequence: Synthetic oligonucleotide
  Sense strand starting at position 634 of SEQ ID NO: 1563123
ccaauagagccaugagaac

SEQ ID NO: 1796928 - RNA, 19 nt, Artificial Sequence
  Description of Artificial Sequence: Synthetic oligonucleotide
  Antisense strand to SEQ ID NO: 1796927
guucucauggcucuauugg

SEQ ID NO: 1796929 - RNA, 19 nt, Artificial Sequence
  Description of Artificial Sequence: Synthetic oligonucleotide
  Sense strand starting at position 706 of SEQ ID NO: 1563123
gcaagugaacuuugauaga

SEQ ID NO: 1796930 - RNA, 19 nt, Artificial Sequence
  Description of Artificial Sequence: Synthetic oligonucleotide
  Antisense strand to SEQ ID NO: 1796929
ucuaucaaaguucacuugc

SEQ ID NO: 1796931 - RNA, 19 nt, Artificial Sequence
  Description of Artificial Sequence: Synthetic oligonucleotide
  Sense strand starting at position 825 of SEQ ID NO: 1563123
ccaggaagagcuugacauc

SEQ ID NO: 1796932 - RNA, 19 nt, Artificial Sequence
  Description of Artificial Sequence: Synthetic oligonucleotide
  Antisense strand to SEQ ID NO: 1796931
gaugucaagcucuuccugg

SEQ ID NO: 1796933 - RNA, 19 nt, Artificial Sequence
  Description of Artificial Sequence: Synthetic oligonucleotide
  Sense strand starting at position 871 of SEQ ID NO: 1563123
cugaaugacuuucccuaga

SEQ ID NO: 1796934 - RNA, 19 nt, Artificial Sequence
  Description of Artificial Sequence: Synthetic oligonucleotide
  Antisense strand to SEQ ID NO: 1796933
ucuagggaaagucauucag

SEQ ID NO: 1796935 - RNA, 19 nt, Artificial Sequence
  Description of Artificial Sequence: Synthetic oligonucleotide
  Sense strand starting at position 1336 of SEQ ID NO: 1563123
ucucuacuugggcaacauu

SEQ ID NO: 1796936 - RNA, 19 nt, Artificial Sequence
  Description of Artificial Sequence: Synthetic oligonucleotide
  Antisense strand to SEQ ID NO: 1796935
aauguugcccaaguagaga

SEQ ID NO: 1796937 - RNA, 19 nt, Artificial Sequence
  Description of Artificial Sequence: Synthetic oligonucleotide
  Sense strand starting at position 1712 of SEQ ID NO: 1563123
agccauuucugaucaguuu

SEQ ID NO: 1796938 - RNA, 19 nt, Artificial Sequence
  Description of Artificial Sequence: Synthetic oligonucleotide
  Antisense strand to SEQ ID NO: 1796937
aaacugaucagaaauggcu

SEQ ID NO: 1796939 - RNA, 19 nt, Artificial Sequence
  Description of Artificial Sequence: Synthetic oligonucleotide
  Sense strand starting at position 2079 of SEQ ID NO: 1563123
guaugagugccacagauca

SEQ ID NO: 1796940 - RNA, 19 nt, Artificial Sequence
  Description of Artificial Sequence: Synthetic oligonucleotide
  Antisense strand to SEQ ID NO: 1796939
ugaucuguggcacucauac

SEQ ID NO: 1796941 - RNA, 19 nt, Artificial Sequence
  Description of Artificial Sequence: Synthetic oligonucleotide
  Sense strand starting at position 2131 of SEQ ID NO: 1563123
ggccuaccugacgaugauu

SEQ ID NO: 1796942 - RNA, 19 nt, Artificial Sequence
  Description of Artificial Sequence: Synthetic oligonucleotide
  Antisense strand to SEQ ID NO: 1796941
aaucaucgucagguaggcc

SEQ ID NO: 1796943 - RNA, 19 nt, Artificial Sequence
  Description of Artificial Sequence: Synthetic oligonucleotide
  Sense strand starting at position 2136 of SEQ ID NO: 1563123
accugacgaugauugugaa

SEQ ID NO: 1796944 - RNA, 19 nt, Artificial Sequence
  Description of Artificial Sequence: Synthetic oligonucleotide
  Antisense strand to SEQ ID NO: 1796943
uucacaaucaucgucaggu

SEQ ID NO: 1796945 - RNA, 19 nt, Artificial Sequence
  Description of Artificial Sequence: Synthetic oligonucleotide
  Sense strand starting at position 2137 of SEQ ID NO: 1563123
ccugacgaugauugugaaa

SEQ ID NO: 1796946 - RNA, 19 nt, Artificial Sequence
  Description of Artificial Sequence: Synthetic oligonucleotide
  Antisense strand to SEQ ID NO: 1796945
uuucacaaucaucgucagg

SEQ ID NO: 1796947 - RNA, 19 nt, Artificial Sequence
  Description of Artificial Sequence: Synthetic oligonucleotide
  Sense strand starting at position 2211 of SEQ ID NO: 1563123
gugacauugcaauaaucaa

SEQ ID NO: 1796948 - RNA, 19 nt, Artificial Sequence
  Description of Artificial Sequence: Synthetic oligonucleotide
  Antisense strand to SEQ ID NO: 1796947
uugauuauugcaaugucac

SEQ ID NO: 1796949 - RNA, 19 nt, Artificial Sequence
  Description of Artificial Sequence: Synthetic oligonucleotide
  Sense strand starting at position 2263 of SEQ ID NO: 1563123
uccaaaguuguguauauua

SEQ ID NO: 1796950 - RNA, 19 nt, Artificial Sequence
  Description of Artificial Sequence: Synthetic oligonucleotide
  Antisense strand to SEQ ID NO: 1796949
uaauauacacaacuuugga

SEQ ID NO: 1796951 - RNA, 19 nt, Artificial Sequence
  Description of Artificial Sequence: Synthetic oligonucleotide
  Sense strand starting at position 2345 of SEQ ID NO: 1563123
auuugagcaucacaagaaa

SEQ ID NO: 1796952 - RNA, 19 nt, Artificial Sequence
  Description of Artificial Sequence: Synthetic oligonucleotide
  Antisense strand to SEQ ID NO: 1796951
uuucuugugaugcucaaau

SEQ ID NO: 1796953 - RNA, 19 nt, Artificial Sequence
  Description of Artificial Sequence: Synthetic oligonucleotide
  Sense strand starting at position 2464 of SEQ ID NO: 1563123
ggaucuauguauucugauu

SEQ ID NO: 1796954 - RNA, 19 nt, Artificial Sequence
  Description of Artificial Sequence: Synthetic oligonucleotide
  Antisense strand to SEQ ID NO: 1796953
aaucagaauacauagaucc

SEQ ID NO: 1796955 - RNA, 19 nt, Artificial Sequence
  Description of Artificial Sequence: Synthetic oligonucleotide
  Sense strand starting at position 2505 of SEQ ID NO: 1563123
acuuguagucaacagucua

SEQ ID NO: 1796956 - RNA, 19 nt, Artificial Sequence
  Description of Artificial Sequence: Synthetic oligonucleotide
  Antisense strand to SEQ ID NO: 1796955
uagacuguugacuacaagu

SEQ ID NO: 1796957 - RNA, 19 nt, Artificial Sequence
  Description of Artificial Sequence: Synthetic oligonucleotide
  Sense strand starting at position 2621 of SEQ ID NO: 1563123
cuuacuucccuugauguga

SEQ ID NO: 1796958 - RNA, 19 nt, Artificial Sequence
  Description of Artificial Sequence: Synthetic oligonucleotide
  Antisense strand to SEQ ID NO: 1796957
ucacaucaagggaaguaag

SEQ ID NO: 1796959 - RNA, 19 nt, Artificial Sequence
  Description of Artificial Sequence: Synthetic oligonucleotide
  Sense strand starting at position 2909 of SEQ ID NO: 1563123
acagguaaguuccuaaaug

SEQ ID NO: 1796960 - RNA, 19 nt, Artificial Sequence
  Description of Artificial Sequence: Synthetic oligonucleotide
  Antisense strand to SEQ ID NO: 1796959
cauuuaggaacuuaccugu

SEQ ID NO: 1796961 - RNA, 19 nt, Artificial Sequence
  Description of Artificial Sequence: Synthetic oligonucleotide
  Sense strand starting at position 2992 of SEQ ID NO: 1563123
cgauuaacuugaucaaacu

SEQ ID NO: 1796962 - RNA, 19 nt, Artificial Sequence
  Description of Artificial Sequence: Synthetic oligonucleotide
  Antisense strand to SEQ ID NO: 1796961
aguuugaucaaguuaaucg

SEQ ID NO: 1796963 - RNA, 19 nt, Artificial Sequence
  Description of Artificial Sequence: Synthetic oligonucleotide
  Sense strand starting at position 3097 of SEQ ID NO: 1563123
gcuagaagccaagaaacuu

SEQ ID NO: 1796964 - RNA, 19 nt, Artificial Sequence
  Description of Artificial Sequence: Synthetic oligonucleotide
  Antisense strand to SEQ ID NO: 1796963
aaguuucuuggcuucuagc

SEQ ID NO: 1796965 - RNA, 19 nt, Artificial Sequence
  Description of Artificial Sequence: Synthetic oligonucleotide
  Sense strand starting at position 3145 of SEQ ID NO: 1563123
uacagugauucuguagaaa

SEQ ID NO: 1796966 - RNA, 19 nt, Artificial Sequence
  Description of Artificial Sequence: Synthetic oligonucleotide
  Antisense strand to SEQ ID NO: 1796965
uuucuacagaaucacugua

SEQ ID NO: 1796967 - RNA, 19 nt, Artificial Sequence
  Description of Artificial Sequence: Synthetic oligonucleotide
  Sense strand starting at position 3234 of SEQ ID NO: 1563123
agauaucaauguucugaua

SEQ ID NO: 1796968 - RNA, 19 nt, Artificial Sequence
  Description of Artificial Sequence: Synthetic oligonucleotide
  Antisense strand to SEQ ID NO: 1796967
uaucagaacauugauaucu

SEQ ID NO: 1796969 - RNA, 19 nt, Artificial Sequence
  Description of Artificial Sequence: Synthetic oligonucleotide
  Sense strand starting at position 3340 of SEQ ID NO: 1563123
ggucuaaaggaauguauug

SEQ ID NO: 1796970 - RNA, 19 nt, Artificial Sequence
  Description of Artificial Sequence: Synthetic oligonucleotide
  Antisense strand to SEQ ID NO: 1796969
caauacauuccuuuagacc

SEQ ID NO: 1796971 - RNA, 19 nt, Artificial Sequence
  Description of Artificial Sequence: Synthetic oligonucleotide
  Sense strand starting at position 3347 of SEQ ID NO: 1563123
aggaauguauugucuuuga

SEQ ID NO: 1796972 - RNA, 19 nt, Artificial Sequence
  Description of Artificial Sequence: Synthetic oligonucleotide
  Antisense strand to SEQ ID NO: 1796971
ucaaagacaauacauuccu

SEQ ID NO: 1796973 - RNA, 19 nt, Artificial Sequence
  Description of Artificial Sequence: Synthetic oligonucleotide
  Sense strand starting at position 3350 of SEQ ID NO: 1563123
aauguauugucuuugagaa

SEQ ID NO: 1796974 - RNA, 19 nt, Artificial Sequence
  Description of Artificial Sequence: Synthetic oligonucleotide
  Antisense strand to SEQ ID NO: 1796973
uucucaaagacaauacauu

SEQ ID NO: 1796975 - RNA, 19 nt, Artificial Sequence
  Description of Artificial Sequence: Synthetic oligonucleotide
  Sense strand starting at position 3351 of SEQ ID NO: 1563123
auguauugucuuugagaaa

SEQ ID NO: 1796976 - RNA, 19 nt, Artificial Sequence
  Description of Artificial Sequence: Synthetic oligonucleotide
  Antisense strand to SEQ ID NO: 1796975
uuucucaaagacaauacau

SEQ ID NO: 1796977 - RNA, 19 nt, Artificial Sequence
  Description of Artificial Sequence: Synthetic oligonucleotide
  Sense strand starting at position 3407 of SEQ ID NO: 1563123
caggaaagauguucuaugu

SEQ ID NO: 1796978 - RNA, 19 nt, Artificial Sequence
  Description of Artificial Sequence: Synthetic oligonucleotide
  Antisense strand to SEQ ID NO: 1796977
acauagaacaucuuuccug

SEQ ID NO: 1796979 - RNA, 19 nt, Artificial Sequence
  Description of Artificial Sequence: Synthetic oligonucleotide
  Sense strand starting at position 3467 of SEQ ID NO: 1563123
agggaaguuugaccuuaac

SEQ ID NO: 1796980 - RNA, 19 nt, Artificial Sequence
  Description of Artificial Sequence: Synthetic oligonucleotide
  Antisense strand to SEQ ID NO: 1796979
guuaaggucaaacuucccu

SEQ ID NO: 1796981 - RNA, 19 nt, Artificial Sequence
  Description of Artificial Sequence: Synthetic oligonucleotide
  Sense strand starting at position 3488 of SEQ ID NO: 1563123
cuaguaaagcuauaaagua

SEQ ID NO: 1796982 - RNA, 19 nt, Artificial Sequence
  Description of Artificial Sequence: Synthetic oligonucleotide
  Antisense strand to SEQ ID NO: 1796981
uacuuuauagcuuuacuag

SEQ ID NO: 1796983 - RNA, 19 nt, Artificial Sequence
  Description of Artificial Sequence: Synthetic oligonucleotide
  Sense strand starting at position 3843 of SEQ ID NO: 1563123
auauaucucugguccauua

SEQ ID NO: 1796984 - RNA, 19 nt, Artificial Sequence
  Description of Artificial Sequence: Synthetic oligonucleotide
  Antisense strand to SEQ ID NO: 1796983
uaauggaccagagauauau

SEQ ID NO: 1796985 - RNA, 19 nt, Artificial Sequence
  Description of Artificial Sequence: Synthetic oligonucleotide
  Sense strand starting at position 24 of SEQ ID NO: 1563124
ggacauauaucccaaagaa

SEQ ID NO: 1796986 - RNA, 19 nt, Artificial Sequence
  Description of Artificial Sequence: Synthetic oligonucleotide
  Antisense strand to SEQ ID NO: 1796985
uucuuugggauauaugucc

SEQ ID NO: 1796987 - RNA, 19 nt, Artificial Sequence
  Description of Artificial Sequence: Synthetic oligonucleotide
  Sense strand starting at position 206 of SEQ ID NO: 1563124
gcccuccacucugaggaaa

SEQ ID NO: 1796988 - RNA, 19 nt, Artificial Sequence
  Description of Artificial Sequence: Synthetic oligonucleotide
  Antisense strand to SEQ ID NO: 1796987
uuuccucagaguggagggc

SEQ ID NO: 1796989 - RNA, 19 nt, Artificial Sequence
  Description of Artificial Sequence: Synthetic oligonucleotide
  Sense strand starting at position 208 of SEQ ID NO: 1563124
ccuccacucugaggaaaua

SEQ ID NO: 1796990 - RNA, 19 nt, Artificial Sequence
  Description of Artificial Sequence: Synthetic oligonucleotide
  Antisense strand to SEQ ID NO: 1796989
uauuuccucagaguggagg

SEQ ID NO: 1796991 - RNA, 19 nt, Artificial Sequence
  Description of Artificial Sequence: Synthetic oligonucleotide
  Sense strand starting at position 355 of SEQ ID NO: 1563124
acuagacacuaagagauua

SEQ ID NO: 1796992 - RNA, 19 nt, Artificial Sequence
  Description of Artificial Sequence: Synthetic oligonucleotide
  Antisense strand to SEQ ID NO: 1796991
uaaucucuuagugucuagu

SEQ ID NO: 1796993 - RNA, 19 nt, Artificial Sequence
  Description of Artificial Sequence: Synthetic oligonucleotide
  Sense strand starting at position 363 of SEQ ID NO: 1563124
cuaagagauuauccgcuua

SEQ ID NO: 1796994 - RNA, 19 nt, Artificial Sequence
  Description of Artificial Sequence: Synthetic oligonucleotide
  Antisense strand to SEQ ID NO: 1796993
uaagcggauaaucucuuag

SEQ ID NO: 1796995 - RNA, 19 nt, Artificial Sequence
  Description of Artificial Sequence: Synthetic oligonucleotide
  Sense strand starting at position 365 of SEQ ID NO: 1563124
aagagauuauccgcuuaag

SEQ ID NO: 1796996 - RNA, 19 nt, Artificial Sequence
  Description of Artificial Sequence: Synthetic oligonucleotide
  Antisense strand to SEQ ID NO: 1796995
cuuaagcggauaaucucuu

SEQ ID NO: 1796997 - RNA, 19 nt, Artificial Sequence
  Description of Artificial Sequence: Synthetic oligonucleotide
  Sense strand starting at position 368 of SEQ ID NO: 1563124
agauuauccgcuuaagguu

SEQ ID NO: 1796998 - RNA, 19 nt, Artificial Sequence
  Description of Artificial Sequence: Synthetic oligonucleotide
  Antisense strand to SEQ ID NO: 1796997
aaccuuaagcggauaaucu

SEQ ID NO: 1796999 - RNA, 19 nt, Artificial Sequence
  Description of Artificial Sequence: Synthetic oligonucleotide
  Sense strand starting at position 707 of SEQ ID NO: 1563124
aacacaggguuauaagaga

SEQ ID NO: 1797000 - RNA, 19 nt, Artificial Sequence
  Description of Artificial Sequence: Synthetic oligonucleotide
  Antisense strand to SEQ ID NO: 1796999
ucucuuauaacccuguguu

SEQ ID NO: 1797001 - RNA, 19 nt, Artificial Sequence
  Description of Artificial Sequence: Synthetic oligonucleotide
  Sense strand starting at position 1279 of SEQ ID NO: 1563124
ggcuuugcggcucauuaaa

SEQ ID NO: 1797002 - RNA, 19 nt, Artificial Sequence
  Description of Artificial Sequence: Synthetic oligonucleotide
  Antisense strand to SEQ ID NO: 1797001
uuuaaugagccgcaaagcc

SEQ ID NO: 1797003 - RNA, 19 nt, Artificial Sequence
  Description of Artificial Sequence: Synthetic oligonucleotide
  Sense strand starting at position 1281 of SEQ ID NO: 1563124
cuuugcggcucauuaaagu

SEQ ID NO: 1797004 - RNA, 19 nt, Artificial Sequence
  Description of Artificial Sequence: Synthetic oligonucleotide
  Antisense strand to SEQ ID NO: 1797003
acuuuaaugagccgcaaag

SEQ ID NO: 1797005 - RNA, 19 nt, Artificial Sequence
  Description of Artificial Sequence: Synthetic oligonucleotide
  Sense strand starting at position 1364 of SEQ ID NO: 1563124
ccuguaaucucugccaaug

SEQ ID NO: 1797006 - RNA, 19 nt, Artificial Sequence
  Description of Artificial Sequence: Synthetic oligonucleotide
  Antisense strand to SEQ ID NO: 1797005
cauuggcagagauuacagg

SEQ ID NO: 1797007 - RNA, 19 nt, Artificial Sequence
  Description of Artificial Sequence: Synthetic oligonucleotide
  Sense strand starting at position 1394 of SEQ ID NO: 1563124
uuaaguaagagccgaagua

SEQ ID NO: 1797008 - RNA, 19 nt, Artificial Sequence
  Description of Artificial Sequence: Synthetic oligonucleotide
  Antisense strand to SEQ ID NO: 1797007
uacuucggcucuuacuuaa

SEQ ID NO: 1797009 - RNA, 19 nt, Artificial Sequence
  Description of Artificial Sequence: Synthetic oligonucleotide
  Sense strand starting at position 1616 of SEQ ID NO: 1563124
agugcuagaagucgccaaa

SEQ ID NO: 1797010 - RNA, 19 nt, Artificial Sequence
  Description of Artificial Sequence: Synthetic oligonucleotide
  Antisense strand to SEQ ID NO: 1797009
uuuggcgacuucuagcacu

SEQ ID NO: 1797011 - RNA, 19 nt, Artificial Sequence
  Description of Artificial Sequence: Synthetic oligonucleotide
  Sense strand starting at position 1619 of SEQ ID NO: 1563124
gcuagaagucgccaaagug

SEQ ID NO: 1797012 - RNA, 19 nt, Artificial Sequence
  Description of Artificial Sequence: Synthetic oligonucleotide
  Antisense strand to SEQ ID NO: 1797011
cacuuuggcgacuucuagc

SEQ ID NO: 1797013 - RNA, 19 nt, Artificial Sequence
  Description of Artificial Sequence: Synthetic oligonucleotide
  Sense strand starting at position 2137 of SEQ ID NO: 1563124
ggccuauucucgguugagu

SEQ ID NO: 1797014 - RNA, 19 nt, Artificial Sequence
  Description of Artificial Sequence: Synthetic oligonucleotide
  Antisense strand to SEQ ID NO: 1797013
acucaaccgagaauaggcc

SEQ ID NO: 1797015 - RNA, 19 nt, Artificial Sequence
  Description of Artificial Sequence: Synthetic oligonucleotide
  Sense strand starting at position 2139 of SEQ ID NO: 1563124
ccuauucucgguugaguaa

SEQ ID NO: 1797016 - RNA, 19 nt, Artificial Sequence
  Description of Artificial Sequence: Synthetic oligonucleotide
  Antisense strand to SEQ ID NO: 1797015
uuacucaaccgagaauagg

SEQ ID NO: 1797017 - RNA, 19 nt, Artificial Sequence
  Description of Artificial Sequence: Synthetic oligonucleotide
  Sense strand starting at position 2140 of SEQ ID NO: 1563124
cuauucucgguugaguaaa

SEQ ID NO: 1797018 - RNA, 19 nt, Artificial Sequence
  Description of Artificial Sequence: Synthetic oligonucleotide
  Antisense strand to SEQ ID NO: 1797017
uuuacucaaccgagaauag

SEQ ID NO: 1797019 - RNA, 19 nt, Artificial Sequence
  Description of Artificial Sequence: Synthetic oligonucleotide
  Sense strand starting at position 2179 of SEQ ID NO: 1563124
gggcgugacgucgagaaga

SEQ ID NO: 1797020 - RNA, 19 nt, Artificial Sequence
  Description of Artificial Sequence: Synthetic oligonucleotide
  Antisense strand to SEQ ID NO: 1797019
ucuucucgacgucacgccc

SEQ ID NO: 1797021 - RNA, 19 nt, Artificial Sequence
  Description of Artificial Sequence: Synthetic oligonucleotide
  Sense strand starting at position 2215 of SEQ ID NO: 1563124
uggagcuugucuccuuuau

SEQ ID NO: 1797022 - RNA, 19 nt, Artificial Sequence
  Description of Artificial Sequence: Synthetic oligonucleotide
  Antisense strand to SEQ ID NO: 1797021
auaaaggagacaagcucca

SEQ ID NO: 1797023 - RNA, 19 nt, Artificial Sequence
  Description of Artificial Sequence: Synthetic oligonucleotide
  Sense strand starting at position 2219 of SEQ ID NO: 1563124
gcuugucuccuuuauccuu

SEQ ID NO: 1797024 - RNA, 19 nt, Artificial Sequence
  Description of Artificial Sequence: Synthetic oligonucleotide
  Antisense strand to SEQ ID NO: 1797023
aaggauaaaggagacaagc

SEQ ID NO: 1797025 - RNA, 19 nt, Artificial Sequence
  Description of Artificial Sequence: Synthetic oligonucleotide
  Sense strand starting at position 2644 of SEQ ID NO: 1563124
uggagauucuaguuuaguc

SEQ ID NO: 1797026 - RNA, 19 nt, Artificial Sequence
  Description of Artificial Sequence: Synthetic oligonucleotide
  Antisense strand to SEQ ID NO: 1797025
gacuaaacuagaaucucca

SEQ ID NO: 1797027 - RNA, 19 nt, Artificial Sequence
  Description of Artificial Sequence: Synthetic oligonucleotide
  Sense strand starting at position 2681 of SEQ ID NO: 1563124
ucgggaugaugucuaaaga

SEQ ID NO: 1797028 - RNA, 19 nt, Artificial Sequence
  Description of Artificial Sequence: Synthetic oligonucleotide
  Antisense strand to SEQ ID NO: 1797027
ucuuuagacaucaucccga

SEQ ID NO: 1797029 - RNA, 19 nt, Artificial Sequence
  Description of Artificial Sequence: Synthetic oligonucleotide
  Sense strand starting at position 2794 of SEQ ID NO: 1563124
guuugauaucuugggcgag

SEQ ID NO: 1797030 - RNA, 19 nt, Artificial Sequence
  Description of Artificial Sequence: Synthetic oligonucleotide
  Antisense strand to SEQ ID NO: 1797029
cucgcccaagauaucaaac

SEQ ID NO: 1797031 - RNA, 19 nt, Artificial Sequence
  Description of Artificial Sequence: Synthetic oligonucleotide
  Sense strand starting at position 2797 of SEQ ID NO: 1563124
ugauaucuugggcgagcua

SEQ ID NO: 1797032 - RNA, 19 nt, Artificial Sequence
  Description of Artificial Sequence: Synthetic oligonucleotide
  Antisense strand to SEQ ID NO: 1797031
uagcucgcccaagauauca

SEQ ID NO: 1797033 - RNA, 19 nt, Artificial Sequence
  Description of Artificial Sequence: Synthetic oligonucleotide
  Sense strand starting at position 2830 of SEQ ID NO: 1563124
cagagaguuuaagauuauu

SEQ ID NO: 1797034 - RNA, 19 nt, Artificial Sequence
  Description of Artificial Sequence: Synthetic oligonucleotide
  Antisense strand to SEQ ID NO: 1797033
aauaaucuuaaacucucug

SEQ ID NO: 1797035 - RNA, 19 nt, Artificial Sequence
  Description of Artificial Sequence: Synthetic oligonucleotide
  Sense strand starting at position 2882 of SEQ ID NO: 1563124
cgaauuauuauugagcugu

SEQ ID NO: 1797036 - RNA, 19 nt, Artificial Sequence
  Description of Artificial Sequence: Synthetic oligonucleotide
  Antisense strand to SEQ ID NO: 1797035
acagcucaauaauaauucg

SEQ ID NO: 1797037 - RNA, 19 nt, Artificial Sequence
  Description of Artificial Sequence: Synthetic oligonucleotide
  Sense strand starting at position 2902 of SEQ ID NO: 1563124
ugcauugugccaggcacua

SEQ ID NO: 1797038 - RNA, 19 nt, Artificial Sequence
  Description of Artificial Sequence: Synthetic oligonucleotide
  Antisense strand to SEQ ID NO: 1797037
uagugccuggcacaaugca

SEQ ID NO: 1797039 - RNA, 19 nt, Artificial Sequence
  Description of Artificial Sequence: Synthetic oligonucleotide
  Sense strand starting at position 2978 of SEQ ID NO: 1563124
cuugccucuugauaaggaa

SEQ ID NO: 1797040 - RNA, 19 nt, Artificial Sequence
  Description of Artificial Sequence: Synthetic oligonucleotide
  Antisense strand to SEQ ID NO: 1797039
uuccuuaucaagaggcaag

SEQ ID NO: 1797041 - RNA, 19 nt, Artificial Sequence
  Description of Artificial Sequence: Synthetic oligonucleotide
  Sense strand starting at position 3105 of SEQ ID NO: 1563124
agucuugcuuugccucuaa

SEQ ID NO: 1797042 - RNA, 19 nt, Artificial Sequence
  Description of Artificial Sequence: Synthetic oligonucleotide
  Antisense strand to SEQ ID NO: 1797041
uuagaggcaaagcaagacu

SEQ ID NO: 1797043 - RNA, 19 nt, Artificial Sequence
  Description of Artificial Sequence: Synthetic oligonucleotide
  Sense strand starting at position 3233 of SEQ ID NO: 1563124
augaguuacacauggagca

SEQ ID NO: 1797044 - RNA, 19 nt, Artificial Sequence
  Description of Artificial Sequence: Synthetic oligonucleotide
  Antisense strand to SEQ ID NO: 1797043
ugcuccauguguaacucau

SEQ ID NO: 1797045 - RNA, 19 nt, Artificial Sequence
  Description of Artificial Sequence: Synthetic oligonucleotide
  Sense strand starting at position 3234 of SEQ ID NO: 1563124
ugaguuacacauggagcau

SEQ ID NO: 1797046 - RNA, 19 nt, Artificial Sequence
  Description of Artificial Sequence: Synthetic oligonucleotide
  Antisense strand to SEQ ID NO: 1797045
augcuccauguguaacuca

SEQ ID NO: 1797047 - RNA, 19 nt, Artificial Sequence
  Description of Artificial Sequence: Synthetic oligonucleotide
  Sense strand starting at position 3260 of SEQ ID NO: 1563124
ggcuuucucuuucuacuga

SEQ ID NO: 1797048 - RNA, 19 nt, Artificial Sequence
  Description of Artificial Sequence: Synthetic oligonucleotide
  Antisense strand to SEQ ID NO: 1797047
ucaguagaaagagaaagcc

SEQ ID NO: 1797049 - RNA, 19 nt, Artificial Sequence
  Description of Artificial Sequence: Synthetic oligonucleotide
  Sense strand starting at position 3412 of SEQ ID NO: 1563124
gugauugucuuguugguuu

SEQ ID NO: 1797050 - RNA, 19 nt, Artificial Sequence
  Description of Artificial Sequence: Synthetic oligonucleotide
  Antisense strand to SEQ ID NO: 1797049
aaaccaacaagacaaucac

SEQ ID NO: 1797051 - RNA, 19 nt, Artificial Sequence
  Description of Artificial Sequence: Synthetic oligonucleotide
  Sense strand starting at position 3593 of SEQ ID NO: 1563124
augguauaauagguaggua

SEQ ID NO: 1797052 - RNA, 19 nt, Artificial Sequence
  Description of Artificial Sequence: Synthetic oligonucleotide
  Antisense strand to SEQ ID NO: 1797051
uaccuaccuauuauaccau

SEQ ID NO: 1797053 - RNA, 19 nt, Artificial Sequence
  Description of Artificial Sequence: Synthetic oligonucleotide
  Sense strand starting at position 3605 of SEQ ID NO: 1563124
guagguacaguuuauaguu

SEQ ID NO: 1797054 - RNA, 19 nt, Artificial Sequence
  Description of Artificial Sequence: Synthetic oligonucleotide
  Antisense strand to SEQ ID NO: 1797053
aacuauaaacuguaccuac

SEQ ID NO: 1797055 - RNA, 19 nt, Artificial Sequence
  Description of Artificial Sequence: Synthetic oligonucleotide
  Sense strand starting at position 3741 of SEQ ID NO: 1563124
gcagaugccuucucucuau

SEQ ID NO: 1797056 - RNA, 19 nt, Artificial Sequence
  Description of Artificial Sequence: Synthetic oligonucleotide
  Antisense strand to SEQ ID NO: 1797055
auagagagaaggcaucugc

SEQ ID NO: 1797057 - RNA, 19 nt, Artificial Sequence
  Description of Artificial Sequence: Synthetic oligonucleotide
  Sense strand starting at position 3816 of SEQ ID NO: 1563124
ugacauucuccauauggca

SEQ ID NO: 1797058 - RNA, 19 nt, Artificial Sequence
  Description of Artificial Sequence: Synthetic oligonucleotide
  Antisense strand to SEQ ID NO: 1797057
ugccauauggagaauguca

SEQ ID NO: 1797059 - RNA, 19 nt, Artificial Sequence
  Description of Artificial Sequence: Synthetic oligonucleotide
  Sense strand starting at position 3835 of SEQ ID NO: 1563124
auagaagcuccugaacuuu

SEQ ID NO: 1797060 - RNA, 19 nt, Artificial Sequence
  Description of Artificial Sequence: Synthetic oligonucleotide
  Antisense strand to SEQ ID NO: 1797059
aaaguucaggagcuucuau

SEQ ID NO: 1797061 - RNA, 19 nt, Artificial Sequence
  Description of Artificial Sequence: Synthetic oligonucleotide
  Sense strand starting at position 3891 of SEQ ID NO: 1563124
ugaaauuucuacggcccaa

SEQ ID NO: 1797062 - RNA, 19 nt, Artificial Sequence
  Description of Artificial Sequence: Synthetic oligonucleotide
  Antisense strand to SEQ ID NO: 1797061
uugggccguagaaauuuca

SEQ ID NO: 1797063 - RNA, 19 nt, Artificial Sequence
  Description of Artificial Sequence: Synthetic oligonucleotide
  Sense strand starting at position 3956 of SEQ ID NO: 1563124
gguacacacuccuggacua

SEQ ID NO: 1797064 - RNA, 19 nt, Artificial Sequence
  Description of Artificial Sequence: Synthetic oligonucleotide
  Antisense strand to SEQ ID NO: 1797063
uaguccaggaguguguacc

SEQ ID NO: 1797065 - RNA, 19 nt, Artificial Sequence
  Description of Artificial Sequence: Synthetic oligonucleotide
  Sense strand starting at position 45 of SEQ ID NO: 1563125
gcuucucacuggucuuaua

SEQ ID NO: 1797066 - RNA, 19 nt, Artificial Sequence
  Description of Artificial Sequence: Synthetic oligonucleotide
  Antisense strand to SEQ ID NO: 1797065
uauaagaccagugagaagc

SEQ ID NO: 1797067 - RNA, 19 nt, Artificial Sequence
  Description of Artificial Sequence: Synthetic oligonucleotide
  Sense strand starting at position 48 of SEQ ID NO: 1563125
ucucacuggucuuauauga

SEQ ID NO: 1797068 - RNA, 19 nt, Artificial Sequence
  Description of Artificial Sequence: Synthetic oligonucleotide
  Antisense strand to SEQ ID NO: 1797067
ucauauaagaccagugaga

SEQ ID NO: 1797069 - RNA, 19 nt, Artificial Sequence
  Description of Artificial Sequence: Synthetic oligonucleotide
  Sense strand starting at position 890 of SEQ ID NO: 1563125
gcgccacguauuccuacau

SEQ ID NO: 1797070 - RNA, 19 nt, Artificial Sequence
  Description of Artificial Sequence: Synthetic oligonucleotide
  Antisense strand to SEQ ID NO: 1797069
auguaggaauacguggcgc

SEQ ID NO: 1797071 - RNA, 19 nt, Artificial Sequence
  Description of Artificial Sequence: Synthetic oligonucleotide
  Sense strand starting at position 891 of SEQ ID NO: 1563125
cgccacguauuccuacaua

SEQ ID NO: 1797072 - RNA, 19 nt, Artificial Sequence
  Description of Artificial Sequence: Synthetic oligonucleotide
  Antisense strand to SEQ ID NO: 1797071
uauguaggaauacguggcg

SEQ ID NO: 1797073 - RNA, 19 nt, Artificial Sequence
  Description of Artificial Sequence: Synthetic oligonucleotide
  Sense strand starting at position 1406 of SEQ ID NO: 1563125
gguauacagugguccugau

SEQ ID NO: 1797074 - RNA, 19 nt, Artificial Sequence
  Description of Artificial Sequence: Synthetic oligonucleotide
  Antisense strand to SEQ ID NO: 1797073
aucaggaccacuguauacc

SEQ ID NO: 1797075 - RNA, 19 nt, Artificial Sequence
  Description of Artificial Sequence: Synthetic oligonucleotide
  Sense strand starting at position 1434 of SEQ ID NO: 1563125
gucacucaauuaggauuaa

SEQ ID NO: 1797076 - RNA, 19 nt, Artificial Sequence
  Description of Artificial Sequence: Synthetic oligonucleotide
  Antisense strand to SEQ ID NO: 1797075
uuaauccuaauugagugac

SEQ ID NO: 1797077 - RNA, 19 nt, Artificial Sequence
  Description of Artificial Sequence: Synthetic oligonucleotide
  Sense strand starting at position 1446 of SEQ ID NO: 1563125
ggauuaaccucuggaccac

SEQ ID NO: 1797078 - RNA, 19 nt, Artificial Sequence
  Description of Artificial Sequence: Synthetic oligonucleotide
  Antisense strand to SEQ ID NO: 1797077
gugguccagagguuaaucc

SEQ ID NO: 1797079 - RNA, 19 nt, Artificial Sequence
  Description of Artificial Sequence: Synthetic oligonucleotide
  Sense strand starting at position 2190 of SEQ ID NO: 1563125
ggcgaacuaugauguuuac

SEQ ID NO: 1797080 - RNA, 19 nt, Artificial Sequence
  Description of Artificial Sequence: Synthetic oligonucleotide
  Antisense strand to SEQ ID NO: 1797079
guaaacaucauaguucgcc

SEQ ID NO: 1797081 - RNA, 19 nt, Artificial Sequence
  Description of Artificial Sequence: Synthetic oligonucleotide
  Sense strand starting at position 2218 of SEQ ID NO: 1563125
ccuccaaacccuggagaua

SEQ ID NO: 1797082 - RNA, 19 nt, Artificial Sequence
  Description of Artificial Sequence: Synthetic oligonucleotide
  Antisense strand to SEQ ID NO: 1797081
uaucuccaggguuuggagg

SEQ ID NO: 1797083 - RNA, 19 nt, Artificial Sequence
  Description of Artificial Sequence: Synthetic oligonucleotide
  Sense strand starting at position 2323 of SEQ ID NO: 1563125
caguuucuccagcgagcau

SEQ ID NO: 1797084 - RNA, 19 nt, Artificial Sequence
  Description of Artificial Sequence: Synthetic oligonucleotide
  Antisense strand to SEQ ID NO: 1797083
augcucgcuggagaaacug

SEQ ID NO: 1797085 - RNA, 19 nt, Artificial Sequence
  Description of Artificial Sequence: Synthetic oligonucleotide
  Sense strand starting at position 2338 of SEQ ID NO: 1563125
gcaucuauauauuucguaa

SEQ ID NO: 1797086 - RNA, 19 nt, Artificial Sequence
  Description of Artificial Sequence: Synthetic oligonucleotide
  Antisense strand to SEQ ID NO: 1797085
uuacgaaauauauagaugc

SEQ ID NO: 1797087 - RNA, 19 nt, Artificial Sequence
  Description of Artificial Sequence: Synthetic oligonucleotide
  Sense strand starting at position 2355 of SEQ ID NO: 1563125
aauguaugccuuuggguaa

SEQ ID NO: 1797088 - RNA, 19 nt, Artificial Sequence
  Description of Artificial Sequence: Synthetic oligonucleotide
  Antisense strand to SEQ ID NO: 1797087
uuacccaaaggcauacauu

SEQ ID NO: 1797089 - RNA, 19 nt, Artificial Sequence
  Description of Artificial Sequence: Synthetic oligonucleotide
  Sense strand starting at position 2359 of SEQ ID NO: 1563125
uaugccuuuggguaacaga

SEQ ID NO: 1797090 - RNA, 19 nt, Artificial Sequence
  Description of Artificial Sequence: Synthetic oligonucleotide
  Antisense strand to SEQ ID NO: 1797089
ucuguuacccaaaggcaua

SEQ ID NO: 1797091 - RNA, 19 nt, Artificial Sequence
  Description of Artificial Sequence: Synthetic oligonucleotide
  Sense strand starting at position 2387 of SEQ ID NO: 1563125
aaaugucccugcguuugau

SEQ ID NO: 1797092 - RNA, 19 nt, Artificial Sequence
  Description of Artificial Sequence: Synthetic oligonucleotide
  Antisense strand to SEQ ID NO: 1797091
aucaaacgcagggacauuu

SEQ ID NO: 1797093 - RNA, 19 nt, Artificial Sequence
  Description of Artificial Sequence: Synthetic oligonucleotide
  Sense strand starting at position 2390 of SEQ ID NO: 1563125
ugucccugcguuugauacu

SEQ ID NO: 1797094 - RNA, 19 nt, Artificial Sequence
  Description of Artificial Sequence: Synthetic oligonucleotide
  Antisense strand to SEQ ID NO: 1797093
aguaucaaacgcagggaca

SEQ ID NO: 1797095 - RNA, 19 nt, Artificial Sequence
  Description of Artificial Sequence: Synthetic oligonucleotide
  Sense strand starting at position 2393 of SEQ ID NO: 1563125
cccugcguuugauacuauu

SEQ ID NO: 1797096 - RNA, 19 nt, Artificial Sequence
  Description of Artificial Sequence: Synthetic oligonucleotide
  Antisense strand to SEQ ID NO: 1797095
aauaguaucaaacgcaggg

SEQ ID NO: 1797097 - RNA, 19 nt, Artificial Sequence
  Description of Artificial Sequence: Synthetic oligonucleotide
  Sense strand starting at position 2413 of SEQ ID NO: 1563125
ugugcuaagcauuauucca

SEQ ID NO: 1797098 - RNA, 19 nt, Artificial Sequence
  Description of Artificial Sequence: Synthetic oligonucleotide
  Antisense strand to SEQ ID NO: 1797097
uggaauaaugcuuagcaca

SEQ ID NO: 1797099 - RNA, 19 nt, Artificial Sequence
  Description of Artificial Sequence: Synthetic oligonucleotide
  Sense strand starting at position 2427 of SEQ ID NO: 1563125
uuccaagugucuuacgacu

SEQ ID NO: 1797100 - RNA, 19 nt, Artificial Sequence
  Description of Artificial Sequence: Synthetic oligonucleotide
  Antisense strand to SEQ ID NO: 1797099
agucguaagacacuuggaa

SEQ ID NO: 1797101 - RNA, 19 nt, Artificial Sequence
  Description of Artificial Sequence: Synthetic oligonucleotide
  Sense strand starting at position 2429 of SEQ ID NO: 1563125
ccaagugucuuacgacuua

SEQ ID NO: 1797102 - RNA, 19 nt, Artificial Sequence
  Description of Artificial Sequence: Synthetic oligonucleotide
  Antisense strand to SEQ ID NO: 1797101
uaagucguaagacacuugg

SEQ ID NO: 1797103 - RNA, 19 nt, Artificial Sequence
  Description of Artificial Sequence: Synthetic oligonucleotide
  Sense strand starting at position 3044 of SEQ ID NO: 1563125
gaaccaggauguuagcuau

SEQ ID NO: 1797104 - RNA, 19 nt, Artificial Sequence
  Description of Artificial Sequence: Synthetic oligonucleotide
  Antisense strand to SEQ ID NO: 1797103
auagcuaacauccugguuc

SEQ ID NO: 1797105 - RNA, 19 nt, Artificial Sequence
  Description of Artificial Sequence: Synthetic oligonucleotide
  Sense strand starting at position 3047 of SEQ ID NO: 1563125
ccaggauguuagcuauaau

SEQ ID NO: 1797106 - RNA, 19 nt, Artificial Sequence
  Description of Artificial Sequence: Synthetic oligonucleotide
  Antisense strand to SEQ ID NO: 1797105
auuauagcuaacauccugg

SEQ ID NO: 1797107 - RNA, 19 nt, Artificial Sequence
  Description of Artificial Sequence: Synthetic oligonucleotide
  Sense strand starting at position 3050 of SEQ ID NO: 1563125
ggauguuagcuauaauuga

SEQ ID NO: 1797108 - RNA, 19 nt, Artificial Sequence
  Description of Artificial Sequence: Synthetic oligonucleotide
  Antisense strand to SEQ ID NO: 1797107
ucaauuauagcuaacaucc

SEQ ID NO: 1797109 - RNA, 19 nt, Artificial Sequence
  Description of Artificial Sequence: Synthetic oligonucleotide
  Sense strand starting at position 3057 of SEQ ID NO: 1563125
agcuauaauugagaggcau

SEQ ID NO: 1797110 - RNA, 19 nt, Artificial Sequence
  Description of Artificial Sequence: Synthetic oligonucleotide
  Antisense strand to SEQ ID NO: 1797109
augccucucaauuauagcu

SEQ ID NO: 1797111 - RNA, 19 nt, Artificial Sequence
  Description of Artificial Sequence: Synthetic oligonucleotide
  Sense strand starting at position 3063 of SEQ ID NO: 1563125
aauugagaggcauaugcuu

SEQ ID NO: 1797112 - RNA, 19 nt, Artificial Sequence
  Description of Artificial Sequence: Synthetic oligonucleotide
  Antisense strand to SEQ ID NO: 1797111
aagcauaugccucucaauu

SEQ ID NO: 1797113 - RNA, 19 nt, Artificial Sequence
  Description of Artificial Sequence: Synthetic oligonucleotide
  Sense strand starting at position 3093 of SEQ ID NO: 1563125
augggauagguuuggaauc

SEQ ID NO: 1797114 - RNA, 19 nt, Artificial Sequence
  Description of Artificial Sequence: Synthetic oligonucleotide
  Antisense strand to SEQ ID NO: 1797113
gauuccaaaccuaucccau

SEQ ID NO: 1797115 - RNA, 19 nt, Artificial Sequence
  Description of Artificial Sequence: Synthetic oligonucleotide
  Sense strand starting at position 3094 of SEQ ID NO: 1563125
ugggauagguuuggaauca

SEQ ID NO: 1797116 - RNA, 19 nt, Artificial Sequence
  Description of Artificial Sequence: Synthetic oligonucleotide
  Antisense strand to SEQ ID NO: 1797115
ugauuccaaaccuauccca

SEQ ID NO: 1797117 - RNA, 19 nt, Artificial Sequence
  Description of Artificial Sequence: Synthetic oligonucleotide
  Sense strand starting at position 3095 of SEQ ID NO: 1563125
gggauagguuuggaaucaa

SEQ ID NO: 1797118 - RNA, 19 nt, Artificial Sequence
  Description of Artificial Sequence: Synthetic oligonucleotide
  Antisense strand to SEQ ID NO: 1797117
uugauuccaaaccuauccc

SEQ ID NO: 1797119 - RNA, 19 nt, Artificial Sequence
  Description of Artificial Sequence: Synthetic oligonucleotide
  Sense strand starting at position 3161 of SEQ ID NO: 1563125
gcaagcaacuccuuuagau

SEQ ID NO: 1797120 - RNA, 19 nt, Artificial Sequence
  Description of Artificial Sequence: Synthetic oligonucleotide
  Antisense strand to SEQ ID NO: 1797119
aucuaaaggaguugcuugc

SEQ ID NO: 1797121 - RNA, 19 nt, Artificial Sequence
  Description of Artificial Sequence: Synthetic oligonucleotide
  Sense strand starting at position 3165 of SEQ ID NO: 1563125
gcaacuccuuuagauugaa

SEQ ID NO: 1797122 - RNA, 19 nt, Artificial Sequence
  Description of Artificial Sequence: Synthetic oligonucleotide
  Antisense strand to SEQ ID NO: 1797121
uucaaucuaaaggaguugc

SEQ ID NO: 1797123 - RNA, 19 nt, Artificial Sequence
  Description of Artificial Sequence: Synthetic oligonucleotide
  Sense strand starting at position 3194 of SEQ ID NO: 1563125
gcugaaguagacuggaaau

SEQ ID NO: 1797124 - RNA, 19 nt, Artificial Sequence
  Description of Artificial Sequence: Synthetic oligonucleotide
  Antisense strand to SEQ ID NO: 1797123
auuuccagucuacuucagc

SEQ ID NO: 1797125 - RNA, 19 nt, Artificial Sequence
  Description of Artificial Sequence: Synthetic oligonucleotide
  Sense strand starting at position 3313 of SEQ ID NO: 1563125
gcuuuaagaaguugggaau

SEQ ID NO: 1797126 - RNA, 19 nt, Artificial Sequence
  Description of Artificial Sequence: Synthetic oligonucleotide
  Antisense strand to SEQ ID NO: 1797125
auucccaacuucuuaaagc

SEQ ID NO: 1797127 - RNA, 19 nt, Artificial Sequence
  Description of Artificial Sequence: Synthetic oligonucleotide
  Sense strand starting at position 3314 of SEQ ID NO: 1563125
cuuuaagaaguugggaauu

SEQ ID NO: 1797128 - RNA, 19 nt, Artificial Sequence
  Description of Artificial Sequence: Synthetic oligonucleotide
  Antisense strand to SEQ ID NO: 1797127
aauucccaacuucuuaaag

SEQ ID NO: 1797129 - RNA, 19 nt, Artificial Sequence
  Description of Artificial Sequence: Synthetic oligonucleotide
  Sense strand starting at position 3316 of SEQ ID NO: 1563125
uuaagaaguugggaauuaa

SEQ ID NO: 1797130 - RNA, 19 nt, Artificial Sequence
  Description of Artificial Sequence: Synthetic oligonucleotide
  Antisense strand to SEQ ID NO: 1797129
uuaauucccaacuucuuaa

SEQ ID NO: 1797131 - RNA, 19 nt, Artificial Sequence
  Description of Artificial Sequence: Synthetic oligonucleotide
  Sense strand starting at position 3418 of SEQ ID NO: 1563125
ugauaucaaucaugaauug

SEQ ID NO: 1797132 - RNA, 19 nt, Artificial Sequence
  Description of Artificial Sequence: Synthetic oligonucleotide
  Antisense strand to SEQ ID NO: 1797131
caauucaugauugauauca

SEQ ID NO: 1797133 - RNA, 19 nt, Artificial Sequence
  Description of Artificial Sequence: Synthetic oligonucleotide
  Sense strand starting at position 3543 of SEQ ID NO: 1563125
cgagacuacaaggguaaau

SEQ ID NO: 1797134 - RNA, 19 nt, Artificial Sequence
  Description of Artificial Sequence: Synthetic oligonucleotide
  Antisense strand to SEQ ID NO: 1797133
auuuacccuuguagucucg

SEQ ID NO: 1797135 - RNA, 19 nt, Artificial Sequence
  Description of Artificial Sequence: Synthetic oligonucleotide
  Sense strand starting at position 3747 of SEQ ID NO: 1563125
cucgcauguaguugggauu

SEQ ID NO: 1797136 - RNA, 19 nt, Artificial Sequence
  Description of Artificial Sequence: Synthetic oligonucleotide
  Antisense strand to SEQ ID NO: 1797135
aaucccaacuacaugcgag

SEQ ID NO: 1797137 - RNA, 19 nt, Artificial Sequence
  Description of Artificial Sequence: Synthetic oligonucleotide
  Sense strand starting at position 3748 of SEQ ID NO: 1563125
ucgcauguaguugggauua

SEQ ID NO: 1797138 - RNA, 19 nt, Artificial Sequence
  Description of Artificial Sequence: Synthetic oligonucleotide
  Antisense strand to SEQ ID NO: 1797137
uaaucccaacuacaugcga

SEQ ID NO: 1797139 - RNA, 19 nt, Artificial Sequence
  Description of Artificial Sequence: Synthetic oligonucleotide
  Sense strand starting at position 3750 of SEQ ID NO: 1563125
gcauguaguugggauuaca

SEQ ID NO: 1797140 - RNA, 19 nt, Artificial Sequence
  Description of Artificial Sequence: Synthetic oligonucleotide
  Antisense strand to SEQ ID NO: 1797139
uguaaucccaacuacaugc

SEQ ID NO: 1797141 - RNA, 19 nt, Artificial Sequence
  Description of Artificial Sequence: Synthetic oligonucleotide
  Sense strand starting at position 3932 of SEQ ID NO: 1563125
uugccuucuuaauggauca

SEQ ID NO: 1797142 - RNA, 19 nt, Artificial Sequence
  Description of Artificial Sequence: Synthetic oligonucleotide
  Antisense strand to SEQ ID NO: 1797141
ugauccauuaagaaggcaa

SEQ ID NO: 1797143 - RNA, 19 nt, Artificial Sequence
  Description of Artificial Sequence: Synthetic oligonucleotide
  Sense strand starting at position 3970 of SEQ ID NO: 1563125
accagaccuggcugagaaa

SEQ ID NO: 1797144 - RNA, 19 nt, Artificial Sequence
  Description of Artificial Sequence: Synthetic oligonucleotide
  Antisense strand to SEQ ID NO: 1797143
uuucucagccaggucuggu

SEQ ID NO: 1797145 - RNA, 19 nt, Artificial Sequence
  Description of Artificial Sequence: Synthetic oligonucleotide
  Sense strand starting at position 20 of SEQ ID NO: 1563126
auaucuagaguugggucua

SEQ ID NO: 1797146 - RNA, 19 nt, Artificial Sequence
  Description of Artificial Sequence: Synthetic oligonucleotide
  Antisense strand to SEQ ID NO: 1797145
uagacccaacucuagauau

SEQ ID NO: 1797147 - RNA, 19 nt, Artificial Sequence
  Description of Artificial Sequence: Synthetic oligonucleotide
  Sense strand starting at position 274 of SEQ ID NO: 1563126
uuucuuauagcaggacaau

SEQ ID NO: 1797148 - RNA, 19 nt, Artificial Sequence
  Description of Artificial Sequence: Synthetic oligonucleotide
  Antisense strand to SEQ ID NO: 1797147
auuguccugcuauaagaaa

SEQ ID NO: 1797149 - RNA, 19 nt, Artificial Sequence
  Description of Artificial Sequence: Synthetic oligonucleotide
  Sense strand starting at position 352 of SEQ ID NO: 1563126
aauggcagagaguguuaau

SEQ ID NO: 1797150 - RNA, 19 nt, Artificial Sequence
  Description of Artificial Sequence: Synthetic oligonucleotide
  Antisense strand to SEQ ID NO: 1797149
auuaacacucucugccauu

SEQ ID NO: 1797151 - RNA, 19 nt, Artificial Sequence
  Description of Artificial Sequence: Synthetic oligonucleotide
  Sense strand starting at position 445 of SEQ ID NO: 1563126
gaggccuuacacuguuaaa

SEQ ID NO: 1797152 - RNA, 19 nt, Artificial Sequence
  Description of Artificial Sequence: Synthetic oligonucleotide
  Antisense strand to SEQ ID NO: 1797151
uuuaacaguguaaggccuc

SEQ ID NO: 1797153 - RNA, 19 nt, Artificial Sequence
  Description of Artificial Sequence: Synthetic oligonucleotide
  Sense strand starting at position 486 of SEQ ID NO: 1563126
gcaguaccaucauugaauc

SEQ ID NO: 1797154 - RNA, 19 nt, Artificial Sequence
  Description of Artificial Sequence: Synthetic oligonucleotide
  Antisense strand to SEQ ID NO: 1797153
gauucaaugaugguacugc

SEQ ID NO: 1797155 - RNA, 19 nt, Artificial Sequence
  Description of Artificial Sequence: Synthetic oligonucleotide
  Sense strand starting at position 539 of SEQ ID NO: 1563126
aagucuuucuuguuagaga

SEQ ID NO: 1797156 - RNA, 19 nt, Artificial Sequence
  Description of Artificial Sequence: Synthetic oligonucleotide
  Antisense strand to SEQ ID NO: 1797155
ucucuaacaagaaagacuu

SEQ ID NO: 1797157 - RNA, 19 nt, Artificial Sequence
  Description of Artificial Sequence: Synthetic oligonucleotide
  Sense strand starting at position 579 of SEQ ID NO: 1563126
gugacaagcgacuaugaga

SEQ ID NO: 1797158 - RNA, 19 nt, Artificial Sequence
  Description of Artificial Sequence: Synthetic oligonucleotide
  Antisense strand to SEQ ID NO: 1797157
ucucauagucgcuugucac

SEQ ID NO: 1797159 - RNA, 19 nt, Artificial Sequence
  Description of Artificial Sequence: Synthetic oligonucleotide
  Sense strand starting at position 725 of SEQ ID NO: 1563126
aacugaagcgcugaugaga

SEQ ID NO: 1797160 - RNA, 19 nt, Artificial Sequence
  Description of Artificial Sequence: Synthetic oligonucleotide
  Antisense strand to SEQ ID NO: 1797159
ucucaucagcgcuucaguu

SEQ ID NO: 1797161 - RNA, 19 nt, Artificial Sequence
  Description of Artificial Sequence: Synthetic oligonucleotide
  Sense strand starting at position 733 of SEQ ID NO: 1563126
cgcugaugagaccauuaac

SEQ ID NO: 1797162 - RNA, 19 nt, Artificial Sequence
  Description of Artificial Sequence: Synthetic oligonucleotide
  Antisense strand to SEQ ID NO: 1797161
guuaauggucucaucagcg

SEQ ID NO: 1797163 - RNA, 19 nt, Artificial Sequence
  Description of Artificial Sequence: Synthetic oligonucleotide
  Sense strand starting at position 1010 of SEQ ID NO: 1563126
uuucuaugucuauagacau

SEQ ID NO: 1797164 - RNA, 19 nt, Artificial Sequence
  Description of Artificial Sequence: Synthetic oligonucleotide
  Antisense strand to SEQ ID NO: 1797163
augucuauagacauagaaa

SEQ ID NO: 1797165 - RNA, 19 nt, Artificial Sequence
  Description of Artificial Sequence: Synthetic oligonucleotide
  Sense strand starting at position 1071 of SEQ ID NO: 1563126
gugaauaaagcucauacua

SEQ ID NO: 1797166 - RNA, 19 nt, Artificial Sequence
  Description of Artificial Sequence: Synthetic oligonucleotide
  Antisense strand to SEQ ID NO: 1797165
uaguaugagcuuuauucac

SEQ ID NO: 1797167 - RNA, 19 nt, Artificial Sequence
  Description of Artificial Sequence: Synthetic oligonucleotide
  Sense strand starting at position 1533 of SEQ ID NO: 1563126
cagugaccucgggaaucuu

SEQ ID NO: 1797168 - RNA, 19 nt, Artificial Sequence
  Description of Artificial Sequence: Synthetic oligonucleotide
  Antisense strand to SEQ ID NO: 1797167
aagauucccgaggucacug

SEQ ID NO: 1797169 - RNA, 19 nt, Artificial Sequence
  Description of Artificial Sequence: Synthetic oligonucleotide
  Sense strand starting at position 1575 of SEQ ID NO: 1563126
gauagauagcccuggcuca

SEQ ID NO: 1797170 - RNA, 19 nt, Artificial Sequence
  Description of Artificial Sequence: Synthetic oligonucleotide
  Antisense strand to SEQ ID NO: 1797169
ugagccagggcuaucuauc

SEQ ID NO: 1797171 - RNA, 19 nt, Artificial Sequence
  Description of Artificial Sequence: Synthetic oligonucleotide
  Sense strand starting at position 1576 of SEQ ID NO: 1563126
auagauagcccuggcucaa

SEQ ID NO: 1797172 - RNA, 19 nt, Artificial Sequence
  Description of Artificial Sequence: Synthetic oligonucleotide
  Antisense strand to SEQ ID NO: 1797171
uugagccagggcuaucuau

SEQ ID NO: 1797173 - RNA, 19 nt, Artificial Sequence
  Description of Artificial Sequence: Synthetic oligonucleotide
  Sense strand starting at position 2155 of SEQ ID NO: 1563126
uggcgauccgcuucuguca

SEQ ID NO: 1797174 - RNA, 19 nt, Artificial Sequence
  Description of Artificial Sequence: Synthetic oligonucleotide
  Antisense strand to SEQ ID NO: 1797173
ugacagaagcggaucgcca

SEQ ID NO: 1797175 - RNA, 19 nt, Artificial Sequence
  Description of Artificial Sequence: Synthetic oligonucleotide
  Sense strand starting at position 2352 of SEQ ID NO: 1563126
acugcuccucuuuaagaga

SEQ ID NO: 1797176 - RNA, 19 nt, Artificial Sequence
  Description of Artificial Sequence: Synthetic oligonucleotide
  Antisense strand to SEQ ID NO: 1797175
ucucuuaaagaggagcagu

SEQ ID NO: 1797177 - RNA, 19 nt, Artificial Sequence
  Description of Artificial Sequence: Synthetic oligonucleotide
  Sense strand starting at position 2405 of SEQ ID NO: 1563126
uccuguaagccugaacuaa

SEQ ID NO: 1797178 - RNA, 19 nt, Artificial Sequence
  Description of Artificial Sequence: Synthetic oligonucleotide
  Antisense strand to SEQ ID NO: 1797177
uuaguucaggcuuacagga

SEQ ID NO: 1797179 - RNA, 19 nt, Artificial Sequence
  Description of Artificial Sequence: Synthetic oligonucleotide
  Sense strand starting at position 2469 of SEQ ID NO: 1563126
gcucacucccacugaugaa

SEQ ID NO: 1797180 - RNA, 19 nt, Artificial Sequence
  Description of Artificial Sequence: Synthetic oligonucleotide
  Antisense strand to SEQ ID NO: 1797179
uucaucagugggagugagc

SEQ ID NO: 1797181 - RNA, 19 nt, Artificial Sequence
  Description of Artificial Sequence: Synthetic oligonucleotide
  Sense strand starting at position 2485 of SEQ ID NO: 1563126
gaaauaucacaaggacgca

SEQ ID NO: 1797182 - RNA, 19 nt, Artificial Sequence
  Description of Artificial Sequence: Synthetic oligonucleotide
  Antisense strand to SEQ ID NO: 1797181
ugcguccuugugauauuuc

SEQ ID NO: 1797183 - RNA, 19 nt, Artificial Sequence
  Description of Artificial Sequence: Synthetic oligonucleotide
  Sense strand starting at position 2603 of SEQ ID NO: 1563126
ccugaucauugcuuauaag

SEQ ID NO: 1797184 - RNA, 19 nt, Artificial Sequence
  Description of Artificial Sequence: Synthetic oligonucleotide
  Antisense strand to SEQ ID NO: 1797183
cuuauaagcaaugaucagg

SEQ ID NO: 1797185 - RNA, 19 nt, Artificial Sequence
  Description of Artificial Sequence: Synthetic oligonucleotide
  Sense strand starting at position 2722 of SEQ ID NO: 1563126
gcaaaugaggccugauaaa

SEQ ID NO: 1797186 - RNA, 19 nt, Artificial Sequence
  Description of Artificial Sequence: Synthetic oligonucleotide
  Antisense strand to SEQ ID NO: 1797185
uuuaucaggccucauuugc

SEQ ID NO: 1797187 - RNA, 19 nt, Artificial Sequence
  Description of Artificial Sequence: Synthetic oligonucleotide
  Sense strand starting at position 2816 of SEQ ID NO: 1563126
cuuccuguuccugauggua

SEQ ID NO: 1797188 - RNA, 19 nt, Artificial Sequence
  Description of Artificial Sequence: Synthetic oligonucleotide
  Antisense strand to SEQ ID NO: 1797187
uaccaucaggaacaggaag

SEQ ID NO: 1797189 - RNA, 19 nt, Artificial Sequence
  Description of Artificial Sequence: Synthetic oligonucleotide
  Sense strand starting at position 2824 of SEQ ID NO: 1563126
uccugaugguaauugacau

SEQ ID NO: 1797190 - RNA, 19 nt, Artificial Sequence
  Description of Artificial Sequence: Synthetic oligonucleotide
  Antisense strand to SEQ ID NO: 1797189
augucaauuaccaucagga

SEQ ID NO: 1797191 - RNA, 19 nt, Artificial Sequence
  Description of Artificial Sequence: Synthetic oligonucleotide
  Sense strand starting at position 2927 of SEQ ID NO: 1563126
gccuuaccaccugagauua

SEQ ID NO: 1797192 - RNA, 19 nt, Artificial Sequence
  Description of Artificial Sequence: Synthetic oligonucleotide
  Antisense strand to SEQ ID NO: 1797191
uaaucucaggugguaaggc

SEQ ID NO: 1797193 - RNA, 19 nt, Artificial Sequence
  Description of Artificial Sequence: Synthetic oligonucleotide
  Sense strand starting at position 2941 of SEQ ID NO: 1563126
gauuacaagcuagaguagu

SEQ ID NO: 1797194 - RNA, 19 nt, Artificial Sequence
  Description of Artificial Sequence: Synthetic oligonucleotide
  Antisense strand to SEQ ID NO: 1797193
acuacucuagcuuguaauc

SEQ ID NO: 1797195 - RNA, 19 nt, Artificial Sequence
  Description of Artificial Sequence: Synthetic oligonucleotide
  Sense strand starting at position 2952 of SEQ ID NO: 1563126
agaguaguucuucagugug

SEQ ID NO: 1797196 - RNA, 19 nt, Artificial Sequence
  Description of Artificial Sequence: Synthetic oligonucleotide
  Antisense strand to SEQ ID NO: 1797195
cacacugaagaacuacucu

SEQ ID NO: 1797197 - RNA, 19 nt, Artificial Sequence
  Description of Artificial Sequence: Synthetic oligonucleotide
  Sense strand starting at position 3040 of SEQ ID NO: 1563126
cugaucuggguagggauaa

SEQ ID NO: 1797198 - RNA, 19 nt, Artificial Sequence
  Description of Artificial Sequence: Synthetic oligonucleotide
  Antisense strand to SEQ ID NO: 1797197
uuaucccuacccagaucag

SEQ ID NO: 1797199 - RNA, 19 nt, Artificial Sequence
  Description of Artificial Sequence: Synthetic oligonucleotide
  Sense strand starting at position 3111 of SEQ ID NO: 1563126
agagcacagagcuauaguu

SEQ ID NO: 1797200 - RNA, 19 nt, Artificial Sequence
  Description of Artificial Sequence: Synthetic oligonucleotide
  Antisense strand to SEQ ID NO: 1797199
aacuauagcucugugcucu

SEQ ID NO: 1797201 - RNA, 19 nt, Artificial Sequence
  Description of Artificial Sequence: Synthetic oligonucleotide
  Sense strand starting at position 3131 of SEQ ID NO: 1563126
uuguguuacuacucuaaag

SEQ ID NO: 1797202 - RNA, 19 nt, Artificial Sequence
  Description of Artificial Sequence: Synthetic oligonucleotide
  Antisense strand to SEQ ID NO: 1797201
cuuuagaguaguaacacaa

SEQ ID NO: 1797203 - RNA, 19 nt, Artificial Sequence
  Description of Artificial Sequence: Synthetic oligonucleotide
  Sense strand starting at position 3334 of SEQ ID NO: 1563126
ucauaugucagguacguaa

SEQ ID NO: 1797204 - RNA, 19 nt, Artificial Sequence
  Description of Artificial Sequence: Synthetic oligonucleotide
  Antisense strand to SEQ ID NO: 1797203
uuacguaccugacauauga

SEQ ID NO: 1797205 - RNA, 19 nt, Artificial Sequence
  Description of Artificial Sequence: Synthetic oligonucleotide
  Sense strand starting at position 3439 of SEQ ID NO: 1563126
ucaauaaaguuagugucua

SEQ ID NO: 1797206 - RNA, 19 nt, Artificial Sequence
  Description of Artificial Sequence: Synthetic oligonucleotide
  Antisense strand to SEQ ID NO: 1797205
uagacacuaacuuuauuga

SEQ ID NO: 1797207 - RNA, 19 nt, Artificial Sequence
  Description of Artificial Sequence: Synthetic oligonucleotide
  Sense strand starting at position 3452 of SEQ ID NO: 1563126
ugucuaguuguggaauuaa

SEQ ID NO: 1797208 - RNA, 19 nt, Artificial Sequence
  Description of Artificial Sequence: Synthetic oligonucleotide
  Antisense strand to SEQ ID NO: 1797207
uuaauuccacaacuagaca

SEQ ID NO: 1797209 - RNA, 19 nt, Artificial Sequence
  Description of Artificial Sequence: Synthetic oligonucleotide
  Sense strand starting at position 3490 of SEQ ID NO: 1563126
cccaguguagcacauaaau

SEQ ID NO: 1797210 - RNA, 19 nt, Artificial Sequence
  Description of Artificial Sequence: Synthetic oligonucleotide
  Antisense strand to SEQ ID NO: 1797209
auuuaugugcuacacuggg

SEQ ID NO: 1797211 - RNA, 19 nt, Artificial Sequence
  Description of Artificial Sequence: Synthetic oligonucleotide
  Sense strand starting at position 3502 of SEQ ID NO: 1563126
cauaaaucagugugcugga

SEQ ID NO: 1797212 - RNA, 19 nt, Artificial Sequence
  Description of Artificial Sequence: Synthetic oligonucleotide
  Antisense strand to SEQ ID NO: 1797211
uccagcacacugauuuaug

SEQ ID NO: 1797213 - RNA, 19 nt, Artificial Sequence
  Description of Artificial Sequence: Synthetic oligonucleotide
  Sense strand starting at position 3503 of SEQ ID NO: 1563126
auaaaucagugugcuggau

SEQ ID NO: 1797214 - RNA, 19 nt, Artificial Sequence
  Description of Artificial Sequence: Synthetic oligonucleotide
  Antisense strand to SEQ ID NO: 1797213
auccagcacacugauuuau

SEQ ID NO: 1797215 - RNA, 19 nt, Artificial Sequence
  Description of Artificial Sequence: Synthetic oligonucleotide
  Sense strand starting at position 3578 of SEQ ID NO: 1563126
ggucucuuagcccagacau

SEQ ID NO: 1797216 - RNA, 19 nt, Artificial Sequence
  Description of Artificial Sequence: Synthetic oligonucleotide
  Antisense strand to SEQ ID NO: 1797215
augucugggcuaagagacc

SEQ ID NO: 1797217 - RNA, 19 nt, Artificial Sequence
  Description of Artificial Sequence: Synthetic oligonucleotide
  Sense strand starting at position 3607 of SEQ ID NO: 1563126
guaauuuccucugaacaga

SEQ ID NO: 1797218 - RNA, 19 nt, Artificial Sequence
  Description of Artificial Sequence: Synthetic oligonucleotide
  Antisense strand to SEQ ID NO: 1797217
ucuguucagaggaaauuac

SEQ ID NO: 1797219 - RNA, 19 nt, Artificial Sequence
  Description of Artificial Sequence: Synthetic oligonucleotide
  Sense strand starting at position 3709 of SEQ ID NO: 1563126
uauacaaauguguguauga

SEQ ID NO: 1797220 - RNA, 19 nt, Artificial Sequence
  Description of Artificial Sequence: Synthetic oligonucleotide
  Antisense strand to SEQ ID NO: 1797219
ucauacacacauuuguaua

SEQ ID NO: 1797221 - RNA, 19 nt, Artificial Sequence
  Description of Artificial Sequence: Synthetic oligonucleotide
  Sense strand starting at position 3710 of SEQ ID NO: 1563126
auacaaauguguguaugau

SEQ ID NO: 1797222 - RNA, 19 nt, Artificial Sequence
  Description of Artificial Sequence: Synthetic oligonucleotide
  Antisense strand to SEQ ID NO: 1797221
aucauacacacauuuguau

SEQ ID NO: 1797223 - RNA, 19 nt, Artificial Sequence
  Description of Artificial Sequence: Synthetic oligonucleotide
  Sense strand starting at position 3711 of SEQ ID NO: 1563126
uacaaauguguguaugaua

SEQ ID NO: 1797224 - RNA, 19 nt, Artificial Sequence
  Description of Artificial Sequence: Synthetic oligonucleotide
  Antisense strand to SEQ ID NO: 1797223
uaucauacacacauuugua

SEQ ID NO: 1797225 - RNA, 19 nt, Artificial Sequence
  Description of Artificial Sequence: Synthetic oligonucleotide
  Sense strand starting at position 621 of SEQ ID NO: 1563127
cugguacuccuguaaucug

SEQ ID NO: 1797226 - RNA, 19 nt, Artificial Sequence
  Description of Artificial Sequence: Synthetic oligonucleotide
  Antisense strand to SEQ ID NO: 1797225
cagauuacaggaguaccag

SEQ ID NO: 1797227 - RNA, 19 nt, Artificial Sequence
  Description of Artificial Sequence: Synthetic oligonucleotide
  Sense strand starting at position 808 of SEQ ID NO: 1563127
agcugugaucuugauggga

SEQ ID NO: 1797228 - RNA, 19 nt, Artificial Sequence
  Description of Artificial Sequence: Synthetic oligonucleotide
  Antisense strand to SEQ ID NO: 1797227
ucccaucaagaucacagcu

SEQ ID NO: 1797229 - RNA, 19 nt, Artificial Sequence
  Description of Artificial Sequence: Synthetic oligonucleotide
  Sense strand starting at position 811 of SEQ ID NO: 1563127
ugugaucuugaugggagua

SEQ ID NO: 1797230 - RNA, 19 nt, Artificial Sequence
  Description of Artificial Sequence: Synthetic oligonucleotide
  Antisense strand to SEQ ID NO: 1797229
uacucccaucaagaucaca

SEQ ID NO: 1797231 - RNA, 19 nt, Artificial Sequence
  Description of Artificial Sequence: Synthetic oligonucleotide
  Sense strand starting at position 906 of SEQ ID NO: 1563127
guacaaugucugcauaaag

SEQ ID NO: 1797232 - RNA, 19 nt, Artificial Sequence
  Description of Artificial Sequence: Synthetic oligonucleotide
  Antisense strand to SEQ ID NO: 1797231
cuuuaugcagacauuguac

SEQ ID NO: 1797233 - RNA, 19 nt, Artificial Sequence
  Description of Artificial Sequence: Synthetic oligonucleotide
  Sense strand starting at position 922 of SEQ ID NO: 1563127
aaguuuauucuggauguca

SEQ ID NO: 1797234 - RNA, 19 nt, Artificial Sequence
  Description of Artificial Sequence: Synthetic oligonucleotide
  Antisense strand to SEQ ID NO: 1797233
ugacauccagaauaaacuu

SEQ ID NO: 1797235 - RNA, 19 nt, Artificial Sequence
  Description of Artificial Sequence: Synthetic oligonucleotide
  Sense strand starting at position 1183 of SEQ ID NO: 1563127
gaguaugcaagggaaguua

SEQ ID NO: 1797236 - RNA, 19 nt, Artificial Sequence
  Description of Artificial Sequence: Synthetic oligonucleotide
  Antisense strand to SEQ ID NO: 1797235
uaacuucccuugcauacuc

SEQ ID NO: 1797237 - RNA, 19 nt, Artificial Sequence
  Description of Artificial Sequence: Synthetic oligonucleotide
  Sense strand starting at position 1596 of SEQ ID NO: 1563127
aauguagggccucauacuu

SEQ ID NO: 1797238 - RNA, 19 nt, Artificial Sequence
  Description of Artificial Sequence: Synthetic oligonucleotide
  Antisense strand to SEQ ID NO: 1797237
aaguaugaggcccuacauu

SEQ ID NO: 1797239 - RNA, 19 nt, Artificial Sequence
  Description of Artificial Sequence: Synthetic oligonucleotide
  Sense strand starting at position 1638 of SEQ ID NO: 1563127
aguacuucugauuaagucu

SEQ ID NO: 1797240 - RNA, 19 nt, Artificial Sequence
  Description of Artificial Sequence: Synthetic oligonucleotide
  Antisense strand to SEQ ID NO: 1797239
agacuuaaucagaaguacu

SEQ ID NO: 1797241 - RNA, 19 nt, Artificial Sequence
  Description of Artificial Sequence: Synthetic oligonucleotide
  Sense strand starting at position 1647 of SEQ ID NO: 1563127
gauuaagucuugcuaaagg

SEQ ID NO: 1797242 - RNA, 19 nt, Artificial Sequence
  Description of Artificial Sequence: Synthetic oligonucleotide
  Antisense strand to SEQ ID NO: 1797241
ccuuuagcaagacuuaauc

SEQ ID NO: 1797243 - RNA, 19 nt, Artificial Sequence
  Description of Artificial Sequence: Synthetic oligonucleotide
  Sense strand starting at position 1712 of SEQ ID NO: 1563127
gguccaaucucuccagaca

SEQ ID NO: 1797244 - RNA, 19 nt, Artificial Sequence
  Description of Artificial Sequence: Synthetic oligonucleotide
  Antisense strand to SEQ ID NO: 1797243
ugucuggagagauuggacc

SEQ ID NO: 1797245 - RNA, 19 nt, Artificial Sequence
  Description of Artificial Sequence: Synthetic oligonucleotide
  Sense strand starting at position 1785 of SEQ ID NO: 1563127
augcauguggauuaaacau

SEQ ID NO: 1797246 - RNA, 19 nt, Artificial Sequence
  Description of Artificial Sequence: Synthetic oligonucleotide
  Antisense strand to SEQ ID NO: 1797245
auguuuaauccacaugcau

SEQ ID NO: 1797247 - RNA, 19 nt, Artificial Sequence
  Description of Artificial Sequence: Synthetic oligonucleotide
  Sense strand starting at position 2068 of SEQ ID NO: 1563127
aacaauuguccucagugag

SEQ ID NO: 1797248 - RNA, 19 nt, Artificial Sequence
  Description of Artificial Sequence: Synthetic oligonucleotide
  Antisense strand to SEQ ID NO: 1797247
cucacugaggacaauuguu

SEQ ID NO: 1797249 - RNA, 19 nt, Artificial Sequence
  Description of Artificial Sequence: Synthetic oligonucleotide
  Sense strand starting at position 2125 of SEQ ID NO: 1563127
cucccuacuuggucagaua

SEQ ID NO: 1797250 - RNA, 19 nt, Artificial Sequence
  Description of Artificial Sequence: Synthetic oligonucleotide
  Antisense strand to SEQ ID NO: 1797249
uaucugaccaaguagggag

SEQ ID NO: 1797251 - RNA, 19 nt, Artificial Sequence
  Description of Artificial Sequence: Synthetic oligonucleotide
  Sense strand starting at position 2245 of SEQ ID NO: 1563127
agaauagaauugcugaguu

SEQ ID NO: 1797252 - RNA, 19 nt, Artificial Sequence
  Description of Artificial Sequence: Synthetic oligonucleotide
  Antisense strand to SEQ ID NO: 1797251
aacucagcaauucuauucu

SEQ ID NO: 1797253 - RNA, 19 nt, Artificial Sequence
  Description of Artificial Sequence: Synthetic oligonucleotide
  Sense strand starting at position 2247 of SEQ ID NO: 1563127
aauagaauugcugaguuau

SEQ ID NO: 1797254 - RNA, 19 nt, Artificial Sequence
  Description of Artificial Sequence: Synthetic oligonucleotide
  Antisense strand to SEQ ID NO: 1797253
auaacucagcaauucuauu

SEQ ID NO: 1797255 - RNA, 19 nt, Artificial Sequence
  Description of Artificial Sequence: Synthetic oligonucleotide
  Sense strand starting at position 2264 of SEQ ID NO: 1563127
auaugacaacuguauguua

SEQ ID NO: 1797256 - RNA, 19 nt, Artificial Sequence
  Description of Artificial Sequence: Synthetic oligonucleotide
  Antisense strand to SEQ ID NO: 1797255
uaacauacaguugucauau

SEQ ID NO: 1797257 - RNA, 19 nt, Artificial Sequence
  Description of Artificial Sequence: Synthetic oligonucleotide
  Sense strand starting at position 2266 of SEQ ID NO: 1563127
augacaacuguauguuaaa

SEQ ID NO: 1797258 - RNA, 19 nt, Artificial Sequence
  Description of Artificial Sequence: Synthetic oligonucleotide
  Antisense strand to SEQ ID NO: 1797257
uuuaacauacaguugucau

SEQ ID NO: 1797259 - RNA, 19 nt, Artificial Sequence
  Description of Artificial Sequence: Synthetic oligonucleotide
  Sense strand starting at position 2267 of SEQ ID NO: 1563127
ugacaacuguauguuaaau

SEQ ID NO: 1797260 - RNA, 19 nt, Artificial Sequence
  Description of Artificial Sequence: Synthetic oligonucleotide
  Antisense strand to SEQ ID NO: 1797259
auuuaacauacaguuguca

SEQ ID NO: 1797261 - RNA, 19 nt, Artificial Sequence
  Description of Artificial Sequence: Synthetic oligonucleotide
  Sense strand starting at position 2483 of SEQ ID NO: 1563127
ugagaaucuuuauuaugug

SEQ ID NO: 1797262 - RNA, 19 nt, Artificial Sequence
  Description of Artificial Sequence: Synthetic oligonucleotide
  Antisense strand to SEQ ID NO: 1797261
cacauaauaaagauucuca

SEQ ID NO: 1797263 - RNA, 19 nt, Artificial Sequence
  Description of Artificial Sequence: Synthetic oligonucleotide
  Sense strand starting at position 2592 of SEQ ID NO: 1563127
guaacuguucuuuacacau

SEQ ID NO: 1797264 - RNA, 19 nt, Artificial Sequence
  Description of Artificial Sequence: Synthetic oligonucleotide
  Antisense strand to SEQ ID NO: 1797263
auguguaaagaacaguuac

SEQ ID NO: 1797265 - RNA, 19 nt, Artificial Sequence
  Description of Artificial Sequence: Synthetic oligonucleotide
  Sense strand starting at position 2615 of SEQ ID NO: 1563127
gagucugguguuuaucaga

SEQ ID NO: 1797266 - RNA, 19 nt, Artificial Sequence
  Description of Artificial Sequence: Synthetic oligonucleotide
  Antisense strand to SEQ ID NO: 1797265
ucugauaaacaccagacuc

SEQ ID NO: 1797267 - RNA, 19 nt, Artificial Sequence
  Description of Artificial Sequence: Synthetic oligonucleotide
  Sense strand starting at position 2633 of SEQ ID NO: 1563127
auacauuaugugcauacau

SEQ ID NO: 1797268 - RNA, 19 nt, Artificial Sequence
  Description of Artificial Sequence: Synthetic oligonucleotide
  Antisense strand to SEQ ID NO: 1797267
auguaugcacauaauguau

SEQ ID NO: 1797269 - RNA, 19 nt, Artificial Sequence
  Description of Artificial Sequence: Synthetic oligonucleotide
  Sense strand starting at position 2687 of SEQ ID NO: 1563127
guuaguguucuugaaauua

SEQ ID NO: 1797270 - RNA, 19 nt, Artificial Sequence
  Description of Artificial Sequence: Synthetic oligonucleotide
  Antisense strand to SEQ ID NO: 1797269
uaauuucaagaacacuaac

SEQ ID NO: 1797271 - RNA, 19 nt, Artificial Sequence
  Description of Artificial Sequence: Synthetic oligonucleotide
  Sense strand starting at position 2887 of SEQ ID NO: 1563127
uuauuuauggugugcauua

SEQ ID NO: 1797272 - RNA, 19 nt, Artificial Sequence
  Description of Artificial Sequence: Synthetic oligonucleotide
  Antisense strand to SEQ ID NO: 1797271
uaaugcacaccauaaauaa

SEQ ID NO: 1797273 - RNA, 19 nt, Artificial Sequence
  Description of Artificial Sequence: Synthetic oligonucleotide
  Sense strand starting at position 2888 of SEQ ID NO: 1563127
uauuuauggugugcauuaa

SEQ ID NO: 1797274 - RNA, 19 nt, Artificial Sequence
  Description of Artificial Sequence: Synthetic oligonucleotide
  Antisense strand to SEQ ID NO: 1797273
uuaaugcacaccauaaaua

SEQ ID NO: 1797275 - RNA, 19 nt, Artificial Sequence
  Description of Artificial Sequence: Synthetic oligonucleotide
  Sense strand starting at position 2982 of SEQ ID NO: 1563127
cccauagaaugacuaguau

SEQ ID NO: 1797276 - RNA, 19 nt, Artificial Sequence
  Description of Artificial Sequence: Synthetic oligonucleotide
  Antisense strand to SEQ ID NO: 1797275
auacuagucauucuauggg

SEQ ID NO: 1797277 - RNA, 19 nt, Artificial Sequence
  Description of Artificial Sequence: Synthetic oligonucleotide
  Sense strand starting at position 3026 of SEQ ID NO: 1563127
gacagacaccuggguuuau

SEQ ID NO: 1797278 - RNA, 19 nt, Artificial Sequence
  Description of Artificial Sequence: Synthetic oligonucleotide
  Antisense strand to SEQ ID NO: 1797277
auaaacccaggugucuguc

SEQ ID NO: 1797279 - RNA, 19 nt, Artificial Sequence
  Description of Artificial Sequence: Synthetic oligonucleotide
  Sense strand starting at position 3027 of SEQ ID NO: 1563127
acagacaccuggguuuauu

SEQ ID NO: 1797280 - RNA, 19 nt, Artificial Sequence
  Description of Artificial Sequence: Synthetic oligonucleotide
  Antisense strand to SEQ ID NO: 1797279
aauaaacccaggugucugu

SEQ ID NO: 1797281 - RNA, 19 nt, Artificial Sequence
  Description of Artificial Sequence: Synthetic oligonucleotide
  Sense strand starting at position 3070 of SEQ ID NO: 1563127
ugaucuauaugucuaucau

SEQ ID NO: 1797282 - RNA, 19 nt, Artificial Sequence
  Description of Artificial Sequence: Synthetic oligonucleotide
  Antisense strand to SEQ ID NO: 1797281
augauagacauauagauca

SEQ ID NO: 1797283 - RNA, 19 nt, Artificial Sequence
  Description of Artificial Sequence: Synthetic oligonucleotide
  Sense strand starting at position 3110 of SEQ ID NO: 1563127
ugauuucugucacucugua

SEQ ID NO: 1797284 - RNA, 19 nt, Artificial Sequence
  Description of Artificial Sequence: Synthetic oligonucleotide
  Antisense strand to SEQ ID NO: 1797283
uacagagugacagaaauca

SEQ ID NO: 1797285 - RNA, 19 nt, Artificial Sequence
  Description of Artificial Sequence: Synthetic oligonucleotide
  Sense strand starting at position 3115 of SEQ ID NO: 1563127
ucugucacucuguaauaaa

SEQ ID NO: 1797286 - RNA, 19 nt, Artificial Sequence
  Description of Artificial Sequence: Synthetic oligonucleotide
  Antisense strand to SEQ ID NO: 1797285
uuuauuacagagugacaga

SEQ ID NO: 1797287 - RNA, 19 nt, Artificial Sequence
  Description of Artificial Sequence: Synthetic oligonucleotide
  Sense strand starting at position 3140 of SEQ ID NO: 1563127
aguuaagaaguuugaguac

SEQ ID NO: 1797288 - RNA, 19 nt, Artificial Sequence
  Description of Artificial Sequence: Synthetic oligonucleotide
  Antisense strand to SEQ ID NO: 1797287
guacucaaacuucuuaacu

SEQ ID NO: 1797289 - RNA, 19 nt, Artificial Sequence
  Description of Artificial Sequence: Synthetic oligonucleotide
  Sense strand starting at position 3279 of SEQ ID NO: 1563127
ugccuugaaucauuagauc

SEQ ID NO: 1797290 - RNA, 19 nt, Artificial Sequence
  Description of Artificial Sequence: Synthetic oligonucleotide
  Antisense strand to SEQ ID NO: 1797289
gaucuaaugauucaaggca

SEQ ID NO: 1797291 - RNA, 19 nt, Artificial Sequence
  Description of Artificial Sequence: Synthetic oligonucleotide
  Sense strand starting at position 3798 of SEQ ID NO: 1563127
gguacaugugcuuauuugu

SEQ ID NO: 1797292 - RNA, 19 nt, Artificial Sequence
  Description of Artificial Sequence: Synthetic oligonucleotide
  Antisense strand to SEQ ID NO: 1797291
acaaauaagcacauguacc

SEQ ID NO: 1797293 - RNA, 19 nt, Artificial Sequence
  Description of Artificial Sequence: Synthetic oligonucleotide
  Sense strand starting at position 3803 of SEQ ID NO: 1563127
augugcuuauuuguuacau

SEQ ID NO: 1797294 - RNA, 19 nt, Artificial Sequence
  Description of Artificial Sequence: Synthetic oligonucleotide
  Antisense strand to SEQ ID NO: 1797293
auguaacaaauaagcacau

SEQ ID NO: 1797295 - RNA, 19 nt, Artificial Sequence
  Description of Artificial Sequence: Synthetic oligonucleotide
  Sense strand starting at position 3804 of SEQ ID NO: 1563127
ugugcuuauuuguuacaua

SEQ ID NO: 1797296 - RNA, 19 nt, Artificial Sequence
  Description of Artificial Sequence: Synthetic oligonucleotide
  Antisense strand to SEQ ID NO: 1797295
uauguaacaaauaagcaca

SEQ ID NO: 1797297 - RNA, 19 nt, Artificial Sequence
  Description of Artificial Sequence: Synthetic oligonucleotide
  Sense strand starting at position 3824 of SEQ ID NO: 1563127
guauuacauguauaauggu

SEQ ID NO: 1797298 - RNA, 19 nt, Artificial Sequence
  Description of Artificial Sequence: Synthetic oligonucleotide
  Antisense strand to SEQ ID NO: 1797297
accauuauacauguaauac

SEQ ID NO: 1797299 - RNA, 19 nt, Artificial Sequence
  Description of Artificial Sequence: Synthetic oligonucleotide
  Sense strand starting at position 3976 of SEQ ID NO: 1563127
ccauguguaucauuuguuu

SEQ ID NO: 1797300 - RNA, 19 nt, Artificial Sequence
  Description of Artificial Sequence: Synthetic oligonucleotide
  Antisense strand to SEQ ID NO: 1797299
aaacaaaugauacacaugg

SEQ ID NO: 1797301 - RNA, 19 nt, Artificial Sequence
  Description of Artificial Sequence: Synthetic oligonucleotide
  Sense strand starting at position 3978 of SEQ ID NO: 1563127
auguguaucauuuguuuag

SEQ ID NO: 1797302 - RNA, 19 nt, Artificial Sequence
  Description of Artificial Sequence: Synthetic oligonucleotide
  Antisense strand to SEQ ID NO: 1797301
cuaaacaaaugauacacau

SEQ ID NO: 1797303 - RNA, 19 nt, Artificial Sequence
  Description of Artificial Sequence: Synthetic oligonucleotide
  Sense strand starting at position 3981 of SEQ ID NO: 1563127
uguaucauuuguuuagcuu

SEQ ID NO: 1797304 - RNA, 19 nt, Artificial Sequence
  Description of Artificial Sequence: Synthetic oligonucleotide
  Antisense strand to SEQ ID NO: 1797303
aagcuaaacaaaugauaca

SEQ ID NO: 1797305 - RNA, 19 nt, Artificial Sequence
  Description of Artificial Sequence: Synthetic oligonucleotide
  Sense strand starting at position 93 of SEQ ID NO: 1563128
cgccuuauagauuaauacu

SEQ ID NO: 1797306 - RNA, 19 nt, Artificial Sequence
  Description of Artificial Sequence: Synthetic oligonucleotide
  Antisense strand to SEQ ID NO: 1797305
aguauuaaucuauaaggcg

SEQ ID NO: 1797307 - RNA, 19 nt, Artificial Sequence
  Description of Artificial Sequence: Synthetic oligonucleotide
  Sense strand starting at position 134 of SEQ ID NO: 1563128
aaggauuuauccggaauug

SEQ ID NO: 1797308 - RNA, 19 nt, Artificial Sequence
  Description of Artificial Sequence: Synthetic oligonucleotide
  Antisense strand to SEQ ID NO: 1797307
caauuccggauaaauccuu

SEQ ID NO: 1797309 - RNA, 19 nt, Artificial Sequence
  Description of Artificial Sequence: Synthetic oligonucleotide
  Sense strand starting at position 174 of SEQ ID NO: 1563128
aguucugacuaucuuggau

SEQ ID NO: 1797310 - RNA, 19 nt, Artificial Sequence
  Description of Artificial Sequence: Synthetic oligonucleotide
  Antisense strand to SEQ ID NO: 1797309
auccaagauagucagaacu

SEQ ID NO: 1797311 - RNA, 19 nt, Artificial Sequence
  Description of Artificial Sequence: Synthetic oligonucleotide
  Sense strand starting at position 204 of SEQ ID NO: 1563128
ggaggcaugauuggcauaa

SEQ ID NO: 1797312 - RNA, 19 nt, Artificial Sequence
  Description of Artificial Sequence: Synthetic oligonucleotide
  Antisense strand to SEQ ID NO: 1797311
uuaugccaaucaugccucc

SEQ ID NO: 1797313 - RNA, 19 nt, Artificial Sequence
  Description of Artificial Sequence: Synthetic oligonucleotide
  Sense strand starting at position 205 of SEQ ID NO: 1563128
gaggcaugauuggcauaau

SEQ ID NO: 1797314 - RNA, 19 nt, Artificial Sequence
  Description of Artificial Sequence: Synthetic oligonucleotide
  Antisense strand to SEQ ID NO: 1797313
auuaugccaaucaugccuc

SEQ ID NO: 1797315 - RNA, 19 nt, Artificial Sequence
  Description of Artificial Sequence: Synthetic oligonucleotide
  Sense strand starting at position 208 of SEQ ID NO: 1563128
gcaugauuggcauaaugaa

SEQ ID NO: 1797316 - RNA, 19 nt, Artificial Sequence
  Description of Artificial Sequence: Synthetic oligonucleotide
  Antisense strand to SEQ ID NO: 1797315
uucauuaugccaaucaugc

SEQ ID NO: 1797317 - RNA, 19 nt, Artificial Sequence
  Description of Artificial Sequence: Synthetic oligonucleotide
  Sense strand starting at position 331 of SEQ ID NO: 1563128
gccgcuaguaguuuaacau

SEQ ID NO: 1797318 - RNA, 19 nt, Artificial Sequence
  Description of Artificial Sequence: Synthetic oligonucleotide
  Antisense strand to SEQ ID NO: 1797317
auguuaaacuacuagcggc

SEQ ID NO: 1797319 - RNA, 19 nt, Artificial Sequence
  Description of Artificial Sequence: Synthetic oligonucleotide
  Sense strand starting at position 481 of SEQ ID NO: 1563128
gggaaucugauacguuuaa

SEQ ID NO: 1797320 - RNA, 19 nt, Artificial Sequence
  Description of Artificial Sequence: Synthetic oligonucleotide
  Antisense strand to SEQ ID NO: 1797319
uuaaacguaucagauuccc

SEQ ID NO: 1797321 - RNA, 19 nt, Artificial Sequence
  Description of Artificial Sequence: Synthetic oligonucleotide
  Sense strand starting at position 482 of SEQ ID NO: 1563128
ggaaucugauacguuuaag

SEQ ID NO: 1797322 - RNA, 19 nt, Artificial Sequence
  Description of Artificial Sequence: Synthetic oligonucleotide
  Antisense strand to SEQ ID NO: 1797321
cuuaaacguaucagauucc

SEQ ID NO: 1797323 - RNA, 19 nt, Artificial Sequence
  Description of Artificial Sequence: Synthetic oligonucleotide
  Sense strand starting at position 485 of SEQ ID NO: 1563128
aucugauacguuuaaguau

SEQ ID NO: 1797324 - RNA, 19 nt, Artificial Sequence
  Description of Artificial Sequence: Synthetic oligonucleotide
  Antisense strand to SEQ ID NO: 1797323
auacuuaaacguaucagau

SEQ ID NO: 1797325 - RNA, 19 nt, Artificial Sequence
  Description of Artificial Sequence: Synthetic oligonucleotide
  Sense strand starting at position 528 of SEQ ID NO: 1563128
uuuguaguaggugaaguuu

SEQ ID NO: 1797326 - RNA, 19 nt, Artificial Sequence
  Description of Artificial Sequence: Synthetic oligonucleotide
  Antisense strand to SEQ ID NO: 1797325
aaacuucaccuacuacaaa

SEQ ID NO: 1797327 - RNA, 19 nt, Artificial Sequence
  Description of Artificial Sequence: Synthetic oligonucleotide
  Sense strand starting at position 684 of SEQ ID NO: 1563128
uugugaagagcugacucaa

SEQ ID NO: 1797328 - RNA, 19 nt, Artificial Sequence
  Description of Artificial Sequence: Synthetic oligonucleotide
  Antisense strand to SEQ ID NO: 1797327
uugagucagcucuucacaa

SEQ ID NO: 1797329 - RNA, 19 nt, Artificial Sequence
  Description of Artificial Sequence: Synthetic oligonucleotide
  Sense strand starting at position 769 of SEQ ID NO: 1563128
ggguccauccgguaauuaa

SEQ ID NO: 1797330 - RNA, 19 nt, Artificial Sequence
  Description of Artificial Sequence: Synthetic oligonucleotide
  Antisense strand to SEQ ID NO: 1797329
uuaauuaccggauggaccc

SEQ ID NO: 1797331 - RNA, 19 nt, Artificial Sequence
  Description of Artificial Sequence: Synthetic oligonucleotide
  Sense strand starting at position 784 of SEQ ID NO: 1563128
uuaaaugugcauugacauc

SEQ ID NO: 1797332 - RNA, 19 nt, Artificial Sequence
  Description of Artificial Sequence: Synthetic oligonucleotide
  Antisense strand to SEQ ID NO: 1797331
gaugucaaugcacauuuaa

SEQ ID NO: 1797333 - RNA, 19 nt, Artificial Sequence
  Description of Artificial Sequence: Synthetic oligonucleotide
  Sense strand starting at position 1089 of SEQ ID NO: 1563128
cuggaaaguugagacauuu

SEQ ID NO: 1797334 - RNA, 19 nt, Artificial Sequence
  Description of Artificial Sequence: Synthetic oligonucleotide
  Antisense strand to SEQ ID NO: 1797333
aaaugucucaacuuuccag

SEQ ID NO: 1797335 - RNA, 19 nt, Artificial Sequence
  Description of Artificial Sequence: Synthetic oligonucleotide
  Sense strand starting at position 1419 of SEQ ID NO: 1563128
cucagacuucgccaggaga

SEQ ID NO: 1797336 - RNA, 19 nt, Artificial Sequence
  Description of Artificial Sequence: Synthetic oligonucleotide
  Antisense strand to SEQ ID NO: 1797335
ucuccuggcgaagucugag

SEQ ID NO: 1797337 - RNA, 19 nt, Artificial Sequence
  Description of Artificial Sequence: Synthetic oligonucleotide
  Sense strand starting at position 1421 of SEQ ID NO: 1563128
cagacuucgccaggagacu

SEQ ID NO: 1797338 - RNA, 19 nt, Artificial Sequence
  Description of Artificial Sequence: Synthetic oligonucleotide
  Antisense strand to SEQ ID NO: 1797337
agucuccuggcgaagucug

SEQ ID NO: 1797339 - RNA, 19 nt, Artificial Sequence
  Description of Artificial Sequence: Synthetic oligonucleotide
  Sense strand starting at position 1432 of SEQ ID NO: 1563128
aggagacucgcucaucaaa

SEQ ID NO: 1797340 - RNA, 19 nt, Artificial Sequence
  Description of Artificial Sequence: Synthetic oligonucleotide
  Antisense strand to SEQ ID NO: 1797339
uuugaugagcgagucuccu

SEQ ID NO: 1797341 - RNA, 19 nt, Artificial Sequence
  Description of Artificial Sequence: Synthetic oligonucleotide
  Sense strand starting at position 2412 of SEQ ID NO: 1563128
cgaguaguggagcaaacuu

SEQ ID NO: 1797342 - RNA, 19 nt, Artificial Sequence
  Description of Artificial Sequence: Synthetic oligonucleotide
  Antisense strand to SEQ ID NO: 1797341
aaguuugcuccacuacucg

SEQ ID NO: 1797343 - RNA, 19 nt, Artificial Sequence
  Description of Artificial Sequence: Synthetic oligonucleotide
  Sense strand starting at position 2802 of SEQ ID NO: 1563128
ucccuucuggccugaaauu

SEQ ID NO: 1797344 - RNA, 19 nt, Artificial Sequence
  Description of Artificial Sequence: Synthetic oligonucleotide
  Antisense strand to SEQ ID NO: 1797343
aauuucaggccagaaggga

SEQ ID NO: 1797345 - RNA, 19 nt, Artificial Sequence
  Description of Artificial Sequence: Synthetic oligonucleotide
  Sense strand starting at position 2891 of SEQ ID NO: 1563128
aguggaucccuuuagccaa

SEQ ID NO: 1797346 - RNA, 19 nt, Artificial Sequence
  Description of Artificial Sequence: Synthetic oligonucleotide
  Antisense strand to SEQ ID NO: 1797345
uuggcuaaagggauccacu

SEQ ID NO: 1797347 - RNA, 19 nt, Artificial Sequence
  Description of Artificial Sequence: Synthetic oligonucleotide
  Sense strand starting at position 2904 of SEQ ID NO: 1563128
agccaauucccuggaggga

SEQ ID NO: 1797348 - RNA, 19 nt, Artificial Sequence
  Description of Artificial Sequence: Synthetic oligonucleotide
  Antisense strand to SEQ ID NO: 1797347
ucccuccagggaauuggcu

SEQ ID NO: 1797349 - RNA, 19 nt, Artificial Sequence
  Description of Artificial Sequence: Synthetic oligonucleotide
  Sense strand starting at position 2943 of SEQ ID NO: 1563128
cagagaaaggucuguggga

SEQ ID NO: 1797350 - RNA, 19 nt, Artificial Sequence
  Description of Artificial Sequence: Synthetic oligonucleotide
  Antisense strand to SEQ ID NO: 1797349
ucccacagaccuuucucug

SEQ ID NO: 1797351 - RNA, 19 nt, Artificial Sequence
  Description of Artificial Sequence: Synthetic oligonucleotide
  Sense strand starting at position 3004 of SEQ ID NO: 1563128
uggaguccuaggcauguaa

SEQ ID NO: 1797352 - RNA, 19 nt, Artificial Sequence
  Description of Artificial Sequence: Synthetic oligonucleotide
  Antisense strand to SEQ ID NO: 1797351
uuacaugccuaggacucca

SEQ ID NO: 1797353 - RNA, 19 nt, Artificial Sequence
  Description of Artificial Sequence: Synthetic oligonucleotide
  Sense strand starting at position 3015 of SEQ ID NO: 1563128
gcauguaauuugccuucuu

SEQ ID NO: 1797354 - RNA, 19 nt, Artificial Sequence
  Description of Artificial Sequence: Synthetic oligonucleotide
  Antisense strand to SEQ ID NO: 1797353
aagaaggcaaauuacaugc

SEQ ID NO: 1797355 - RNA, 19 nt, Artificial Sequence
  Description of Artificial Sequence: Synthetic oligonucleotide
  Sense strand starting at position 3025 of SEQ ID NO: 1563128
ugccuucuucgugucguua

SEQ ID NO: 1797356 - RNA, 19 nt, Artificial Sequence
  Description of Artificial Sequence: Synthetic oligonucleotide
  Antisense strand to SEQ ID NO: 1797355
uaacgacacgaagaaggca

SEQ ID NO: 1797357 - RNA, 19 nt, Artificial Sequence
  Description of Artificial Sequence: Synthetic oligonucleotide
  Sense strand starting at position 3026 of SEQ ID NO: 1563128
gccuucuucgugucguuau

SEQ ID NO: 1797358 - RNA, 19 nt, Artificial Sequence
  Description of Artificial Sequence: Synthetic oligonucleotide
  Antisense strand to SEQ ID NO: 1797357
auaacgacacgaagaaggc

SEQ ID NO: 1797359 - RNA, 19 nt, Artificial Sequence
  Description of Artificial Sequence: Synthetic oligonucleotide
  Sense strand starting at position 3036 of SEQ ID NO: 1563128
ugucguuauacagagggaa

SEQ ID NO: 1797360 - RNA, 19 nt, Artificial Sequence
  Description of Artificial Sequence: Synthetic oligonucleotide
  Antisense strand to SEQ ID NO: 1797359
uucccucuguauaacgaca

SEQ ID NO: 1797361 - RNA, 19 nt, Artificial Sequence
  Description of Artificial Sequence: Synthetic oligonucleotide
  Sense strand starting at position 3038 of SEQ ID NO: 1563128
ucguuauacagagggaaua

SEQ ID NO: 1797362 - RNA, 19 nt, Artificial Sequence
  Description of Artificial Sequence: Synthetic oligonucleotide
  Antisense strand to SEQ ID NO: 1797361
uauucccucuguauaacga

SEQ ID NO: 1797363 - RNA, 19 nt, Artificial Sequence
  Description of Artificial Sequence: Synthetic oligonucleotide
  Sense strand starting at position 3050 of SEQ ID NO: 1563128
gggaauaguauuggcacau

SEQ ID NO: 1797364 - RNA, 19 nt, Artificial Sequence
  Description of Artificial Sequence: Synthetic oligonucleotide
  Antisense strand to SEQ ID NO: 1797363
augugccaauacuauuccc

SEQ ID NO: 1797365 - RNA, 19 nt, Artificial Sequence
  Description of Artificial Sequence: Synthetic oligonucleotide
  Sense strand starting at position 3051 of SEQ ID NO: 1563128
ggaauaguauuggcacauu

SEQ ID NO: 1797366 - RNA, 19 nt, Artificial Sequence
  Description of Artificial Sequence: Synthetic oligonucleotide
  Antisense strand to SEQ ID NO: 1797365
aaugugccaauacuauucc

SEQ ID NO: 1797367 - RNA, 19 nt, Artificial Sequence
  Description of Artificial Sequence: Synthetic oligonucleotide
  Sense strand starting at position 3109 of SEQ ID NO: 1563128
cagacugagcccugacaga

SEQ ID NO: 1797368 - RNA, 19 nt, Artificial Sequence
  Description of Artificial Sequence: Synthetic oligonucleotide
  Antisense strand to SEQ ID NO: 1797367
ucugucagggcucagucug

SEQ ID NO: 1797369 - RNA, 19 nt, Artificial Sequence
  Description of Artificial Sequence: Synthetic oligonucleotide
  Sense strand starting at position 3214 of SEQ ID NO: 1563128
ggcucauacuucucugaca

SEQ ID NO: 1797370 - RNA, 19 nt, Artificial Sequence
  Description of Artificial Sequence: Synthetic oligonucleotide
  Antisense strand to SEQ ID NO: 1797369
ugucagagaaguaugagcc

SEQ ID NO: 1797371 - RNA, 19 nt, Artificial Sequence
  Description of Artificial Sequence: Synthetic oligonucleotide
  Sense strand starting at position 3348 of SEQ ID NO: 1563128
ugcucaagaucugauauuu

SEQ ID NO: 1797372 - RNA, 19 nt, Artificial Sequence
  Description of Artificial Sequence: Synthetic oligonucleotide
  Antisense strand to SEQ ID NO: 1797371
aaauaucagaucuugagca

SEQ ID NO: 1797373 - RNA, 19 nt, Artificial Sequence
  Description of Artificial Sequence: Synthetic oligonucleotide
  Sense strand starting at position 3586 of SEQ ID NO: 1563128
cugggacuuugcuuagaug

SEQ ID NO: 1797374 - RNA, 19 nt, Artificial Sequence
  Description of Artificial Sequence: Synthetic oligonucleotide
  Antisense strand to SEQ ID NO: 1797373
caucuaagcaaagucccag

SEQ ID NO: 1797375 - RNA, 19 nt, Artificial Sequence
  Description of Artificial Sequence: Synthetic oligonucleotide
  Sense strand starting at position 3587 of SEQ ID NO: 1563128
ugggacuuugcuuagaugu

SEQ ID NO: 1797376 - RNA, 19 nt, Artificial Sequence
  Description of Artificial Sequence: Synthetic oligonucleotide
  Antisense strand to SEQ ID NO: 1797375
acaucuaagcaaaguccca

SEQ ID NO: 1797377 - RNA, 19 nt, Artificial Sequence
  Description of Artificial Sequence: Synthetic oligonucleotide
  Sense strand starting at position 3594 of SEQ ID NO: 1563128
uugcuuagaugucuauuua

SEQ ID NO: 1797378 - RNA, 19 nt, Artificial Sequence
  Description of Artificial Sequence: Synthetic oligonucleotide
  Antisense strand to SEQ ID NO: 1797377
uaaauagacaucuaagcaa

SEQ ID NO: 1797379 - RNA, 19 nt, Artificial Sequence
  Description of Artificial Sequence: Synthetic oligonucleotide
  Sense strand starting at position 3722 of SEQ ID NO: 1563128
uguaaacuccucuggucaa

SEQ ID NO: 1797380 - RNA, 19 nt, Artificial Sequence
  Description of Artificial Sequence: Synthetic oligonucleotide
  Antisense strand to SEQ ID NO: 1797379
uugaccagaggaguuuaca

SEQ ID NO: 1797381 - RNA, 19 nt, Artificial Sequence
  Description of Artificial Sequence: Synthetic oligonucleotide
  Sense strand starting at position 3753 of SEQ ID NO: 1563128
gagaaacaguuauuggcaa

SEQ ID NO: 1797382 - RNA, 19 nt, Artificial Sequence
  Description of Artificial Sequence: Synthetic oligonucleotide
  Antisense strand to SEQ ID NO: 1797381
uugccaauaacuguuucuc

SEQ ID NO: 1797383 - RNA, 19 nt, Artificial Sequence
  Description of Artificial Sequence: Synthetic oligonucleotide
  Sense strand starting at position 3961 of SEQ ID NO: 1563128
aguacuugaucugcuugaa

SEQ ID NO: 1797384 - RNA, 19 nt, Artificial Sequence
  Description of Artificial Sequence: Synthetic oligonucleotide
  Antisense strand to SEQ ID NO: 1797383
uucaagcagaucaaguacu

SEQ ID NO: 1797385 - RNA, 19 nt, Artificial Sequence
  Description of Artificial Sequence: Synthetic oligonucleotide
  Sense strand starting at position 18 of SEQ ID NO: 1563129
ggcaguuagacagacaugu

SEQ ID NO: 1797386 - RNA, 19 nt, Artificial Sequence
  Description of Artificial Sequence: Synthetic oligonucleotide
  Antisense strand to SEQ ID NO: 1797385
acaugucugucuaacugcc

SEQ ID NO: 1797387 - RNA, 19 nt, Artificial Sequence
  Description of Artificial Sequence: Synthetic oligonucleotide
  Sense strand starting at position 121 of SEQ ID NO: 1563129
cucauaucucuauggagga

SEQ ID NO: 1797388 - RNA, 19 nt, Artificial Sequence
  Description of Artificial Sequence: Synthetic oligonucleotide
  Antisense strand to SEQ ID NO: 1797387
uccuccauagagauaugag

SEQ ID NO: 1797389 - RNA, 19 nt, Artificial Sequence
  Description of Artificial Sequence: Synthetic oligonucleotide
  Sense strand starting at position 267 of SEQ ID NO: 1563129
uaggacuugccuuggaaag

SEQ ID NO: 1797390 - RNA, 19 nt, Artificial Sequence
  Description of Artificial Sequence: Synthetic oligonucleotide
  Antisense strand to SEQ ID NO: 1797389
cuuuccaaggcaaguccua

SEQ ID NO: 1797391 - RNA, 19 nt, Artificial Sequence
  Description of Artificial Sequence: Synthetic oligonucleotide
  Sense strand starting at position 355 of SEQ ID NO: 1563129
uucuucugugaaugaagau

SEQ ID NO: 1797392 - RNA, 19 nt, Artificial Sequence
  Description of Artificial Sequence: Synthetic oligonucleotide
  Antisense strand to SEQ ID NO: 1797391
aucuucauucacagaagaa

SEQ ID NO: 1797393 - RNA, 19 nt, Artificial Sequence
  Description of Artificial Sequence: Synthetic oligonucleotide
  Sense strand starting at position 361 of SEQ ID NO: 1563129
ugugaaugaagauguagga

SEQ ID NO: 1797394 - RNA, 19 nt, Artificial Sequence
  Description of Artificial Sequence: Synthetic oligonucleotide
  Antisense strand to SEQ ID NO: 1797393
uccuacaucuucauucaca

SEQ ID NO: 1797395 - RNA, 19 nt, Artificial Sequence
  Description of Artificial Sequence: Synthetic oligonucleotide
  Sense strand starting at position 380 of SEQ ID NO: 1563129
gucagaauagcaugacaaa

SEQ ID NO: 1797396 - RNA, 19 nt, Artificial Sequence
  Description of Artificial Sequence: Synthetic oligonucleotide
  Antisense strand to SEQ ID NO: 1797395
uuugucaugcuauucugac

SEQ ID NO: 1797397 - RNA, 19 nt, Artificial Sequence
  Description of Artificial Sequence: Synthetic oligonucleotide
  Sense strand starting at position 460 of SEQ ID NO: 1563129
ggaguaacugauggcaaca

SEQ ID NO: 1797398 - RNA, 19 nt, Artificial Sequence
  Description of Artificial Sequence: Synthetic oligonucleotide
  Antisense strand to SEQ ID NO: 1797397
uguugccaucaguuacucc

SEQ ID NO: 1797399 - RNA, 19 nt, Artificial Sequence
  Description of Artificial Sequence: Synthetic oligonucleotide
  Sense strand starting at position 465 of SEQ ID NO: 1563129
aacugauggcaacauuagu

SEQ ID NO: 1797400 - RNA, 19 nt, Artificial Sequence
  Description of Artificial Sequence: Synthetic oligonucleotide
  Antisense strand to SEQ ID NO: 1797399
acuaauguugccaucaguu

SEQ ID NO: 1797401 - RNA, 19 nt, Artificial Sequence
  Description of Artificial Sequence: Synthetic oligonucleotide
  Sense strand starting at position 514 of SEQ ID NO: 1563129
ugaggaauagcacaugugu

SEQ ID NO: 1797402 - RNA, 19 nt, Artificial Sequence
  Description of Artificial Sequence: Synthetic oligonucleotide
  Antisense strand to SEQ ID NO: 1797401
acacaugugcuauuccuca

SEQ ID NO: 1797403 - RNA, 19 nt, Artificial Sequence
  Description of Artificial Sequence: Synthetic oligonucleotide
  Sense strand starting at position 798 of SEQ ID NO: 1563129
uugcgcaugguuucuuuaa

SEQ ID NO: 1797404 - RNA, 19 nt, Artificial Sequence
  Description of Artificial Sequence: Synthetic oligonucleotide
  Antisense strand to SEQ ID NO: 1797403
uuaaagaaaccaugcgcaa

SEQ ID NO: 1797405 - RNA, 19 nt, Artificial Sequence
  Description of Artificial Sequence: Synthetic oligonucleotide
  Sense strand starting at position 949 of SEQ ID NO: 1563129
ggaguauauuaugcucaua

SEQ ID NO: 1797406 - RNA, 19 nt, Artificial Sequence
  Description of Artificial Sequence: Synthetic oligonucleotide
  Antisense strand to SEQ ID NO: 1797405
uaugagcauaauauacucc

SEQ ID NO: 1797407 - RNA, 19 nt, Artificial Sequence
  Description of Artificial Sequence: Synthetic oligonucleotide
  Sense strand starting at position 951 of SEQ ID NO: 1563129
aguauauuaugcucauaga

SEQ ID NO: 1797408 - RNA, 19 nt, Artificial Sequence
  Description of Artificial Sequence: Synthetic oligonucleotide
  Antisense strand to SEQ ID NO: 1797407
ucuaugagcauaauauacu

SEQ ID NO: 1797409 - RNA, 19 nt, Artificial Sequence
  Description of Artificial Sequence: Synthetic oligonucleotide
  Sense strand starting at position 952 of SEQ ID NO: 1563129
guauauuaugcucauagau

SEQ ID NO: 1797410 - RNA, 19 nt, Artificial Sequence
  Description of Artificial Sequence: Synthetic oligonucleotide
  Antisense strand to SEQ ID NO: 1797409
aucuaugagcauaauauac

SEQ ID NO: 1797411 - RNA, 19 nt, Artificial Sequence
  Description of Artificial Sequence: Synthetic oligonucleotide
  Sense strand starting at position 1104 of SEQ ID NO: 1563129
guggcaauggucuaacuga

SEQ ID NO: 1797412 - RNA, 19 nt, Artificial Sequence
  Description of Artificial Sequence: Synthetic oligonucleotide
  Antisense strand to SEQ ID NO: 1797411
ucaguuagaccauugccac

SEQ ID NO: 1797413 - RNA, 19 nt, Artificial Sequence
  Description of Artificial Sequence: Synthetic oligonucleotide
  Sense strand starting at position 1120 of SEQ ID NO: 1563129
ugauguaaaugggcaaagu

SEQ ID NO: 1797414 - RNA, 19 nt, Artificial Sequence
  Description of Artificial Sequence: Synthetic oligonucleotide
  Antisense strand to SEQ ID NO: 1797413
acuuugcccauuuacauca

SEQ ID NO: 1797415 - RNA, 19 nt, Artificial Sequence
  Description of Artificial Sequence: Synthetic oligonucleotide
  Sense strand starting at position 1276 of SEQ ID NO: 1563129
auuguugcugguuagaaag

SEQ ID NO: 1797416 - RNA, 19 nt, Artificial Sequence
  Description of Artificial Sequence: Synthetic oligonucleotide
  Antisense strand to SEQ ID NO: 1797415
cuuucuaaccagcaacaau

SEQ ID NO: 1797417 - RNA, 19 nt, Artificial Sequence
  Description of Artificial Sequence: Synthetic oligonucleotide
  Sense strand starting at position 1374 of SEQ ID NO: 1563129
uggaacaugugagcacuua

SEQ ID NO: 1797418 - RNA, 19 nt, Artificial Sequence
  Description of Artificial Sequence: Synthetic oligonucleotide
  Antisense strand to SEQ ID NO: 1797417
uaagugcucacauguucca

SEQ ID NO: 1797419 - RNA, 19 nt, Artificial Sequence
  Description of Artificial Sequence: Synthetic oligonucleotide
  Sense strand starting at position 1414 of SEQ ID NO: 1563129
uuuguuaucguuguuuguu

SEQ ID NO: 1797420 - RNA, 19 nt, Artificial Sequence
  Description of Artificial Sequence: Synthetic oligonucleotide
  Antisense strand to SEQ ID NO: 1797419
aacaaacaacgauaacaaa

SEQ ID NO: 1797421 - RNA, 19 nt, Artificial Sequence
  Description of Artificial Sequence: Synthetic oligonucleotide
  Sense strand starting at position 1494 of SEQ ID NO: 1563129
uggacauuauccuuuacug

SEQ ID NO: 1797422 - RNA, 19 nt, Artificial Sequence
  Description of Artificial Sequence: Synthetic oligonucleotide
  Antisense strand to SEQ ID NO: 1797421
caguaaaggauaaugucca

SEQ ID NO: 1797423 - RNA, 19 nt, Artificial Sequence
  Description of Artificial Sequence: Synthetic oligonucleotide
  Sense strand starting at position 1512 of SEQ ID NO: 1563129
gaagucucagaaugacauu

SEQ ID NO: 1797424 - RNA, 19 nt, Artificial Sequence
  Description of Artificial Sequence: Synthetic oligonucleotide
  Antisense strand to SEQ ID NO: 1797423
aaugucauucugagacuuc

SEQ ID NO: 1797425 - RNA, 19 nt, Artificial Sequence
  Description of Artificial Sequence: Synthetic oligonucleotide
  Sense strand starting at position 1609 of SEQ ID NO: 1563129
gggacagucagugaagcau

SEQ ID NO: 1797426 - RNA, 19 nt, Artificial Sequence
  Description of Artificial Sequence: Synthetic oligonucleotide
  Antisense strand to SEQ ID NO: 1797425
augcuucacugacuguccc

SEQ ID NO: 1797427 - RNA, 19 nt, Artificial Sequence
  Description of Artificial Sequence: Synthetic oligonucleotide
  Sense strand starting at position 1667 of SEQ ID NO: 1563129
uuuccuuacuuagugagaa

SEQ ID NO: 1797428 - RNA, 19 nt, Artificial Sequence
  Description of Artificial Sequence: Synthetic oligonucleotide
  Antisense strand to SEQ ID NO: 1797427
uucucacuaaguaaggaaa

SEQ ID NO: 1797429 - RNA, 19 nt, Artificial Sequence
  Description of Artificial Sequence: Synthetic oligonucleotide
  Sense strand starting at position 1718 of SEQ ID NO: 1563129
guauuuaaaucagugcuuu

SEQ ID NO: 1797430 - RNA, 19 nt, Artificial Sequence
  Description of Artificial Sequence: Synthetic oligonucleotide
  Antisense strand to SEQ ID NO: 1797429
aaagcacugauuuaaauac

SEQ ID NO: 1797431 - RNA, 19 nt, Artificial Sequence
  Description of Artificial Sequence: Synthetic oligonucleotide
  Sense strand starting at position 1724 of SEQ ID NO: 1563129
aaaucagugcuuuggauag

SEQ ID NO: 1797432 - RNA, 19 nt, Artificial Sequence
  Description of Artificial Sequence: Synthetic oligonucleotide
  Antisense strand to SEQ ID NO: 1797431
cuauccaaagcacugauuu

SEQ ID NO: 1797433 - RNA, 19 nt, Artificial Sequence
  Description of Artificial Sequence: Synthetic oligonucleotide
  Sense strand starting at position 1734 of SEQ ID NO: 1563129
uuuggauagcuuuaagcca

SEQ ID NO: 1797434 - RNA, 19 nt, Artificial Sequence
  Description of Artificial Sequence: Synthetic oligonucleotide
  Antisense strand to SEQ ID NO: 1797433
uggcuuaaagcuauccaaa

SEQ ID NO: 1797435 - RNA, 19 nt, Artificial Sequence
  Description of Artificial Sequence: Synthetic oligonucleotide
  Sense strand starting at position 1755 of SEQ ID NO: 1563129
ggaaauaccucacugugau

SEQ ID NO: 1797436 - RNA, 19 nt, Artificial Sequence
  Description of Artificial Sequence: Synthetic oligonucleotide
  Antisense strand to SEQ ID NO: 1797435
aucacagugagguauuucc

SEQ ID NO: 1797437 - RNA, 19 nt, Artificial Sequence
  Description of Artificial Sequence: Synthetic oligonucleotide
  Sense strand starting at position 1775 of SEQ ID NO: 1563129
aggacucauuuguaaagag

SEQ ID NO: 1797438 - RNA, 19 nt, Artificial Sequence
  Description of Artificial Sequence: Synthetic oligonucleotide
  Antisense strand to SEQ ID NO: 1797437
cucuuuacaaaugaguccu

SEQ ID NO: 1797439 - RNA, 19 nt, Artificial Sequence
  Description of Artificial Sequence: Synthetic oligonucleotide
  Sense strand starting at position 2273 of SEQ ID NO: 1563129
uccuacuguguguauagaa

SEQ ID NO: 1797440 - RNA, 19 nt, Artificial Sequence
  Description of Artificial Sequence: Synthetic oligonucleotide
  Antisense strand to SEQ ID NO: 1797439
uucuauacacacaguagga

SEQ ID NO: 1797441 - RNA, 19 nt, Artificial Sequence
  Description of Artificial Sequence: Synthetic oligonucleotide
  Sense strand starting at position 2551 of SEQ ID NO: 1563129
guuagauagguagggauga

SEQ ID NO: 1797442 - RNA, 19 nt, Artificial Sequence
  Description of Artificial Sequence: Synthetic oligonucleotide
  Antisense strand to SEQ ID NO: 1797441
ucaucccuaccuaucuaac

SEQ ID NO: 1797443 - RNA, 19 nt, Artificial Sequence
  Description of Artificial Sequence: Synthetic oligonucleotide
  Sense strand starting at position 2805 of SEQ ID NO: 1563129
aguggaugauuauccauga

SEQ ID NO: 1797444 - RNA, 19 nt, Artificial Sequence
  Description of Artificial Sequence: Synthetic oligonucleotide
  Antisense strand to SEQ ID NO: 1797443
ucauggauaaucauccacu

SEQ ID NO: 1797445 - RNA, 19 nt, Artificial Sequence
  Description of Artificial Sequence: Synthetic oligonucleotide
  Sense strand starting at position 2806 of SEQ ID NO: 1563129
guggaugauuauccaugau

SEQ ID NO: 1797446 - RNA, 19 nt, Artificial Sequence
  Description of Artificial Sequence: Synthetic oligonucleotide
  Antisense strand to SEQ ID NO: 1797445
aucauggauaaucauccac

SEQ ID NO: 1797447 - RNA, 19 nt, Artificial Sequence
  Description of Artificial Sequence: Synthetic oligonucleotide
  Sense strand starting at position 2949 of SEQ ID NO: 1563129
cccuuuaaauuguugggaa

SEQ ID NO: 1797448 - RNA, 19 nt, Artificial Sequence
  Description of Artificial Sequence: Synthetic oligonucleotide
  Antisense strand to SEQ ID NO: 1797447
uucccaacaauuuaaaggg

SEQ ID NO: 1797449 - RNA, 19 nt, Artificial Sequence
  Description of Artificial Sequence: Synthetic oligonucleotide
  Sense strand starting at position 3023 of SEQ ID NO: 1563129
gauaaaguguuacugaaag

SEQ ID NO: 1797450 - RNA, 19 nt, Artificial Sequence
  Description of Artificial Sequence: Synthetic oligonucleotide
  Antisense strand to SEQ ID NO: 1797449
cuuucaguaacacuuuauc

SEQ ID NO: 1797451 - RNA, 19 nt, Artificial Sequence
  Description of Artificial Sequence: Synthetic oligonucleotide
  Sense strand starting at position 3029 of SEQ ID NO: 1563129
guguuacugaaagaugcau

SEQ ID NO: 1797452 - RNA, 19 nt, Artificial Sequence
  Description of Artificial Sequence: Synthetic oligonucleotide
  Antisense strand to SEQ ID NO: 1797451
augcaucuuucaguaacac

SEQ ID NO: 1797453 - RNA, 19 nt, Artificial Sequence
  Description of Artificial Sequence: Synthetic oligonucleotide
  Sense strand starting at position 3040 of SEQ ID NO: 1563129
agaugcauucuauguuaaa

SEQ ID NO: 1797454 - RNA, 19 nt, Artificial Sequence
  Description of Artificial Sequence: Synthetic oligonucleotide
  Antisense strand to SEQ ID NO: 1797453
uuuaacauagaaugcaucu

SEQ ID NO: 1797455 - RNA, 19 nt, Artificial Sequence
  Description of Artificial Sequence: Synthetic oligonucleotide
  Sense strand starting at position 3583 of SEQ ID NO: 1563129
guacacucacaauguuaag

SEQ ID NO: 1797456 - RNA, 19 nt, Artificial Sequence
  Description of Artificial Sequence: Synthetic oligonucleotide
  Antisense strand to SEQ ID NO: 1797455
cuuaacauugugaguguac

SEQ ID NO: 1797457 - RNA, 19 nt, Artificial Sequence
  Description of Artificial Sequence: Synthetic oligonucleotide
  Sense strand starting at position 3589 of SEQ ID NO: 1563129
ucacaauguuaagugaaca

SEQ ID NO: 1797458 - RNA, 19 nt, Artificial Sequence
  Description of Artificial Sequence: Synthetic oligonucleotide
  Antisense strand to SEQ ID NO: 1797457
uguucacuuaacauuguga

SEQ ID NO: 1797459 - RNA, 19 nt, Artificial Sequence
  Description of Artificial Sequence: Synthetic oligonucleotide
  Sense strand starting at position 3759 of SEQ ID NO: 1563129
gaaauaauauaugugacgu

SEQ ID NO: 1797460 - RNA, 19 nt, Artificial Sequence
  Description of Artificial Sequence: Synthetic oligonucleotide
  Antisense strand to SEQ ID NO: 1797459
acgucacauauauuauuuc

SEQ ID NO: 1797461 - RNA, 19 nt, Artificial Sequence
  Description of Artificial Sequence: Synthetic oligonucleotide
  Sense strand starting at position 3900 of SEQ ID NO: 1563129
uuguguauucguuugucca

SEQ ID NO: 1797462 - RNA, 19 nt, Artificial Sequence
  Description of Artificial Sequence: Synthetic oligonucleotide
  Antisense strand to SEQ ID NO: 1797461
uggacaaacgaauacacaa

SEQ ID NO: 1797463 - RNA, 19 nt, Artificial Sequence
  Description of Artificial Sequence: Synthetic oligonucleotide
  Sense strand starting at position 3912 of SEQ ID NO: 1563129
uuguccauugauggagauu

SEQ ID NO: 1797464 - RNA, 19 nt, Artificial Sequence
  Description of Artificial Sequence: Synthetic oligonucleotide
  Antisense strand to SEQ ID NO: 1797463
aaucuccaucaauggacaa

SEQ ID NO: 1797465 - RNA, 19 nt, Artificial Sequence
  Description of Artificial Sequence: Synthetic oligonucleotide
  Sense strand starting at position 452 of SEQ ID NO: 1563130
uuaugccuucuguggagaa

SEQ ID NO: 1797466 - RNA, 19 nt, Artificial Sequence
  Description of Artificial Sequence: Synthetic oligonucleotide
  Antisense strand to SEQ ID NO: 1797465
uucuccacagaaggcauaa

SEQ ID NO: 1797467 - RNA, 19 nt, Artificial Sequence
  Description of Artificial Sequence: Synthetic oligonucleotide
  Sense strand starting at position 758 of SEQ ID NO: 1563130
aagauuagucagggcagga

SEQ ID NO: 1797468 - RNA, 19 nt, Artificial Sequence
  Description of Artificial Sequence: Synthetic oligonucleotide
  Antisense strand to SEQ ID NO: 1797467
uccugcccugacuaaucuu

SEQ ID NO: 1797469 - RNA, 19 nt, Artificial Sequence
  Description of Artificial Sequence: Synthetic oligonucleotide
  Sense strand starting at position 877 of SEQ ID NO: 1563130
ugcugcuugcuauugcaua

SEQ ID NO: 1797470 - RNA, 19 nt, Artificial Sequence
  Description of Artificial Sequence: Synthetic oligonucleotide
  Antisense strand to SEQ ID NO: 1797469
uaugcaauagcaagcagca

SEQ ID NO: 1797471 - RNA, 19 nt, Artificial Sequence
  Description of Artificial Sequence: Synthetic oligonucleotide
  Sense strand starting at position 882 of SEQ ID NO: 1563130
cuugcuauugcauagagaa

SEQ ID NO: 1797472 - RNA, 19 nt, Artificial Sequence
  Description of Artificial Sequence: Synthetic oligonucleotide
  Antisense strand to SEQ ID NO: 1797471
uucucuaugcaauagcaag

SEQ ID NO: 1797473 - RNA, 19 nt, Artificial Sequence
  Description of Artificial Sequence: Synthetic oligonucleotide
  Sense strand starting at position 1031 of SEQ ID NO: 1563130
ggaaucaugguuugucuuu

SEQ ID NO: 1797474 - RNA, 19 nt, Artificial Sequence
  Description of Artificial Sequence: Synthetic oligonucleotide
  Antisense strand to SEQ ID NO: 1797473
aaagacaaaccaugauucc

SEQ ID NO: 1797475 - RNA, 19 nt, Artificial Sequence
  Description of Artificial Sequence: Synthetic oligonucleotide
  Sense strand starting at position 1277 of SEQ ID NO: 1563130
guagaaguaguuuagauug

SEQ ID NO: 1797476 - RNA, 19 nt, Artificial Sequence
  Description of Artificial Sequence: Synthetic oligonucleotide
  Antisense strand to SEQ ID NO: 1797475
caaucuaaacuacuucuac

SEQ ID NO: 1797477 - RNA, 19 nt, Artificial Sequence
  Description of Artificial Sequence: Synthetic oligonucleotide
  Sense strand starting at position 1288 of SEQ ID NO: 1563130
uuagauugcucagugaaau

SEQ ID NO: 1797478 - RNA, 19 nt, Artificial Sequence
  Description of Artificial Sequence: Synthetic oligonucleotide
  Antisense strand to SEQ ID NO: 1797477
auuucacugagcaaucuaa

SEQ ID NO: 1797479 - RNA, 19 nt, Artificial Sequence
  Description of Artificial Sequence: Synthetic oligonucleotide
  Sense strand starting at position 1289 of SEQ ID NO: 1563130
uagauugcucagugaaaug

SEQ ID NO: 1797480 - RNA, 19 nt, Artificial Sequence
  Description of Artificial Sequence: Synthetic oligonucleotide
  Antisense strand to SEQ ID NO: 1797479
cauuucacugagcaaucua

SEQ ID NO: 1797481 - RNA, 19 nt, Artificial Sequence
  Description of Artificial Sequence: Synthetic oligonucleotide
  Sense strand starting at position 1294 of SEQ ID NO: 1563130
ugcucagugaaaugagaaa

SEQ ID NO: 1797482 - RNA, 19 nt, Artificial Sequence
  Description of Artificial Sequence: Synthetic oligonucleotide
  Antisense strand to SEQ ID NO: 1797481
uuucucauuucacugagca

SEQ ID NO: 1797483 - RNA, 19 nt, Artificial Sequence
  Description of Artificial Sequence: Synthetic oligonucleotide
  Sense strand starting at position 1367 of SEQ ID NO: 1563130
uucgguuuaaccgaacuga

SEQ ID NO: 1797484 - RNA, 19 nt, Artificial Sequence
  Description of Artificial Sequence: Synthetic oligonucleotide
  Antisense strand to SEQ ID NO: 1797483
ucaguucgguuaaaccgaa

SEQ ID NO: 1797485 - RNA, 19 nt, Artificial Sequence
  Description of Artificial Sequence: Synthetic oligonucleotide
  Sense strand starting at position 1668 of SEQ ID NO: 1563130
ugaagacuuacugguuguu

SEQ ID NO: 1797486 - RNA, 19 nt, Artificial Sequence
  Description of Artificial Sequence: Synthetic oligonucleotide
  Antisense strand to SEQ ID NO: 1797485
aacaaccaguaagucuuca

SEQ ID NO: 1797487 - RNA, 19 nt, Artificial Sequence
  Description of Artificial Sequence: Synthetic oligonucleotide
  Sense strand starting at position 1670 of SEQ ID NO: 1563130
aagacuuacugguuguuga

SEQ ID NO: 1797488 - RNA, 19 nt, Artificial Sequence
  Description of Artificial Sequence: Synthetic oligonucleotide
  Antisense strand to SEQ ID NO: 1797487
ucaacaaccaguaagucuu

SEQ ID NO: 1797489 - RNA, 19 nt, Artificial Sequence
  Description of Artificial Sequence: Synthetic oligonucleotide
  Sense strand starting at position 1671 of SEQ ID NO: 1563130
agacuuacugguuguugaa

SEQ ID NO: 1797490 - RNA, 19 nt, Artificial Sequence
  Description of Artificial Sequence: Synthetic oligonucleotide
  Antisense strand to SEQ ID NO: 1797489
uucaacaaccaguaagucu

SEQ ID NO: 1797491 - RNA, 19 nt, Artificial Sequence
  Description of Artificial Sequence: Synthetic oligonucleotide
  Sense strand starting at position 1844 of SEQ ID NO: 1563130
auguucuacuuuccaagua

SEQ ID NO: 1797492 - RNA, 19 nt, Artificial Sequence
  Description of Artificial Sequence: Synthetic oligonucleotide
  Antisense strand to SEQ ID NO: 1797491
uacuuggaaaguagaacau

SEQ ID NO: 1797493 - RNA, 19 nt, Artificial Sequence
  Description of Artificial Sequence: Synthetic oligonucleotide
  Sense strand starting at position 2052 of SEQ ID NO: 1563130
gccagcuuuccagagaggu

SEQ ID NO: 1797494 - RNA, 19 nt, Artificial Sequence
  Description of Artificial Sequence: Synthetic oligonucleotide
  Antisense strand to SEQ ID NO: 1797493
accucucuggaaagcuggc

SEQ ID NO: 1797495 - RNA, 19 nt, Artificial Sequence
  Description of Artificial Sequence: Synthetic oligonucleotide
  Sense strand starting at position 2198 of SEQ ID NO: 1563130
gcuuacuugguaggagaaa

SEQ ID NO: 1797496 - RNA, 19 nt, Artificial Sequence
  Description of Artificial Sequence: Synthetic oligonucleotide
  Antisense strand to SEQ ID NO: 1797495
uuucuccuaccaaguaagc

SEQ ID NO: 1797497 - RNA, 19 nt, Artificial Sequence
  Description of Artificial Sequence: Synthetic oligonucleotide
  Sense strand starting at position 2287 of SEQ ID NO: 1563130
aguagagacuaggaaauuu

SEQ ID NO: 1797498 - RNA, 19 nt, Artificial Sequence
  Description of Artificial Sequence: Synthetic oligonucleotide
  Antisense strand to SEQ ID NO: 1797497
aaauuuccuagucucuacu

SEQ ID NO: 1797499 - RNA, 19 nt, Artificial Sequence
  Description of Artificial Sequence: Synthetic oligonucleotide
  Sense strand starting at position 2533 of SEQ ID NO: 1563130
cucugucauauuugugguu

SEQ ID NO: 1797500 - RNA, 19 nt, Artificial Sequence
  Description of Artificial Sequence: Synthetic oligonucleotide
  Antisense strand to SEQ ID NO: 1797499
aaccacaaauaugacagag

SEQ ID NO: 1797501 - RNA, 19 nt, Artificial Sequence
  Description of Artificial Sequence: Synthetic oligonucleotide
  Sense strand starting at position 2578 of SEQ ID NO: 1563130
gggauucgcuagcuauuuc

SEQ ID NO: 1797502 - RNA, 19 nt, Artificial Sequence
  Description of Artificial Sequence: Synthetic oligonucleotide
  Antisense strand to SEQ ID NO: 1797501
gaaauagcuagcgaauccc

SEQ ID NO: 1797503 - RNA, 19 nt, Artificial Sequence
  Description of Artificial Sequence: Synthetic oligonucleotide
  Sense strand starting at position 2701 of SEQ ID NO: 1563130
ggugaugguagugauaaua

SEQ ID NO: 1797504 - RNA, 19 nt, Artificial Sequence
  Description of Artificial Sequence: Synthetic oligonucleotide
  Antisense strand to SEQ ID NO: 1797503
uauuaucacuaccaucacc

SEQ ID NO: 1797505 - RNA, 19 nt, Artificial Sequence
  Description of Artificial Sequence: Synthetic oligonucleotide
  Sense strand starting at position 2712 of SEQ ID NO: 1563130
ugauaauacuagcugacaa

SEQ ID NO: 1797506 - RNA, 19 nt, Artificial Sequence
  Description of Artificial Sequence: Synthetic oligonucleotide
  Antisense strand to SEQ ID NO: 1797505
uugucagcuaguauuauca

SEQ ID NO: 1797507 - RNA, 19 nt, Artificial Sequence
  Description of Artificial Sequence: Synthetic oligonucleotide
  Sense strand starting at position 2795 of SEQ ID NO: 1563130
auagcacacugguuaguaa

SEQ ID NO: 1797508 - RNA, 19 nt, Artificial Sequence
  Description of Artificial Sequence: Synthetic oligonucleotide
  Antisense strand to SEQ ID NO: 1797507
uuacuaaccagugugcuau

SEQ ID NO: 1797509 - RNA, 19 nt, Artificial Sequence
  Description of Artificial Sequence: Synthetic oligonucleotide
  Sense strand starting at position 2796 of SEQ ID NO: 1563130
uagcacacugguuaguaaa

SEQ ID NO: 1797510 - RNA, 19 nt, Artificial Sequence
  Description of Artificial Sequence: Synthetic oligonucleotide
  Antisense strand to SEQ ID NO: 1797509
uuuacuaaccagugugcua

SEQ ID NO: 1797511 - RNA, 19 nt, Artificial Sequence
  Description of Artificial Sequence: Synthetic oligonucleotide
  Sense strand starting at position 2798 of SEQ ID NO: 1563130
gcacacugguuaguaaaua

SEQ ID NO: 1797512 - RNA, 19 nt, Artificial Sequence
  Description of Artificial Sequence: Synthetic oligonucleotide
  Antisense strand to SEQ ID NO: 1797511
uauuuacuaaccagugugc

SEQ ID NO: 1797513 - RNA, 19 nt, Artificial Sequence
  Description of Artificial Sequence: Synthetic oligonucleotide
  Sense strand starting at position 2810 of SEQ ID NO: 1563130
guaaauagccucugggauc

SEQ ID NO: 1797514 - RNA, 19 nt, Artificial Sequence
  Description of Artificial Sequence: Synthetic oligonucleotide
  Antisense strand to SEQ ID NO: 1797513
gaucccagaggcuauuuac

SEQ ID NO: 1797515 - RNA, 19 nt, Artificial Sequence
  Description of Artificial Sequence: Synthetic oligonucleotide
  Sense strand starting at position 3139 of SEQ ID NO: 1563130
ugaagacacuugcauuuaa

SEQ ID NO: 1797516 - RNA, 19 nt, Artificial Sequence
  Description of Artificial Sequence: Synthetic oligonucleotide
  Antisense strand to SEQ ID NO: 1797515
uuaaaugcaagugucuuca

SEQ ID NO: 1797517 - RNA, 19 nt, Artificial Sequence
  Description of Artificial Sequence: Synthetic oligonucleotide
  Sense strand starting at position 3164 of SEQ ID NO: 1563130
ggaaacuaauaucagaacu

SEQ ID NO: 1797518 - RNA, 19 nt, Artificial Sequence
  Description of Artificial Sequence: Synthetic oligonucleotide
  Antisense strand to SEQ ID NO: 1797517
aguucugauauuaguuucc

SEQ ID NO: 1797519 - RNA, 19 nt, Artificial Sequence
  Description of Artificial Sequence: Synthetic oligonucleotide
  Sense strand starting at position 3187 of SEQ ID NO: 1563130
cuguuuagccucuauacca

SEQ ID NO: 1797520 - RNA, 19 nt, Artificial Sequence
  Description of Artificial Sequence: Synthetic oligonucleotide
  Antisense strand to SEQ ID NO: 1797519
ugguauagaggcuaaacag

SEQ ID NO: 1797521 - RNA, 19 nt, Artificial Sequence
  Description of Artificial Sequence: Synthetic oligonucleotide
  Sense strand starting at position 3413 of SEQ ID NO: 1563130
gugacuagauggcuuucua

SEQ ID NO: 1797522 - RNA, 19 nt, Artificial Sequence
  Description of Artificial Sequence: Synthetic oligonucleotide
  Antisense strand to SEQ ID NO: 1797521
uagaaagccaucuagucac

SEQ ID NO: 1797523 - RNA, 19 nt, Artificial Sequence
  Description of Artificial Sequence: Synthetic oligonucleotide
  Sense strand starting at position 3420 of SEQ ID NO: 1563130
gauggcuuucuauaguuag

SEQ ID NO: 1797524 - RNA, 19 nt, Artificial Sequence
  Description of Artificial Sequence: Synthetic oligonucleotide
  Antisense strand to SEQ ID NO: 1797523
cuaacuauagaaagccauc

SEQ ID NO: 1797525 - RNA, 19 nt, Artificial Sequence
  Description of Artificial Sequence: Synthetic oligonucleotide
  Sense strand starting at position 3627 of SEQ ID NO: 1563130
aggagaagucaguguugau

SEQ ID NO: 1797526 - RNA, 19 nt, Artificial Sequence
  Description of Artificial Sequence: Synthetic oligonucleotide
  Antisense strand to SEQ ID NO: 1797525
aucaacacugacuucuccu

SEQ ID NO: 1797527 - RNA, 19 nt, Artificial Sequence
  Description of Artificial Sequence: Synthetic oligonucleotide
  Sense strand starting at position 3631 of SEQ ID NO: 1563130
gaagucaguguugaugaca

SEQ ID NO: 1797528 - RNA, 19 nt, Artificial Sequence
  Description of Artificial Sequence: Synthetic oligonucleotide
  Antisense strand to SEQ ID NO: 1797527
ugucaucaacacugacuuc

SEQ ID NO: 1797529 - RNA, 19 nt, Artificial Sequence
  Description of Artificial Sequence: Synthetic oligonucleotide
  Sense strand starting at position 3634 of SEQ ID NO: 1563130
gucaguguugaugacagaa

SEQ ID NO: 1797530 - RNA, 19 nt, Artificial Sequence
  Description of Artificial Sequence: Synthetic oligonucleotide
  Antisense strand to SEQ ID NO: 1797529
uucugucaucaacacugac

SEQ ID NO: 1797531 - RNA, 19 nt, Artificial Sequence
  Description of Artificial Sequence: Synthetic oligonucleotide
  Sense strand starting at position 3660 of SEQ ID NO: 1563130
uugcaaauggcaugagaca

SEQ ID NO: 1797532 - RNA, 19 nt, Artificial Sequence
  Description of Artificial Sequence: Synthetic oligonucleotide
  Antisense strand to SEQ ID NO: 1797531
ugucucaugccauuugcaa

SEQ ID NO: 1797533 - RNA, 19 nt, Artificial Sequence
  Description of Artificial Sequence: Synthetic oligonucleotide
  Sense strand starting at position 3761 of SEQ ID NO: 1563130
agaagucaucguuauguga

SEQ ID NO: 1797534 - RNA, 19 nt, Artificial Sequence
  Description of Artificial Sequence: Synthetic oligonucleotide
  Antisense strand to SEQ ID NO: 1797533
ucacauaacgaugacuucu

SEQ ID NO: 1797535 - RNA, 19 nt, Artificial Sequence
  Description of Artificial Sequence: Synthetic oligonucleotide
  Sense strand starting at position 3801 of SEQ ID NO: 1563130
guuugcauaggccaucaua

SEQ ID NO: 1797536 - RNA, 19 nt, Artificial Sequence
  Description of Artificial Sequence: Synthetic oligonucleotide
  Antisense strand to SEQ ID NO: 1797535
uaugauggccuaugcaaac

SEQ ID NO: 1797537 - RNA, 19 nt, Artificial Sequence
  Description of Artificial Sequence: Synthetic oligonucleotide
  Sense strand starting at position 3816 of SEQ ID NO: 1563130
cauaaaguuuguuugguaa

SEQ ID NO: 1797538 - RNA, 19 nt, Artificial Sequence
  Description of Artificial Sequence: Synthetic oligonucleotide
  Antisense strand to SEQ ID NO: 1797537
uuaccaaacaaacuuuaug

SEQ ID NO: 1797539 - RNA, 19 nt, Artificial Sequence
  Description of Artificial Sequence: Synthetic oligonucleotide
  Sense strand starting at position 3819 of SEQ ID NO: 1563130
aaaguuuguuugguaaaca

SEQ ID NO: 1797540 - RNA, 19 nt, Artificial Sequence
  Description of Artificial Sequence: Synthetic oligonucleotide
  Antisense strand to SEQ ID NO: 1797539
uguuuaccaaacaaacuuu

SEQ ID NO: 1797541 - RNA, 19 nt, Artificial Sequence
  Description of Artificial Sequence: Synthetic oligonucleotide
  Sense strand starting at position 3829 of SEQ ID NO: 1563130
ugguaaacaguuugaacau

SEQ ID NO: 1797542 - RNA, 19 nt, Artificial Sequence
  Description of Artificial Sequence: Synthetic oligonucleotide
  Antisense strand to SEQ ID NO: 1797541
auguucaaacuguuuacca

SEQ ID NO: 1797543 - RNA, 19 nt, Artificial Sequence
  Description of Artificial Sequence: Synthetic oligonucleotide
  Sense strand starting at position 3906 of SEQ ID NO: 1563130
uccuaugcucuggacagau

SEQ ID NO: 1797544 - RNA, 19 nt, Artificial Sequence
  Description of Artificial Sequence: Synthetic oligonucleotide
  Antisense strand to SEQ ID NO: 1797543
aucuguccagagcauagga

SEQ ID NO: 1797545 - RNA, 19 nt, Artificial Sequence
  Description of Artificial Sequence: Synthetic oligonucleotide
  Sense strand starting at position 12 of SEQ ID NO: 1563131
auguuagagcgugcuugua

SEQ ID NO: 1797546 - RNA, 19 nt, Artificial Sequence
  Description of Artificial Sequence: Synthetic oligonucleotide
  Antisense strand to SEQ ID NO: 1797545
uacaagcacgcucuaacau

SEQ ID NO: 1797547 - RNA, 19 nt, Artificial Sequence
  Description of Artificial Sequence: Synthetic oligonucleotide
  Sense strand starting at position 22 of SEQ ID NO: 1563131
gugcuuguagcucugcauu

SEQ ID NO: 1797548 - RNA, 19 nt, Artificial Sequence
  Description of Artificial Sequence: Synthetic oligonucleotide
  Antisense strand to SEQ ID NO: 1797547
aaugcagagcuacaagcac

SEQ ID NO: 1797549 - RNA, 19 nt, Artificial Sequence
  Description of Artificial Sequence: Synthetic oligonucleotide
  Sense strand starting at position 24 of SEQ ID NO: 1563131
gcuuguagcucugcauuua

SEQ ID NO: 1797550 - RNA, 19 nt, Artificial Sequence
  Description of Artificial Sequence: Synthetic oligonucleotide
  Antisense strand to SEQ ID NO: 1797549
uaaaugcagagcuacaagc

SEQ ID NO: 1797551 - RNA, 19 nt, Artificial Sequence
  Description of Artificial Sequence: Synthetic oligonucleotide
  Sense strand starting at position 136 of SEQ ID NO: 1563131
caguuucuaccugaggcaa

SEQ ID NO: 1797552 - RNA, 19 nt, Artificial Sequence
  Description of Artificial Sequence: Synthetic oligonucleotide
  Antisense strand to SEQ ID NO: 1797551
uugccucagguagaaacug

SEQ ID NO: 1797553 - RNA, 19 nt, Artificial Sequence
  Description of Artificial Sequence: Synthetic oligonucleotide
  Sense strand starting at position 194 of SEQ ID NO: 1563131
ugccuacaggcguaacaau

SEQ ID NO: 1797554 - RNA, 19 nt, Artificial Sequence
  Description of Artificial Sequence: Synthetic oligonucleotide
  Antisense strand to SEQ ID NO: 1797553
auuguuacgccuguaggca

SEQ ID NO: 1797555 - RNA, 19 nt, Artificial Sequence
  Description of Artificial Sequence: Synthetic oligonucleotide
  Sense strand starting at position 253 of SEQ ID NO: 1563131
uggguuaacuuaccucuga

SEQ ID NO: 1797556 - RNA, 19 nt, Artificial Sequence
  Description of Artificial Sequence: Synthetic oligonucleotide
  Antisense strand to SEQ ID NO: 1797555
ucagagguaaguuaaccca

SEQ ID NO: 1797557 - RNA, 19 nt, Artificial Sequence
  Description of Artificial Sequence: Synthetic oligonucleotide
  Sense strand starting at position 254 of SEQ ID NO: 1563131
ggguuaacuuaccucugau

SEQ ID NO: 1797558 - RNA, 19 nt, Artificial Sequence
  Description of Artificial Sequence: Synthetic oligonucleotide
  Antisense strand to SEQ ID NO: 1797557
aucagagguaaguuaaccc

SEQ ID NO: 1797559 - RNA, 19 nt, Artificial Sequence
  Description of Artificial Sequence: Synthetic oligonucleotide
  Sense strand starting at position 457 of SEQ ID NO: 1563131
agggaugguuaauucggaa

SEQ ID NO: 1797560 - RNA, 19 nt, Artificial Sequence
  Description of Artificial Sequence: Synthetic oligonucleotide
  Antisense strand to SEQ ID NO: 1797559
uuccgaauuaaccaucccu

SEQ ID NO: 1797561 - RNA, 19 nt, Artificial Sequence
  Description of Artificial Sequence: Synthetic oligonucleotide
  Sense strand starting at position 517 of SEQ ID NO: 1563131
acuggugucaaaugaagga

SEQ ID NO: 1797562 - RNA, 19 nt, Artificial Sequence
  Description of Artificial Sequence: Synthetic oligonucleotide
  Antisense strand to SEQ ID NO: 1797561
uccuucauuugacaccagu

SEQ ID NO: 1797563 - RNA, 19 nt, Artificial Sequence
  Description of Artificial Sequence: Synthetic oligonucleotide
  Sense strand starting at position 521 of SEQ ID NO: 1563131
gugucaaaugaaggaguaa

SEQ ID NO: 1797564 - RNA, 19 nt, Artificial Sequence
  Description of Artificial Sequence: Synthetic oligonucleotide
  Antisense strand to SEQ ID NO: 1797563
uuacuccuucauuugacac

SEQ ID NO: 1797565 - RNA, 19 nt, Artificial Sequence
  Description of Artificial Sequence: Synthetic oligonucleotide
  Sense strand starting at position 653 of SEQ ID NO: 1563131
cggauugcacaauagcauu

SEQ ID NO: 1797566 - RNA, 19 nt, Artificial Sequence
  Description of Artificial Sequence: Synthetic oligonucleotide
  Antisense strand to SEQ ID NO: 1797565
aaugcuauugugcaauccg

SEQ ID NO: 1797567 - RNA, 19 nt, Artificial Sequence
  Description of Artificial Sequence: Synthetic oligonucleotide
  Sense strand starting at position 700 of SEQ ID NO: 1563131
gcaaacaagaccugagagu

SEQ ID NO: 1797568 - RNA, 19 nt, Artificial Sequence
  Description of Artificial Sequence: Synthetic oligonucleotide
  Antisense strand to SEQ ID NO: 1797567
acucucaggucuuguuugc

SEQ ID NO: 1797569 - RNA, 19 nt, Artificial Sequence
  Description of Artificial Sequence: Synthetic oligonucleotide
  Sense strand starting at position 893 of SEQ ID NO: 1563131
gaacuuagcugacuggaga

SEQ ID NO: 1797570 - RNA, 19 nt, Artificial Sequence
  Description of Artificial Sequence: Synthetic oligonucleotide
  Antisense strand to SEQ ID NO: 1797569
ucuccagucagcuaaguuc

SEQ ID NO: 1797571 - RNA, 19 nt, Artificial Sequence
  Description of Artificial Sequence: Synthetic oligonucleotide
  Sense strand starting at position 894 of SEQ ID NO: 1563131
aacuuagcugacuggagaa

SEQ ID NO: 1797572 - RNA, 19 nt, Artificial Sequence
  Description of Artificial Sequence: Synthetic oligonucleotide
  Antisense strand to SEQ ID NO: 1797571
uucuccagucagcuaaguu

SEQ ID NO: 1797573 - RNA, 19 nt, Artificial Sequence
  Description of Artificial Sequence: Synthetic oligonucleotide
  Sense strand starting at position 936 of SEQ ID NO: 1563131
ggugauagggcuuauguca

SEQ ID NO: 1797574 - RNA, 19 nt, Artificial Sequence
  Description of Artificial Sequence: Synthetic oligonucleotide
  Antisense strand to SEQ ID NO: 1797573
ugacauaagcccuaucacc

SEQ ID NO: 1797575 - RNA, 19 nt, Artificial Sequence
  Description of Artificial Sequence: Synthetic oligonucleotide
  Sense strand starting at position 961 of SEQ ID NO: 1563131
uuccuauagaagcgaaguu

SEQ ID NO: 1797576 - RNA, 19 nt, Artificial Sequence
  Description of Artificial Sequence: Synthetic oligonucleotide
  Antisense strand to SEQ ID NO: 1797575
aacuucgcuucuauaggaa

SEQ ID NO: 1797577 - RNA, 19 nt, Artificial Sequence
  Description of Artificial Sequence: Synthetic oligonucleotide
  Sense strand starting at position 973 of SEQ ID NO: 1563131
cgaaguuugccuuagguca

SEQ ID NO: 1797578 - RNA, 19 nt, Artificial Sequence
  Description of Artificial Sequence: Synthetic oligonucleotide
  Antisense strand to SEQ ID NO: 1797577
ugaccuaaggcaaacuucg

SEQ ID NO: 1797579 - RNA, 19 nt, Artificial Sequence
  Description of Artificial Sequence: Synthetic oligonucleotide
  Sense strand starting at position 1057 of SEQ ID NO: 1563131
gguccaguugcugagguau

SEQ ID NO: 1797580 - RNA, 19 nt, Artificial Sequence
  Description of Artificial Sequence: Synthetic oligonucleotide
  Antisense strand to SEQ ID NO: 1797579
auaccucagcaacuggacc

SEQ ID NO: 1797581 - RNA, 19 nt, Artificial Sequence
  Description of Artificial Sequence: Synthetic oligonucleotide
  Sense strand starting at position 1080 of SEQ ID NO: 1563131
ggaggaucuuucccauauu

SEQ ID NO: 1797582 - RNA, 19 nt, Artificial Sequence
  Description of Artificial Sequence: Synthetic oligonucleotide
  Antisense strand to SEQ ID NO: 1797581
aauaugggaaagauccucc

SEQ ID NO: 1797583 - RNA, 19 nt, Artificial Sequence
  Description of Artificial Sequence: Synthetic oligonucleotide
  Sense strand starting at position 1113 of SEQ ID NO: 1563131
agaguugaaucacuucugu

SEQ ID NO: 1797584 - RNA, 19 nt, Artificial Sequence
  Description of Artificial Sequence: Synthetic oligonucleotide
  Antisense strand to SEQ ID NO: 1797583
acagaagugauucaacucu

SEQ ID NO: 1797585 - RNA, 19 nt, Artificial Sequence
  Description of Artificial Sequence: Synthetic oligonucleotide
  Sense strand starting at position 1507 of SEQ ID NO: 1563131
acuaguugccaugaaacau

SEQ ID NO: 1797586 - RNA, 19 nt, Artificial Sequence
  Description of Artificial Sequence: Synthetic oligonucleotide
  Antisense strand to SEQ ID NO: 1797585
auguuucauggcaacuagu

SEQ ID NO: 1797587 - RNA, 19 nt, Artificial Sequence
  Description of Artificial Sequence: Synthetic oligonucleotide
  Sense strand starting at position 1561 of SEQ ID NO: 1563131
ccaucaugugcccaaagaa

SEQ ID NO: 1797588 - RNA, 19 nt, Artificial Sequence
  Description of Artificial Sequence: Synthetic oligonucleotide
  Antisense strand to SEQ ID NO: 1797587
uucuuugggcacaugaugg

SEQ ID NO: 1797589 - RNA, 19 nt, Artificial Sequence
  Description of Artificial Sequence: Synthetic oligonucleotide
  Sense strand starting at position 1617 of SEQ ID NO: 1563131
acccauaauucuguagucu

SEQ ID NO: 1797590 - RNA, 19 nt, Artificial Sequence
  Description of Artificial Sequence: Synthetic oligonucleotide
  Antisense strand to SEQ ID NO: 1797589
agacuacagaauuaugggu

SEQ ID NO: 1797591 - RNA, 19 nt, Artificial Sequence
  Description of Artificial Sequence: Synthetic oligonucleotide
  Sense strand starting at position 2048 of SEQ ID NO: 1563131
uguuaaguugcucagguga

SEQ ID NO: 1797592 - RNA, 19 nt, Artificial Sequence
  Description of Artificial Sequence: Synthetic oligonucleotide
  Antisense strand to SEQ ID NO: 1797591
ucaccugagcaacuuaaca

SEQ ID NO: 1797593 - RNA, 19 nt, Artificial Sequence
  Description of Artificial Sequence: Synthetic oligonucleotide
  Sense strand starting at position 2617 of SEQ ID NO: 1563131
uuugacuucccgugaaauc

SEQ ID NO: 1797594 - RNA, 19 nt, Artificial Sequence
  Description of Artificial Sequence: Synthetic oligonucleotide
  Antisense strand to SEQ ID NO: 1797593
gauuucacgggaagucaaa

SEQ ID NO: 1797595 - RNA, 19 nt, Artificial Sequence
  Description of Artificial Sequence: Synthetic oligonucleotide
  Sense strand starting at position 2618 of SEQ ID NO: 1563131
uugacuucccgugaaaucu

SEQ ID NO: 1797596 - RNA, 19 nt, Artificial Sequence
  Description of Artificial Sequence: Synthetic oligonucleotide
  Antisense strand to SEQ ID NO: 1797595
agauuucacgggaagucaa

SEQ ID NO: 1797597 - RNA, 19 nt, Artificial Sequence
  Description of Artificial Sequence: Synthetic oligonucleotide
  Sense strand starting at position 2628 of SEQ ID NO: 1563131
gugaaaucuucuccaagcu

SEQ ID NO: 1797598 - RNA, 19 nt, Artificial Sequence
  Description of Artificial Sequence: Synthetic oligonucleotide
  Antisense strand to SEQ ID NO: 1797597
agcuuggagaagauuucac

SEQ ID NO: 1797599 - RNA, 19 nt, Artificial Sequence
  Description of Artificial Sequence: Synthetic oligonucleotide
  Sense strand starting at position 2664 of SEQ ID NO: 1563131
gcaggaucacaucaguuua

SEQ ID NO: 1797600 - RNA, 19 nt, Artificial Sequence
  Description of Artificial Sequence: Synthetic oligonucleotide
  Antisense strand to SEQ ID NO: 1797599
uaaacugaugugauccugc

SEQ ID NO: 1797601 - RNA, 19 nt, Artificial Sequence
  Description of Artificial Sequence: Synthetic oligonucleotide
  Sense strand starting at position 2666 of SEQ ID NO: 1563131
aggaucacaucaguuuagu

SEQ ID NO: 1797602 - RNA, 19 nt, Artificial Sequence
  Description of Artificial Sequence: Synthetic oligonucleotide
  Antisense strand to SEQ ID NO: 1797601
acuaaacugaugugauccu

SEQ ID NO: 1797603 - RNA, 19 nt, Artificial Sequence
  Description of Artificial Sequence: Synthetic oligonucleotide
  Sense strand starting at position 2672 of SEQ ID NO: 1563131
acaucaguuuaguccauua

SEQ ID NO: 1797604 - RNA, 19 nt, Artificial Sequence
  Description of Artificial Sequence: Synthetic oligonucleotide
  Antisense strand to SEQ ID NO: 1797603
uaauggacuaaacugaugu

SEQ ID NO: 1797605 - RNA, 19 nt, Artificial Sequence
  Description of Artificial Sequence: Synthetic oligonucleotide
  Sense strand starting at position 2674 of SEQ ID NO: 1563131
aucaguuuaguccauuaau

SEQ ID NO: 1797606 - RNA, 19 nt, Artificial Sequence
  Description of Artificial Sequence: Synthetic oligonucleotide
  Antisense strand to SEQ ID NO: 1797605
auuaauggacuaaacugau

SEQ ID NO: 1797607 - RNA, 19 nt, Artificial Sequence
  Description of Artificial Sequence: Synthetic oligonucleotide
  Sense strand starting at position 2709 of SEQ ID NO: 1563131
ggauaauaauacuagaaag

SEQ ID NO: 1797608 - RNA, 19 nt, Artificial Sequence
  Description of Artificial Sequence: Synthetic oligonucleotide
  Antisense strand to SEQ ID NO: 1797607
cuuucuaguauuauuaucc

SEQ ID NO: 1797609 - RNA, 19 nt, Artificial Sequence
  Description of Artificial Sequence: Synthetic oligonucleotide
  Sense strand starting at position 2768 of SEQ ID NO: 1563131
uguauaaagugacucaauu

SEQ ID NO: 1797610 - RNA, 19 nt, Artificial Sequence
  Description of Artificial Sequence: Synthetic oligonucleotide
  Antisense strand to SEQ ID NO: 1797609
aauugagucacuuuauaca

SEQ ID NO: 1797611 - RNA, 19 nt, Artificial Sequence
  Description of Artificial Sequence: Synthetic oligonucleotide
  Sense strand starting at position 3054 of SEQ ID NO: 1563131
agccuuguucuaggaagaa

SEQ ID NO: 1797612 - RNA, 19 nt, Artificial Sequence
  Description of Artificial Sequence: Synthetic oligonucleotide
  Antisense strand to SEQ ID NO: 1797611
uucuuccuagaacaaggcu

SEQ ID NO: 1797613 - RNA, 19 nt, Artificial Sequence
  Description of Artificial Sequence: Synthetic oligonucleotide
  Sense strand starting at position 3345 of SEQ ID NO: 1563131
uuauaagcacaguguuaag

SEQ ID NO: 1797614 - RNA, 19 nt, Artificial Sequence
  Description of Artificial Sequence: Synthetic oligonucleotide
  Antisense strand to SEQ ID NO: 1797613
cuuaacacugugcuuauaa

SEQ ID NO: 1797615 - RNA, 19 nt, Artificial Sequence
  Description of Artificial Sequence: Synthetic oligonucleotide
  Sense strand starting at position 3572 of SEQ ID NO: 1563131
ccuugagugagguaucuga

SEQ ID NO: 1797616 - RNA, 19 nt, Artificial Sequence
  Description of Artificial Sequence: Synthetic oligonucleotide
  Antisense strand to SEQ ID NO: 1797615
ucagauaccucacucaagg

SEQ ID NO: 1797617 - RNA, 19 nt, Artificial Sequence
  Description of Artificial Sequence: Synthetic oligonucleotide
  Sense strand starting at position 3576 of SEQ ID NO: 1563131
gagugagguaucugaggug

SEQ ID NO: 1797618 - RNA, 19 nt, Artificial Sequence
  Description of Artificial Sequence: Synthetic oligonucleotide
  Antisense strand to SEQ ID NO: 1797617
caccucagauaccucacuc

SEQ ID NO: 1797619 - RNA, 19 nt, Artificial Sequence
  Description of Artificial Sequence: Synthetic oligonucleotide
  Sense strand starting at position 3808 of SEQ ID NO: 1563131
cagacagacuucuuggagu

SEQ ID NO: 1797620 - RNA, 19 nt, Artificial Sequence
  Description of Artificial Sequence: Synthetic oligonucleotide
  Antisense strand to SEQ ID NO: 1797619
acuccaagaagucugucug

SEQ ID NO: 1797621 - RNA, 19 nt, Artificial Sequence
  Description of Artificial Sequence: Synthetic oligonucleotide
  Sense strand starting at position 3810 of SEQ ID NO: 1563131
gacagacuucuuggaguac

SEQ ID NO: 1797622 - RNA, 19 nt, Artificial Sequence
  Description of Artificial Sequence: Synthetic oligonucleotide
  Antisense strand to SEQ ID NO: 1797621
guacuccaagaagucuguc

SEQ ID NO: 1797623 - RNA, 19 nt, Artificial Sequence
  Description of Artificial Sequence: Synthetic oligonucleotide
  Sense strand starting at position 3822 of SEQ ID NO: 1563131
ggaguaccuccuggaaaua

SEQ ID NO: 1797624 - RNA, 19 nt, Artificial Sequence
  Description of Artificial Sequence: Synthetic oligonucleotide
  Antisense strand to SEQ ID NO: 1797623
uauuuccaggagguacucc

SEQ ID NO: 1797625 - RNA, 19 nt, Artificial Sequence
  Description of Artificial Sequence: Synthetic oligonucleotide
  Sense strand starting at position 380 of SEQ ID NO: 1563132
uugauaaggcauuaguuua

SEQ ID NO: 1797626 - RNA, 19 nt, Artificial Sequence
  Description of Artificial Sequence: Synthetic oligonucleotide
  Antisense strand to SEQ ID NO: 1797625
uaaacuaaugccuuaucaa

SEQ ID NO: 1797627 - RNA, 19 nt, Artificial Sequence
  Description of Artificial Sequence: Synthetic oligonucleotide
  Sense strand starting at position 430 of SEQ ID NO: 1563132
caguaugucccaggacaua

SEQ ID NO: 1797628 - RNA, 19 nt, Artificial Sequence
  Description of Artificial Sequence: Synthetic oligonucleotide
  Antisense strand to SEQ ID NO: 1797627
uauguccugggacauacug

SEQ ID NO: 1797629 - RNA, 19 nt, Artificial Sequence
  Description of Artificial Sequence: Synthetic oligonucleotide
  Sense strand starting at position 707 of SEQ ID NO: 1563132
gaaguaacgcaguacgaaa

SEQ ID NO: 1797630 - RNA, 19 nt, Artificial Sequence
  Description of Artificial Sequence: Synthetic oligonucleotide
  Antisense strand to SEQ ID NO: 1797629
uuucguacugcguuacuuc

SEQ ID NO: 1797631 - RNA, 19 nt, Artificial Sequence
  Description of Artificial Sequence: Synthetic oligonucleotide
  Sense strand starting at position 736 of SEQ ID NO: 1563132
ucaagccaugcucagauaa

SEQ ID NO: 1797632 - RNA, 19 nt, Artificial Sequence
  Description of Artificial Sequence: Synthetic oligonucleotide
  Antisense strand to SEQ ID NO: 1797631
uuaucugagcauggcuuga

SEQ ID NO: 1797633 - RNA, 19 nt, Artificial Sequence
  Description of Artificial Sequence: Synthetic oligonucleotide
  Sense strand starting at position 779 of SEQ ID NO: 1563132
gggcuaauuacugggaaga

SEQ ID NO: 1797634 - RNA, 19 nt, Artificial Sequence
  Description of Artificial Sequence: Synthetic oligonucleotide
  Antisense strand to SEQ ID NO: 1797633
ucuucccaguaauuagccc

SEQ ID NO: 1797635 - RNA, 19 nt, Artificial Sequence
  Description of Artificial Sequence: Synthetic oligonucleotide
  Sense strand starting at position 780 of SEQ ID NO: 1563132
ggcuaauuacugggaagag

SEQ ID NO: 1797636 - RNA, 19 nt, Artificial Sequence
  Description of Artificial Sequence: Synthetic oligonucleotide
  Antisense strand to SEQ ID NO: 1797635
cucuucccaguaauuagcc

SEQ ID NO: 1797637 - RNA, 19 nt, Artificial Sequence
  Description of Artificial Sequence: Synthetic oligonucleotide
  Sense strand starting at position 971 of SEQ ID NO: 1563132
aaaugaguggguugaccuu

SEQ ID NO: 1797638 - RNA, 19 nt, Artificial Sequence
  Description of Artificial Sequence: Synthetic oligonucleotide
  Antisense strand to SEQ ID NO: 1797637
aaggucaacccacucauuu

SEQ ID NO: 1797639 - RNA, 19 nt, Artificial Sequence
  Description of Artificial Sequence: Synthetic oligonucleotide
  Sense strand starting at position 978 of SEQ ID NO: 1563132
uggguugaccuuuaccaca

SEQ ID NO: 1797640 - RNA, 19 nt, Artificial Sequence
  Description of Artificial Sequence: Synthetic oligonucleotide
  Antisense strand to SEQ ID NO: 1797639
ugugguaaaggucaaccca

SEQ ID NO: 1797641 - RNA, 19 nt, Artificial Sequence
  Description of Artificial Sequence: Synthetic oligonucleotide
  Sense strand starting at position 980 of SEQ ID NO: 1563132
gguugaccuuuaccacaaa

SEQ ID NO: 1797642 - RNA, 19 nt, Artificial Sequence
  Description of Artificial Sequence: Synthetic oligonucleotide
  Antisense strand to SEQ ID NO: 1797641
uuugugguaaaggucaacc

SEQ ID NO: 1797643 - RNA, 19 nt, Artificial Sequence
  Description of Artificial Sequence: Synthetic oligonucleotide
  Sense strand starting at position 1061 of SEQ ID NO: 1563132
gcaaacuguuucuuugaag

SEQ ID NO: 1797644 - RNA, 19 nt, Artificial Sequence
  Description of Artificial Sequence: Synthetic oligonucleotide
  Antisense strand to SEQ ID NO: 1797643
cuucaaagaaacaguuugc

SEQ ID NO: 1797645 - RNA, 19 nt, Artificial Sequence
  Description of Artificial Sequence: Synthetic oligonucleotide
  Sense strand starting at position 1305 of SEQ ID NO: 1563132
aagucucaaucgguaaaug

SEQ ID NO: 1797646 - RNA, 19 nt, Artificial Sequence
  Description of Artificial Sequence: Synthetic oligonucleotide
  Antisense strand to SEQ ID NO: 1797645
cauuuaccgauugagacuu

SEQ ID NO: 1797647 - RNA, 19 nt, Artificial Sequence
  Description of Artificial Sequence: Synthetic oligonucleotide
  Sense strand starting at position 1306 of SEQ ID NO: 1563132
agucucaaucgguaaauga

SEQ ID NO: 1797648 - RNA, 19 nt, Artificial Sequence
  Description of Artificial Sequence: Synthetic oligonucleotide
  Antisense strand to SEQ ID NO: 1797647
ucauuuaccgauugagacu

SEQ ID NO: 1797649 - RNA, 19 nt, Artificial Sequence
  Description of Artificial Sequence: Synthetic oligonucleotide
  Sense strand starting at position 1541 of SEQ ID NO: 1563132
uggaauucacgugacuaug

SEQ ID NO: 1797650 - RNA, 19 nt, Artificial Sequence
  Description of Artificial Sequence: Synthetic oligonucleotide
  Antisense strand to SEQ ID NO: 1797649
cauagucacgugaauucca

SEQ ID NO: 1797651 - RNA, 19 nt, Artificial Sequence
  Description of Artificial Sequence: Synthetic oligonucleotide
  Sense strand starting at position 1634 of SEQ ID NO: 1563132
cuuggagguugccuggaau

SEQ ID NO: 1797652 - RNA, 19 nt, Artificial Sequence
  Description of Artificial Sequence: Synthetic oligonucleotide
  Antisense strand to SEQ ID NO: 1797651
auuccaggcaaccuccaag

SEQ ID NO: 1797653 - RNA, 19 nt, Artificial Sequence
  Description of Artificial Sequence: Synthetic oligonucleotide
  Sense strand starting at position 2020 of SEQ ID NO: 1563132
agaggauuugcgcaugcac

SEQ ID NO: 1797654 - RNA, 19 nt, Artificial Sequence
  Description of Artificial Sequence: Synthetic oligonucleotide
  Antisense strand to SEQ ID NO: 1797653
gugcaugcgcaaauccucu

SEQ ID NO: 1797655 - RNA, 19 nt, Artificial Sequence
  Description of Artificial Sequence: Synthetic oligonucleotide
  Sense strand starting at position 2022 of SEQ ID NO: 1563132
aggauuugcgcaugcacua

SEQ ID NO: 1797656 - RNA, 19 nt, Artificial Sequence
  Description of Artificial Sequence: Synthetic oligonucleotide
  Antisense strand to SEQ ID NO: 1797655
uagugcaugcgcaaauccu

SEQ ID NO: 1797657 - RNA, 19 nt, Artificial Sequence
  Description of Artificial Sequence: Synthetic oligonucleotide
  Sense strand starting at position 2106 of SEQ ID NO: 1563132
guuggacugaacgaguuaa

SEQ ID NO: 1797658 - RNA, 19 nt, Artificial Sequence
  Description of Artificial Sequence: Synthetic oligonucleotide
  Antisense strand to SEQ ID NO: 1797657
uuaacucguucaguccaac

SEQ ID NO: 1797659 - RNA, 19 nt, Artificial Sequence
  Description of Artificial Sequence: Synthetic oligonucleotide
  Sense strand starting at position 2189 of SEQ ID NO: 1563132
uguguuggugacgagaacu

SEQ ID NO: 1797660 - RNA, 19 nt, Artificial Sequence
  Description of Artificial Sequence: Synthetic oligonucleotide
  Antisense strand to SEQ ID NO: 1797659
aguucucgucaccaacaca

SEQ ID NO: 1797661 - RNA, 19 nt, Artificial Sequence
  Description of Artificial Sequence: Synthetic oligonucleotide
  Sense strand starting at position 2265 of SEQ ID NO: 1563132
ggacaccaguuacuugaua

SEQ ID NO: 1797662 - RNA, 19 nt, Artificial Sequence
  Description of Artificial Sequence: Synthetic oligonucleotide
  Antisense strand to SEQ ID NO: 1797661
uaucaaguaacuggugucc

SEQ ID NO: 1797663 - RNA, 19 nt, Artificial Sequence
  Description of Artificial Sequence: Synthetic oligonucleotide
  Sense strand starting at position 2413 of SEQ ID NO: 1563132
acccguuuccuggacaagu

SEQ ID NO: 1797664 - RNA, 19 nt, Artificial Sequence
  Description of Artificial Sequence: Synthetic oligonucleotide
  Antisense strand to SEQ ID NO: 1797663
acuuguccaggaaacgggu

SEQ ID NO: 1797665 - RNA, 19 nt, Artificial Sequence
  Description of Artificial Sequence: Synthetic oligonucleotide
  Sense strand starting at position 2415 of SEQ ID NO: 1563132
ccguuuccuggacaaguaa

SEQ ID NO: 1797666 - RNA, 19 nt, Artificial Sequence
  Description of Artificial Sequence: Synthetic oligonucleotide
  Antisense strand to SEQ ID NO: 1797665
uuacuuguccaggaaacgg

SEQ ID NO: 1797667 - RNA, 19 nt, Artificial Sequence
  Description of Artificial Sequence: Synthetic oligonucleotide
  Sense strand starting at position 2430 of SEQ ID NO: 1563132
guaauucugcgcucuucuu

SEQ ID NO: 1797668 - RNA, 19 nt, Artificial Sequence
  Description of Artificial Sequence: Synthetic oligonucleotide
  Antisense strand to SEQ ID NO: 1797667
aagaagagcgcagaauuac

SEQ ID NO: 1797669 - RNA, 19 nt, Artificial Sequence
  Description of Artificial Sequence: Synthetic oligonucleotide
  Sense strand starting at position 2596 of SEQ ID NO: 1563132
ggaagagaagucugcuaag

SEQ ID NO: 1797670 - RNA, 19 nt, Artificial Sequence
  Description of Artificial Sequence: Synthetic oligonucleotide
  Antisense strand to SEQ ID NO: 1797669
cuuagcagacuucucuucc

SEQ ID NO: 1797671 - RNA, 19 nt, Artificial Sequence
  Description of Artificial Sequence: Synthetic oligonucleotide
  Sense strand starting at position 2667 of SEQ ID NO: 1563132
uugacucugccagauauaa

SEQ ID NO: 1797672 - RNA, 19 nt, Artificial Sequence
  Description of Artificial Sequence: Synthetic oligonucleotide
  Antisense strand to SEQ ID NO: 1797671
uuauaucuggcagagucaa

SEQ ID NO: 1797673 - RNA, 19 nt, Artificial Sequence
  Description of Artificial Sequence: Synthetic oligonucleotide
  Sense strand starting at position 2813 of SEQ ID NO: 1563132
ggcucuguuggguaugaaa

SEQ ID NO: 1797674 - RNA, 19 nt, Artificial Sequence
  Description of Artificial Sequence: Synthetic oligonucleotide
  Antisense strand to SEQ ID NO: 1797673
uuucauacccaacagagcc

SEQ ID NO: 1797675 - RNA, 19 nt, Artificial Sequence
  Description of Artificial Sequence: Synthetic oligonucleotide
  Sense strand starting at position 2857 of SEQ ID NO: 1563132
cucacaaugguucgacuua

SEQ ID NO: 1797676 - RNA, 19 nt, Artificial Sequence
  Description of Artificial Sequence: Synthetic oligonucleotide
  Antisense strand to SEQ ID NO: 1797675
uaagucgaaccauugugag

SEQ ID NO: 1797677 - RNA, 19 nt, Artificial Sequence
  Description of Artificial Sequence: Synthetic oligonucleotide
  Sense strand starting at position 2886 of SEQ ID NO: 1563132
acuuuaugauggguuuaau

SEQ ID NO: 1797678 - RNA, 19 nt, Artificial Sequence
  Description of Artificial Sequence: Synthetic oligonucleotide
  Antisense strand to SEQ ID NO: 1797677
auuaaacccaucauaaagu

SEQ ID NO: 1797679 - RNA, 19 nt, Artificial Sequence
  Description of Artificial Sequence: Synthetic oligonucleotide
  Sense strand starting at position 3027 of SEQ ID NO: 1563132
aguuuacaauggguuuauu

SEQ ID NO: 1797680 - RNA, 19 nt, Artificial Sequence
  Description of Artificial Sequence: Synthetic oligonucleotide
  Antisense strand to SEQ ID NO: 1797679
aauaaacccauuguaaacu

SEQ ID NO: 1797681 - RNA, 19 nt, Artificial Sequence
  Description of Artificial Sequence: Synthetic oligonucleotide
  Sense strand starting at position 3095 of SEQ ID NO: 1563132
acauauaccggucauugaa

SEQ ID NO: 1797682 - RNA, 19 nt, Artificial Sequence
  Description of Artificial Sequence: Synthetic oligonucleotide
  Antisense strand to SEQ ID NO: 1797681
uucaaugaccgguauaugu

SEQ ID NO: 1797683 - RNA, 19 nt, Artificial Sequence
  Description of Artificial Sequence: Synthetic oligonucleotide
  Sense strand starting at position 3097 of SEQ ID NO: 1563132
auauaccggucauugaaau

SEQ ID NO: 1797684 - RNA, 19 nt, Artificial Sequence
  Description of Artificial Sequence: Synthetic oligonucleotide
  Antisense strand to SEQ ID NO: 1797683
auuucaaugaccgguauau

SEQ ID NO: 1797685 - RNA, 19 nt, Artificial Sequence
  Description of Artificial Sequence: Synthetic oligonucleotide
  Sense strand starting at position 3098 of SEQ ID NO: 1563132
uauaccggucauugaaaua

SEQ ID NO: 1797686 - RNA, 19 nt, Artificial Sequence
  Description of Artificial Sequence: Synthetic oligonucleotide
  Antisense strand to SEQ ID NO: 1797685
uauuucaaugaccgguaua

SEQ ID NO: 1797687 - RNA, 19 nt, Artificial Sequence
  Description of Artificial Sequence: Synthetic oligonucleotide
  Sense strand starting at position 3148 of SEQ ID NO: 1563132
agaagacuaugggauggaa

SEQ ID NO: 1797688 - RNA, 19 nt, Artificial Sequence
  Description of Artificial Sequence: Synthetic oligonucleotide
  Antisense strand to SEQ ID NO: 1797687
uuccaucccauagucuucu

SEQ ID NO: 1797689 - RNA, 19 nt, Artificial Sequence
  Description of Artificial Sequence: Synthetic oligonucleotide
  Sense strand starting at position 3176 of SEQ ID NO: 1563132
uagaacuucguguaagaag

SEQ ID NO: 1797690 - RNA, 19 nt, Artificial Sequence
  Description of Artificial Sequence: Synthetic oligonucleotide
  Antisense strand to SEQ ID NO: 1797689
cuucuuacacgaaguucua

SEQ ID NO: 1797691 - RNA, 19 nt, Artificial Sequence
  Description of Artificial Sequence: Synthetic oligonucleotide
  Sense strand starting at position 3191 of SEQ ID NO: 1563132
gaaguuauuugaguugugu

SEQ ID NO: 1797692 - RNA, 19 nt, Artificial Sequence
  Description of Artificial Sequence: Synthetic oligonucleotide
  Antisense strand to SEQ ID NO: 1797691
acacaacucaaauaacuuc

SEQ ID NO: 1797693 - RNA, 19 nt, Artificial Sequence
  Description of Artificial Sequence: Synthetic oligonucleotide
  Sense strand starting at position 3193 of SEQ ID NO: 1563132
aguuauuugaguugugucu

SEQ ID NO: 1797694 - RNA, 19 nt, Artificial Sequence
  Description of Artificial Sequence: Synthetic oligonucleotide
  Antisense strand to SEQ ID NO: 1797693
agacacaacucaaauaacu

SEQ ID NO: 1797695 - RNA, 19 nt, Artificial Sequence
  Description of Artificial Sequence: Synthetic oligonucleotide
  Sense strand starting at position 3210 of SEQ ID NO: 1563132
cuugaaggaugaguaguaa

SEQ ID NO: 1797696 - RNA, 19 nt, Artificial Sequence
  Description of Artificial Sequence: Synthetic oligonucleotide
  Antisense strand to SEQ ID NO: 1797695
uuacuacucauccuucaag

SEQ ID NO: 1797697 - RNA, 19 nt, Artificial Sequence
  Description of Artificial Sequence: Synthetic oligonucleotide
  Sense strand starting at position 3264 of SEQ ID NO: 1563132
gauggugaauacuuucgga

SEQ ID NO: 1797698 - RNA, 19 nt, Artificial Sequence
  Description of Artificial Sequence: Synthetic oligonucleotide
  Antisense strand to SEQ ID NO: 1797697
uccgaaaguauucaccauc

SEQ ID NO: 1797699 - RNA, 19 nt, Artificial Sequence
  Description of Artificial Sequence: Synthetic oligonucleotide
  Sense strand starting at position 3413 of SEQ ID NO: 1563132
ggguguucggaagacuaaa

SEQ ID NO: 1797700 - RNA, 19 nt, Artificial Sequence
  Description of Artificial Sequence: Synthetic oligonucleotide
  Antisense strand to SEQ ID NO: 1797699
uuuagucuuccgaacaccc

SEQ ID NO: 1797701 - RNA, 19 nt, Artificial Sequence
  Description of Artificial Sequence: Synthetic oligonucleotide
  Sense strand starting at position 3561 of SEQ ID NO: 1563132
gaaguauugauguggucag

SEQ ID NO: 1797702 - RNA, 19 nt, Artificial Sequence
  Description of Artificial Sequence: Synthetic oligonucleotide
  Antisense strand to SEQ ID NO: 1797701
cugaccacaucaauacuuc

SEQ ID NO: 1797703 - RNA, 19 nt, Artificial Sequence
  Description of Artificial Sequence: Synthetic oligonucleotide
  Sense strand starting at position 3927 of SEQ ID NO: 1563132
agaguugggcccuaacuuu

SEQ ID NO: 1797704 - RNA, 19 nt, Artificial Sequence
  Description of Artificial Sequence: Synthetic oligonucleotide
  Antisense strand to SEQ ID NO: 1797703
aaaguuagggcccaacucu

SEQ ID NO: 1797705 - RNA, 19 nt, Artificial Sequence
  Description of Artificial Sequence: Synthetic oligonucleotide
  Sense strand starting at position 154 of SEQ ID NO: 1563133
guauguugcccagacugau

SEQ ID NO: 1797706 - RNA, 19 nt, Artificial Sequence
  Description of Artificial Sequence: Synthetic oligonucleotide
  Antisense strand to SEQ ID NO: 1797705
aucagucugggcaacauac

SEQ ID NO: 1797707 - RNA, 19 nt, Artificial Sequence
  Description of Artificial Sequence: Synthetic oligonucleotide
  Sense strand starting at position 239 of SEQ ID NO: 1563133
gaucaucugccagagcaca

SEQ ID NO: 1797708 - RNA, 19 nt, Artificial Sequence
  Description of Artificial Sequence: Synthetic oligonucleotide
  Antisense strand to SEQ ID NO: 1797707
ugugcucuggcagaugauc

SEQ ID NO: 1797709 - RNA, 19 nt, Artificial Sequence
  Description of Artificial Sequence: Synthetic oligonucleotide
  Sense strand starting at position 297 of SEQ ID NO: 1563133
gcuaaaggguggucaguga

SEQ ID NO: 1797710 - RNA, 19 nt, Artificial Sequence
  Description of Artificial Sequence: Synthetic oligonucleotide
  Antisense strand to SEQ ID NO: 1797709
ucacugaccacccuuuagc

SEQ ID NO: 1797711 - RNA, 19 nt, Artificial Sequence
  Description of Artificial Sequence: Synthetic oligonucleotide
  Sense strand starting at position 319 of SEQ ID NO: 1563133
gccuaaagguccuuaacac

SEQ ID NO: 1797712 - RNA, 19 nt, Artificial Sequence
  Description of Artificial Sequence: Synthetic oligonucleotide
  Antisense strand to SEQ ID NO: 1797711
guguuaaggaccuuuaggc

SEQ ID NO: 1797713 - RNA, 19 nt, Artificial Sequence
  Description of Artificial Sequence: Synthetic oligonucleotide
  Sense strand starting at position 362 of SEQ ID NO: 1563133
uuacuuaggccaugccaau

SEQ ID NO: 1797714 - RNA, 19 nt, Artificial Sequence
  Description of Artificial Sequence: Synthetic oligonucleotide
  Antisense strand to SEQ ID NO: 1797713
auuggcauggccuaaguaa

SEQ ID NO: 1797715 - RNA, 19 nt, Artificial Sequence
  Description of Artificial Sequence: Synthetic oligonucleotide
  Sense strand starting at position 396 of SEQ ID NO: 1563133
ugcuauaaacucuguaguu

SEQ ID NO: 1797716 - RNA, 19 nt, Artificial Sequence
  Description of Artificial Sequence: Synthetic oligonucleotide
  Antisense strand to SEQ ID NO: 1797715
aacuacagaguuuauagca

SEQ ID NO: 1797717 - RNA, 19 nt, Artificial Sequence
  Description of Artificial Sequence: Synthetic oligonucleotide
  Sense strand starting at position 397 of SEQ ID NO: 1563133
gcuauaaacucuguaguua

SEQ ID NO: 1797718 - RNA, 19 nt, Artificial Sequence
  Description of Artificial Sequence: Synthetic oligonucleotide
  Antisense strand to SEQ ID NO: 1797717
uaacuacagaguuuauagc

SEQ ID NO: 1797719 - RNA, 19 nt, Artificial Sequence
  Description of Artificial Sequence: Synthetic oligonucleotide
  Sense strand starting at position 398 of SEQ ID NO: 1563133
cuauaaacucuguaguuaa

SEQ ID NO: 1797720 - RNA, 19 nt, Artificial Sequence
  Description of Artificial Sequence: Synthetic oligonucleotide
  Antisense strand to SEQ ID NO: 1797719
uuaacuacagaguuuauag

SEQ ID NO: 1797721 - RNA, 19 nt, Artificial Sequence
  Description of Artificial Sequence: Synthetic oligonucleotide
  Sense strand starting at position 438 of SEQ ID NO: 1563133
uggguaaauugguaauuuc

SEQ ID NO: 1797722 - RNA, 19 nt, Artificial Sequence
  Description of Artificial Sequence: Synthetic oligonucleotide
  Antisense strand to SEQ ID NO: 1797721
gaaauuaccaauuuaccca

SEQ ID NO: 1797723 - RNA, 19 nt, Artificial Sequence
  Description of Artificial Sequence: Synthetic oligonucleotide
  Sense strand starting at position 466 of SEQ ID NO: 1563133
uggugagguagccauauau

SEQ ID NO: 1797724 - RNA, 19 nt, Artificial Sequence
  Description of Artificial Sequence: Synthetic oligonucleotide
  Antisense strand to SEQ ID NO: 1797723
auauauggcuaccucacca

SEQ ID NO: 1797725 - RNA, 19 nt, Artificial Sequence
  Description of Artificial Sequence: Synthetic oligonucleotide
  Sense strand starting at position 1289 of SEQ ID NO: 1563133
gggugugugcuuuaugcau

SEQ ID NO: 1797726 - RNA, 19 nt, Artificial Sequence
  Description of Artificial Sequence: Synthetic oligonucleotide
  Antisense strand to SEQ ID NO: 1797725
augcauaaagcacacaccc

SEQ ID NO: 1797727 - RNA, 19 nt, Artificial Sequence
  Description of Artificial Sequence: Synthetic oligonucleotide
  Sense strand starting at position 1293 of SEQ ID NO: 1563133
gugugcuuuaugcauggaa

SEQ ID NO: 1797728 - RNA, 19 nt, Artificial Sequence
  Description of Artificial Sequence: Synthetic oligonucleotide
  Antisense strand to SEQ ID NO: 1797727
uuccaugcauaaagcacac

SEQ ID NO: 1797729 - RNA, 19 nt, Artificial Sequence
  Description of Artificial Sequence: Synthetic oligonucleotide
  Sense strand starting at position 1296 of SEQ ID NO: 1563133
ugcuuuaugcauggaagga

SEQ ID NO: 1797730 - RNA, 19 nt, Artificial Sequence
  Description of Artificial Sequence: Synthetic oligonucleotide
  Antisense strand to SEQ ID NO: 1797729
uccuuccaugcauaaagca

SEQ ID NO: 1797731 - RNA, 19 nt, Artificial Sequence
  Description of Artificial Sequence: Synthetic oligonucleotide
  Sense strand starting at position 1297 of SEQ ID NO: 1563133
gcuuuaugcauggaaggac

SEQ ID NO: 1797732 - RNA, 19 nt, Artificial Sequence
  Description of Artificial Sequence: Synthetic oligonucleotide
  Antisense strand to SEQ ID NO: 1797731
guccuuccaugcauaaagc

SEQ ID NO: 1797733 - RNA, 19 nt, Artificial Sequence
  Description of Artificial Sequence: Synthetic oligonucleotide
  Sense strand starting at position 1863 of SEQ ID NO: 1563133
acauguuucugacugcuua

SEQ ID NO: 1797734 - RNA, 19 nt, Artificial Sequence
  Description of Artificial Sequence: Synthetic oligonucleotide
  Antisense strand to SEQ ID NO: 1797733
uaagcagucagaaacaugu

SEQ ID NO: 1797735 - RNA, 19 nt, Artificial Sequence
  Description of Artificial Sequence: Synthetic oligonucleotide
  Sense strand starting at position 1871 of SEQ ID NO: 1563133
cugacugcuuauguuaaua

SEQ ID NO: 1797736 - RNA, 19 nt, Artificial Sequence
  Description of Artificial Sequence: Synthetic oligonucleotide
  Antisense strand to SEQ ID NO: 1797735
uauuaacauaagcagucag

SEQ ID NO: 1797737 - RNA, 19 nt, Artificial Sequence
  Description of Artificial Sequence: Synthetic oligonucleotide
  Sense strand starting at position 1941 of SEQ ID NO: 1563133
gcaacugucugaccgcaau

SEQ ID NO: 1797738 - RNA, 19 nt, Artificial Sequence
  Description of Artificial Sequence: Synthetic oligonucleotide
  Antisense strand to SEQ ID NO: 1797737
auugcggucagacaguugc

SEQ ID NO: 1797739 - RNA, 19 nt, Artificial Sequence
  Description of Artificial Sequence: Synthetic oligonucleotide
  Sense strand starting at position 1944 of SEQ ID NO: 1563133
acugucugaccgcaauaau

SEQ ID NO: 1797740 - RNA, 19 nt, Artificial Sequence
  Description of Artificial Sequence: Synthetic oligonucleotide
  Antisense strand to SEQ ID NO: 1797739
auuauugcggucagacagu

SEQ ID NO: 1797741 - RNA, 19 nt, Artificial Sequence
  Description of Artificial Sequence: Synthetic oligonucleotide
  Sense strand starting at position 2031 of SEQ ID NO: 1563133
gaagaacaguggugauaag

SEQ ID NO: 1797742 - RNA, 19 nt, Artificial Sequence
  Description of Artificial Sequence: Synthetic oligonucleotide
  Antisense strand to SEQ ID NO: 1797741
cuuaucaccacuguucuuc

SEQ ID NO: 1797743 - RNA, 19 nt, Artificial Sequence
  Description of Artificial Sequence: Synthetic oligonucleotide
  Sense strand starting at position 2041 of SEQ ID NO: 1563133
ggugauaagccucacagcu

SEQ ID NO: 1797744 - RNA, 19 nt, Artificial Sequence
  Description of Artificial Sequence: Synthetic oligonucleotide
  Antisense strand to SEQ ID NO: 1797743
agcugugaggcuuaucacc

SEQ ID NO: 1797745 - RNA, 19 nt, Artificial Sequence
  Description of Artificial Sequence: Synthetic oligonucleotide
  Sense strand starting at position 2069 of SEQ ID NO: 1563133
ugggcaucccuaugauaug

SEQ ID NO: 1797746 - RNA, 19 nt, Artificial Sequence
  Description of Artificial Sequence: Synthetic oligonucleotide
  Antisense strand to SEQ ID NO: 1797745
cauaucauagggaugccca

SEQ ID NO: 1797747 - RNA, 19 nt, Artificial Sequence
  Description of Artificial Sequence: Synthetic oligonucleotide
  Sense strand starting at position 2084 of SEQ ID NO: 1563133
uaugccagucacuguguua

SEQ ID NO: 1797748 - RNA, 19 nt, Artificial Sequence
  Description of Artificial Sequence: Synthetic oligonucleotide
  Antisense strand to SEQ ID NO: 1797747
uaacacagugacuggcaua

SEQ ID NO: 1797749 - RNA, 19 nt, Artificial Sequence
  Description of Artificial Sequence: Synthetic oligonucleotide
  Sense strand starting at position 2139 of SEQ ID NO: 1563133
agcauuaugagguauuagu

SEQ ID NO: 1797750 - RNA, 19 nt, Artificial Sequence
  Description of Artificial Sequence: Synthetic oligonucleotide
  Antisense strand to SEQ ID NO: 1797749
acuaauaccucauaaugcu

SEQ ID NO: 1797751 - RNA, 19 nt, Artificial Sequence
  Description of Artificial Sequence: Synthetic oligonucleotide
  Sense strand starting at position 2162 of SEQ ID NO: 1563133
gcauauugcaguugaacag

SEQ ID NO: 1797752 - RNA, 19 nt, Artificial Sequence
  Description of Artificial Sequence: Synthetic oligonucleotide
  Antisense strand to SEQ ID NO: 1797751
cuguucaacugcaauaugc

SEQ ID NO: 1797753 - RNA, 19 nt, Artificial Sequence
  Description of Artificial Sequence: Synthetic oligonucleotide
  Sense strand starting at position 2220 of SEQ ID NO: 1563133
agcugacuucuuuggcuga

SEQ ID NO: 1797754 - RNA, 19 nt, Artificial Sequence
  Description of Artificial Sequence: Synthetic oligonucleotide
  Antisense strand to SEQ ID NO: 1797753
ucagccaaagaagucagcu

SEQ ID NO: 1797755 - RNA, 19 nt, Artificial Sequence
  Description of Artificial Sequence: Synthetic oligonucleotide
  Sense strand starting at position 2224 of SEQ ID NO: 1563133
gacuucuuuggcugagcuu

SEQ ID NO: 1797756 - RNA, 19 nt, Artificial Sequence
  Description of Artificial Sequence: Synthetic oligonucleotide
  Antisense strand to SEQ ID NO: 1797755
aagcucagccaaagaaguc

SEQ ID NO: 1797757 - RNA, 19 nt, Artificial Sequence
  Description of Artificial Sequence: Synthetic oligonucleotide
  Sense strand starting at position 2254 of SEQ ID NO: 1563133
uuuccaaauucugagguua

SEQ ID NO: 1797758 - RNA, 19 nt, Artificial Sequence
  Description of Artificial Sequence: Synthetic oligonucleotide
  Antisense strand to SEQ ID NO: 1797757
uaaccucagaauuuggaaa

SEQ ID NO: 1797759 - RNA, 19 nt, Artificial Sequence
  Description of Artificial Sequence: Synthetic oligonucleotide
  Sense strand starting at position 2318 of SEQ ID NO: 1563133
ugaaacaggucucaauuua

SEQ ID NO: 1797760 - RNA, 19 nt, Artificial Sequence
  Description of Artificial Sequence: Synthetic oligonucleotide
  Antisense strand to SEQ ID NO: 1797759
uaaauugagaccuguuuca

SEQ ID NO: 1797761 - RNA, 19 nt, Artificial Sequence
  Description of Artificial Sequence: Synthetic oligonucleotide
  Sense strand starting at position 2326 of SEQ ID NO: 1563133
gucucaauuuaccaguuua

SEQ ID NO: 1797762 - RNA, 19 nt, Artificial Sequence
  Description of Artificial Sequence: Synthetic oligonucleotide
  Antisense strand to SEQ ID NO: 1797761
uaaacugguaaauugagac

SEQ ID NO: 1797763 - RNA, 19 nt, Artificial Sequence
  Description of Artificial Sequence: Synthetic oligonucleotide
  Sense strand starting at position 2357 of SEQ ID NO: 1563133
uaaggaugugucugggaga

SEQ ID NO: 1797764 - RNA, 19 nt, Artificial Sequence
  Description of Artificial Sequence: Synthetic oligonucleotide
  Antisense strand to SEQ ID NO: 1797763
ucucccagacacauccuua

SEQ ID NO: 1797765 - RNA, 19 nt, Artificial Sequence
  Description of Artificial Sequence: Synthetic oligonucleotide
  Sense strand starting at position 2360 of SEQ ID NO: 1563133
ggaugugucugggagacag

SEQ ID NO: 1797766 - RNA, 19 nt, Artificial Sequence
  Description of Artificial Sequence: Synthetic oligonucleotide
  Antisense strand to SEQ ID NO: 1797765
cugucucccagacacaucc

SEQ ID NO: 1797767 - RNA, 19 nt, Artificial Sequence
  Description of Artificial Sequence: Synthetic oligonucleotide
  Sense strand starting at position 2983 of SEQ ID NO: 1563133
ucugauggugcugggauua

SEQ ID NO: 1797768 - RNA, 19 nt, Artificial Sequence
  Description of Artificial Sequence: Synthetic oligonucleotide
  Antisense strand to SEQ ID NO: 1797767
uaaucccagcaccaucaga

SEQ ID NO: 1797769 - RNA, 19 nt, Artificial Sequence
  Description of Artificial Sequence: Synthetic oligonucleotide
  Sense strand starting at position 3022 of SEQ ID NO: 1563133
cggccuaggcuucaguauu

SEQ ID NO: 1797770 - RNA, 19 nt, Artificial Sequence
  Description of Artificial Sequence: Synthetic oligonucleotide
  Antisense strand to SEQ ID NO: 1797769
aauacugaagccuaggccg

SEQ ID NO: 1797771 - RNA, 19 nt, Artificial Sequence
  Description of Artificial Sequence: Synthetic oligonucleotide
  Sense strand starting at position 3406 of SEQ ID NO: 1563133
gagggaagguauggucaca

SEQ ID NO: 1797772 - RNA, 19 nt, Artificial Sequence
  Description of Artificial Sequence: Synthetic oligonucleotide
  Antisense strand to SEQ ID NO: 1797771
ugugaccauaccuucccuc

SEQ ID NO: 1797773 - RNA, 19 nt, Artificial Sequence
  Description of Artificial Sequence: Synthetic oligonucleotide
  Sense strand starting at position 3411 of SEQ ID NO: 1563133
aagguauggucacaugauu

SEQ ID NO: 1797774 - RNA, 19 nt, Artificial Sequence
  Description of Artificial Sequence: Synthetic oligonucleotide
  Antisense strand to SEQ ID NO: 1797773
aaucaugugaccauaccuu

SEQ ID NO: 1797775 - RNA, 19 nt, Artificial Sequence
  Description of Artificial Sequence: Synthetic oligonucleotide
  Sense strand starting at position 3484 of SEQ ID NO: 1563133
uccgucuccugcucaguaa

SEQ ID NO: 1797776 - RNA, 19 nt, Artificial Sequence
  Description of Artificial Sequence: Synthetic oligonucleotide
  Antisense strand to SEQ ID NO: 1797775
uuacugagcaggagacgga

SEQ ID NO: 1797777 - RNA, 19 nt, Artificial Sequence
  Description of Artificial Sequence: Synthetic oligonucleotide
  Sense strand starting at position 3485 of SEQ ID NO: 1563133
ccgucuccugcucaguaaa

SEQ ID NO: 1797778 - RNA, 19 nt, Artificial Sequence
  Description of Artificial Sequence: Synthetic oligonucleotide
  Antisense strand to SEQ ID NO: 1797777
uuuacugagcaggagacgg

SEQ ID NO: 1797779 - RNA, 19 nt, Artificial Sequence
  Description of Artificial Sequence: Synthetic oligonucleotide
  Sense strand starting at position 3567 of SEQ ID NO: 1563133
auuuguagcugucugcuua

SEQ ID NO: 1797780 - RNA, 19 nt, Artificial Sequence
  Description of Artificial Sequence: Synthetic oligonucleotide
  Antisense strand to SEQ ID NO: 1797779
uaagcagacagcuacaaau

SEQ ID NO: 1797781 - RNA, 19 nt, Artificial Sequence
  Description of Artificial Sequence: Synthetic oligonucleotide
  Sense strand starting at position 3727 of SEQ ID NO: 1563133
gagauauagugcuuaucag

SEQ ID NO: 1797782 - RNA, 19 nt, Artificial Sequence
  Description of Artificial Sequence: Synthetic oligonucleotide
  Antisense strand to SEQ ID NO: 1797781
cugauaagcacuauaucuc

SEQ ID NO: 1797783 - RNA, 19 nt, Artificial Sequence
  Description of Artificial Sequence: Synthetic oligonucleotide
  Sense strand starting at position 3840 of SEQ ID NO: 1563133
gggaucaaaccaggcaauu

SEQ ID NO: 1797784 - RNA, 19 nt, Artificial Sequence
  Description of Artificial Sequence: Synthetic oligonucleotide
  Antisense strand to SEQ ID NO: 1797783
aauugccugguuugauccc

SEQ ID NO: 1797785 - RNA, 19 nt, Artificial Sequence
  Description of Artificial Sequence: Synthetic oligonucleotide
  Sense strand starting at position 570 of SEQ ID NO: 1563135
cuacguaagaccugagauu

SEQ ID NO: 1797786 - RNA, 19 nt, Artificial Sequence
  Description of Artificial Sequence: Synthetic oligonucleotide
  Antisense strand to SEQ ID NO: 1797785
aaucucaggucuuacguag

SEQ ID NO: 1797787 - RNA, 19 nt, Artificial Sequence
  Description of Artificial Sequence: Synthetic oligonucleotide
  Sense strand starting at position 604 of SEQ ID NO: 1563135
caguuaagagcucaguaga

SEQ ID NO: 1797788 - RNA, 19 nt, Artificial Sequence
  Description of Artificial Sequence: Synthetic oligonucleotide
  Antisense strand to SEQ ID NO: 1797787
ucuacugagcucuuaacug

SEQ ID NO: 1797789 - RNA, 19 nt, Artificial Sequence
  Description of Artificial Sequence: Synthetic oligonucleotide
  Sense strand starting at position 607 of SEQ ID NO: 1563135
uuaagagcucaguagacuu

SEQ ID NO: 1797790 - RNA, 19 nt, Artificial Sequence
  Description of Artificial Sequence: Synthetic oligonucleotide
  Antisense strand to SEQ ID NO: 1797789
aagucuacugagcucuuaa

SEQ ID NO: 1797791 - RNA, 19 nt, Artificial Sequence
  Description of Artificial Sequence: Synthetic oligonucleotide
  Sense strand starting at position 690 of SEQ ID NO: 1563135
ccaaguauuagagggcuau

SEQ ID NO: 1797792 - RNA, 19 nt, Artificial Sequence
  Description of Artificial Sequence: Synthetic oligonucleotide
  Antisense strand to SEQ ID NO: 1797791
auagcccucuaauacuugg

SEQ ID NO: 1797793 - RNA, 19 nt, Artificial Sequence
  Description of Artificial Sequence: Synthetic oligonucleotide
  Sense strand starting at position 691 of SEQ ID NO: 1563135
caaguauuagagggcuauu

SEQ ID NO: 1797794 - RNA, 19 nt, Artificial Sequence
  Description of Artificial Sequence: Synthetic oligonucleotide
  Antisense strand to SEQ ID NO: 1797793
aauagcccucuaauacuug

SEQ ID NO: 1797795 - RNA, 19 nt, Artificial Sequence
  Description of Artificial Sequence: Synthetic oligonucleotide
  Sense strand starting at position 1016 of SEQ ID NO: 1563135
caggaaucucugugaaacc

SEQ ID NO: 1797796 - RNA, 19 nt, Artificial Sequence
  Description of Artificial Sequence: Synthetic oligonucleotide
  Antisense strand to SEQ ID NO: 1797795
gguuucacagagauuccug

SEQ ID NO: 1797797 - RNA, 19 nt, Artificial Sequence
  Description of Artificial Sequence: Synthetic oligonucleotide
  Sense strand starting at position 1134 of SEQ ID NO: 1563135
cauagagucccucauguga

SEQ ID NO: 1797798 - RNA, 19 nt, Artificial Sequence
  Description of Artificial Sequence: Synthetic oligonucleotide
  Antisense strand to SEQ ID NO: 1797797
ucacaugagggacucuaug

SEQ ID NO: 1797799 - RNA, 19 nt, Artificial Sequence
  Description of Artificial Sequence: Synthetic oligonucleotide
  Sense strand starting at position 1234 of SEQ ID NO: 1563135
uuuagauguuuggcugaaa

SEQ ID NO: 1797800 - RNA, 19 nt, Artificial Sequence
  Description of Artificial Sequence: Synthetic oligonucleotide
  Antisense strand to SEQ ID NO: 1797799
uuucagccaaacaucuaaa

SEQ ID NO: 1797801 - RNA, 19 nt, Artificial Sequence
  Description of Artificial Sequence: Synthetic oligonucleotide
  Sense strand starting at position 1529 of SEQ ID NO: 1563135
uucuguuaucucuaugagg

SEQ ID NO: 1797802 - RNA, 19 nt, Artificial Sequence
  Description of Artificial Sequence: Synthetic oligonucleotide
  Antisense strand to SEQ ID NO: 1797801
ccucauagagauaacagaa

SEQ ID NO: 1797803 - RNA, 19 nt, Artificial Sequence
  Description of Artificial Sequence: Synthetic oligonucleotide
  Sense strand starting at position 1617 of SEQ ID NO: 1563135
cugcgagaccuccagaaca

SEQ ID NO: 1797804 - RNA, 19 nt, Artificial Sequence
  Description of Artificial Sequence: Synthetic oligonucleotide
  Antisense strand to SEQ ID NO: 1797803
uguucuggaggucucgcag

SEQ ID NO: 1797805 - RNA, 19 nt, Artificial Sequence
  Description of Artificial Sequence: Synthetic oligonucleotide
  Sense strand starting at position 1619 of SEQ ID NO: 1563135
gcgagaccuccagaacaau

SEQ ID NO: 1797806 - RNA, 19 nt, Artificial Sequence
  Description of Artificial Sequence: Synthetic oligonucleotide
  Antisense strand to SEQ ID NO: 1797805
auuguucuggaggucucgc

SEQ ID NO: 1797807 - RNA, 19 nt, Artificial Sequence
  Description of Artificial Sequence: Synthetic oligonucleotide
  Sense strand starting at position 1666 of SEQ ID NO: 1563135
guuauauugcaagagaucu

SEQ ID NO: 1797808 - RNA, 19 nt, Artificial Sequence
  Description of Artificial Sequence: Synthetic oligonucleotide
  Antisense strand to SEQ ID NO: 1797807
agaucucuugcaauauaac

SEQ ID NO: 1797809 - RNA, 19 nt, Artificial Sequence
  Description of Artificial Sequence: Synthetic oligonucleotide
  Sense strand starting at position 1835 of SEQ ID NO: 1563135
gucagaugucccuaccauu

SEQ ID NO: 1797810 - RNA, 19 nt, Artificial Sequence
  Description of Artificial Sequence: Synthetic oligonucleotide
  Antisense strand to SEQ ID NO: 1797809
aaugguagggacaucugac

SEQ ID NO: 1797811 - RNA, 19 nt, Artificial Sequence
  Description of Artificial Sequence: Synthetic oligonucleotide
  Sense strand starting at position 1929 of SEQ ID NO: 1563135
uccagucugccucaagaua

SEQ ID NO: 1797812 - RNA, 19 nt, Artificial Sequence
  Description of Artificial Sequence: Synthetic oligonucleotide
  Antisense strand to SEQ ID NO: 1797811
uaucuugaggcagacugga

SEQ ID NO: 1797813 - RNA, 19 nt, Artificial Sequence
  Description of Artificial Sequence: Synthetic oligonucleotide
  Sense strand starting at position 2005 of SEQ ID NO: 1563135
agaguuaccucuucuugac

SEQ ID NO: 1797814 - RNA, 19 nt, Artificial Sequence
  Description of Artificial Sequence: Synthetic oligonucleotide
  Antisense strand to SEQ ID NO: 1797813
gucaagaagagguaacucu

SEQ ID NO: 1797815 - RNA, 19 nt, Artificial Sequence
  Description of Artificial Sequence: Synthetic oligonucleotide
  Sense strand starting at position 2007 of SEQ ID NO: 1563135
aguuaccucuucuugacau

SEQ ID NO: 1797816 - RNA, 19 nt, Artificial Sequence
  Description of Artificial Sequence: Synthetic oligonucleotide
  Antisense strand to SEQ ID NO: 1797815
augucaagaagagguaacu

SEQ ID NO: 1797817 - RNA, 19 nt, Artificial Sequence
  Description of Artificial Sequence: Synthetic oligonucleotide
  Sense strand starting at position 2022 of SEQ ID NO: 1563135
acaucaccguuucuauaga

SEQ ID NO: 1797818 - RNA, 19 nt, Artificial Sequence
  Description of Artificial Sequence: Synthetic oligonucleotide
  Antisense strand to SEQ ID NO: 1797817
ucuauagaaacggugaugu

SEQ ID NO: 1797819 - RNA, 19 nt, Artificial Sequence
  Description of Artificial Sequence: Synthetic oligonucleotide
  Sense strand starting at position 2029 of SEQ ID NO: 1563135
cguuucuauagagaacagu

SEQ ID NO: 1797820 - RNA, 19 nt, Artificial Sequence
  Description of Artificial Sequence: Synthetic oligonucleotide
  Antisense strand to SEQ ID NO: 1797819
acuguucucuauagaaacg

SEQ ID NO: 1797821 - RNA, 19 nt, Artificial Sequence
  Description of Artificial Sequence: Synthetic oligonucleotide
  Sense strand starting at position 2108 of SEQ ID NO: 1563135
ugaccuucccuaugagaaa

SEQ ID NO: 1797822 - RNA, 19 nt, Artificial Sequence
  Description of Artificial Sequence: Synthetic oligonucleotide
  Antisense strand to SEQ ID NO: 1797821
uuucucauagggaagguca

SEQ ID NO: 1797823 - RNA, 19 nt, Artificial Sequence
  Description of Artificial Sequence: Synthetic oligonucleotide
  Sense strand starting at position 2120 of SEQ ID NO: 1563135
ugagaaauaaguuguccag

SEQ ID NO: 1797824 - RNA, 19 nt, Artificial Sequence
  Description of Artificial Sequence: Synthetic oligonucleotide
  Antisense strand to SEQ ID NO: 1797823
cuggacaacuuauuucuca

SEQ ID NO: 1797825 - RNA, 19 nt, Artificial Sequence
  Description of Artificial Sequence: Synthetic oligonucleotide
  Sense strand starting at position 2122 of SEQ ID NO: 1563135
agaaauaaguuguccagag

SEQ ID NO: 1797826 - RNA, 19 nt, Artificial Sequence
  Description of Artificial Sequence: Synthetic oligonucleotide
  Antisense strand to SEQ ID NO: 1797825
cucuggacaacuuauuucu

SEQ ID NO: 1797827 - RNA, 19 nt, Artificial Sequence
  Description of Artificial Sequence: Synthetic oligonucleotide
  Sense strand starting at position 2123 of SEQ ID NO: 1563135
gaaauaaguuguccagaga

SEQ ID NO: 1797828 - RNA, 19 nt, Artificial Sequence
  Description of Artificial Sequence: Synthetic oligonucleotide
  Antisense strand to SEQ ID NO: 1797827
ucucuggacaacuuauuuc

SEQ ID NO: 1797829 - RNA, 19 nt, Artificial Sequence
  Description of Artificial Sequence: Synthetic oligonucleotide
  Sense strand starting at position 2138 of SEQ ID NO: 1563135
gagaaaggcugaucuaguu

SEQ ID NO: 1797830 - RNA, 19 nt, Artificial Sequence
  Description of Artificial Sequence: Synthetic oligonucleotide
  Antisense strand to SEQ ID NO: 1797829
aacuagaucagccuuucuc

SEQ ID NO: 1797831 - RNA, 19 nt, Artificial Sequence
  Description of Artificial Sequence: Synthetic oligonucleotide
  Sense strand starting at position 2144 of SEQ ID NO: 1563135
ggcugaucuaguugagaca

SEQ ID NO: 1797832 - RNA, 19 nt, Artificial Sequence
  Description of Artificial Sequence: Synthetic oligonucleotide
  Antisense strand to SEQ ID NO: 1797831
ugucucaacuagaucagcc

SEQ ID NO: 1797833 - RNA, 19 nt, Artificial Sequence
  Description of Artificial Sequence: Synthetic oligonucleotide
  Sense strand starting at position 2272 of SEQ ID NO: 1563135
uccauuacacuuugagaug

SEQ ID NO: 1797834 - RNA, 19 nt, Artificial Sequence
  Description of Artificial Sequence: Synthetic oligonucleotide
  Antisense strand to SEQ ID NO: 1797833
caucucaaaguguaaugga

SEQ ID NO: 1797835 - RNA, 19 nt, Artificial Sequence
  Description of Artificial Sequence: Synthetic oligonucleotide
  Sense strand starting at position 3063 of SEQ ID NO: 1563135
aaguacaugcuguaaggaa

SEQ ID NO: 1797836 - RNA, 19 nt, Artificial Sequence
  Description of Artificial Sequence: Synthetic oligonucleotide
  Antisense strand to SEQ ID NO: 1797835
uuccuuacagcauguacuu

SEQ ID NO: 1797837 - RNA, 19 nt, Artificial Sequence
  Description of Artificial Sequence: Synthetic oligonucleotide
  Sense strand starting at position 3172 of SEQ ID NO: 1563135
gggcuaggauugucauacu

SEQ ID NO: 1797838 - RNA, 19 nt, Artificial Sequence
  Description of Artificial Sequence: Synthetic oligonucleotide
  Antisense strand to SEQ ID NO: 1797837
aguaugacaauccuagccc

SEQ ID NO: 1797839 - RNA, 19 nt, Artificial Sequence
  Description of Artificial Sequence: Synthetic oligonucleotide
  Sense strand starting at position 3180 of SEQ ID NO: 1563135
auugucauacuagggaaau

SEQ ID NO: 1797840 - RNA, 19 nt, Artificial Sequence
  Description of Artificial Sequence: Synthetic oligonucleotide
  Antisense strand to SEQ ID NO: 1797839
auuucccuaguaugacaau

SEQ ID NO: 1797841 - RNA, 19 nt, Artificial Sequence
  Description of Artificial Sequence: Synthetic oligonucleotide
  Sense strand starting at position 3246 of SEQ ID NO: 1563135
cugagauugucauccuagg

SEQ ID NO: 1797842 - RNA, 19 nt, Artificial Sequence
  Description of Artificial Sequence: Synthetic oligonucleotide
  Antisense strand to SEQ ID NO: 1797841
ccuaggaugacaaucucag

SEQ ID NO: 1797843 - RNA, 19 nt, Artificial Sequence
  Description of Artificial Sequence: Synthetic oligonucleotide
  Sense strand starting at position 3251 of SEQ ID NO: 1563135
auugucauccuagggaaau

SEQ ID NO: 1797844 - RNA, 19 nt, Artificial Sequence
  Description of Artificial Sequence: Synthetic oligonucleotide
  Antisense strand to SEQ ID NO: 1797843
auuucccuaggaugacaau

SEQ ID NO: 1797845 - RNA, 19 nt, Artificial Sequence
  Description of Artificial Sequence: Synthetic oligonucleotide
  Sense strand starting at position 3263 of SEQ ID NO: 1563135
gggaaauggccuugagcug

SEQ ID NO: 1797846 - RNA, 19 nt, Artificial Sequence
  Description of Artificial Sequence: Synthetic oligonucleotide
  Antisense strand to SEQ ID NO: 1797845
cagcucaaggccauuuccc

SEQ ID NO: 1797847 - RNA, 19 nt, Artificial Sequence
  Description of Artificial Sequence: Synthetic oligonucleotide
  Sense strand starting at position 3264 of SEQ ID NO: 1563135
ggaaauggccuugagcuga

SEQ ID NO: 1797848 - RNA, 19 nt, Artificial Sequence
  Description of Artificial Sequence: Synthetic oligonucleotide
  Antisense strand to SEQ ID NO: 1797847
ucagcucaaggccauuucc

SEQ ID NO: 1797849 - RNA, 19 nt, Artificial Sequence
  Description of Artificial Sequence: Synthetic oligonucleotide
  Sense strand starting at position 3268 of SEQ ID NO: 1563135
auggccuugagcugauaga

SEQ ID NO: 1797850 - RNA, 19 nt, Artificial Sequence
  Description of Artificial Sequence: Synthetic oligonucleotide
  Antisense strand to SEQ ID NO: 1797849
ucuaucagcucaaggccau

SEQ ID NO: 1797851 - RNA, 19 nt, Artificial Sequence
  Description of Artificial Sequence: Synthetic oligonucleotide
  Sense strand starting at position 3269 of SEQ ID NO: 1563135
uggccuugagcugauagaa

SEQ ID NO: 1797852 - RNA, 19 nt, Artificial Sequence
  Description of Artificial Sequence: Synthetic oligonucleotide
  Antisense strand to SEQ ID NO: 1797851
uucuaucagcucaaggcca

SEQ ID NO: 1797853 - RNA, 19 nt, Artificial Sequence
  Description of Artificial Sequence: Synthetic oligonucleotide
  Sense strand starting at position 3343 of SEQ ID NO: 1563135
ggaugaaauugugccgaaa

SEQ ID NO: 1797854 - RNA, 19 nt, Artificial Sequence
  Description of Artificial Sequence: Synthetic oligonucleotide
  Antisense strand to SEQ ID NO: 1797853
uuucggcacaauuucaucc

SEQ ID NO: 1797855 - RNA, 19 nt, Artificial Sequence
  Description of Artificial Sequence: Synthetic oligonucleotide
  Sense strand starting at position 3368 of SEQ ID NO: 1563135
guucuuauaggccaaaguu

SEQ ID NO: 1797856 - RNA, 19 nt, Artificial Sequence
  Description of Artificial Sequence: Synthetic oligonucleotide
  Antisense strand to SEQ ID NO: 1797855
aacuuuggccuauaagaac

SEQ ID NO: 1797857 - RNA, 19 nt, Artificial Sequence
  Description of Artificial Sequence: Synthetic oligonucleotide
  Sense strand starting at position 3419 of SEQ ID NO: 1563135
cugacuaaaguuugaucau

SEQ ID NO: 1797858 - RNA, 19 nt, Artificial Sequence
  Description of Artificial Sequence: Synthetic oligonucleotide
  Antisense strand to SEQ ID NO: 1797857
augaucaaacuuuagucag

SEQ ID NO: 1797859 - RNA, 19 nt, Artificial Sequence
  Description of Artificial Sequence: Synthetic oligonucleotide
  Sense strand starting at position 3768 of SEQ ID NO: 1563135
ccugucauccuggaggcua

SEQ ID NO: 1797860 - RNA, 19 nt, Artificial Sequence
  Description of Artificial Sequence: Synthetic oligonucleotide
  Antisense strand to SEQ ID NO: 1797859
uagccuccaggaugacagg

SEQ ID NO: 1797861 - RNA, 19 nt, Artificial Sequence
  Description of Artificial Sequence: Synthetic oligonucleotide
  Sense strand starting at position 3815 of SEQ ID NO: 1563135
augugaaaccaaugagcaa

SEQ ID NO: 1797862 - RNA, 19 nt, Artificial Sequence
  Description of Artificial Sequence: Synthetic oligonucleotide
  Antisense strand to SEQ ID NO: 1797861
uugcucauugguuucacau

SEQ ID NO: 1797863 - RNA, 19 nt, Artificial Sequence
  Description of Artificial Sequence: Synthetic oligonucleotide
  Sense strand starting at position 3923 of SEQ ID NO: 1563135
uuggucuguacugaguaga

SEQ ID NO: 1797864 - RNA, 19 nt, Artificial Sequence
  Description of Artificial Sequence: Synthetic oligonucleotide
  Antisense strand to SEQ ID NO: 1797863
ucuacucaguacagaccaa

SEQ ID NO: 1797865 - RNA, 19 nt, Artificial Sequence
  Description of Artificial Sequence: Synthetic oligonucleotide
  Sense strand starting at position 196 of SEQ ID NO: 1563136
uggagaagucaggguauca

SEQ ID NO: 1797866 - RNA, 19 nt, Artificial Sequence
  Description of Artificial Sequence: Synthetic oligonucleotide
  Antisense strand to SEQ ID NO: 1797865
ugauacccugacuucucca

SEQ ID NO: 1797867 - RNA, 19 nt, Artificial Sequence
  Description of Artificial Sequence: Synthetic oligonucleotide
  Sense strand starting at position 333 of SEQ ID NO: 1563136
cuggguuguagagaucuac

SEQ ID NO: 1797868 - RNA, 19 nt, Artificial Sequence
  Description of Artificial Sequence: Synthetic oligonucleotide
  Antisense strand to SEQ ID NO: 1797867
guagaucucuacaacccag

SEQ ID NO: 1797869 - RNA, 19 nt, Artificial Sequence
  Description of Artificial Sequence: Synthetic oligonucleotide
  Sense strand starting at position 337 of SEQ ID NO: 1563136
guuguagagaucuaccuug

SEQ ID NO: 1797870 - RNA, 19 nt, Artificial Sequence
  Description of Artificial Sequence: Synthetic oligonucleotide
  Antisense strand to SEQ ID NO: 1797869
caagguagaucucuacaac

SEQ ID NO: 1797871 - RNA, 19 nt, Artificial Sequence
  Description of Artificial Sequence: Synthetic oligonucleotide
  Sense strand starting at position 342 of SEQ ID NO: 1563136
agagaucuaccuugcacac

SEQ ID NO: 1797872 - RNA, 19 nt, Artificial Sequence
  Description of Artificial Sequence: Synthetic oligonucleotide
  Antisense strand to SEQ ID NO: 1797871
gugugcaagguagaucucu

SEQ ID NO: 1797873 - RNA, 19 nt, Artificial Sequence
  Description of Artificial Sequence: Synthetic oligonucleotide
  Sense strand starting at position 421 of SEQ ID NO: 1563136
agcugaaaugcuuauauau

SEQ ID NO: 1797874 - RNA, 19 nt, Artificial Sequence
  Description of Artificial Sequence: Synthetic oligonucleotide
  Antisense strand to SEQ ID NO: 1797873
auauauaagcauuucagcu

SEQ ID NO: 1797875 - RNA, 19 nt, Artificial Sequence
  Description of Artificial Sequence: Synthetic oligonucleotide
  Sense strand starting at position 453 of SEQ ID NO: 1563136
cgggucaauuuggauaaga

SEQ ID NO: 1797876 - RNA, 19 nt, Artificial Sequence
  Description of Artificial Sequence: Synthetic oligonucleotide
  Antisense strand to SEQ ID NO: 1797875
ucuuauccaaauugacccg

SEQ ID NO: 1797877 - RNA, 19 nt, Artificial Sequence
  Description of Artificial Sequence: Synthetic oligonucleotide
  Sense strand starting at position 508 of SEQ ID NO: 1563136
cauauauagguuuaggcua

SEQ ID NO: 1797878 - RNA, 19 nt, Artificial Sequence
  Description of Artificial Sequence: Synthetic oligonucleotide
  Antisense strand to SEQ ID NO: 1797877
uagccuaaaccuauauaug

SEQ ID NO: 1797879 - RNA, 19 nt, Artificial Sequence
  Description of Artificial Sequence: Synthetic oligonucleotide
  Sense strand starting at position 556 of SEQ ID NO: 1563136
cauugagauguuugaacuu

SEQ ID NO: 1797880 - RNA, 19 nt, Artificial Sequence
  Description of Artificial Sequence: Synthetic oligonucleotide
  Antisense strand to SEQ ID NO: 1797879
aaguucaaacaucucaaug

SEQ ID NO: 1797881 - RNA, 19 nt, Artificial Sequence
  Description of Artificial Sequence: Synthetic oligonucleotide
  Sense strand starting at position 568 of SEQ ID NO: 1563136
ugaacuugaugcuuaggau

SEQ ID NO: 1797882 - RNA, 19 nt, Artificial Sequence
  Description of Artificial Sequence: Synthetic oligonucleotide
  Antisense strand to SEQ ID NO: 1797881
auccuaagcaucaaguuca

SEQ ID NO: 1797883 - RNA, 19 nt, Artificial Sequence
  Description of Artificial Sequence: Synthetic oligonucleotide
  Sense strand starting at position 659 of SEQ ID NO: 1563136
guaugaugaccugggaauc

SEQ ID NO: 1797884 - RNA, 19 nt, Artificial Sequence
  Description of Artificial Sequence: Synthetic oligonucleotide
  Antisense strand to SEQ ID NO: 1797883
gauucccaggucaucauac

SEQ ID NO: 1797885 - RNA, 19 nt, Artificial Sequence
  Description of Artificial Sequence: Synthetic oligonucleotide
  Sense strand starting at position 1230 of SEQ ID NO: 1563136
cuacguaagaccugagauu

SEQ ID NO: 1797886 - RNA, 19 nt, Artificial Sequence
  Description of Artificial Sequence: Synthetic oligonucleotide
  Antisense strand to SEQ ID NO: 1797885
aaucucaggucuuacguag

SEQ ID NO: 1797887 - RNA, 19 nt, Artificial Sequence
  Description of Artificial Sequence: Synthetic oligonucleotide
  Sense strand starting at position 1264 of SEQ ID NO: 1563136
caguuaagagcucaguaga

SEQ ID NO: 1797888 - RNA, 19 nt, Artificial Sequence
  Description of Artificial Sequence: Synthetic oligonucleotide
  Antisense strand to SEQ ID NO: 1797887
ucuacugagcucuuaacug

SEQ ID NO: 1797889 - RNA, 19 nt, Artificial Sequence
  Description of Artificial Sequence: Synthetic oligonucleotide
  Sense strand starting at position 1267 of SEQ ID NO: 1563136
uuaagagcucaguagacuu

SEQ ID NO: 1797890 - RNA, 19 nt, Artificial Sequence
  Description of Artificial Sequence: Synthetic oligonucleotide
  Antisense strand to SEQ ID NO: 1797889
aagucuacugagcucuuaa

SEQ ID NO: 1797891 - RNA, 19 nt, Artificial Sequence
  Description of Artificial Sequence: Synthetic oligonucleotide
  Sense strand starting at position 1350 of SEQ ID NO: 1563136
ccaaguauuagagggcuau

SEQ ID NO: 1797892 - RNA, 19 nt, Artificial Sequence
  Description of Artificial Sequence: Synthetic oligonucleotide
  Antisense strand to SEQ ID NO: 1797891
auagcccucuaauacuugg

SEQ ID NO: 1797893 - RNA, 19 nt, Artificial Sequence
  Description of Artificial Sequence: Synthetic oligonucleotide
  Sense strand starting at position 1351 of SEQ ID NO: 1563136
caaguauuagagggcuauu

SEQ ID NO: 1797894 - RNA, 19 nt, Artificial Sequence
  Description of Artificial Sequence: Synthetic oligonucleotide
  Antisense strand to SEQ ID NO: 1797893
aauagcccucuaauacuug

SEQ ID NO: 1797895 - RNA, 19 nt, Artificial Sequence
  Description of Artificial Sequence: Synthetic oligonucleotide
  Sense strand starting at position 1676 of SEQ ID NO: 1563136
caggaaucucugugaaacc

SEQ ID NO: 1797896 - RNA, 19 nt, Artificial Sequence
  Description of Artificial Sequence: Synthetic oligonucleotide
  Antisense strand to SEQ ID NO: 1797895
gguuucacagagauuccug

SEQ ID NO: 1797897 - RNA, 19 nt, Artificial Sequence
  Description of Artificial Sequence: Synthetic oligonucleotide
  Sense strand starting at position 1794 of SEQ ID NO: 1563136
cauagagucccucauguga

SEQ ID NO: 1797898 - RNA, 19 nt, Artificial Sequence
  Description of Artificial Sequence: Synthetic oligonucleotide
  Antisense strand to SEQ ID NO: 1797897
ucacaugagggacucuaug

SEQ ID NO: 1797899 - RNA, 19 nt, Artificial Sequence
  Description of Artificial Sequence: Synthetic oligonucleotide
  Sense strand starting at position 1894 of SEQ ID NO: 1563136
uuuagauguuuggcugaaa

SEQ ID NO: 1797900 - RNA, 19 nt, Artificial Sequence
  Description of Artificial Sequence: Synthetic oligonucleotide
  Antisense strand to SEQ ID NO: 1797899
uuucagccaaacaucuaaa

SEQ ID NO: 1797901 - RNA, 19 nt, Artificial Sequence
  Description of Artificial Sequence: Synthetic oligonucleotide
  Sense strand starting at position 2189 of SEQ ID NO: 1563136
uucuguuaucucuaugagg

SEQ ID NO: 1797902 - RNA, 19 nt, Artificial Sequence
  Description of Artificial Sequence: Synthetic oligonucleotide
  Antisense strand to SEQ ID NO: 1797901
ccucauagagauaacagaa

SEQ ID NO: 1797903 - RNA, 19 nt, Artificial Sequence
  Description of Artificial Sequence: Synthetic oligonucleotide
  Sense strand starting at position 2277 of SEQ ID NO: 1563136
cugcgagaccuccagaaca

SEQ ID NO: 1797904 - RNA, 19 nt, Artificial Sequence
  Description of Artificial Sequence: Synthetic oligonucleotide
  Antisense strand to SEQ ID NO: 1797903
uguucuggaggucucgcag

SEQ ID NO: 1797905 - RNA, 19 nt, Artificial Sequence
  Description of Artificial Sequence: Synthetic oligonucleotide
  Sense strand starting at position 2279 of SEQ ID NO: 1563136
gcgagaccuccagaacaau

SEQ ID NO: 1797906 - RNA, 19 nt, Artificial Sequence
  Description of Artificial Sequence: Synthetic oligonucleotide
  Antisense strand to SEQ ID NO: 1797905
auuguucuggaggucucgc

SEQ ID NO: 1797907 - RNA, 19 nt, Artificial Sequence
  Description of Artificial Sequence: Synthetic oligonucleotide
  Sense strand starting at position 2326 of SEQ ID NO: 1563136
guuauauugcaagagaucu

SEQ ID NO: 1797908 - RNA, 19 nt, Artificial Sequence
  Description of Artificial Sequence: Synthetic oligonucleotide
  Antisense strand to SEQ ID NO: 1797907
agaucucuugcaauauaac

SEQ ID NO: 1797909 - RNA, 19 nt, Artificial Sequence
  Description of Artificial Sequence: Synthetic oligonucleotide
  Sense strand starting at position 2495 of SEQ ID NO: 1563136
gucagaugucccuaccauu

SEQ ID NO: 1797910 - RNA, 19 nt, Artificial Sequence
  Description of Artificial Sequence: Synthetic oligonucleotide
  Antisense strand to SEQ ID NO: 1797909
aaugguagggacaucugac

SEQ ID NO: 1797911 - RNA, 19 nt, Artificial Sequence
  Description of Artificial Sequence: Synthetic oligonucleotide
  Sense strand starting at position 2589 of SEQ ID NO: 1563136
uccagucugccucaagaua

SEQ ID NO: 1797912 - RNA, 19 nt, Artificial Sequence
  Description of Artificial Sequence: Synthetic oligonucleotide
  Antisense strand to SEQ ID NO: 1797911
uaucuugaggcagacugga

SEQ ID NO: 1797913 - RNA, 19 nt, Artificial Sequence
  Description of Artificial Sequence: Synthetic oligonucleotide
  Sense strand starting at position 2665 of SEQ ID NO: 1563136
agaguuaccucuucuugac

SEQ ID NO: 1797914 - RNA, 19 nt, Artificial Sequence
  Description of Artificial Sequence: Synthetic oligonucleotide
  Antisense strand to SEQ ID NO: 1797913
gucaagaagagguaacucu

SEQ ID NO: 1797915 - RNA, 19 nt, Artificial Sequence
  Description of Artificial Sequence: Synthetic oligonucleotide
  Sense strand starting at position 2689 of SEQ ID NO: 1563136
cguuucuauagagaacagu

SEQ ID NO: 1797916 - RNA, 19 nt, Artificial Sequence
  Description of Artificial Sequence: Synthetic oligonucleotide
  Antisense strand to SEQ ID NO: 1797915
acuguucucuauagaaacg

SEQ ID NO: 1797917 - RNA, 19 nt, Artificial Sequence
  Description of Artificial Sequence: Synthetic oligonucleotide
  Sense strand starting at position 2768 of SEQ ID NO: 1563136
ugaccuucccuaugagaaa

SEQ ID NO: 1797918 - RNA, 19 nt, Artificial Sequence
  Description of Artificial Sequence: Synthetic oligonucleotide
  Antisense strand to SEQ ID NO: 1797917
uuucucauagggaagguca

SEQ ID NO: 1797919 - RNA, 19 nt, Artificial Sequence
  Description of Artificial Sequence: Synthetic oligonucleotide
  Sense strand starting at position 2780 of SEQ ID NO: 1563136
ugagaaauaaguuguccag

SEQ ID NO: 1797920 - RNA, 19 nt, Artificial Sequence
  Description of Artificial Sequence: Synthetic oligonucleotide
  Antisense strand to SEQ ID NO: 1797919
cuggacaacuuauuucuca

SEQ ID NO: 1797921 - RNA, 19 nt, Artificial Sequence
  Description of Artificial Sequence: Synthetic oligonucleotide
  Sense strand starting at position 2782 of SEQ ID NO: 1563136
agaaauaaguuguccagag

SEQ ID NO: 1797922 - RNA, 19 nt, Artificial Sequence
  Description of Artificial Sequence: Synthetic oligonucleotide
  Antisense strand to SEQ ID NO: 1797921
cucuggacaacuuauuucu

SEQ ID NO: 1797923 - RNA, 19 nt, Artificial Sequence
  Description of Artificial Sequence: Synthetic oligonucleotide
  Sense strand starting at position 2783 of SEQ ID NO: 1563136
gaaauaaguuguccagaga

SEQ ID NO: 1797924 - RNA, 19 nt, Artificial Sequence
  Description of Artificial Sequence: Synthetic oligonucleotide
  Antisense strand to SEQ ID NO: 1797923
ucucuggacaacuuauuuc

SEQ ID NO: 1797925 - RNA, 19 nt, Artificial Sequence
  Description of Artificial Sequence: Synthetic oligonucleotide
  Sense strand starting at position 2798 of SEQ ID NO: 1563136
gagaaaggcugaucuaguu

SEQ ID NO: 1797926 - RNA, 19 nt, Artificial Sequence
  Description of Artificial Sequence: Synthetic oligonucleotide
  Antisense strand to SEQ ID NO: 1797925
aacuagaucagccuuucuc

SEQ ID NO: 1797927 - RNA, 19 nt, Artificial Sequence
  Description of Artificial Sequence: Synthetic oligonucleotide
  Sense strand starting at position 2804 of SEQ ID NO: 1563136
ggcugaucuaguugagaca

SEQ ID NO: 1797928 - RNA, 19 nt, Artificial Sequence
  Description of Artificial Sequence: Synthetic oligonucleotide
  Antisense strand to SEQ ID NO: 1797927
ugucucaacuagaucagcc

SEQ ID NO: 1797929 - RNA, 19 nt, Artificial Sequence
  Description of Artificial Sequence: Synthetic oligonucleotide
  Sense strand starting at position 2932 of SEQ ID NO: 1563136
uccauuacacuuugagaug

SEQ ID NO: 1797930 - RNA, 19 nt, Artificial Sequence
  Description of Artificial Sequence: Synthetic oligonucleotide
  Antisense strand to SEQ ID NO: 1797929
caucucaaaguguaaugga

SEQ ID NO: 1797931 - RNA, 19 nt, Artificial Sequence
  Description of Artificial Sequence: Synthetic oligonucleotide
  Sense strand starting at position 3723 of SEQ ID NO: 1563136
aaguacaugcuguaaggaa

SEQ ID NO: 1797932 - RNA, 19 nt, Artificial Sequence
  Description of Artificial Sequence: Synthetic oligonucleotide
  Antisense strand to SEQ ID NO: 1797931
uuccuuacagcauguacuu

SEQ ID NO: 1797933 - RNA, 19 nt, Artificial Sequence
  Description of Artificial Sequence: Synthetic oligonucleotide
  Sense strand starting at position 3840 of SEQ ID NO: 1563136
auugucauacuagggaaau

SEQ ID NO: 1797934 - RNA, 19 nt, Artificial Sequence
  Description of Artificial Sequence: Synthetic oligonucleotide
  Antisense strand to SEQ ID NO: 1797933
auuucccuaguaugacaau

SEQ ID NO: 1797935 - RNA, 19 nt, Artificial Sequence
  Description of Artificial Sequence: Synthetic oligonucleotide
  Sense strand starting at position 3906 of SEQ ID NO: 1563136
cugagauugucauccuagg

SEQ ID NO: 1797936 - RNA, 19 nt, Artificial Sequence
  Description of Artificial Sequence: Synthetic oligonucleotide
  Antisense strand to SEQ ID NO: 1797935
ccuaggaugacaaucucag

SEQ ID NO: 1797937 - RNA, 19 nt, Artificial Sequence
  Description of Artificial Sequence: Synthetic oligonucleotide
  Sense strand starting at position 3911 of SEQ ID NO: 1563136
auugucauccuagggaaau

SEQ ID NO: 1797938 - RNA, 19 nt, Artificial Sequence
  Description of Artificial Sequence: Synthetic oligonucleotide
  Antisense strand to SEQ ID NO: 1797937
auuucccuaggaugacaau

SEQ ID NO: 1797939 - RNA, 19 nt, Artificial Sequence
  Description of Artificial Sequence: Synthetic oligonucleotide
  Sense strand starting at position 3923 of SEQ ID NO: 1563136
gggaaauggccuugagcug

SEQ ID NO: 1797940 - RNA, 19 nt, Artificial Sequence
  Description of Artificial Sequence: Synthetic oligonucleotide
  Antisense strand to SEQ ID NO: 1797939
cagcucaaggccauuuccc

SEQ ID NO: 1797941 - RNA, 19 nt, Artificial Sequence
  Description of Artificial Sequence: Synthetic oligonucleotide
  Sense strand starting at position 3924 of SEQ ID NO: 1563136
ggaaauggccuugagcuga

SEQ ID NO: 1797942 - RNA, 19 nt, Artificial Sequence
  Description of Artificial Sequence: Synthetic oligonucleotide
  Antisense strand to SEQ ID NO: 1797941
ucagcucaaggccauuucc

SEQ ID NO: 1797943 - RNA, 19 nt, Artificial Sequence
  Description of Artificial Sequence: Synthetic oligonucleotide
  Sense strand starting at position 3929 of SEQ ID NO: 1563136
uggccuugagcugauagaa

SEQ ID NO: 1797944 - RNA, 19 nt, Artificial Sequence
  Description of Artificial Sequence: Synthetic oligonucleotide
  Antisense strand to SEQ ID NO: 1797943
uucuaucagcucaaggcca

SEQ ID NO: 1797945 - RNA, 19 nt, Artificial Sequence
  Description of Artificial Sequence: Synthetic oligonucleotide
  Sense strand starting at position 307 of SEQ ID NO: 1563137
augucaacccugugaugau

SEQ ID NO: 1797946 - RNA, 19 nt, Artificial Sequence
  Description of Artificial Sequence: Synthetic oligonucleotide
  Antisense strand to SEQ ID NO: 1797945
aucaucacaggguugacau

SEQ ID NO: 1797947 - RNA, 19 nt, Artificial Sequence
  Description of Artificial Sequence: Synthetic oligonucleotide
  Sense strand starting at position 353 of SEQ ID NO: 1563137
guaaccugucuagaucaga

SEQ ID NO: 1797948 - RNA, 19 nt, Artificial Sequence
  Description of Artificial Sequence: Synthetic oligonucleotide
  Antisense strand to SEQ ID NO: 1797947
ucugaucuagacagguuac

SEQ ID NO: 1797949 - RNA, 19 nt, Artificial Sequence
  Description of Artificial Sequence: Synthetic oligonucleotide
  Sense strand starting at position 405 of SEQ ID NO: 1563137
uaggcaaucuguuuccaga

SEQ ID NO: 1797950 - RNA, 19 nt, Artificial Sequence
  Description of Artificial Sequence: Synthetic oligonucleotide
  Antisense strand to SEQ ID NO: 1797949
ucuggaaacagauugccua

SEQ ID NO: 1797951 - RNA, 19 nt, Artificial Sequence
  Description of Artificial Sequence: Synthetic oligonucleotide
  Sense strand starting at position 407 of SEQ ID NO: 1563137
ggcaaucuguuuccagaga

SEQ ID NO: 1797952 - RNA, 19 nt, Artificial Sequence
  Description of Artificial Sequence: Synthetic oligonucleotide
  Antisense strand to SEQ ID NO: 1797951
ucucuggaaacagauugcc

SEQ ID NO: 1797953 - RNA, 19 nt, Artificial Sequence
  Description of Artificial Sequence: Synthetic oligonucleotide
  Sense strand starting at position 649 of SEQ ID NO: 1563137
auguaccuaaugugugaua

SEQ ID NO: 1797954 - RNA, 19 nt, Artificial Sequence
  Description of Artificial Sequence: Synthetic oligonucleotide
  Antisense strand to SEQ ID NO: 1797953
uaucacacauuagguacau

SEQ ID NO: 1797955 - RNA, 19 nt, Artificial Sequence
  Description of Artificial Sequence: Synthetic oligonucleotide
  Sense strand starting at position 650 of SEQ ID NO: 1563137
uguaccuaaugugugauaa

SEQ ID NO: 1797956 - RNA, 19 nt, Artificial Sequence
  Description of Artificial Sequence: Synthetic oligonucleotide
  Antisense strand to SEQ ID NO: 1797955
uuaucacacauuagguaca

SEQ ID NO: 1797957 - RNA, 19 nt, Artificial Sequence
  Description of Artificial Sequence: Synthetic oligonucleotide
  Sense strand starting at position 651 of SEQ ID NO: 1563137
guaccuaaugugugauaau

SEQ ID NO: 1797958 - RNA, 19 nt, Artificial Sequence
  Description of Artificial Sequence: Synthetic oligonucleotide
  Antisense strand to SEQ ID NO: 1797957
auuaucacacauuagguac

SEQ ID NO: 1797959 - RNA, 19 nt, Artificial Sequence
  Description of Artificial Sequence: Synthetic oligonucleotide
  Sense strand starting at position 718 of SEQ ID NO: 1563137
ggugaaauuugagaccaag

SEQ ID NO: 1797960 - RNA, 19 nt, Artificial Sequence
  Description of Artificial Sequence: Synthetic oligonucleotide
  Antisense strand to SEQ ID NO: 1797959
cuuggucucaaauuucacc

SEQ ID NO: 1797961 - RNA, 19 nt, Artificial Sequence
  Description of Artificial Sequence: Synthetic oligonucleotide
  Sense strand starting at position 801 of SEQ ID NO: 1563137
ucuguacucccagagguga

SEQ ID NO: 1797962 - RNA, 19 nt, Artificial Sequence
  Description of Artificial Sequence: Synthetic oligonucleotide
  Antisense strand to SEQ ID NO: 1797961
ucaccucugggaguacaga

SEQ ID NO: 1797963 - RNA, 19 nt, Artificial Sequence
  Description of Artificial Sequence: Synthetic oligonucleotide
  Sense strand starting at position 803 of SEQ ID NO: 1563137
uguacucccagaggugaaa

SEQ ID NO: 1797964 - RNA, 19 nt, Artificial Sequence
  Description of Artificial Sequence: Synthetic oligonucleotide
  Antisense strand to SEQ ID NO: 1797963
uuucaccucugggaguaca

SEQ ID NO: 1797965 - RNA, 19 nt, Artificial Sequence
  Description of Artificial Sequence: Synthetic oligonucleotide
  Sense strand starting at position 935 of SEQ ID NO: 1563137
cuggaagggaagugguaau

SEQ ID NO: 1797966 - RNA, 19 nt, Artificial Sequence
  Description of Artificial Sequence: Synthetic oligonucleotide
  Antisense strand to SEQ ID NO: 1797965
auuaccacuucccuuccag

SEQ ID NO: 1797967 - RNA, 19 nt, Artificial Sequence
  Description of Artificial Sequence: Synthetic oligonucleotide
  Sense strand starting at position 1166 of SEQ ID NO: 1563137
agggucucacagugaauua

SEQ ID NO: 1797968 - RNA, 19 nt, Artificial Sequence
  Description of Artificial Sequence: Synthetic oligonucleotide
  Antisense strand to SEQ ID NO: 1797967
uaauucacugugagacccu

SEQ ID NO: 1797969 - RNA, 19 nt, Artificial Sequence
  Description of Artificial Sequence: Synthetic oligonucleotide
  Sense strand starting at position 1167 of SEQ ID NO: 1563137
gggucucacagugaauuag

SEQ ID NO: 1797970 - RNA, 19 nt, Artificial Sequence
  Description of Artificial Sequence: Synthetic oligonucleotide
  Antisense strand to SEQ ID NO: 1797969
cuaauucacugugagaccc

SEQ ID NO: 1797971 - RNA, 19 nt, Artificial Sequence
  Description of Artificial Sequence: Synthetic oligonucleotide
  Sense strand starting at position 1179 of SEQ ID NO: 1563137
gaauuaggaugagaauaga

SEQ ID NO: 1797972 - RNA, 19 nt, Artificial Sequence
  Description of Artificial Sequence: Synthetic oligonucleotide
  Antisense strand to SEQ ID NO: 1797971
ucuauucucauccuaauuc

SEQ ID NO: 1797973 - RNA, 19 nt, Artificial Sequence
  Description of Artificial Sequence: Synthetic oligonucleotide
  Sense strand starting at position 1749 of SEQ ID NO: 1563137
agagacagauucuaagaaa

SEQ ID NO: 1797974 - RNA, 19 nt, Artificial Sequence
  Description of Artificial Sequence: Synthetic oligonucleotide
  Antisense strand to SEQ ID NO: 1797973
uuucuuagaaucugucucu

SEQ ID NO: 1797975 - RNA, 19 nt, Artificial Sequence
  Description of Artificial Sequence: Synthetic oligonucleotide
  Sense strand starting at position 2022 of SEQ ID NO: 1563137
ccuuccuugcuagagauaa

SEQ ID NO: 1797976 - RNA, 19 nt, Artificial Sequence
  Description of Artificial Sequence: Synthetic oligonucleotide
  Antisense strand to SEQ ID NO: 1797975
uuaucucuagcaaggaagg

SEQ ID NO: 1797977 - RNA, 19 nt, Artificial Sequence
  Description of Artificial Sequence: Synthetic oligonucleotide
  Sense strand starting at position 2156 of SEQ ID NO: 1563137
uccacauagagcugggaua

SEQ ID NO: 1797978 - RNA, 19 nt, Artificial Sequence
  Description of Artificial Sequence: Synthetic oligonucleotide
  Antisense strand to SEQ ID NO: 1797977
uaucccagcucuaugugga

SEQ ID NO: 1797979 - RNA, 19 nt, Artificial Sequence
  Description of Artificial Sequence: Synthetic oligonucleotide
  Sense strand starting at position 2299 of SEQ ID NO: 1563137
ugcuuaugagcucaaacag

SEQ ID NO: 1797980 - RNA, 19 nt, Artificial Sequence
  Description of Artificial Sequence: Synthetic oligonucleotide
  Antisense strand to SEQ ID NO: 1797979
cuguuugagcucauaagca

SEQ ID NO: 1797981 - RNA, 19 nt, Artificial Sequence
  Description of Artificial Sequence: Synthetic oligonucleotide
  Sense strand starting at position 2349 of SEQ ID NO: 1563137
guaacaauuugguaauauc

SEQ ID NO: 1797982 - RNA, 19 nt, Artificial Sequence
  Description of Artificial Sequence: Synthetic oligonucleotide
  Antisense strand to SEQ ID NO: 1797981
gauauuaccaaauuguuac

SEQ ID NO: 1797983 - RNA, 19 nt, Artificial Sequence
  Description of Artificial Sequence: Synthetic oligonucleotide
  Sense strand starting at position 2421 of SEQ ID NO: 1563137
uugacugagugcuuacaau

SEQ ID NO: 1797984 - RNA, 19 nt, Artificial Sequence
  Description of Artificial Sequence: Synthetic oligonucleotide
  Antisense strand to SEQ ID NO: 1797983
auuguaagcacucagucaa

SEQ ID NO: 1797985 - RNA, 19 nt, Artificial Sequence
  Description of Artificial Sequence: Synthetic oligonucleotide
  Sense strand starting at position 2554 of SEQ ID NO: 1563137
ugagguaacuuguugauaa

SEQ ID NO: 1797986 - RNA, 19 nt, Artificial Sequence
  Description of Artificial Sequence: Synthetic oligonucleotide
  Antisense strand to SEQ ID NO: 1797985
uuaucaacaaguuaccuca

SEQ ID NO: 1797987 - RNA, 19 nt, Artificial Sequence
  Description of Artificial Sequence: Synthetic oligonucleotide
  Sense strand starting at position 2556 of SEQ ID NO: 1563137
agguaacuuguugauaauu

SEQ ID NO: 1797988 - RNA, 19 nt, Artificial Sequence
  Description of Artificial Sequence: Synthetic oligonucleotide
  Antisense strand to SEQ ID NO: 1797987
aauuaucaacaaguuaccu

SEQ ID NO: 1797989 - RNA, 19 nt, Artificial Sequence
  Description of Artificial Sequence: Synthetic oligonucleotide
  Sense strand starting at position 2610 of SEQ ID NO: 1563137
uaggcaauguaguuacaga

SEQ ID NO: 1797990 - RNA, 19 nt, Artificial Sequence
  Description of Artificial Sequence: Synthetic oligonucleotide
  Antisense strand to SEQ ID NO: 1797989
ucuguaacuacauugccua

SEQ ID NO: 1797991 - RNA, 19 nt, Artificial Sequence
  Description of Artificial Sequence: Synthetic oligonucleotide
  Sense strand starting at position 2611 of SEQ ID NO: 1563137
aggcaauguaguuacagaa

SEQ ID NO: 1797992 - RNA, 19 nt, Artificial Sequence
  Description of Artificial Sequence: Synthetic oligonucleotide
  Antisense strand to SEQ ID NO: 1797991
uucuguaacuacauugccu

SEQ ID NO: 1797993 - RNA, 19 nt, Artificial Sequence
  Description of Artificial Sequence: Synthetic oligonucleotide
  Sense strand starting at position 2809 of SEQ ID NO: 1563137
uagagcagauugucaucau

SEQ ID NO: 1797994 - RNA, 19 nt, Artificial Sequence
  Description of Artificial Sequence: Synthetic oligonucleotide
  Antisense strand to SEQ ID NO: 1797993
augaugacaaucugcucua

SEQ ID NO: 1797995 - RNA, 19 nt, Artificial Sequence
  Description of Artificial Sequence: Synthetic oligonucleotide
  Sense strand starting at position 2812 of SEQ ID NO: 1563137
agcagauugucaucauuaa

SEQ ID NO: 1797996 - RNA, 19 nt, Artificial Sequence
  Description of Artificial Sequence: Synthetic oligonucleotide
  Antisense strand to SEQ ID NO: 1797995
uuaaugaugacaaucugcu

SEQ ID NO: 1797997 - RNA, 19 nt, Artificial Sequence
  Description of Artificial Sequence: Synthetic oligonucleotide
  Sense strand starting at position 2813 of SEQ ID NO: 1563137
gcagauugucaucauuaau

SEQ ID NO: 1797998 - RNA, 19 nt, Artificial Sequence
  Description of Artificial Sequence: Synthetic oligonucleotide
  Antisense strand to SEQ ID NO: 1797997
auuaaugaugacaaucugc

SEQ ID NO: 1797999 - RNA, 19 nt, Artificial Sequence
  Description of Artificial Sequence: Synthetic oligonucleotide
  Sense strand starting at position 2913 of SEQ ID NO: 1563137
gccaauauaccauggaggu

SEQ ID NO: 1798000 - RNA, 19 nt, Artificial Sequence
  Description of Artificial Sequence: Synthetic oligonucleotide
  Antisense strand to SEQ ID NO: 1797999
accuccaugguauauuggc

SEQ ID NO: 1798001 - RNA, 19 nt, Artificial Sequence
  Description of Artificial Sequence: Synthetic oligonucleotide
  Sense strand starting at position 2914 of SEQ ID NO: 1563137
ccaauauaccauggagguu

SEQ ID NO: 1798002 - RNA, 19 nt, Artificial Sequence
  Description of Artificial Sequence: Synthetic oligonucleotide
  Antisense strand to SEQ ID NO: 1798001
aaccuccaugguauauugg

SEQ ID NO: 1798003 - RNA, 19 nt, Artificial Sequence
  Description of Artificial Sequence: Synthetic oligonucleotide
  Sense strand starting at position 2938 of SEQ ID NO: 1563137
aucugaaugcacuguaauu

SEQ ID NO: 1798004 - RNA, 19 nt, Artificial Sequence
  Description of Artificial Sequence: Synthetic oligonucleotide
  Antisense strand to SEQ ID NO: 1798003
aauuacagugcauucagau

SEQ ID NO: 1798005 - RNA, 19 nt, Artificial Sequence
  Description of Artificial Sequence: Synthetic oligonucleotide
  Sense strand starting at position 3091 of SEQ ID NO: 1563137
auaagcauuccuggaucua

SEQ ID NO: 1798006 - RNA, 19 nt, Artificial Sequence
  Description of Artificial Sequence: Synthetic oligonucleotide
  Antisense strand to SEQ ID NO: 1798005
uagauccaggaaugcuuau

SEQ ID NO: 1798007 - RNA, 19 nt, Artificial Sequence
  Description of Artificial Sequence: Synthetic oligonucleotide
  Sense strand starting at position 3178 of SEQ ID NO: 1563137
cacccagugguguauaaga

SEQ ID NO: 1798008 - RNA, 19 nt, Artificial Sequence
  Description of Artificial Sequence: Synthetic oligonucleotide
  Antisense strand to SEQ ID NO: 1798007
ucuuauacaccacugggug

SEQ ID NO: 1798009 - RNA, 19 nt, Artificial Sequence
  Description of Artificial Sequence: Synthetic oligonucleotide
  Sense strand starting at position 3180 of SEQ ID NO: 1563137
cccagugguguauaagagu

SEQ ID NO: 1798010 - RNA, 19 nt, Artificial Sequence
  Description of Artificial Sequence: Synthetic oligonucleotide
  Antisense strand to SEQ ID NO: 1798009
acucuuauacaccacuggg

SEQ ID NO: 1798011 - RNA, 19 nt, Artificial Sequence
  Description of Artificial Sequence: Synthetic oligonucleotide
  Sense strand starting at position 3186 of SEQ ID NO: 1563137
gguguauaagaguaaaugu

SEQ ID NO: 1798012 - RNA, 19 nt, Artificial Sequence
  Description of Artificial Sequence: Synthetic oligonucleotide
  Antisense strand to SEQ ID NO: 1798011
acauuuacucuuauacacc

SEQ ID NO: 1798013 - RNA, 19 nt, Artificial Sequence
  Description of Artificial Sequence: Synthetic oligonucleotide
  Sense strand starting at position 3193 of SEQ ID NO: 1563137
aagaguaaauguguaucua

SEQ ID NO: 1798014 - RNA, 19 nt, Artificial Sequence
  Description of Artificial Sequence: Synthetic oligonucleotide
  Antisense strand to SEQ ID NO: 1798013
uagauacacauuuacucuu

SEQ ID NO: 1798015 - RNA, 19 nt, Artificial Sequence
  Description of Artificial Sequence: Synthetic oligonucleotide
  Sense strand starting at position 3194 of SEQ ID NO: 1563137
agaguaaauguguaucuau

SEQ ID NO: 1798016 - RNA, 19 nt, Artificial Sequence
  Description of Artificial Sequence: Synthetic oligonucleotide
  Antisense strand to SEQ ID NO: 1798015
auagauacacauuuacucu

SEQ ID NO: 1798017 - RNA, 19 nt, Artificial Sequence
  Description of Artificial Sequence: Synthetic oligonucleotide
  Sense strand starting at position 3326 of SEQ ID NO: 1563137
uauuaaugagauugggugu

SEQ ID NO: 1798018 - RNA, 19 nt, Artificial Sequence
  Description of Artificial Sequence: Synthetic oligonucleotide
  Antisense strand to SEQ ID NO: 1798017
acacccaaucucauuaaua

SEQ ID NO: 1798019 - RNA, 19 nt, Artificial Sequence
  Description of Artificial Sequence: Synthetic oligonucleotide
  Sense strand starting at position 3329 of SEQ ID NO: 1563137
uaaugagauugggugucuu

SEQ ID NO: 1798020 - RNA, 19 nt, Artificial Sequence
  Description of Artificial Sequence: Synthetic oligonucleotide
  Antisense strand to SEQ ID NO: 1798019
aagacacccaaucucauua

SEQ ID NO: 1798021 - RNA, 19 nt, Artificial Sequence
  Description of Artificial Sequence: Synthetic oligonucleotide
  Sense strand starting at position 3357 of SEQ ID NO: 1563137
cuuuaucaguugucuauuu

SEQ ID NO: 1798022 - RNA, 19 nt, Artificial Sequence
  Description of Artificial Sequence: Synthetic oligonucleotide
  Antisense strand to SEQ ID NO: 1798021
aaauagacaacugauaaag

SEQ ID NO: 1798023 - RNA, 19 nt, Artificial Sequence
  Description of Artificial Sequence: Synthetic oligonucleotide
  Sense strand starting at position 3794 of SEQ ID NO: 1563137
ccaguucuucuagaaggua

SEQ ID NO: 1798024 - RNA, 19 nt, Artificial Sequence
  Description of Artificial Sequence: Synthetic oligonucleotide
  Antisense strand to SEQ ID NO: 1798023
uaccuucuagaagaacugg

SEQ ID NO: 1798025 - RNA, 19 nt, Artificial Sequence
  Description of Artificial Sequence: Synthetic oligonucleotide
  Sense strand starting at position 13 of SEQ ID NO: 1563138
uguuaccuccuaggagaua

SEQ ID NO: 1798026 - RNA, 19 nt, Artificial Sequence
  Description of Artificial Sequence: Synthetic oligonucleotide
  Antisense strand to SEQ ID NO: 1798025
uaucuccuaggagguaaca

SEQ ID NO: 1798027 - RNA, 19 nt, Artificial Sequence
  Description of Artificial Sequence: Synthetic oligonucleotide
  Sense strand starting at position 42 of SEQ ID NO: 1563138
cacgaaucuguugguaaug

SEQ ID NO: 1798028 - RNA, 19 nt, Artificial Sequence
  Description of Artificial Sequence: Synthetic oligonucleotide
  Antisense strand to SEQ ID NO: 1798027
cauuaccaacagauucgug

SEQ ID NO: 1798029 - RNA, 19 nt, Artificial Sequence
  Description of Artificial Sequence: Synthetic oligonucleotide
  Sense strand starting at position 43 of SEQ ID NO: 1563138
acgaaucuguugguaaugu

SEQ ID NO: 1798030 - RNA, 19 nt, Artificial Sequence
  Description of Artificial Sequence: Synthetic oligonucleotide
  Antisense strand to SEQ ID NO: 1798029
acauuaccaacagauucgu

SEQ ID NO: 1798031 - RNA, 19 nt, Artificial Sequence
  Description of Artificial Sequence: Synthetic oligonucleotide
  Sense strand starting at position 173 of SEQ ID NO: 1563138
aguucuucugaaugcacua

SEQ ID NO: 1798032 - RNA, 19 nt, Artificial Sequence
  Description of Artificial Sequence: Synthetic oligonucleotide
  Antisense strand to SEQ ID NO: 1798031
uagugcauucagaagaacu

SEQ ID NO: 1798033 - RNA, 19 nt, Artificial Sequence
  Description of Artificial Sequence: Synthetic oligonucleotide
  Sense strand starting at position 178 of SEQ ID NO: 1563138
uucugaaugcacuagaagu

SEQ ID NO: 1798034 - RNA, 19 nt, Artificial Sequence
  Description of Artificial Sequence: Synthetic oligonucleotide
  Antisense strand to SEQ ID NO: 1798033
acuucuagugcauucagaa

SEQ ID NO: 1798035 - RNA, 19 nt, Artificial Sequence
  Description of Artificial Sequence: Synthetic oligonucleotide
  Sense strand starting at position 186 of SEQ ID NO: 1563138
gcacuagaagucuaauuaa

SEQ ID NO: 1798036 - RNA, 19 nt, Artificial Sequence
  Description of Artificial Sequence: Synthetic oligonucleotide
  Antisense strand to SEQ ID NO: 1798035
uuaauuagacuucuagugc

SEQ ID NO: 1798037 - RNA, 19 nt, Artificial Sequence
  Description of Artificial Sequence: Synthetic oligonucleotide
  Sense strand starting at position 233 of SEQ ID NO: 1563138
ggaaacaauuuacacagua

SEQ ID NO: 1798038 - RNA, 19 nt, Artificial Sequence
  Description of Artificial Sequence: Synthetic oligonucleotide
  Antisense strand to SEQ ID NO: 1798037
uacuguguaaauuguuucc

SEQ ID NO: 1798039 - RNA, 19 nt, Artificial Sequence
  Description of Artificial Sequence: Synthetic oligonucleotide
  Sense strand starting at position 245 of SEQ ID NO: 1563138
cacaguauguagcuguuau

SEQ ID NO: 1798040 - RNA, 19 nt, Artificial Sequence
  Description of Artificial Sequence: Synthetic oligonucleotide
  Antisense strand to SEQ ID NO: 1798039
auaacagcuacauacugug

SEQ ID NO: 1798041 - RNA, 19 nt, Artificial Sequence
  Description of Artificial Sequence: Synthetic oligonucleotide
  Sense strand starting at position 246 of SEQ ID NO: 1563138
acaguauguagcuguuauu

SEQ ID NO: 1798042 - RNA, 19 nt, Artificial Sequence
  Description of Artificial Sequence: Synthetic oligonucleotide
  Antisense strand to SEQ ID NO: 1798041
aauaacagcuacauacugu

SEQ ID NO: 1798043 - RNA, 19 nt, Artificial Sequence
  Description of Artificial Sequence: Synthetic oligonucleotide
  Sense strand starting at position 358 of SEQ ID NO: 1563138
gcagaacacuccuuuagau

SEQ ID NO: 1798044 - RNA, 19 nt, Artificial Sequence
  Description of Artificial Sequence: Synthetic oligonucleotide
  Antisense strand to SEQ ID NO: 1798043
aucuaaaggaguguucugc

SEQ ID NO: 1798045 - RNA, 19 nt, Artificial Sequence
  Description of Artificial Sequence: Synthetic oligonucleotide
  Sense strand starting at position 393 of SEQ ID NO: 1563138
augucaaguugacaauuua

SEQ ID NO: 1798046 - RNA, 19 nt, Artificial Sequence
  Description of Artificial Sequence: Synthetic oligonucleotide
  Antisense strand to SEQ ID NO: 1798045
uaaauugucaacuugacau

SEQ ID NO: 1798047 - RNA, 19 nt, Artificial Sequence
  Description of Artificial Sequence: Synthetic oligonucleotide
  Sense strand starting at position 470 of SEQ ID NO: 1563138
gguggacuacagugguuaa

SEQ ID NO: 1798048 - RNA, 19 nt, Artificial Sequence
  Description of Artificial Sequence: Synthetic oligonucleotide
  Antisense strand to SEQ ID NO: 1798047
uuaaccacuguaguccacc

SEQ ID NO: 1798049 - RNA, 19 nt, Artificial Sequence
  Description of Artificial Sequence: Synthetic oligonucleotide
  Sense strand starting at position 471 of SEQ ID NO: 1563138
guggacuacagugguuaau

SEQ ID NO: 1798050 - RNA, 19 nt, Artificial Sequence
  Description of Artificial Sequence: Synthetic oligonucleotide
  Antisense strand to SEQ ID NO: 1798049
auuaaccacuguaguccac

SEQ ID NO: 1798051 - RNA, 19 nt, Artificial Sequence
  Description of Artificial Sequence: Synthetic oligonucleotide
  Sense strand starting at position 481 of SEQ ID NO: 1563138
gugguuaauuucccauucu

SEQ ID NO: 1798052 - RNA, 19 nt, Artificial Sequence
  Description of Artificial Sequence: Synthetic oligonucleotide
  Antisense strand to SEQ ID NO: 1798051
agaaugggaaauuaaccac

SEQ ID NO: 1798053 - RNA, 19 nt, Artificial Sequence
  Description of Artificial Sequence: Synthetic oligonucleotide
  Sense strand starting at position 514 of SEQ ID NO: 1563138
auacuaaguucucuccagu

SEQ ID NO: 1798054 - RNA, 19 nt, Artificial Sequence
  Description of Artificial Sequence: Synthetic oligonucleotide
  Antisense strand to SEQ ID NO: 1798053
acuggagagaacuuaguau

SEQ ID NO: 1798055 - RNA, 19 nt, Artificial Sequence
  Description of Artificial Sequence: Synthetic oligonucleotide
  Sense strand starting at position 517 of SEQ ID NO: 1563138
cuaaguucucuccaguaaa

SEQ ID NO: 1798056 - RNA, 19 nt, Artificial Sequence
  Description of Artificial Sequence: Synthetic oligonucleotide
  Antisense strand to SEQ ID NO: 1798055
uuuacuggagagaacuuag

SEQ ID NO: 1798057 - RNA, 19 nt, Artificial Sequence
  Description of Artificial Sequence: Synthetic oligonucleotide
  Sense strand starting at position 520 of SEQ ID NO: 1563138
aguucucuccaguaaaguu

SEQ ID NO: 1798058 - RNA, 19 nt, Artificial Sequence
  Description of Artificial Sequence: Synthetic oligonucleotide
  Antisense strand to SEQ ID NO: 1798057
aacuuuacuggagagaacu

SEQ ID NO: 1798059 - RNA, 19 nt, Artificial Sequence
  Description of Artificial Sequence: Synthetic oligonucleotide
  Sense strand starting at position 528 of SEQ ID NO: 1563138
ccaguaaaguucucaauug

SEQ ID NO: 1798060 - RNA, 19 nt, Artificial Sequence
  Description of Artificial Sequence: Synthetic oligonucleotide
  Antisense strand to SEQ ID NO: 1798059
caauugagaacuuuacugg

SEQ ID NO: 1798061 - RNA, 19 nt, Artificial Sequence
  Description of Artificial Sequence: Synthetic oligonucleotide
  Sense strand starting at position 535 of SEQ ID NO: 1563138
aguucucaauugucauauu

SEQ ID NO: 1798062 - RNA, 19 nt, Artificial Sequence
  Description of Artificial Sequence: Synthetic oligonucleotide
  Antisense strand to SEQ ID NO: 1798061
aauaugacaauugagaacu

SEQ ID NO: 1798063 - RNA, 19 nt, Artificial Sequence
  Description of Artificial Sequence: Synthetic oligonucleotide
  Sense strand starting at position 628 of SEQ ID NO: 1563138
gugucaguuccuuauugga

SEQ ID NO: 1798064 - RNA, 19 nt, Artificial Sequence
  Description of Artificial Sequence: Synthetic oligonucleotide
  Antisense strand to SEQ ID NO: 1798063
uccaauaaggaacugacac

SEQ ID NO: 1798065 - RNA, 19 nt, Artificial Sequence
  Description of Artificial Sequence: Synthetic oligonucleotide
  Sense strand starting at position 692 of SEQ ID NO: 1563138
cuaggugaugcauggcaca

SEQ ID NO: 1798066 - RNA, 19 nt, Artificial Sequence
  Description of Artificial Sequence: Synthetic oligonucleotide
  Antisense strand to SEQ ID NO: 1798065
ugugccaugcaucaccuag

SEQ ID NO: 1798067 - RNA, 19 nt, Artificial Sequence
  Description of Artificial Sequence: Synthetic oligonucleotide
  Sense strand starting at position 803 of SEQ ID NO: 1563138
ugagauucuuaggcaccuu

SEQ ID NO: 1798068 - RNA, 19 nt, Artificial Sequence
  Description of Artificial Sequence: Synthetic oligonucleotide
  Antisense strand to SEQ ID NO: 1798067
aaggugccuaagaaucuca

SEQ ID NO: 1798069 - RNA, 19 nt, Artificial Sequence
  Description of Artificial Sequence: Synthetic oligonucleotide
  Sense strand starting at position 817 of SEQ ID NO: 1563138
accuuuaccugcgugacua

SEQ ID NO: 1798070 - RNA, 19 nt, Artificial Sequence
  Description of Artificial Sequence: Synthetic oligonucleotide
  Antisense strand to SEQ ID NO: 1798069
uagucacgcagguaaaggu

SEQ ID NO: 1798071 - RNA, 19 nt, Artificial Sequence
  Description of Artificial Sequence: Synthetic oligonucleotide
  Sense strand starting at position 818 of SEQ ID NO: 1563138
ccuuuaccugcgugacuaa

SEQ ID NO: 1798072 - RNA, 19 nt, Artificial Sequence
  Description of Artificial Sequence: Synthetic oligonucleotide
  Antisense strand to SEQ ID NO: 1798071
uuagucacgcagguaaagg

SEQ ID NO: 1798073 - RNA, 19 nt, Artificial Sequence
  Description of Artificial Sequence: Synthetic oligonucleotide
  Sense strand starting at position 819 of SEQ ID NO: 1563138
cuuuaccugcgugacuaau

SEQ ID NO: 1798074 - RNA, 19 nt, Artificial Sequence
  Description of Artificial Sequence: Synthetic oligonucleotide
  Antisense strand to SEQ ID NO: 1798073
auuagucacgcagguaaag

SEQ ID NO: 1798075 - RNA, 19 nt, Artificial Sequence
  Description of Artificial Sequence: Synthetic oligonucleotide
  Sense strand starting at position 821 of SEQ ID NO: 1563138
uuaccugcgugacuaauaa

SEQ ID NO: 1798076 - RNA, 19 nt, Artificial Sequence
  Description of Artificial Sequence: Synthetic oligonucleotide
  Antisense strand to SEQ ID NO: 1798075
uuauuagucacgcagguaa

SEQ ID NO: 1798077 - RNA, 19 nt, Artificial Sequence
  Description of Artificial Sequence: Synthetic oligonucleotide
  Sense strand starting at position 1101 of SEQ ID NO: 1563138
gccuaucuguggccgauuu

SEQ ID NO: 1798078 - RNA, 19 nt, Artificial Sequence
  Description of Artificial Sequence: Synthetic oligonucleotide
  Antisense strand to SEQ ID NO: 1798077
aaaucggccacagauaggc

SEQ ID NO: 1798079 - RNA, 19 nt, Artificial Sequence
  Description of Artificial Sequence: Synthetic oligonucleotide
  Sense strand starting at position 2258 of SEQ ID NO: 1563138
acagacaaguuugagauuu

SEQ ID NO: 1798080 - RNA, 19 nt, Artificial Sequence
  Description of Artificial Sequence: Synthetic oligonucleotide
  Antisense strand to SEQ ID NO: 1798079
aaaucucaaacuugucugu

SEQ ID NO: 1798081 - RNA, 19 nt, Artificial Sequence
  Description of Artificial Sequence: Synthetic oligonucleotide
  Sense strand starting at position 2322 of SEQ ID NO: 1563138
uuuacuucgaguuggcuaa

SEQ ID NO: 1798082 - RNA, 19 nt, Artificial Sequence
  Description of Artificial Sequence: Synthetic oligonucleotide
  Antisense strand to SEQ ID NO: 1798081
uuagccaacucgaaguaaa

SEQ ID NO: 1798083 - RNA, 19 nt, Artificial Sequence
  Description of Artificial Sequence: Synthetic oligonucleotide
  Sense strand starting at position 2389 of SEQ ID NO: 1563138
ccaagcuacugggaagaau

SEQ ID NO: 1798084 - RNA, 19 nt, Artificial Sequence
  Description of Artificial Sequence: Synthetic oligonucleotide
  Antisense strand to SEQ ID NO: 1798083
auucuucccaguagcuugg

SEQ ID NO: 1798085 - RNA, 19 nt, Artificial Sequence
  Description of Artificial Sequence: Synthetic oligonucleotide
  Sense strand starting at position 2489 of SEQ ID NO: 1563138
gccaucgcucaaguaugua

SEQ ID NO: 1798086 - RNA, 19 nt, Artificial Sequence
  Description of Artificial Sequence: Synthetic oligonucleotide
  Antisense strand to SEQ ID NO: 1798085
uacauacuugagcgauggc

SEQ ID NO: 1798087 - RNA, 19 nt, Artificial Sequence
  Description of Artificial Sequence: Synthetic oligonucleotide
  Sense strand starting at position 2525 of SEQ ID NO: 1563138
ggccaaggcagguauauua

SEQ ID NO: 1798088 - RNA, 19 nt, Artificial Sequence
  Description of Artificial Sequence: Synthetic oligonucleotide
  Antisense strand to SEQ ID NO: 1798087
uaauauaccugccuuggcc

SEQ ID NO: 1798089 - RNA, 19 nt, Artificial Sequence
  Description of Artificial Sequence: Synthetic oligonucleotide
  Sense strand starting at position 2532 of SEQ ID NO: 1563138
gcagguauauuauugaggu

SEQ ID NO: 1798090 - RNA, 19 nt, Artificial Sequence
  Description of Artificial Sequence: Synthetic oligonucleotide
  Antisense strand to SEQ ID NO: 1798089
accucaauaauauaccugc

SEQ ID NO: 1798091 - RNA, 19 nt, Artificial Sequence
  Description of Artificial Sequence: Synthetic oligonucleotide
  Sense strand starting at position 2814 of SEQ ID NO: 1563138
guuccuagcuagucagaag

SEQ ID NO: 1798092 - RNA, 19 nt, Artificial Sequence
  Description of Artificial Sequence: Synthetic oligonucleotide
  Antisense strand to SEQ ID NO: 1798091
cuucugacuagcuaggaac

SEQ ID NO: 1798093 - RNA, 19 nt, Artificial Sequence
  Description of Artificial Sequence: Synthetic oligonucleotide
  Sense strand starting at position 3047 of SEQ ID NO: 1563138
uucaguacugaguggugaa

SEQ ID NO: 1798094 - RNA, 19 nt, Artificial Sequence
  Description of Artificial Sequence: Synthetic oligonucleotide
  Antisense strand to SEQ ID NO: 1798093
uucaccacucaguacugaa

SEQ ID NO: 1798095 - RNA, 19 nt, Artificial Sequence
  Description of Artificial Sequence: Synthetic oligonucleotide
  Sense strand starting at position 3158 of SEQ ID NO: 1563138
ggcccuaaagcaugacaaa

SEQ ID NO: 1798096 - RNA, 19 nt, Artificial Sequence
  Description of Artificial Sequence: Synthetic oligonucleotide
  Antisense strand to SEQ ID NO: 1798095
uuugucaugcuuuagggcc

SEQ ID NO: 1798097 - RNA, 19 nt, Artificial Sequence
  Description of Artificial Sequence: Synthetic oligonucleotide
  Sense strand starting at position 3828 of SEQ ID NO: 1563138
ugaguugguuucgugauaa

SEQ ID NO: 1798098 - RNA, 19 nt, Artificial Sequence
  Description of Artificial Sequence: Synthetic oligonucleotide
  Antisense strand to SEQ ID NO: 1798097
uuaucacgaaaccaacuca

SEQ ID NO: 1798099 - RNA, 19 nt, Artificial Sequence
  Description of Artificial Sequence: Synthetic oligonucleotide
  Sense strand starting at position 3841 of SEQ ID NO: 1563138
ugauaauauccaggccuuu

SEQ ID NO: 1798100 - RNA, 19 nt, Artificial Sequence
  Description of Artificial Sequence: Synthetic oligonucleotide
  Antisense strand to SEQ ID NO: 1798099
aaaggccuggauauuauca

SEQ ID NO: 1798101 - RNA, 19 nt, Artificial Sequence
  Description of Artificial Sequence: Synthetic oligonucleotide
  Sense strand starting at position 3914 of SEQ ID NO: 1563138
ucuuguuauuaggucacga

SEQ ID NO: 1798102 - RNA, 19 nt, Artificial Sequence
  Description of Artificial Sequence: Synthetic oligonucleotide
  Antisense strand to SEQ ID NO: 1798101
ucgugaccuaauaacaaga

SEQ ID NO: 1798103 - RNA, 19 nt, Artificial Sequence
  Description of Artificial Sequence: Synthetic oligonucleotide
  Sense strand starting at position 3916 of SEQ ID NO: 1563138
uuguuauuaggucacgaga

SEQ ID NO: 1798104 - RNA, 19 nt, Artificial Sequence
  Description of Artificial Sequence: Synthetic oligonucleotide
  Antisense strand to SEQ ID NO: 1798103
ucucgugaccuaauaacaa

SEQ ID NO: 1798105 - RNA, 19 nt, Artificial Sequence
  Description of Artificial Sequence: Synthetic oligonucleotide
  Sense strand starting at position 65 of SEQ ID NO: 1563139
uguuaccuccuaggagaua

SEQ ID NO: 1798106 - RNA, 19 nt, Artificial Sequence
  Description of Artificial Sequence: Synthetic oligonucleotide
  Antisense strand to SEQ ID NO: 1798105
uaucuccuaggagguaaca

SEQ ID NO: 1798107 - RNA, 19 nt, Artificial Sequence
  Description of Artificial Sequence: Synthetic oligonucleotide
  Sense strand starting at position 94 of SEQ ID NO: 1563139
cacgaaucuguugguaaug

SEQ ID NO: 1798108 - RNA, 19 nt, Artificial Sequence
  Description of Artificial Sequence: Synthetic oligonucleotide
  Antisense strand to SEQ ID NO: 1798107
cauuaccaacagauucgug

SEQ ID NO: 1798109 - RNA, 19 nt, Artificial Sequence
  Description of Artificial Sequence: Synthetic oligonucleotide
  Sense strand starting at position 95 of SEQ ID NO: 1563139
acgaaucuguugguaaugu

SEQ ID NO: 1798110 - RNA, 19 nt, Artificial Sequence
  Description of Artificial Sequence: Synthetic oligonucleotide
  Antisense strand to SEQ ID NO: 1798109
acauuaccaacagauucgu

SEQ ID NO: 1798111 - RNA, 19 nt, Artificial Sequence
  Description of Artificial Sequence: Synthetic oligonucleotide
  Sense strand starting at position 225 of SEQ ID NO: 1563139
aguucuucugaaugcacua

SEQ ID NO: 1798112 - RNA, 19 nt, Artificial Sequence
  Description of Artificial Sequence: Synthetic oligonucleotide
  Antisense strand to SEQ ID NO: 1798111
uagugcauucagaagaacu

SEQ ID NO: 1798113 - RNA, 19 nt, Artificial Sequence
  Description of Artificial Sequence: Synthetic oligonucleotide
  Sense strand starting at position 230 of SEQ ID NO: 1563139
uucugaaugcacuagaagu

SEQ ID NO: 1798114 - RNA, 19 nt, Artificial Sequence
  Description of Artificial Sequence: Synthetic oligonucleotide
  Antisense strand to SEQ ID NO: 1798113
acuucuagugcauucagaa

SEQ ID NO: 1798115 - RNA, 19 nt, Artificial Sequence
  Description of Artificial Sequence: Synthetic oligonucleotide
  Sense strand starting at position 238 of SEQ ID NO: 1563139
gcacuagaagucuaauuaa

SEQ ID NO: 1798116 - RNA, 19 nt, Artificial Sequence
  Description of Artificial Sequence: Synthetic oligonucleotide
  Antisense strand to SEQ ID NO: 1798115
uuaauuagacuucuagugc

SEQ ID NO: 1798117 - RNA, 19 nt, Artificial Sequence
  Description of Artificial Sequence: Synthetic oligonucleotide
  Sense strand starting at position 285 of SEQ ID NO: 1563139
ggaaacaauuuacacagua

SEQ ID NO: 1798118 - RNA, 19 nt, Artificial Sequence
  Description of Artificial Sequence: Synthetic oligonucleotide
  Antisense strand to SEQ ID NO: 1798117
uacuguguaaauuguuucc

SEQ ID NO: 1798119 - RNA, 19 nt, Artificial Sequence
  Description of Artificial Sequence: Synthetic oligonucleotide
  Sense strand starting at position 297 of SEQ ID NO: 1563139
cacaguauguagcuguuau

SEQ ID NO: 1798120 - RNA, 19 nt, Artificial Sequence
  Description of Artificial Sequence: Synthetic oligonucleotide
  Antisense strand to SEQ ID NO: 1798119
auaacagcuacauacugug

SEQ ID NO: 1798121 - RNA, 19 nt, Artificial Sequence
  Description of Artificial Sequence: Synthetic oligonucleotide
  Sense strand starting at position 298 of SEQ ID NO: 1563139
acaguauguagcuguuauu

SEQ ID NO: 1798122 - RNA, 19 nt, Artificial Sequence
  Description of Artificial Sequence: Synthetic oligonucleotide
  Antisense strand to SEQ ID NO: 1798121
aauaacagcuacauacugu

SEQ ID NO: 1798123 - RNA, 19 nt, Artificial Sequence
  Description of Artificial Sequence: Synthetic oligonucleotide
  Sense strand starting at position 410 of SEQ ID NO: 1563139
gcagaacacuccuuuagau

SEQ ID NO: 1798124 - RNA, 19 nt, Artificial Sequence
  Description of Artificial Sequence: Synthetic oligonucleotide
  Antisense strand to SEQ ID NO: 1798123
aucuaaaggaguguucugc

SEQ ID NO: 1798125 - RNA, 19 nt, Artificial Sequence
  Description of Artificial Sequence: Synthetic oligonucleotide
  Sense strand starting at position 445 of SEQ ID NO: 1563139
augucaaguugacaauuua

SEQ ID NO: 1798126 - RNA, 19 nt, Artificial Sequence
  Description of Artificial Sequence: Synthetic oligonucleotide
  Antisense strand to SEQ ID NO: 1798125
uaaauugucaacuugacau

SEQ ID NO: 1798127 - RNA, 19 nt, Artificial Sequence
  Description of Artificial Sequence: Synthetic oligonucleotide
  Sense strand starting at position 522 of SEQ ID NO: 1563139
gguggacuacagugguuaa

SEQ ID NO: 1798128 - RNA, 19 nt, Artificial Sequence
  Description of Artificial Sequence: Synthetic oligonucleotide
  Antisense strand to SEQ ID NO: 1798127
uuaaccacuguaguccacc

SEQ ID NO: 1798129 - RNA, 19 nt, Artificial Sequence
  Description of Artificial Sequence: Synthetic oligonucleotide
  Sense strand starting at position 523 of SEQ ID NO: 1563139
guggacuacagugguuaau

SEQ ID NO: 1798130 - RNA, 19 nt, Artificial Sequence
  Description of Artificial Sequence: Synthetic oligonucleotide
  Antisense strand to SEQ ID NO: 1798129
auuaaccacuguaguccac

SEQ ID NO: 1798131 - RNA, 19 nt, Artificial Sequence
  Description of Artificial Sequence: Synthetic oligonucleotide
  Sense strand starting at position 533 of SEQ ID NO: 1563139
gugguuaauuucccauucu

SEQ ID NO: 1798132 - RNA, 19 nt, Artificial Sequence
  Description of Artificial Sequence: Synthetic oligonucleotide
  Antisense strand to SEQ ID NO: 1798131
agaaugggaaauuaaccac

SEQ ID NO: 1798133 - RNA, 19 nt, Artificial Sequence
  Description of Artificial Sequence: Synthetic oligonucleotide
  Sense strand starting at position 566 of SEQ ID NO: 1563139
auacuaaguucucuccagu

SEQ ID NO: 1798134 - RNA, 19 nt, Artificial Sequence
  Description of Artificial Sequence: Synthetic oligonucleotide
  Antisense strand to SEQ ID NO: 1798133
acuggagagaacuuaguau

SEQ ID NO: 1798135 - RNA, 19 nt, Artificial Sequence
  Description of Artificial Sequence: Synthetic oligonucleotide
  Sense strand starting at position 569 of SEQ ID NO: 1563139
cuaaguucucuccaguaaa

SEQ ID NO: 1798136 - RNA, 19 nt, Artificial Sequence
  Description of Artificial Sequence: Synthetic oligonucleotide
  Antisense strand to SEQ ID NO: 1798135
uuuacuggagagaacuuag

SEQ ID NO: 1798137 - RNA, 19 nt, Artificial Sequence
  Description of Artificial Sequence: Synthetic oligonucleotide
  Sense strand starting at position 572 of SEQ ID NO: 1563139
aguucucuccaguaaaguu

SEQ ID NO: 1798138 - RNA, 19 nt, Artificial Sequence
  Description of Artificial Sequence: Synthetic oligonucleotide
  Antisense strand to SEQ ID NO: 1798137
aacuuuacuggagagaacu

SEQ ID NO: 1798139 - RNA, 19 nt, Artificial Sequence
  Description of Artificial Sequence: Synthetic oligonucleotide
  Sense strand starting at position 580 of SEQ ID NO: 1563139
ccaguaaaguucucaauug

SEQ ID NO: 1798140 - RNA, 19 nt, Artificial Sequence
  Description of Artificial Sequence: Synthetic oligonucleotide
  Antisense strand to SEQ ID NO: 1798139
caauugagaacuuuacugg

SEQ ID NO: 1798141 - RNA, 19 nt, Artificial Sequence
  Description of Artificial Sequence: Synthetic oligonucleotide
  Sense strand starting at position 587 of SEQ ID NO: 1563139
aguucucaauugucauauu

SEQ ID NO: 1798142 - RNA, 19 nt, Artificial Sequence
  Description of Artificial Sequence: Synthetic oligonucleotide
  Antisense strand to SEQ ID NO: 1798141
aauaugacaauugagaacu

SEQ ID NO: 1798143 - RNA, 19 nt, Artificial Sequence
  Description of Artificial Sequence: Synthetic oligonucleotide
  Sense strand starting at position 680 of SEQ ID NO: 1563139
gugucaguuccuuauugga

SEQ ID NO: 1798144 - RNA, 19 nt, Artificial Sequence
  Description of Artificial Sequence: Synthetic oligonucleotide
  Antisense strand to SEQ ID NO: 1798143
uccaauaaggaacugacac

SEQ ID NO: 1798145 - RNA, 19 nt, Artificial Sequence
  Description of Artificial Sequence: Synthetic oligonucleotide
  Sense strand starting at position 744 of SEQ ID NO: 1563139
cuaggugaugcauggcaca

SEQ ID NO: 1798146 - RNA, 19 nt, Artificial Sequence
  Description of Artificial Sequence: Synthetic oligonucleotide
  Antisense strand to SEQ ID NO: 1798145
ugugccaugcaucaccuag

SEQ ID NO: 1798147 - RNA, 19 nt, Artificial Sequence
  Description of Artificial Sequence: Synthetic oligonucleotide
  Sense strand starting at position 855 of SEQ ID NO: 1563139
ugagauucuuaggcaccuu

SEQ ID NO: 1798148 - RNA, 19 nt, Artificial Sequence
  Description of Artificial Sequence: Synthetic oligonucleotide
  Antisense strand to SEQ ID NO: 1798147
aaggugccuaagaaucuca

SEQ ID NO: 1798149 - RNA, 19 nt, Artificial Sequence
  Description of Artificial Sequence: Synthetic oligonucleotide
  Sense strand starting at position 869 of SEQ ID NO: 1563139
accuuuaccugcgugacua

SEQ ID NO: 1798150 - RNA, 19 nt, Artificial Sequence
  Description of Artificial Sequence: Synthetic oligonucleotide
  Antisense strand to SEQ ID NO: 1798149
uagucacgcagguaaaggu

SEQ ID NO: 1798151 - RNA, 19 nt, Artificial Sequence
  Description of Artificial Sequence: Synthetic oligonucleotide
  Sense strand starting at position 870 of SEQ ID NO: 1563139
ccuuuaccugcgugacuaa

SEQ ID NO: 1798152 - RNA, 19 nt, Artificial Sequence
  Description of Artificial Sequence: Synthetic oligonucleotide
  Antisense strand to SEQ ID NO: 1798151
uuagucacgcagguaaagg

SEQ ID NO: 1798153 - RNA, 19 nt, Artificial Sequence
  Description of Artificial Sequence: Synthetic oligonucleotide
  Sense strand starting at position 871 of SEQ ID NO: 1563139
cuuuaccugcgugacuaau

SEQ ID NO: 1798154 - RNA, 19 nt, Artificial Sequence
  Description of Artificial Sequence: Synthetic oligonucleotide
  Antisense strand to SEQ ID NO: 1798153
auuagucacgcagguaaag

SEQ ID NO: 1798155 - RNA, 19 nt, Artificial Sequence
  Description of Artificial Sequence: Synthetic oligonucleotide
  Sense strand starting at position 873 of SEQ ID NO: 1563139
uuaccugcgugacuaauaa

SEQ ID NO: 1798156 - RNA, 19 nt, Artificial Sequence
  Description of Artificial Sequence: Synthetic oligonucleotide
  Antisense strand to SEQ ID NO: 1798155
uuauuagucacgcagguaa

SEQ ID NO: 1798157 - RNA, 19 nt, Artificial Sequence
  Description of Artificial Sequence: Synthetic oligonucleotide
  Sense strand starting at position 1153 of SEQ ID NO: 1563139
gccuaucuguggccgauuu

SEQ ID NO: 1798158 - RNA, 19 nt, Artificial Sequence
  Description of Artificial Sequence: Synthetic oligonucleotide
  Antisense strand to SEQ ID NO: 1798157
aaaucggccacagauaggc

SEQ ID NO: 1798159 - RNA, 19 nt, Artificial Sequence
  Description of Artificial Sequence: Synthetic oligonucleotide
  Sense strand starting at position 2310 of SEQ ID NO: 1563139
acagacaaguuugagauuu

SEQ ID NO: 1798160 - RNA, 19 nt, Artificial Sequence
  Description of Artificial Sequence: Synthetic oligonucleotide
  Antisense strand to SEQ ID NO: 1798159
aaaucucaaacuugucugu

SEQ ID NO: 1798161 - RNA, 19 nt, Artificial Sequence
  Description of Artificial Sequence: Synthetic oligonucleotide
  Sense strand starting at position 2374 of SEQ ID NO: 1563139
uuuacuucgaguuggcuaa

SEQ ID NO: 1798162 - RNA, 19 nt, Artificial Sequence
  Description of Artificial Sequence: Synthetic oligonucleotide
  Antisense strand to SEQ ID NO: 1798161
uuagccaacucgaaguaaa

SEQ ID NO: 1798163 - RNA, 19 nt, Artificial Sequence
  Description of Artificial Sequence: Synthetic oligonucleotide
  Sense strand starting at position 2441 of SEQ ID NO: 1563139
ccaagcuacugggaagaau

SEQ ID NO: 1798164 - RNA, 19 nt, Artificial Sequence
  Description of Artificial Sequence: Synthetic oligonucleotide
  Antisense strand to SEQ ID NO: 1798163
auucuucccaguagcuugg

SEQ ID NO: 1798165 - RNA, 19 nt, Artificial Sequence
  Description of Artificial Sequence: Synthetic oligonucleotide
  Sense strand starting at position 2541 of SEQ ID NO: 1563139
gccaucgcucaaguaugua

SEQ ID NO: 1798166 - RNA, 19 nt, Artificial Sequence
  Description of Artificial Sequence: Synthetic oligonucleotide
  Antisense strand to SEQ ID NO: 1798165
uacauacuugagcgauggc

SEQ ID NO: 1798167 - RNA, 19 nt, Artificial Sequence
  Description of Artificial Sequence: Synthetic oligonucleotide
  Sense strand starting at position 2577 of SEQ ID NO: 1563139
ggccaaggcagguauauua

SEQ ID NO: 1798168 - RNA, 19 nt, Artificial Sequence
  Description of Artificial Sequence: Synthetic oligonucleotide
  Antisense strand to SEQ ID NO: 1798167
uaauauaccugccuuggcc

SEQ ID NO: 1798169 - RNA, 19 nt, Artificial Sequence
  Description of Artificial Sequence: Synthetic oligonucleotide
  Sense strand starting at position 2584 of SEQ ID NO: 1563139
gcagguauauuauugaggu

SEQ ID NO: 1798170 - RNA, 19 nt, Artificial Sequence
  Description of Artificial Sequence: Synthetic oligonucleotide
  Antisense strand to SEQ ID NO: 1798169
accucaauaauauaccugc

SEQ ID NO: 1798171 - RNA, 19 nt, Artificial Sequence
  Description of Artificial Sequence: Synthetic oligonucleotide
  Sense strand starting at position 2866 of SEQ ID NO: 1563139
guuccuagcuagucagaag

SEQ ID NO: 1798172 - RNA, 19 nt, Artificial Sequence
  Description of Artificial Sequence: Synthetic oligonucleotide
  Antisense strand to SEQ ID NO: 1798171
cuucugacuagcuaggaac

SEQ ID NO: 1798173 - RNA, 19 nt, Artificial Sequence
  Description of Artificial Sequence: Synthetic oligonucleotide
  Sense strand starting at position 3099 of SEQ ID NO: 1563139
uucaguacugaguggugaa

SEQ ID NO: 1798174 - RNA, 19 nt, Artificial Sequence
  Description of Artificial Sequence: Synthetic oligonucleotide
  Antisense strand to SEQ ID NO: 1798173
uucaccacucaguacugaa

SEQ ID NO: 1798175 - RNA, 19 nt, Artificial Sequence
  Description of Artificial Sequence: Synthetic oligonucleotide
  Sense strand starting at position 3210 of SEQ ID NO: 1563139
ggcccuaaagcaugacaaa

SEQ ID NO: 1798176 - RNA, 19 nt, Artificial Sequence
  Description of Artificial Sequence: Synthetic oligonucleotide
  Antisense strand to SEQ ID NO: 1798175
uuugucaugcuuuagggcc

SEQ ID NO: 1798177 - RNA, 19 nt, Artificial Sequence
  Description of Artificial Sequence: Synthetic oligonucleotide
  Sense strand starting at position 3880 of SEQ ID NO: 1563139
ugaguugguuucgugauaa

SEQ ID NO: 1798178 - RNA, 19 nt, Artificial Sequence
  Description of Artificial Sequence: Synthetic oligonucleotide
  Antisense strand to SEQ ID NO: 1798177
uuaucacgaaaccaacuca

SEQ ID NO: 1798179 - RNA, 19 nt, Artificial Sequence
  Description of Artificial Sequence: Synthetic oligonucleotide
  Sense strand starting at position 3893 of SEQ ID NO: 1563139
ugauaauauccaggccuuu

SEQ ID NO: 1798180 - RNA, 19 nt, Artificial Sequence
  Description of Artificial Sequence: Synthetic oligonucleotide
  Antisense strand to SEQ ID NO: 1798179
aaaggccuggauauuauca

SEQ ID NO: 1798181 - RNA, 19 nt, Artificial Sequence
  Description of Artificial Sequence: Synthetic oligonucleotide
  Sense strand starting at position 3966 of SEQ ID NO: 1563139
ucuuguuauuaggucacga

SEQ ID NO: 1798182 - RNA, 19 nt, Artificial Sequence
  Description of Artificial Sequence: Synthetic oligonucleotide
  Antisense strand to SEQ ID NO: 1798181
ucgugaccuaauaacaaga

SEQ ID NO: 1798183 - RNA, 19 nt, Artificial Sequence
  Description of Artificial Sequence: Synthetic oligonucleotide
  Sense strand starting at position 3968 of SEQ ID NO: 1563139
uuguuauuaggucacgaga

SEQ ID NO: 1798184 - RNA, 19 nt, Artificial Sequence
  Description of Artificial Sequence: Synthetic oligonucleotide
  Antisense strand to SEQ ID NO: 1798183
ucucgugaccuaauaacaa

SEQ ID NO: 1798185 - RNA, 19 nt, Artificial Sequence
  Description of Artificial Sequence: Synthetic oligonucleotide
  Sense strand starting at position 383 of SEQ ID NO: 1563140
ccagauuguuaucugucca

SEQ ID NO: 1798186 - RNA, 19 nt, Artificial Sequence
  Description of Artificial Sequence: Synthetic oligonucleotide
  Antisense strand to SEQ ID NO: 1798185
uggacagauaacaaucugg

SEQ ID NO: 1798187 - RNA, 19 nt, Artificial Sequence
  Description of Artificial Sequence: Synthetic oligonucleotide
  Sense strand starting at position 388 of SEQ ID NO: 1563140
uuguuaucuguccaccacu

SEQ ID NO: 1798188 - RNA, 19 nt, Artificial Sequence
  Description of Artificial Sequence: Synthetic oligonucleotide
  Antisense strand to SEQ ID NO: 1798187
agugguggacagauaacaa

SEQ ID NO: 1798189 - RNA, 19 nt, Artificial Sequence
  Description of Artificial Sequence: Synthetic oligonucleotide
  Sense strand starting at position 464 of SEQ ID NO: 1563140
uggagauacuaacaguacu

SEQ ID NO: 1798190 - RNA, 19 nt, Artificial Sequence
  Description of Artificial Sequence: Synthetic oligonucleotide
  Antisense strand to SEQ ID NO: 1798189
aguacuguuaguaucucca

SEQ ID NO: 1798191 - RNA, 19 nt, Artificial Sequence
  Description of Artificial Sequence: Synthetic oligonucleotide
  Sense strand starting at position 552 of SEQ ID NO: 1563140
uguuaccuccuaggagaua

SEQ ID NO: 1798192 - RNA, 19 nt, Artificial Sequence
  Description of Artificial Sequence: Synthetic oligonucleotide
  Antisense strand to SEQ ID NO: 1798191
uaucuccuaggagguaaca

SEQ ID NO: 1798193 - RNA, 19 nt, Artificial Sequence
  Description of Artificial Sequence: Synthetic oligonucleotide
  Sense strand starting at position 581 of SEQ ID NO: 1563140
cacgaaucuguugguaaug

SEQ ID NO: 1798194 - RNA, 19 nt, Artificial Sequence
  Description of Artificial Sequence: Synthetic oligonucleotide
  Antisense strand to SEQ ID NO: 1798193
cauuaccaacagauucgug

SEQ ID NO: 1798195 - RNA, 19 nt, Artificial Sequence
  Description of Artificial Sequence: Synthetic oligonucleotide
  Sense strand starting at position 582 of SEQ ID NO: 1563140
acgaaucuguugguaaugu

SEQ ID NO: 1798196 - RNA, 19 nt, Artificial Sequence
  Description of Artificial Sequence: Synthetic oligonucleotide
  Antisense strand to SEQ ID NO: 1798195
acauuaccaacagauucgu

SEQ ID NO: 1798197 - RNA, 19 nt, Artificial Sequence
  Description of Artificial Sequence: Synthetic oligonucleotide
  Sense strand starting at position 712 of SEQ ID NO: 1563140
aguucuucugaaugcacua

SEQ ID NO: 1798198 - RNA, 19 nt, Artificial Sequence
  Description of Artificial Sequence: Synthetic oligonucleotide
  Antisense strand to SEQ ID NO: 1798197
uagugcauucagaagaacu

SEQ ID NO: 1798199 - RNA, 19 nt, Artificial Sequence
  Description of Artificial Sequence: Synthetic oligonucleotide
  Sense strand starting at position 717 of SEQ ID NO: 1563140
uucugaaugcacuagaagu

SEQ ID NO: 1798200 - RNA, 19 nt, Artificial Sequence
  Description of Artificial Sequence: Synthetic oligonucleotide
  Antisense strand to SEQ ID NO: 1798199
acuucuagugcauucagaa

SEQ ID NO: 1798201 - RNA, 19 nt, Artificial Sequence
  Description of Artificial Sequence: Synthetic oligonucleotide
  Sense strand starting at position 725 of SEQ ID NO: 1563140
gcacuagaagucuaauuaa

SEQ ID NO: 1798202 - RNA, 19 nt, Artificial Sequence
  Description of Artificial Sequence: Synthetic oligonucleotide
  Antisense strand to SEQ ID NO: 1798201
uuaauuagacuucuagugc

SEQ ID NO: 1798203 - RNA, 19 nt, Artificial Sequence
  Description of Artificial Sequence: Synthetic oligonucleotide
  Sense strand starting at position 772 of SEQ ID NO: 1563140
ggaaacaauuuacacagua

SEQ ID NO: 1798204 - RNA, 19 nt, Artificial Sequence
  Description of Artificial Sequence: Synthetic oligonucleotide
  Antisense strand to SEQ ID NO: 1798203
uacuguguaaauuguuucc

SEQ ID NO: 1798205 - RNA, 19 nt, Artificial Sequence
  Description of Artificial Sequence: Synthetic oligonucleotide
  Sense strand starting at position 784 of SEQ ID NO: 1563140
cacaguauguagcuguuau

SEQ ID NO: 1798206 - RNA, 19 nt, Artificial Sequence
  Description of Artificial Sequence: Synthetic oligonucleotide
  Antisense strand to SEQ ID NO: 1798205
auaacagcuacauacugug

SEQ ID NO: 1798207 - RNA, 19 nt, Artificial Sequence
  Description of Artificial Sequence: Synthetic oligonucleotide
  Sense strand starting at position 785 of SEQ ID NO: 1563140
acaguauguagcuguuauu

SEQ ID NO: 1798208 - RNA, 19 nt, Artificial Sequence
  Description of Artificial Sequence: Synthetic oligonucleotide
  Antisense strand to SEQ ID NO: 1798207
aauaacagcuacauacugu

SEQ ID NO: 1798209 - RNA, 19 nt, Artificial Sequence
  Description of Artificial Sequence: Synthetic oligonucleotide
  Sense strand starting at position 897 of SEQ ID NO: 1563140
gcagaacacuccuuuagau

SEQ ID NO: 1798210 - RNA, 19 nt, Artificial Sequence
  Description of Artificial Sequence: Synthetic oligonucleotide
  Antisense strand to SEQ ID NO: 1798209
aucuaaaggaguguucugc

SEQ ID NO: 1798211 - RNA, 19 nt, Artificial Sequence
  Description of Artificial Sequence: Synthetic oligonucleotide
  Sense strand starting at position 932 of SEQ ID NO: 1563140
augucaaguugacaauuua

SEQ ID NO: 1798212 - RNA, 19 nt, Artificial Sequence
  Description of Artificial Sequence: Synthetic oligonucleotide
  Antisense strand to SEQ ID NO: 1798211
uaaauugucaacuugacau

SEQ ID NO: 1798213 - RNA, 19 nt, Artificial Sequence
  Description of Artificial Sequence: Synthetic oligonucleotide
  Sense strand starting at position 1009 of SEQ ID NO: 1563140
gguggacuacagugguuaa

SEQ ID NO: 1798214 - RNA, 19 nt, Artificial Sequence
  Description of Artificial Sequence: Synthetic oligonucleotide
  Antisense strand to SEQ ID NO: 1798213
uuaaccacuguaguccacc

SEQ ID NO: 1798215 - RNA, 19 nt, Artificial Sequence
  Description of Artificial Sequence: Synthetic oligonucleotide
  Sense strand starting at position 1010 of SEQ ID NO: 1563140
guggacuacagugguuaau

SEQ ID NO: 1798216 - RNA, 19 nt, Artificial Sequence
  Description of Artificial Sequence: Synthetic oligonucleotide
  Antisense strand to SEQ ID NO: 1798215
auuaaccacuguaguccac

SEQ ID NO: 1798217 - RNA, 19 nt, Artificial Sequence
  Description of Artificial Sequence: Synthetic oligonucleotide
  Sense strand starting at position 1020 of SEQ ID NO: 1563140
gugguuaauuucccauucu

SEQ ID NO: 1798218 - RNA, 19 nt, Artificial Sequence
  Description of Artificial Sequence: Synthetic oligonucleotide
  Antisense strand to SEQ ID NO: 1798217
agaaugggaaauuaaccac

SEQ ID NO: 1798219 - RNA, 19 nt, Artificial Sequence
  Description of Artificial Sequence: Synthetic oligonucleotide
  Sense strand starting at position 1053 of SEQ ID NO: 1563140
auacuaaguucucuccagu

SEQ ID NO: 1798220 - RNA, 19 nt, Artificial Sequence
  Description of Artificial Sequence: Synthetic oligonucleotide
  Antisense strand to SEQ ID NO: 1798219
acuggagagaacuuaguau

SEQ ID NO: 1798221 - RNA, 19 nt, Artificial Sequence
  Description of Artificial Sequence: Synthetic oligonucleotide
  Sense strand starting at position 1056 of SEQ ID NO: 1563140
cuaaguucucuccaguaaa

SEQ ID NO: 1798222 - RNA, 19 nt, Artificial Sequence
  Description of Artificial Sequence: Synthetic oligonucleotide
  Antisense strand to SEQ ID NO: 1798221
uuuacuggagagaacuuag

SEQ ID NO: 1798223 - RNA, 19 nt, Artificial Sequence
  Description of Artificial Sequence: Synthetic oligonucleotide
  Sense strand starting at position 1059 of SEQ ID NO: 1563140
aguucucuccaguaaaguu

SEQ ID NO: 1798224 - RNA, 19 nt, Artificial Sequence
  Description of Artificial Sequence: Synthetic oligonucleotide
  Antisense strand to SEQ ID NO: 1798223
aacuuuacuggagagaacu

SEQ ID NO: 1798225 - RNA, 19 nt, Artificial Sequence
  Description of Artificial Sequence: Synthetic oligonucleotide
  Sense strand starting at position 1067 of SEQ ID NO: 1563140
ccaguaaaguucucaauug

SEQ ID NO: 1798226 - RNA, 19 nt, Artificial Sequence
  Description of Artificial Sequence: Synthetic oligonucleotide
  Antisense strand to SEQ ID NO: 1798225
caauugagaacuuuacugg

SEQ ID NO: 1798227 - RNA, 19 nt, Artificial Sequence
  Description of Artificial Sequence: Synthetic oligonucleotide
  Sense strand starting at position 1074 of SEQ ID NO: 1563140
aguucucaauugucauauu

SEQ ID NO: 1798228 - RNA, 19 nt, Artificial Sequence
  Description of Artificial Sequence: Synthetic oligonucleotide
  Antisense strand to SEQ ID NO: 1798227
aauaugacaauugagaacu

SEQ ID NO: 1798229 - RNA, 19 nt, Artificial Sequence
  Description of Artificial Sequence: Synthetic oligonucleotide
  Sense strand starting at position 1167 of SEQ ID NO: 1563140
gugucaguuccuuauugga

SEQ ID NO: 1798230 - RNA, 19 nt, Artificial Sequence
  Description of Artificial Sequence: Synthetic oligonucleotide
  Antisense strand to SEQ ID NO: 1798229
uccaauaaggaacugacac

SEQ ID NO: 1798231 - RNA, 19 nt, Artificial Sequence
  Description of Artificial Sequence: Synthetic oligonucleotide
  Sense strand starting at position 1231 of SEQ ID NO: 1563140
cuaggugaugcauggcaca

SEQ ID NO: 1798232 - RNA, 19 nt, Artificial Sequence
  Description of Artificial Sequence: Synthetic oligonucleotide
  Antisense strand to SEQ ID NO: 1798231
ugugccaugcaucaccuag

SEQ ID NO: 1798233 - RNA, 19 nt, Artificial Sequence
  Description of Artificial Sequence: Synthetic oligonucleotide
  Sense strand starting at position 1342 of SEQ ID NO: 1563140
ugagauucuuaggcaccuu

SEQ ID NO: 1798234 - RNA, 19 nt, Artificial Sequence
  Description of Artificial Sequence: Synthetic oligonucleotide
  Antisense strand to SEQ ID NO: 1798233
aaggugccuaagaaucuca

SEQ ID NO: 1798235 - RNA, 19 nt, Artificial Sequence
  Description of Artificial Sequence: Synthetic oligonucleotide
  Sense strand starting at position 1356 of SEQ ID NO: 1563140
accuuuaccugcgugacua

SEQ ID NO: 1798236 - RNA, 19 nt, Artificial Sequence
  Description of Artificial Sequence: Synthetic oligonucleotide
  Antisense strand to SEQ ID NO: 1798235
uagucacgcagguaaaggu

SEQ ID NO: 1798237 - RNA, 19 nt, Artificial Sequence
  Description of Artificial Sequence: Synthetic oligonucleotide
  Sense strand starting at position 1357 of SEQ ID NO: 1563140
ccuuuaccugcgugacuaa

SEQ ID NO: 1798238 - RNA, 19 nt, Artificial Sequence
  Description of Artificial Sequence: Synthetic oligonucleotide
  Antisense strand to SEQ ID NO: 1798237
uuagucacgcagguaaagg

SEQ ID NO: 1798239 - RNA, 19 nt, Artificial Sequence
  Description of Artificial Sequence: Synthetic oligonucleotide
  Sense strand starting at position 1358 of SEQ ID NO: 1563140
cuuuaccugcgugacuaau

SEQ ID NO: 1798240 - RNA, 19 nt, Artificial Sequence
  Description of Artificial Sequence: Synthetic oligonucleotide
  Antisense strand to SEQ ID NO: 1798239
auuagucacgcagguaaag

SEQ ID NO: 1798241 - RNA, 19 nt, Artificial Sequence
  Description of Artificial Sequence: Synthetic oligonucleotide
  Sense strand starting at position 1360 of SEQ ID NO: 1563140
uuaccugcgugacuaauaa

SEQ ID NO: 1798242 - RNA, 19 nt, Artificial Sequence
  Description of Artificial Sequence: Synthetic oligonucleotide
  Antisense strand to SEQ ID NO: 1798241
uuauuagucacgcagguaa

SEQ ID NO: 1798243 - RNA, 19 nt, Artificial Sequence
  Description of Artificial Sequence: Synthetic oligonucleotide
  Sense strand starting at position 1640 of SEQ ID NO: 1563140
gccuaucuguggccgauuu

SEQ ID NO: 1798244 - RNA, 19 nt, Artificial Sequence
  Description of Artificial Sequence: Synthetic oligonucleotide
  Antisense strand to SEQ ID NO: 1798243
aaaucggccacagauaggc

SEQ ID NO: 1798245 - RNA, 19 nt, Artificial Sequence
  Description of Artificial Sequence: Synthetic oligonucleotide
  Sense strand starting at position 2797 of SEQ ID NO: 1563140
acagacaaguuugagauuu

SEQ ID NO: 1798246 - RNA, 19 nt, Artificial Sequence
  Description of Artificial Sequence: Synthetic oligonucleotide
  Antisense strand to SEQ ID NO: 1798245
aaaucucaaacuugucugu

SEQ ID NO: 1798247 - RNA, 19 nt, Artificial Sequence
  Description of Artificial Sequence: Synthetic oligonucleotide
  Sense strand starting at position 2861 of SEQ ID NO: 1563140
uuuacuucgaguuggcuaa

SEQ ID NO: 1798248 - RNA, 19 nt, Artificial Sequence
  Description of Artificial Sequence: Synthetic oligonucleotide
  Antisense strand to SEQ ID NO: 1798247
uuagccaacucgaaguaaa

SEQ ID NO: 1798249 - RNA, 19 nt, Artificial Sequence
  Description of Artificial Sequence: Synthetic oligonucleotide
  Sense strand starting at position 2928 of SEQ ID NO: 1563140
ccaagcuacugggaagaau

SEQ ID NO: 1798250 - RNA, 19 nt, Artificial Sequence
  Description of Artificial Sequence: Synthetic oligonucleotide
  Antisense strand to SEQ ID NO: 1798249
auucuucccaguagcuugg

SEQ ID NO: 1798251 - RNA, 19 nt, Artificial Sequence
  Description of Artificial Sequence: Synthetic oligonucleotide
  Sense strand starting at position 3025 of SEQ ID NO: 1563140
ggugccaucgcucaaguau

SEQ ID NO: 1798252 - RNA, 19 nt, Artificial Sequence
  Description of Artificial Sequence: Synthetic oligonucleotide
  Antisense strand to SEQ ID NO: 1798251
auacuugagcgauggcacc

SEQ ID NO: 1798253 - RNA, 19 nt, Artificial Sequence
  Description of Artificial Sequence: Synthetic oligonucleotide
  Sense strand starting at position 3028 of SEQ ID NO: 1563140
gccaucgcucaaguaugua

SEQ ID NO: 1798254 - RNA, 19 nt, Artificial Sequence
  Description of Artificial Sequence: Synthetic oligonucleotide
  Antisense strand to SEQ ID NO: 1798253
uacauacuugagcgauggc

SEQ ID NO: 1798255 - RNA, 19 nt, Artificial Sequence
  Description of Artificial Sequence: Synthetic oligonucleotide
  Sense strand starting at position 3064 of SEQ ID NO: 1563140
ggccaaggcagguauauua

SEQ ID NO: 1798256 - RNA, 19 nt, Artificial Sequence
  Description of Artificial Sequence: Synthetic oligonucleotide
  Antisense strand to SEQ ID NO: 1798255
uaauauaccugccuuggcc

SEQ ID NO: 1798257 - RNA, 19 nt, Artificial Sequence
  Description of Artificial Sequence: Synthetic oligonucleotide
  Sense strand starting at position 3071 of SEQ ID NO: 1563140
gcagguauauuauugaggu

SEQ ID NO: 1798258 - RNA, 19 nt, Artificial Sequence
  Description of Artificial Sequence: Synthetic oligonucleotide
  Antisense strand to SEQ ID NO: 1798257
accucaauaauauaccugc

SEQ ID NO: 1798259 - RNA, 19 nt, Artificial Sequence
  Description of Artificial Sequence: Synthetic oligonucleotide
  Sense strand starting at position 3353 of SEQ ID NO: 1563140
guuccuagcuagucagaag

SEQ ID NO: 1798260 - RNA, 19 nt, Artificial Sequence
  Description of Artificial Sequence: Synthetic oligonucleotide
  Antisense strand to SEQ ID NO: 1798259
cuucugacuagcuaggaac

SEQ ID NO: 1798261 - RNA, 19 nt, Artificial Sequence
  Description of Artificial Sequence: Synthetic oligonucleotide
  Sense strand starting at position 3586 of SEQ ID NO: 1563140
uucaguacugaguggugaa

SEQ ID NO: 1798262 - RNA, 19 nt, Artificial Sequence
  Description of Artificial Sequence: Synthetic oligonucleotide
  Antisense strand to SEQ ID NO: 1798261
uucaccacucaguacugaa

SEQ ID NO: 1798263 - RNA, 19 nt, Artificial Sequence
  Description of Artificial Sequence: Synthetic oligonucleotide
  Sense strand starting at position 3697 of SEQ ID NO: 1563140
ggcccuaaagcaugacaaa

SEQ ID NO: 1798264 - RNA, 19 nt, Artificial Sequence
  Description of Artificial Sequence: Synthetic oligonucleotide
  Antisense strand to SEQ ID NO: 1798263
uuugucaugcuuuagggcc

SEQ ID NO: 1798265 - RNA, 19 nt, Artificial Sequence
  Description of Artificial Sequence: Synthetic oligonucleotide
  Sense strand starting at position 145 of SEQ ID NO: 1563141
ggaagagauuuggaaucuu

SEQ ID NO: 1798266 - RNA, 19 nt, Artificial Sequence
  Description of Artificial Sequence: Synthetic oligonucleotide
  Antisense strand to SEQ ID NO: 1798265
aagauuccaaaucucuucc

SEQ ID NO: 1798267 - RNA, 19 nt, Artificial Sequence
  Description of Artificial Sequence: Synthetic oligonucleotide
  Sense strand starting at position 225 of SEQ ID NO: 1563141
gcacuuucucuggagaccu

SEQ ID NO: 1798268 - RNA, 19 nt, Artificial Sequence
  Description of Artificial Sequence: Synthetic oligonucleotide
  Antisense strand to SEQ ID NO: 1798267
aggucuccagagaaagugc

SEQ ID NO: 1798269 - RNA, 19 nt, Artificial Sequence
  Description of Artificial Sequence: Synthetic oligonucleotide
  Sense strand starting at position 274 of SEQ ID NO: 1563141
ucuagagauggguggugau

SEQ ID NO: 1798270 - RNA, 19 nt, Artificial Sequence
  Description of Artificial Sequence: Synthetic oligonucleotide
  Antisense strand to SEQ ID NO: 1798269
aucaccacccaucucuaga

SEQ ID NO: 1798271 - RNA, 19 nt, Artificial Sequence
  Description of Artificial Sequence: Synthetic oligonucleotide
  Sense strand starting at position 388 of SEQ ID NO: 1563141
gguagcggcauuugagaau

SEQ ID NO: 1798272 - RNA, 19 nt, Artificial Sequence
  Description of Artificial Sequence: Synthetic oligonucleotide
  Antisense strand to SEQ ID NO: 1798271
auucucaaaugccgcuacc

SEQ ID NO: 1798273 - RNA, 19 nt, Artificial Sequence
  Description of Artificial Sequence: Synthetic oligonucleotide
  Sense strand starting at position 634 of SEQ ID NO: 1563141
gguucugaaauguaaguca

SEQ ID NO: 1798274 - RNA, 19 nt, Artificial Sequence
  Description of Artificial Sequence: Synthetic oligonucleotide
  Antisense strand to SEQ ID NO: 1798273
ugacuuacauuucagaacc

SEQ ID NO: 1798275 - RNA, 19 nt, Artificial Sequence
  Description of Artificial Sequence: Synthetic oligonucleotide
  Sense strand starting at position 637 of SEQ ID NO: 1563141
ucugaaauguaagucaaca

SEQ ID NO: 1798276 - RNA, 19 nt, Artificial Sequence
  Description of Artificial Sequence: Synthetic oligonucleotide
  Antisense strand to SEQ ID NO: 1798275
uguugacuuacauuucaga

SEQ ID NO: 1798277 - RNA, 19 nt, Artificial Sequence
  Description of Artificial Sequence: Synthetic oligonucleotide
  Sense strand starting at position 684 of SEQ ID NO: 1563141
ggauguaaugaaugcucca

SEQ ID NO: 1798278 - RNA, 19 nt, Artificial Sequence
  Description of Artificial Sequence: Synthetic oligonucleotide
  Antisense strand to SEQ ID NO: 1798277
uggagcauucauuacaucc

SEQ ID NO: 1798279 - RNA, 19 nt, Artificial Sequence
  Description of Artificial Sequence: Synthetic oligonucleotide
  Sense strand starting at position 687 of SEQ ID NO: 1563141
uguaaugaaugcuccauaa

SEQ ID NO: 1798280 - RNA, 19 nt, Artificial Sequence
  Description of Artificial Sequence: Synthetic oligonucleotide
  Antisense strand to SEQ ID NO: 1798279
uuauggagcauucauuaca

SEQ ID NO: 1798281 - RNA, 19 nt, Artificial Sequence
  Description of Artificial Sequence: Synthetic oligonucleotide
  Sense strand starting at position 741 of SEQ ID NO: 1563141
gaaggauggagccauuguu

SEQ ID NO: 1798282 - RNA, 19 nt, Artificial Sequence
  Description of Artificial Sequence: Synthetic oligonucleotide
  Antisense strand to SEQ ID NO: 1798281
aacaauggcuccauccuuc

SEQ ID NO: 1798283 - RNA, 19 nt, Artificial Sequence
  Description of Artificial Sequence: Synthetic oligonucleotide
  Sense strand starting at position 825 of SEQ ID NO: 1563141
aguagugauaaagaugcau

SEQ ID NO: 1798284 - RNA, 19 nt, Artificial Sequence
  Description of Artificial Sequence: Synthetic oligonucleotide
  Antisense strand to SEQ ID NO: 1798283
augcaucuuuaucacuacu

SEQ ID NO: 1798285 - RNA, 19 nt, Artificial Sequence
  Description of Artificial Sequence: Synthetic oligonucleotide
  Sense strand starting at position 978 of SEQ ID NO: 1563141
aggaauaaaguuggcucua

SEQ ID NO: 1798286 - RNA, 19 nt, Artificial Sequence
  Description of Artificial Sequence: Synthetic oligonucleotide
  Antisense strand to SEQ ID NO: 1798285
uagagccaacuuuauuccu

SEQ ID NO: 1798287 - RNA, 19 nt, Artificial Sequence
  Description of Artificial Sequence: Synthetic oligonucleotide
  Sense strand starting at position 979 of SEQ ID NO: 1563141
ggaauaaaguuggcucuaa

SEQ ID NO: 1798288 - RNA, 19 nt, Artificial Sequence
  Description of Artificial Sequence: Synthetic oligonucleotide
  Antisense strand to SEQ ID NO: 1798287
uuagagccaacuuuauucc

SEQ ID NO: 1798289 - RNA, 19 nt, Artificial Sequence
  Description of Artificial Sequence: Synthetic oligonucleotide
  Sense strand starting at position 983 of SEQ ID NO: 1563141
uaaaguuggcucuaaaggu

SEQ ID NO: 1798290 - RNA, 19 nt, Artificial Sequence
  Description of Artificial Sequence: Synthetic oligonucleotide
  Antisense strand to SEQ ID NO: 1798289
accuuuagagccaacuuua

SEQ ID NO: 1798291 - RNA, 19 nt, Artificial Sequence
  Description of Artificial Sequence: Synthetic oligonucleotide
  Sense strand starting at position 991 of SEQ ID NO: 1563141
gcucuaaagguugggaaga

SEQ ID NO: 1798292 - RNA, 19 nt, Artificial Sequence
  Description of Artificial Sequence: Synthetic oligonucleotide
  Antisense strand to SEQ ID NO: 1798291
ucuucccaaccuuuagagc

SEQ ID NO: 1798293 - RNA, 19 nt, Artificial Sequence
  Description of Artificial Sequence: Synthetic oligonucleotide
  Sense strand starting at position 1502 of SEQ ID NO: 1563141
gauaaugcugucuaugaaa

SEQ ID NO: 1798294 - RNA, 19 nt, Artificial Sequence
  Description of Artificial Sequence: Synthetic oligonucleotide
  Antisense strand to SEQ ID NO: 1798293
uuucauagacagcauuauc

SEQ ID NO: 1798295 - RNA, 19 nt, Artificial Sequence
  Description of Artificial Sequence: Synthetic oligonucleotide
  Sense strand starting at position 1567 of SEQ ID NO: 1563141
guuuguuuggguuaaugag

SEQ ID NO: 1798296 - RNA, 19 nt, Artificial Sequence
  Description of Artificial Sequence: Synthetic oligonucleotide
  Antisense strand to SEQ ID NO: 1798295
cucauuaacccaaacaaac

SEQ ID NO: 1798297 - RNA, 19 nt, Artificial Sequence
  Description of Artificial Sequence: Synthetic oligonucleotide
  Sense strand starting at position 1712 of SEQ ID NO: 1563141
ugugaaauguggccaagaa

SEQ ID NO: 1798298 - RNA, 19 nt, Artificial Sequence
  Description of Artificial Sequence: Synthetic oligonucleotide
  Antisense strand to SEQ ID NO: 1798297
uucuuggccacauuucaca

SEQ ID NO: 1798299 - RNA, 19 nt, Artificial Sequence
  Description of Artificial Sequence: Synthetic oligonucleotide
  Sense strand starting at position 1984 of SEQ ID NO: 1563141
agggaugcuugauccuuua

SEQ ID NO: 1798300 - RNA, 19 nt, Artificial Sequence
  Description of Artificial Sequence: Synthetic oligonucleotide
  Antisense strand to SEQ ID NO: 1798299
uaaaggaucaagcaucccu

SEQ ID NO: 1798301 - RNA, 19 nt, Artificial Sequence
  Description of Artificial Sequence: Synthetic oligonucleotide
  Sense strand starting at position 2076 of SEQ ID NO: 1563141
aaauguguugaguauaacu

SEQ ID NO: 1798302 - RNA, 19 nt, Artificial Sequence
  Description of Artificial Sequence: Synthetic oligonucleotide
  Antisense strand to SEQ ID NO: 1798301
aguuauacucaacacauuu

SEQ ID NO: 1798303 - RNA, 19 nt, Artificial Sequence
  Description of Artificial Sequence: Synthetic oligonucleotide
  Sense strand starting at position 2078 of SEQ ID NO: 1563141
auguguugaguauaacuaa

SEQ ID NO: 1798304 - RNA, 19 nt, Artificial Sequence
  Description of Artificial Sequence: Synthetic oligonucleotide
  Antisense strand to SEQ ID NO: 1798303
uuaguuauacucaacacau

SEQ ID NO: 1798305 - RNA, 19 nt, Artificial Sequence
  Description of Artificial Sequence: Synthetic oligonucleotide
  Sense strand starting at position 2134 of SEQ ID NO: 1563141
gacauaaggcuguauguug

SEQ ID NO: 1798306 - RNA, 19 nt, Artificial Sequence
  Description of Artificial Sequence: Synthetic oligonucleotide
  Antisense strand to SEQ ID NO: 1798305
caacauacagccuuauguc

SEQ ID NO: 1798307 - RNA, 19 nt, Artificial Sequence
  Description of Artificial Sequence: Synthetic oligonucleotide
  Sense strand starting at position 2152 of SEQ ID NO: 1563141
gugauuagugcauauggaa

SEQ ID NO: 1798308 - RNA, 19 nt, Artificial Sequence
  Description of Artificial Sequence: Synthetic oligonucleotide
  Antisense strand to SEQ ID NO: 1798307
uuccauaugcacuaaucac

SEQ ID NO: 1798309 - RNA, 19 nt, Artificial Sequence
  Description of Artificial Sequence: Synthetic oligonucleotide
  Sense strand starting at position 2181 of SEQ ID NO: 1563141
ugggcaauaauagguuuaa

SEQ ID NO: 1798310 - RNA, 19 nt, Artificial Sequence
  Description of Artificial Sequence: Synthetic oligonucleotide
  Antisense strand to SEQ ID NO: 1798309
uuaaaccuauuauugccca

SEQ ID NO: 1798311 - RNA, 19 nt, Artificial Sequence
  Description of Artificial Sequence: Synthetic oligonucleotide
  Sense strand starting at position 2182 of SEQ ID NO: 1563141
gggcaauaauagguuuaac

SEQ ID NO: 1798312 - RNA, 19 nt, Artificial Sequence
  Description of Artificial Sequence: Synthetic oligonucleotide
  Antisense strand to SEQ ID NO: 1798311
guuaaaccuauuauugccc

SEQ ID NO: 1798313 - RNA, 19 nt, Artificial Sequence
  Description of Artificial Sequence: Synthetic oligonucleotide
  Sense strand starting at position 2234 of SEQ ID NO: 1563141
agcaaauuaguugacugua

SEQ ID NO: 1798314 - RNA, 19 nt, Artificial Sequence
  Description of Artificial Sequence: Synthetic oligonucleotide
  Antisense strand to SEQ ID NO: 1798313
uacagucaacuaauuugcu

SEQ ID NO: 1798315 - RNA, 19 nt, Artificial Sequence
  Description of Artificial Sequence: Synthetic oligonucleotide
  Sense strand starting at position 2247 of SEQ ID NO: 1563141
acuguacauguugauauau

SEQ ID NO: 1798316 - RNA, 19 nt, Artificial Sequence
  Description of Artificial Sequence: Synthetic oligonucleotide
  Antisense strand to SEQ ID NO: 1798315
auauaucaacauguacagu

SEQ ID NO: 1798317 - RNA, 19 nt, Artificial Sequence
  Description of Artificial Sequence: Synthetic oligonucleotide
  Sense strand starting at position 2344 of SEQ ID NO: 1563141
caagguaggugguugagau

SEQ ID NO: 1798318 - RNA, 19 nt, Artificial Sequence
  Description of Artificial Sequence: Synthetic oligonucleotide
  Antisense strand to SEQ ID NO: 1798317
aucucaaccaccuaccuug

SEQ ID NO: 1798319 - RNA, 19 nt, Artificial Sequence
  Description of Artificial Sequence: Synthetic oligonucleotide
  Sense strand starting at position 2369 of SEQ ID NO: 1563141
guguaaucuggauauccuc

SEQ ID NO: 1798320 - RNA, 19 nt, Artificial Sequence
  Description of Artificial Sequence: Synthetic oligonucleotide
  Antisense strand to SEQ ID NO: 1798319
gaggauauccagauuacac

SEQ ID NO: 1798321 - RNA, 19 nt, Artificial Sequence
  Description of Artificial Sequence: Synthetic oligonucleotide
  Sense strand starting at position 2463 of SEQ ID NO: 1563141
cuaguuucucucugaggaa

SEQ ID NO: 1798322 - RNA, 19 nt, Artificial Sequence
  Description of Artificial Sequence: Synthetic oligonucleotide
  Antisense strand to SEQ ID NO: 1798321
uuccucagagagaaacuag

SEQ ID NO: 1798323 - RNA, 19 nt, Artificial Sequence
  Description of Artificial Sequence: Synthetic oligonucleotide
  Sense strand starting at position 2803 of SEQ ID NO: 1563141
gcagcuuggccucucagua

SEQ ID NO: 1798324 - RNA, 19 nt, Artificial Sequence
  Description of Artificial Sequence: Synthetic oligonucleotide
  Antisense strand to SEQ ID NO: 1798323
uacugagaggccaagcugc

SEQ ID NO: 1798325 - RNA, 19 nt, Artificial Sequence
  Description of Artificial Sequence: Synthetic oligonucleotide
  Sense strand starting at position 3083 of SEQ ID NO: 1563141
ggaauuugauuagauugau

SEQ ID NO: 1798326 - RNA, 19 nt, Artificial Sequence
  Description of Artificial Sequence: Synthetic oligonucleotide
  Antisense strand to SEQ ID NO: 1798325
aucaaucuaaucaaauucc

SEQ ID NO: 1798327 - RNA, 19 nt, Artificial Sequence
  Description of Artificial Sequence: Synthetic oligonucleotide
  Sense strand starting at position 3098 of SEQ ID NO: 1563141
ugaucuaauugagcaaagu

SEQ ID NO: 1798328 - RNA, 19 nt, Artificial Sequence
  Description of Artificial Sequence: Synthetic oligonucleotide
  Antisense strand to SEQ ID NO: 1798327
acuuugcucaauuagauca

SEQ ID NO: 1798329 - RNA, 19 nt, Artificial Sequence
  Description of Artificial Sequence: Synthetic oligonucleotide
  Sense strand starting at position 3099 of SEQ ID NO: 1563141
gaucuaauugagcaaaguu

SEQ ID NO: 1798330 - RNA, 19 nt, Artificial Sequence
  Description of Artificial Sequence: Synthetic oligonucleotide
  Antisense strand to SEQ ID NO: 1798329
aacuuugcucaauuagauc

SEQ ID NO: 1798331 - RNA, 19 nt, Artificial Sequence
  Description of Artificial Sequence: Synthetic oligonucleotide
  Sense strand starting at position 3146 of SEQ ID NO: 1563141
gucguccaucaauauuaga

SEQ ID NO: 1798332 - RNA, 19 nt, Artificial Sequence
  Description of Artificial Sequence: Synthetic oligonucleotide
  Antisense strand to SEQ ID NO: 1798331
ucuaauauugauggacgac

SEQ ID NO: 1798333 - RNA, 19 nt, Artificial Sequence
  Description of Artificial Sequence: Synthetic oligonucleotide
  Sense strand starting at position 3192 of SEQ ID NO: 1563141
ccagauacaguugauguua

SEQ ID NO: 1798334 - RNA, 19 nt, Artificial Sequence
  Description of Artificial Sequence: Synthetic oligonucleotide
  Antisense strand to SEQ ID NO: 1798333
uaacaucaacuguaucugg

SEQ ID NO: 1798335 - RNA, 19 nt, Artificial Sequence
  Description of Artificial Sequence: Synthetic oligonucleotide
  Sense strand starting at position 3210 of SEQ ID NO: 1563141
auacuuggaucucuuugaa

SEQ ID NO: 1798336 - RNA, 19 nt, Artificial Sequence
  Description of Artificial Sequence: Synthetic oligonucleotide
  Antisense strand to SEQ ID NO: 1798335
uucaaagagauccaaguau

SEQ ID NO: 1798337 - RNA, 19 nt, Artificial Sequence
  Description of Artificial Sequence: Synthetic oligonucleotide
  Sense strand starting at position 3213 of SEQ ID NO: 1563141
cuuggaucucuuugaauac

SEQ ID NO: 1798338 - RNA, 19 nt, Artificial Sequence
  Description of Artificial Sequence: Synthetic oligonucleotide
  Antisense strand to SEQ ID NO: 1798337
guauucaaagagauccaag

SEQ ID NO: 1798339 - RNA, 19 nt, Artificial Sequence
  Description of Artificial Sequence: Synthetic oligonucleotide
  Sense strand starting at position 3370 of SEQ ID NO: 1563141
aaaguagaugagugacauc

SEQ ID NO: 1798340 - RNA, 19 nt, Artificial Sequence
  Description of Artificial Sequence: Synthetic oligonucleotide
  Antisense strand to SEQ ID NO: 1798339
gaugucacucaucuacuuu

SEQ ID NO: 1798341 - RNA, 19 nt, Artificial Sequence
  Description of Artificial Sequence: Synthetic oligonucleotide
  Sense strand starting at position 3843 of SEQ ID NO: 1563141
cauauauuggagugucuga

SEQ ID NO: 1798342 - RNA, 19 nt, Artificial Sequence
  Description of Artificial Sequence: Synthetic oligonucleotide
  Antisense strand to SEQ ID NO: 1798341
ucagacacuccaauauaug

SEQ ID NO: 1798343 - RNA, 19 nt, Artificial Sequence
  Description of Artificial Sequence: Synthetic oligonucleotide
  Sense strand starting at position 3896 of SEQ ID NO: 1563141
guggguaaucucuacuaau

SEQ ID NO: 1798344 - RNA, 19 nt, Artificial Sequence
  Description of Artificial Sequence: Synthetic oligonucleotide
  Antisense strand to SEQ ID NO: 1798343
auuaguagagauuacccac

SEQ ID NO: 1798345 - RNA, 19 nt, Artificial Sequence
  Description of Artificial Sequence: Synthetic oligonucleotide
  Sense strand starting at position 115 of SEQ ID NO: 1563142
gggccuaaucaagguggga

SEQ ID NO: 1798346 - RNA, 19 nt, Artificial Sequence
  Description of Artificial Sequence: Synthetic oligonucleotide
  Antisense strand to SEQ ID NO: 1798345
ucccaccuugauuaggccc

SEQ ID NO: 1798347 - RNA, 19 nt, Artificial Sequence
  Description of Artificial Sequence: Synthetic oligonucleotide
  Sense strand starting at position 138 of SEQ ID NO: 1563142
gugacuguagugugauauc

SEQ ID NO: 1798348 - RNA, 19 nt, Artificial Sequence
  Description of Artificial Sequence: Synthetic oligonucleotide
  Antisense strand to SEQ ID NO: 1798347
gauaucacacuacagucac

SEQ ID NO: 1798349 - RNA, 19 nt, Artificial Sequence
  Description of Artificial Sequence: Synthetic oligonucleotide
  Sense strand starting at position 147 of SEQ ID NO: 1563142
gugugauaucugugguccu

SEQ ID NO: 1798350 - RNA, 19 nt, Artificial Sequence
  Description of Artificial Sequence: Synthetic oligonucleotide
  Antisense strand to SEQ ID NO: 1798349
aggaccacagauaucacac

SEQ ID NO: 1798351 - RNA, 19 nt, Artificial Sequence
  Description of Artificial Sequence: Synthetic oligonucleotide
  Sense strand starting at position 206 of SEQ ID NO: 1563142
ugaggaauuuacugggucu

SEQ ID NO: 1798352 - RNA, 19 nt, Artificial Sequence
  Description of Artificial Sequence: Synthetic oligonucleotide
  Antisense strand to SEQ ID NO: 1798351
agacccaguaaauuccuca

SEQ ID NO: 1798353 - RNA, 19 nt, Artificial Sequence
  Description of Artificial Sequence: Synthetic oligonucleotide
  Sense strand starting at position 545 of SEQ ID NO: 1563142
gaggaagauguuugugugu

SEQ ID NO: 1798354 - RNA, 19 nt, Artificial Sequence
  Description of Artificial Sequence: Synthetic oligonucleotide
  Antisense strand to SEQ ID NO: 1798353
acacacaaacaucuuccuc

SEQ ID NO: 1798355 - RNA, 19 nt, Artificial Sequence
  Description of Artificial Sequence: Synthetic oligonucleotide
  Sense strand starting at position 730 of SEQ ID NO: 1563142
ggcggucaccagugucaga

SEQ ID NO: 1798356 - RNA, 19 nt, Artificial Sequence
  Description of Artificial Sequence: Synthetic oligonucleotide
  Antisense strand to SEQ ID NO: 1798355
ucugacacuggugaccgcc

SEQ ID NO: 1798357 - RNA, 19 nt, Artificial Sequence
  Description of Artificial Sequence: Synthetic oligonucleotide
  Sense strand starting at position 748 of SEQ ID NO: 1563142
aagugucuccagcagacaa

SEQ ID NO: 1798358 - RNA, 19 nt, Artificial Sequence
  Description of Artificial Sequence: Synthetic oligonucleotide
  Antisense strand to SEQ ID NO: 1798357
uugucugcuggagacacuu

SEQ ID NO: 1798359 - RNA, 19 nt, Artificial Sequence
  Description of Artificial Sequence: Synthetic oligonucleotide
  Sense strand starting at position 858 of SEQ ID NO: 1563142
ugauacguuccguacuaca

SEQ ID NO: 1798360 - RNA, 19 nt, Artificial Sequence
  Description of Artificial Sequence: Synthetic oligonucleotide
  Antisense strand to SEQ ID NO: 1798359
uguaguacggaacguauca

SEQ ID NO: 1798361 - RNA, 19 nt, Artificial Sequence
  Description of Artificial Sequence: Synthetic oligonucleotide
  Sense strand starting at position 968 of SEQ ID NO: 1563142
gccaguauccuccaaggga

SEQ ID NO: 1798362 - RNA, 19 nt, Artificial Sequence
  Description of Artificial Sequence: Synthetic oligonucleotide
  Antisense strand to SEQ ID NO: 1798361
ucccuuggaggauacuggc

SEQ ID NO: 1798363 - RNA, 19 nt, Artificial Sequence
  Description of Artificial Sequence: Synthetic oligonucleotide
  Sense strand starting at position 1182 of SEQ ID NO: 1563142
caagguucugaagggaagu

SEQ ID NO: 1798364 - RNA, 19 nt, Artificial Sequence
  Description of Artificial Sequence: Synthetic oligonucleotide
  Antisense strand to SEQ ID NO: 1798363
acuucccuucagaaccuug

SEQ ID NO: 1798365 - RNA, 19 nt, Artificial Sequence
  Description of Artificial Sequence: Synthetic oligonucleotide
  Sense strand starting at position 1313 of SEQ ID NO: 1563142
cagcuugaguccgcagaaa

SEQ ID NO: 1798366 - RNA, 19 nt, Artificial Sequence
  Description of Artificial Sequence: Synthetic oligonucleotide
  Antisense strand to SEQ ID NO: 1798365
uuucugcggacucaagcug

SEQ ID NO: 1798367 - RNA, 19 nt, Artificial Sequence
  Description of Artificial Sequence: Synthetic oligonucleotide
  Sense strand starting at position 1428 of SEQ ID NO: 1563142
gcaaaugugcuacaacaaa

SEQ ID NO: 1798368 - RNA, 19 nt, Artificial Sequence
  Description of Artificial Sequence: Synthetic oligonucleotide
  Antisense strand to SEQ ID NO: 1798367
uuuguuguagcacauuugc

SEQ ID NO: 1798369 - RNA, 19 nt, Artificial Sequence
  Description of Artificial Sequence: Synthetic oligonucleotide
  Sense strand starting at position 2046 of SEQ ID NO: 1563142
uccugauuggcaggcauau

SEQ ID NO: 1798370 - RNA, 19 nt, Artificial Sequence
  Description of Artificial Sequence: Synthetic oligonucleotide
  Antisense strand to SEQ ID NO: 1798369
auaugccugccaaucagga

SEQ ID NO: 1798371 - RNA, 19 nt, Artificial Sequence
  Description of Artificial Sequence: Synthetic oligonucleotide
  Sense strand starting at position 2284 of SEQ ID NO: 1563142
gccggaucgguuucgguuu

SEQ ID NO: 1798372 - RNA, 19 nt, Artificial Sequence
  Description of Artificial Sequence: Synthetic oligonucleotide
  Antisense strand to SEQ ID NO: 1798371
aaaccgaaaccgauccggc

SEQ ID NO: 1798373 - RNA, 19 nt, Artificial Sequence
  Description of Artificial Sequence: Synthetic oligonucleotide
  Sense strand starting at position 2329 of SEQ ID NO: 1563142
ugugcauucgcgguacugu

SEQ ID NO: 1798374 - RNA, 19 nt, Artificial Sequence
  Description of Artificial Sequence: Synthetic oligonucleotide
  Antisense strand to SEQ ID NO: 1798373
acaguaccgcgaaugcaca

SEQ ID NO: 1798375 - RNA, 19 nt, Artificial Sequence
  Description of Artificial Sequence: Synthetic oligonucleotide
  Sense strand starting at position 2364 of SEQ ID NO: 1563142
ggacguuuauuccugagcu

SEQ ID NO: 1798376 - RNA, 19 nt, Artificial Sequence
  Description of Artificial Sequence: Synthetic oligonucleotide
  Antisense strand to SEQ ID NO: 1798375
agcucaggaauaaacgucc

SEQ ID NO: 1798377 - RNA, 19 nt, Artificial Sequence
  Description of Artificial Sequence: Synthetic oligonucleotide
  Sense strand starting at position 2366 of SEQ ID NO: 1563142
acguuuauuccugagcuag

SEQ ID NO: 1798378 - RNA, 19 nt, Artificial Sequence
  Description of Artificial Sequence: Synthetic oligonucleotide
  Antisense strand to SEQ ID NO: 1798377
cuagcucaggaauaaacgu

SEQ ID NO: 1798379 - RNA, 19 nt, Artificial Sequence
  Description of Artificial Sequence: Synthetic oligonucleotide
  Sense strand starting at position 2416 of SEQ ID NO: 1563142
ugaggaaucugggaagacu

SEQ ID NO: 1798380 - RNA, 19 nt, Artificial Sequence
  Description of Artificial Sequence: Synthetic oligonucleotide
  Antisense strand to SEQ ID NO: 1798379
agucuucccagauuccuca

SEQ ID NO: 1798381 - RNA, 19 nt, Artificial Sequence
  Description of Artificial Sequence: Synthetic oligonucleotide
  Sense strand starting at position 2453 of SEQ ID NO: 1563142
gccuauccuuagucguaga

SEQ ID NO: 1798382 - RNA, 19 nt, Artificial Sequence
  Description of Artificial Sequence: Synthetic oligonucleotide
  Antisense strand to SEQ ID NO: 1798381
ucuacgacuaaggauaggc

SEQ ID NO: 1798383 - RNA, 19 nt, Artificial Sequence
  Description of Artificial Sequence: Synthetic oligonucleotide
  Sense strand starting at position 2458 of SEQ ID NO: 1563142
uccuuagucguagagacaa

SEQ ID NO: 1798384 - RNA, 19 nt, Artificial Sequence
  Description of Artificial Sequence: Synthetic oligonucleotide
  Antisense strand to SEQ ID NO: 1798383
uugucucuacgacuaagga

SEQ ID NO: 1798385 - RNA, 19 nt, Artificial Sequence
  Description of Artificial Sequence: Synthetic oligonucleotide
  Sense strand starting at position 2514 of SEQ ID NO: 1563142
ggacucaccugccaggaaa

SEQ ID NO: 1798386 - RNA, 19 nt, Artificial Sequence
  Description of Artificial Sequence: Synthetic oligonucleotide
  Antisense strand to SEQ ID NO: 1798385
uuuccuggcaggugagucc

SEQ ID NO: 1798387 - RNA, 19 nt, Artificial Sequence
  Description of Artificial Sequence: Synthetic oligonucleotide
  Sense strand starting at position 2899 of SEQ ID NO: 1563142
ucuaaauauugagaggaaa

SEQ ID NO: 1798388 - RNA, 19 nt, Artificial Sequence
  Description of Artificial Sequence: Synthetic oligonucleotide
  Antisense strand to SEQ ID NO: 1798387
uuuccucucaauauuuaga

SEQ ID NO: 1798389 - RNA, 19 nt, Artificial Sequence
  Description of Artificial Sequence: Synthetic oligonucleotide
  Sense strand starting at position 2917 of SEQ ID NO: 1563142
aaucuugucugggcccaaa

SEQ ID NO: 1798390 - RNA, 19 nt, Artificial Sequence
  Description of Artificial Sequence: Synthetic oligonucleotide
  Antisense strand to SEQ ID NO: 1798389
uuugggcccagacaagauu

SEQ ID NO: 1798391 - RNA, 19 nt, Artificial Sequence
  Description of Artificial Sequence: Synthetic oligonucleotide
  Sense strand starting at position 3174 of SEQ ID NO: 1563142
guggauuaaagcugaggau

SEQ ID NO: 1798392 - RNA, 19 nt, Artificial Sequence
  Description of Artificial Sequence: Synthetic oligonucleotide
  Antisense strand to SEQ ID NO: 1798391
auccucagcuuuaauccac

SEQ ID NO: 1798393 - RNA, 19 nt, Artificial Sequence
  Description of Artificial Sequence: Synthetic oligonucleotide
  Sense strand starting at position 3177 of SEQ ID NO: 1563142
gauuaaagcugaggauaga

SEQ ID NO: 1798394 - RNA, 19 nt, Artificial Sequence
  Description of Artificial Sequence: Synthetic oligonucleotide
  Antisense strand to SEQ ID NO: 1798393
ucuauccucagcuuuaauc

SEQ ID NO: 1798395 - RNA, 19 nt, Artificial Sequence
  Description of Artificial Sequence: Synthetic oligonucleotide
  Sense strand starting at position 3206 of SEQ ID NO: 1563142
agagaacaaugcgugcuau

SEQ ID NO: 1798396 - RNA, 19 nt, Artificial Sequence
  Description of Artificial Sequence: Synthetic oligonucleotide
  Antisense strand to SEQ ID NO: 1798395
auagcacgcauuguucucu

SEQ ID NO: 1798397 - RNA, 19 nt, Artificial Sequence
  Description of Artificial Sequence: Synthetic oligonucleotide
  Sense strand starting at position 3207 of SEQ ID NO: 1563142
gagaacaaugcgugcuauu

SEQ ID NO: 1798398 - RNA, 19 nt, Artificial Sequence
  Description of Artificial Sequence: Synthetic oligonucleotide
  Antisense strand to SEQ ID NO: 1798397
aauagcacgcauuguucuc

SEQ ID NO: 1798399 - RNA, 19 nt, Artificial Sequence
  Description of Artificial Sequence: Synthetic oligonucleotide
  Sense strand starting at position 3460 of SEQ ID NO: 1563142
ucaucaggcucccuugaua

SEQ ID NO: 1798400 - RNA, 19 nt, Artificial Sequence
  Description of Artificial Sequence: Synthetic oligonucleotide
  Antisense strand to SEQ ID NO: 1798399
uaucaagggagccugauga

SEQ ID NO: 1798401 - RNA, 19 nt, Artificial Sequence
  Description of Artificial Sequence: Synthetic oligonucleotide
  Sense strand starting at position 3471 of SEQ ID NO: 1563142
ccuugauaucuuugagauc

SEQ ID NO: 1798402 - RNA, 19 nt, Artificial Sequence
  Description of Artificial Sequence: Synthetic oligonucleotide
  Antisense strand to SEQ ID NO: 1798401
gaucucaaagauaucaagg

SEQ ID NO: 1798403 - RNA, 19 nt, Artificial Sequence
  Description of Artificial Sequence: Synthetic oligonucleotide
  Sense strand starting at position 3474 of SEQ ID NO: 1563142
ugauaucuuugagaucuga

SEQ ID NO: 1798404 - RNA, 19 nt, Artificial Sequence
  Description of Artificial Sequence: Synthetic oligonucleotide
  Antisense strand to SEQ ID NO: 1798403
ucagaucucaaagauauca

SEQ ID NO: 1798405 - RNA, 19 nt, Artificial Sequence
  Description of Artificial Sequence: Synthetic oligonucleotide
  Sense strand starting at position 3524 of SEQ ID NO: 1563142
augaucuuccacggaauau

SEQ ID NO: 1798406 - RNA, 19 nt, Artificial Sequence
  Description of Artificial Sequence: Synthetic oligonucleotide
  Antisense strand to SEQ ID NO: 1798405
auauuccguggaagaucau

SEQ ID NO: 1798407 - RNA, 19 nt, Artificial Sequence
  Description of Artificial Sequence: Synthetic oligonucleotide
  Sense strand starting at position 3553 of SEQ ID NO: 1563142
auagauguuccaugaccuu

SEQ ID NO: 1798408 - RNA, 19 nt, Artificial Sequence
  Description of Artificial Sequence: Synthetic oligonucleotide
  Antisense strand to SEQ ID NO: 1798407
aaggucauggaacaucuau

SEQ ID NO: 1798409 - RNA, 19 nt, Artificial Sequence
  Description of Artificial Sequence: Synthetic oligonucleotide
  Sense strand starting at position 3699 of SEQ ID NO: 1563142
ucuggauggcuggacuaua

SEQ ID NO: 1798410 - RNA, 19 nt, Artificial Sequence
  Description of Artificial Sequence: Synthetic oligonucleotide
  Antisense strand to SEQ ID NO: 1798409
uauaguccagccauccaga

SEQ ID NO: 1798411 - RNA, 19 nt, Artificial Sequence
  Description of Artificial Sequence: Synthetic oligonucleotide
  Sense strand starting at position 3763 of SEQ ID NO: 1563142
ucucauuugugggccugau

SEQ ID NO: 1798412 - RNA, 19 nt, Artificial Sequence
  Description of Artificial Sequence: Synthetic oligonucleotide
  Antisense strand to SEQ ID NO: 1798411
aucaggcccacaaaugaga

SEQ ID NO: 1798413 - RNA, 19 nt, Artificial Sequence
  Description of Artificial Sequence: Synthetic oligonucleotide
  Sense strand starting at position 3773 of SEQ ID NO: 1563142
gggccugauuuggaaguuu

SEQ ID NO: 1798414 - RNA, 19 nt, Artificial Sequence
  Description of Artificial Sequence: Synthetic oligonucleotide
  Antisense strand to SEQ ID NO: 1798413
aaacuuccaaaucaggccc

SEQ ID NO: 1798415 - RNA, 19 nt, Artificial Sequence
  Description of Artificial Sequence: Synthetic oligonucleotide
  Sense strand starting at position 3894 of SEQ ID NO: 1563142
agacuaagauuaugagaag

SEQ ID NO: 1798416 - RNA, 19 nt, Artificial Sequence
  Description of Artificial Sequence: Synthetic oligonucleotide
  Antisense strand to SEQ ID NO: 1798415
cuucucauaaucuuagucu

SEQ ID NO: 1798417 - RNA, 19 nt, Artificial Sequence
  Description of Artificial Sequence: Synthetic oligonucleotide
  Sense strand starting at position 3897 of SEQ ID NO: 1563142
cuaagauuaugagaaggca

SEQ ID NO: 1798418 - RNA, 19 nt, Artificial Sequence
  Description of Artificial Sequence: Synthetic oligonucleotide
  Antisense strand to SEQ ID NO: 1798417
ugccuucucauaaucuuag

SEQ ID NO: 1798419 - RNA, 19 nt, Artificial Sequence
  Description of Artificial Sequence: Synthetic oligonucleotide
  Sense strand starting at position 3900 of SEQ ID NO: 1563142
agauuaugagaaggcaguu

SEQ ID NO: 1798420 - RNA, 19 nt, Artificial Sequence
  Description of Artificial Sequence: Synthetic oligonucleotide
  Antisense strand to SEQ ID NO: 1798419
aacugccuucucauaaucu

SEQ ID NO: 1798421 - RNA, 19 nt, Artificial Sequence
  Description of Artificial Sequence: Synthetic oligonucleotide
  Sense strand starting at position 3953 of SEQ ID NO: 1563142
agcagucucaguuguggaa

SEQ ID NO: 1798422 - RNA, 19 nt, Artificial Sequence
  Description of Artificial Sequence: Synthetic oligonucleotide
  Antisense strand to SEQ ID NO: 1798421
uuccacaacugagacugcu

SEQ ID NO: 1798423 - RNA, 19 nt, Artificial Sequence
  Description of Artificial Sequence: Synthetic oligonucleotide
  Sense strand starting at position 3980 of SEQ ID NO: 1563142
agaggaggugugcaaagua

SEQ ID NO: 1798424 - RNA, 19 nt, Artificial Sequence
  Description of Artificial Sequence: Synthetic oligonucleotide
  Antisense strand to SEQ ID NO: 1798423
uacuuugcacaccuccucu

SEQ ID NO: 1798425 - RNA, 19 nt, Artificial Sequence
  Description of Artificial Sequence: Synthetic oligonucleotide
  Sense strand starting at position 108 of SEQ ID NO: 1563143
uuagucuaggcagaaaugu

SEQ ID NO: 1798426 - RNA, 19 nt, Artificial Sequence
  Description of Artificial Sequence: Synthetic oligonucleotide
  Antisense strand to SEQ ID NO: 1798425
acauuucugccuagacuaa

SEQ ID NO: 1798427 - RNA, 19 nt, Artificial Sequence
  Description of Artificial Sequence: Synthetic oligonucleotide
  Sense strand starting at position 116 of SEQ ID NO: 1563143
ggcagaaauguuuauacuu

SEQ ID NO: 1798428 - RNA, 19 nt, Artificial Sequence
  Description of Artificial Sequence: Synthetic oligonucleotide
  Antisense strand to SEQ ID NO: 1798427
aaguauaaacauuucugcc

SEQ ID NO: 1798429 - RNA, 19 nt, Artificial Sequence
  Description of Artificial Sequence: Synthetic oligonucleotide
  Sense strand starting at position 371 of SEQ ID NO: 1563143
uuacauucugucuagcauu

SEQ ID NO: 1798430 - RNA, 19 nt, Artificial Sequence
  Description of Artificial Sequence: Synthetic oligonucleotide
  Antisense strand to SEQ ID NO: 1798429
aaugcuagacagaauguaa

SEQ ID NO: 1798431 - RNA, 19 nt, Artificial Sequence
  Description of Artificial Sequence: Synthetic oligonucleotide
  Sense strand starting at position 611 of SEQ ID NO: 1563143
guucucaaaucaucaagua

SEQ ID NO: 1798432 - RNA, 19 nt, Artificial Sequence
  Description of Artificial Sequence: Synthetic oligonucleotide
  Antisense strand to SEQ ID NO: 1798431
uacuugaugauuugagaac

SEQ ID NO: 1798433 - RNA, 19 nt, Artificial Sequence
  Description of Artificial Sequence: Synthetic oligonucleotide
  Sense strand starting at position 667 of SEQ ID NO: 1563143
gcgaaugcacgcuuaaugu

SEQ ID NO: 1798434 - RNA, 19 nt, Artificial Sequence
  Description of Artificial Sequence: Synthetic oligonucleotide
  Antisense strand to SEQ ID NO: 1798433
acauuaagcgugcauucgc

SEQ ID NO: 1798435 - RNA, 19 nt, Artificial Sequence
  Description of Artificial Sequence: Synthetic oligonucleotide
  Sense strand starting at position 710 of SEQ ID NO: 1563143
gacaguucucuuugaauga

SEQ ID NO: 1798436 - RNA, 19 nt, Artificial Sequence
  Description of Artificial Sequence: Synthetic oligonucleotide
  Antisense strand to SEQ ID NO: 1798435
ucauucaaagagaacuguc

SEQ ID NO: 1798437 - RNA, 19 nt, Artificial Sequence
  Description of Artificial Sequence: Synthetic oligonucleotide
  Sense strand starting at position 714 of SEQ ID NO: 1563143
guucucuuugaaugagcua

SEQ ID NO: 1798438 - RNA, 19 nt, Artificial Sequence
  Description of Artificial Sequence: Synthetic oligonucleotide
  Antisense strand to SEQ ID NO: 1798437
uagcucauucaaagagaac

SEQ ID NO: 1798439 - RNA, 19 nt, Artificial Sequence
  Description of Artificial Sequence: Synthetic oligonucleotide
  Sense strand starting at position 717 of SEQ ID NO: 1563143
cucuuugaaugagcuauua

SEQ ID NO: 1798440 - RNA, 19 nt, Artificial Sequence
  Description of Artificial Sequence: Synthetic oligonucleotide
  Antisense strand to SEQ ID NO: 1798439
uaauagcucauucaaagag

SEQ ID NO: 1798441 - RNA, 19 nt, Artificial Sequence
  Description of Artificial Sequence: Synthetic oligonucleotide
  Sense strand starting at position 730 of SEQ ID NO: 1563143
cuauuauccagacggugga

SEQ ID NO: 1798442 - RNA, 19 nt, Artificial Sequence
  Description of Artificial Sequence: Synthetic oligonucleotide
  Antisense strand to SEQ ID NO: 1798441
uccaccgucuggauaauag

SEQ ID NO: 1798443 - RNA, 19 nt, Artificial Sequence
  Description of Artificial Sequence: Synthetic oligonucleotide
  Sense strand starting at position 995 of SEQ ID NO: 1563143
ccugcaaugggauaguagu

SEQ ID NO: 1798444 - RNA, 19 nt, Artificial Sequence
  Description of Artificial Sequence: Synthetic oligonucleotide
  Antisense strand to SEQ ID NO: 1798443
acuacuaucccauugcagg

SEQ ID NO: 1798445 - RNA, 19 nt, Artificial Sequence
  Description of Artificial Sequence: Synthetic oligonucleotide
  Sense strand starting at position 1012 of SEQ ID NO: 1563143
guucuccaugugcaagaua

SEQ ID NO: 1798446 - RNA, 19 nt, Artificial Sequence
  Description of Artificial Sequence: Synthetic oligonucleotide
  Antisense strand to SEQ ID NO: 1798445
uaucuugcacauggagaac

SEQ ID NO: 1798447 - RNA, 19 nt, Artificial Sequence
  Description of Artificial Sequence: Synthetic oligonucleotide
  Sense strand starting at position 1090 of SEQ ID NO: 1563143
aggucaacaccuugaguaa

SEQ ID NO: 1798448 - RNA, 19 nt, Artificial Sequence
  Description of Artificial Sequence: Synthetic oligonucleotide
  Antisense strand to SEQ ID NO: 1798447
uuacucaagguguugaccu

SEQ ID NO: 1798449 - RNA, 19 nt, Artificial Sequence
  Description of Artificial Sequence: Synthetic oligonucleotide
  Sense strand starting at position 1091 of SEQ ID NO: 1563143
ggucaacaccuugaguaac

SEQ ID NO: 1798450 - RNA, 19 nt, Artificial Sequence
  Description of Artificial Sequence: Synthetic oligonucleotide
  Antisense strand to SEQ ID NO: 1798449
guuacucaagguguugacc

SEQ ID NO: 1798451 - RNA, 19 nt, Artificial Sequence
  Description of Artificial Sequence: Synthetic oligonucleotide
  Sense strand starting at position 1482 of SEQ ID NO: 1563143
cugguauccauacagguga

SEQ ID NO: 1798452 - RNA, 19 nt, Artificial Sequence
  Description of Artificial Sequence: Synthetic oligonucleotide
  Antisense strand to SEQ ID NO: 1798451
ucaccuguauggauaccag

SEQ ID NO: 1798453 - RNA, 19 nt, Artificial Sequence
  Description of Artificial Sequence: Synthetic oligonucleotide
  Sense strand starting at position 1945 of SEQ ID NO: 1563143
guuuccgacccauaaguga

SEQ ID NO: 1798454 - RNA, 19 nt, Artificial Sequence
  Description of Artificial Sequence: Synthetic oligonucleotide
  Antisense strand to SEQ ID NO: 1798453
ucacuuaugggucggaaac

SEQ ID NO: 1798455 - RNA, 19 nt, Artificial Sequence
  Description of Artificial Sequence: Synthetic oligonucleotide
  Sense strand starting at position 2480 of SEQ ID NO: 1563143
ggguuucugaacuguugga

SEQ ID NO: 1798456 - RNA, 19 nt, Artificial Sequence
  Description of Artificial Sequence: Synthetic oligonucleotide
  Antisense strand to SEQ ID NO: 1798455
uccaacaguucagaaaccc

SEQ ID NO: 1798457 - RNA, 19 nt, Artificial Sequence
  Description of Artificial Sequence: Synthetic oligonucleotide
  Sense strand starting at position 2542 of SEQ ID NO: 1563143
ccuguaaaguguguacaaa

SEQ ID NO: 1798458 - RNA, 19 nt, Artificial Sequence
  Description of Artificial Sequence: Synthetic oligonucleotide
  Antisense strand to SEQ ID NO: 1798457
uuuguacacacuuuacagg

SEQ ID NO: 1798459 - RNA, 19 nt, Artificial Sequence
  Description of Artificial Sequence: Synthetic oligonucleotide
  Sense strand starting at position 2846 of SEQ ID NO: 1563143
uuaggaauauuaucuguag

SEQ ID NO: 1798460 - RNA, 19 nt, Artificial Sequence
  Description of Artificial Sequence: Synthetic oligonucleotide
  Antisense strand to SEQ ID NO: 1798459
cuacagauaauauuccuaa

SEQ ID NO: 1798461 - RNA, 19 nt, Artificial Sequence
  Description of Artificial Sequence: Synthetic oligonucleotide
  Sense strand starting at position 2847 of SEQ ID NO: 1563143
uaggaauauuaucuguagu

SEQ ID NO: 1798462 - RNA, 19 nt, Artificial Sequence
  Description of Artificial Sequence: Synthetic oligonucleotide
  Antisense strand to SEQ ID NO: 1798461
acuacagauaauauuccua

SEQ ID NO: 1798463 - RNA, 19 nt, Artificial Sequence
  Description of Artificial Sequence: Synthetic oligonucleotide
  Sense strand starting at position 2848 of SEQ ID NO: 1563143
aggaauauuaucuguagug

SEQ ID NO: 1798464 - RNA, 19 nt, Artificial Sequence
  Description of Artificial Sequence: Synthetic oligonucleotide
  Antisense strand to SEQ ID NO: 1798463
cacuacagauaauauuccu

SEQ ID NO: 1798465 - RNA, 19 nt, Artificial Sequence
  Description of Artificial Sequence: Synthetic oligonucleotide
  Sense strand starting at position 2857 of SEQ ID NO: 1563143
aucuguagugcucagaucu

SEQ ID NO: 1798466 - RNA, 19 nt, Artificial Sequence
  Description of Artificial Sequence: Synthetic oligonucleotide
  Antisense strand to SEQ ID NO: 1798465
agaucugagcacuacagau

SEQ ID NO: 1798467 - RNA, 19 nt, Artificial Sequence
  Description of Artificial Sequence: Synthetic oligonucleotide
  Sense strand starting at position 2972 of SEQ ID NO: 1563143
aauuaaaugcuuggaugga

SEQ ID NO: 1798468 - RNA, 19 nt, Artificial Sequence
  Description of Artificial Sequence: Synthetic oligonucleotide
  Antisense strand to SEQ ID NO: 1798467
uccauccaagcauuuaauu

SEQ ID NO: 1798469 - RNA, 19 nt, Artificial Sequence
  Description of Artificial Sequence: Synthetic oligonucleotide
  Sense strand starting at position 3026 of SEQ ID NO: 1563143
cuaagugcagcuuaauaau

SEQ ID NO: 1798470 - RNA, 19 nt, Artificial Sequence
  Description of Artificial Sequence: Synthetic oligonucleotide
  Antisense strand to SEQ ID NO: 1798469
auuauuaagcugcacuuag

SEQ ID NO: 1798471 - RNA, 19 nt, Artificial Sequence
  Description of Artificial Sequence: Synthetic oligonucleotide
  Sense strand starting at position 3077 of SEQ ID NO: 1563143
cguagaaaugaacgugaua

SEQ ID NO: 1798472 - RNA, 19 nt, Artificial Sequence
  Description of Artificial Sequence: Synthetic oligonucleotide
  Antisense strand to SEQ ID NO: 1798471
uaucacguucauuucuacg

SEQ ID NO: 1798473 - RNA, 19 nt, Artificial Sequence
  Description of Artificial Sequence: Synthetic oligonucleotide
  Sense strand starting at position 3095 of SEQ ID NO: 1563143
agaaauagaaagcguaagu

SEQ ID NO: 1798474 - RNA, 19 nt, Artificial Sequence
  Description of Artificial Sequence: Synthetic oligonucleotide
  Antisense strand to SEQ ID NO: 1798473
acuuacgcuuucuauuucu

SEQ ID NO: 1798475 - RNA, 19 nt, Artificial Sequence
  Description of Artificial Sequence: Synthetic oligonucleotide
  Sense strand starting at position 3100 of SEQ ID NO: 1563143
uagaaagcguaaguuauuu

SEQ ID NO: 1798476 - RNA, 19 nt, Artificial Sequence
  Description of Artificial Sequence: Synthetic oligonucleotide
  Antisense strand to SEQ ID NO: 1798475
aaauaacuuacgcuuucua

SEQ ID NO: 1798477 - RNA, 19 nt, Artificial Sequence
  Description of Artificial Sequence: Synthetic oligonucleotide
  Sense strand starting at position 3104 of SEQ ID NO: 1563143
aagcguaaguuauuugcau

SEQ ID NO: 1798478 - RNA, 19 nt, Artificial Sequence
  Description of Artificial Sequence: Synthetic oligonucleotide
  Antisense strand to SEQ ID NO: 1798477
augcaaauaacuuacgcuu

SEQ ID NO: 1798479 - RNA, 19 nt, Artificial Sequence
  Description of Artificial Sequence: Synthetic oligonucleotide
  Sense strand starting at position 3105 of SEQ ID NO: 1563143
agcguaaguuauuugcauu

SEQ ID NO: 1798480 - RNA, 19 nt, Artificial Sequence
  Description of Artificial Sequence: Synthetic oligonucleotide
  Antisense strand to SEQ ID NO: 1798479
aaugcaaauaacuuacgcu

SEQ ID NO: 1798481 - RNA, 19 nt, Artificial Sequence
  Description of Artificial Sequence: Synthetic oligonucleotide
  Sense strand starting at position 3106 of SEQ ID NO: 1563143
gcguaaguuauuugcauug

SEQ ID NO: 1798482 - RNA, 19 nt, Artificial Sequence
  Description of Artificial Sequence: Synthetic oligonucleotide
  Antisense strand to SEQ ID NO: 1798481
caaugcaaauaacuuacgc

SEQ ID NO: 1798483 - RNA, 19 nt, Artificial Sequence
  Description of Artificial Sequence: Synthetic oligonucleotide
  Sense strand starting at position 3111 of SEQ ID NO: 1563143
aguuauuugcauuguaucu

SEQ ID NO: 1798484 - RNA, 19 nt, Artificial Sequence
  Description of Artificial Sequence: Synthetic oligonucleotide
  Antisense strand to SEQ ID NO: 1798483
agauacaaugcaaauaacu

SEQ ID NO: 1798485 - RNA, 19 nt, Artificial Sequence
  Description of Artificial Sequence: Synthetic oligonucleotide
  Sense strand starting at position 3153 of SEQ ID NO: 1563143
aaagucagguaucugcaua

SEQ ID NO: 1798486 - RNA, 19 nt, Artificial Sequence
  Description of Artificial Sequence: Synthetic oligonucleotide
  Antisense strand to SEQ ID NO: 1798485
uaugcagauaccugacuuu

SEQ ID NO: 1798487 - RNA, 19 nt, Artificial Sequence
  Description of Artificial Sequence: Synthetic oligonucleotide
  Sense strand starting at position 3217 of SEQ ID NO: 1563143
ugggaucuugcagauagcu

SEQ ID NO: 1798488 - RNA, 19 nt, Artificial Sequence
  Description of Artificial Sequence: Synthetic oligonucleotide
  Antisense strand to SEQ ID NO: 1798487
agcuaucugcaagauccca

SEQ ID NO: 1798489 - RNA, 19 nt, Artificial Sequence
  Description of Artificial Sequence: Synthetic oligonucleotide
  Sense strand starting at position 3347 of SEQ ID NO: 1563143
gggcguacucaggaaguau

SEQ ID NO: 1798490 - RNA, 19 nt, Artificial Sequence
  Description of Artificial Sequence: Synthetic oligonucleotide
  Antisense strand to SEQ ID NO: 1798489
auacuuccugaguacgccc

SEQ ID NO: 1798491 - RNA, 19 nt, Artificial Sequence
  Description of Artificial Sequence: Synthetic oligonucleotide
  Sense strand starting at position 3500 of SEQ ID NO: 1563143
auaagauacuaucucguuu

SEQ ID NO: 1798492 - RNA, 19 nt, Artificial Sequence
  Description of Artificial Sequence: Synthetic oligonucleotide
  Antisense strand to SEQ ID NO: 1798491
aaacgagauaguaucuuau

SEQ ID NO: 1798493 - RNA, 19 nt, Artificial Sequence
  Description of Artificial Sequence: Synthetic oligonucleotide
  Sense strand starting at position 3526 of SEQ ID NO: 1563143
acaacaaugcucugagguu

SEQ ID NO: 1798494 - RNA, 19 nt, Artificial Sequence
  Description of Artificial Sequence: Synthetic oligonucleotide
  Antisense strand to SEQ ID NO: 1798493
aaccucagagcauuguugu

SEQ ID NO: 1798495 - RNA, 19 nt, Artificial Sequence
  Description of Artificial Sequence: Synthetic oligonucleotide
  Sense strand starting at position 3535 of SEQ ID NO: 1563143
cucugagguuacucauuaa

SEQ ID NO: 1798496 - RNA, 19 nt, Artificial Sequence
  Description of Artificial Sequence: Synthetic oligonucleotide
  Antisense strand to SEQ ID NO: 1798495
uuaaugaguaaccucagag

SEQ ID NO: 1798497 - RNA, 19 nt, Artificial Sequence
  Description of Artificial Sequence: Synthetic oligonucleotide
  Sense strand starting at position 3538 of SEQ ID NO: 1563143
ugagguuacucauuaacag

SEQ ID NO: 1798498 - RNA, 19 nt, Artificial Sequence
  Description of Artificial Sequence: Synthetic oligonucleotide
  Antisense strand to SEQ ID NO: 1798497
cuguuaaugaguaaccuca

SEQ ID NO: 1798499 - RNA, 19 nt, Artificial Sequence
  Description of Artificial Sequence: Synthetic oligonucleotide
  Sense strand starting at position 3562 of SEQ ID NO: 1563143
gcuauuaaaccucagaagu

SEQ ID NO: 1798500 - RNA, 19 nt, Artificial Sequence
  Description of Artificial Sequence: Synthetic oligonucleotide
  Antisense strand to SEQ ID NO: 1798499
acuucugagguuuaauagc

SEQ ID NO: 1798501 - RNA, 19 nt, Artificial Sequence
  Description of Artificial Sequence: Synthetic oligonucleotide
  Sense strand starting at position 3633 of SEQ ID NO: 1563143
uggcaugucugauuccaaa

SEQ ID NO: 1798502 - RNA, 19 nt, Artificial Sequence
  Description of Artificial Sequence: Synthetic oligonucleotide
  Antisense strand to SEQ ID NO: 1798501
uuuggaaucagacaugcca

SEQ ID NO: 1798503 - RNA, 19 nt, Artificial Sequence
  Description of Artificial Sequence: Synthetic oligonucleotide
  Sense strand starting at position 3914 of SEQ ID NO: 1563143
uuaauuggucggugauaug

SEQ ID NO: 1798504 - RNA, 19 nt, Artificial Sequence
  Description of Artificial Sequence: Synthetic oligonucleotide
  Antisense strand to SEQ ID NO: 1798503
cauaucaccgaccaauuaa

SEQ ID NO: 1798505 - RNA, 19 nt, Artificial Sequence
  Description of Artificial Sequence: Synthetic oligonucleotide
  Sense strand starting at position 18 of SEQ ID NO: 1563144
ugccaaagcccugagucaa

SEQ ID NO: 1798506 - RNA, 19 nt, Artificial Sequence
  Description of Artificial Sequence: Synthetic oligonucleotide
  Antisense strand to SEQ ID NO: 1798505
uugacucagggcuuuggca

SEQ ID NO: 1798507 - RNA, 19 nt, Artificial Sequence
  Description of Artificial Sequence: Synthetic oligonucleotide
  Sense strand starting at position 386 of SEQ ID NO: 1563144
uuuguccuauagccugaaa

SEQ ID NO: 1798508 - RNA, 19 nt, Artificial Sequence
  Description of Artificial Sequence: Synthetic oligonucleotide
  Antisense strand to SEQ ID NO: 1798507
uuucaggcuauaggacaaa

SEQ ID NO: 1798509 - RNA, 19 nt, Artificial Sequence
  Description of Artificial Sequence: Synthetic oligonucleotide
  Sense strand starting at position 410 of SEQ ID NO: 1563144
uccggucuccaccagacau

SEQ ID NO: 1798510 - RNA, 19 nt, Artificial Sequence
  Description of Artificial Sequence: Synthetic oligonucleotide
  Antisense strand to SEQ ID NO: 1798509
augucugguggagaccgga

SEQ ID NO: 1798511 - RNA, 19 nt, Artificial Sequence
  Description of Artificial Sequence: Synthetic oligonucleotide
  Sense strand starting at position 412 of SEQ ID NO: 1563144
cggucuccaccagacauaa

SEQ ID NO: 1798512 - RNA, 19 nt, Artificial Sequence
  Description of Artificial Sequence: Synthetic oligonucleotide
  Antisense strand to SEQ ID NO: 1798511
uuaugucugguggagaccg

SEQ ID NO: 1798513 - RNA, 19 nt, Artificial Sequence
  Description of Artificial Sequence: Synthetic oligonucleotide
  Sense strand starting at position 433 of SEQ ID NO: 1563144
uggaauuccugucuugauu

SEQ ID NO: 1798514 - RNA, 19 nt, Artificial Sequence
  Description of Artificial Sequence: Synthetic oligonucleotide
  Antisense strand to SEQ ID NO: 1798513
aaucaagacaggaauucca

SEQ ID NO: 1798515 - RNA, 19 nt, Artificial Sequence
  Description of Artificial Sequence: Synthetic oligonucleotide
  Sense strand starting at position 607 of SEQ ID NO: 1563144
aggacaauguuccuucuau

SEQ ID NO: 1798516 - RNA, 19 nt, Artificial Sequence
  Description of Artificial Sequence: Synthetic oligonucleotide
  Antisense strand to SEQ ID NO: 1798515
auagaaggaacauuguccu

SEQ ID NO: 1798517 - RNA, 19 nt, Artificial Sequence
  Description of Artificial Sequence: Synthetic oligonucleotide
  Sense strand starting at position 608 of SEQ ID NO: 1563144
ggacaauguuccuucuauu

SEQ ID NO: 1798518 - RNA, 19 nt, Artificial Sequence
  Description of Artificial Sequence: Synthetic oligonucleotide
  Antisense strand to SEQ ID NO: 1798517
aauagaaggaacauugucc

SEQ ID NO: 1798519 - RNA, 19 nt, Artificial Sequence
  Description of Artificial Sequence: Synthetic oligonucleotide
  Sense strand starting at position 763 of SEQ ID NO: 1563144
ccaagauauuucucccgcu

SEQ ID NO: 1798520 - RNA, 19 nt, Artificial Sequence
  Description of Artificial Sequence: Synthetic oligonucleotide
  Antisense strand to SEQ ID NO: 1798519
agcgggagaaauaucuugg

SEQ ID NO: 1798521 - RNA, 19 nt, Artificial Sequence
  Description of Artificial Sequence: Synthetic oligonucleotide
  Sense strand starting at position 862 of SEQ ID NO: 1563144
uugucauccugggcuauuu

SEQ ID NO: 1798522 - RNA, 19 nt, Artificial Sequence
  Description of Artificial Sequence: Synthetic oligonucleotide
  Antisense strand to SEQ ID NO: 1798521
aaauagcccaggaugacaa

SEQ ID NO: 1798523 - RNA, 19 nt, Artificial Sequence
  Description of Artificial Sequence: Synthetic oligonucleotide
  Sense strand starting at position 988 of SEQ ID NO: 1563144
guccucucucaggaaagca

SEQ ID NO: 1798524 - RNA, 19 nt, Artificial Sequence
  Description of Artificial Sequence: Synthetic oligonucleotide
  Antisense strand to SEQ ID NO: 1798523
ugcuuuccugagagaggac

SEQ ID NO: 1798525 - RNA, 19 nt, Artificial Sequence
  Description of Artificial Sequence: Synthetic oligonucleotide
  Sense strand starting at position 1135 of SEQ ID NO: 1563144
auuucuaacugcguugaga

SEQ ID NO: 1798526 - RNA, 19 nt, Artificial Sequence
  Description of Artificial Sequence: Synthetic oligonucleotide
  Antisense strand to SEQ ID NO: 1798525
ucucaacgcaguuagaaau

SEQ ID NO: 1798527 - RNA, 19 nt, Artificial Sequence
  Description of Artificial Sequence: Synthetic oligonucleotide
  Sense strand starting at position 1138 of SEQ ID NO: 1563144
ucuaacugcguugagaauu

SEQ ID NO: 1798528 - RNA, 19 nt, Artificial Sequence
  Description of Artificial Sequence: Synthetic oligonucleotide
  Antisense strand to SEQ ID NO: 1798527
aauucucaacgcaguuaga

SEQ ID NO: 1798529 - RNA, 19 nt, Artificial Sequence
  Description of Artificial Sequence: Synthetic oligonucleotide
  Sense strand starting at position 1144 of SEQ ID NO: 1563144
ugcguugagaauuaaccau

SEQ ID NO: 1798530 - RNA, 19 nt, Artificial Sequence
  Description of Artificial Sequence: Synthetic oligonucleotide
  Antisense strand to SEQ ID NO: 1798529
augguuaauucucaacgca

SEQ ID NO: 1798531 - RNA, 19 nt, Artificial Sequence
  Description of Artificial Sequence: Synthetic oligonucleotide
  Sense strand starting at position 1361 of SEQ ID NO: 1563144
agaaaucaggugugcacaa

SEQ ID NO: 1798532 - RNA, 19 nt, Artificial Sequence
  Description of Artificial Sequence: Synthetic oligonucleotide
  Antisense strand to SEQ ID NO: 1798531
uugugcacaccugauuucu

SEQ ID NO: 1798533 - RNA, 19 nt, Artificial Sequence
  Description of Artificial Sequence: Synthetic oligonucleotide
  Sense strand starting at position 1444 of SEQ ID NO: 1563144
ggguggugagcuugggaaa

SEQ ID NO: 1798534 - RNA, 19 nt, Artificial Sequence
  Description of Artificial Sequence: Synthetic oligonucleotide
  Antisense strand to SEQ ID NO: 1798533
uuucccaagcucaccaccc

SEQ ID NO: 1798535 - RNA, 19 nt, Artificial Sequence
  Description of Artificial Sequence: Synthetic oligonucleotide
  Sense strand starting at position 1529 of SEQ ID NO: 1563144
gucagaaauucuucuaacg

SEQ ID NO: 1798536 - RNA, 19 nt, Artificial Sequence
  Description of Artificial Sequence: Synthetic oligonucleotide
  Antisense strand to SEQ ID NO: 1798535
cguuagaagaauuucugac

SEQ ID NO: 1798537 - RNA, 19 nt, Artificial Sequence
  Description of Artificial Sequence: Synthetic oligonucleotide
  Sense strand starting at position 1625 of SEQ ID NO: 1563144
acagcaugagcaugaguaa

SEQ ID NO: 1798538 - RNA, 19 nt, Artificial Sequence
  Description of Artificial Sequence: Synthetic oligonucleotide
  Antisense strand to SEQ ID NO: 1798537
uuacucaugcucaugcugu

SEQ ID NO: 1798539 - RNA, 19 nt, Artificial Sequence
  Description of Artificial Sequence: Synthetic oligonucleotide
  Sense strand starting at position 1648 of SEQ ID NO: 1563144
gguacuuacaggugcagaa

SEQ ID NO: 1798540 - RNA, 19 nt, Artificial Sequence
  Description of Artificial Sequence: Synthetic oligonucleotide
  Antisense strand to SEQ ID NO: 1798539
uucugcaccuguaaguacc

SEQ ID NO: 1798541 - RNA, 19 nt, Artificial Sequence
  Description of Artificial Sequence: Synthetic oligonucleotide
  Sense strand starting at position 2040 of SEQ ID NO: 1563144
uagagagcuccagguccuu

SEQ ID NO: 1798542 - RNA, 19 nt, Artificial Sequence
  Description of Artificial Sequence: Synthetic oligonucleotide
  Antisense strand to SEQ ID NO: 1798541
aaggaccuggagcucucua

SEQ ID NO: 1798543 - RNA, 19 nt, Artificial Sequence
  Description of Artificial Sequence: Synthetic oligonucleotide
  Sense strand starting at position 2188 of SEQ ID NO: 1563144
gugugugaucaaagugcag

SEQ ID NO: 1798544 - RNA, 19 nt, Artificial Sequence
  Description of Artificial Sequence: Synthetic oligonucleotide
  Antisense strand to SEQ ID NO: 1798543
cugcacuuugaucacacac

SEQ ID NO: 1798545 - RNA, 19 nt, Artificial Sequence
  Description of Artificial Sequence: Synthetic oligonucleotide
  Sense strand starting at position 2199 of SEQ ID NO: 1563144
aagugcagauuuguuggua

SEQ ID NO: 1798546 - RNA, 19 nt, Artificial Sequence
  Description of Artificial Sequence: Synthetic oligonucleotide
  Antisense strand to SEQ ID NO: 1798545
uaccaacaaaucugcacuu

SEQ ID NO: 1798547 - RNA, 19 nt, Artificial Sequence
  Description of Artificial Sequence: Synthetic oligonucleotide
  Sense strand starting at position 2228 of SEQ ID NO: 1563144
aagccaugagcuuaggagu

SEQ ID NO: 1798548 - RNA, 19 nt, Artificial Sequence
  Description of Artificial Sequence: Synthetic oligonucleotide
  Antisense strand to SEQ ID NO: 1798547
acuccuaagcucauggcuu

SEQ ID NO: 1798549 - RNA, 19 nt, Artificial Sequence
  Description of Artificial Sequence: Synthetic oligonucleotide
  Sense strand starting at position 2388 of SEQ ID NO: 1563144
augcgcuaacaauaugaaa

SEQ ID NO: 1798550 - RNA, 19 nt, Artificial Sequence
  Description of Artificial Sequence: Synthetic oligonucleotide
  Antisense strand to SEQ ID NO: 1798549
uuucauauuguuagcgcau

SEQ ID NO: 1798551 - RNA, 19 nt, Artificial Sequence
  Description of Artificial Sequence: Synthetic oligonucleotide
  Sense strand starting at position 2524 of SEQ ID NO: 1563144
uggccuuuggcauaaguaa

SEQ ID NO: 1798552 - RNA, 19 nt, Artificial Sequence
  Description of Artificial Sequence: Synthetic oligonucleotide
  Antisense strand to SEQ ID NO: 1798551
uuacuuaugccaaaggcca

SEQ ID NO: 1798553 - RNA, 19 nt, Artificial Sequence
  Description of Artificial Sequence: Synthetic oligonucleotide
  Sense strand starting at position 2578 of SEQ ID NO: 1563144
acaguagggucucugugau

SEQ ID NO: 1798554 - RNA, 19 nt, Artificial Sequence
  Description of Artificial Sequence: Synthetic oligonucleotide
  Antisense strand to SEQ ID NO: 1798553
aucacagagacccuacugu

SEQ ID NO: 1798555 - RNA, 19 nt, Artificial Sequence
  Description of Artificial Sequence: Synthetic oligonucleotide
  Sense strand starting at position 2636 of SEQ ID NO: 1563144
acuggaucaugucuguaca

SEQ ID NO: 1798556 - RNA, 19 nt, Artificial Sequence
  Description of Artificial Sequence: Synthetic oligonucleotide
  Antisense strand to SEQ ID NO: 1798555
uguacagacaugauccagu

SEQ ID NO: 1798557 - RNA, 19 nt, Artificial Sequence
  Description of Artificial Sequence: Synthetic oligonucleotide
  Sense strand starting at position 2637 of SEQ ID NO: 1563144
cuggaucaugucuguacau

SEQ ID NO: 1798558 - RNA, 19 nt, Artificial Sequence
  Description of Artificial Sequence: Synthetic oligonucleotide
  Antisense strand to SEQ ID NO: 1798557
auguacagacaugauccag

SEQ ID NO: 1798559 - RNA, 19 nt, Artificial Sequence
  Description of Artificial Sequence: Synthetic oligonucleotide
  Sense strand starting at position 2764 of SEQ ID NO: 1563144
uuaggauugucugcagaga

SEQ ID NO: 1798560 - RNA, 19 nt, Artificial Sequence
  Description of Artificial Sequence: Synthetic oligonucleotide
  Antisense strand to SEQ ID NO: 1798559
ucucugcagacaauccuaa

SEQ ID NO: 1798561 - RNA, 19 nt, Artificial Sequence
  Description of Artificial Sequence: Synthetic oligonucleotide
  Sense strand starting at position 2765 of SEQ ID NO: 1563144
uaggauugucugcagagag

SEQ ID NO: 1798562 - RNA, 19 nt, Artificial Sequence
  Description of Artificial Sequence: Synthetic oligonucleotide
  Antisense strand to SEQ ID NO: 1798561
cucucugcagacaauccua

SEQ ID NO: 1798563 - RNA, 19 nt, Artificial Sequence
  Description of Artificial Sequence: Synthetic oligonucleotide
  Sense strand starting at position 2779 of SEQ ID NO: 1563144
gagagugugguucaguaug

SEQ ID NO: 1798564 - RNA, 19 nt, Artificial Sequence
  Description of Artificial Sequence: Synthetic oligonucleotide
  Antisense strand to SEQ ID NO: 1798563
cauacugaaccacacucuc

SEQ ID NO: 1798565 - RNA, 19 nt, Artificial Sequence
  Description of Artificial Sequence: Synthetic oligonucleotide
  Sense strand starting at position 2797 of SEQ ID NO: 1563144
guggaaaggucagcauaug

SEQ ID NO: 1798566 - RNA, 19 nt, Artificial Sequence
  Description of Artificial Sequence: Synthetic oligonucleotide
  Antisense strand to SEQ ID NO: 1798565
cauaugcugaccuuuccac

SEQ ID NO: 1798567 - RNA, 19 nt, Artificial Sequence
  Description of Artificial Sequence: Synthetic oligonucleotide
  Sense strand starting at position 2798 of SEQ ID NO: 1563144
uggaaaggucagcauaugu

SEQ ID NO: 1798568 - RNA, 19 nt, Artificial Sequence
  Description of Artificial Sequence: Synthetic oligonucleotide
  Antisense strand to SEQ ID NO: 1798567
acauaugcugaccuuucca

SEQ ID NO: 1798569 - RNA, 19 nt, Artificial Sequence
  Description of Artificial Sequence: Synthetic oligonucleotide
  Sense strand starting at position 2991 of SEQ ID NO: 1563144
uguuguaaagaguaacuca

SEQ ID NO: 1798570 - RNA, 19 nt, Artificial Sequence
  Description of Artificial Sequence: Synthetic oligonucleotide
  Antisense strand to SEQ ID NO: 1798569
ugaguuacucuuuacaaca

SEQ ID NO: 1798571 - RNA, 19 nt, Artificial Sequence
  Description of Artificial Sequence: Synthetic oligonucleotide
  Sense strand starting at position 3252 of SEQ ID NO: 1563144
cugucaaguggguauacaa

SEQ ID NO: 1798572 - RNA, 19 nt, Artificial Sequence
  Description of Artificial Sequence: Synthetic oligonucleotide
  Antisense strand to SEQ ID NO: 1798571
uuguauacccacuugacag

SEQ ID NO: 1798573 - RNA, 19 nt, Artificial Sequence
  Description of Artificial Sequence: Synthetic oligonucleotide
  Sense strand starting at position 3311 of SEQ ID NO: 1563144
guuggagcuagacauguuu

SEQ ID NO: 1798574 - RNA, 19 nt, Artificial Sequence
  Description of Artificial Sequence: Synthetic oligonucleotide
  Antisense strand to SEQ ID NO: 1798573
aaacaugucuagcuccaac

SEQ ID NO: 1798575 - RNA, 19 nt, Artificial Sequence
  Description of Artificial Sequence: Synthetic oligonucleotide
  Sense strand starting at position 3359 of SEQ ID NO: 1563144
agcaaugugguagauauaa

SEQ ID NO: 1798576 - RNA, 19 nt, Artificial Sequence
  Description of Artificial Sequence: Synthetic oligonucleotide
  Antisense strand to SEQ ID NO: 1798575
uuauaucuaccacauugcu

SEQ ID NO: 1798577 - RNA, 19 nt, Artificial Sequence
  Description of Artificial Sequence: Synthetic oligonucleotide
  Sense strand starting at position 3495 of SEQ ID NO: 1563144
augagcuugccacagaauu

SEQ ID NO: 1798578 - RNA, 19 nt, Artificial Sequence
  Description of Artificial Sequence: Synthetic oligonucleotide
  Antisense strand to SEQ ID NO: 1798577
aauucuguggcaagcucau

SEQ ID NO: 1798579 - RNA, 19 nt, Artificial Sequence
  Description of Artificial Sequence: Synthetic oligonucleotide
  Sense strand starting at position 3582 of SEQ ID NO: 1563144
acuuauuucgugcauguaa

SEQ ID NO: 1798580 - RNA, 19 nt, Artificial Sequence
  Description of Artificial Sequence: Synthetic oligonucleotide
  Antisense strand to SEQ ID NO: 1798579
uuacaugcacgaaauaagu

SEQ ID NO: 1798581 - RNA, 19 nt, Artificial Sequence
  Description of Artificial Sequence: Synthetic oligonucleotide
  Sense strand starting at position 3584 of SEQ ID NO: 1563144
uuauuucgugcauguaaug

SEQ ID NO: 1798582 - RNA, 19 nt, Artificial Sequence
  Description of Artificial Sequence: Synthetic oligonucleotide
  Antisense strand to SEQ ID NO: 1798581
cauuacaugcacgaaauaa

SEQ ID NO: 1798583 - RNA, 19 nt, Artificial Sequence
  Description of Artificial Sequence: Synthetic oligonucleotide
  Sense strand starting at position 3646 of SEQ ID NO: 1563144
ccaauaagccugugaggua

SEQ ID NO: 1798584 - RNA, 19 nt, Artificial Sequence
  Description of Artificial Sequence: Synthetic oligonucleotide
  Antisense strand to SEQ ID NO: 1798583
uaccucacaggcuuauugg

SEQ ID NO: 1798585 - RNA, 19 nt, Artificial Sequence
  Description of Artificial Sequence: Synthetic oligonucleotide
  Sense strand starting at position 239 of SEQ ID NO: 1563145
gcccuauauguggaaauac

SEQ ID NO: 1798586 - RNA, 19 nt, Artificial Sequence
  Description of Artificial Sequence: Synthetic oligonucleotide
  Antisense strand to SEQ ID NO: 1798585
guauuuccacauauagggc

SEQ ID NO: 1798587 - RNA, 19 nt, Artificial Sequence
  Description of Artificial Sequence: Synthetic oligonucleotide
  Sense strand starting at position 322 of SEQ ID NO: 1563145
aggucuagugaauauagca

SEQ ID NO: 1798588 - RNA, 19 nt, Artificial Sequence
  Description of Artificial Sequence: Synthetic oligonucleotide
  Antisense strand to SEQ ID NO: 1798587
ugcuauauucacuagaccu

SEQ ID NO: 1798589 - RNA, 19 nt, Artificial Sequence
  Description of Artificial Sequence: Synthetic oligonucleotide
  Sense strand starting at position 330 of SEQ ID NO: 1563145
ugaauauagcagugggaca

SEQ ID NO: 1798590 - RNA, 19 nt, Artificial Sequence
  Description of Artificial Sequence: Synthetic oligonucleotide
  Antisense strand to SEQ ID NO: 1798589
ugucccacugcuauauuca

SEQ ID NO: 1798591 - RNA, 19 nt, Artificial Sequence
  Description of Artificial Sequence: Synthetic oligonucleotide
  Sense strand starting at position 468 of SEQ ID NO: 1563145
gaauuuaacucagagguuu

SEQ ID NO: 1798592 - RNA, 19 nt, Artificial Sequence
  Description of Artificial Sequence: Synthetic oligonucleotide
  Antisense strand to SEQ ID NO: 1798591
aaaccucugaguuaaauuc

SEQ ID NO: 1798593 - RNA, 19 nt, Artificial Sequence
  Description of Artificial Sequence: Synthetic oligonucleotide
  Sense strand starting at position 741 of SEQ ID NO: 1563145
gugauaggauguuccagac

SEQ ID NO: 1798594 - RNA, 19 nt, Artificial Sequence
  Description of Artificial Sequence: Synthetic oligonucleotide
  Antisense strand to SEQ ID NO: 1798593
gucuggaacauccuaucac

SEQ ID NO: 1798595 - RNA, 19 nt, Artificial Sequence
  Description of Artificial Sequence: Synthetic oligonucleotide
  Sense strand starting at position 751 of SEQ ID NO: 1563145
guuccagacuaauuaaagu

SEQ ID NO: 1798596 - RNA, 19 nt, Artificial Sequence
  Description of Artificial Sequence: Synthetic oligonucleotide
  Antisense strand to SEQ ID NO: 1798595
acuuuaauuagucuggaac

SEQ ID NO: 1798597 - RNA, 19 nt, Artificial Sequence
  Description of Artificial Sequence: Synthetic oligonucleotide
  Sense strand starting at position 759 of SEQ ID NO: 1563145
cuaauuaaagugcaaggua

SEQ ID NO: 1798598 - RNA, 19 nt, Artificial Sequence
  Description of Artificial Sequence: Synthetic oligonucleotide
  Antisense strand to SEQ ID NO: 1798597
uaccuugcacuuuaauuag

SEQ ID NO: 1798599 - RNA, 19 nt, Artificial Sequence
  Description of Artificial Sequence: Synthetic oligonucleotide
  Sense strand starting at position 921 of SEQ ID NO: 1563145
aagcuaagggauuguuaau

SEQ ID NO: 1798600 - RNA, 19 nt, Artificial Sequence
  Description of Artificial Sequence: Synthetic oligonucleotide
  Antisense strand to SEQ ID NO: 1798599
auuaacaaucccuuagcuu

SEQ ID NO: 1798601 - RNA, 19 nt, Artificial Sequence
  Description of Artificial Sequence: Synthetic oligonucleotide
  Sense strand starting at position 945 of SEQ ID NO: 1563145
gcuaauuauggcuaaagag

SEQ ID NO: 1798602 - RNA, 19 nt, Artificial Sequence
  Description of Artificial Sequence: Synthetic oligonucleotide
  Antisense strand to SEQ ID NO: 1798601
cucuuuagccauaauuagc

SEQ ID NO: 1798603 - RNA, 19 nt, Artificial Sequence
  Description of Artificial Sequence: Synthetic oligonucleotide
  Sense strand starting at position 1199 of SEQ ID NO: 1563145
ggcgaugcucacuauagaa

SEQ ID NO: 1798604 - RNA, 19 nt, Artificial Sequence
  Description of Artificial Sequence: Synthetic oligonucleotide
  Antisense strand to SEQ ID NO: 1798603
uucuauagugagcaucgcc

SEQ ID NO: 1798605 - RNA, 19 nt, Artificial Sequence
  Description of Artificial Sequence: Synthetic oligonucleotide
  Sense strand starting at position 1201 of SEQ ID NO: 1563145
cgaugcucacuauagaagu

SEQ ID NO: 1798606 - RNA, 19 nt, Artificial Sequence
  Description of Artificial Sequence: Synthetic oligonucleotide
  Antisense strand to SEQ ID NO: 1798605
acuucuauagugagcaucg

SEQ ID NO: 1798607 - RNA, 19 nt, Artificial Sequence
  Description of Artificial Sequence: Synthetic oligonucleotide
  Sense strand starting at position 1233 of SEQ ID NO: 1563145
gggcuugcacacuacagau

SEQ ID NO: 1798608 - RNA, 19 nt, Artificial Sequence
  Description of Artificial Sequence: Synthetic oligonucleotide
  Antisense strand to SEQ ID NO: 1798607
aucuguagugugcaagccc

SEQ ID NO: 1798609 - RNA, 19 nt, Artificial Sequence
  Description of Artificial Sequence: Synthetic oligonucleotide
  Sense strand starting at position 1261 of SEQ ID NO: 1563145
augcccuugaagggauauu

SEQ ID NO: 1798610 - RNA, 19 nt, Artificial Sequence
  Description of Artificial Sequence: Synthetic oligonucleotide
  Antisense strand to SEQ ID NO: 1798609
aauaucccuucaagggcau

SEQ ID NO: 1798611 - RNA, 19 nt, Artificial Sequence
  Description of Artificial Sequence: Synthetic oligonucleotide
  Sense strand starting at position 1368 of SEQ ID NO: 1563145
gggauucuuguagagguca

SEQ ID NO: 1798612 - RNA, 19 nt, Artificial Sequence
  Description of Artificial Sequence: Synthetic oligonucleotide
  Antisense strand to SEQ ID NO: 1798611
ugaccucuacaagaauccc

SEQ ID NO: 1798613 - RNA, 19 nt, Artificial Sequence
  Description of Artificial Sequence: Synthetic oligonucleotide
  Sense strand starting at position 1529 of SEQ ID NO: 1563145
gcaucuuuccaggauugag

SEQ ID NO: 1798614 - RNA, 19 nt, Artificial Sequence
  Description of Artificial Sequence: Synthetic oligonucleotide
  Antisense strand to SEQ ID NO: 1798613
cucaauccuggaaagaugc

SEQ ID NO: 1798615 - RNA, 19 nt, Artificial Sequence
  Description of Artificial Sequence: Synthetic oligonucleotide
  Sense strand starting at position 1589 of SEQ ID NO: 1563145
uggugacuccagugacaua

SEQ ID NO: 1798616 - RNA, 19 nt, Artificial Sequence
  Description of Artificial Sequence: Synthetic oligonucleotide
  Antisense strand to SEQ ID NO: 1798615
uaugucacuggagucacca

SEQ ID NO: 1798617 - RNA, 19 nt, Artificial Sequence
  Description of Artificial Sequence: Synthetic oligonucleotide
  Sense strand starting at position 1762 of SEQ ID NO: 1563145
gguucuugucgagcagcau

SEQ ID NO: 1798618 - RNA, 19 nt, Artificial Sequence
  Description of Artificial Sequence: Synthetic oligonucleotide
  Antisense strand to SEQ ID NO: 1798617
augcugcucgacaagaacc

SEQ ID NO: 1798619 - RNA, 19 nt, Artificial Sequence
  Description of Artificial Sequence: Synthetic oligonucleotide
  Sense strand starting at position 1904 of SEQ ID NO: 1563145
ugcgauucucacuaggauu

SEQ ID NO: 1798620 - RNA, 19 nt, Artificial Sequence
  Description of Artificial Sequence: Synthetic oligonucleotide
  Antisense strand to SEQ ID NO: 1798619
aauccuagugagaaucgca

SEQ ID NO: 1798621 - RNA, 19 nt, Artificial Sequence
  Description of Artificial Sequence: Synthetic oligonucleotide
  Sense strand starting at position 1915 of SEQ ID NO: 1563145
cuaggauugccauagcgaa

SEQ ID NO: 1798622 - RNA, 19 nt, Artificial Sequence
  Description of Artificial Sequence: Synthetic oligonucleotide
  Antisense strand to SEQ ID NO: 1798621
uucgcuauggcaauccuag

SEQ ID NO: 1798623 - RNA, 19 nt, Artificial Sequence
  Description of Artificial Sequence: Synthetic oligonucleotide
  Sense strand starting at position 2008 of SEQ ID NO: 1563145
gcugguggugccuugugaa

SEQ ID NO: 1798624 - RNA, 19 nt, Artificial Sequence
  Description of Artificial Sequence: Synthetic oligonucleotide
  Antisense strand to SEQ ID NO: 1798623
uucacaaggcaccaccagc

SEQ ID NO: 1798625 - RNA, 19 nt, Artificial Sequence
  Description of Artificial Sequence: Synthetic oligonucleotide
  Sense strand starting at position 2089 of SEQ ID NO: 1563145
cacccaguugauggauaaa

SEQ ID NO: 1798626 - RNA, 19 nt, Artificial Sequence
  Description of Artificial Sequence: Synthetic oligonucleotide
  Antisense strand to SEQ ID NO: 1798625
uuuauccaucaacugggug

SEQ ID NO: 1798627 - RNA, 19 nt, Artificial Sequence
  Description of Artificial Sequence: Synthetic oligonucleotide
  Sense strand starting at position 2146 of SEQ ID NO: 1563145
ugaggauucgauugcagaa

SEQ ID NO: 1798628 - RNA, 19 nt, Artificial Sequence
  Description of Artificial Sequence: Synthetic oligonucleotide
  Antisense strand to SEQ ID NO: 1798627
uucugcaaucgaauccuca

SEQ ID NO: 1798629 - RNA, 19 nt, Artificial Sequence
  Description of Artificial Sequence: Synthetic oligonucleotide
  Sense strand starting at position 2213 of SEQ ID NO: 1563145
ggcccuagcacugauauga

SEQ ID NO: 1798630 - RNA, 19 nt, Artificial Sequence
  Description of Artificial Sequence: Synthetic oligonucleotide
  Antisense strand to SEQ ID NO: 1798629
ucauaucagugcuagggcc

SEQ ID NO: 1798631 - RNA, 19 nt, Artificial Sequence
  Description of Artificial Sequence: Synthetic oligonucleotide
  Sense strand starting at position 2311 of SEQ ID NO: 1563145
uccuaagaaugcuugagaa

SEQ ID NO: 1798632 - RNA, 19 nt, Artificial Sequence
  Description of Artificial Sequence: Synthetic oligonucleotide
  Antisense strand to SEQ ID NO: 1798631
uucucaagcauucuuagga

SEQ ID NO: 1798633 - RNA, 19 nt, Artificial Sequence
  Description of Artificial Sequence: Synthetic oligonucleotide
  Sense strand starting at position 2336 of SEQ ID NO: 1563145
aacagucaacuaggguaau

SEQ ID NO: 1798634 - RNA, 19 nt, Artificial Sequence
  Description of Artificial Sequence: Synthetic oligonucleotide
  Antisense strand to SEQ ID NO: 1798633
auuacccuaguugacuguu

SEQ ID NO: 1798635 - RNA, 19 nt, Artificial Sequence
  Description of Artificial Sequence: Synthetic oligonucleotide
  Sense strand starting at position 2620 of SEQ ID NO: 1563145
cucauaaggcucugaaaca

SEQ ID NO: 1798636 - RNA, 19 nt, Artificial Sequence
  Description of Artificial Sequence: Synthetic oligonucleotide
  Antisense strand to SEQ ID NO: 1798635
uguuucagagccuuaugag

SEQ ID NO: 1798637 - RNA, 19 nt, Artificial Sequence
  Description of Artificial Sequence: Synthetic oligonucleotide
  Sense strand starting at position 2770 of SEQ ID NO: 1563145
uauuguuauuggguagaag

SEQ ID NO: 1798638 - RNA, 19 nt, Artificial Sequence
  Description of Artificial Sequence: Synthetic oligonucleotide
  Antisense strand to SEQ ID NO: 1798637
cuucuacccaauaacaaua

SEQ ID NO: 1798639 - RNA, 19 nt, Artificial Sequence
  Description of Artificial Sequence: Synthetic oligonucleotide
  Sense strand starting at position 2872 of SEQ ID NO: 1563145
aggguauacgauuagcaua

SEQ ID NO: 1798640 - RNA, 19 nt, Artificial Sequence
  Description of Artificial Sequence: Synthetic oligonucleotide
  Antisense strand to SEQ ID NO: 1798639
uaugcuaaucguauacccu

SEQ ID NO: 1798641 - RNA, 19 nt, Artificial Sequence
  Description of Artificial Sequence: Synthetic oligonucleotide
  Sense strand starting at position 2922 of SEQ ID NO: 1563145
gguacuauggguugacuga

SEQ ID NO: 1798642 - RNA, 19 nt, Artificial Sequence
  Description of Artificial Sequence: Synthetic oligonucleotide
  Antisense strand to SEQ ID NO: 1798641
ucagucaacccauaguacc

SEQ ID NO: 1798643 - RNA, 19 nt, Artificial Sequence
  Description of Artificial Sequence: Synthetic oligonucleotide
  Sense strand starting at position 2923 of SEQ ID NO: 1563145
guacuauggguugacugaa

SEQ ID NO: 1798644 - RNA, 19 nt, Artificial Sequence
  Description of Artificial Sequence: Synthetic oligonucleotide
  Antisense strand to SEQ ID NO: 1798643
uucagucaacccauaguac

SEQ ID NO: 1798645 - RNA, 19 nt, Artificial Sequence
  Description of Artificial Sequence: Synthetic oligonucleotide
  Sense strand starting at position 3121 of SEQ ID NO: 1563145
ugggcagaaucugucaaug

SEQ ID NO: 1798646 - RNA, 19 nt, Artificial Sequence
  Description of Artificial Sequence: Synthetic oligonucleotide
  Antisense strand to SEQ ID NO: 1798645
cauugacagauucugccca

SEQ ID NO: 1798647 - RNA, 19 nt, Artificial Sequence
  Description of Artificial Sequence: Synthetic oligonucleotide
  Sense strand starting at position 3126 of SEQ ID NO: 1563145
agaaucugucaauguuaag

SEQ ID NO: 1798648 - RNA, 19 nt, Artificial Sequence
  Description of Artificial Sequence: Synthetic oligonucleotide
  Antisense strand to SEQ ID NO: 1798647
cuuaacauugacagauucu

SEQ ID NO: 1798649 - RNA, 19 nt, Artificial Sequence
  Description of Artificial Sequence: Synthetic oligonucleotide
  Sense strand starting at position 3133 of SEQ ID NO: 1563145
gucaauguuaaguauugga

SEQ ID NO: 1798650 - RNA, 19 nt, Artificial Sequence
  Description of Artificial Sequence: Synthetic oligonucleotide
  Antisense strand to SEQ ID NO: 1798649
uccaauacuuaacauugac

SEQ ID NO: 1798651 - RNA, 19 nt, Artificial Sequence
  Description of Artificial Sequence: Synthetic oligonucleotide
  Sense strand starting at position 3197 of SEQ ID NO: 1563145
ucaguaauugguggagaau

SEQ ID NO: 1798652 - RNA, 19 nt, Artificial Sequence
  Description of Artificial Sequence: Synthetic oligonucleotide
  Antisense strand to SEQ ID NO: 1798651
auucuccaccaauuacuga

SEQ ID NO: 1798653 - RNA, 19 nt, Artificial Sequence
  Description of Artificial Sequence: Synthetic oligonucleotide
  Sense strand starting at position 3331 of SEQ ID NO: 1563145
ccugcaaucucucuggaaa

SEQ ID NO: 1798654 - RNA, 19 nt, Artificial Sequence
  Description of Artificial Sequence: Synthetic oligonucleotide
  Antisense strand to SEQ ID NO: 1798653
uuuccagagagauugcagg

SEQ ID NO: 1798655 - RNA, 19 nt, Artificial Sequence
  Description of Artificial Sequence: Synthetic oligonucleotide
  Sense strand starting at position 3523 of SEQ ID NO: 1563145
ucaucauauucucuuggga

SEQ ID NO: 1798656 - RNA, 19 nt, Artificial Sequence
  Description of Artificial Sequence: Synthetic oligonucleotide
  Antisense strand to SEQ ID NO: 1798655
ucccaagagaauaugauga

SEQ ID NO: 1798657 - RNA, 19 nt, Artificial Sequence
  Description of Artificial Sequence: Synthetic oligonucleotide
  Sense strand starting at position 3526 of SEQ ID NO: 1563145
ucauauucucuugggaagu

SEQ ID NO: 1798658 - RNA, 19 nt, Artificial Sequence
  Description of Artificial Sequence: Synthetic oligonucleotide
  Antisense strand to SEQ ID NO: 1798657
acuucccaagagaauauga

SEQ ID NO: 1798659 - RNA, 19 nt, Artificial Sequence
  Description of Artificial Sequence: Synthetic oligonucleotide
  Sense strand starting at position 3599 of SEQ ID NO: 1563145
ccaggacuccuguacuuga

SEQ ID NO: 1798660 - RNA, 19 nt, Artificial Sequence
  Description of Artificial Sequence: Synthetic oligonucleotide
  Antisense strand to SEQ ID NO: 1798659
ucaaguacaggaguccugg

SEQ ID NO: 1798661 - RNA, 19 nt, Artificial Sequence
  Description of Artificial Sequence: Synthetic oligonucleotide
  Sense strand starting at position 3643 of SEQ ID NO: 1563145
ggcugacaagcauaauaua

SEQ ID NO: 1798662 - RNA, 19 nt, Artificial Sequence
  Description of Artificial Sequence: Synthetic oligonucleotide
  Antisense strand to SEQ ID NO: 1798661
uauauuaugcuugucagcc

SEQ ID NO: 1798663 - RNA, 19 nt, Artificial Sequence
  Description of Artificial Sequence: Synthetic oligonucleotide
  Sense strand starting at position 3777 of SEQ ID NO: 1563145
cccuguaaggcagggaaau

SEQ ID NO: 1798664 - RNA, 19 nt, Artificial Sequence
  Description of Artificial Sequence: Synthetic oligonucleotide
  Antisense strand to SEQ ID NO: 1798663
auuucccugccuuacaggg

SEQ ID NO: 1798665 - RNA, 19 nt, Artificial Sequence
  Description of Artificial Sequence: Synthetic oligonucleotide
  Sense strand starting at position 43 of SEQ ID NO: 1563146
gauguagugccagaaagug

SEQ ID NO: 1798666 - RNA, 19 nt, Artificial Sequence
  Description of Artificial Sequence: Synthetic oligonucleotide
  Antisense strand to SEQ ID NO: 1798665
cacuuucuggcacuacauc

SEQ ID NO: 1798667 - RNA, 19 nt, Artificial Sequence
  Description of Artificial Sequence: Synthetic oligonucleotide
  Sense strand starting at position 52 of SEQ ID NO: 1563146
ccagaaagugucugucaau

SEQ ID NO: 1798668 - RNA, 19 nt, Artificial Sequence
  Description of Artificial Sequence: Synthetic oligonucleotide
  Antisense strand to SEQ ID NO: 1798667
auugacagacacuuucugg

SEQ ID NO: 1798669 - RNA, 19 nt, Artificial Sequence
  Description of Artificial Sequence: Synthetic oligonucleotide
  Sense strand starting at position 53 of SEQ ID NO: 1563146
cagaaagugucugucaaug

SEQ ID NO: 1798670 - RNA, 19 nt, Artificial Sequence
  Description of Artificial Sequence: Synthetic oligonucleotide
  Antisense strand to SEQ ID NO: 1798669
cauugacagacacuuucug

SEQ ID NO: 1798671 - RNA, 19 nt, Artificial Sequence
  Description of Artificial Sequence: Synthetic oligonucleotide
  Sense strand starting at position 65 of SEQ ID NO: 1563146
gucaaugacgccggauaaa

SEQ ID NO: 1798672 - RNA, 19 nt, Artificial Sequence
  Description of Artificial Sequence: Synthetic oligonucleotide
  Antisense strand to SEQ ID NO: 1798671
uuuauccggcgucauugac

SEQ ID NO: 1798673 - RNA, 19 nt, Artificial Sequence
  Description of Artificial Sequence: Synthetic oligonucleotide
  Sense strand starting at position 97 of SEQ ID NO: 1563146
guuggaaccuuaguuauca

SEQ ID NO: 1798674 - RNA, 19 nt, Artificial Sequence
  Description of Artificial Sequence: Synthetic oligonucleotide
  Antisense strand to SEQ ID NO: 1798673
ugauaacuaagguuccaac

SEQ ID NO: 1798675 - RNA, 19 nt, Artificial Sequence
  Description of Artificial Sequence: Synthetic oligonucleotide
  Sense strand starting at position 98 of SEQ ID NO: 1563146
uuggaaccuuaguuaucau

SEQ ID NO: 1798676 - RNA, 19 nt, Artificial Sequence
  Description of Artificial Sequence: Synthetic oligonucleotide
  Antisense strand to SEQ ID NO: 1798675
augauaacuaagguuccaa

SEQ ID NO: 1798677 - RNA, 19 nt, Artificial Sequence
  Description of Artificial Sequence: Synthetic oligonucleotide
  Sense strand starting at position 108 of SEQ ID NO: 1563146
aguuaucaucuguaaauag

SEQ ID NO: 1798678 - RNA, 19 nt, Artificial Sequence
  Description of Artificial Sequence: Synthetic oligonucleotide
  Antisense strand to SEQ ID NO: 1798677
cuauuuacagaugauaacu

SEQ ID NO: 1798679 - RNA, 19 nt, Artificial Sequence
  Description of Artificial Sequence: Synthetic oligonucleotide
  Sense strand starting at position 125 of SEQ ID NO: 1563146
agaggcaacuacucuacaa

SEQ ID NO: 1798680 - RNA, 19 nt, Artificial Sequence
  Description of Artificial Sequence: Synthetic oligonucleotide
  Antisense strand to SEQ ID NO: 1798679
uuguagaguaguugccucu

SEQ ID NO: 1798681 - RNA, 19 nt, Artificial Sequence
  Description of Artificial Sequence: Synthetic oligonucleotide
  Sense strand starting at position 313 of SEQ ID NO: 1563146
uguuaauaauguguuccca

SEQ ID NO: 1798682 - RNA, 19 nt, Artificial Sequence
  Description of Artificial Sequence: Synthetic oligonucleotide
  Antisense strand to SEQ ID NO: 1798681
ugggaacacauuauuaaca

SEQ ID NO: 1798683 - RNA, 19 nt, Artificial Sequence
  Description of Artificial Sequence: Synthetic oligonucleotide
  Sense strand starting at position 329 of SEQ ID NO: 1563146
ccaaauaagcaauggguua

SEQ ID NO: 1798684 - RNA, 19 nt, Artificial Sequence
  Description of Artificial Sequence: Synthetic oligonucleotide
  Antisense strand to SEQ ID NO: 1798683
uaacccauugcuuauuugg

SEQ ID NO: 1798685 - RNA, 19 nt, Artificial Sequence
  Description of Artificial Sequence: Synthetic oligonucleotide
  Sense strand starting at position 359 of SEQ ID NO: 1563146
guaauaagucuuugaacac

SEQ ID NO: 1798686 - RNA, 19 nt, Artificial Sequence
  Description of Artificial Sequence: Synthetic oligonucleotide
  Antisense strand to SEQ ID NO: 1798685
guguucaaagacuuauuac

SEQ ID NO: 1798687 - RNA, 19 nt, Artificial Sequence
  Description of Artificial Sequence: Synthetic oligonucleotide
  Sense strand starting at position 394 of SEQ ID NO: 1563146
gacgcacuuguccaauuga

SEQ ID NO: 1798688 - RNA, 19 nt, Artificial Sequence
  Description of Artificial Sequence: Synthetic oligonucleotide
  Antisense strand to SEQ ID NO: 1798687
ucaauuggacaagugcguc

SEQ ID NO: 1798689 - RNA, 19 nt, Artificial Sequence
  Description of Artificial Sequence: Synthetic oligonucleotide
  Sense strand starting at position 491 of SEQ ID NO: 1563146
ugcugaaaggucuaacuga

SEQ ID NO: 1798690 - RNA, 19 nt, Artificial Sequence
  Description of Artificial Sequence: Synthetic oligonucleotide
  Antisense strand to SEQ ID NO: 1798689
ucaguuagaccuuucagca

SEQ ID NO: 1798691 - RNA, 19 nt, Artificial Sequence
  Description of Artificial Sequence: Synthetic oligonucleotide
  Sense strand starting at position 598 of SEQ ID NO: 1563146
agauuauggugacuaauua

SEQ ID NO: 1798692 - RNA, 19 nt, Artificial Sequence
  Description of Artificial Sequence: Synthetic oligonucleotide
  Antisense strand to SEQ ID NO: 1798691
uaauuagucaccauaaucu

SEQ ID NO: 1798693 - RNA, 19 nt, Artificial Sequence
  Description of Artificial Sequence: Synthetic oligonucleotide
  Sense strand starting at position 619 of SEQ ID NO: 1563146
uucuucucugaaugggaga

SEQ ID NO: 1798694 - RNA, 19 nt, Artificial Sequence
  Description of Artificial Sequence: Synthetic oligonucleotide
  Antisense strand to SEQ ID NO: 1798693
ucucccauucagagaagaa

SEQ ID NO: 1798695 - RNA, 19 nt, Artificial Sequence
  Description of Artificial Sequence: Synthetic oligonucleotide
  Sense strand starting at position 718 of SEQ ID NO: 1563146
cuaaacaucccagguuguu

SEQ ID NO: 1798696 - RNA, 19 nt, Artificial Sequence
  Description of Artificial Sequence: Synthetic oligonucleotide
  Antisense strand to SEQ ID NO: 1798695
aacaaccugggauguuuag

SEQ ID NO: 1798697 - RNA, 19 nt, Artificial Sequence
  Description of Artificial Sequence: Synthetic oligonucleotide
  Sense strand starting at position 1036 of SEQ ID NO: 1563146
aucuuuggaucuucuaaag

SEQ ID NO: 1798698 - RNA, 19 nt, Artificial Sequence
  Description of Artificial Sequence: Synthetic oligonucleotide
  Antisense strand to SEQ ID NO: 1798697
cuuuagaagauccaaagau

SEQ ID NO: 1798699 - RNA, 19 nt, Artificial Sequence
  Description of Artificial Sequence: Synthetic oligonucleotide
  Sense strand starting at position 1244 of SEQ ID NO: 1563146
gcagaaaccuaucuaguua

SEQ ID NO: 1798700 - RNA, 19 nt, Artificial Sequence
  Description of Artificial Sequence: Synthetic oligonucleotide
  Antisense strand to SEQ ID NO: 1798699
uaacuagauagguuucugc

SEQ ID NO: 1798701 - RNA, 19 nt, Artificial Sequence
  Description of Artificial Sequence: Synthetic oligonucleotide
  Sense strand starting at position 1251 of SEQ ID NO: 1563146
ccuaucuaguuaucugaga

SEQ ID NO: 1798702 - RNA, 19 nt, Artificial Sequence
  Description of Artificial Sequence: Synthetic oligonucleotide
  Antisense strand to SEQ ID NO: 1798701
ucucagauaacuagauagg

SEQ ID NO: 1798703 - RNA, 19 nt, Artificial Sequence
  Description of Artificial Sequence: Synthetic oligonucleotide
  Sense strand starting at position 1252 of SEQ ID NO: 1563146
cuaucuaguuaucugagau

SEQ ID NO: 1798704 - RNA, 19 nt, Artificial Sequence
  Description of Artificial Sequence: Synthetic oligonucleotide
  Antisense strand to SEQ ID NO: 1798703
aucucagauaacuagauag

SEQ ID NO: 1798705 - RNA, 19 nt, Artificial Sequence
  Description of Artificial Sequence: Synthetic oligonucleotide
  Sense strand starting at position 1265 of SEQ ID NO: 1563146
ugagauaagcacugacaug

SEQ ID NO: 1798706 - RNA, 19 nt, Artificial Sequence
  Description of Artificial Sequence: Synthetic oligonucleotide
  Antisense strand to SEQ ID NO: 1798705
caugucagugcuuaucuca

SEQ ID NO: 1798707 - RNA, 19 nt, Artificial Sequence
  Description of Artificial Sequence: Synthetic oligonucleotide
  Sense strand starting at position 1336 of SEQ ID NO: 1563146
ugugauuaauuaccuagag

SEQ ID NO: 1798708 - RNA, 19 nt, Artificial Sequence
  Description of Artificial Sequence: Synthetic oligonucleotide
  Antisense strand to SEQ ID NO: 1798707
cucuagguaauuaaucaca

SEQ ID NO: 1798709 - RNA, 19 nt, Artificial Sequence
  Description of Artificial Sequence: Synthetic oligonucleotide
  Sense strand starting at position 1337 of SEQ ID NO: 1563146
gugauuaauuaccuagaga

SEQ ID NO: 1798710 - RNA, 19 nt, Artificial Sequence
  Description of Artificial Sequence: Synthetic oligonucleotide
  Antisense strand to SEQ ID NO: 1798709
ucucuagguaauuaaucac

SEQ ID NO: 1798711 - RNA, 19 nt, Artificial Sequence
  Description of Artificial Sequence: Synthetic oligonucleotide
  Sense strand starting at position 1461 of SEQ ID NO: 1563146
cgauuuaacuugcugcaca

SEQ ID NO: 1798712 - RNA, 19 nt, Artificial Sequence
  Description of Artificial Sequence: Synthetic oligonucleotide
  Antisense strand to SEQ ID NO: 1798711
ugugcagcaaguuaaaucg

SEQ ID NO: 1798713 - RNA, 19 nt, Artificial Sequence
  Description of Artificial Sequence: Synthetic oligonucleotide
  Sense strand starting at position 1951 of SEQ ID NO: 1563146
ccagaaagcuccucggaag

SEQ ID NO: 1798714 - RNA, 19 nt, Artificial Sequence
  Description of Artificial Sequence: Synthetic oligonucleotide
  Antisense strand to SEQ ID NO: 1798713
cuuccgaggagcuuucugg

SEQ ID NO: 1798715 - RNA, 19 nt, Artificial Sequence
  Description of Artificial Sequence: Synthetic oligonucleotide
  Sense strand starting at position 2514 of SEQ ID NO: 1563146
ggagaagcgcuccuucguu

SEQ ID NO: 1798716 - RNA, 19 nt, Artificial Sequence
  Description of Artificial Sequence: Synthetic oligonucleotide
  Antisense strand to SEQ ID NO: 1798715
aacgaaggagcgcuucucc

SEQ ID NO: 1798717 - RNA, 19 nt, Artificial Sequence
  Description of Artificial Sequence: Synthetic oligonucleotide
  Sense strand starting at position 2812 of SEQ ID NO: 1563146
ccuaguauacgcuugcgau

SEQ ID NO: 1798718 - RNA, 19 nt, Artificial Sequence
  Description of Artificial Sequence: Synthetic oligonucleotide
  Antisense strand to SEQ ID NO: 1798717
aucgcaagcguauacuagg

SEQ ID NO: 1798719 - RNA, 19 nt, Artificial Sequence
  Description of Artificial Sequence: Synthetic oligonucleotide
  Sense strand starting at position 2956 of SEQ ID NO: 1563146
acgcuuuauuucucagucu

SEQ ID NO: 1798720 - RNA, 19 nt, Artificial Sequence
  Description of Artificial Sequence: Synthetic oligonucleotide
  Antisense strand to SEQ ID NO: 1798719
agacugagaaauaaagcgu

SEQ ID NO: 1798721 - RNA, 19 nt, Artificial Sequence
  Description of Artificial Sequence: Synthetic oligonucleotide
  Sense strand starting at position 3006 of SEQ ID NO: 1563146
ucugguacgccuuuauguu

SEQ ID NO: 1798722 - RNA, 19 nt, Artificial Sequence
  Description of Artificial Sequence: Synthetic oligonucleotide
  Antisense strand to SEQ ID NO: 1798721
aacauaaaggcguaccaga

SEQ ID NO: 1798723 - RNA, 19 nt, Artificial Sequence
  Description of Artificial Sequence: Synthetic oligonucleotide
  Sense strand starting at position 3039 of SEQ ID NO: 1563146
gcuuucugcgaauagguaa

SEQ ID NO: 1798724 - RNA, 19 nt, Artificial Sequence
  Description of Artificial Sequence: Synthetic oligonucleotide
  Antisense strand to SEQ ID NO: 1798723
uuaccuauucgcagaaagc

SEQ ID NO: 1798725 - RNA, 19 nt, Artificial Sequence
  Description of Artificial Sequence: Synthetic oligonucleotide
  Sense strand starting at position 3370 of SEQ ID NO: 1563146
aaguaaaugcuguaagaca

SEQ ID NO: 1798726 - RNA, 19 nt, Artificial Sequence
  Description of Artificial Sequence: Synthetic oligonucleotide
  Antisense strand to SEQ ID NO: 1798725
ugucuuacagcauuuacuu

SEQ ID NO: 1798727 - RNA, 19 nt, Artificial Sequence
  Description of Artificial Sequence: Synthetic oligonucleotide
  Sense strand starting at position 3453 of SEQ ID NO: 1563146
acacauguauguguuccua

SEQ ID NO: 1798728 - RNA, 19 nt, Artificial Sequence
  Description of Artificial Sequence: Synthetic oligonucleotide
  Antisense strand to SEQ ID NO: 1798727
uaggaacacauacaugugu

SEQ ID NO: 1798729 - RNA, 19 nt, Artificial Sequence
  Description of Artificial Sequence: Synthetic oligonucleotide
  Sense strand starting at position 3475 of SEQ ID NO: 1563146
gugugugaaacauaaugga

SEQ ID NO: 1798730 - RNA, 19 nt, Artificial Sequence
  Description of Artificial Sequence: Synthetic oligonucleotide
  Antisense strand to SEQ ID NO: 1798729
uccauuauguuucacacac

SEQ ID NO: 1798731 - RNA, 19 nt, Artificial Sequence
  Description of Artificial Sequence: Synthetic oligonucleotide
  Sense strand starting at position 3492 of SEQ ID NO: 1563146
gagagucuuagauguguua

SEQ ID NO: 1798732 - RNA, 19 nt, Artificial Sequence
  Description of Artificial Sequence: Synthetic oligonucleotide
  Antisense strand to SEQ ID NO: 1798731
uaacacaucuaagacucuc

SEQ ID NO: 1798733 - RNA, 19 nt, Artificial Sequence
  Description of Artificial Sequence: Synthetic oligonucleotide
  Sense strand starting at position 3494 of SEQ ID NO: 1563146
gagucuuagauguguuaga

SEQ ID NO: 1798734 - RNA, 19 nt, Artificial Sequence
  Description of Artificial Sequence: Synthetic oligonucleotide
  Antisense strand to SEQ ID NO: 1798733
ucuaacacaucuaagacuc

SEQ ID NO: 1798735 - RNA, 19 nt, Artificial Sequence
  Description of Artificial Sequence: Synthetic oligonucleotide
  Sense strand starting at position 3495 of SEQ ID NO: 1563146
agucuuagauguguuagag

SEQ ID NO: 1798736 - RNA, 19 nt, Artificial Sequence
  Description of Artificial Sequence: Synthetic oligonucleotide
  Antisense strand to SEQ ID NO: 1798735
cucuaacacaucuaagacu

SEQ ID NO: 1798737 - RNA, 19 nt, Artificial Sequence
  Description of Artificial Sequence: Synthetic oligonucleotide
  Sense strand starting at position 3501 of SEQ ID NO: 1563146
agauguguuagaggaucaa

SEQ ID NO: 1798738 - RNA, 19 nt, Artificial Sequence
  Description of Artificial Sequence: Synthetic oligonucleotide
  Antisense strand to SEQ ID NO: 1798737
uugauccucuaacacaucu

SEQ ID NO: 1798739 - RNA, 19 nt, Artificial Sequence
  Description of Artificial Sequence: Synthetic oligonucleotide
  Sense strand starting at position 3763 of SEQ ID NO: 1563146
guaucuccgaagugaacuu

SEQ ID NO: 1798740 - RNA, 19 nt, Artificial Sequence
  Description of Artificial Sequence: Synthetic oligonucleotide
  Antisense strand to SEQ ID NO: 1798739
aaguucacuucggagauac

SEQ ID NO: 1798741 - RNA, 19 nt, Artificial Sequence
  Description of Artificial Sequence: Synthetic oligonucleotide
  Sense strand starting at position 3895 of SEQ ID NO: 1563146
gcgcaaggccauuauaaug

SEQ ID NO: 1798742 - RNA, 19 nt, Artificial Sequence
  Description of Artificial Sequence: Synthetic oligonucleotide
  Antisense strand to SEQ ID NO: 1798741
cauuauaauggccuugcgc

SEQ ID NO: 1798743 - RNA, 19 nt, Artificial Sequence
  Description of Artificial Sequence: Synthetic oligonucleotide
  Sense strand starting at position 3913 of SEQ ID NO: 1563146
ggcucaugccaaugaaaga

SEQ ID NO: 1798744 - RNA, 19 nt, Artificial Sequence
  Description of Artificial Sequence: Synthetic oligonucleotide
  Antisense strand to SEQ ID NO: 1798743
ucuuucauuggcaugagcc

SEQ ID NO: 1798745 - RNA, 19 nt, Artificial Sequence
  Description of Artificial Sequence: Synthetic oligonucleotide
  Sense strand starting at position 6 of SEQ ID NO: 1563147
ucaguuuaugauggcauau

SEQ ID NO: 1798746 - RNA, 19 nt, Artificial Sequence
  Description of Artificial Sequence: Synthetic oligonucleotide
  Antisense strand to SEQ ID NO: 1798745
auaugccaucauaaacuga

SEQ ID NO: 1798747 - RNA, 19 nt, Artificial Sequence
  Description of Artificial Sequence: Synthetic oligonucleotide
  Sense strand starting at position 336 of SEQ ID NO: 1563147
uguauuuauuugugaucug

SEQ ID NO: 1798748 - RNA, 19 nt, Artificial Sequence
  Description of Artificial Sequence: Synthetic oligonucleotide
  Antisense strand to SEQ ID NO: 1798747
cagaucacaaauaaauaca

SEQ ID NO: 1798749 - RNA, 19 nt, Artificial Sequence
  Description of Artificial Sequence: Synthetic oligonucleotide
  Sense strand starting at position 350 of SEQ ID NO: 1563147
aucugcaaauguguugauu

SEQ ID NO: 1798750 - RNA, 19 nt, Artificial Sequence
  Description of Artificial Sequence: Synthetic oligonucleotide
  Antisense strand to SEQ ID NO: 1798749
aaucaacacauuugcagau

SEQ ID NO: 1798751 - RNA, 19 nt, Artificial Sequence
  Description of Artificial Sequence: Synthetic oligonucleotide
  Sense strand starting at position 432 of SEQ ID NO: 1563147
acagaaguauuguuucuac

SEQ ID NO: 1798752 - RNA, 19 nt, Artificial Sequence
  Description of Artificial Sequence: Synthetic oligonucleotide
  Antisense strand to SEQ ID NO: 1798751
guagaaacaauacuucugu

SEQ ID NO: 1798753 - RNA, 19 nt, Artificial Sequence
  Description of Artificial Sequence: Synthetic oligonucleotide
  Sense strand starting at position 503 of SEQ ID NO: 1563147
cuguuaaguuccuuuaaca

SEQ ID NO: 1798754 - RNA, 19 nt, Artificial Sequence
  Description of Artificial Sequence: Synthetic oligonucleotide
  Antisense strand to SEQ ID NO: 1798753
uguuaaaggaacuuaacag

SEQ ID NO: 1798755 - RNA, 19 nt, Artificial Sequence
  Description of Artificial Sequence: Synthetic oligonucleotide
  Sense strand starting at position 786 of SEQ ID NO: 1563147
ggacauuauuaggugauac

SEQ ID NO: 1798756 - RNA, 19 nt, Artificial Sequence
  Description of Artificial Sequence: Synthetic oligonucleotide
  Antisense strand to SEQ ID NO: 1798755
guaucaccuaauaaugucc

SEQ ID NO: 1798757 - RNA, 19 nt, Artificial Sequence
  Description of Artificial Sequence: Synthetic oligonucleotide
  Sense strand starting at position 817 of SEQ ID NO: 1563147
cgugcaaguccugaagaua

SEQ ID NO: 1798758 - RNA, 19 nt, Artificial Sequence
  Description of Artificial Sequence: Synthetic oligonucleotide
  Antisense strand to SEQ ID NO: 1798757
uaucuucaggacuugcacg

SEQ ID NO: 1798759 - RNA, 19 nt, Artificial Sequence
  Description of Artificial Sequence: Synthetic oligonucleotide
  Sense strand starting at position 919 of SEQ ID NO: 1563147
cucguauuccuagaucuug

SEQ ID NO: 1798760 - RNA, 19 nt, Artificial Sequence
  Description of Artificial Sequence: Synthetic oligonucleotide
  Antisense strand to SEQ ID NO: 1798759
caagaucuaggaauacgag

SEQ ID NO: 1798761 - RNA, 19 nt, Artificial Sequence
  Description of Artificial Sequence: Synthetic oligonucleotide
  Sense strand starting at position 1016 of SEQ ID NO: 1563147
accacuuugcaggacgaaa

SEQ ID NO: 1798762 - RNA, 19 nt, Artificial Sequence
  Description of Artificial Sequence: Synthetic oligonucleotide
  Antisense strand to SEQ ID NO: 1798761
uuucguccugcaaaguggu

SEQ ID NO: 1798763 - RNA, 19 nt, Artificial Sequence
  Description of Artificial Sequence: Synthetic oligonucleotide
  Sense strand starting at position 1099 of SEQ ID NO: 1563147
cgaguauuccuucccucgu

SEQ ID NO: 1798764 - RNA, 19 nt, Artificial Sequence
  Description of Artificial Sequence: Synthetic oligonucleotide
  Antisense strand to SEQ ID NO: 1798763
acgagggaaggaauacucg

SEQ ID NO: 1798765 - RNA, 19 nt, Artificial Sequence
  Description of Artificial Sequence: Synthetic oligonucleotide
  Sense strand starting at position 1159 of SEQ ID NO: 1563147
accacaauuccucgagacu

SEQ ID NO: 1798766 - RNA, 19 nt, Artificial Sequence
  Description of Artificial Sequence: Synthetic oligonucleotide
  Antisense strand to SEQ ID NO: 1798765
agucucgaggaauuguggu

SEQ ID NO: 1798767 - RNA, 19 nt, Artificial Sequence
  Description of Artificial Sequence: Synthetic oligonucleotide
  Sense strand starting at position 1160 of SEQ ID NO: 1563147
ccacaauuccucgagacug

SEQ ID NO: 1798768 - RNA, 19 nt, Artificial Sequence
  Description of Artificial Sequence: Synthetic oligonucleotide
  Antisense strand to SEQ ID NO: 1798767
cagucucgaggaauugugg

SEQ ID NO: 1798769 - RNA, 19 nt, Artificial Sequence
  Description of Artificial Sequence: Synthetic oligonucleotide
  Sense strand starting at position 2112 of SEQ ID NO: 1563147
gcuguccugcuuguuuaau

SEQ ID NO: 1798770 - RNA, 19 nt, Artificial Sequence
  Description of Artificial Sequence: Synthetic oligonucleotide
  Antisense strand to SEQ ID NO: 1798769
auuaaacaagcaggacagc

SEQ ID NO: 1798771 - RNA, 19 nt, Artificial Sequence
  Description of Artificial Sequence: Synthetic oligonucleotide
  Sense strand starting at position 2185 of SEQ ID NO: 1563147
ggaaguuccggacagcgaa

SEQ ID NO: 1798772 - RNA, 19 nt, Artificial Sequence
  Description of Artificial Sequence: Synthetic oligonucleotide
  Antisense strand to SEQ ID NO: 1798771
uucgcuguccggaacuucc

SEQ ID NO: 1798773 - RNA, 19 nt, Artificial Sequence
  Description of Artificial Sequence: Synthetic oligonucleotide
  Sense strand starting at position 2209 of SEQ ID NO: 1563147
acguucgagcucuaaugau

SEQ ID NO: 1798774 - RNA, 19 nt, Artificial Sequence
  Description of Artificial Sequence: Synthetic oligonucleotide
  Antisense strand to SEQ ID NO: 1798773
aucauuagagcucgaacgu

SEQ ID NO: 1798775 - RNA, 19 nt, Artificial Sequence
  Description of Artificial Sequence: Synthetic oligonucleotide
  Sense strand starting at position 2218 of SEQ ID NO: 1563147
cucuaaugauucucugugu

SEQ ID NO: 1798776 - RNA, 19 nt, Artificial Sequence
  Description of Artificial Sequence: Synthetic oligonucleotide
  Antisense strand to SEQ ID NO: 1798775
acacagagaaucauuagag

SEQ ID NO: 1798777 - RNA, 19 nt, Artificial Sequence
  Description of Artificial Sequence: Synthetic oligonucleotide
  Sense strand starting at position 2722 of SEQ ID NO: 1563147
cccguuagccuuuauuuag

SEQ ID NO: 1798778 - RNA, 19 nt, Artificial Sequence
  Description of Artificial Sequence: Synthetic oligonucleotide
  Antisense strand to SEQ ID NO: 1798777
cuaaauaaaggcuaacggg

SEQ ID NO: 1798779 - RNA, 19 nt, Artificial Sequence
  Description of Artificial Sequence: Synthetic oligonucleotide
  Sense strand starting at position 2802 of SEQ ID NO: 1563147
uaauaaaugugaguugacu

SEQ ID NO: 1798780 - RNA, 19 nt, Artificial Sequence
  Description of Artificial Sequence: Synthetic oligonucleotide
  Antisense strand to SEQ ID NO: 1798779
agucaacucacauuuauua

SEQ ID NO: 1798781 - RNA, 19 nt, Artificial Sequence
  Description of Artificial Sequence: Synthetic oligonucleotide
  Sense strand starting at position 2804 of SEQ ID NO: 1563147
auaaaugugaguugacuga

SEQ ID NO: 1798782 - RNA, 19 nt, Artificial Sequence
  Description of Artificial Sequence: Synthetic oligonucleotide
  Antisense strand to SEQ ID NO: 1798781
ucagucaacucacauuuau

SEQ ID NO: 1798783 - RNA, 19 nt, Artificial Sequence
  Description of Artificial Sequence: Synthetic oligonucleotide
  Sense strand starting at position 2808 of SEQ ID NO: 1563147
augugaguugacugauaaa

SEQ ID NO: 1798784 - RNA, 19 nt, Artificial Sequence
  Description of Artificial Sequence: Synthetic oligonucleotide
  Antisense strand to SEQ ID NO: 1798783
uuuaucagucaacucacau

SEQ ID NO: 1798785 - RNA, 19 nt, Artificial Sequence
  Description of Artificial Sequence: Synthetic oligonucleotide
  Sense strand starting at position 2837 of SEQ ID NO: 1563147
ugauaaauuuguuaagagc

SEQ ID NO: 1798786 - RNA, 19 nt, Artificial Sequence
  Description of Artificial Sequence: Synthetic oligonucleotide
  Antisense strand to SEQ ID NO: 1798785
gcucuuaacaaauuuauca

SEQ ID NO: 1798787 - RNA, 19 nt, Artificial Sequence
  Description of Artificial Sequence: Synthetic oligonucleotide
  Sense strand starting at position 2844 of SEQ ID NO: 1563147
uuuguuaagagcuguaaug

SEQ ID NO: 1798788 - RNA, 19 nt, Artificial Sequence
  Description of Artificial Sequence: Synthetic oligonucleotide
  Antisense strand to SEQ ID NO: 1798787
cauuacagcucuuaacaaa

SEQ ID NO: 1798789 - RNA, 19 nt, Artificial Sequence
  Description of Artificial Sequence: Synthetic oligonucleotide
  Sense strand starting at position 2846 of SEQ ID NO: 1563147
uguuaagagcuguaaugcu

SEQ ID NO: 1798790 - RNA, 19 nt, Artificial Sequence
  Description of Artificial Sequence: Synthetic oligonucleotide
  Antisense strand to SEQ ID NO: 1798789
agcauuacagcucuuaaca

SEQ ID NO: 1798791 - RNA, 19 nt, Artificial Sequence
  Description of Artificial Sequence: Synthetic oligonucleotide
  Sense strand starting at position 2878 of SEQ ID NO: 1563147
gggcauaauggauguucau

SEQ ID NO: 1798792 - RNA, 19 nt, Artificial Sequence
  Description of Artificial Sequence: Synthetic oligonucleotide
  Antisense strand to SEQ ID NO: 1798791
augaacauccauuaugccc

SEQ ID NO: 1798793 - RNA, 19 nt, Artificial Sequence
  Description of Artificial Sequence: Synthetic oligonucleotide
  Sense strand starting at position 2970 of SEQ ID NO: 1563147
ggugaccuuccuugaagag

SEQ ID NO: 1798794 - RNA, 19 nt, Artificial Sequence
  Description of Artificial Sequence: Synthetic oligonucleotide
  Antisense strand to SEQ ID NO: 1798793
cucuucaaggaaggucacc

SEQ ID NO: 1798795 - RNA, 19 nt, Artificial Sequence
  Description of Artificial Sequence: Synthetic oligonucleotide
  Sense strand starting at position 2991 of SEQ ID NO: 1563147
acggguuucccauaucgaa

SEQ ID NO: 1798796 - RNA, 19 nt, Artificial Sequence
  Description of Artificial Sequence: Synthetic oligonucleotide
  Antisense strand to SEQ ID NO: 1798795
uucgauaugggaaacccgu

SEQ ID NO: 1798797 - RNA, 19 nt, Artificial Sequence
  Description of Artificial Sequence: Synthetic oligonucleotide
  Sense strand starting at position 3090 of SEQ ID NO: 1563147
agagguuccuaaguauagu

SEQ ID NO: 1798798 - RNA, 19 nt, Artificial Sequence
  Description of Artificial Sequence: Synthetic oligonucleotide
  Antisense strand to SEQ ID NO: 1798797
acuauacuuaggaaccucu

SEQ ID NO: 1798799 - RNA, 19 nt, Artificial Sequence
  Description of Artificial Sequence: Synthetic oligonucleotide
  Sense strand starting at position 3099 of SEQ ID NO: 1563147
uaaguauagucgccagaau

SEQ ID NO: 1798800 - RNA, 19 nt, Artificial Sequence
  Description of Artificial Sequence: Synthetic oligonucleotide
  Antisense strand to SEQ ID NO: 1798799
auucuggcgacuauacuua

SEQ ID NO: 1798801 - RNA, 19 nt, Artificial Sequence
  Description of Artificial Sequence: Synthetic oligonucleotide
  Sense strand starting at position 3100 of SEQ ID NO: 1563147
aaguauagucgccagaauu

SEQ ID NO: 1798802 - RNA, 19 nt, Artificial Sequence
  Description of Artificial Sequence: Synthetic oligonucleotide
  Antisense strand to SEQ ID NO: 1798801
aauucuggcgacuauacuu

SEQ ID NO: 1798803 - RNA, 19 nt, Artificial Sequence
  Description of Artificial Sequence: Synthetic oligonucleotide
  Sense strand starting at position 3165 of SEQ ID NO: 1563147
agcuaaauguaaucaaugu

SEQ ID NO: 1798804 - RNA, 19 nt, Artificial Sequence
  Description of Artificial Sequence: Synthetic oligonucleotide
  Antisense strand to SEQ ID NO: 1798803
acauugauuacauuuagcu

SEQ ID NO: 1798805 - RNA, 19 nt, Artificial Sequence
  Description of Artificial Sequence: Synthetic oligonucleotide
  Sense strand starting at position 3339 of SEQ ID NO: 1563147
cuuggaaaguuuccuacua

SEQ ID NO: 1798806 - RNA, 19 nt, Artificial Sequence
  Description of Artificial Sequence: Synthetic oligonucleotide
  Antisense strand to SEQ ID NO: 1798805
uaguaggaaacuuuccaag

SEQ ID NO: 1798807 - RNA, 19 nt, Artificial Sequence
  Description of Artificial Sequence: Synthetic oligonucleotide
  Sense strand starting at position 3340 of SEQ ID NO: 1563147
uuggaaaguuuccuacuaa

SEQ ID NO: 1798808 - RNA, 19 nt, Artificial Sequence
  Description of Artificial Sequence: Synthetic oligonucleotide
  Antisense strand to SEQ ID NO: 1798807
uuaguaggaaacuuuccaa

SEQ ID NO: 1798809 - RNA, 19 nt, Artificial Sequence
  Description of Artificial Sequence: Synthetic oligonucleotide
  Sense strand starting at position 3554 of SEQ ID NO: 1563147
gcucuaaugcuacacaaug

SEQ ID NO: 1798810 - RNA, 19 nt, Artificial Sequence
  Description of Artificial Sequence: Synthetic oligonucleotide
  Antisense strand to SEQ ID NO: 1798809
cauuguguagcauuagagc

SEQ ID NO: 1798811 - RNA, 19 nt, Artificial Sequence
  Description of Artificial Sequence: Synthetic oligonucleotide
  Sense strand starting at position 3632 of SEQ ID NO: 1563147
uccugaagguuccugagau

SEQ ID NO: 1798812 - RNA, 19 nt, Artificial Sequence
  Description of Artificial Sequence: Synthetic oligonucleotide
  Antisense strand to SEQ ID NO: 1798811
aucucaggaaccuucagga

SEQ ID NO: 1798813 - RNA, 19 nt, Artificial Sequence
  Description of Artificial Sequence: Synthetic oligonucleotide
  Sense strand starting at position 3681 of SEQ ID NO: 1563147
cuccuaauguugcucugaa

SEQ ID NO: 1798814 - RNA, 19 nt, Artificial Sequence
  Description of Artificial Sequence: Synthetic oligonucleotide
  Antisense strand to SEQ ID NO: 1798813
uucagagcaacauuaggag

SEQ ID NO: 1798815 - RNA, 19 nt, Artificial Sequence
  Description of Artificial Sequence: Synthetic oligonucleotide
  Sense strand starting at position 3682 of SEQ ID NO: 1563147
uccuaauguugcucugaaa

SEQ ID NO: 1798816 - RNA, 19 nt, Artificial Sequence
  Description of Artificial Sequence: Synthetic oligonucleotide
  Antisense strand to SEQ ID NO: 1798815
uuucagagcaacauuagga

SEQ ID NO: 1798817 - RNA, 19 nt, Artificial Sequence
  Description of Artificial Sequence: Synthetic oligonucleotide
  Sense strand starting at position 3832 of SEQ ID NO: 1563147
acauaaucuuggcugcuua

SEQ ID NO: 1798818 - RNA, 19 nt, Artificial Sequence
  Description of Artificial Sequence: Synthetic oligonucleotide
  Antisense strand to SEQ ID NO: 1798817
uaagcagccaagauuaugu

SEQ ID NO: 1798819 - RNA, 19 nt, Artificial Sequence
  Description of Artificial Sequence: Synthetic oligonucleotide
  Sense strand starting at position 3839 of SEQ ID NO: 1563147
cuuggcugcuuauuaauuu

SEQ ID NO: 1798820 - RNA, 19 nt, Artificial Sequence
  Description of Artificial Sequence: Synthetic oligonucleotide
  Antisense strand to SEQ ID NO: 1798819
aaauuaauaagcagccaag

SEQ ID NO: 1798821 - RNA, 19 nt, Artificial Sequence
  Description of Artificial Sequence: Synthetic oligonucleotide
  Sense strand starting at position 3843 of SEQ ID NO: 1563147
gcugcuuauuaauuuagca

SEQ ID NO: 1798822 - RNA, 19 nt, Artificial Sequence
  Description of Artificial Sequence: Synthetic oligonucleotide
  Antisense strand to SEQ ID NO: 1798821
ugcuaaauuaauaagcagc

SEQ ID NO: 1798823 - RNA, 19 nt, Artificial Sequence
  Description of Artificial Sequence: Synthetic oligonucleotide
  Sense strand starting at position 3864 of SEQ ID NO: 1563147
aggaauggcuuauuaaauu

SEQ ID NO: 1798824 - RNA, 19 nt, Artificial Sequence
  Description of Artificial Sequence: Synthetic oligonucleotide
  Antisense strand to SEQ ID NO: 1798823
aauuuaauaagccauuccu

SEQ ID NO: 1798825 - RNA, 19 nt, Artificial Sequence
  Description of Artificial Sequence: Synthetic oligonucleotide
  Sense strand starting at position 151 of SEQ ID NO: 1563148
ccacacaagucaucuaagu

SEQ ID NO: 1798826 - RNA, 19 nt, Artificial Sequence
  Description of Artificial Sequence: Synthetic oligonucleotide
  Antisense strand to SEQ ID NO: 1798825
acuuagaugacuugugugg

SEQ ID NO: 1798827 - RNA, 19 nt, Artificial Sequence
  Description of Artificial Sequence: Synthetic oligonucleotide
  Sense strand starting at position 271 of SEQ ID NO: 1563148
auacauggugagugcucaa

SEQ ID NO: 1798828 - RNA, 19 nt, Artificial Sequence
  Description of Artificial Sequence: Synthetic oligonucleotide
  Antisense strand to SEQ ID NO: 1798827
uugagcacucaccauguau

SEQ ID NO: 1798829 - RNA, 19 nt, Artificial Sequence
  Description of Artificial Sequence: Synthetic oligonucleotide
  Sense strand starting at position 287 of SEQ ID NO: 1563148
caagacguauuagcaauua

SEQ ID NO: 1798830 - RNA, 19 nt, Artificial Sequence
  Description of Artificial Sequence: Synthetic oligonucleotide
  Antisense strand to SEQ ID NO: 1798829
uaauugcuaauacgucuug

SEQ ID NO: 1798831 - RNA, 19 nt, Artificial Sequence
  Description of Artificial Sequence: Synthetic oligonucleotide
  Sense strand starting at position 392 of SEQ ID NO: 1563148
ggcaccaagagguaaugua

SEQ ID NO: 1798832 - RNA, 19 nt, Artificial Sequence
  Description of Artificial Sequence: Synthetic oligonucleotide
  Antisense strand to SEQ ID NO: 1798831
uacauuaccucuuggugcc

SEQ ID NO: 1798833 - RNA, 19 nt, Artificial Sequence
  Description of Artificial Sequence: Synthetic oligonucleotide
  Sense strand starting at position 402 of SEQ ID NO: 1563148
gguaauguaacuugccaga

SEQ ID NO: 1798834 - RNA, 19 nt, Artificial Sequence
  Description of Artificial Sequence: Synthetic oligonucleotide
  Antisense strand to SEQ ID NO: 1798833
ucuggcaaguuacauuacc

SEQ ID NO: 1798835 - RNA, 19 nt, Artificial Sequence
  Description of Artificial Sequence: Synthetic oligonucleotide
  Sense strand starting at position 513 of SEQ ID NO: 1563148
ugagguccaguaggauaau

SEQ ID NO: 1798836 - RNA, 19 nt, Artificial Sequence
  Description of Artificial Sequence: Synthetic oligonucleotide
  Antisense strand to SEQ ID NO: 1798835
auuauccuacuggaccuca

SEQ ID NO: 1798837 - RNA, 19 nt, Artificial Sequence
  Description of Artificial Sequence: Synthetic oligonucleotide
  Sense strand starting at position 794 of SEQ ID NO: 1563148
guaagauuaagucagaggu

SEQ ID NO: 1798838 - RNA, 19 nt, Artificial Sequence
  Description of Artificial Sequence: Synthetic oligonucleotide
  Antisense strand to SEQ ID NO: 1798837
accucugacuuaaucuuac

SEQ ID NO: 1798839 - RNA, 19 nt, Artificial Sequence
  Description of Artificial Sequence: Synthetic oligonucleotide
  Sense strand starting at position 831 of SEQ ID NO: 1563148
acacaaaggccuggaauua

SEQ ID NO: 1798840 - RNA, 19 nt, Artificial Sequence
  Description of Artificial Sequence: Synthetic oligonucleotide
  Antisense strand to SEQ ID NO: 1798839
uaauuccaggccuuugugu

SEQ ID NO: 1798841 - RNA, 19 nt, Artificial Sequence
  Description of Artificial Sequence: Synthetic oligonucleotide
  Sense strand starting at position 953 of SEQ ID NO: 1563148
agaggaaauugauaucaga

SEQ ID NO: 1798842 - RNA, 19 nt, Artificial Sequence
  Description of Artificial Sequence: Synthetic oligonucleotide
  Antisense strand to SEQ ID NO: 1798841
ucugauaucaauuuccucu

SEQ ID NO: 1798843 - RNA, 19 nt, Artificial Sequence
  Description of Artificial Sequence: Synthetic oligonucleotide
  Sense strand starting at position 992 of SEQ ID NO: 1563148
gcgguuagagacuaugaag

SEQ ID NO: 1798844 - RNA, 19 nt, Artificial Sequence
  Description of Artificial Sequence: Synthetic oligonucleotide
  Antisense strand to SEQ ID NO: 1798843
cuucauagucucuaaccgc

SEQ ID NO: 1798845 - RNA, 19 nt, Artificial Sequence
  Description of Artificial Sequence: Synthetic oligonucleotide
  Sense strand starting at position 1273 of SEQ ID NO: 1563148
ggacuuuccgcugggagga

SEQ ID NO: 1798846 - RNA, 19 nt, Artificial Sequence
  Description of Artificial Sequence: Synthetic oligonucleotide
  Antisense strand to SEQ ID NO: 1798845
uccucccagcggaaagucc

SEQ ID NO: 1798847 - RNA, 19 nt, Artificial Sequence
  Description of Artificial Sequence: Synthetic oligonucleotide
  Sense strand starting at position 1319 of SEQ ID NO: 1563148
gguucugagguggaaaugu

SEQ ID NO: 1798848 - RNA, 19 nt, Artificial Sequence
  Description of Artificial Sequence: Synthetic oligonucleotide
  Antisense strand to SEQ ID NO: 1798847
acauuuccaccucagaacc

SEQ ID NO: 1798849 - RNA, 19 nt, Artificial Sequence
  Description of Artificial Sequence: Synthetic oligonucleotide
  Sense strand starting at position 1530 of SEQ ID NO: 1563148
ucgagaaggagcuaaaguu

SEQ ID NO: 1798850 - RNA, 19 nt, Artificial Sequence
  Description of Artificial Sequence: Synthetic oligonucleotide
  Antisense strand to SEQ ID NO: 1798849
aacuuuagcuccuucucga

SEQ ID NO: 1798851 - RNA, 19 nt, Artificial Sequence
  Description of Artificial Sequence: Synthetic oligonucleotide
  Sense strand starting at position 1538 of SEQ ID NO: 1563148
gagcuaaaguuugcugaag

SEQ ID NO: 1798852 - RNA, 19 nt, Artificial Sequence
  Description of Artificial Sequence: Synthetic oligonucleotide
  Antisense strand to SEQ ID NO: 1798851
cuucagcaaacuuuagcuc

SEQ ID NO: 1798853 - RNA, 19 nt, Artificial Sequence
  Description of Artificial Sequence: Synthetic oligonucleotide
  Sense strand starting at position 1539 of SEQ ID NO: 1563148
agcuaaaguuugcugaaga

SEQ ID NO: 1798854 - RNA, 19 nt, Artificial Sequence
  Description of Artificial Sequence: Synthetic oligonucleotide
  Antisense strand to SEQ ID NO: 1798853
ucuucagcaaacuuuagcu

SEQ ID NO: 1798855 - RNA, 19 nt, Artificial Sequence
  Description of Artificial Sequence: Synthetic oligonucleotide
  Sense strand starting at position 2226 of SEQ ID NO: 1563148
uggugcguccgguuacuua

SEQ ID NO: 1798856 - RNA, 19 nt, Artificial Sequence
  Description of Artificial Sequence: Synthetic oligonucleotide
  Antisense strand to SEQ ID NO: 1798855
uaaguaaccggacgcacca

SEQ ID NO: 1798857 - RNA, 19 nt, Artificial Sequence
  Description of Artificial Sequence: Synthetic oligonucleotide
  Sense strand starting at position 2411 of SEQ ID NO: 1563148
agggaaguucaugguugga

SEQ ID NO: 1798858 - RNA, 19 nt, Artificial Sequence
  Description of Artificial Sequence: Synthetic oligonucleotide
  Antisense strand to SEQ ID NO: 1798857
uccaaccaugaacuucccu

SEQ ID NO: 1798859 - RNA, 19 nt, Artificial Sequence
  Description of Artificial Sequence: Synthetic oligonucleotide
  Sense strand starting at position 2414 of SEQ ID NO: 1563148
gaaguucaugguuggagga

SEQ ID NO: 1798860 - RNA, 19 nt, Artificial Sequence
  Description of Artificial Sequence: Synthetic oligonucleotide
  Antisense strand to SEQ ID NO: 1798859
uccuccaaccaugaacuuc

SEQ ID NO: 1798861 - RNA, 19 nt, Artificial Sequence
  Description of Artificial Sequence: Synthetic oligonucleotide
  Sense strand starting at position 2445 of SEQ ID NO: 1563148
agucgcuccacugagauaa

SEQ ID NO: 1798862 - RNA, 19 nt, Artificial Sequence
  Description of Artificial Sequence: Synthetic oligonucleotide
  Antisense strand to SEQ ID NO: 1798861
uuaucucaguggagcgacu

SEQ ID NO: 1798863 - RNA, 19 nt, Artificial Sequence
  Description of Artificial Sequence: Synthetic oligonucleotide
  Sense strand starting at position 2555 of SEQ ID NO: 1563148
uaacauucugaaggaugua

SEQ ID NO: 1798864 - RNA, 19 nt, Artificial Sequence
  Description of Artificial Sequence: Synthetic oligonucleotide
  Antisense strand to SEQ ID NO: 1798863
uacauccuucagaauguua

SEQ ID NO: 1798865 - RNA, 19 nt, Artificial Sequence
  Description of Artificial Sequence: Synthetic oligonucleotide
  Sense strand starting at position 2576 of SEQ ID NO: 1563148
cggacacauccuuacucuu

SEQ ID NO: 1798866 - RNA, 19 nt, Artificial Sequence
  Description of Artificial Sequence: Synthetic oligonucleotide
  Antisense strand to SEQ ID NO: 1798865
aagaguaaggauguguccg

SEQ ID NO: 1798867 - RNA, 19 nt, Artificial Sequence
  Description of Artificial Sequence: Synthetic oligonucleotide
  Sense strand starting at position 2602 of SEQ ID NO: 1563148
uuucucagauaagugaaau

SEQ ID NO: 1798868 - RNA, 19 nt, Artificial Sequence
  Description of Artificial Sequence: Synthetic oligonucleotide
  Antisense strand to SEQ ID NO: 1798867
auuucacuuaucugagaaa

SEQ ID NO: 1798869 - RNA, 19 nt, Artificial Sequence
  Description of Artificial Sequence: Synthetic oligonucleotide
  Sense strand starting at position 2739 of SEQ ID NO: 1563148
guuagagacgucgaaugaa

SEQ ID NO: 1798870 - RNA, 19 nt, Artificial Sequence
  Description of Artificial Sequence: Synthetic oligonucleotide
  Antisense strand to SEQ ID NO: 1798869
uucauucgacgucucuaac

SEQ ID NO: 1798871 - RNA, 19 nt, Artificial Sequence
  Description of Artificial Sequence: Synthetic oligonucleotide
  Sense strand starting at position 2742 of SEQ ID NO: 1563148
agagacgucgaaugaauuc

SEQ ID NO: 1798872 - RNA, 19 nt, Artificial Sequence
  Description of Artificial Sequence: Synthetic oligonucleotide
  Antisense strand to SEQ ID NO: 1798871
gaauucauucgacgucucu

SEQ ID NO: 1798873 - RNA, 19 nt, Artificial Sequence
  Description of Artificial Sequence: Synthetic oligonucleotide
  Sense strand starting at position 2926 of SEQ ID NO: 1563148
cugucacaguacuuauaau

SEQ ID NO: 1798874 - RNA, 19 nt, Artificial Sequence
  Description of Artificial Sequence: Synthetic oligonucleotide
  Antisense strand to SEQ ID NO: 1798873
auuauaaguacugugacag

SEQ ID NO: 1798875 - RNA, 19 nt, Artificial Sequence
  Description of Artificial Sequence: Synthetic oligonucleotide
  Sense strand starting at position 2993 of SEQ ID NO: 1563148
acuugagagcaaugaccau

SEQ ID NO: 1798876 - RNA, 19 nt, Artificial Sequence
  Description of Artificial Sequence: Synthetic oligonucleotide
  Antisense strand to SEQ ID NO: 1798875
auggucauugcucucaagu

SEQ ID NO: 1798877 - RNA, 19 nt, Artificial Sequence
  Description of Artificial Sequence: Synthetic oligonucleotide
  Sense strand starting at position 3072 of SEQ ID NO: 1563148
auagauauuugucagguga

SEQ ID NO: 1798878 - RNA, 19 nt, Artificial Sequence
  Description of Artificial Sequence: Synthetic oligonucleotide
  Antisense strand to SEQ ID NO: 1798877
ucaccugacaaauaucuau

SEQ ID NO: 1798879 - RNA, 19 nt, Artificial Sequence
  Description of Artificial Sequence: Synthetic oligonucleotide
  Sense strand starting at position 3080 of SEQ ID NO: 1563148
uugucaggugaaugaauga

SEQ ID NO: 1798880 - RNA, 19 nt, Artificial Sequence
  Description of Artificial Sequence: Synthetic oligonucleotide
  Antisense strand to SEQ ID NO: 1798879
ucauucauucaccugacaa

SEQ ID NO: 1798881 - RNA, 19 nt, Artificial Sequence
  Description of Artificial Sequence: Synthetic oligonucleotide
  Sense strand starting at position 3210 of SEQ ID NO: 1563148
uuagguuccucacccagaa

SEQ ID NO: 1798882 - RNA, 19 nt, Artificial Sequence
  Description of Artificial Sequence: Synthetic oligonucleotide
  Antisense strand to SEQ ID NO: 1798881
uucugggugaggaaccuaa

SEQ ID NO: 1798883 - RNA, 19 nt, Artificial Sequence
  Description of Artificial Sequence: Synthetic oligonucleotide
  Sense strand starting at position 3223 of SEQ ID NO: 1563148
ccagaauugcagcauaauu

SEQ ID NO: 1798884 - RNA, 19 nt, Artificial Sequence
  Description of Artificial Sequence: Synthetic oligonucleotide
  Antisense strand to SEQ ID NO: 1798883
aauuaugcugcaauucugg

SEQ ID NO: 1798885 - RNA, 19 nt, Artificial Sequence
  Description of Artificial Sequence: Synthetic oligonucleotide
  Sense strand starting at position 3225 of SEQ ID NO: 1563148
agaauugcagcauaauuau

SEQ ID NO: 1798886 - RNA, 19 nt, Artificial Sequence
  Description of Artificial Sequence: Synthetic oligonucleotide
  Antisense strand to SEQ ID NO: 1798885
auaauuaugcugcaauucu

SEQ ID NO: 1798887 - RNA, 19 nt, Artificial Sequence
  Description of Artificial Sequence: Synthetic oligonucleotide
  Sense strand starting at position 3439 of SEQ ID NO: 1563148
ccaugagugcgauaacuag

SEQ ID NO: 1798888 - RNA, 19 nt, Artificial Sequence
  Description of Artificial Sequence: Synthetic oligonucleotide
  Antisense strand to SEQ ID NO: 1798887
cuaguuaucgcacucaugg

SEQ ID NO: 1798889 - RNA, 19 nt, Artificial Sequence
  Description of Artificial Sequence: Synthetic oligonucleotide
  Sense strand starting at position 3443 of SEQ ID NO: 1563148
gagugcgauaacuaggaca

SEQ ID NO: 1798890 - RNA, 19 nt, Artificial Sequence
  Description of Artificial Sequence: Synthetic oligonucleotide
  Antisense strand to SEQ ID NO: 1798889
uguccuaguuaucgcacuc

SEQ ID NO: 1798891 - RNA, 19 nt, Artificial Sequence
  Description of Artificial Sequence: Synthetic oligonucleotide
  Sense strand starting at position 3445 of SEQ ID NO: 1563148
gugcgauaacuaggacaaa

SEQ ID NO: 1798892 - RNA, 19 nt, Artificial Sequence
  Description of Artificial Sequence: Synthetic oligonucleotide
  Antisense strand to SEQ ID NO: 1798891
uuuguccuaguuaucgcac

SEQ ID NO: 1798893 - RNA, 19 nt, Artificial Sequence
  Description of Artificial Sequence: Synthetic oligonucleotide
  Sense strand starting at position 3504 of SEQ ID NO: 1563148
auugcuuuccaguaaggga

SEQ ID NO: 1798894 - RNA, 19 nt, Artificial Sequence
  Description of Artificial Sequence: Synthetic oligonucleotide
  Antisense strand to SEQ ID NO: 1798893
ucccuuacuggaaagcaau

SEQ ID NO: 1798895 - RNA, 19 nt, Artificial Sequence
  Description of Artificial Sequence: Synthetic oligonucleotide
  Sense strand starting at position 3564 of SEQ ID NO: 1563148
cagcgaaauccagaacuug

SEQ ID NO: 1798896 - RNA, 19 nt, Artificial Sequence
  Description of Artificial Sequence: Synthetic oligonucleotide
  Antisense strand to SEQ ID NO: 1798895
caaguucuggauuucgcug

SEQ ID NO: 1798897 - RNA, 19 nt, Artificial Sequence
  Description of Artificial Sequence: Synthetic oligonucleotide
  Sense strand starting at position 3863 of SEQ ID NO: 1563148
aagagaaccgaguguugga

SEQ ID NO: 1798898 - RNA, 19 nt, Artificial Sequence
  Description of Artificial Sequence: Synthetic oligonucleotide
  Antisense strand to SEQ ID NO: 1798897
uccaacacucgguucucuu

SEQ ID NO: 1798899 - RNA, 19 nt, Artificial Sequence
  Description of Artificial Sequence: Synthetic oligonucleotide
  Sense strand starting at position 3870 of SEQ ID NO: 1563148
ccgaguguuggauaauuag

SEQ ID NO: 1798900 - RNA, 19 nt, Artificial Sequence
  Description of Artificial Sequence: Synthetic oligonucleotide
  Antisense strand to SEQ ID NO: 1798899
cuaauuauccaacacucgg

SEQ ID NO: 1798901 - RNA, 19 nt, Artificial Sequence
  Description of Artificial Sequence: Synthetic oligonucleotide
  Sense strand starting at position 3880 of SEQ ID NO: 1563148
gauaauuagcgauggaaga

SEQ ID NO: 1798902 - RNA, 19 nt, Artificial Sequence
  Description of Artificial Sequence: Synthetic oligonucleotide
  Antisense strand to SEQ ID NO: 1798901
ucuuccaucgcuaauuauc

SEQ ID NO: 1798903 - RNA, 19 nt, Artificial Sequence
  Description of Artificial Sequence: Synthetic oligonucleotide
  Sense strand starting at position 3881 of SEQ ID NO: 1563148
auaauuagcgauggaagaa

SEQ ID NO: 1798904 - RNA, 19 nt, Artificial Sequence
  Description of Artificial Sequence: Synthetic oligonucleotide
  Antisense strand to SEQ ID NO: 1798903
uucuuccaucgcuaauuau

SEQ ID NO: 1798905 - RNA, 19 nt, Artificial Sequence
  Description of Artificial Sequence: Synthetic oligonucleotide
  Sense strand starting at position 11 of SEQ ID NO: 1563149
ggugguauugugcaagugu

SEQ ID NO: 1798906 - RNA, 19 nt, Artificial Sequence
  Description of Artificial Sequence: Synthetic oligonucleotide
  Antisense strand to SEQ ID NO: 1798905
acacuugcacaauaccacc

SEQ ID NO: 1798907 - RNA, 19 nt, Artificial Sequence
  Description of Artificial Sequence: Synthetic oligonucleotide
  Sense strand starting at position 12 of SEQ ID NO: 1563149
gugguauugugcaaguguc

SEQ ID NO: 1798908 - RNA, 19 nt, Artificial Sequence
  Description of Artificial Sequence: Synthetic oligonucleotide
  Antisense strand to SEQ ID NO: 1798907
gacacuugcacaauaccac

SEQ ID NO: 1798909 - RNA, 19 nt, Artificial Sequence
  Description of Artificial Sequence: Synthetic oligonucleotide
  Sense strand starting at position 20 of SEQ ID NO: 1563149
gugcaagugucaugccuug

SEQ ID NO: 1798910 - RNA, 19 nt, Artificial Sequence
  Description of Artificial Sequence: Synthetic oligonucleotide
  Antisense strand to SEQ ID NO: 1798909
caaggcaugacacuugcac

SEQ ID NO: 1798911 - RNA, 19 nt, Artificial Sequence
  Description of Artificial Sequence: Synthetic oligonucleotide
  Sense strand starting at position 25 of SEQ ID NO: 1563149
agugucaugccuugccaau

SEQ ID NO: 1798912 - RNA, 19 nt, Artificial Sequence
  Description of Artificial Sequence: Synthetic oligonucleotide
  Antisense strand to SEQ ID NO: 1798911
auuggcaaggcaugacacu

SEQ ID NO: 1798913 - RNA, 19 nt, Artificial Sequence
  Description of Artificial Sequence: Synthetic oligonucleotide
  Sense strand starting at position 27 of SEQ ID NO: 1563149
ugucaugccuugccaauga

SEQ ID NO: 1798914 - RNA, 19 nt, Artificial Sequence
  Description of Artificial Sequence: Synthetic oligonucleotide
  Antisense strand to SEQ ID NO: 1798913
ucauuggcaaggcaugaca

SEQ ID NO: 1798915 - RNA, 19 nt, Artificial Sequence
  Description of Artificial Sequence: Synthetic oligonucleotide
  Sense strand starting at position 74 of SEQ ID NO: 1563149
gcugguaugguguaucauu

SEQ ID NO: 1798916 - RNA, 19 nt, Artificial Sequence
  Description of Artificial Sequence: Synthetic oligonucleotide
  Antisense strand to SEQ ID NO: 1798915
aaugauacaccauaccagc

SEQ ID NO: 1798917 - RNA, 19 nt, Artificial Sequence
  Description of Artificial Sequence: Synthetic oligonucleotide
  Sense strand starting at position 79 of SEQ ID NO: 1563149
uaugguguaucauucguau

SEQ ID NO: 1798918 - RNA, 19 nt, Artificial Sequence
  Description of Artificial Sequence: Synthetic oligonucleotide
  Antisense strand to SEQ ID NO: 1798917
auacgaaugauacaccaua

SEQ ID NO: 1798919 - RNA, 19 nt, Artificial Sequence
  Description of Artificial Sequence: Synthetic oligonucleotide
  Sense strand starting at position 81 of SEQ ID NO: 1563149
ugguguaucauucguaucu

SEQ ID NO: 1798920 - RNA, 19 nt, Artificial Sequence
  Description of Artificial Sequence: Synthetic oligonucleotide
  Antisense strand to SEQ ID NO: 1798919
agauacgaaugauacacca

SEQ ID NO: 1798921 - RNA, 19 nt, Artificial Sequence
  Description of Artificial Sequence: Synthetic oligonucleotide
  Sense strand starting at position 82 of SEQ ID NO: 1563149
gguguaucauucguaucuu

SEQ ID NO: 1798922 - RNA, 19 nt, Artificial Sequence
  Description of Artificial Sequence: Synthetic oligonucleotide
  Antisense strand to SEQ ID NO: 1798921
aagauacgaaugauacacc

SEQ ID NO: 1798923 - RNA, 19 nt, Artificial Sequence
  Description of Artificial Sequence: Synthetic oligonucleotide
  Sense strand starting at position 83 of SEQ ID NO: 1563149
guguaucauucguaucuua

SEQ ID NO: 1798924 - RNA, 19 nt, Artificial Sequence
  Description of Artificial Sequence: Synthetic oligonucleotide
  Antisense strand to SEQ ID NO: 1798923
uaagauacgaaugauacac

SEQ ID NO: 1798925 - RNA, 19 nt, Artificial Sequence
  Description of Artificial Sequence: Synthetic oligonucleotide
  Sense strand starting at position 96 of SEQ ID NO: 1563149
aucuuacauucguaucuuu

SEQ ID NO: 1798926 - RNA, 19 nt, Artificial Sequence
  Description of Artificial Sequence: Synthetic oligonucleotide
  Antisense strand to SEQ ID NO: 1798925
aaagauacgaauguaagau

SEQ ID NO: 1798927 - RNA, 19 nt, Artificial Sequence
  Description of Artificial Sequence: Synthetic oligonucleotide
  Sense strand starting at position 137 of SEQ ID NO: 1563149
acaggaguuucuguggaaa

SEQ ID NO: 1798928 - RNA, 19 nt, Artificial Sequence
  Description of Artificial Sequence: Synthetic oligonucleotide
  Antisense strand to SEQ ID NO: 1798927
uuuccacagaaacuccugu

SEQ ID NO: 1798929 - RNA, 19 nt, Artificial Sequence
  Description of Artificial Sequence: Synthetic oligonucleotide
  Sense strand starting at position 194 of SEQ ID NO: 1563149
guguucaggucuugaauag

SEQ ID NO: 1798930 - RNA, 19 nt, Artificial Sequence
  Description of Artificial Sequence: Synthetic oligonucleotide
  Antisense strand to SEQ ID NO: 1798929
cuauucaagaccugaacac

SEQ ID NO: 1798931 - RNA, 19 nt, Artificial Sequence
  Description of Artificial Sequence: Synthetic oligonucleotide
  Sense strand starting at position 261 of SEQ ID NO: 1563149
acugcaccuuucugagaag

SEQ ID NO: 1798932 - RNA, 19 nt, Artificial Sequence
  Description of Artificial Sequence: Synthetic oligonucleotide
  Antisense strand to SEQ ID NO: 1798931
cuucucagaaaggugcagu

SEQ ID NO: 1798933 - RNA, 19 nt, Artificial Sequence
  Description of Artificial Sequence: Synthetic oligonucleotide
  Sense strand starting at position 264 of SEQ ID NO: 1563149
gcaccuuucugagaagcca

SEQ ID NO: 1798934 - RNA, 19 nt, Artificial Sequence
  Description of Artificial Sequence: Synthetic oligonucleotide
  Antisense strand to SEQ ID NO: 1798933
uggcuucucagaaaggugc

SEQ ID NO: 1798935 - RNA, 19 nt, Artificial Sequence
  Description of Artificial Sequence: Synthetic oligonucleotide
  Sense strand starting at position 709 of SEQ ID NO: 1563149
gggcacuagugccaaguau

SEQ ID NO: 1798936 - RNA, 19 nt, Artificial Sequence
  Description of Artificial Sequence: Synthetic oligonucleotide
  Antisense strand to SEQ ID NO: 1798935
auacuuggcacuagugccc

SEQ ID NO: 1798937 - RNA, 19 nt, Artificial Sequence
  Description of Artificial Sequence: Synthetic oligonucleotide
  Sense strand starting at position 1228 of SEQ ID NO: 1563149
gucaguuccuuccaucgau

SEQ ID NO: 1798938 - RNA, 19 nt, Artificial Sequence
  Description of Artificial Sequence: Synthetic oligonucleotide
  Antisense strand to SEQ ID NO: 1798937
aucgauggaaggaacugac

SEQ ID NO: 1798939 - RNA, 19 nt, Artificial Sequence
  Description of Artificial Sequence: Synthetic oligonucleotide
  Sense strand starting at position 1920 of SEQ ID NO: 1563149
agcggcgagcucuuucuua

SEQ ID NO: 1798940 - RNA, 19 nt, Artificial Sequence
  Description of Artificial Sequence: Synthetic oligonucleotide
  Antisense strand to SEQ ID NO: 1798939
uaagaaagagcucgccgcu

SEQ ID NO: 1798941 - RNA, 19 nt, Artificial Sequence
  Description of Artificial Sequence: Synthetic oligonucleotide
  Sense strand starting at position 2358 of SEQ ID NO: 1563149
cuuaacagcugucaggaaa

SEQ ID NO: 1798942 - RNA, 19 nt, Artificial Sequence
  Description of Artificial Sequence: Synthetic oligonucleotide
  Antisense strand to SEQ ID NO: 1798941
uuuccugacagcuguuaag

SEQ ID NO: 1798943 - RNA, 19 nt, Artificial Sequence
  Description of Artificial Sequence: Synthetic oligonucleotide
  Sense strand starting at position 2465 of SEQ ID NO: 1563149
gcuucaaggguuuggucaa

SEQ ID NO: 1798944 - RNA, 19 nt, Artificial Sequence
  Description of Artificial Sequence: Synthetic oligonucleotide
  Antisense strand to SEQ ID NO: 1798943
uugaccaaacccuugaagc

SEQ ID NO: 1798945 - RNA, 19 nt, Artificial Sequence
  Description of Artificial Sequence: Synthetic oligonucleotide
  Sense strand starting at position 2559 of SEQ ID NO: 1563149
gugcccaaggcuugauuaa

SEQ ID NO: 1798946 - RNA, 19 nt, Artificial Sequence
  Description of Artificial Sequence: Synthetic oligonucleotide
  Antisense strand to SEQ ID NO: 1798945
uuaaucaagccuugggcac

SEQ ID NO: 1798947 - RNA, 19 nt, Artificial Sequence
  Description of Artificial Sequence: Synthetic oligonucleotide
  Sense strand starting at position 2560 of SEQ ID NO: 1563149
ugcccaaggcuugauuaau

SEQ ID NO: 1798948 - RNA, 19 nt, Artificial Sequence
  Description of Artificial Sequence: Synthetic oligonucleotide
  Antisense strand to SEQ ID NO: 1798947
auuaaucaagccuugggca

SEQ ID NO: 1798949 - RNA, 19 nt, Artificial Sequence
  Description of Artificial Sequence: Synthetic oligonucleotide
  Sense strand starting at position 2643 of SEQ ID NO: 1563149
ccacccuuccgugagcaau

SEQ ID NO: 1798950 - RNA, 19 nt, Artificial Sequence
  Description of Artificial Sequence: Synthetic oligonucleotide
  Antisense strand to SEQ ID NO: 1798949
auugcucacggaagggugg

SEQ ID NO: 1798951 - RNA, 19 nt, Artificial Sequence
  Description of Artificial Sequence: Synthetic oligonucleotide
  Sense strand starting at position 2698 of SEQ ID NO: 1563149
ccagaagccuucucaggau

SEQ ID NO: 1798952 - RNA, 19 nt, Artificial Sequence
  Description of Artificial Sequence: Synthetic oligonucleotide
  Antisense strand to SEQ ID NO: 1798951
auccugagaaggcuucugg

SEQ ID NO: 1798953 - RNA, 19 nt, Artificial Sequence
  Description of Artificial Sequence: Synthetic oligonucleotide
  Sense strand starting at position 2704 of SEQ ID NO: 1563149
gccuucucaggauaacacu

SEQ ID NO: 1798954 - RNA, 19 nt, Artificial Sequence
  Description of Artificial Sequence: Synthetic oligonucleotide
  Antisense strand to SEQ ID NO: 1798953
aguguuauccugagaaggc

SEQ ID NO: 1798955 - RNA, 19 nt, Artificial Sequence
  Description of Artificial Sequence: Synthetic oligonucleotide
  Sense strand starting at position 2804 of SEQ ID NO: 1563149
uggagcuguccucauucua

SEQ ID NO: 1798956 - RNA, 19 nt, Artificial Sequence
  Description of Artificial Sequence: Synthetic oligonucleotide
  Antisense strand to SEQ ID NO: 1798955
uagaaugaggacagcucca

SEQ ID NO: 1798957 - RNA, 19 nt, Artificial Sequence
  Description of Artificial Sequence: Synthetic oligonucleotide
  Sense strand starting at position 2925 of SEQ ID NO: 1563149
gaaguuguuugccuuucca

SEQ ID NO: 1798958 - RNA, 19 nt, Artificial Sequence
  Description of Artificial Sequence: Synthetic oligonucleotide
  Antisense strand to SEQ ID NO: 1798957
uggaaaggcaaacaacuuc

SEQ ID NO: 1798959 - RNA, 19 nt, Artificial Sequence
  Description of Artificial Sequence: Synthetic oligonucleotide
  Sense strand starting at position 3027 of SEQ ID NO: 1563149
guaggauacugucuucuca

SEQ ID NO: 1798960 - RNA, 19 nt, Artificial Sequence
  Description of Artificial Sequence: Synthetic oligonucleotide
  Antisense strand to SEQ ID NO: 1798959
ugagaagacaguauccuac

SEQ ID NO: 1798961 - RNA, 19 nt, Artificial Sequence
  Description of Artificial Sequence: Synthetic oligonucleotide
  Sense strand starting at position 3029 of SEQ ID NO: 1563149
aggauacugucuucucacu

SEQ ID NO: 1798962 - RNA, 19 nt, Artificial Sequence
  Description of Artificial Sequence: Synthetic oligonucleotide
  Antisense strand to SEQ ID NO: 1798961
agugagaagacaguauccu

SEQ ID NO: 1798963 - RNA, 19 nt, Artificial Sequence
  Description of Artificial Sequence: Synthetic oligonucleotide
  Sense strand starting at position 3050 of SEQ ID NO: 1563149
ucuggaucucuccaaaguc

SEQ ID NO: 1798964 - RNA, 19 nt, Artificial Sequence
  Description of Artificial Sequence: Synthetic oligonucleotide
  Antisense strand to SEQ ID NO: 1798963
gacuuuggagagauccaga

SEQ ID NO: 1798965 - RNA, 19 nt, Artificial Sequence
  Description of Artificial Sequence: Synthetic oligonucleotide
  Sense strand starting at position 3152 of SEQ ID NO: 1563149
caggcaguuugcuugaagu

SEQ ID NO: 1798966 - RNA, 19 nt, Artificial Sequence
  Description of Artificial Sequence: Synthetic oligonucleotide
  Antisense strand to SEQ ID NO: 1798965
acuucaagcaaacugccug

SEQ ID NO: 1798967 - RNA, 19 nt, Artificial Sequence
  Description of Artificial Sequence: Synthetic oligonucleotide
  Sense strand starting at position 3154 of SEQ ID NO: 1563149
ggcaguuugcuugaagugu

SEQ ID NO: 1798968 - RNA, 19 nt, Artificial Sequence
  Description of Artificial Sequence: Synthetic oligonucleotide
  Antisense strand to SEQ ID NO: 1798967
acacuucaagcaaacugcc

SEQ ID NO: 1798969 - RNA, 19 nt, Artificial Sequence
  Description of Artificial Sequence: Synthetic oligonucleotide
  Sense strand starting at position 3158 of SEQ ID NO: 1563149
guuugcuugaaguguuaag

SEQ ID NO: 1798970 - RNA, 19 nt, Artificial Sequence
  Description of Artificial Sequence: Synthetic oligonucleotide
  Antisense strand to SEQ ID NO: 1798969
cuuaacacuucaagcaaac

SEQ ID NO: 1798971 - RNA, 19 nt, Artificial Sequence
  Description of Artificial Sequence: Synthetic oligonucleotide
  Sense strand starting at position 3231 of SEQ ID NO: 1563149
augagagaccauggcauau

SEQ ID NO: 1798972 - RNA, 19 nt, Artificial Sequence
  Description of Artificial Sequence: Synthetic oligonucleotide
  Antisense strand to SEQ ID NO: 1798971
auaugccauggucucucau

SEQ ID NO: 1798973 - RNA, 19 nt, Artificial Sequence
  Description of Artificial Sequence: Synthetic oligonucleotide
  Sense strand starting at position 3342 of SEQ ID NO: 1563149
gagggaucuuugcuuuguu

SEQ ID NO: 1798974 - RNA, 19 nt, Artificial Sequence
  Description of Artificial Sequence: Synthetic oligonucleotide
  Antisense strand to SEQ ID NO: 1798973
aacaaagcaaagaucccuc

SEQ ID NO: 1798975 - RNA, 19 nt, Artificial Sequence
  Description of Artificial Sequence: Synthetic oligonucleotide
  Sense strand starting at position 3395 of SEQ ID NO: 1563149
cgacaugacugguacucaa

SEQ ID NO: 1798976 - RNA, 19 nt, Artificial Sequence
  Description of Artificial Sequence: Synthetic oligonucleotide
  Antisense strand to SEQ ID NO: 1798975
uugaguaccagucaugucg

SEQ ID NO: 1798977 - RNA, 19 nt, Artificial Sequence
  Description of Artificial Sequence: Synthetic oligonucleotide
  Sense strand starting at position 3490 of SEQ ID NO: 1563149
agauaagguucucauuaau

SEQ ID NO: 1798978 - RNA, 19 nt, Artificial Sequence
  Description of Artificial Sequence: Synthetic oligonucleotide
  Antisense strand to SEQ ID NO: 1798977
auuaaugagaaccuuaucu

SEQ ID NO: 1798979 - RNA, 19 nt, Artificial Sequence
  Description of Artificial Sequence: Synthetic oligonucleotide
  Sense strand starting at position 3496 of SEQ ID NO: 1563149
gguucucauuaauagccua

SEQ ID NO: 1798980 - RNA, 19 nt, Artificial Sequence
  Description of Artificial Sequence: Synthetic oligonucleotide
  Antisense strand to SEQ ID NO: 1798979
uaggcuauuaaugagaacc

SEQ ID NO: 1798981 - RNA, 19 nt, Artificial Sequence
  Description of Artificial Sequence: Synthetic oligonucleotide
  Sense strand starting at position 3589 of SEQ ID NO: 1563149
ggauaugaguagcagacau

SEQ ID NO: 1798982 - RNA, 19 nt, Artificial Sequence
  Description of Artificial Sequence: Synthetic oligonucleotide
  Antisense strand to SEQ ID NO: 1798981
augucugcuacucauaucc

SEQ ID NO: 1798983 - RNA, 19 nt, Artificial Sequence
  Description of Artificial Sequence: Synthetic oligonucleotide
  Sense strand starting at position 3646 of SEQ ID NO: 1563149
gaaagaguuugcuuucuuu

SEQ ID NO: 1798984 - RNA, 19 nt, Artificial Sequence
  Description of Artificial Sequence: Synthetic oligonucleotide
  Antisense strand to SEQ ID NO: 1798983
aaagaaagcaaacucuuuc

SEQ ID NO: 1798985 - RNA, 19 nt, Artificial Sequence
  Description of Artificial Sequence: Synthetic oligonucleotide
  Sense strand starting at position 177 of SEQ ID NO: 1563150
ucaguaaccaagugaggaa

SEQ ID NO: 1798986 - RNA, 19 nt, Artificial Sequence
  Description of Artificial Sequence: Synthetic oligonucleotide
  Antisense strand to SEQ ID NO: 1798985
uuccucacuugguuacuga

SEQ ID NO: 1798987 - RNA, 19 nt, Artificial Sequence
  Description of Artificial Sequence: Synthetic oligonucleotide
  Sense strand starting at position 322 of SEQ ID NO: 1563150
acugguuugcagugauuug

SEQ ID NO: 1798988 - RNA, 19 nt, Artificial Sequence
  Description of Artificial Sequence: Synthetic oligonucleotide
  Antisense strand to SEQ ID NO: 1798987
caaaucacugcaaaccagu

SEQ ID NO: 1798989 - RNA, 19 nt, Artificial Sequence
  Description of Artificial Sequence: Synthetic oligonucleotide
  Sense strand starting at position 323 of SEQ ID NO: 1563150
cugguuugcagugauuugu

SEQ ID NO: 1798990 - RNA, 19 nt, Artificial Sequence
  Description of Artificial Sequence: Synthetic oligonucleotide
  Antisense strand to SEQ ID NO: 1798989
acaaaucacugcaaaccag

SEQ ID NO: 1798991 - RNA, 19 nt, Artificial Sequence
  Description of Artificial Sequence: Synthetic oligonucleotide
  Sense strand starting at position 329 of SEQ ID NO: 1563150
ugcagugauuuguuaccca

SEQ ID NO: 1798992 - RNA, 19 nt, Artificial Sequence
  Description of Artificial Sequence: Synthetic oligonucleotide
  Antisense strand to SEQ ID NO: 1798991
uggguaacaaaucacugca

SEQ ID NO: 1798993 - RNA, 19 nt, Artificial Sequence
  Description of Artificial Sequence: Synthetic oligonucleotide
  Sense strand starting at position 362 of SEQ ID NO: 1563150
agacauuacccauaugcgu

SEQ ID NO: 1798994 - RNA, 19 nt, Artificial Sequence
  Description of Artificial Sequence: Synthetic oligonucleotide
  Antisense strand to SEQ ID NO: 1798993
acgcauauggguaaugucu

SEQ ID NO: 1798995 - RNA, 19 nt, Artificial Sequence
  Description of Artificial Sequence: Synthetic oligonucleotide
  Sense strand starting at position 402 of SEQ ID NO: 1563150
ccaauuggagauugcuaaa

SEQ ID NO: 1798996 - RNA, 19 nt, Artificial Sequence
  Description of Artificial Sequence: Synthetic oligonucleotide
  Antisense strand to SEQ ID NO: 1798995
uuuagcaaucuccaauugg

SEQ ID NO: 1798997 - RNA, 19 nt, Artificial Sequence
  Description of Artificial Sequence: Synthetic oligonucleotide
  Sense strand starting at position 459 of SEQ ID NO: 1563150
ucugaaaucuaugugcaga

SEQ ID NO: 1798998 - RNA, 19 nt, Artificial Sequence
  Description of Artificial Sequence: Synthetic oligonucleotide
  Antisense strand to SEQ ID NO: 1798997
ucugcacauagauuucaga

SEQ ID NO: 1798999 - RNA, 19 nt, Artificial Sequence
  Description of Artificial Sequence: Synthetic oligonucleotide
  Sense strand starting at position 461 of SEQ ID NO: 1563150
ugaaaucuaugugcagauc

SEQ ID NO: 1799000 - RNA, 19 nt, Artificial Sequence
  Description of Artificial Sequence: Synthetic oligonucleotide
  Antisense strand to SEQ ID NO: 1798999
gaucugcacauagauuuca

SEQ ID NO: 1799001 - RNA, 19 nt, Artificial Sequence
  Description of Artificial Sequence: Synthetic oligonucleotide
  Sense strand starting at position 568 of SEQ ID NO: 1563150
guacacauauaguuaaacu

SEQ ID NO: 1799002 - RNA, 19 nt, Artificial Sequence
  Description of Artificial Sequence: Synthetic oligonucleotide
  Antisense strand to SEQ ID NO: 1799001
aguuuaacuauauguguac

SEQ ID NO: 1799003 - RNA, 19 nt, Artificial Sequence
  Description of Artificial Sequence: Synthetic oligonucleotide
  Sense strand starting at position 690 of SEQ ID NO: 1563150
ggaucugucuuccugacua

SEQ ID NO: 1799004 - RNA, 19 nt, Artificial Sequence
  Description of Artificial Sequence: Synthetic oligonucleotide
  Antisense strand to SEQ ID NO: 1799003
uagucaggaagacagaucc

SEQ ID NO: 1799005 - RNA, 19 nt, Artificial Sequence
  Description of Artificial Sequence: Synthetic oligonucleotide
  Sense strand starting at position 901 of SEQ ID NO: 1563150
cagaaugcauguucugauu

SEQ ID NO: 1799006 - RNA, 19 nt, Artificial Sequence
  Description of Artificial Sequence: Synthetic oligonucleotide
  Antisense strand to SEQ ID NO: 1799005
aaucagaacaugcauucug

SEQ ID NO: 1799007 - RNA, 19 nt, Artificial Sequence
  Description of Artificial Sequence: Synthetic oligonucleotide
  Sense strand starting at position 1024 of SEQ ID NO: 1563150
augcuucuugaagacucaa

SEQ ID NO: 1799008 - RNA, 19 nt, Artificial Sequence
  Description of Artificial Sequence: Synthetic oligonucleotide
  Antisense strand to SEQ ID NO: 1799007
uugagucuucaagaagcau

SEQ ID NO: 1799009 - RNA, 19 nt, Artificial Sequence
  Description of Artificial Sequence: Synthetic oligonucleotide
  Sense strand starting at position 1112 of SEQ ID NO: 1563150
guagaauaauggcuuuaug

SEQ ID NO: 1799010 - RNA, 19 nt, Artificial Sequence
  Description of Artificial Sequence: Synthetic oligonucleotide
  Antisense strand to SEQ ID NO: 1799009
cauaaagccauuauucuac

SEQ ID NO: 1799011 - RNA, 19 nt, Artificial Sequence
  Description of Artificial Sequence: Synthetic oligonucleotide
  Sense strand starting at position 1236 of SEQ ID NO: 1563150
aaauaauguucccugagga

SEQ ID NO: 1799012 - RNA, 19 nt, Artificial Sequence
  Description of Artificial Sequence: Synthetic oligonucleotide
  Antisense strand to SEQ ID NO: 1799011
uccucagggaacauuauuu

SEQ ID NO: 1799013 - RNA, 19 nt, Artificial Sequence
  Description of Artificial Sequence: Synthetic oligonucleotide
  Sense strand starting at position 1237 of SEQ ID NO: 1563150
aauaauguucccugaggag

SEQ ID NO: 1799014 - RNA, 19 nt, Artificial Sequence
  Description of Artificial Sequence: Synthetic oligonucleotide
  Antisense strand to SEQ ID NO: 1799013
cuccucagggaacauuauu

SEQ ID NO: 1799015 - RNA, 19 nt, Artificial Sequence
  Description of Artificial Sequence: Synthetic oligonucleotide
  Sense strand starting at position 1585 of SEQ ID NO: 1563150
ccaguagaccagugaauga

SEQ ID NO: 1799016 - RNA, 19 nt, Artificial Sequence
  Description of Artificial Sequence: Synthetic oligonucleotide
  Antisense strand to SEQ ID NO: 1799015
ucauucacuggucuacugg

SEQ ID NO: 1799017 - RNA, 19 nt, Artificial Sequence
  Description of Artificial Sequence: Synthetic oligonucleotide
  Sense strand starting at position 1812 of SEQ ID NO: 1563150
ccacuauagagaggugacu

SEQ ID NO: 1799018 - RNA, 19 nt, Artificial Sequence
  Description of Artificial Sequence: Synthetic oligonucleotide
  Antisense strand to SEQ ID NO: 1799017
agucaccucucuauagugg

SEQ ID NO: 1799019 - RNA, 19 nt, Artificial Sequence
  Description of Artificial Sequence: Synthetic oligonucleotide
  Sense strand starting at position 2394 of SEQ ID NO: 1563150
gccuccucucuggaaauca

SEQ ID NO: 1799020 - RNA, 19 nt, Artificial Sequence
  Description of Artificial Sequence: Synthetic oligonucleotide
  Antisense strand to SEQ ID NO: 1799019
ugauuuccagagaggaggc

SEQ ID NO: 1799021 - RNA, 19 nt, Artificial Sequence
  Description of Artificial Sequence: Synthetic oligonucleotide
  Sense strand starting at position 2414 of SEQ ID NO: 1563150
auguuugucccuuaauacu

SEQ ID NO: 1799022 - RNA, 19 nt, Artificial Sequence
  Description of Artificial Sequence: Synthetic oligonucleotide
  Antisense strand to SEQ ID NO: 1799021
aguauuaagggacaaacau

SEQ ID NO: 1799023 - RNA, 19 nt, Artificial Sequence
  Description of Artificial Sequence: Synthetic oligonucleotide
  Sense strand starting at position 2420 of SEQ ID NO: 1563150
gucccuuaauacuuguaga

SEQ ID NO: 1799024 - RNA, 19 nt, Artificial Sequence
  Description of Artificial Sequence: Synthetic oligonucleotide
  Antisense strand to SEQ ID NO: 1799023
ucuacaaguauuaagggac

SEQ ID NO: 1799025 - RNA, 19 nt, Artificial Sequence
  Description of Artificial Sequence: Synthetic oligonucleotide
  Sense strand starting at position 2477 of SEQ ID NO: 1563150
guaaacaagcacugauaca

SEQ ID NO: 1799026 - RNA, 19 nt, Artificial Sequence
  Description of Artificial Sequence: Synthetic oligonucleotide
  Antisense strand to SEQ ID NO: 1799025
uguaucagugcuuguuuac

SEQ ID NO: 1799027 - RNA, 19 nt, Artificial Sequence
  Description of Artificial Sequence: Synthetic oligonucleotide
  Sense strand starting at position 2490 of SEQ ID NO: 1563150
gauacagcacuuugauaug

SEQ ID NO: 1799028 - RNA, 19 nt, Artificial Sequence
  Description of Artificial Sequence: Synthetic oligonucleotide
  Antisense strand to SEQ ID NO: 1799027
cauaucaaagugcuguauc

SEQ ID NO: 1799029 - RNA, 19 nt, Artificial Sequence
  Description of Artificial Sequence: Synthetic oligonucleotide
  Sense strand starting at position 2562 of SEQ ID NO: 1563150
gaaguaggugggcaugauu

SEQ ID NO: 1799030 - RNA, 19 nt, Artificial Sequence
  Description of Artificial Sequence: Synthetic oligonucleotide
  Antisense strand to SEQ ID NO: 1799029
aaucaugcccaccuacuuc

SEQ ID NO: 1799031 - RNA, 19 nt, Artificial Sequence
  Description of Artificial Sequence: Synthetic oligonucleotide
  Sense strand starting at position 2565 of SEQ ID NO: 1563150
guaggugggcaugauuauu

SEQ ID NO: 1799032 - RNA, 19 nt, Artificial Sequence
  Description of Artificial Sequence: Synthetic oligonucleotide
  Antisense strand to SEQ ID NO: 1799031
aauaaucaugcccaccuac

SEQ ID NO: 1799033 - RNA, 19 nt, Artificial Sequence
  Description of Artificial Sequence: Synthetic oligonucleotide
  Sense strand starting at position 2619 of SEQ ID NO: 1563150
agaaguaauuuguacaaga

SEQ ID NO: 1799034 - RNA, 19 nt, Artificial Sequence
  Description of Artificial Sequence: Synthetic oligonucleotide
  Antisense strand to SEQ ID NO: 1799033
ucuuguacaaauuacuucu

SEQ ID NO: 1799035 - RNA, 19 nt, Artificial Sequence
  Description of Artificial Sequence: Synthetic oligonucleotide
  Sense strand starting at position 2886 of SEQ ID NO: 1563150
gaaauuggguuucucauug

SEQ ID NO: 1799036 - RNA, 19 nt, Artificial Sequence
  Description of Artificial Sequence: Synthetic oligonucleotide
  Antisense strand to SEQ ID NO: 1799035
caaugagaaacccaauuuc

SEQ ID NO: 1799037 - RNA, 19 nt, Artificial Sequence
  Description of Artificial Sequence: Synthetic oligonucleotide
  Sense strand starting at position 2924 of SEQ ID NO: 1563150
guaggaacacagugacaua

SEQ ID NO: 1799038 - RNA, 19 nt, Artificial Sequence
  Description of Artificial Sequence: Synthetic oligonucleotide
  Antisense strand to SEQ ID NO: 1799037
uaugucacuguguuccuac

SEQ ID NO: 1799039 - RNA, 19 nt, Artificial Sequence
  Description of Artificial Sequence: Synthetic oligonucleotide
  Sense strand starting at position 2927 of SEQ ID NO: 1563150
ggaacacagugacauauuu

SEQ ID NO: 1799040 - RNA, 19 nt, Artificial Sequence
  Description of Artificial Sequence: Synthetic oligonucleotide
  Antisense strand to SEQ ID NO: 1799039
aaauaugucacuguguucc

SEQ ID NO: 1799041 - RNA, 19 nt, Artificial Sequence
  Description of Artificial Sequence: Synthetic oligonucleotide
  Sense strand starting at position 2978 of SEQ ID NO: 1563150
ggcuuugguucggugauuu

SEQ ID NO: 1799042 - RNA, 19 nt, Artificial Sequence
  Description of Artificial Sequence: Synthetic oligonucleotide
  Antisense strand to SEQ ID NO: 1799041
aaaucaccgaaccaaagcc

SEQ ID NO: 1799043 - RNA, 19 nt, Artificial Sequence
  Description of Artificial Sequence: Synthetic oligonucleotide
  Sense strand starting at position 3144 of SEQ ID NO: 1563150
ucuuaagaggauuguauau

SEQ ID NO: 1799044 - RNA, 19 nt, Artificial Sequence
  Description of Artificial Sequence: Synthetic oligonucleotide
  Antisense strand to SEQ ID NO: 1799043
auauacaauccucuuaaga

SEQ ID NO: 1799045 - RNA, 19 nt, Artificial Sequence
  Description of Artificial Sequence: Synthetic oligonucleotide
  Sense strand starting at position 3402 of SEQ ID NO: 1563150
auugaugacuuugucauca

SEQ ID NO: 1799046 - RNA, 19 nt, Artificial Sequence
  Description of Artificial Sequence: Synthetic oligonucleotide
  Antisense strand to SEQ ID NO: 1799045
ugaugacaaagucaucaau

SEQ ID NO: 1799047 - RNA, 19 nt, Artificial Sequence
  Description of Artificial Sequence: Synthetic oligonucleotide
  Sense strand starting at position 3410 of SEQ ID NO: 1563150
cuuugucaucaauggaaag

SEQ ID NO: 1799048 - RNA, 19 nt, Artificial Sequence
  Description of Artificial Sequence: Synthetic oligonucleotide
  Antisense strand to SEQ ID NO: 1799047
cuuuccauugaugacaaag

SEQ ID NO: 1799049 - RNA, 19 nt, Artificial Sequence
  Description of Artificial Sequence: Synthetic oligonucleotide
  Sense strand starting at position 3453 of SEQ ID NO: 1563150
cagucaugucagggaucuu

SEQ ID NO: 1799050 - RNA, 19 nt, Artificial Sequence
  Description of Artificial Sequence: Synthetic oligonucleotide
  Antisense strand to SEQ ID NO: 1799049
aagaucccugacaugacug

SEQ ID NO: 1799051 - RNA, 19 nt, Artificial Sequence
  Description of Artificial Sequence: Synthetic oligonucleotide
  Sense strand starting at position 3471 of SEQ ID NO: 1563150
ugaaauauuuaugcucguu

SEQ ID NO: 1799052 - RNA, 19 nt, Artificial Sequence
  Description of Artificial Sequence: Synthetic oligonucleotide
  Antisense strand to SEQ ID NO: 1799051
aacgagcauaaauauuuca

SEQ ID NO: 1799053 - RNA, 19 nt, Artificial Sequence
  Description of Artificial Sequence: Synthetic oligonucleotide
  Sense strand starting at position 3718 of SEQ ID NO: 1563150
ccaagcagugaguaagaau

SEQ ID NO: 1799054 - RNA, 19 nt, Artificial Sequence
  Description of Artificial Sequence: Synthetic oligonucleotide
  Antisense strand to SEQ ID NO: 1799053
auucuuacucacugcuugg

SEQ ID NO: 1799055 - RNA, 19 nt, Artificial Sequence
  Description of Artificial Sequence: Synthetic oligonucleotide
  Sense strand starting at position 3749 of SEQ ID NO: 1563150
uccaaauuggagcauuacu

SEQ ID NO: 1799056 - RNA, 19 nt, Artificial Sequence
  Description of Artificial Sequence: Synthetic oligonucleotide
  Antisense strand to SEQ ID NO: 1799055
aguaaugcuccaauuugga

SEQ ID NO: 1799057 - RNA, 19 nt, Artificial Sequence
  Description of Artificial Sequence: Synthetic oligonucleotide
  Sense strand starting at position 3757 of SEQ ID NO: 1563150
ggagcauuacugcauccaa

SEQ ID NO: 1799058 - RNA, 19 nt, Artificial Sequence
  Description of Artificial Sequence: Synthetic oligonucleotide
  Antisense strand to SEQ ID NO: 1799057
uuggaugcaguaaugcucc

SEQ ID NO: 1799059 - RNA, 19 nt, Artificial Sequence
  Description of Artificial Sequence: Synthetic oligonucleotide
  Sense strand starting at position 3779 of SEQ ID NO: 1563150
cguugcuuuaaagaauaga

SEQ ID NO: 1799060 - RNA, 19 nt, Artificial Sequence
  Description of Artificial Sequence: Synthetic oligonucleotide
  Antisense strand to SEQ ID NO: 1799059
ucuauucuuuaaagcaacg

SEQ ID NO: 1799061 - RNA, 19 nt, Artificial Sequence
  Description of Artificial Sequence: Synthetic oligonucleotide
  Sense strand starting at position 3796 of SEQ ID NO: 1563150
gaaaguuggagguggaauc

SEQ ID NO: 1799062 - RNA, 19 nt, Artificial Sequence
  Description of Artificial Sequence: Synthetic oligonucleotide
  Antisense strand to SEQ ID NO: 1799061
gauuccaccuccaacuuuc

SEQ ID NO: 1799063 - RNA, 19 nt, Artificial Sequence
  Description of Artificial Sequence: Synthetic oligonucleotide
  Sense strand starting at position 3972 of SEQ ID NO: 1563150
aggacucuguaguuaacaa

SEQ ID NO: 1799064 - RNA, 19 nt, Artificial Sequence
  Description of Artificial Sequence: Synthetic oligonucleotide
  Antisense strand to SEQ ID NO: 1799063
uuguuaacuacagaguccu

SEQ ID NO: 1799065 - RNA, 19 nt, Artificial Sequence
  Description of Artificial Sequence: Synthetic oligonucleotide
  Sense strand starting at position 144 of SEQ ID NO: 1563151
acagucauuuguguuauau

SEQ ID NO: 1799066 - RNA, 19 nt, Artificial Sequence
  Description of Artificial Sequence: Synthetic oligonucleotide
  Antisense strand to SEQ ID NO: 1799065
auauaacacaaaugacugu

SEQ ID NO: 1799067 - RNA, 19 nt, Artificial Sequence
  Description of Artificial Sequence: Synthetic oligonucleotide
  Sense strand starting at position 163 of SEQ ID NO: 1563151
guguuauaucuccaccacu

SEQ ID NO: 1799068 - RNA, 19 nt, Artificial Sequence
  Description of Artificial Sequence: Synthetic oligonucleotide
  Antisense strand to SEQ ID NO: 1799067
agugguggagauauaacac

SEQ ID NO: 1799069 - RNA, 19 nt, Artificial Sequence
  Description of Artificial Sequence: Synthetic oligonucleotide
  Sense strand starting at position 222 of SEQ ID NO: 1563151
agaacauguugacuaccua

SEQ ID NO: 1799070 - RNA, 19 nt, Artificial Sequence
  Description of Artificial Sequence: Synthetic oligonucleotide
  Antisense strand to SEQ ID NO: 1799069
uagguagucaacauguucu

SEQ ID NO: 1799071 - RNA, 19 nt, Artificial Sequence
  Description of Artificial Sequence: Synthetic oligonucleotide
  Sense strand starting at position 312 of SEQ ID NO: 1563151
aguuuagguagcuagaaca

SEQ ID NO: 1799072 - RNA, 19 nt, Artificial Sequence
  Description of Artificial Sequence: Synthetic oligonucleotide
  Antisense strand to SEQ ID NO: 1799071
uguucuagcuaccuaaacu

SEQ ID NO: 1799073 - RNA, 19 nt, Artificial Sequence
  Description of Artificial Sequence: Synthetic oligonucleotide
  Sense strand starting at position 332 of SEQ ID NO: 1563151
acaaguaaguagucuauau

SEQ ID NO: 1799074 - RNA, 19 nt, Artificial Sequence
  Description of Artificial Sequence: Synthetic oligonucleotide
  Antisense strand to SEQ ID NO: 1799073
auauagacuacuuacuugu

SEQ ID NO: 1799075 - RNA, 19 nt, Artificial Sequence
  Description of Artificial Sequence: Synthetic oligonucleotide
  Sense strand starting at position 334 of SEQ ID NO: 1563151
aaguaaguagucuauaugu

SEQ ID NO: 1799076 - RNA, 19 nt, Artificial Sequence
  Description of Artificial Sequence: Synthetic oligonucleotide
  Antisense strand to SEQ ID NO: 1799075
acauauagacuacuuacuu

SEQ ID NO: 1799077 - RNA, 19 nt, Artificial Sequence
  Description of Artificial Sequence: Synthetic oligonucleotide
  Sense strand starting at position 345 of SEQ ID NO: 1563151
cuauaugugcaguggaaua

SEQ ID NO: 1799078 - RNA, 19 nt, Artificial Sequence
  Description of Artificial Sequence: Synthetic oligonucleotide
  Antisense strand to SEQ ID NO: 1799077
uauuccacugcacauauag

SEQ ID NO: 1799079 - RNA, 19 nt, Artificial Sequence
  Description of Artificial Sequence: Synthetic oligonucleotide
  Sense strand starting at position 357 of SEQ ID NO: 1563151
uggaauaaaugcuugguua

SEQ ID NO: 1799080 - RNA, 19 nt, Artificial Sequence
  Description of Artificial Sequence: Synthetic oligonucleotide
  Antisense strand to SEQ ID NO: 1799079
uaaccaagcauuuauucca

SEQ ID NO: 1799081 - RNA, 19 nt, Artificial Sequence
  Description of Artificial Sequence: Synthetic oligonucleotide
  Sense strand starting at position 358 of SEQ ID NO: 1563151
ggaauaaaugcuugguuaa

SEQ ID NO: 1799082 - RNA, 19 nt, Artificial Sequence
  Description of Artificial Sequence: Synthetic oligonucleotide
  Antisense strand to SEQ ID NO: 1799081
uuaaccaagcauuuauucc

SEQ ID NO: 1799083 - RNA, 19 nt, Artificial Sequence
  Description of Artificial Sequence: Synthetic oligonucleotide
  Sense strand starting at position 359 of SEQ ID NO: 1563151
gaauaaaugcuugguuaag

SEQ ID NO: 1799084 - RNA, 19 nt, Artificial Sequence
  Description of Artificial Sequence: Synthetic oligonucleotide
  Antisense strand to SEQ ID NO: 1799083
cuuaaccaagcauuuauuc

SEQ ID NO: 1799085 - RNA, 19 nt, Artificial Sequence
  Description of Artificial Sequence: Synthetic oligonucleotide
  Sense strand starting at position 887 of SEQ ID NO: 1563151
gcacuuuaggcccagagaa

SEQ ID NO: 1799086 - RNA, 19 nt, Artificial Sequence
  Description of Artificial Sequence: Synthetic oligonucleotide
  Antisense strand to SEQ ID NO: 1799085
uucucugggccuaaagugc

SEQ ID NO: 1799087 - RNA, 19 nt, Artificial Sequence
  Description of Artificial Sequence: Synthetic oligonucleotide
  Sense strand starting at position 961 of SEQ ID NO: 1563151
gaggguuccugagugacaa

SEQ ID NO: 1799088 - RNA, 19 nt, Artificial Sequence
  Description of Artificial Sequence: Synthetic oligonucleotide
  Antisense strand to SEQ ID NO: 1799087
uugucacucaggaacccuc

SEQ ID NO: 1799089 - RNA, 19 nt, Artificial Sequence
  Description of Artificial Sequence: Synthetic oligonucleotide
  Sense strand starting at position 962 of SEQ ID NO: 1563151
aggguuccugagugacaag

SEQ ID NO: 1799090 - RNA, 19 nt, Artificial Sequence
  Description of Artificial Sequence: Synthetic oligonucleotide
  Antisense strand to SEQ ID NO: 1799089
cuugucacucaggaacccu

SEQ ID NO: 1799091 - RNA, 19 nt, Artificial Sequence
  Description of Artificial Sequence: Synthetic oligonucleotide
  Sense strand starting at position 979 of SEQ ID NO: 1563151
agagaugaggcuggaaagu

SEQ ID NO: 1799092 - RNA, 19 nt, Artificial Sequence
  Description of Artificial Sequence: Synthetic oligonucleotide
  Antisense strand to SEQ ID NO: 1799091
acuuuccagccucaucucu

SEQ ID NO: 1799093 - RNA, 19 nt, Artificial Sequence
  Description of Artificial Sequence: Synthetic oligonucleotide
  Sense strand starting at position 1182 of SEQ ID NO: 1563151
cagguaggagguuguucaa

SEQ ID NO: 1799094 - RNA, 19 nt, Artificial Sequence
  Description of Artificial Sequence: Synthetic oligonucleotide
  Antisense strand to SEQ ID NO: 1799093
uugaacaaccuccuaccug

SEQ ID NO: 1799095 - RNA, 19 nt, Artificial Sequence
  Description of Artificial Sequence: Synthetic oligonucleotide
  Sense strand starting at position 1185 of SEQ ID NO: 1563151
guaggagguuguucaaaua

SEQ ID NO: 1799096 - RNA, 19 nt, Artificial Sequence
  Description of Artificial Sequence: Synthetic oligonucleotide
  Antisense strand to SEQ ID NO: 1799095
uauuugaacaaccuccuac

SEQ ID NO: 1799097 - RNA, 19 nt, Artificial Sequence
  Description of Artificial Sequence: Synthetic oligonucleotide
  Sense strand starting at position 1197 of SEQ ID NO: 1563151
ucaaauaacucagaugaag

SEQ ID NO: 1799098 - RNA, 19 nt, Artificial Sequence
  Description of Artificial Sequence: Synthetic oligonucleotide
  Antisense strand to SEQ ID NO: 1799097
cuucaucugaguuauuuga

SEQ ID NO: 1799099 - RNA, 19 nt, Artificial Sequence
  Description of Artificial Sequence: Synthetic oligonucleotide
  Sense strand starting at position 1324 of SEQ ID NO: 1563151
cuacguaaauaucuguaga

SEQ ID NO: 1799100 - RNA, 19 nt, Artificial Sequence
  Description of Artificial Sequence: Synthetic oligonucleotide
  Antisense strand to SEQ ID NO: 1799099
ucuacagauauuuacguag

SEQ ID NO: 1799101 - RNA, 19 nt, Artificial Sequence
  Description of Artificial Sequence: Synthetic oligonucleotide
  Sense strand starting at position 1326 of SEQ ID NO: 1563151
acguaaauaucuguagacu

SEQ ID NO: 1799102 - RNA, 19 nt, Artificial Sequence
  Description of Artificial Sequence: Synthetic oligonucleotide
  Antisense strand to SEQ ID NO: 1799101
agucuacagauauuuacgu

SEQ ID NO: 1799103 - RNA, 19 nt, Artificial Sequence
  Description of Artificial Sequence: Synthetic oligonucleotide
  Sense strand starting at position 1327 of SEQ ID NO: 1563151
cguaaauaucuguagacua

SEQ ID NO: 1799104 - RNA, 19 nt, Artificial Sequence
  Description of Artificial Sequence: Synthetic oligonucleotide
  Antisense strand to SEQ ID NO: 1799103
uagucuacagauauuuacg

SEQ ID NO: 1799105 - RNA, 19 nt, Artificial Sequence
  Description of Artificial Sequence: Synthetic oligonucleotide
  Sense strand starting at position 1388 of SEQ ID NO: 1563151
cugagucacucacuguaca

SEQ ID NO: 1799106 - RNA, 19 nt, Artificial Sequence
  Description of Artificial Sequence: Synthetic oligonucleotide
  Antisense strand to SEQ ID NO: 1799105
uguacagugagugacucag

SEQ ID NO: 1799107 - RNA, 19 nt, Artificial Sequence
  Description of Artificial Sequence: Synthetic oligonucleotide
  Sense strand starting at position 1446 of SEQ ID NO: 1563151
ucgaaaggaacagguuauu

SEQ ID NO: 1799108 - RNA, 19 nt, Artificial Sequence
  Description of Artificial Sequence: Synthetic oligonucleotide
  Antisense strand to SEQ ID NO: 1799107
aauaaccuguuccuuucga

SEQ ID NO: 1799109 - RNA, 19 nt, Artificial Sequence
  Description of Artificial Sequence: Synthetic oligonucleotide
  Sense strand starting at position 1457 of SEQ ID NO: 1563151
agguuauucgagcacagaa

SEQ ID NO: 1799110 - RNA, 19 nt, Artificial Sequence
  Description of Artificial Sequence: Synthetic oligonucleotide
  Antisense strand to SEQ ID NO: 1799109
uucugugcucgaauaaccu

SEQ ID NO: 1799111 - RNA, 19 nt, Artificial Sequence
  Description of Artificial Sequence: Synthetic oligonucleotide
  Sense strand starting at position 1459 of SEQ ID NO: 1563151
guuauucgagcacagaaag

SEQ ID NO: 1799112 - RNA, 19 nt, Artificial Sequence
  Description of Artificial Sequence: Synthetic oligonucleotide
  Antisense strand to SEQ ID NO: 1799111
cuuucugugcucgaauaac

SEQ ID NO: 1799113 - RNA, 19 nt, Artificial Sequence
  Description of Artificial Sequence: Synthetic oligonucleotide
  Sense strand starting at position 1477 of SEQ ID NO: 1563151
gcaacaacacuauguguaa

SEQ ID NO: 1799114 - RNA, 19 nt, Artificial Sequence
  Description of Artificial Sequence: Synthetic oligonucleotide
  Antisense strand to SEQ ID NO: 1799113
uuacacauaguguuguugc

SEQ ID NO: 1799115 - RNA, 19 nt, Artificial Sequence
  Description of Artificial Sequence: Synthetic oligonucleotide
  Sense strand starting at position 1907 of SEQ ID NO: 1563151
uacaguuaccgggaugcua

SEQ ID NO: 1799116 - RNA, 19 nt, Artificial Sequence
  Description of Artificial Sequence: Synthetic oligonucleotide
  Antisense strand to SEQ ID NO: 1799115
uagcaucccgguaacugua

SEQ ID NO: 1799117 - RNA, 19 nt, Artificial Sequence
  Description of Artificial Sequence: Synthetic oligonucleotide
  Sense strand starting at position 2027 of SEQ ID NO: 1563151
gacaaaucaguucgacuag

SEQ ID NO: 1799118 - RNA, 19 nt, Artificial Sequence
  Description of Artificial Sequence: Synthetic oligonucleotide
  Antisense strand to SEQ ID NO: 1799117
cuagucgaacugauuuguc

SEQ ID NO: 1799119 - RNA, 19 nt, Artificial Sequence
  Description of Artificial Sequence: Synthetic oligonucleotide
  Sense strand starting at position 2042 of SEQ ID NO: 1563151
cuaggcuucccuuaggaca

SEQ ID NO: 1799120 - RNA, 19 nt, Artificial Sequence
  Description of Artificial Sequence: Synthetic oligonucleotide
  Antisense strand to SEQ ID NO: 1799119
uguccuaagggaagccuag

SEQ ID NO: 1799121 - RNA, 19 nt, Artificial Sequence
  Description of Artificial Sequence: Synthetic oligonucleotide
  Sense strand starting at position 2149 of SEQ ID NO: 1563151
agcugucuucuggagaaac

SEQ ID NO: 1799122 - RNA, 19 nt, Artificial Sequence
  Description of Artificial Sequence: Synthetic oligonucleotide
  Antisense strand to SEQ ID NO: 1799121
guuucuccagaagacagcu

SEQ ID NO: 1799123 - RNA, 19 nt, Artificial Sequence
  Description of Artificial Sequence: Synthetic oligonucleotide
  Sense strand starting at position 2362 of SEQ ID NO: 1563151
acuuauuaccucugcgaaa

SEQ ID NO: 1799124 - RNA, 19 nt, Artificial Sequence
  Description of Artificial Sequence: Synthetic oligonucleotide
  Antisense strand to SEQ ID NO: 1799123
uuucgcagagguaauaagu

SEQ ID NO: 1799125 - RNA, 19 nt, Artificial Sequence
  Description of Artificial Sequence: Synthetic oligonucleotide
  Sense strand starting at position 2363 of SEQ ID NO: 1563151
cuuauuaccucugcgaaac

SEQ ID NO: 1799126 - RNA, 19 nt, Artificial Sequence
  Description of Artificial Sequence: Synthetic oligonucleotide
  Antisense strand to SEQ ID NO: 1799125
guuucgcagagguaauaag

SEQ ID NO: 1799127 - RNA, 19 nt, Artificial Sequence
  Description of Artificial Sequence: Synthetic oligonucleotide
  Sense strand starting at position 2364 of SEQ ID NO: 1563151
uuauuaccucugcgaaaca

SEQ ID NO: 1799128 - RNA, 19 nt, Artificial Sequence
  Description of Artificial Sequence: Synthetic oligonucleotide
  Antisense strand to SEQ ID NO: 1799127
uguuucgcagagguaauaa

SEQ ID NO: 1799129 - RNA, 19 nt, Artificial Sequence
  Description of Artificial Sequence: Synthetic oligonucleotide
  Sense strand starting at position 2407 of SEQ ID NO: 1563151
cuaagucacggagagcaua

SEQ ID NO: 1799130 - RNA, 19 nt, Artificial Sequence
  Description of Artificial Sequence: Synthetic oligonucleotide
  Antisense strand to SEQ ID NO: 1799129
uaugcucuccgugacuuag

SEQ ID NO: 1799131 - RNA, 19 nt, Artificial Sequence
  Description of Artificial Sequence: Synthetic oligonucleotide
  Sense strand starting at position 2473 of SEQ ID NO: 1563151
ccucacagagcuuaugauu

SEQ ID NO: 1799132 - RNA, 19 nt, Artificial Sequence
  Description of Artificial Sequence: Synthetic oligonucleotide
  Antisense strand to SEQ ID NO: 1799131
aaucauaagcucugugagg

SEQ ID NO: 1799133 - RNA, 19 nt, Artificial Sequence
  Description of Artificial Sequence: Synthetic oligonucleotide
  Sense strand starting at position 2902 of SEQ ID NO: 1563151
uuauaucaaugagagaaag

SEQ ID NO: 1799134 - RNA, 19 nt, Artificial Sequence
  Description of Artificial Sequence: Synthetic oligonucleotide
  Antisense strand to SEQ ID NO: 1799133
cuuucucucauugauauaa

SEQ ID NO: 1799135 - RNA, 19 nt, Artificial Sequence
  Description of Artificial Sequence: Synthetic oligonucleotide
  Sense strand starting at position 3102 of SEQ ID NO: 1563151
gggaaaucauuggaggauu

SEQ ID NO: 1799136 - RNA, 19 nt, Artificial Sequence
  Description of Artificial Sequence: Synthetic oligonucleotide
  Antisense strand to SEQ ID NO: 1799135
aauccuccaaugauuuccc

SEQ ID NO: 1799137 - RNA, 19 nt, Artificial Sequence
  Description of Artificial Sequence: Synthetic oligonucleotide
  Sense strand starting at position 3127 of SEQ ID NO: 1563151
aaaggugugaugugaucua

SEQ ID NO: 1799138 - RNA, 19 nt, Artificial Sequence
  Description of Artificial Sequence: Synthetic oligonucleotide
  Antisense strand to SEQ ID NO: 1799137
uagaucacaucacaccuuu

SEQ ID NO: 1799139 - RNA, 19 nt, Artificial Sequence
  Description of Artificial Sequence: Synthetic oligonucleotide
  Sense strand starting at position 3234 of SEQ ID NO: 1563151
guaggccucccugaaggau

SEQ ID NO: 1799140 - RNA, 19 nt, Artificial Sequence
  Description of Artificial Sequence: Synthetic oligonucleotide
  Antisense strand to SEQ ID NO: 1799139
auccuucagggaggccuac

SEQ ID NO: 1799141 - RNA, 19 nt, Artificial Sequence
  Description of Artificial Sequence: Synthetic oligonucleotide
  Sense strand starting at position 3367 of SEQ ID NO: 1563151
guugauaccuaucacauuu

SEQ ID NO: 1799142 - RNA, 19 nt, Artificial Sequence
  Description of Artificial Sequence: Synthetic oligonucleotide
  Antisense strand to SEQ ID NO: 1799141
aaaugugauagguaucaac

SEQ ID NO: 1799143 - RNA, 19 nt, Artificial Sequence
  Description of Artificial Sequence: Synthetic oligonucleotide
  Sense strand starting at position 3666 of SEQ ID NO: 1563151
aguggucugccacaggaau

SEQ ID NO: 1799144 - RNA, 19 nt, Artificial Sequence
  Description of Artificial Sequence: Synthetic oligonucleotide
  Antisense strand to SEQ ID NO: 1799143
auuccuguggcagaccacu

SEQ ID NO: 1799145 - RNA, 19 nt, Artificial Sequence
  Description of Artificial Sequence: Synthetic oligonucleotide
  Sense strand starting at position 2269 of SEQ ID NO: 1563152
gcgccagggcuccagauuu

SEQ ID NO: 1799146 - RNA, 19 nt, Artificial Sequence
  Description of Artificial Sequence: Synthetic oligonucleotide
  Antisense strand to SEQ ID NO: 1799145
aaaucuggagcccuggcgc

SEQ ID NO: 1799147 - RNA, 19 nt, Artificial Sequence
  Description of Artificial Sequence: Synthetic oligonucleotide
  Sense strand starting at position 2442 of SEQ ID NO: 1563152
gugggagagucuccuacaa

SEQ ID NO: 1799148 - RNA, 19 nt, Artificial Sequence
  Description of Artificial Sequence: Synthetic oligonucleotide
  Antisense strand to SEQ ID NO: 1799147
uuguaggagacucucccac

SEQ ID NO: 1799149 - RNA, 19 nt, Artificial Sequence
  Description of Artificial Sequence: Synthetic oligonucleotide
  Sense strand starting at position 2444 of SEQ ID NO: 1563152
gggagagucuccuacaaac

SEQ ID NO: 1799150 - RNA, 19 nt, Artificial Sequence
  Description of Artificial Sequence: Synthetic oligonucleotide
  Antisense strand to SEQ ID NO: 1799149
guuuguaggagacucuccc

SEQ ID NO: 1799151 - RNA, 19 nt, Artificial Sequence
  Description of Artificial Sequence: Synthetic oligonucleotide
  Sense strand starting at position 2504 of SEQ ID NO: 1563152
accuuagauuccgucauag

SEQ ID NO: 1799152 - RNA, 19 nt, Artificial Sequence
  Description of Artificial Sequence: Synthetic oligonucleotide
  Antisense strand to SEQ ID NO: 1799151
cuaugacggaaucuaaggu

SEQ ID NO: 1799153 - RNA, 19 nt, Artificial Sequence
  Description of Artificial Sequence: Synthetic oligonucleotide
  Sense strand starting at position 2512 of SEQ ID NO: 1563152
uuccgucauagggauagau

SEQ ID NO: 1799154 - RNA, 19 nt, Artificial Sequence
  Description of Artificial Sequence: Synthetic oligonucleotide
  Antisense strand to SEQ ID NO: 1799153
aucuaucccuaugacggaa

SEQ ID NO: 1799155 - RNA, 19 nt, Artificial Sequence
  Description of Artificial Sequence: Synthetic oligonucleotide
  Sense strand starting at position 2546 of SEQ ID NO: 1563152
ugugccauuugcucuagga

SEQ ID NO: 1799156 - RNA, 19 nt, Artificial Sequence
  Description of Artificial Sequence: Synthetic oligonucleotide
  Antisense strand to SEQ ID NO: 1799155
uccuagagcaaauggcaca

SEQ ID NO: 1799157 - RNA, 19 nt, Artificial Sequence
  Description of Artificial Sequence: Synthetic oligonucleotide
  Sense strand starting at position 2611 of SEQ ID NO: 1563152
cuuucuuccugucuggaau

SEQ ID NO: 1799158 - RNA, 19 nt, Artificial Sequence
  Description of Artificial Sequence: Synthetic oligonucleotide
  Antisense strand to SEQ ID NO: 1799157
auuccagacaggaagaaag

SEQ ID NO: 1799159 - RNA, 19 nt, Artificial Sequence
  Description of Artificial Sequence: Synthetic oligonucleotide
  Sense strand starting at position 2612 of SEQ ID NO: 1563152
uuucuuccugucuggaauu

SEQ ID NO: 1799160 - RNA, 19 nt, Artificial Sequence
  Description of Artificial Sequence: Synthetic oligonucleotide
  Antisense strand to SEQ ID NO: 1799159
aauuccagacaggaagaaa

SEQ ID NO: 1799161 - RNA, 19 nt, Artificial Sequence
  Description of Artificial Sequence: Synthetic oligonucleotide
  Sense strand starting at position 2624 of SEQ ID NO: 1563152
uggaauugccuuuaaccau

SEQ ID NO: 1799162 - RNA, 19 nt, Artificial Sequence
  Description of Artificial Sequence: Synthetic oligonucleotide
  Antisense strand to SEQ ID NO: 1799161
augguuaaaggcaauucca

SEQ ID NO: 1799163 - RNA, 19 nt, Artificial Sequence
  Description of Artificial Sequence: Synthetic oligonucleotide
  Sense strand starting at position 2743 of SEQ ID NO: 1563152
uguccagagcucuguaaac

SEQ ID NO: 1799164 - RNA, 19 nt, Artificial Sequence
  Description of Artificial Sequence: Synthetic oligonucleotide
  Antisense strand to SEQ ID NO: 1799163
guuuacagagcucuggaca

SEQ ID NO: 1799165 - RNA, 19 nt, Artificial Sequence
  Description of Artificial Sequence: Synthetic oligonucleotide
  Sense strand starting at position 2745 of SEQ ID NO: 1563152
uccagagcucuguaaacgu

SEQ ID NO: 1799166 - RNA, 19 nt, Artificial Sequence
  Description of Artificial Sequence: Synthetic oligonucleotide
  Antisense strand to SEQ ID NO: 1799165
acguuuacagagcucugga

SEQ ID NO: 1799167 - RNA, 19 nt, Artificial Sequence
  Description of Artificial Sequence: Synthetic oligonucleotide
  Sense strand starting at position 2756 of SEQ ID NO: 1563152
guaaacguuugcuuuguau

SEQ ID NO: 1799168 - RNA, 19 nt, Artificial Sequence
  Description of Artificial Sequence: Synthetic oligonucleotide
  Antisense strand to SEQ ID NO: 1799167
auacaaagcaaacguuuac

SEQ ID NO: 1799169 - RNA, 19 nt, Artificial Sequence
  Description of Artificial Sequence: Synthetic oligonucleotide
  Sense strand starting at position 2791 of SEQ ID NO: 1563152
ccaaguugccuucgcauau

SEQ ID NO: 1799170 - RNA, 19 nt, Artificial Sequence
  Description of Artificial Sequence: Synthetic oligonucleotide
  Antisense strand to SEQ ID NO: 1799169
auaugcgaaggcaacuugg

SEQ ID NO: 1799171 - RNA, 19 nt, Artificial Sequence
  Description of Artificial Sequence: Synthetic oligonucleotide
  Sense strand starting at position 2792 of SEQ ID NO: 1563152
caaguugccuucgcauauu

SEQ ID NO: 1799172 - RNA, 19 nt, Artificial Sequence
  Description of Artificial Sequence: Synthetic oligonucleotide
  Antisense strand to SEQ ID NO: 1799171
aauaugcgaaggcaacuug

SEQ ID NO: 1799173 - RNA, 19 nt, Artificial Sequence
  Description of Artificial Sequence: Synthetic oligonucleotide
  Sense strand starting at position 2891 of SEQ ID NO: 1563152
gaggaugauguggguuacu

SEQ ID NO: 1799174 - RNA, 19 nt, Artificial Sequence
  Description of Artificial Sequence: Synthetic oligonucleotide
  Antisense strand to SEQ ID NO: 1799173
aguaacccacaucauccuc

SEQ ID NO: 1799175 - RNA, 19 nt, Artificial Sequence
  Description of Artificial Sequence: Synthetic oligonucleotide
  Sense strand starting at position 2934 of SEQ ID NO: 1563152
ucccauaagcccuguguaa

SEQ ID NO: 1799176 - RNA, 19 nt, Artificial Sequence
  Description of Artificial Sequence: Synthetic oligonucleotide
  Antisense strand to SEQ ID NO: 1799175
uuacacagggcuuauggga

SEQ ID NO: 1799177 - RNA, 19 nt, Artificial Sequence
  Description of Artificial Sequence: Synthetic oligonucleotide
  Sense strand starting at position 2936 of SEQ ID NO: 1563152
ccauaagcccuguguaaag

SEQ ID NO: 1799178 - RNA, 19 nt, Artificial Sequence
  Description of Artificial Sequence: Synthetic oligonucleotide
  Antisense strand to SEQ ID NO: 1799177
cuuuacacagggcuuaugg

SEQ ID NO: 1799179 - RNA, 19 nt, Artificial Sequence
  Description of Artificial Sequence: Synthetic oligonucleotide
  Sense strand starting at position 2956 of SEQ ID NO: 1563152
uggagaugcaagugggaau

SEQ ID NO: 1799180 - RNA, 19 nt, Artificial Sequence
  Description of Artificial Sequence: Synthetic oligonucleotide
  Antisense strand to SEQ ID NO: 1799179
auucccacuugcaucucca

SEQ ID NO: 1799181 - RNA, 19 nt, Artificial Sequence
  Description of Artificial Sequence: Synthetic oligonucleotide
  Sense strand starting at position 3022 of SEQ ID NO: 1563152
uccuuuaugucaguagaga

SEQ ID NO: 1799182 - RNA, 19 nt, Artificial Sequence
  Description of Artificial Sequence: Synthetic oligonucleotide
  Antisense strand to SEQ ID NO: 1799181
ucucuacugacauaaagga

SEQ ID NO: 1799183 - RNA, 19 nt, Artificial Sequence
  Description of Artificial Sequence: Synthetic oligonucleotide
  Sense strand starting at position 3023 of SEQ ID NO: 1563152
ccuuuaugucaguagagac

SEQ ID NO: 1799184 - RNA, 19 nt, Artificial Sequence
  Description of Artificial Sequence: Synthetic oligonucleotide
  Antisense strand to SEQ ID NO: 1799183
gucucuacugacauaaagg

SEQ ID NO: 1799185 - RNA, 19 nt, Artificial Sequence
  Description of Artificial Sequence: Synthetic oligonucleotide
  Sense strand starting at position 3145 of SEQ ID NO: 1563152
ugcagucuucuacagagaa

SEQ ID NO: 1799186 - RNA, 19 nt, Artificial Sequence
  Description of Artificial Sequence: Synthetic oligonucleotide
  Antisense strand to SEQ ID NO: 1799185
uucucuguagaagacugca

SEQ ID NO: 1799187 - RNA, 19 nt, Artificial Sequence
  Description of Artificial Sequence: Synthetic oligonucleotide
  Sense strand starting at position 3272 of SEQ ID NO: 1563152
cuggauaugauaggcucua

SEQ ID NO: 1799188 - RNA, 19 nt, Artificial Sequence
  Description of Artificial Sequence: Synthetic oligonucleotide
  Antisense strand to SEQ ID NO: 1799187
uagagccuaucauauccag

SEQ ID NO: 1799189 - RNA, 19 nt, Artificial Sequence
  Description of Artificial Sequence: Synthetic oligonucleotide
  Sense strand starting at position 3273 of SEQ ID NO: 1563152
uggauaugauaggcucuau

SEQ ID NO: 1799190 - RNA, 19 nt, Artificial Sequence
  Description of Artificial Sequence: Synthetic oligonucleotide
  Antisense strand to SEQ ID NO: 1799189
auagagccuaucauaucca

SEQ ID NO: 1799191 - RNA, 19 nt, Artificial Sequence
  Description of Artificial Sequence: Synthetic oligonucleotide
  Sense strand starting at position 3325 of SEQ ID NO: 1563152
uuuguucuauguuccacau

SEQ ID NO: 1799192 - RNA, 19 nt, Artificial Sequence
  Description of Artificial Sequence: Synthetic oligonucleotide
  Antisense strand to SEQ ID NO: 1799191
auguggaacauagaacaaa

SEQ ID NO: 1799193 - RNA, 19 nt, Artificial Sequence
  Description of Artificial Sequence: Synthetic oligonucleotide
  Sense strand starting at position 3329 of SEQ ID NO: 1563152
uucuauguuccacauuagu

SEQ ID NO: 1799194 - RNA, 19 nt, Artificial Sequence
  Description of Artificial Sequence: Synthetic oligonucleotide
  Antisense strand to SEQ ID NO: 1799193
acuaauguggaacauagaa

SEQ ID NO: 1799195 - RNA, 19 nt, Artificial Sequence
  Description of Artificial Sequence: Synthetic oligonucleotide
  Sense strand starting at position 3405 of SEQ ID NO: 1563152
aucgcauugucauuuggga

SEQ ID NO: 1799196 - RNA, 19 nt, Artificial Sequence
  Description of Artificial Sequence: Synthetic oligonucleotide
  Antisense strand to SEQ ID NO: 1799195
ucccaaaugacaaugcgau

SEQ ID NO: 1799197 - RNA, 19 nt, Artificial Sequence
  Description of Artificial Sequence: Synthetic oligonucleotide
  Sense strand starting at position 3409 of SEQ ID NO: 1563152
cauugucauuugggaaaug

SEQ ID NO: 1799198 - RNA, 19 nt, Artificial Sequence
  Description of Artificial Sequence: Synthetic oligonucleotide
  Antisense strand to SEQ ID NO: 1799197
cauuucccaaaugacaaug

SEQ ID NO: 1799199 - RNA, 19 nt, Artificial Sequence
  Description of Artificial Sequence: Synthetic oligonucleotide
  Sense strand starting at position 3512 of SEQ ID NO: 1563152
gcuacagccuuccuugaau

SEQ ID NO: 1799200 - RNA, 19 nt, Artificial Sequence
  Description of Artificial Sequence: Synthetic oligonucleotide
  Antisense strand to SEQ ID NO: 1799199
auucaaggaaggcuguagc

SEQ ID NO: 1799201 - RNA, 19 nt, Artificial Sequence
  Description of Artificial Sequence: Synthetic oligonucleotide
  Sense strand starting at position 3545 of SEQ ID NO: 1563152
guaaguagaaugcguagau

SEQ ID NO: 1799202 - RNA, 19 nt, Artificial Sequence
  Description of Artificial Sequence: Synthetic oligonucleotide
  Antisense strand to SEQ ID NO: 1799201
aucuacgcauucuacuuac

SEQ ID NO: 1799203 - RNA, 19 nt, Artificial Sequence
  Description of Artificial Sequence: Synthetic oligonucleotide
  Sense strand starting at position 3546 of SEQ ID NO: 1563152
uaaguagaaugcguagaua

SEQ ID NO: 1799204 - RNA, 19 nt, Artificial Sequence
  Description of Artificial Sequence: Synthetic oligonucleotide
  Antisense strand to SEQ ID NO: 1799203
uaucuacgcauucuacuua

SEQ ID NO: 1799205 - RNA, 19 nt, Artificial Sequence
  Description of Artificial Sequence: Synthetic oligonucleotide
  Sense strand starting at position 3549 of SEQ ID NO: 1563152
guagaaugcguagauacuu

SEQ ID NO: 1799206 - RNA, 19 nt, Artificial Sequence
  Description of Artificial Sequence: Synthetic oligonucleotide
  Antisense strand to SEQ ID NO: 1799205
aaguaucuacgcauucuac

SEQ ID NO: 1799207 - RNA, 19 nt, Artificial Sequence
  Description of Artificial Sequence: Synthetic oligonucleotide
  Sense strand starting at position 3621 of SEQ ID NO: 1563152
agcauugcucaauaggaau

SEQ ID NO: 1799208 - RNA, 19 nt, Artificial Sequence
  Description of Artificial Sequence: Synthetic oligonucleotide
  Antisense strand to SEQ ID NO: 1799207
auuccuauugagcaaugcu

SEQ ID NO: 1799209 - RNA, 19 nt, Artificial Sequence
  Description of Artificial Sequence: Synthetic oligonucleotide
  Sense strand starting at position 3688 of SEQ ID NO: 1563152
ccaggagaacuaugugucu

SEQ ID NO: 1799210 - RNA, 19 nt, Artificial Sequence
  Description of Artificial Sequence: Synthetic oligonucleotide
  Antisense strand to SEQ ID NO: 1799209
agacacauaguucuccugg

SEQ ID NO: 1799211 - RNA, 19 nt, Artificial Sequence
  Description of Artificial Sequence: Synthetic oligonucleotide
  Sense strand starting at position 3690 of SEQ ID NO: 1563152
aggagaacuaugugucuac

SEQ ID NO: 1799212 - RNA, 19 nt, Artificial Sequence
  Description of Artificial Sequence: Synthetic oligonucleotide
  Antisense strand to SEQ ID NO: 1799211
guagacacauaguucuccu

SEQ ID NO: 1799213 - RNA, 19 nt, Artificial Sequence
  Description of Artificial Sequence: Synthetic oligonucleotide
  Sense strand starting at position 3691 of SEQ ID NO: 1563152
ggagaacuaugugucuaca

SEQ ID NO: 1799214 - RNA, 19 nt, Artificial Sequence
  Description of Artificial Sequence: Synthetic oligonucleotide
  Antisense strand to SEQ ID NO: 1799213
uguagacacauaguucucc

SEQ ID NO: 1799215 - RNA, 19 nt, Artificial Sequence
  Description of Artificial Sequence: Synthetic oligonucleotide
  Sense strand starting at position 3693 of SEQ ID NO: 1563152
agaacuaugugucuacaca

SEQ ID NO: 1799216 - RNA, 19 nt, Artificial Sequence
  Description of Artificial Sequence: Synthetic oligonucleotide
  Antisense strand to SEQ ID NO: 1799215
uguguagacacauaguucu

SEQ ID NO: 1799217 - RNA, 19 nt, Artificial Sequence
  Description of Artificial Sequence: Synthetic oligonucleotide
  Sense strand starting at position 3701 of SEQ ID NO: 1563152
gugucuacacacuaacagu

SEQ ID NO: 1799218 - RNA, 19 nt, Artificial Sequence
  Description of Artificial Sequence: Synthetic oligonucleotide
  Antisense strand to SEQ ID NO: 1799217
acuguuaguguguagacac

SEQ ID NO: 1799219 - RNA, 19 nt, Artificial Sequence
  Description of Artificial Sequence: Synthetic oligonucleotide
  Sense strand starting at position 3822 of SEQ ID NO: 1563152
ugaaguuacucugaauaaa

SEQ ID NO: 1799220 - RNA, 19 nt, Artificial Sequence
  Description of Artificial Sequence: Synthetic oligonucleotide
  Antisense strand to SEQ ID NO: 1799219
uuuauucagaguaacuuca

SEQ ID NO: 1799221 - RNA, 19 nt, Artificial Sequence
  Description of Artificial Sequence: Synthetic oligonucleotide
  Sense strand starting at position 3962 of SEQ ID NO: 1563152
gaaggcuagugugucauuu

SEQ ID NO: 1799222 - RNA, 19 nt, Artificial Sequence
  Description of Artificial Sequence: Synthetic oligonucleotide
  Antisense strand to SEQ ID NO: 1799221
aaaugacacacuagccuuc

SEQ ID NO: 1799223 - RNA, 19 nt, Artificial Sequence
  Description of Artificial Sequence: Synthetic oligonucleotide
  Sense strand starting at position 3964 of SEQ ID NO: 1563152
aggcuagugugucauuuaa

SEQ ID NO: 1799224 - RNA, 19 nt, Artificial Sequence
  Description of Artificial Sequence: Synthetic oligonucleotide
  Antisense strand to SEQ ID NO: 1799223
uuaaaugacacacuagccu

SEQ ID NO: 1799225 - RNA, 19 nt, Artificial Sequence
  Description of Artificial Sequence: Synthetic oligonucleotide
  Sense strand starting at position 153 of SEQ ID NO: 1563153
ugugaugucuuaucagaaa

SEQ ID NO: 1799226 - RNA, 19 nt, Artificial Sequence
  Description of Artificial Sequence: Synthetic oligonucleotide
  Antisense strand to SEQ ID NO: 1799225
uuucugauaagacaucaca

SEQ ID NO: 1799227 - RNA, 19 nt, Artificial Sequence
  Description of Artificial Sequence: Synthetic oligonucleotide
  Sense strand starting at position 168 of SEQ ID NO: 1563153
gaaauaagacuuugcagua

SEQ ID NO: 1799228 - RNA, 19 nt, Artificial Sequence
  Description of Artificial Sequence: Synthetic oligonucleotide
  Antisense strand to SEQ ID NO: 1799227
uacugcaaagucuuauuuc

SEQ ID NO: 1799229 - RNA, 19 nt, Artificial Sequence
  Description of Artificial Sequence: Synthetic oligonucleotide
  Sense strand starting at position 230 of SEQ ID NO: 1563153
agaacauaguucuuaugca

SEQ ID NO: 1799230 - RNA, 19 nt, Artificial Sequence
  Description of Artificial Sequence: Synthetic oligonucleotide
  Antisense strand to SEQ ID NO: 1799229
ugcauaagaacuauguucu

SEQ ID NO: 1799231 - RNA, 19 nt, Artificial Sequence
  Description of Artificial Sequence: Synthetic oligonucleotide
  Sense strand starting at position 361 of SEQ ID NO: 1563153
agacacacugugcauaauu

SEQ ID NO: 1799232 - RNA, 19 nt, Artificial Sequence
  Description of Artificial Sequence: Synthetic oligonucleotide
  Antisense strand to SEQ ID NO: 1799231
aauuaugcacagugugucu

SEQ ID NO: 1799233 - RNA, 19 nt, Artificial Sequence
  Description of Artificial Sequence: Synthetic oligonucleotide
  Sense strand starting at position 503 of SEQ ID NO: 1563153
cugguagauuccuuggaga

SEQ ID NO: 1799234 - RNA, 19 nt, Artificial Sequence
  Description of Artificial Sequence: Synthetic oligonucleotide
  Antisense strand to SEQ ID NO: 1799233
ucuccaaggaaucuaccag

SEQ ID NO: 1799235 - RNA, 19 nt, Artificial Sequence
  Description of Artificial Sequence: Synthetic oligonucleotide
  Sense strand starting at position 757 of SEQ ID NO: 1563153
guuggauaugcucacucau

SEQ ID NO: 1799236 - RNA, 19 nt, Artificial Sequence
  Description of Artificial Sequence: Synthetic oligonucleotide
  Antisense strand to SEQ ID NO: 1799235
augagugagcauauccaac

SEQ ID NO: 1799237 - RNA, 19 nt, Artificial Sequence
  Description of Artificial Sequence: Synthetic oligonucleotide
  Sense strand starting at position 759 of SEQ ID NO: 1563153
uggauaugcucacucauac

SEQ ID NO: 1799238 - RNA, 19 nt, Artificial Sequence
  Description of Artificial Sequence: Synthetic oligonucleotide
  Antisense strand to SEQ ID NO: 1799237
guaugagugagcauaucca

SEQ ID NO: 1799239 - RNA, 19 nt, Artificial Sequence
  Description of Artificial Sequence: Synthetic oligonucleotide
  Sense strand starting at position 900 of SEQ ID NO: 1563153
cuaagauaaguaggcagau

SEQ ID NO: 1799240 - RNA, 19 nt, Artificial Sequence
  Description of Artificial Sequence: Synthetic oligonucleotide
  Antisense strand to SEQ ID NO: 1799239
aucugccuacuuaucuuag

SEQ ID NO: 1799241 - RNA, 19 nt, Artificial Sequence
  Description of Artificial Sequence: Synthetic oligonucleotide
  Sense strand starting at position 901 of SEQ ID NO: 1563153
uaagauaaguaggcagaua

SEQ ID NO: 1799242 - RNA, 19 nt, Artificial Sequence
  Description of Artificial Sequence: Synthetic oligonucleotide
  Antisense strand to SEQ ID NO: 1799241
uaucugccuacuuaucuua

SEQ ID NO: 1799243 - RNA, 19 nt, Artificial Sequence
  Description of Artificial Sequence: Synthetic oligonucleotide
  Sense strand starting at position 1245 of SEQ ID NO: 1563153
ggcacauugacuuagcaag

SEQ ID NO: 1799244 - RNA, 19 nt, Artificial Sequence
  Description of Artificial Sequence: Synthetic oligonucleotide
  Antisense strand to SEQ ID NO: 1799243
cuugcuaagucaaugugcc

SEQ ID NO: 1799245 - RNA, 19 nt, Artificial Sequence
  Description of Artificial Sequence: Synthetic oligonucleotide
  Sense strand starting at position 1302 of SEQ ID NO: 1563153
acacguucccacuagcaaa

SEQ ID NO: 1799246 - RNA, 19 nt, Artificial Sequence
  Description of Artificial Sequence: Synthetic oligonucleotide
  Antisense strand to SEQ ID NO: 1799245
uuugcuagugggaacgugu

SEQ ID NO: 1799247 - RNA, 19 nt, Artificial Sequence
  Description of Artificial Sequence: Synthetic oligonucleotide
  Sense strand starting at position 1330 of SEQ ID NO: 1563153
guaagacacuguuucugga

SEQ ID NO: 1799248 - RNA, 19 nt, Artificial Sequence
  Description of Artificial Sequence: Synthetic oligonucleotide
  Antisense strand to SEQ ID NO: 1799247
uccagaaacagugucuuac

SEQ ID NO: 1799249 - RNA, 19 nt, Artificial Sequence
  Description of Artificial Sequence: Synthetic oligonucleotide
  Sense strand starting at position 1357 of SEQ ID NO: 1563153
ugucacaacugcucagaaa

SEQ ID NO: 1799250 - RNA, 19 nt, Artificial Sequence
  Description of Artificial Sequence: Synthetic oligonucleotide
  Antisense strand to SEQ ID NO: 1799249
uuucugagcaguugugaca

SEQ ID NO: 1799251 - RNA, 19 nt, Artificial Sequence
  Description of Artificial Sequence: Synthetic oligonucleotide
  Sense strand starting at position 1358 of SEQ ID NO: 1563153
gucacaacugcucagaaau

SEQ ID NO: 1799252 - RNA, 19 nt, Artificial Sequence
  Description of Artificial Sequence: Synthetic oligonucleotide
  Antisense strand to SEQ ID NO: 1799251
auuucugagcaguugugac

SEQ ID NO: 1799253 - RNA, 19 nt, Artificial Sequence
  Description of Artificial Sequence: Synthetic oligonucleotide
  Sense strand starting at position 1702 of SEQ ID NO: 1563153
agucuagaugccuaauaga

SEQ ID NO: 1799254 - RNA, 19 nt, Artificial Sequence
  Description of Artificial Sequence: Synthetic oligonucleotide
  Antisense strand to SEQ ID NO: 1799253
ucuauuaggcaucuagacu

SEQ ID NO: 1799255 - RNA, 19 nt, Artificial Sequence
  Description of Artificial Sequence: Synthetic oligonucleotide
  Sense strand starting at position 1736 of SEQ ID NO: 1563153
guaauauuaggucacaguc

SEQ ID NO: 1799256 - RNA, 19 nt, Artificial Sequence
  Description of Artificial Sequence: Synthetic oligonucleotide
  Antisense strand to SEQ ID NO: 1799255
gacugugaccuaauauuac

SEQ ID NO: 1799257 - RNA, 19 nt, Artificial Sequence
  Description of Artificial Sequence: Synthetic oligonucleotide
  Sense strand starting at position 1777 of SEQ ID NO: 1563153
ccuagaaacugaguucuaa

SEQ ID NO: 1799258 - RNA, 19 nt, Artificial Sequence
  Description of Artificial Sequence: Synthetic oligonucleotide
  Antisense strand to SEQ ID NO: 1799257
uuagaacucaguuucuagg

SEQ ID NO: 1799259 - RNA, 19 nt, Artificial Sequence
  Description of Artificial Sequence: Synthetic oligonucleotide
  Sense strand starting at position 2385 of SEQ ID NO: 1563153
agcagaagcccucgauuuc

SEQ ID NO: 1799260 - RNA, 19 nt, Artificial Sequence
  Description of Artificial Sequence: Synthetic oligonucleotide
  Antisense strand to SEQ ID NO: 1799259
gaaaucgagggcuucugcu

SEQ ID NO: 1799261 - RNA, 19 nt, Artificial Sequence
  Description of Artificial Sequence: Synthetic oligonucleotide
  Sense strand starting at position 2425 of SEQ ID NO: 1563153
guguuugugcuugugaacu

SEQ ID NO: 1799262 - RNA, 19 nt, Artificial Sequence
  Description of Artificial Sequence: Synthetic oligonucleotide
  Antisense strand to SEQ ID NO: 1799261
aguucacaagcacaaacac

SEQ ID NO: 1799263 - RNA, 19 nt, Artificial Sequence
  Description of Artificial Sequence: Synthetic oligonucleotide
  Sense strand starting at position 2476 of SEQ ID NO: 1563153
uugcccaguccauacgaaa

SEQ ID NO: 1799264 - RNA, 19 nt, Artificial Sequence
  Description of Artificial Sequence: Synthetic oligonucleotide
  Antisense strand to SEQ ID NO: 1799263
uuucguauggacugggcaa

SEQ ID NO: 1799265 - RNA, 19 nt, Artificial Sequence
  Description of Artificial Sequence: Synthetic oligonucleotide
  Sense strand starting at position 2535 of SEQ ID NO: 1563153
ucugauucuuuggcauaaa

SEQ ID NO: 1799266 - RNA, 19 nt, Artificial Sequence
  Description of Artificial Sequence: Synthetic oligonucleotide
  Antisense strand to SEQ ID NO: 1799265
uuuaugccaaagaaucaga

SEQ ID NO: 1799267 - RNA, 19 nt, Artificial Sequence
  Description of Artificial Sequence: Synthetic oligonucleotide
  Sense strand starting at position 2757 of SEQ ID NO: 1563153
gugguaugggagggagauu

SEQ ID NO: 1799268 - RNA, 19 nt, Artificial Sequence
  Description of Artificial Sequence: Synthetic oligonucleotide
  Antisense strand to SEQ ID NO: 1799267
aaucucccucccauaccac

SEQ ID NO: 1799269 - RNA, 19 nt, Artificial Sequence
  Description of Artificial Sequence: Synthetic oligonucleotide
  Sense strand starting at position 2832 of SEQ ID NO: 1563153
acacuugcucaaugaagaa

SEQ ID NO: 1799270 - RNA, 19 nt, Artificial Sequence
  Description of Artificial Sequence: Synthetic oligonucleotide
  Antisense strand to SEQ ID NO: 1799269
uucuucauugagcaagugu

SEQ ID NO: 1799271 - RNA, 19 nt, Artificial Sequence
  Description of Artificial Sequence: Synthetic oligonucleotide
  Sense strand starting at position 3303 of SEQ ID NO: 1563153
gcaugaacucagggcugaa

SEQ ID NO: 1799272 - RNA, 19 nt, Artificial Sequence
  Description of Artificial Sequence: Synthetic oligonucleotide
  Antisense strand to SEQ ID NO: 1799271
uucagcccugaguucaugc

SEQ ID NO: 1799273 - RNA, 19 nt, Artificial Sequence
  Description of Artificial Sequence: Synthetic oligonucleotide
  Sense strand starting at position 3380 of SEQ ID NO: 1563153
agguguggcauuuggcuaa

SEQ ID NO: 1799274 - RNA, 19 nt, Artificial Sequence
  Description of Artificial Sequence: Synthetic oligonucleotide
  Antisense strand to SEQ ID NO: 1799273
uuagccaaaugccacaccu

SEQ ID NO: 1799275 - RNA, 19 nt, Artificial Sequence
  Description of Artificial Sequence: Synthetic oligonucleotide
  Sense strand starting at position 3448 of SEQ ID NO: 1563153
uacucuuaguccucaggga

SEQ ID NO: 1799276 - RNA, 19 nt, Artificial Sequence
  Description of Artificial Sequence: Synthetic oligonucleotide
  Antisense strand to SEQ ID NO: 1799275
ucccugaggacuaagagua

SEQ ID NO: 1799277 - RNA, 19 nt, Artificial Sequence
  Description of Artificial Sequence: Synthetic oligonucleotide
  Sense strand starting at position 3452 of SEQ ID NO: 1563153
cuuaguccucagggaacau

SEQ ID NO: 1799278 - RNA, 19 nt, Artificial Sequence
  Description of Artificial Sequence: Synthetic oligonucleotide
  Antisense strand to SEQ ID NO: 1799277
auguucccugaggacuaag

SEQ ID NO: 1799279 - RNA, 19 nt, Artificial Sequence
  Description of Artificial Sequence: Synthetic oligonucleotide
  Sense strand starting at position 3463 of SEQ ID NO: 1563153
gggaacauuguggguaagu

SEQ ID NO: 1799280 - RNA, 19 nt, Artificial Sequence
  Description of Artificial Sequence: Synthetic oligonucleotide
  Antisense strand to SEQ ID NO: 1799279
acuuacccacaauguuccc

SEQ ID NO: 1799281 - RNA, 19 nt, Artificial Sequence
  Description of Artificial Sequence: Synthetic oligonucleotide
  Sense strand starting at position 3464 of SEQ ID NO: 1563153
ggaacauuguggguaaguu

SEQ ID NO: 1799282 - RNA, 19 nt, Artificial Sequence
  Description of Artificial Sequence: Synthetic oligonucleotide
  Antisense strand to SEQ ID NO: 1799281
aacuuacccacaauguucc

SEQ ID NO: 1799283 - RNA, 19 nt, Artificial Sequence
  Description of Artificial Sequence: Synthetic oligonucleotide
  Sense strand starting at position 3465 of SEQ ID NO: 1563153
gaacauuguggguaaguuu

SEQ ID NO: 1799284 - RNA, 19 nt, Artificial Sequence
  Description of Artificial Sequence: Synthetic oligonucleotide
  Antisense strand to SEQ ID NO: 1799283
aaacuuacccacaauguuc

SEQ ID NO: 1799285 - RNA, 19 nt, Artificial Sequence
  Description of Artificial Sequence: Synthetic oligonucleotide
  Sense strand starting at position 3509 of SEQ ID NO: 1563153
augacaaguugccuaggaa

SEQ ID NO: 1799286 - RNA, 19 nt, Artificial Sequence
  Description of Artificial Sequence: Synthetic oligonucleotide
  Antisense strand to SEQ ID NO: 1799285
uuccuaggcaacuugucau

SEQ ID NO: 1799287 - RNA, 19 nt, Artificial Sequence
  Description of Artificial Sequence: Synthetic oligonucleotide
  Sense strand starting at position 3512 of SEQ ID NO: 1563153
acaaguugccuaggaaauu

SEQ ID NO: 1799288 - RNA, 19 nt, Artificial Sequence
  Description of Artificial Sequence: Synthetic oligonucleotide
  Antisense strand to SEQ ID NO: 1799287
aauuuccuaggcaacuugu

SEQ ID NO: 1799289 - RNA, 19 nt, Artificial Sequence
  Description of Artificial Sequence: Synthetic oligonucleotide
  Sense strand starting at position 3599 of SEQ ID NO: 1563153
acuuaagagccuggauuaa

SEQ ID NO: 1799290 - RNA, 19 nt, Artificial Sequence
  Description of Artificial Sequence: Synthetic oligonucleotide
  Antisense strand to SEQ ID NO: 1799289
uuaauccaggcucuuaagu

SEQ ID NO: 1799291 - RNA, 19 nt, Artificial Sequence
  Description of Artificial Sequence: Synthetic oligonucleotide
  Sense strand starting at position 3663 of SEQ ID NO: 1563153
agauuauuaagaggacgcu

SEQ ID NO: 1799292 - RNA, 19 nt, Artificial Sequence
  Description of Artificial Sequence: Synthetic oligonucleotide
  Antisense strand to SEQ ID NO: 1799291
agcguccucuuaauaaucu

SEQ ID NO: 1799293 - RNA, 19 nt, Artificial Sequence
  Description of Artificial Sequence: Synthetic oligonucleotide
  Sense strand starting at position 3735 of SEQ ID NO: 1563153
uuuaauggccucuaugaaa

SEQ ID NO: 1799294 - RNA, 19 nt, Artificial Sequence
  Description of Artificial Sequence: Synthetic oligonucleotide
  Antisense strand to SEQ ID NO: 1799293
uuucauagaggccauuaaa

SEQ ID NO: 1799295 - RNA, 19 nt, Artificial Sequence
  Description of Artificial Sequence: Synthetic oligonucleotide
  Sense strand starting at position 3762 of SEQ ID NO: 1563153
ugaagugguguggaauagu

SEQ ID NO: 1799296 - RNA, 19 nt, Artificial Sequence
  Description of Artificial Sequence: Synthetic oligonucleotide
  Antisense strand to SEQ ID NO: 1799295
acuauuccacaccacuuca

SEQ ID NO: 1799297 - RNA, 19 nt, Artificial Sequence
  Description of Artificial Sequence: Synthetic oligonucleotide
  Sense strand starting at position 3765 of SEQ ID NO: 1563153
agugguguggaauagugaa

SEQ ID NO: 1799298 - RNA, 19 nt, Artificial Sequence
  Description of Artificial Sequence: Synthetic oligonucleotide
  Antisense strand to SEQ ID NO: 1799297
uucacuauuccacaccacu

SEQ ID NO: 1799299 - RNA, 19 nt, Artificial Sequence
  Description of Artificial Sequence: Synthetic oligonucleotide
  Sense strand starting at position 3855 of SEQ ID NO: 1563153
uuacuauacuaugugaucu

SEQ ID NO: 1799300 - RNA, 19 nt, Artificial Sequence
  Description of Artificial Sequence: Synthetic oligonucleotide
  Antisense strand to SEQ ID NO: 1799299
agaucacauaguauaguaa

SEQ ID NO: 1799301 - RNA, 19 nt, Artificial Sequence
  Description of Artificial Sequence: Synthetic oligonucleotide
  Sense strand starting at position 3904 of SEQ ID NO: 1563153
guuucuuaccuauaaagug

SEQ ID NO: 1799302 - RNA, 19 nt, Artificial Sequence
  Description of Artificial Sequence: Synthetic oligonucleotide
  Antisense strand to SEQ ID NO: 1799301
cacuuuauagguaagaaac

SEQ ID NO: 1799303 - RNA, 19 nt, Artificial Sequence
  Description of Artificial Sequence: Synthetic oligonucleotide
  Sense strand starting at position 3935 of SEQ ID NO: 1563153
gcuaccuaggaucaaagua

SEQ ID NO: 1799304 - RNA, 19 nt, Artificial Sequence
  Description of Artificial Sequence: Synthetic oligonucleotide
  Antisense strand to SEQ ID NO: 1799303
uacuuugauccuagguagc

SEQ ID NO: 1799305 - RNA, 19 nt, Artificial Sequence
  Description of Artificial Sequence: Synthetic oligonucleotide
  Sense strand starting at position 465 of SEQ ID NO: 1563154
uacugucuuggaggguaga

SEQ ID NO: 1799306 - RNA, 19 nt, Artificial Sequence
  Description of Artificial Sequence: Synthetic oligonucleotide
  Antisense strand to SEQ ID NO: 1799305
ucuacccuccaagacagua

SEQ ID NO: 1799307 - RNA, 19 nt, Artificial Sequence
  Description of Artificial Sequence: Synthetic oligonucleotide
  Sense strand starting at position 539 of SEQ ID NO: 1563154
ugagccgucagguacauaa

SEQ ID NO: 1799308 - RNA, 19 nt, Artificial Sequence
  Description of Artificial Sequence: Synthetic oligonucleotide
  Antisense strand to SEQ ID NO: 1799307
uuauguaccugacggcuca

SEQ ID NO: 1799309 - RNA, 19 nt, Artificial Sequence
  Description of Artificial Sequence: Synthetic oligonucleotide
  Sense strand starting at position 953 of SEQ ID NO: 1563154
aucagauacugcccuuagu

SEQ ID NO: 1799310 - RNA, 19 nt, Artificial Sequence
  Description of Artificial Sequence: Synthetic oligonucleotide
  Antisense strand to SEQ ID NO: 1799309
acuaagggcaguaucugau

SEQ ID NO: 1799311 - RNA, 19 nt, Artificial Sequence
  Description of Artificial Sequence: Synthetic oligonucleotide
  Sense strand starting at position 1037 of SEQ ID NO: 1563154
ggguguaauguugauguua

SEQ ID NO: 1799312 - RNA, 19 nt, Artificial Sequence
  Description of Artificial Sequence: Synthetic oligonucleotide
  Antisense strand to SEQ ID NO: 1799311
uaacaucaacauuacaccc

SEQ ID NO: 1799313 - RNA, 19 nt, Artificial Sequence
  Description of Artificial Sequence: Synthetic oligonucleotide
  Sense strand starting at position 1091 of SEQ ID NO: 1563154
gucccaagccucuaugaug

SEQ ID NO: 1799314 - RNA, 19 nt, Artificial Sequence
  Description of Artificial Sequence: Synthetic oligonucleotide
  Antisense strand to SEQ ID NO: 1799313
caucauagaggcuugggac

SEQ ID NO: 1799315 - RNA, 19 nt, Artificial Sequence
  Description of Artificial Sequence: Synthetic oligonucleotide
  Sense strand starting at position 1247 of SEQ ID NO: 1563154
accaccagacauugucaua

SEQ ID NO: 1799316 - RNA, 19 nt, Artificial Sequence
  Description of Artificial Sequence: Synthetic oligonucleotide
  Antisense strand to SEQ ID NO: 1799315
uaugacaaugucugguggu

SEQ ID NO: 1799317 - RNA, 19 nt, Artificial Sequence
  Description of Artificial Sequence: Synthetic oligonucleotide
  Sense strand starting at position 1352 of SEQ ID NO: 1563154
gggucacaggcauauuacu

SEQ ID NO: 1799318 - RNA, 19 nt, Artificial Sequence
  Description of Artificial Sequence: Synthetic oligonucleotide
  Antisense strand to SEQ ID NO: 1799317
aguaauaugccugugaccc

SEQ ID NO: 1799319 - RNA, 19 nt, Artificial Sequence
  Description of Artificial Sequence: Synthetic oligonucleotide
  Sense strand starting at position 1361 of SEQ ID NO: 1563154
gcauauuacuggucuaaac

SEQ ID NO: 1799320 - RNA, 19 nt, Artificial Sequence
  Description of Artificial Sequence: Synthetic oligonucleotide
  Antisense strand to SEQ ID NO: 1799319
guuuagaccaguaauaugc

SEQ ID NO: 1799321 - RNA, 19 nt, Artificial Sequence
  Description of Artificial Sequence: Synthetic oligonucleotide
  Sense strand starting at position 2016 of SEQ ID NO: 1563154
augugagucguguuccgga

SEQ ID NO: 1799322 - RNA, 19 nt, Artificial Sequence
  Description of Artificial Sequence: Synthetic oligonucleotide
  Antisense strand to SEQ ID NO: 1799321
uccggaacacgacucacau

SEQ ID NO: 1799323 - RNA, 19 nt, Artificial Sequence
  Description of Artificial Sequence: Synthetic oligonucleotide
  Sense strand starting at position 2018 of SEQ ID NO: 1563154
gugagucguguuccggauu

SEQ ID NO: 1799324 - RNA, 19 nt, Artificial Sequence
  Description of Artificial Sequence: Synthetic oligonucleotide
  Antisense strand to SEQ ID NO: 1799323
aauccggaacacgacucac

SEQ ID NO: 1799325 - RNA, 19 nt, Artificial Sequence
  Description of Artificial Sequence: Synthetic oligonucleotide
  Sense strand starting at position 2141 of SEQ ID NO: 1563154
guggcauagacguauaaag

SEQ ID NO: 1799326 - RNA, 19 nt, Artificial Sequence
  Description of Artificial Sequence: Synthetic oligonucleotide
  Antisense strand to SEQ ID NO: 1799325
cuuuauacgucuaugccac

SEQ ID NO: 1799327 - RNA, 19 nt, Artificial Sequence
  Description of Artificial Sequence: Synthetic oligonucleotide
  Sense strand starting at position 2143 of SEQ ID NO: 1563154
ggcauagacguauaaagca

SEQ ID NO: 1799328 - RNA, 19 nt, Artificial Sequence
  Description of Artificial Sequence: Synthetic oligonucleotide
  Antisense strand to SEQ ID NO: 1799327
ugcuuuauacgucuaugcc

SEQ ID NO: 1799329 - RNA, 19 nt, Artificial Sequence
  Description of Artificial Sequence: Synthetic oligonucleotide
  Sense strand starting at position 2196 of SEQ ID NO: 1563154
uggcaucugggcggagaaa

SEQ ID NO: 1799330 - RNA, 19 nt, Artificial Sequence
  Description of Artificial Sequence: Synthetic oligonucleotide
  Antisense strand to SEQ ID NO: 1799329
uuucuccgcccagaugcca

SEQ ID NO: 1799331 - RNA, 19 nt, Artificial Sequence
  Description of Artificial Sequence: Synthetic oligonucleotide
  Sense strand starting at position 2197 of SEQ ID NO: 1563154
ggcaucugggcggagaaau

SEQ ID NO: 1799332 - RNA, 19 nt, Artificial Sequence
  Description of Artificial Sequence: Synthetic oligonucleotide
  Antisense strand to SEQ ID NO: 1799331
auuucuccgcccagaugcc

SEQ ID NO: 1799333 - RNA, 19 nt, Artificial Sequence
  Description of Artificial Sequence: Synthetic oligonucleotide
  Sense strand starting at position 2432 of SEQ ID NO: 1563154
ggaggcuuccuuuaggaau

SEQ ID NO: 1799334 - RNA, 19 nt, Artificial Sequence
  Description of Artificial Sequence: Synthetic oligonucleotide
  Antisense strand to SEQ ID NO: 1799333
auuccuaaaggaagccucc

SEQ ID NO: 1799335 - RNA, 19 nt, Artificial Sequence
  Description of Artificial Sequence: Synthetic oligonucleotide
  Sense strand starting at position 2533 of SEQ ID NO: 1563154
agucaauguguggagguau

SEQ ID NO: 1799336 - RNA, 19 nt, Artificial Sequence
  Description of Artificial Sequence: Synthetic oligonucleotide
  Antisense strand to SEQ ID NO: 1799335
auaccuccacacauugacu

SEQ ID NO: 1799337 - RNA, 19 nt, Artificial Sequence
  Description of Artificial Sequence: Synthetic oligonucleotide
  Sense strand starting at position 2667 of SEQ ID NO: 1563154
cuuugagauguauguaagu

SEQ ID NO: 1799338 - RNA, 19 nt, Artificial Sequence
  Description of Artificial Sequence: Synthetic oligonucleotide
  Antisense strand to SEQ ID NO: 1799337
acuuacauacaucucaaag

SEQ ID NO: 1799339 - RNA, 19 nt, Artificial Sequence
  Description of Artificial Sequence: Synthetic oligonucleotide
  Sense strand starting at position 2748 of SEQ ID NO: 1563154
guagccaucucuuugaaau

SEQ ID NO: 1799340 - RNA, 19 nt, Artificial Sequence
  Description of Artificial Sequence: Synthetic oligonucleotide
  Antisense strand to SEQ ID NO: 1799339
auuucaaagagauggcuac

SEQ ID NO: 1799341 - RNA, 19 nt, Artificial Sequence
  Description of Artificial Sequence: Synthetic oligonucleotide
  Sense strand starting at position 2801 of SEQ ID NO: 1563154
ccugucuucgugggaauuu

SEQ ID NO: 1799342 - RNA, 19 nt, Artificial Sequence
  Description of Artificial Sequence: Synthetic oligonucleotide
  Antisense strand to SEQ ID NO: 1799341
aaauucccacgaagacagg

SEQ ID NO: 1799343 - RNA, 19 nt, Artificial Sequence
  Description of Artificial Sequence: Synthetic oligonucleotide
  Sense strand starting at position 2810 of SEQ ID NO: 1563154
gugggaauuugaucugcgu

SEQ ID NO: 1799344 - RNA, 19 nt, Artificial Sequence
  Description of Artificial Sequence: Synthetic oligonucleotide
  Antisense strand to SEQ ID NO: 1799343
acgcagaucaaauucccac

SEQ ID NO: 1799345 - RNA, 19 nt, Artificial Sequence
  Description of Artificial Sequence: Synthetic oligonucleotide
  Sense strand starting at position 2844 of SEQ ID NO: 1563154
auuaccugcuugucauaga

SEQ ID NO: 1799346 - RNA, 19 nt, Artificial Sequence
  Description of Artificial Sequence: Synthetic oligonucleotide
  Antisense strand to SEQ ID NO: 1799345
ucuaugacaagcagguaau

SEQ ID NO: 1799347 - RNA, 19 nt, Artificial Sequence
  Description of Artificial Sequence: Synthetic oligonucleotide
  Sense strand starting at position 2940 of SEQ ID NO: 1563154
ggaugaaguauguguacca

SEQ ID NO: 1799348 - RNA, 19 nt, Artificial Sequence
  Description of Artificial Sequence: Synthetic oligonucleotide
  Antisense strand to SEQ ID NO: 1799347
ugguacacauacuucaucc

SEQ ID NO: 1799349 - RNA, 19 nt, Artificial Sequence
  Description of Artificial Sequence: Synthetic oligonucleotide
  Sense strand starting at position 2941 of SEQ ID NO: 1563154
gaugaaguauguguaccaa

SEQ ID NO: 1799350 - RNA, 19 nt, Artificial Sequence
  Description of Artificial Sequence: Synthetic oligonucleotide
  Antisense strand to SEQ ID NO: 1799349
uugguacacauacuucauc

SEQ ID NO: 1799351 - RNA, 19 nt, Artificial Sequence
  Description of Artificial Sequence: Synthetic oligonucleotide
  Sense strand starting at position 2970 of SEQ ID NO: 1563154
caaguuucuugagcacaag

SEQ ID NO: 1799352 - RNA, 19 nt, Artificial Sequence
  Description of Artificial Sequence: Synthetic oligonucleotide
  Antisense strand to SEQ ID NO: 1799351
cuugugcucaagaaacuug

SEQ ID NO: 1799353 - RNA, 19 nt, Artificial Sequence
  Description of Artificial Sequence: Synthetic oligonucleotide
  Sense strand starting at position 2971 of SEQ ID NO: 1563154
aaguuucuugagcacaagu

SEQ ID NO: 1799354 - RNA, 19 nt, Artificial Sequence
  Description of Artificial Sequence: Synthetic oligonucleotide
  Antisense strand to SEQ ID NO: 1799353
acuugugcucaagaaacuu

SEQ ID NO: 1799355 - RNA, 19 nt, Artificial Sequence
  Description of Artificial Sequence: Synthetic oligonucleotide
  Sense strand starting at position 2973 of SEQ ID NO: 1563154
guuucuugagcacaaguua

SEQ ID NO: 1799356 - RNA, 19 nt, Artificial Sequence
  Description of Artificial Sequence: Synthetic oligonucleotide
  Antisense strand to SEQ ID NO: 1799355
uaacuugugcucaagaaac

SEQ ID NO: 1799357 - RNA, 19 nt, Artificial Sequence
  Description of Artificial Sequence: Synthetic oligonucleotide
  Sense strand starting at position 2984 of SEQ ID NO: 1563154
acaaguuauuguuugagaa

SEQ ID NO: 1799358 - RNA, 19 nt, Artificial Sequence
  Description of Artificial Sequence: Synthetic oligonucleotide
  Antisense strand to SEQ ID NO: 1799357
uucucaaacaauaacuugu

SEQ ID NO: 1799359 - RNA, 19 nt, Artificial Sequence
  Description of Artificial Sequence: Synthetic oligonucleotide
  Sense strand starting at position 2985 of SEQ ID NO: 1563154
caaguuauuguuugagaau

SEQ ID NO: 1799360 - RNA, 19 nt, Artificial Sequence
  Description of Artificial Sequence: Synthetic oligonucleotide
  Antisense strand to SEQ ID NO: 1799359
auucucaaacaauaacuug

SEQ ID NO: 1799361 - RNA, 19 nt, Artificial Sequence
  Description of Artificial Sequence: Synthetic oligonucleotide
  Sense strand starting at position 2994 of SEQ ID NO: 1563154
guuugagaauauguuugua

SEQ ID NO: 1799362 - RNA, 19 nt, Artificial Sequence
  Description of Artificial Sequence: Synthetic oligonucleotide
  Antisense strand to SEQ ID NO: 1799361
uacaaacauauucucaaac

SEQ ID NO: 1799363 - RNA, 19 nt, Artificial Sequence
  Description of Artificial Sequence: Synthetic oligonucleotide
  Sense strand starting at position 2997 of SEQ ID NO: 1563154
ugagaauauguuuguaaug

SEQ ID NO: 1799364 - RNA, 19 nt, Artificial Sequence
  Description of Artificial Sequence: Synthetic oligonucleotide
  Antisense strand to SEQ ID NO: 1799363
cauuacaaacauauucuca

SEQ ID NO: 1799365 - RNA, 19 nt, Artificial Sequence
  Description of Artificial Sequence: Synthetic oligonucleotide
  Sense strand starting at position 3061 of SEQ ID NO: 1563154
uuugaaaccucuuuagcag

SEQ ID NO: 1799366 - RNA, 19 nt, Artificial Sequence
  Description of Artificial Sequence: Synthetic oligonucleotide
  Antisense strand to SEQ ID NO: 1799365
cugcuaaagagguuucaaa

SEQ ID NO: 1799367 - RNA, 19 nt, Artificial Sequence
  Description of Artificial Sequence: Synthetic oligonucleotide
  Sense strand starting at position 3062 of SEQ ID NO: 1563154
uugaaaccucuuuagcaga

SEQ ID NO: 1799368 - RNA, 19 nt, Artificial Sequence
  Description of Artificial Sequence: Synthetic oligonucleotide
  Antisense strand to SEQ ID NO: 1799367
ucugcuaaagagguuucaa

SEQ ID NO: 1799369 - RNA, 19 nt, Artificial Sequence
  Description of Artificial Sequence: Synthetic oligonucleotide
  Sense strand starting at position 3067 of SEQ ID NO: 1563154
accucuuuagcagauuguu

SEQ ID NO: 1799370 - RNA, 19 nt, Artificial Sequence
  Description of Artificial Sequence: Synthetic oligonucleotide
  Antisense strand to SEQ ID NO: 1799369
aacaaucugcuaaagaggu

SEQ ID NO: 1799371 - RNA, 19 nt, Artificial Sequence
  Description of Artificial Sequence: Synthetic oligonucleotide
  Sense strand starting at position 3548 of SEQ ID NO: 1563154
gccuguuguguuucaagug

SEQ ID NO: 1799372 - RNA, 19 nt, Artificial Sequence
  Description of Artificial Sequence: Synthetic oligonucleotide
  Antisense strand to SEQ ID NO: 1799371
cacuugaaacacaacaggc

SEQ ID NO: 1799373 - RNA, 19 nt, Artificial Sequence
  Description of Artificial Sequence: Synthetic oligonucleotide
  Sense strand starting at position 3571 of SEQ ID NO: 1563154
cauucuccuguuuggagau

SEQ ID NO: 1799374 - RNA, 19 nt, Artificial Sequence
  Description of Artificial Sequence: Synthetic oligonucleotide
  Antisense strand to SEQ ID NO: 1799373
aucuccaaacaggagaaug

SEQ ID NO: 1799375 - RNA, 19 nt, Artificial Sequence
  Description of Artificial Sequence: Synthetic oligonucleotide
  Sense strand starting at position 3587 of SEQ ID NO: 1563154
gauuuagcauccuuuggca

SEQ ID NO: 1799376 - RNA, 19 nt, Artificial Sequence
  Description of Artificial Sequence: Synthetic oligonucleotide
  Antisense strand to SEQ ID NO: 1799375
ugccaaaggaugcuaaauc

SEQ ID NO: 1799377 - RNA, 19 nt, Artificial Sequence
  Description of Artificial Sequence: Synthetic oligonucleotide
  Sense strand starting at position 3595 of SEQ ID NO: 1563154
auccuuuggcaauguaaug

SEQ ID NO: 1799378 - RNA, 19 nt, Artificial Sequence
  Description of Artificial Sequence: Synthetic oligonucleotide
  Antisense strand to SEQ ID NO: 1799377
cauuacauugccaaaggau

SEQ ID NO: 1799379 - RNA, 19 nt, Artificial Sequence
  Description of Artificial Sequence: Synthetic oligonucleotide
  Sense strand starting at position 3682 of SEQ ID NO: 1563154
gcuuucucugucuauaaga

SEQ ID NO: 1799380 - RNA, 19 nt, Artificial Sequence
  Description of Artificial Sequence: Synthetic oligonucleotide
  Antisense strand to SEQ ID NO: 1799379
ucuuauagacagagaaagc

SEQ ID NO: 1799381 - RNA, 19 nt, Artificial Sequence
  Description of Artificial Sequence: Synthetic oligonucleotide
  Sense strand starting at position 3684 of SEQ ID NO: 1563154
uuucucugucuauaagaag

SEQ ID NO: 1799382 - RNA, 19 nt, Artificial Sequence
  Description of Artificial Sequence: Synthetic oligonucleotide
  Antisense strand to SEQ ID NO: 1799381
cuucuuauagacagagaaa

SEQ ID NO: 1799383 - RNA, 19 nt, Artificial Sequence
  Description of Artificial Sequence: Synthetic oligonucleotide
  Sense strand starting at position 3706 of SEQ ID NO: 1563154
gacagaaguucugccuacu

SEQ ID NO: 1799384 - RNA, 19 nt, Artificial Sequence
  Description of Artificial Sequence: Synthetic oligonucleotide
  Antisense strand to SEQ ID NO: 1799383
aguaggcagaacuucuguc

SEQ ID NO: 1799385 - RNA, 19 nt, Artificial Sequence
  Description of Artificial Sequence: Synthetic oligonucleotide
  Sense strand starting at position 58 of SEQ ID NO: 1563155
gggccuugaagcuauguca

SEQ ID NO: 1799386 - RNA, 19 nt, Artificial Sequence
  Description of Artificial Sequence: Synthetic oligonucleotide
  Antisense strand to SEQ ID NO: 1799385
ugacauagcuucaaggccc

SEQ ID NO: 1799387 - RNA, 19 nt, Artificial Sequence
  Description of Artificial Sequence: Synthetic oligonucleotide
  Sense strand starting at position 61 of SEQ ID NO: 1563155
ccuugaagcuaugucacau

SEQ ID NO: 1799388 - RNA, 19 nt, Artificial Sequence
  Description of Artificial Sequence: Synthetic oligonucleotide
  Antisense strand to SEQ ID NO: 1799387
augugacauagcuucaagg

SEQ ID NO: 1799389 - RNA, 19 nt, Artificial Sequence
  Description of Artificial Sequence: Synthetic oligonucleotide
  Sense strand starting at position 102 of SEQ ID NO: 1563155
ggaaguuuggccuagguaa

SEQ ID NO: 1799390 - RNA, 19 nt, Artificial Sequence
  Description of Artificial Sequence: Synthetic oligonucleotide
  Antisense strand to SEQ ID NO: 1799389
uuaccuaggccaaacuucc

SEQ ID NO: 1799391 - RNA, 19 nt, Artificial Sequence
  Description of Artificial Sequence: Synthetic oligonucleotide
  Sense strand starting at position 104 of SEQ ID NO: 1563155
aaguuuggccuagguaaga

SEQ ID NO: 1799392 - RNA, 19 nt, Artificial Sequence
  Description of Artificial Sequence: Synthetic oligonucleotide
  Antisense strand to SEQ ID NO: 1799391
ucuuaccuaggccaaacuu

SEQ ID NO: 1799393 - RNA, 19 nt, Artificial Sequence
  Description of Artificial Sequence: Synthetic oligonucleotide
  Sense strand starting at position 158 of SEQ ID NO: 1563155
ugacacuguuuccuaggaa

SEQ ID NO: 1799394 - RNA, 19 nt, Artificial Sequence
  Description of Artificial Sequence: Synthetic oligonucleotide
  Antisense strand to SEQ ID NO: 1799393
uuccuaggaaacaguguca

SEQ ID NO: 1799395 - RNA, 19 nt, Artificial Sequence
  Description of Artificial Sequence: Synthetic oligonucleotide
  Sense strand starting at position 161 of SEQ ID NO: 1563155
cacuguuuccuaggaagga

SEQ ID NO: 1799396 - RNA, 19 nt, Artificial Sequence
  Description of Artificial Sequence: Synthetic oligonucleotide
  Antisense strand to SEQ ID NO: 1799395
uccuuccuaggaaacagug

SEQ ID NO: 1799397 - RNA, 19 nt, Artificial Sequence
  Description of Artificial Sequence: Synthetic oligonucleotide
  Sense strand starting at position 224 of SEQ ID NO: 1563155
ggacauagauuuggguuca

SEQ ID NO: 1799398 - RNA, 19 nt, Artificial Sequence
  Description of Artificial Sequence: Synthetic oligonucleotide
  Antisense strand to SEQ ID NO: 1799397
ugaacccaaaucuaugucc

SEQ ID NO: 1799399 - RNA, 19 nt, Artificial Sequence
  Description of Artificial Sequence: Synthetic oligonucleotide
  Sense strand starting at position 298 of SEQ ID NO: 1563155
ggcuuccugguguaauaug

SEQ ID NO: 1799400 - RNA, 19 nt, Artificial Sequence
  Description of Artificial Sequence: Synthetic oligonucleotide
  Antisense strand to SEQ ID NO: 1799399
cauauuacaccaggaagcc

SEQ ID NO: 1799401 - RNA, 19 nt, Artificial Sequence
  Description of Artificial Sequence: Synthetic oligonucleotide
  Sense strand starting at position 323 of SEQ ID NO: 1563155
cuccuaugugguuacucau

SEQ ID NO: 1799402 - RNA, 19 nt, Artificial Sequence
  Description of Artificial Sequence: Synthetic oligonucleotide
  Antisense strand to SEQ ID NO: 1799401
augaguaaccacauaggag

SEQ ID NO: 1799403 - RNA, 19 nt, Artificial Sequence
  Description of Artificial Sequence: Synthetic oligonucleotide
  Sense strand starting at position 326 of SEQ ID NO: 1563155
cuaugugguuacucauaaa

SEQ ID NO: 1799404 - RNA, 19 nt, Artificial Sequence
  Description of Artificial Sequence: Synthetic oligonucleotide
  Antisense strand to SEQ ID NO: 1799403
uuuaugaguaaccacauag

SEQ ID NO: 1799405 - RNA, 19 nt, Artificial Sequence
  Description of Artificial Sequence: Synthetic oligonucleotide
  Sense strand starting at position 352 of SEQ ID NO: 1563155
ucauguccuugaucucauu

SEQ ID NO: 1799406 - RNA, 19 nt, Artificial Sequence
  Description of Artificial Sequence: Synthetic oligonucleotide
  Antisense strand to SEQ ID NO: 1799405
aaugagaucaaggacauga

SEQ ID NO: 1799407 - RNA, 19 nt, Artificial Sequence
  Description of Artificial Sequence: Synthetic oligonucleotide
  Sense strand starting at position 358 of SEQ ID NO: 1563155
ccuugaucucauuggaguc

SEQ ID NO: 1799408 - RNA, 19 nt, Artificial Sequence
  Description of Artificial Sequence: Synthetic oligonucleotide
  Antisense strand to SEQ ID NO: 1799407
gacuccaaugagaucaagg

SEQ ID NO: 1799409 - RNA, 19 nt, Artificial Sequence
  Description of Artificial Sequence: Synthetic oligonucleotide
  Sense strand starting at position 605 of SEQ ID NO: 1563155
acuugaacugccuaagcaa

SEQ ID NO: 1799410 - RNA, 19 nt, Artificial Sequence
  Description of Artificial Sequence: Synthetic oligonucleotide
  Antisense strand to SEQ ID NO: 1799409
uugcuuaggcaguucaagu

SEQ ID NO: 1799411 - RNA, 19 nt, Artificial Sequence
  Description of Artificial Sequence: Synthetic oligonucleotide
  Sense strand starting at position 700 of SEQ ID NO: 1563155
caggucucugcugaauuaa

SEQ ID NO: 1799412 - RNA, 19 nt, Artificial Sequence
  Description of Artificial Sequence: Synthetic oligonucleotide
  Antisense strand to SEQ ID NO: 1799411
uuaauucagcagagaccug

SEQ ID NO: 1799413 - RNA, 19 nt, Artificial Sequence
  Description of Artificial Sequence: Synthetic oligonucleotide
  Sense strand starting at position 1053 of SEQ ID NO: 1563155
ggugaaaugugacccacau

SEQ ID NO: 1799414 - RNA, 19 nt, Artificial Sequence
  Description of Artificial Sequence: Synthetic oligonucleotide
  Antisense strand to SEQ ID NO: 1799413
augugggucacauuucacc

SEQ ID NO: 1799415 - RNA, 19 nt, Artificial Sequence
  Description of Artificial Sequence: Synthetic oligonucleotide
  Sense strand starting at position 1289 of SEQ ID NO: 1563155
gugucaucaucucuuaaau

SEQ ID NO: 1799416 - RNA, 19 nt, Artificial Sequence
  Description of Artificial Sequence: Synthetic oligonucleotide
  Antisense strand to SEQ ID NO: 1799415
auuuaagagaugaugacac

SEQ ID NO: 1799417 - RNA, 19 nt, Artificial Sequence
  Description of Artificial Sequence: Synthetic oligonucleotide
  Sense strand starting at position 1314 of SEQ ID NO: 1563155
guuaaauucgacgacucua

SEQ ID NO: 1799418 - RNA, 19 nt, Artificial Sequence
  Description of Artificial Sequence: Synthetic oligonucleotide
  Antisense strand to SEQ ID NO: 1799417
uagagucgucgaauuuaac

SEQ ID NO: 1799419 - RNA, 19 nt, Artificial Sequence
  Description of Artificial Sequence: Synthetic oligonucleotide
  Sense strand starting at position 1345 of SEQ ID NO: 1563155
cugauauucuguguuugag

SEQ ID NO: 1799420 - RNA, 19 nt, Artificial Sequence
  Description of Artificial Sequence: Synthetic oligonucleotide
  Antisense strand to SEQ ID NO: 1799419
cucaaacacagaauaucag

SEQ ID NO: 1799421 - RNA, 19 nt, Artificial Sequence
  Description of Artificial Sequence: Synthetic oligonucleotide
  Sense strand starting at position 1347 of SEQ ID NO: 1563155
gauauucuguguuugagau

SEQ ID NO: 1799422 - RNA, 19 nt, Artificial Sequence
  Description of Artificial Sequence: Synthetic oligonucleotide
  Antisense strand to SEQ ID NO: 1799421
aucucaaacacagaauauc

SEQ ID NO: 1799423 - RNA, 19 nt, Artificial Sequence
  Description of Artificial Sequence: Synthetic oligonucleotide
  Sense strand starting at position 1348 of SEQ ID NO: 1563155
auauucuguguuugagauu

SEQ ID NO: 1799424 - RNA, 19 nt, Artificial Sequence
  Description of Artificial Sequence: Synthetic oligonucleotide
  Antisense strand to SEQ ID NO: 1799423
aaucucaaacacagaauau

SEQ ID NO: 1799425 - RNA, 19 nt, Artificial Sequence
  Description of Artificial Sequence: Synthetic oligonucleotide
  Sense strand starting at position 1354 of SEQ ID NO: 1563155
uguguuugagauugagaca

SEQ ID NO: 1799426 - RNA, 19 nt, Artificial Sequence
  Description of Artificial Sequence: Synthetic oligonucleotide
  Antisense strand to SEQ ID NO: 1799425
ugucucaaucucaaacaca

SEQ ID NO: 1799427 - RNA, 19 nt, Artificial Sequence
  Description of Artificial Sequence: Synthetic oligonucleotide
  Sense strand starting at position 1462 of SEQ ID NO: 1563155
ccuugaggguccuugaguu

SEQ ID NO: 1799428 - RNA, 19 nt, Artificial Sequence
  Description of Artificial Sequence: Synthetic oligonucleotide
  Antisense strand to SEQ ID NO: 1799427
aacucaaggacccucaagg

SEQ ID NO: 1799429 - RNA, 19 nt, Artificial Sequence
  Description of Artificial Sequence: Synthetic oligonucleotide
  Sense strand starting at position 2353 of SEQ ID NO: 1563155
gacaguaucccaggcucua

SEQ ID NO: 1799430 - RNA, 19 nt, Artificial Sequence
  Description of Artificial Sequence: Synthetic oligonucleotide
  Antisense strand to SEQ ID NO: 1799429
uagagccugggauacuguc

SEQ ID NO: 1799431 - RNA, 19 nt, Artificial Sequence
  Description of Artificial Sequence: Synthetic oligonucleotide
  Sense strand starting at position 2383 of SEQ ID NO: 1563155
gauuuagcggagcguuauc

SEQ ID NO: 1799432 - RNA, 19 nt, Artificial Sequence
  Description of Artificial Sequence: Synthetic oligonucleotide
  Antisense strand to SEQ ID NO: 1799431
gauaacgcuccgcuaaauc

SEQ ID NO: 1799433 - RNA, 19 nt, Artificial Sequence
  Description of Artificial Sequence: Synthetic oligonucleotide
  Sense strand starting at position 2407 of SEQ ID NO: 1563155
ccucaagaggccuagucua

SEQ ID NO: 1799434 - RNA, 19 nt, Artificial Sequence
  Description of Artificial Sequence: Synthetic oligonucleotide
  Antisense strand to SEQ ID NO: 1799433
uagacuaggccucuugagg

SEQ ID NO: 1799435 - RNA, 19 nt, Artificial Sequence
  Description of Artificial Sequence: Synthetic oligonucleotide
  Sense strand starting at position 2578 of SEQ ID NO: 1563155
guccguucuagaggaccaa

SEQ ID NO: 1799436 - RNA, 19 nt, Artificial Sequence
  Description of Artificial Sequence: Synthetic oligonucleotide
  Antisense strand to SEQ ID NO: 1799435
uugguccucuagaacggac

SEQ ID NO: 1799437 - RNA, 19 nt, Artificial Sequence
  Description of Artificial Sequence: Synthetic oligonucleotide
  Sense strand starting at position 2593 of SEQ ID NO: 1563155
ccaagaaugugagcaggaa

SEQ ID NO: 1799438 - RNA, 19 nt, Artificial Sequence
  Description of Artificial Sequence: Synthetic oligonucleotide
  Antisense strand to SEQ ID NO: 1799437
uuccugcucacauucuugg

SEQ ID NO: 1799439 - RNA, 19 nt, Artificial Sequence
  Description of Artificial Sequence: Synthetic oligonucleotide
  Sense strand starting at position 2646 of SEQ ID NO: 1563155
aucugagaguaaucuuacu

SEQ ID NO: 1799440 - RNA, 19 nt, Artificial Sequence
  Description of Artificial Sequence: Synthetic oligonucleotide
  Antisense strand to SEQ ID NO: 1799439
aguaagauuacucucagau

SEQ ID NO: 1799441 - RNA, 19 nt, Artificial Sequence
  Description of Artificial Sequence: Synthetic oligonucleotide
  Sense strand starting at position 2675 of SEQ ID NO: 1563155
ugcgaauuccgcagcgaag

SEQ ID NO: 1799442 - RNA, 19 nt, Artificial Sequence
  Description of Artificial Sequence: Synthetic oligonucleotide
  Antisense strand to SEQ ID NO: 1799441
cuucgcugcggaauucgca

SEQ ID NO: 1799443 - RNA, 19 nt, Artificial Sequence
  Description of Artificial Sequence: Synthetic oligonucleotide
  Sense strand starting at position 2676 of SEQ ID NO: 1563155
gcgaauuccgcagcgaaga

SEQ ID NO: 1799444 - RNA, 19 nt, Artificial Sequence
  Description of Artificial Sequence: Synthetic oligonucleotide
  Antisense strand to SEQ ID NO: 1799443
ucuucgcugcggaauucgc

SEQ ID NO: 1799445 - RNA, 19 nt, Artificial Sequence
  Description of Artificial Sequence: Synthetic oligonucleotide
  Sense strand starting at position 2712 of SEQ ID NO: 1563155
cugggaaccuuuguacuga

SEQ ID NO: 1799446 - RNA, 19 nt, Artificial Sequence
  Description of Artificial Sequence: Synthetic oligonucleotide
  Antisense strand to SEQ ID NO: 1799445
ucaguacaaagguucccag

SEQ ID NO: 1799447 - RNA, 19 nt, Artificial Sequence
  Description of Artificial Sequence: Synthetic oligonucleotide
  Sense strand starting at position 2761 of SEQ ID NO: 1563155
cccagugucaaguauguau

SEQ ID NO: 1799448 - RNA, 19 nt, Artificial Sequence
  Description of Artificial Sequence: Synthetic oligonucleotide
  Antisense strand to SEQ ID NO: 1799447
auacauacuugacacuggg

SEQ ID NO: 1799449 - RNA, 19 nt, Artificial Sequence
  Description of Artificial Sequence: Synthetic oligonucleotide
  Sense strand starting at position 2764 of SEQ ID NO: 1563155
agugucaaguauguauaaa

SEQ ID NO: 1799450 - RNA, 19 nt, Artificial Sequence
  Description of Artificial Sequence: Synthetic oligonucleotide
  Antisense strand to SEQ ID NO: 1799449
uuuauacauacuugacacu

SEQ ID NO: 1799451 - RNA, 19 nt, Artificial Sequence
  Description of Artificial Sequence: Synthetic oligonucleotide
  Sense strand starting at position 2765 of SEQ ID NO: 1563155
gugucaaguauguauaaac

SEQ ID NO: 1799452 - RNA, 19 nt, Artificial Sequence
  Description of Artificial Sequence: Synthetic oligonucleotide
  Antisense strand to SEQ ID NO: 1799451
guuuauacauacuugacac

SEQ ID NO: 1799453 - RNA, 19 nt, Artificial Sequence
  Description of Artificial Sequence: Synthetic oligonucleotide
  Sense strand starting at position 3422 of SEQ ID NO: 1563155
uguacuuugcuguacaauu

SEQ ID NO: 1799454 - RNA, 19 nt, Artificial Sequence
  Description of Artificial Sequence: Synthetic oligonucleotide
  Antisense strand to SEQ ID NO: 1799453
aauuguacagcaaaguaca

SEQ ID NO: 1799455 - RNA, 19 nt, Artificial Sequence
  Description of Artificial Sequence: Synthetic oligonucleotide
  Sense strand starting at position 3626 of SEQ ID NO: 1563155
acgaauacuuagucaucca

SEQ ID NO: 1799456 - RNA, 19 nt, Artificial Sequence
  Description of Artificial Sequence: Synthetic oligonucleotide
  Antisense strand to SEQ ID NO: 1799455
uggaugacuaaguauucgu

SEQ ID NO: 1799457 - RNA, 19 nt, Artificial Sequence
  Description of Artificial Sequence: Synthetic oligonucleotide
  Sense strand starting at position 3655 of SEQ ID NO: 1563155
gccuaacaucuagaaaugu

SEQ ID NO: 1799458 - RNA, 19 nt, Artificial Sequence
  Description of Artificial Sequence: Synthetic oligonucleotide
  Antisense strand to SEQ ID NO: 1799457
acauuucuagauguuaggc

SEQ ID NO: 1799459 - RNA, 19 nt, Artificial Sequence
  Description of Artificial Sequence: Synthetic oligonucleotide
  Sense strand starting at position 3833 of SEQ ID NO: 1563155
aucccagaguccucggaaa

SEQ ID NO: 1799460 - RNA, 19 nt, Artificial Sequence
  Description of Artificial Sequence: Synthetic oligonucleotide
  Antisense strand to SEQ ID NO: 1799459
uuuccgaggacucugggau

SEQ ID NO: 1799461 - RNA, 19 nt, Artificial Sequence
  Description of Artificial Sequence: Synthetic oligonucleotide
  Sense strand starting at position 3835 of SEQ ID NO: 1563155
cccagaguccucggaaacu

SEQ ID NO: 1799462 - RNA, 19 nt, Artificial Sequence
  Description of Artificial Sequence: Synthetic oligonucleotide
  Antisense strand to SEQ ID NO: 1799461
aguuuccgaggacucuggg

SEQ ID NO: 1799463 - RNA, 19 nt, Artificial Sequence
  Description of Artificial Sequence: Synthetic oligonucleotide
  Sense strand starting at position 3841 of SEQ ID NO: 1563155
guccucggaaacugaaauu

SEQ ID NO: 1799464 - RNA, 19 nt, Artificial Sequence
  Description of Artificial Sequence: Synthetic oligonucleotide
  Antisense strand to SEQ ID NO: 1799463
aauuucaguuuccgaggac

SEQ ID NO: 1799465 - RNA, 19 nt, Artificial Sequence
  Description of Artificial Sequence: Synthetic oligonucleotide
  Sense strand starting at position 245 of SEQ ID NO: 1563156
cuuuguagugcuuauuauc

SEQ ID NO: 1799466 - RNA, 19 nt, Artificial Sequence
  Description of Artificial Sequence: Synthetic oligonucleotide
  Antisense strand to SEQ ID NO: 1799465
gauaauaagcacuacaaag

SEQ ID NO: 1799467 - RNA, 19 nt, Artificial Sequence
  Description of Artificial Sequence: Synthetic oligonucleotide
  Sense strand starting at position 456 of SEQ ID NO: 1563156
acagauguauaggaaacau

SEQ ID NO: 1799468 - RNA, 19 nt, Artificial Sequence
  Description of Artificial Sequence: Synthetic oligonucleotide
  Antisense strand to SEQ ID NO: 1799467
auguuuccuauacaucugu

SEQ ID NO: 1799469 - RNA, 19 nt, Artificial Sequence
  Description of Artificial Sequence: Synthetic oligonucleotide
  Sense strand starting at position 493 of SEQ ID NO: 1563156
gaauccaugucugccugaa

SEQ ID NO: 1799470 - RNA, 19 nt, Artificial Sequence
  Description of Artificial Sequence: Synthetic oligonucleotide
  Antisense strand to SEQ ID NO: 1799469
uucaggcagacauggauuc

SEQ ID NO: 1799471 - RNA, 19 nt, Artificial Sequence
  Description of Artificial Sequence: Synthetic oligonucleotide
  Sense strand starting at position 495 of SEQ ID NO: 1563156
auccaugucugccugaauu

SEQ ID NO: 1799472 - RNA, 19 nt, Artificial Sequence
  Description of Artificial Sequence: Synthetic oligonucleotide
  Antisense strand to SEQ ID NO: 1799471
aauucaggcagacauggau

SEQ ID NO: 1799473 - RNA, 19 nt, Artificial Sequence
  Description of Artificial Sequence: Synthetic oligonucleotide
  Sense strand starting at position 497 of SEQ ID NO: 1563156
ccaugucugccugaauuac

SEQ ID NO: 1799474 - RNA, 19 nt, Artificial Sequence
  Description of Artificial Sequence: Synthetic oligonucleotide
  Antisense strand to SEQ ID NO: 1799473
guaauucaggcagacaugg

SEQ ID NO: 1799475 - RNA, 19 nt, Artificial Sequence
  Description of Artificial Sequence: Synthetic oligonucleotide
  Sense strand starting at position 538 of SEQ ID NO: 1563156
cagcacuuccugugagcaa

SEQ ID NO: 1799476 - RNA, 19 nt, Artificial Sequence
  Description of Artificial Sequence: Synthetic oligonucleotide
  Antisense strand to SEQ ID NO: 1799475
uugcucacaggaagugcug

SEQ ID NO: 1799477 - RNA, 19 nt, Artificial Sequence
  Description of Artificial Sequence: Synthetic oligonucleotide
  Sense strand starting at position 545 of SEQ ID NO: 1563156
uccugugagcaaggcauuu

SEQ ID NO: 1799478 - RNA, 19 nt, Artificial Sequence
  Description of Artificial Sequence: Synthetic oligonucleotide
  Antisense strand to SEQ ID NO: 1799477
aaaugccuugcucacagga

SEQ ID NO: 1799479 - RNA, 19 nt, Artificial Sequence
  Description of Artificial Sequence: Synthetic oligonucleotide
  Sense strand starting at position 564 of SEQ ID NO: 1563156
ggucucacuucugcugaca

SEQ ID NO: 1799480 - RNA, 19 nt, Artificial Sequence
  Description of Artificial Sequence: Synthetic oligonucleotide
  Antisense strand to SEQ ID NO: 1799479
ugucagcagaagugagacc

SEQ ID NO: 1799481 - RNA, 19 nt, Artificial Sequence
  Description of Artificial Sequence: Synthetic oligonucleotide
  Sense strand starting at position 624 of SEQ ID NO: 1563156
gcugaccuuugagaauuua

SEQ ID NO: 1799482 - RNA, 19 nt, Artificial Sequence
  Description of Artificial Sequence: Synthetic oligonucleotide
  Antisense strand to SEQ ID NO: 1799481
uaaauucucaaaggucagc

SEQ ID NO: 1799483 - RNA, 19 nt, Artificial Sequence
  Description of Artificial Sequence: Synthetic oligonucleotide
  Sense strand starting at position 632 of SEQ ID NO: 1563156
uugagaauuuaggguguca

SEQ ID NO: 1799484 - RNA, 19 nt, Artificial Sequence
  Description of Artificial Sequence: Synthetic oligonucleotide
  Antisense strand to SEQ ID NO: 1799483
ugacacccuaaauucucaa

SEQ ID NO: 1799485 - RNA, 19 nt, Artificial Sequence
  Description of Artificial Sequence: Synthetic oligonucleotide
  Sense strand starting at position 637 of SEQ ID NO: 1563156
aauuuagggugucaagaca

SEQ ID NO: 1799486 - RNA, 19 nt, Artificial Sequence
  Description of Artificial Sequence: Synthetic oligonucleotide
  Antisense strand to SEQ ID NO: 1799485
ugucuugacacccuaaauu

SEQ ID NO: 1799487 - RNA, 19 nt, Artificial Sequence
  Description of Artificial Sequence: Synthetic oligonucleotide
  Sense strand starting at position 763 of SEQ ID NO: 1563156
gugugaaaucacugaccca

SEQ ID NO: 1799488 - RNA, 19 nt, Artificial Sequence
  Description of Artificial Sequence: Synthetic oligonucleotide
  Antisense strand to SEQ ID NO: 1799487
ugggucagugauuucacac

SEQ ID NO: 1799489 - RNA, 19 nt, Artificial Sequence
  Description of Artificial Sequence: Synthetic oligonucleotide
  Sense strand starting at position 852 of SEQ ID NO: 1563156
accuccaucugagcaagau

SEQ ID NO: 1799490 - RNA, 19 nt, Artificial Sequence
  Description of Artificial Sequence: Synthetic oligonucleotide
  Antisense strand to SEQ ID NO: 1799489
aucuugcucagauggaggu

SEQ ID NO: 1799491 - RNA, 19 nt, Artificial Sequence
  Description of Artificial Sequence: Synthetic oligonucleotide
  Sense strand starting at position 956 of SEQ ID NO: 1563156
uggagcauacuuugguaua

SEQ ID NO: 1799492 - RNA, 19 nt, Artificial Sequence
  Description of Artificial Sequence: Synthetic oligonucleotide
  Antisense strand to SEQ ID NO: 1799491
uauaccaaaguaugcucca

SEQ ID NO: 1799493 - RNA, 19 nt, Artificial Sequence
  Description of Artificial Sequence: Synthetic oligonucleotide
  Sense strand starting at position 958 of SEQ ID NO: 1563156
gagcauacuuugguauaaa

SEQ ID NO: 1799494 - RNA, 19 nt, Artificial Sequence
  Description of Artificial Sequence: Synthetic oligonucleotide
  Antisense strand to SEQ ID NO: 1799493
uuuauaccaaaguaugcuc

SEQ ID NO: 1799495 - RNA, 19 nt, Artificial Sequence
  Description of Artificial Sequence: Synthetic oligonucleotide
  Sense strand starting at position 969 of SEQ ID NO: 1563156
gguauaaauugcuugcacu

SEQ ID NO: 1799496 - RNA, 19 nt, Artificial Sequence
  Description of Artificial Sequence: Synthetic oligonucleotide
  Antisense strand to SEQ ID NO: 1799495
agugcaagcaauuuauacc

SEQ ID NO: 1799497 - RNA, 19 nt, Artificial Sequence
  Description of Artificial Sequence: Synthetic oligonucleotide
  Sense strand starting at position 970 of SEQ ID NO: 1563156
guauaaauugcuugcacug

SEQ ID NO: 1799498 - RNA, 19 nt, Artificial Sequence
  Description of Artificial Sequence: Synthetic oligonucleotide
  Antisense strand to SEQ ID NO: 1799497
cagugcaagcaauuuauac

SEQ ID NO: 1799499 - RNA, 19 nt, Artificial Sequence
  Description of Artificial Sequence: Synthetic oligonucleotide
  Sense strand starting at position 979 of SEQ ID NO: 1563156
gcuugcacugaauaaugau

SEQ ID NO: 1799500 - RNA, 19 nt, Artificial Sequence
  Description of Artificial Sequence: Synthetic oligonucleotide
  Antisense strand to SEQ ID NO: 1799499
aucauuauucagugcaagc

SEQ ID NO: 1799501 - RNA, 19 nt, Artificial Sequence
  Description of Artificial Sequence: Synthetic oligonucleotide
  Sense strand starting at position 1109 of SEQ ID NO: 1563156
uguuuccguaauugguaaa

SEQ ID NO: 1799502 - RNA, 19 nt, Artificial Sequence
  Description of Artificial Sequence: Synthetic oligonucleotide
  Antisense strand to SEQ ID NO: 1799501
uuuaccaauuacggaaaca

SEQ ID NO: 1799503 - RNA, 19 nt, Artificial Sequence
  Description of Artificial Sequence: Synthetic oligonucleotide
  Sense strand starting at position 1132 of SEQ ID NO: 1563156
agugauugagagugauaug

SEQ ID NO: 1799504 - RNA, 19 nt, Artificial Sequence
  Description of Artificial Sequence: Synthetic oligonucleotide
  Antisense strand to SEQ ID NO: 1799503
cauaucacucucaaucacu

SEQ ID NO: 1799505 - RNA, 19 nt, Artificial Sequence
  Description of Artificial Sequence: Synthetic oligonucleotide
  Sense strand starting at position 1135 of SEQ ID NO: 1563156
gauugagagugauauggac

SEQ ID NO: 1799506 - RNA, 19 nt, Artificial Sequence
  Description of Artificial Sequence: Synthetic oligonucleotide
  Antisense strand to SEQ ID NO: 1799505
guccauaucacucucaauc

SEQ ID NO: 1799507 - RNA, 19 nt, Artificial Sequence
  Description of Artificial Sequence: Synthetic oligonucleotide
  Sense strand starting at position 1176 of SEQ ID NO: 1563156
gccucuuuccuuugcaaga

SEQ ID NO: 1799508 - RNA, 19 nt, Artificial Sequence
  Description of Artificial Sequence: Synthetic oligonucleotide
  Antisense strand to SEQ ID NO: 1799507
ucuugcaaaggaaagaggc

SEQ ID NO: 1799509 - RNA, 19 nt, Artificial Sequence
  Description of Artificial Sequence: Synthetic oligonucleotide
  Sense strand starting at position 1181 of SEQ ID NO: 1563156
uuuccuuugcaagaguuac

SEQ ID NO: 1799510 - RNA, 19 nt, Artificial Sequence
  Description of Artificial Sequence: Synthetic oligonucleotide
  Antisense strand to SEQ ID NO: 1799509
guaacucuugcaaaggaaa

SEQ ID NO: 1799511 - RNA, 19 nt, Artificial Sequence
  Description of Artificial Sequence: Synthetic oligonucleotide
  Sense strand starting at position 1193 of SEQ ID NO: 1563156
gaguuaccaugcccugaau

SEQ ID NO: 1799512 - RNA, 19 nt, Artificial Sequence
  Description of Artificial Sequence: Synthetic oligonucleotide
  Antisense strand to SEQ ID NO: 1799511
auucagggcaugguaacuc

SEQ ID NO: 1799513 - RNA, 19 nt, Artificial Sequence
  Description of Artificial Sequence: Synthetic oligonucleotide
  Sense strand starting at position 1195 of SEQ ID NO: 1563156
guuaccaugcccugaauaa

SEQ ID NO: 1799514 - RNA, 19 nt, Artificial Sequence
  Description of Artificial Sequence: Synthetic oligonucleotide
  Antisense strand to SEQ ID NO: 1799513
uuauucagggcaugguaac

SEQ ID NO: 1799515 - RNA, 19 nt, Artificial Sequence
  Description of Artificial Sequence: Synthetic oligonucleotide
  Sense strand starting at position 1196 of SEQ ID NO: 1563156
uuaccaugcccugaauaag

SEQ ID NO: 1799516 - RNA, 19 nt, Artificial Sequence
  Description of Artificial Sequence: Synthetic oligonucleotide
  Antisense strand to SEQ ID NO: 1799515
cuuauucagggcaugguaa

SEQ ID NO: 1799517 - RNA, 19 nt, Artificial Sequence
  Description of Artificial Sequence: Synthetic oligonucleotide
  Sense strand starting at position 1221 of SEQ ID NO: 1563156
acaagcuauuggcuaagaa

SEQ ID NO: 1799518 - RNA, 19 nt, Artificial Sequence
  Description of Artificial Sequence: Synthetic oligonucleotide
  Antisense strand to SEQ ID NO: 1799517
uucuuagccaauagcuugu

SEQ ID NO: 1799519 - RNA, 19 nt, Artificial Sequence
  Description of Artificial Sequence: Synthetic oligonucleotide
  Sense strand starting at position 1241 of SEQ ID NO: 1563156
uugcaaagcugauuugcau

SEQ ID NO: 1799520 - RNA, 19 nt, Artificial Sequence
  Description of Artificial Sequence: Synthetic oligonucleotide
  Antisense strand to SEQ ID NO: 1799519
augcaaaucagcuuugcaa

SEQ ID NO: 1799521 - RNA, 19 nt, Artificial Sequence
  Description of Artificial Sequence: Synthetic oligonucleotide
  Sense strand starting at position 1247 of SEQ ID NO: 1563156
agcugauuugcaugugauu

SEQ ID NO: 1799522 - RNA, 19 nt, Artificial Sequence
  Description of Artificial Sequence: Synthetic oligonucleotide
  Antisense strand to SEQ ID NO: 1799521
aaucacaugcaaaucagcu

SEQ ID NO: 1799523 - RNA, 19 nt, Artificial Sequence
  Description of Artificial Sequence: Synthetic oligonucleotide
  Sense strand starting at position 1260 of SEQ ID NO: 1563156
gugauuugcacaugggugu

SEQ ID NO: 1799524 - RNA, 19 nt, Artificial Sequence
  Description of Artificial Sequence: Synthetic oligonucleotide
  Antisense strand to SEQ ID NO: 1799523
acacccaugugcaaaucac

SEQ ID NO: 1799525 - RNA, 19 nt, Artificial Sequence
  Description of Artificial Sequence: Synthetic oligonucleotide
  Sense strand starting at position 1314 of SEQ ID NO: 1563156
agaagccagcccuguuaaa

SEQ ID NO: 1799526 - RNA, 19 nt, Artificial Sequence
  Description of Artificial Sequence: Synthetic oligonucleotide
  Antisense strand to SEQ ID NO: 1799525
uuuaacagggcuggcuucu

SEQ ID NO: 1799527 - RNA, 19 nt, Artificial Sequence
  Description of Artificial Sequence: Synthetic oligonucleotide
  Sense strand starting at position 1456 of SEQ ID NO: 1563156
ccaggugaucuccaccaau

SEQ ID NO: 1799528 - RNA, 19 nt, Artificial Sequence
  Description of Artificial Sequence: Synthetic oligonucleotide
  Antisense strand to SEQ ID NO: 1799527
auugguggagaucaccugg

SEQ ID NO: 1799529 - RNA, 19 nt, Artificial Sequence
  Description of Artificial Sequence: Synthetic oligonucleotide
  Sense strand starting at position 1459 of SEQ ID NO: 1563156
ggugaucuccaccaaucca

SEQ ID NO: 1799530 - RNA, 19 nt, Artificial Sequence
  Description of Artificial Sequence: Synthetic oligonucleotide
  Antisense strand to SEQ ID NO: 1799529
uggauugguggagaucacc

SEQ ID NO: 1799531 - RNA, 19 nt, Artificial Sequence
  Description of Artificial Sequence: Synthetic oligonucleotide
  Sense strand starting at position 1828 of SEQ ID NO: 1563156
uuggguucuccgcaggaaa

SEQ ID NO: 1799532 - RNA, 19 nt, Artificial Sequence
  Description of Artificial Sequence: Synthetic oligonucleotide
  Antisense strand to SEQ ID NO: 1799531
uuuccugcggagaacccaa

SEQ ID NO: 1799533 - RNA, 19 nt, Artificial Sequence
  Description of Artificial Sequence: Synthetic oligonucleotide
  Sense strand starting at position 2911 of SEQ ID NO: 1563156
ucaauuuggugggagggaa

SEQ ID NO: 1799534 - RNA, 19 nt, Artificial Sequence
  Description of Artificial Sequence: Synthetic oligonucleotide
  Antisense strand to SEQ ID NO: 1799533
uucccucccaccaaauuga

SEQ ID NO: 1799535 - RNA, 19 nt, Artificial Sequence
  Description of Artificial Sequence: Synthetic oligonucleotide
  Sense strand starting at position 3048 of SEQ ID NO: 1563156
agagucaggcucugugcaa

SEQ ID NO: 1799536 - RNA, 19 nt, Artificial Sequence
  Description of Artificial Sequence: Synthetic oligonucleotide
  Antisense strand to SEQ ID NO: 1799535
uugcacagagccugacucu

SEQ ID NO: 1799537 - RNA, 19 nt, Artificial Sequence
  Description of Artificial Sequence: Synthetic oligonucleotide
  Sense strand starting at position 3049 of SEQ ID NO: 1563156
gagucaggcucugugcaaa

SEQ ID NO: 1799538 - RNA, 19 nt, Artificial Sequence
  Description of Artificial Sequence: Synthetic oligonucleotide
  Antisense strand to SEQ ID NO: 1799537
uuugcacagagccugacuc

SEQ ID NO: 1799539 - RNA, 19 nt, Artificial Sequence
  Description of Artificial Sequence: Synthetic oligonucleotide
  Sense strand starting at position 3140 of SEQ ID NO: 1563156
gugagcaauuaauucucuu

SEQ ID NO: 1799540 - RNA, 19 nt, Artificial Sequence
  Description of Artificial Sequence: Synthetic oligonucleotide
  Antisense strand to SEQ ID NO: 1799539
aagagaauuaauugcucac

SEQ ID NO: 1799541 - RNA, 19 nt, Artificial Sequence
  Description of Artificial Sequence: Synthetic oligonucleotide
  Sense strand starting at position 3152 of SEQ ID NO: 1563156
uucucuugcccagaaggaa

SEQ ID NO: 1799542 - RNA, 19 nt, Artificial Sequence
  Description of Artificial Sequence: Synthetic oligonucleotide
  Antisense strand to SEQ ID NO: 1799541
uuccuucugggcaagagaa

SEQ ID NO: 1799543 - RNA, 19 nt, Artificial Sequence
  Description of Artificial Sequence: Synthetic oligonucleotide
  Sense strand starting at position 3696 of SEQ ID NO: 1563156
ggcacuuguuuggcauuua

SEQ ID NO: 1799544 - RNA, 19 nt, Artificial Sequence
  Description of Artificial Sequence: Synthetic oligonucleotide
  Antisense strand to SEQ ID NO: 1799543
uaaaugccaaacaagugcc

SEQ ID NO: 1799545 - RNA, 19 nt, Artificial Sequence
  Description of Artificial Sequence: Synthetic oligonucleotide
  Sense strand starting at position 138 of SEQ ID NO: 1563157
gauguugaaugggcacaau

SEQ ID NO: 1799546 - RNA, 19 nt, Artificial Sequence
  Description of Artificial Sequence: Synthetic oligonucleotide
  Antisense strand to SEQ ID NO: 1799545
auugugcccauucaacauc

SEQ ID NO: 1799547 - RNA, 19 nt, Artificial Sequence
  Description of Artificial Sequence: Synthetic oligonucleotide
  Sense strand starting at position 204 of SEQ ID NO: 1563157
gugguuacccuuuaaacua

SEQ ID NO: 1799548 - RNA, 19 nt, Artificial Sequence
  Description of Artificial Sequence: Synthetic oligonucleotide
  Antisense strand to SEQ ID NO: 1799547
uaguuuaaaggguaaccac

SEQ ID NO: 1799549 - RNA, 19 nt, Artificial Sequence
  Description of Artificial Sequence: Synthetic oligonucleotide
  Sense strand starting at position 249 of SEQ ID NO: 1563157
cggugucuccaagacagau

SEQ ID NO: 1799550 - RNA, 19 nt, Artificial Sequence
  Description of Artificial Sequence: Synthetic oligonucleotide
  Antisense strand to SEQ ID NO: 1799549
aucugucuuggagacaccg

SEQ ID NO: 1799551 - RNA, 19 nt, Artificial Sequence
  Description of Artificial Sequence: Synthetic oligonucleotide
  Sense strand starting at position 268 of SEQ ID NO: 1563157
gaacgagcauuaguaacuu

SEQ ID NO: 1799552 - RNA, 19 nt, Artificial Sequence
  Description of Artificial Sequence: Synthetic oligonucleotide
  Antisense strand to SEQ ID NO: 1799551
aaguuacuaaugcucguuc

SEQ ID NO: 1799553 - RNA, 19 nt, Artificial Sequence
  Description of Artificial Sequence: Synthetic oligonucleotide
  Sense strand starting at position 370 of SEQ ID NO: 1563157
cugggaagguaucuuaaca

SEQ ID NO: 1799554 - RNA, 19 nt, Artificial Sequence
  Description of Artificial Sequence: Synthetic oligonucleotide
  Antisense strand to SEQ ID NO: 1799553
uguuaagauaccuucccag

SEQ ID NO: 1799555 - RNA, 19 nt, Artificial Sequence
  Description of Artificial Sequence: Synthetic oligonucleotide
  Sense strand starting at position 613 of SEQ ID NO: 1563157
acacgaauuccagacaguu

SEQ ID NO: 1799556 - RNA, 19 nt, Artificial Sequence
  Description of Artificial Sequence: Synthetic oligonucleotide
  Antisense strand to SEQ ID NO: 1799555
aacugucuggaauucgugu

SEQ ID NO: 1799557 - RNA, 19 nt, Artificial Sequence
  Description of Artificial Sequence: Synthetic oligonucleotide
  Sense strand starting at position 634 of SEQ ID NO: 1563157
cugucuuugccugauuaua

SEQ ID NO: 1799558 - RNA, 19 nt, Artificial Sequence
  Description of Artificial Sequence: Synthetic oligonucleotide
  Antisense strand to SEQ ID NO: 1799557
uauaaucaggcaaagacag

SEQ ID NO: 1799559 - RNA, 19 nt, Artificial Sequence
  Description of Artificial Sequence: Synthetic oligonucleotide
  Sense strand starting at position 636 of SEQ ID NO: 1563157
gucuuugccugauuauaaa

SEQ ID NO: 1799560 - RNA, 19 nt, Artificial Sequence
  Description of Artificial Sequence: Synthetic oligonucleotide
  Antisense strand to SEQ ID NO: 1799559
uuuauaaucaggcaaagac

SEQ ID NO: 1799561 - RNA, 19 nt, Artificial Sequence
  Description of Artificial Sequence: Synthetic oligonucleotide
  Sense strand starting at position 905 of SEQ ID NO: 1563157
aguagucauuccucagaaa

SEQ ID NO: 1799562 - RNA, 19 nt, Artificial Sequence
  Description of Artificial Sequence: Synthetic oligonucleotide
  Antisense strand to SEQ ID NO: 1799561
uuucugaggaaugacuacu

SEQ ID NO: 1799563 - RNA, 19 nt, Artificial Sequence
  Description of Artificial Sequence: Synthetic oligonucleotide
  Sense strand starting at position 906 of SEQ ID NO: 1563157
guagucauuccucagaaac

SEQ ID NO: 1799564 - RNA, 19 nt, Artificial Sequence
  Description of Artificial Sequence: Synthetic oligonucleotide
  Antisense strand to SEQ ID NO: 1799563
guuucugaggaaugacuac

SEQ ID NO: 1799565 - RNA, 19 nt, Artificial Sequence
  Description of Artificial Sequence: Synthetic oligonucleotide
  Sense strand starting at position 989 of SEQ ID NO: 1563157
uggauuuggucggucguua

SEQ ID NO: 1799566 - RNA, 19 nt, Artificial Sequence
  Description of Artificial Sequence: Synthetic oligonucleotide
  Antisense strand to SEQ ID NO: 1799565
uaacgaccgaccaaaucca

SEQ ID NO: 1799567 - RNA, 19 nt, Artificial Sequence
  Description of Artificial Sequence: Synthetic oligonucleotide
  Sense strand starting at position 1038 of SEQ ID NO: 1563157
aggcaaaucccaugagcuu

SEQ ID NO: 1799568 - RNA, 19 nt, Artificial Sequence
  Description of Artificial Sequence: Synthetic oligonucleotide
  Antisense strand to SEQ ID NO: 1799567
aagcucaugggauuugccu

SEQ ID NO: 1799569 - RNA, 19 nt, Artificial Sequence
  Description of Artificial Sequence: Synthetic oligonucleotide
  Sense strand starting at position 1039 of SEQ ID NO: 1563157
ggcaaaucccaugagcuuu

SEQ ID NO: 1799570 - RNA, 19 nt, Artificial Sequence
  Description of Artificial Sequence: Synthetic oligonucleotide
  Antisense strand to SEQ ID NO: 1799569
aaagcucaugggauuugcc

SEQ ID NO: 1799571 - RNA, 19 nt, Artificial Sequence
  Description of Artificial Sequence: Synthetic oligonucleotide
  Sense strand starting at position 1121 of SEQ ID NO: 1563157
cccaguaaaucuuuguauc

SEQ ID NO: 1799572 - RNA, 19 nt, Artificial Sequence
  Description of Artificial Sequence: Synthetic oligonucleotide
  Antisense strand to SEQ ID NO: 1799571
gauacaaagauuuacuggg

SEQ ID NO: 1799573 - RNA, 19 nt, Artificial Sequence
  Description of Artificial Sequence: Synthetic oligonucleotide
  Sense strand starting at position 1122 of SEQ ID NO: 1563157
ccaguaaaucuuuguauca

SEQ ID NO: 1799574 - RNA, 19 nt, Artificial Sequence
  Description of Artificial Sequence: Synthetic oligonucleotide
  Antisense strand to SEQ ID NO: 1799573
ugauacaaagauuuacugg

SEQ ID NO: 1799575 - RNA, 19 nt, Artificial Sequence
  Description of Artificial Sequence: Synthetic oligonucleotide
  Sense strand starting at position 1206 of SEQ ID NO: 1563157
uuguauuagcgugcaacau

SEQ ID NO: 1799576 - RNA, 19 nt, Artificial Sequence
  Description of Artificial Sequence: Synthetic oligonucleotide
  Antisense strand to SEQ ID NO: 1799575
auguugcacgcuaauacaa

SEQ ID NO: 1799577 - RNA, 19 nt, Artificial Sequence
  Description of Artificial Sequence: Synthetic oligonucleotide
  Sense strand starting at position 1210 of SEQ ID NO: 1563157
auuagcgugcaacauuaau

SEQ ID NO: 1799578 - RNA, 19 nt, Artificial Sequence
  Description of Artificial Sequence: Synthetic oligonucleotide
  Antisense strand to SEQ ID NO: 1799577
auuaauguugcacgcuaau

SEQ ID NO: 1799579 - RNA, 19 nt, Artificial Sequence
  Description of Artificial Sequence: Synthetic oligonucleotide
  Sense strand starting at position 2292 of SEQ ID NO: 1563157
cuuuaaugccagcgagaag

SEQ ID NO: 1799580 - RNA, 19 nt, Artificial Sequence
  Description of Artificial Sequence: Synthetic oligonucleotide
  Antisense strand to SEQ ID NO: 1799579
cuucucgcuggcauuaaag

SEQ ID NO: 1799581 - RNA, 19 nt, Artificial Sequence
  Description of Artificial Sequence: Synthetic oligonucleotide
  Sense strand starting at position 2313 of SEQ ID NO: 1563157
gaacuuggguuuccaagaa

SEQ ID NO: 1799582 - RNA, 19 nt, Artificial Sequence
  Description of Artificial Sequence: Synthetic oligonucleotide
  Antisense strand to SEQ ID NO: 1799581
uucuuggaaacccaaguuc

SEQ ID NO: 1799583 - RNA, 19 nt, Artificial Sequence
  Description of Artificial Sequence: Synthetic oligonucleotide
  Sense strand starting at position 2406 of SEQ ID NO: 1563157
ggcagaguuucccuuucua

SEQ ID NO: 1799584 - RNA, 19 nt, Artificial Sequence
  Description of Artificial Sequence: Synthetic oligonucleotide
  Antisense strand to SEQ ID NO: 1799583
uagaaagggaaacucugcc

SEQ ID NO: 1799585 - RNA, 19 nt, Artificial Sequence
  Description of Artificial Sequence: Synthetic oligonucleotide
  Sense strand starting at position 2427 of SEQ ID NO: 1563157
aagccuucuucugugagag

SEQ ID NO: 1799586 - RNA, 19 nt, Artificial Sequence
  Description of Artificial Sequence: Synthetic oligonucleotide
  Antisense strand to SEQ ID NO: 1799585
cucucacagaagaaggcuu

SEQ ID NO: 1799587 - RNA, 19 nt, Artificial Sequence
  Description of Artificial Sequence: Synthetic oligonucleotide
  Sense strand starting at position 2493 of SEQ ID NO: 1563157
agucaugcuacccaggaga

SEQ ID NO: 1799588 - RNA, 19 nt, Artificial Sequence
  Description of Artificial Sequence: Synthetic oligonucleotide
  Antisense strand to SEQ ID NO: 1799587
ucuccuggguagcaugacu

SEQ ID NO: 1799589 - RNA, 19 nt, Artificial Sequence
  Description of Artificial Sequence: Synthetic oligonucleotide
  Sense strand starting at position 2534 of SEQ ID NO: 1563157
ccaggaugcuggucacuua

SEQ ID NO: 1799590 - RNA, 19 nt, Artificial Sequence
  Description of Artificial Sequence: Synthetic oligonucleotide
  Antisense strand to SEQ ID NO: 1799589
uaagugaccagcauccugg

SEQ ID NO: 1799591 - RNA, 19 nt, Artificial Sequence
  Description of Artificial Sequence: Synthetic oligonucleotide
  Sense strand starting at position 2616 of SEQ ID NO: 1563157
acuggccucugcucugaaa

SEQ ID NO: 1799592 - RNA, 19 nt, Artificial Sequence
  Description of Artificial Sequence: Synthetic oligonucleotide
  Antisense strand to SEQ ID NO: 1799591
uuucagagcagaggccagu

SEQ ID NO: 1799593 - RNA, 19 nt, Artificial Sequence
  Description of Artificial Sequence: Synthetic oligonucleotide
  Sense strand starting at position 2668 of SEQ ID NO: 1563157
uggagaagaucagcgaguu

SEQ ID NO: 1799594 - RNA, 19 nt, Artificial Sequence
  Description of Artificial Sequence: Synthetic oligonucleotide
  Antisense strand to SEQ ID NO: 1799593
aacucgcugaucuucucca

SEQ ID NO: 1799595 - RNA, 19 nt, Artificial Sequence
  Description of Artificial Sequence: Synthetic oligonucleotide
  Sense strand starting at position 2697 of SEQ ID NO: 1563157
ccuuguccuucuguaauuu

SEQ ID NO: 1799596 - RNA, 19 nt, Artificial Sequence
  Description of Artificial Sequence: Synthetic oligonucleotide
  Antisense strand to SEQ ID NO: 1799595
aaauuacagaaggacaagg

SEQ ID NO: 1799597 - RNA, 19 nt, Artificial Sequence
  Description of Artificial Sequence: Synthetic oligonucleotide
  Sense strand starting at position 3035 of SEQ ID NO: 1563157
uauaauuagcagugggaau

SEQ ID NO: 1799598 - RNA, 19 nt, Artificial Sequence
  Description of Artificial Sequence: Synthetic oligonucleotide
  Antisense strand to SEQ ID NO: 1799597
auucccacugcuaauuaua

SEQ ID NO: 1799599 - RNA, 19 nt, Artificial Sequence
  Description of Artificial Sequence: Synthetic oligonucleotide
  Sense strand starting at position 3066 of SEQ ID NO: 1563157
gugcaaguggccugaggaa

SEQ ID NO: 1799600 - RNA, 19 nt, Artificial Sequence
  Description of Artificial Sequence: Synthetic oligonucleotide
  Antisense strand to SEQ ID NO: 1799599
uuccucaggccacuugcac

SEQ ID NO: 1799601 - RNA, 19 nt, Artificial Sequence
  Description of Artificial Sequence: Synthetic oligonucleotide
  Sense strand starting at position 3093 of SEQ ID NO: 1563157
uagauagucccaugacagu

SEQ ID NO: 1799602 - RNA, 19 nt, Artificial Sequence
  Description of Artificial Sequence: Synthetic oligonucleotide
  Antisense strand to SEQ ID NO: 1799601
acugucaugggacuaucua

SEQ ID NO: 1799603 - RNA, 19 nt, Artificial Sequence
  Description of Artificial Sequence: Synthetic oligonucleotide
  Sense strand starting at position 3132 of SEQ ID NO: 1563157
augguuauaucugcuaaag

SEQ ID NO: 1799604 - RNA, 19 nt, Artificial Sequence
  Description of Artificial Sequence: Synthetic oligonucleotide
  Antisense strand to SEQ ID NO: 1799603
cuuuagcagauauaaccau

SEQ ID NO: 1799605 - RNA, 19 nt, Artificial Sequence
  Description of Artificial Sequence: Synthetic oligonucleotide
  Sense strand starting at position 3286 of SEQ ID NO: 1563157
ccaacugaugcaugacaaa

SEQ ID NO: 1799606 - RNA, 19 nt, Artificial Sequence
  Description of Artificial Sequence: Synthetic oligonucleotide
  Antisense strand to SEQ ID NO: 1799605
uuugucaugcaucaguugg

SEQ ID NO: 1799607 - RNA, 19 nt, Artificial Sequence
  Description of Artificial Sequence: Synthetic oligonucleotide
  Sense strand starting at position 3473 of SEQ ID NO: 1563157
ucaaauguuuaagugcaau

SEQ ID NO: 1799608 - RNA, 19 nt, Artificial Sequence
  Description of Artificial Sequence: Synthetic oligonucleotide
  Antisense strand to SEQ ID NO: 1799607
auugcacuuaaacauuuga

SEQ ID NO: 1799609 - RNA, 19 nt, Artificial Sequence
  Description of Artificial Sequence: Synthetic oligonucleotide
  Sense strand starting at position 3479 of SEQ ID NO: 1563157
guuuaagugcaauaggcaa

SEQ ID NO: 1799610 - RNA, 19 nt, Artificial Sequence
  Description of Artificial Sequence: Synthetic oligonucleotide
  Antisense strand to SEQ ID NO: 1799609
uugccuauugcacuuaaac

SEQ ID NO: 1799611 - RNA, 19 nt, Artificial Sequence
  Description of Artificial Sequence: Synthetic oligonucleotide
  Sense strand starting at position 3520 of SEQ ID NO: 1563157
ucauaacagugguuaccaa

SEQ ID NO: 1799612 - RNA, 19 nt, Artificial Sequence
  Description of Artificial Sequence: Synthetic oligonucleotide
  Antisense strand to SEQ ID NO: 1799611
uugguaaccacuguuauga

SEQ ID NO: 1799613 - RNA, 19 nt, Artificial Sequence
  Description of Artificial Sequence: Synthetic oligonucleotide
  Sense strand starting at position 3549 of SEQ ID NO: 1563157
ugguauugacuaggaaggu

SEQ ID NO: 1799614 - RNA, 19 nt, Artificial Sequence
  Description of Artificial Sequence: Synthetic oligonucleotide
  Antisense strand to SEQ ID NO: 1799613
accuuccuagucaauacca

SEQ ID NO: 1799615 - RNA, 19 nt, Artificial Sequence
  Description of Artificial Sequence: Synthetic oligonucleotide
  Sense strand starting at position 3587 of SEQ ID NO: 1563157
gggugcuggaaaugaucua

SEQ ID NO: 1799616 - RNA, 19 nt, Artificial Sequence
  Description of Artificial Sequence: Synthetic oligonucleotide
  Antisense strand to SEQ ID NO: 1799615
uagaucauuuccagcaccc

SEQ ID NO: 1799617 - RNA, 19 nt, Artificial Sequence
  Description of Artificial Sequence: Synthetic oligonucleotide
  Sense strand starting at position 3588 of SEQ ID NO: 1563157
ggugcuggaaaugaucuau

SEQ ID NO: 1799618 - RNA, 19 nt, Artificial Sequence
  Description of Artificial Sequence: Synthetic oligonucleotide
  Antisense strand to SEQ ID NO: 1799617
auagaucauuuccagcacc

SEQ ID NO: 1799619 - RNA, 19 nt, Artificial Sequence
  Description of Artificial Sequence: Synthetic oligonucleotide
  Sense strand starting at position 3602 of SEQ ID NO: 1563157
ucuauaucuugaucuguau

SEQ ID NO: 1799620 - RNA, 19 nt, Artificial Sequence
  Description of Artificial Sequence: Synthetic oligonucleotide
  Antisense strand to SEQ ID NO: 1799619
auacagaucaagauauaga

SEQ ID NO: 1799621 - RNA, 19 nt, Artificial Sequence
  Description of Artificial Sequence: Synthetic oligonucleotide
  Sense strand starting at position 3606 of SEQ ID NO: 1563157
uaucuugaucuguauggca

SEQ ID NO: 1799622 - RNA, 19 nt, Artificial Sequence
  Description of Artificial Sequence: Synthetic oligonucleotide
  Antisense strand to SEQ ID NO: 1799621
ugccauacagaucaagaua

SEQ ID NO: 1799623 - RNA, 19 nt, Artificial Sequence
  Description of Artificial Sequence: Synthetic oligonucleotide
  Sense strand starting at position 3874 of SEQ ID NO: 1563157
uucugcuuuguaggagaaa

SEQ ID NO: 1799624 - RNA, 19 nt, Artificial Sequence
  Description of Artificial Sequence: Synthetic oligonucleotide
  Antisense strand to SEQ ID NO: 1799623
uuucuccuacaaagcagaa

SEQ ID NO: 1799625 - RNA, 19 nt, Artificial Sequence
  Description of Artificial Sequence: Synthetic oligonucleotide
  Sense strand starting at position 185 of SEQ ID NO: 1563158
acagcuuagcaauagauau

SEQ ID NO: 1799626 - RNA, 19 nt, Artificial Sequence
  Description of Artificial Sequence: Synthetic oligonucleotide
  Antisense strand to SEQ ID NO: 1799625
auaucuauugcuaagcugu

SEQ ID NO: 1799627 - RNA, 19 nt, Artificial Sequence
  Description of Artificial Sequence: Synthetic oligonucleotide
  Sense strand starting at position 308 of SEQ ID NO: 1563158
ccacgacugcuccaaagua

SEQ ID NO: 1799628 - RNA, 19 nt, Artificial Sequence
  Description of Artificial Sequence: Synthetic oligonucleotide
  Antisense strand to SEQ ID NO: 1799627
uacuuuggagcagucgugg

SEQ ID NO: 1799629 - RNA, 19 nt, Artificial Sequence
  Description of Artificial Sequence: Synthetic oligonucleotide
  Sense strand starting at position 542 of SEQ ID NO: 1563158
cggauuuccacacgacgua

SEQ ID NO: 1799630 - RNA, 19 nt, Artificial Sequence
  Description of Artificial Sequence: Synthetic oligonucleotide
  Antisense strand to SEQ ID NO: 1799629
uacgucguguggaaauccg

SEQ ID NO: 1799631 - RNA, 19 nt, Artificial Sequence
  Description of Artificial Sequence: Synthetic oligonucleotide
  Sense strand starting at position 754 of SEQ ID NO: 1563158
ggaaccucauagucaaagu

SEQ ID NO: 1799632 - RNA, 19 nt, Artificial Sequence
  Description of Artificial Sequence: Synthetic oligonucleotide
  Antisense strand to SEQ ID NO: 1799631
acuuugacuaugagguucc

SEQ ID NO: 1799633 - RNA, 19 nt, Artificial Sequence
  Description of Artificial Sequence: Synthetic oligonucleotide
  Sense strand starting at position 1525 of SEQ ID NO: 1563158
cuggauggccucuaagacu

SEQ ID NO: 1799634 - RNA, 19 nt, Artificial Sequence
  Description of Artificial Sequence: Synthetic oligonucleotide
  Antisense strand to SEQ ID NO: 1799633
agucuuagaggccauccag

SEQ ID NO: 1799635 - RNA, 19 nt, Artificial Sequence
  Description of Artificial Sequence: Synthetic oligonucleotide
  Sense strand starting at position 2073 of SEQ ID NO: 1563158
cguguagagcuggaggaau

SEQ ID NO: 1799636 - RNA, 19 nt, Artificial Sequence
  Description of Artificial Sequence: Synthetic oligonucleotide
  Antisense strand to SEQ ID NO: 1799635
auuccuccagcucuacacg

SEQ ID NO: 1799637 - RNA, 19 nt, Artificial Sequence
  Description of Artificial Sequence: Synthetic oligonucleotide
  Sense strand starting at position 2291 of SEQ ID NO: 1563158
ccacucacguuucuggaaa

SEQ ID NO: 1799638 - RNA, 19 nt, Artificial Sequence
  Description of Artificial Sequence: Synthetic oligonucleotide
  Antisense strand to SEQ ID NO: 1799637
uuuccagaaacgugagugg

SEQ ID NO: 1799639 - RNA, 19 nt, Artificial Sequence
  Description of Artificial Sequence: Synthetic oligonucleotide
  Sense strand starting at position 2363 of SEQ ID NO: 1563158
ggacgauugcucugaaguu

SEQ ID NO: 1799640 - RNA, 19 nt, Artificial Sequence
  Description of Artificial Sequence: Synthetic oligonucleotide
  Antisense strand to SEQ ID NO: 1799639
aacuucagagcaaucgucc

SEQ ID NO: 1799641 - RNA, 19 nt, Artificial Sequence
  Description of Artificial Sequence: Synthetic oligonucleotide
  Sense strand starting at position 2382 of SEQ ID NO: 1563158
ggaguuaaaucuccugccu

SEQ ID NO: 1799642 - RNA, 19 nt, Artificial Sequence
  Description of Artificial Sequence: Synthetic oligonucleotide
  Antisense strand to SEQ ID NO: 1799641
aggcaggagauuuaacucc

SEQ ID NO: 1799643 - RNA, 19 nt, Artificial Sequence
  Description of Artificial Sequence: Synthetic oligonucleotide
  Sense strand starting at position 2486 of SEQ ID NO: 1563158
aguggcugccgaugaauga

SEQ ID NO: 1799644 - RNA, 19 nt, Artificial Sequence
  Description of Artificial Sequence: Synthetic oligonucleotide
  Antisense strand to SEQ ID NO: 1799643
ucauucaucggcagccacu

SEQ ID NO: 1799645 - RNA, 19 nt, Artificial Sequence
  Description of Artificial Sequence: Synthetic oligonucleotide
  Sense strand starting at position 2495 of SEQ ID NO: 1563158
cgaugaaugagcuggagau

SEQ ID NO: 1799646 - RNA, 19 nt, Artificial Sequence
  Description of Artificial Sequence: Synthetic oligonucleotide
  Antisense strand to SEQ ID NO: 1799645
aucuccagcucauucaucg

SEQ ID NO: 1799647 - RNA, 19 nt, Artificial Sequence
  Description of Artificial Sequence: Synthetic oligonucleotide
  Sense strand starting at position 2658 of SEQ ID NO: 1563158
gagauuggcgcucacaaag

SEQ ID NO: 1799648 - RNA, 19 nt, Artificial Sequence
  Description of Artificial Sequence: Synthetic oligonucleotide
  Antisense strand to SEQ ID NO: 1799647
cuuugugagcgccaaucuc

SEQ ID NO: 1799649 - RNA, 19 nt, Artificial Sequence
  Description of Artificial Sequence: Synthetic oligonucleotide
  Sense strand starting at position 2778 of SEQ ID NO: 1563158
aggagaugagucugaaagc

SEQ ID NO: 1799650 - RNA, 19 nt, Artificial Sequence
  Description of Artificial Sequence: Synthetic oligonucleotide
  Antisense strand to SEQ ID NO: 1799649
gcuuucagacucaucuccu

SEQ ID NO: 1799651 - RNA, 19 nt, Artificial Sequence
  Description of Artificial Sequence: Synthetic oligonucleotide
  Sense strand starting at position 2871 of SEQ ID NO: 1563158
acaguuaagcuuugcaaug

SEQ ID NO: 1799652 - RNA, 19 nt, Artificial Sequence
  Description of Artificial Sequence: Synthetic oligonucleotide
  Antisense strand to SEQ ID NO: 1799651
cauugcaaagcuuaacugu

SEQ ID NO: 1799653 - RNA, 19 nt, Artificial Sequence
  Description of Artificial Sequence: Synthetic oligonucleotide
  Sense strand starting at position 2926 of SEQ ID NO: 1563158
guuggaaaugucuacuuug

SEQ ID NO: 1799654 - RNA, 19 nt, Artificial Sequence
  Description of Artificial Sequence: Synthetic oligonucleotide
  Antisense strand to SEQ ID NO: 1799653
caaaguagacauuuccaac

SEQ ID NO: 1799655 - RNA, 19 nt, Artificial Sequence
  Description of Artificial Sequence: Synthetic oligonucleotide
  Sense strand starting at position 2929 of SEQ ID NO: 1563158
ggaaaugucuacuuugugu

SEQ ID NO: 1799656 - RNA, 19 nt, Artificial Sequence
  Description of Artificial Sequence: Synthetic oligonucleotide
  Antisense strand to SEQ ID NO: 1799655
acacaaaguagacauuucc

SEQ ID NO: 1799657 - RNA, 19 nt, Artificial Sequence
  Description of Artificial Sequence: Synthetic oligonucleotide
  Sense strand starting at position 3056 of SEQ ID NO: 1563158
agauguuggacacgaacau

SEQ ID NO: 1799658 - RNA, 19 nt, Artificial Sequence
  Description of Artificial Sequence: Synthetic oligonucleotide
  Antisense strand to SEQ ID NO: 1799657
auguucguguccaacaucu

SEQ ID NO: 1799659 - RNA, 19 nt, Artificial Sequence
  Description of Artificial Sequence: Synthetic oligonucleotide
  Sense strand starting at position 3082 of SEQ ID NO: 1563158
gcauaucuaccagaauugu

SEQ ID NO: 1799660 - RNA, 19 nt, Artificial Sequence
  Description of Artificial Sequence: Synthetic oligonucleotide
  Antisense strand to SEQ ID NO: 1799659
acaauucugguagauaugc

SEQ ID NO: 1799661 - RNA, 19 nt, Artificial Sequence
  Description of Artificial Sequence: Synthetic oligonucleotide
  Sense strand starting at position 3088 of SEQ ID NO: 1563158
cuaccagaauuguccaagu

SEQ ID NO: 1799662 - RNA, 19 nt, Artificial Sequence
  Description of Artificial Sequence: Synthetic oligonucleotide
  Antisense strand to SEQ ID NO: 1799661
acuuggacaauucugguag

SEQ ID NO: 1799663 - RNA, 19 nt, Artificial Sequence
  Description of Artificial Sequence: Synthetic oligonucleotide
  Sense strand starting at position 3090 of SEQ ID NO: 1563158
accagaauuguccaaguuu

SEQ ID NO: 1799664 - RNA, 19 nt, Artificial Sequence
  Description of Artificial Sequence: Synthetic oligonucleotide
  Antisense strand to SEQ ID NO: 1799663
aaacuuggacaauucuggu

SEQ ID NO: 1799665 - RNA, 19 nt, Artificial Sequence
  Description of Artificial Sequence: Synthetic oligonucleotide
  Sense strand starting at position 3099 of SEQ ID NO: 1563158
guccaaguuugauucugga

SEQ ID NO: 1799666 - RNA, 19 nt, Artificial Sequence
  Description of Artificial Sequence: Synthetic oligonucleotide
  Antisense strand to SEQ ID NO: 1799665
uccagaaucaaacuuggac

SEQ ID NO: 1799667 - RNA, 19 nt, Artificial Sequence
  Description of Artificial Sequence: Synthetic oligonucleotide
  Sense strand starting at position 3113 of SEQ ID NO: 1563158
cuggaagacuuccuuuauu

SEQ ID NO: 1799668 - RNA, 19 nt, Artificial Sequence
  Description of Artificial Sequence: Synthetic oligonucleotide
  Antisense strand to SEQ ID NO: 1799667
aauaaaggaagucuuccag

SEQ ID NO: 1799669 - RNA, 19 nt, Artificial Sequence
  Description of Artificial Sequence: Synthetic oligonucleotide
  Sense strand starting at position 3241 of SEQ ID NO: 1563158
uuaggagaauucguugucu

SEQ ID NO: 1799670 - RNA, 19 nt, Artificial Sequence
  Description of Artificial Sequence: Synthetic oligonucleotide
  Antisense strand to SEQ ID NO: 1799669
agacaacgaauucuccuaa

SEQ ID NO: 1799671 - RNA, 19 nt, Artificial Sequence
  Description of Artificial Sequence: Synthetic oligonucleotide
  Sense strand starting at position 3245 of SEQ ID NO: 1563158
gagaauucguugucuccac

SEQ ID NO: 1799672 - RNA, 19 nt, Artificial Sequence
  Description of Artificial Sequence: Synthetic oligonucleotide
  Antisense strand to SEQ ID NO: 1799671
guggagacaacgaauucuc

SEQ ID NO: 1799673 - RNA, 19 nt, Artificial Sequence
  Description of Artificial Sequence: Synthetic oligonucleotide
  Sense strand starting at position 3246 of SEQ ID NO: 1563158
agaauucguugucuccaca

SEQ ID NO: 1799674 - RNA, 19 nt, Artificial Sequence
  Description of Artificial Sequence: Synthetic oligonucleotide
  Antisense strand to SEQ ID NO: 1799673
uguggagacaacgaauucu

SEQ ID NO: 1799675 - RNA, 19 nt, Artificial Sequence
  Description of Artificial Sequence: Synthetic oligonucleotide
  Sense strand starting at position 3249 of SEQ ID NO: 1563158
auucguugucuccacaaag

SEQ ID NO: 1799676 - RNA, 19 nt, Artificial Sequence
  Description of Artificial Sequence: Synthetic oligonucleotide
  Antisense strand to SEQ ID NO: 1799675
cuuuguggagacaacgaau

SEQ ID NO: 1799677 - RNA, 19 nt, Artificial Sequence
  Description of Artificial Sequence: Synthetic oligonucleotide
  Sense strand starting at position 3324 of SEQ ID NO: 1563158
acugcacccuuagagauuu

SEQ ID NO: 1799678 - RNA, 19 nt, Artificial Sequence
  Description of Artificial Sequence: Synthetic oligonucleotide
  Antisense strand to SEQ ID NO: 1799677
aaaucucuaagggugcagu

SEQ ID NO: 1799679 - RNA, 19 nt, Artificial Sequence
  Description of Artificial Sequence: Synthetic oligonucleotide
  Sense strand starting at position 3350 of SEQ ID NO: 1563158
gguagcuuuaaugagcuau

SEQ ID NO: 1799680 - RNA, 19 nt, Artificial Sequence
  Description of Artificial Sequence: Synthetic oligonucleotide
  Antisense strand to SEQ ID NO: 1799679
auagcucauuaaagcuacc

SEQ ID NO: 1799681 - RNA, 19 nt, Artificial Sequence
  Description of Artificial Sequence: Synthetic oligonucleotide
  Sense strand starting at position 3371 of SEQ ID NO: 1563158
gcugucugaagacagaguu

SEQ ID NO: 1799682 - RNA, 19 nt, Artificial Sequence
  Description of Artificial Sequence: Synthetic oligonucleotide
  Antisense strand to SEQ ID NO: 1799681
aacucugucuucagacagc

SEQ ID NO: 1799683 - RNA, 19 nt, Artificial Sequence
  Description of Artificial Sequence: Synthetic oligonucleotide
  Sense strand starting at position 3644 of SEQ ID NO: 1563158
acuguaauuuaucacuggu

SEQ ID NO: 1799684 - RNA, 19 nt, Artificial Sequence
  Description of Artificial Sequence: Synthetic oligonucleotide
  Antisense strand to SEQ ID NO: 1799683
accagugauaaauuacagu

SEQ ID NO: 1799685 - RNA, 19 nt, Artificial Sequence
  Description of Artificial Sequence: Synthetic oligonucleotide
  Sense strand starting at position 3650 of SEQ ID NO: 1563158
auuuaucacugguaaugga

SEQ ID NO: 1799686 - RNA, 19 nt, Artificial Sequence
  Description of Artificial Sequence: Synthetic oligonucleotide
  Antisense strand to SEQ ID NO: 1799685
uccauuaccagugauaaau

SEQ ID NO: 1799687 - RNA, 19 nt, Artificial Sequence
  Description of Artificial Sequence: Synthetic oligonucleotide
  Sense strand starting at position 3678 of SEQ ID NO: 1563158
ugucucuaccacugggaua

SEQ ID NO: 1799688 - RNA, 19 nt, Artificial Sequence
  Description of Artificial Sequence: Synthetic oligonucleotide
  Antisense strand to SEQ ID NO: 1799687
uaucccagugguagagaca

SEQ ID NO: 1799689 - RNA, 19 nt, Artificial Sequence
  Description of Artificial Sequence: Synthetic oligonucleotide
  Sense strand starting at position 3704 of SEQ ID NO: 1563158
augguuaugccucauugca

SEQ ID NO: 1799690 - RNA, 19 nt, Artificial Sequence
  Description of Artificial Sequence: Synthetic oligonucleotide
  Antisense strand to SEQ ID NO: 1799689
ugcaaugaggcauaaccau

SEQ ID NO: 1799691 - RNA, 19 nt, Artificial Sequence
  Description of Artificial Sequence: Synthetic oligonucleotide
  Sense strand starting at position 3722 of SEQ ID NO: 1563158
augguuaugccucagugga

SEQ ID NO: 1799692 - RNA, 19 nt, Artificial Sequence
  Description of Artificial Sequence: Synthetic oligonucleotide
  Antisense strand to SEQ ID NO: 1799691
uccacugaggcauaaccau

SEQ ID NO: 1799693 - RNA, 19 nt, Artificial Sequence
  Description of Artificial Sequence: Synthetic oligonucleotide
  Sense strand starting at position 3724 of SEQ ID NO: 1563158
gguuaugccucaguggagu

SEQ ID NO: 1799694 - RNA, 19 nt, Artificial Sequence
  Description of Artificial Sequence: Synthetic oligonucleotide
  Antisense strand to SEQ ID NO: 1799693
acuccacugaggcauaacc

SEQ ID NO: 1799695 - RNA, 19 nt, Artificial Sequence
  Description of Artificial Sequence: Synthetic oligonucleotide
  Sense strand starting at position 3803 of SEQ ID NO: 1563158
gggugagcaacuugaugau

SEQ ID NO: 1799696 - RNA, 19 nt, Artificial Sequence
  Description of Artificial Sequence: Synthetic oligonucleotide
  Antisense strand to SEQ ID NO: 1799695
aucaucaaguugcucaccc

SEQ ID NO: 1799697 - RNA, 19 nt, Artificial Sequence
  Description of Artificial Sequence: Synthetic oligonucleotide
  Sense strand starting at position 3807 of SEQ ID NO: 1563158
gagcaacuugaugauugua

SEQ ID NO: 1799698 - RNA, 19 nt, Artificial Sequence
  Description of Artificial Sequence: Synthetic oligonucleotide
  Antisense strand to SEQ ID NO: 1799697
uacaaucaucaaguugcuc

SEQ ID NO: 1799699 - RNA, 19 nt, Artificial Sequence
  Description of Artificial Sequence: Synthetic oligonucleotide
  Sense strand starting at position 3809 of SEQ ID NO: 1563158
gcaacuugaugauuguauu

SEQ ID NO: 1799700 - RNA, 19 nt, Artificial Sequence
  Description of Artificial Sequence: Synthetic oligonucleotide
  Antisense strand to SEQ ID NO: 1799699
aauacaaucaucaaguugc

SEQ ID NO: 1799701 - RNA, 19 nt, Artificial Sequence
  Description of Artificial Sequence: Synthetic oligonucleotide
  Sense strand starting at position 3812 of SEQ ID NO: 1563158
acuugaugauuguauuuga

SEQ ID NO: 1799702 - RNA, 19 nt, Artificial Sequence
  Description of Artificial Sequence: Synthetic oligonucleotide
  Antisense strand to SEQ ID NO: 1799701
ucaaauacaaucaucaagu

SEQ ID NO: 1799703 - RNA, 19 nt, Artificial Sequence
  Description of Artificial Sequence: Synthetic oligonucleotide
  Sense strand starting at position 3929 of SEQ ID NO: 1563158
gggcauacauucuugcuca

SEQ ID NO: 1799704 - RNA, 19 nt, Artificial Sequence
  Description of Artificial Sequence: Synthetic oligonucleotide
  Antisense strand to SEQ ID NO: 1799703
ugagcaagaauguaugccc

SEQ ID NO: 1799705 - RNA, 19 nt, Artificial Sequence
  Description of Artificial Sequence: Synthetic oligonucleotide
  Sense strand starting at position 305 of SEQ ID NO: 1563159
augaaauagaagugguuau

SEQ ID NO: 1799706 - RNA, 19 nt, Artificial Sequence
  Description of Artificial Sequence: Synthetic oligonucleotide
  Antisense strand to SEQ ID NO: 1799705
auaaccacuucuauuucau

SEQ ID NO: 1799707 - RNA, 19 nt, Artificial Sequence
  Description of Artificial Sequence: Synthetic oligonucleotide
  Sense strand starting at position 312 of SEQ ID NO: 1563159
agaagugguuaucugcaaa

SEQ ID NO: 1799708 - RNA, 19 nt, Artificial Sequence
  Description of Artificial Sequence: Synthetic oligonucleotide
  Antisense strand to SEQ ID NO: 1799707
uuugcagauaaccacuucu

SEQ ID NO: 1799709 - RNA, 19 nt, Artificial Sequence
  Description of Artificial Sequence: Synthetic oligonucleotide
  Sense strand starting at position 343 of SEQ ID NO: 1563159
cuggguuaccgauaaacua

SEQ ID NO: 1799710 - RNA, 19 nt, Artificial Sequence
  Description of Artificial Sequence: Synthetic oligonucleotide
  Antisense strand to SEQ ID NO: 1799709
uaguuuaucgguaacccag

SEQ ID NO: 1799711 - RNA, 19 nt, Artificial Sequence
  Description of Artificial Sequence: Synthetic oligonucleotide
  Sense strand starting at position 434 of SEQ ID NO: 1563159
ucuuguuuccaguggaaag

SEQ ID NO: 1799712 - RNA, 19 nt, Artificial Sequence
  Description of Artificial Sequence: Synthetic oligonucleotide
  Antisense strand to SEQ ID NO: 1799711
cuuuccacuggaaacaaga

SEQ ID NO: 1799713 - RNA, 19 nt, Artificial Sequence
  Description of Artificial Sequence: Synthetic oligonucleotide
  Sense strand starting at position 435 of SEQ ID NO: 1563159
cuuguuuccaguggaaaga

SEQ ID NO: 1799714 - RNA, 19 nt, Artificial Sequence
  Description of Artificial Sequence: Synthetic oligonucleotide
  Antisense strand to SEQ ID NO: 1799713
ucuuuccacuggaaacaag

SEQ ID NO: 1799715 - RNA, 19 nt, Artificial Sequence
  Description of Artificial Sequence: Synthetic oligonucleotide
  Sense strand starting at position 488 of SEQ ID NO: 1563159
ggaaguccucaagggcaaa

SEQ ID NO: 1799716 - RNA, 19 nt, Artificial Sequence
  Description of Artificial Sequence: Synthetic oligonucleotide
  Antisense strand to SEQ ID NO: 1799715
uuugcccuugaggacuucc

SEQ ID NO: 1799717 - RNA, 19 nt, Artificial Sequence
  Description of Artificial Sequence: Synthetic oligonucleotide
  Sense strand starting at position 677 of SEQ ID NO: 1563159
uggcaugaauuagaaauuu

SEQ ID NO: 1799718 - RNA, 19 nt, Artificial Sequence
  Description of Artificial Sequence: Synthetic oligonucleotide
  Antisense strand to SEQ ID NO: 1799717
aaauuucuaauucaugcca

SEQ ID NO: 1799719 - RNA, 19 nt, Artificial Sequence
  Description of Artificial Sequence: Synthetic oligonucleotide
  Sense strand starting at position 794 of SEQ ID NO: 1563159
ugaagauacugcucacauu

SEQ ID NO: 1799720 - RNA, 19 nt, Artificial Sequence
  Description of Artificial Sequence: Synthetic oligonucleotide
  Antisense strand to SEQ ID NO: 1799719
aaugugagcaguaucuuca

SEQ ID NO: 1799721 - RNA, 19 nt, Artificial Sequence
  Description of Artificial Sequence: Synthetic oligonucleotide
  Sense strand starting at position 821 of SEQ ID NO: 1563159
guccgcucucugcuaguua

SEQ ID NO: 1799722 - RNA, 19 nt, Artificial Sequence
  Description of Artificial Sequence: Synthetic oligonucleotide
  Antisense strand to SEQ ID NO: 1799721
uaacuagcagagagcggac

SEQ ID NO: 1799723 - RNA, 19 nt, Artificial Sequence
  Description of Artificial Sequence: Synthetic oligonucleotide
  Sense strand starting at position 892 of SEQ ID NO: 1563159
aggacuauguuaccaucau

SEQ ID NO: 1799724 - RNA, 19 nt, Artificial Sequence
  Description of Artificial Sequence: Synthetic oligonucleotide
  Antisense strand to SEQ ID NO: 1799723
augaugguaacauaguccu

SEQ ID NO: 1799725 - RNA, 19 nt, Artificial Sequence
  Description of Artificial Sequence: Synthetic oligonucleotide
  Sense strand starting at position 1205 of SEQ ID NO: 1563159
aaagccagacaguguuuaa

SEQ ID NO: 1799726 - RNA, 19 nt, Artificial Sequence
  Description of Artificial Sequence: Synthetic oligonucleotide
  Antisense strand to SEQ ID NO: 1799725
uuaaacacugucuggcuuu

SEQ ID NO: 1799727 - RNA, 19 nt, Artificial Sequence
  Description of Artificial Sequence: Synthetic oligonucleotide
  Sense strand starting at position 1492 of SEQ ID NO: 1563159
gcuugaguuugcucauuuc

SEQ ID NO: 1799728 - RNA, 19 nt, Artificial Sequence
  Description of Artificial Sequence: Synthetic oligonucleotide
  Antisense strand to SEQ ID NO: 1799727
gaaaugagcaaacucaagc

SEQ ID NO: 1799729 - RNA, 19 nt, Artificial Sequence
  Description of Artificial Sequence: Synthetic oligonucleotide
  Sense strand starting at position 1592 of SEQ ID NO: 1563159
agacacugaucauuccagu

SEQ ID NO: 1799730 - RNA, 19 nt, Artificial Sequence
  Description of Artificial Sequence: Synthetic oligonucleotide
  Antisense strand to SEQ ID NO: 1799729
acuggaaugaucagugucu

SEQ ID NO: 1799731 - RNA, 19 nt, Artificial Sequence
  Description of Artificial Sequence: Synthetic oligonucleotide
  Sense strand starting at position 1676 of SEQ ID NO: 1563159
aaaguaguguaaguauaga

SEQ ID NO: 1799732 - RNA, 19 nt, Artificial Sequence
  Description of Artificial Sequence: Synthetic oligonucleotide
  Antisense strand to SEQ ID NO: 1799731
ucuauacuuacacuacuuu

SEQ ID NO: 1799733 - RNA, 19 nt, Artificial Sequence
  Description of Artificial Sequence: Synthetic oligonucleotide
  Sense strand starting at position 1837 of SEQ ID NO: 1563159
gaucauauugaaugucuga

SEQ ID NO: 1799734 - RNA, 19 nt, Artificial Sequence
  Description of Artificial Sequence: Synthetic oligonucleotide
  Antisense strand to SEQ ID NO: 1799733
ucagacauucaauaugauc

SEQ ID NO: 1799735 - RNA, 19 nt, Artificial Sequence
  Description of Artificial Sequence: Synthetic oligonucleotide
  Sense strand starting at position 1840 of SEQ ID NO: 1563159
cauauugaaugucugagaa

SEQ ID NO: 1799736 - RNA, 19 nt, Artificial Sequence
  Description of Artificial Sequence: Synthetic oligonucleotide
  Antisense strand to SEQ ID NO: 1799735
uucucagacauucaauaug

SEQ ID NO: 1799737 - RNA, 19 nt, Artificial Sequence
  Description of Artificial Sequence: Synthetic oligonucleotide
  Sense strand starting at position 2009 of SEQ ID NO: 1563159
ugaguaagugcacaaauga

SEQ ID NO: 1799738 - RNA, 19 nt, Artificial Sequence
  Description of Artificial Sequence: Synthetic oligonucleotide
  Antisense strand to SEQ ID NO: 1799737
ucauuugugcacuuacuca

SEQ ID NO: 1799739 - RNA, 19 nt, Artificial Sequence
  Description of Artificial Sequence: Synthetic oligonucleotide
  Sense strand starting at position 2029 of SEQ ID NO: 1563159
ugagugcguguguuuguau

SEQ ID NO: 1799740 - RNA, 19 nt, Artificial Sequence
  Description of Artificial Sequence: Synthetic oligonucleotide
  Antisense strand to SEQ ID NO: 1799739
auacaaacacacgcacuca

SEQ ID NO: 1799741 - RNA, 19 nt, Artificial Sequence
  Description of Artificial Sequence: Synthetic oligonucleotide
  Sense strand starting at position 2191 of SEQ ID NO: 1563159
gaagaaauauacucgaguu

SEQ ID NO: 1799742 - RNA, 19 nt, Artificial Sequence
  Description of Artificial Sequence: Synthetic oligonucleotide
  Antisense strand to SEQ ID NO: 1799741
aacucgaguauauuucuuc

SEQ ID NO: 1799743 - RNA, 19 nt, Artificial Sequence
  Description of Artificial Sequence: Synthetic oligonucleotide
  Sense strand starting at position 2248 of SEQ ID NO: 1563159
gggaucuacaaacgguaau

SEQ ID NO: 1799744 - RNA, 19 nt, Artificial Sequence
  Description of Artificial Sequence: Synthetic oligonucleotide
  Antisense strand to SEQ ID NO: 1799743
auuaccguuuguagauccc

SEQ ID NO: 1799745 - RNA, 19 nt, Artificial Sequence
  Description of Artificial Sequence: Synthetic oligonucleotide
  Sense strand starting at position 2249 of SEQ ID NO: 1563159
ggaucuacaaacgguaauu

SEQ ID NO: 1799746 - RNA, 19 nt, Artificial Sequence
  Description of Artificial Sequence: Synthetic oligonucleotide
  Antisense strand to SEQ ID NO: 1799745
aauuaccguuuguagaucc

SEQ ID NO: 1799747 - RNA, 19 nt, Artificial Sequence
  Description of Artificial Sequence: Synthetic oligonucleotide
  Sense strand starting at position 2365 of SEQ ID NO: 1563159
gccuucuuuguuuaggaca

SEQ ID NO: 1799748 - RNA, 19 nt, Artificial Sequence
  Description of Artificial Sequence: Synthetic oligonucleotide
  Antisense strand to SEQ ID NO: 1799747
uguccuaaacaaagaaggc

SEQ ID NO: 1799749 - RNA, 19 nt, Artificial Sequence
  Description of Artificial Sequence: Synthetic oligonucleotide
  Sense strand starting at position 2370 of SEQ ID NO: 1563159
cuuuguuuaggacaaauuc

SEQ ID NO: 1799750 - RNA, 19 nt, Artificial Sequence
  Description of Artificial Sequence: Synthetic oligonucleotide
  Antisense strand to SEQ ID NO: 1799749
gaauuuguccuaaacaaag

SEQ ID NO: 1799751 - RNA, 19 nt, Artificial Sequence
  Description of Artificial Sequence: Synthetic oligonucleotide
  Sense strand starting at position 2523 of SEQ ID NO: 1563159
gacagcaguccuugagaag

SEQ ID NO: 1799752 - RNA, 19 nt, Artificial Sequence
  Description of Artificial Sequence: Synthetic oligonucleotide
  Antisense strand to SEQ ID NO: 1799751
cuucucaaggacugcuguc

SEQ ID NO: 1799753 - RNA, 19 nt, Artificial Sequence
  Description of Artificial Sequence: Synthetic oligonucleotide
  Sense strand starting at position 2524 of SEQ ID NO: 1563159
acagcaguccuugagaagu

SEQ ID NO: 1799754 - RNA, 19 nt, Artificial Sequence
  Description of Artificial Sequence: Synthetic oligonucleotide
  Antisense strand to SEQ ID NO: 1799753
acuucucaaggacugcugu

SEQ ID NO: 1799755 - RNA, 19 nt, Artificial Sequence
  Description of Artificial Sequence: Synthetic oligonucleotide
  Sense strand starting at position 2576 of SEQ ID NO: 1563159
gagugaauauacccacaug

SEQ ID NO: 1799756 - RNA, 19 nt, Artificial Sequence
  Description of Artificial Sequence: Synthetic oligonucleotide
  Antisense strand to SEQ ID NO: 1799755
cauguggguauauucacuc

SEQ ID NO: 1799757 - RNA, 19 nt, Artificial Sequence
  Description of Artificial Sequence: Synthetic oligonucleotide
  Sense strand starting at position 2783 of SEQ ID NO: 1563159
augggucucaagugaauuc

SEQ ID NO: 1799758 - RNA, 19 nt, Artificial Sequence
  Description of Artificial Sequence: Synthetic oligonucleotide
  Antisense strand to SEQ ID NO: 1799757
gaauucacuugagacccau

SEQ ID NO: 1799759 - RNA, 19 nt, Artificial Sequence
  Description of Artificial Sequence: Synthetic oligonucleotide
  Sense strand starting at position 2905 of SEQ ID NO: 1563159
cugugaaacuaaucaugua

SEQ ID NO: 1799760 - RNA, 19 nt, Artificial Sequence
  Description of Artificial Sequence: Synthetic oligonucleotide
  Antisense strand to SEQ ID NO: 1799759
uacaugauuaguuucacag

SEQ ID NO: 1799761 - RNA, 19 nt, Artificial Sequence
  Description of Artificial Sequence: Synthetic oligonucleotide
  Sense strand starting at position 3101 of SEQ ID NO: 1563159
gcauuauuccaguagacag

SEQ ID NO: 1799762 - RNA, 19 nt, Artificial Sequence
  Description of Artificial Sequence: Synthetic oligonucleotide
  Antisense strand to SEQ ID NO: 1799761
cugucuacuggaauaaugc

SEQ ID NO: 1799763 - RNA, 19 nt, Artificial Sequence
  Description of Artificial Sequence: Synthetic oligonucleotide
  Sense strand starting at position 3138 of SEQ ID NO: 1563159
gauacucaucaauggaagu

SEQ ID NO: 1799764 - RNA, 19 nt, Artificial Sequence
  Description of Artificial Sequence: Synthetic oligonucleotide
  Antisense strand to SEQ ID NO: 1799763
acuuccauugaugaguauc

SEQ ID NO: 1799765 - RNA, 19 nt, Artificial Sequence
  Description of Artificial Sequence: Synthetic oligonucleotide
  Sense strand starting at position 3386 of SEQ ID NO: 1563159
aauucuuagcaguagguua

SEQ ID NO: 1799766 - RNA, 19 nt, Artificial Sequence
  Description of Artificial Sequence: Synthetic oligonucleotide
  Antisense strand to SEQ ID NO: 1799765
uaaccuacugcuaagaauu

SEQ ID NO: 1799767 - RNA, 19 nt, Artificial Sequence
  Description of Artificial Sequence: Synthetic oligonucleotide
  Sense strand starting at position 3391 of SEQ ID NO: 1563159
uuagcaguagguuacauua

SEQ ID NO: 1799768 - RNA, 19 nt, Artificial Sequence
  Description of Artificial Sequence: Synthetic oligonucleotide
  Antisense strand to SEQ ID NO: 1799767
uaauguaaccuacugcuaa

SEQ ID NO: 1799769 - RNA, 19 nt, Artificial Sequence
  Description of Artificial Sequence: Synthetic oligonucleotide
  Sense strand starting at position 3560 of SEQ ID NO: 1563159
acuaguaggagccauguua

SEQ ID NO: 1799770 - RNA, 19 nt, Artificial Sequence
  Description of Artificial Sequence: Synthetic oligonucleotide
  Antisense strand to SEQ ID NO: 1799769
uaacauggcuccuacuagu

SEQ ID NO: 1799771 - RNA, 19 nt, Artificial Sequence
  Description of Artificial Sequence: Synthetic oligonucleotide
  Sense strand starting at position 3630 of SEQ ID NO: 1563159
acuagaguggucuguuaaa

SEQ ID NO: 1799772 - RNA, 19 nt, Artificial Sequence
  Description of Artificial Sequence: Synthetic oligonucleotide
  Antisense strand to SEQ ID NO: 1799771
uuuaacagaccacucuagu

SEQ ID NO: 1799773 - RNA, 19 nt, Artificial Sequence
  Description of Artificial Sequence: Synthetic oligonucleotide
  Sense strand starting at position 3649 of SEQ ID NO: 1563159
ucaauuauuugauggagac

SEQ ID NO: 1799774 - RNA, 19 nt, Artificial Sequence
  Description of Artificial Sequence: Synthetic oligonucleotide
  Antisense strand to SEQ ID NO: 1799773
gucuccaucaaauaauuga

SEQ ID NO: 1799775 - RNA, 19 nt, Artificial Sequence
  Description of Artificial Sequence: Synthetic oligonucleotide
  Sense strand starting at position 3673 of SEQ ID NO: 1563159
cugucaggucaauaaaugu

SEQ ID NO: 1799776 - RNA, 19 nt, Artificial Sequence
  Description of Artificial Sequence: Synthetic oligonucleotide
  Antisense strand to SEQ ID NO: 1799775
acauuuauugaccugacag

SEQ ID NO: 1799777 - RNA, 19 nt, Artificial Sequence
  Description of Artificial Sequence: Synthetic oligonucleotide
  Sense strand starting at position 3692 of SEQ ID NO: 1563159
uucguaagaaggugacuaa

SEQ ID NO: 1799778 - RNA, 19 nt, Artificial Sequence
  Description of Artificial Sequence: Synthetic oligonucleotide
  Antisense strand to SEQ ID NO: 1799777
uuagucaccuucuuacgaa

SEQ ID NO: 1799779 - RNA, 19 nt, Artificial Sequence
  Description of Artificial Sequence: Synthetic oligonucleotide
  Sense strand starting at position 3819 of SEQ ID NO: 1563159
agguguguauauuugguau

SEQ ID NO: 1799780 - RNA, 19 nt, Artificial Sequence
  Description of Artificial Sequence: Synthetic oligonucleotide
  Antisense strand to SEQ ID NO: 1799779
auaccaaauauacacaccu

SEQ ID NO: 1799781 - RNA, 19 nt, Artificial Sequence
  Description of Artificial Sequence: Synthetic oligonucleotide
  Sense strand starting at position 3822 of SEQ ID NO: 1563159
uguguauauuugguauucu

SEQ ID NO: 1799782 - RNA, 19 nt, Artificial Sequence
  Description of Artificial Sequence: Synthetic oligonucleotide
  Antisense strand to SEQ ID NO: 1799781
agaauaccaaauauacaca

SEQ ID NO: 1799783 - RNA, 19 nt, Artificial Sequence
  Description of Artificial Sequence: Synthetic oligonucleotide
  Sense strand starting at position 3948 of SEQ ID NO: 1563159
cugaaagagccuuggaaau

SEQ ID NO: 1799784 - RNA, 19 nt, Artificial Sequence
  Description of Artificial Sequence: Synthetic oligonucleotide
  Antisense strand to SEQ ID NO: 1799783
auuuccaaggcucuuucag

SEQ ID NO: 1799785 - RNA, 19 nt, Artificial Sequence
  Description of Artificial Sequence: Synthetic oligonucleotide
  Sense strand starting at position 11 of SEQ ID NO: 1563160
ucuugauuagcagagcaaa

SEQ ID NO: 1799786 - RNA, 19 nt, Artificial Sequence
  Description of Artificial Sequence: Synthetic oligonucleotide
  Antisense strand to SEQ ID NO: 1799785
uuugcucugcuaaucaaga

SEQ ID NO: 1799787 - RNA, 19 nt, Artificial Sequence
  Description of Artificial Sequence: Synthetic oligonucleotide
  Sense strand starting at position 96 of SEQ ID NO: 1563160
ucaggaagucauugauguu

SEQ ID NO: 1799788 - RNA, 19 nt, Artificial Sequence
  Description of Artificial Sequence: Synthetic oligonucleotide
  Antisense strand to SEQ ID NO: 1799787
aacaucaaugacuuccuga

SEQ ID NO: 1799789 - RNA, 19 nt, Artificial Sequence
  Description of Artificial Sequence: Synthetic oligonucleotide
  Sense strand starting at position 97 of SEQ ID NO: 1563160
caggaagucauugauguug

SEQ ID NO: 1799790 - RNA, 19 nt, Artificial Sequence
  Description of Artificial Sequence: Synthetic oligonucleotide
  Antisense strand to SEQ ID NO: 1799789
caacaucaaugacuuccug

SEQ ID NO: 1799791 - RNA, 19 nt, Artificial Sequence
  Description of Artificial Sequence: Synthetic oligonucleotide
  Sense strand starting at position 166 of SEQ ID NO: 1563160
agugaaaugucacuuggag

SEQ ID NO: 1799792 - RNA, 19 nt, Artificial Sequence
  Description of Artificial Sequence: Synthetic oligonucleotide
  Antisense strand to SEQ ID NO: 1799791
cuccaagugacauuucacu

SEQ ID NO: 1799793 - RNA, 19 nt, Artificial Sequence
  Description of Artificial Sequence: Synthetic oligonucleotide
  Sense strand starting at position 168 of SEQ ID NO: 1563160
ugaaaugucacuuggagau

SEQ ID NO: 1799794 - RNA, 19 nt, Artificial Sequence
  Description of Artificial Sequence: Synthetic oligonucleotide
  Antisense strand to SEQ ID NO: 1799793
aucuccaagugacauuuca

SEQ ID NO: 1799795 - RNA, 19 nt, Artificial Sequence
  Description of Artificial Sequence: Synthetic oligonucleotide
  Sense strand starting at position 180 of SEQ ID NO: 1563160
uggagauugucaucccaug

SEQ ID NO: 1799796 - RNA, 19 nt, Artificial Sequence
  Description of Artificial Sequence: Synthetic oligonucleotide
  Antisense strand to SEQ ID NO: 1799795
caugggaugacaaucucca

SEQ ID NO: 1799797 - RNA, 19 nt, Artificial Sequence
  Description of Artificial Sequence: Synthetic oligonucleotide
  Sense strand starting at position 216 of SEQ ID NO: 1563160
aucauuugcugauaacuag

SEQ ID NO: 1799798 - RNA, 19 nt, Artificial Sequence
  Description of Artificial Sequence: Synthetic oligonucleotide
  Antisense strand to SEQ ID NO: 1799797
cuaguuaucagcaaaugau

SEQ ID NO: 1799799 - RNA, 19 nt, Artificial Sequence
  Description of Artificial Sequence: Synthetic oligonucleotide
  Sense strand starting at position 366 of SEQ ID NO: 1563160
agccaugucuacuuacaag

SEQ ID NO: 1799800 - RNA, 19 nt, Artificial Sequence
  Description of Artificial Sequence: Synthetic oligonucleotide
  Antisense strand to SEQ ID NO: 1799799
cuuguaaguagacauggcu

SEQ ID NO: 1799801 - RNA, 19 nt, Artificial Sequence
  Description of Artificial Sequence: Synthetic oligonucleotide
  Sense strand starting at position 475 of SEQ ID NO: 1563160
gaagcaaucccugguaccu

SEQ ID NO: 1799802 - RNA, 19 nt, Artificial Sequence
  Description of Artificial Sequence: Synthetic oligonucleotide
  Antisense strand to SEQ ID NO: 1799801
agguaccagggauugcuuc

SEQ ID NO: 1799803 - RNA, 19 nt, Artificial Sequence
  Description of Artificial Sequence: Synthetic oligonucleotide
  Sense strand starting at position 743 of SEQ ID NO: 1563160
gaaauuaucuauucucgug

SEQ ID NO: 1799804 - RNA, 19 nt, Artificial Sequence
  Description of Artificial Sequence: Synthetic oligonucleotide
  Antisense strand to SEQ ID NO: 1799803
cacgagaauagauaauuuc

SEQ ID NO: 1799805 - RNA, 19 nt, Artificial Sequence
  Description of Artificial Sequence: Synthetic oligonucleotide
  Sense strand starting at position 761 of SEQ ID NO: 1563160
gaucguggauuuccagcua

SEQ ID NO: 1799806 - RNA, 19 nt, Artificial Sequence
  Description of Artificial Sequence: Synthetic oligonucleotide
  Antisense strand to SEQ ID NO: 1799805
uagcuggaaauccacgauc

SEQ ID NO: 1799807 - RNA, 19 nt, Artificial Sequence
  Description of Artificial Sequence: Synthetic oligonucleotide
  Sense strand starting at position 843 of SEQ ID NO: 1563160
cgaaacauauaucugguuu

SEQ ID NO: 1799808 - RNA, 19 nt, Artificial Sequence
  Description of Artificial Sequence: Synthetic oligonucleotide
  Antisense strand to SEQ ID NO: 1799807
aaaccagauauauguuucg

SEQ ID NO: 1799809 - RNA, 19 nt, Artificial Sequence
  Description of Artificial Sequence: Synthetic oligonucleotide
  Sense strand starting at position 1052 of SEQ ID NO: 1563160
acauguccucgguacacaa

SEQ ID NO: 1799810 - RNA, 19 nt, Artificial Sequence
  Description of Artificial Sequence: Synthetic oligonucleotide
  Antisense strand to SEQ ID NO: 1799809
uuguguaccgaggacaugu

SEQ ID NO: 1799811 - RNA, 19 nt, Artificial Sequence
  Description of Artificial Sequence: Synthetic oligonucleotide
  Sense strand starting at position 1071 of SEQ ID NO: 1563160
ggagauguaacaugcaucu

SEQ ID NO: 1799812 - RNA, 19 nt, Artificial Sequence
  Description of Artificial Sequence: Synthetic oligonucleotide
  Antisense strand to SEQ ID NO: 1799811
agaugcauguuacaucucc

SEQ ID NO: 1799813 - RNA, 19 nt, Artificial Sequence
  Description of Artificial Sequence: Synthetic oligonucleotide
  Sense strand starting at position 1279 of SEQ ID NO: 1563160
uucccauggccugggaaau

SEQ ID NO: 1799814 - RNA, 19 nt, Artificial Sequence
  Description of Artificial Sequence: Synthetic oligonucleotide
  Antisense strand to SEQ ID NO: 1799813
auuucccaggccaugggaa

SEQ ID NO: 1799815 - RNA, 19 nt, Artificial Sequence
  Description of Artificial Sequence: Synthetic oligonucleotide
  Sense strand starting at position 1280 of SEQ ID NO: 1563160
ucccauggccugggaaaua

SEQ ID NO: 1799816 - RNA, 19 nt, Artificial Sequence
  Description of Artificial Sequence: Synthetic oligonucleotide
  Antisense strand to SEQ ID NO: 1799815
uauuucccaggccauggga

SEQ ID NO: 1799817 - RNA, 19 nt, Artificial Sequence
  Description of Artificial Sequence: Synthetic oligonucleotide
  Sense strand starting at position 1534 of SEQ ID NO: 1563160
uucauuacugaggacggua

SEQ ID NO: 1799818 - RNA, 19 nt, Artificial Sequence
  Description of Artificial Sequence: Synthetic oligonucleotide
  Antisense strand to SEQ ID NO: 1799817
uaccguccucaguaaugaa

SEQ ID NO: 1799819 - RNA, 19 nt, Artificial Sequence
  Description of Artificial Sequence: Synthetic oligonucleotide
  Sense strand starting at position 1722 of SEQ ID NO: 1563160
cacagagaucacgguccaa

SEQ ID NO: 1799820 - RNA, 19 nt, Artificial Sequence
  Description of Artificial Sequence: Synthetic oligonucleotide
  Antisense strand to SEQ ID NO: 1799819
uuggaccgugaucucugug

SEQ ID NO: 1799821 - RNA, 19 nt, Artificial Sequence
  Description of Artificial Sequence: Synthetic oligonucleotide
  Sense strand starting at position 1746 of SEQ ID NO: 1563160
ggaaacagauaagaauuaa

SEQ ID NO: 1799822 - RNA, 19 nt, Artificial Sequence
  Description of Artificial Sequence: Synthetic oligonucleotide
  Antisense strand to SEQ ID NO: 1799821
uuaauucuuaucuguuucc

SEQ ID NO: 1799823 - RNA, 19 nt, Artificial Sequence
  Description of Artificial Sequence: Synthetic oligonucleotide
  Sense strand starting at position 1877 of SEQ ID NO: 1563160
cacagagugcaagaaguua

SEQ ID NO: 1799824 - RNA, 19 nt, Artificial Sequence
  Description of Artificial Sequence: Synthetic oligonucleotide
  Antisense strand to SEQ ID NO: 1799823
uaacuucuugcacucugug

SEQ ID NO: 1799825 - RNA, 19 nt, Artificial Sequence
  Description of Artificial Sequence: Synthetic oligonucleotide
  Sense strand starting at position 1943 of SEQ ID NO: 1563160
aagcaagugcuuugggaaa

SEQ ID NO: 1799826 - RNA, 19 nt, Artificial Sequence
  Description of Artificial Sequence: Synthetic oligonucleotide
  Antisense strand to SEQ ID NO: 1799825
uuucccaaagcacuugcuu

SEQ ID NO: 1799827 - RNA, 19 nt, Artificial Sequence
  Description of Artificial Sequence: Synthetic oligonucleotide
  Sense strand starting at position 2173 of SEQ ID NO: 1563160
ccaagaaauagccggaugu

SEQ ID NO: 1799828 - RNA, 19 nt, Artificial Sequence
  Description of Artificial Sequence: Synthetic oligonucleotide
  Antisense strand to SEQ ID NO: 1799827
acauccggcuauuucuugg

SEQ ID NO: 1799829 - RNA, 19 nt, Artificial Sequence
  Description of Artificial Sequence: Synthetic oligonucleotide
  Sense strand starting at position 2306 of SEQ ID NO: 1563160
uguguauaagcagaagcua

SEQ ID NO: 1799830 - RNA, 19 nt, Artificial Sequence
  Description of Artificial Sequence: Synthetic oligonucleotide
  Antisense strand to SEQ ID NO: 1799829
uagcuucugcuuauacaca

SEQ ID NO: 1799831 - RNA, 19 nt, Artificial Sequence
  Description of Artificial Sequence: Synthetic oligonucleotide
  Sense strand starting at position 2319 of SEQ ID NO: 1563160
aagcuagaagaauggcauu

SEQ ID NO: 1799832 - RNA, 19 nt, Artificial Sequence
  Description of Artificial Sequence: Synthetic oligonucleotide
  Antisense strand to SEQ ID NO: 1799831
aaugccauucuucuagcuu

SEQ ID NO: 1799833 - RNA, 19 nt, Artificial Sequence
  Description of Artificial Sequence: Synthetic oligonucleotide
  Sense strand starting at position 2476 of SEQ ID NO: 1563160
ggcucagacucagucacau

SEQ ID NO: 1799834 - RNA, 19 nt, Artificial Sequence
  Description of Artificial Sequence: Synthetic oligonucleotide
  Antisense strand to SEQ ID NO: 1799833
augugacugagucugagcc

SEQ ID NO: 1799835 - RNA, 19 nt, Artificial Sequence
  Description of Artificial Sequence: Synthetic oligonucleotide
  Sense strand starting at position 2704 of SEQ ID NO: 1563160
aggcauacuauugggaaau

SEQ ID NO: 1799836 - RNA, 19 nt, Artificial Sequence
  Description of Artificial Sequence: Synthetic oligonucleotide
  Antisense strand to SEQ ID NO: 1799835
auuucccaauaguaugccu

SEQ ID NO: 1799837 - RNA, 19 nt, Artificial Sequence
  Description of Artificial Sequence: Synthetic oligonucleotide
  Sense strand starting at position 2706 of SEQ ID NO: 1563160
gcauacuauugggaaauuu

SEQ ID NO: 1799838 - RNA, 19 nt, Artificial Sequence
  Description of Artificial Sequence: Synthetic oligonucleotide
  Antisense strand to SEQ ID NO: 1799837
aaauuucccaauaguaugc

SEQ ID NO: 1799839 - RNA, 19 nt, Artificial Sequence
  Description of Artificial Sequence: Synthetic oligonucleotide
  Sense strand starting at position 2714 of SEQ ID NO: 1563160
uugggaaauuuaugauaag

SEQ ID NO: 1799840 - RNA, 19 nt, Artificial Sequence
  Description of Artificial Sequence: Synthetic oligonucleotide
  Antisense strand to SEQ ID NO: 1799839
cuuaucauaaauuucccaa

SEQ ID NO: 1799841 - RNA, 19 nt, Artificial Sequence
  Description of Artificial Sequence: Synthetic oligonucleotide
  Sense strand starting at position 2723 of SEQ ID NO: 1563160
uuaugauaaggccaacuuu

SEQ ID NO: 1799842 - RNA, 19 nt, Artificial Sequence
  Description of Artificial Sequence: Synthetic oligonucleotide
  Antisense strand to SEQ ID NO: 1799841
aaaguuggccuuaucauaa

SEQ ID NO: 1799843 - RNA, 19 nt, Artificial Sequence
  Description of Artificial Sequence: Synthetic oligonucleotide
  Sense strand starting at position 2743 of SEQ ID NO: 1563160
auaguauaacccuauguug

SEQ ID NO: 1799844 - RNA, 19 nt, Artificial Sequence
  Description of Artificial Sequence: Synthetic oligonucleotide
  Antisense strand to SEQ ID NO: 1799843
caacauaggguuauacuau

SEQ ID NO: 1799845 - RNA, 19 nt, Artificial Sequence
  Description of Artificial Sequence: Synthetic oligonucleotide
  Sense strand starting at position 2941 of SEQ ID NO: 1563160
ucaggacacuugucacacu

SEQ ID NO: 1799846 - RNA, 19 nt, Artificial Sequence
  Description of Artificial Sequence: Synthetic oligonucleotide
  Antisense strand to SEQ ID NO: 1799845
agugugacaaguguccuga

SEQ ID NO: 1799847 - RNA, 19 nt, Artificial Sequence
  Description of Artificial Sequence: Synthetic oligonucleotide
  Sense strand starting at position 3125 of SEQ ID NO: 1563160
gauggugucccugauauag

SEQ ID NO: 1799848 - RNA, 19 nt, Artificial Sequence
  Description of Artificial Sequence: Synthetic oligonucleotide
  Antisense strand to SEQ ID NO: 1799847
cuauaucagggacaccauc

SEQ ID NO: 1799849 - RNA, 19 nt, Artificial Sequence
  Description of Artificial Sequence: Synthetic oligonucleotide
  Sense strand starting at position 3144 of SEQ ID NO: 1563160
acaguaacugauuauagca

SEQ ID NO: 1799850 - RNA, 19 nt, Artificial Sequence
  Description of Artificial Sequence: Synthetic oligonucleotide
  Antisense strand to SEQ ID NO: 1799849
ugcuauaaucaguuacugu

SEQ ID NO: 1799851 - RNA, 19 nt, Artificial Sequence
  Description of Artificial Sequence: Synthetic oligonucleotide
  Sense strand starting at position 3478 of SEQ ID NO: 1563160
ggaaguacacaguauggua

SEQ ID NO: 1799852 - RNA, 19 nt, Artificial Sequence
  Description of Artificial Sequence: Synthetic oligonucleotide
  Antisense strand to SEQ ID NO: 1799851
uaccauacuguguacuucc

SEQ ID NO: 1799853 - RNA, 19 nt, Artificial Sequence
  Description of Artificial Sequence: Synthetic oligonucleotide
  Sense strand starting at position 3578 of SEQ ID NO: 1563160
caagguuugcuugauguac

SEQ ID NO: 1799854 - RNA, 19 nt, Artificial Sequence
  Description of Artificial Sequence: Synthetic oligonucleotide
  Antisense strand to SEQ ID NO: 1799853
guacaucaagcaaaccuug

SEQ ID NO: 1799855 - RNA, 19 nt, Artificial Sequence
  Description of Artificial Sequence: Synthetic oligonucleotide
  Sense strand starting at position 3654 of SEQ ID NO: 1563160
uggccaaaucuauguaaug

SEQ ID NO: 1799856 - RNA, 19 nt, Artificial Sequence
  Description of Artificial Sequence: Synthetic oligonucleotide
  Antisense strand to SEQ ID NO: 1799855
cauuacauagauuuggcca

SEQ ID NO: 1799857 - RNA, 19 nt, Artificial Sequence
  Description of Artificial Sequence: Synthetic oligonucleotide
  Sense strand starting at position 3806 of SEQ ID NO: 1563160
ggcaguauuauugagguau

SEQ ID NO: 1799858 - RNA, 19 nt, Artificial Sequence
  Description of Artificial Sequence: Synthetic oligonucleotide
  Antisense strand to SEQ ID NO: 1799857
auaccucaauaauacugcc

SEQ ID NO: 1799859 - RNA, 19 nt, Artificial Sequence
  Description of Artificial Sequence: Synthetic oligonucleotide
  Sense strand starting at position 3846 of SEQ ID NO: 1563160
aacaaagccugaguaaguu

SEQ ID NO: 1799860 - RNA, 19 nt, Artificial Sequence
  Description of Artificial Sequence: Synthetic oligonucleotide
  Antisense strand to SEQ ID NO: 1799859
aacuuacucaggcuuuguu

SEQ ID NO: 1799861 - RNA, 19 nt, Artificial Sequence
  Description of Artificial Sequence: Synthetic oligonucleotide
  Sense strand starting at position 3900 of SEQ ID NO: 1563160
ucaccaaggucaucuggau

SEQ ID NO: 1799862 - RNA, 19 nt, Artificial Sequence
  Description of Artificial Sequence: Synthetic oligonucleotide
  Antisense strand to SEQ ID NO: 1799861
auccagaugaccuugguga

SEQ ID NO: 1799863 - RNA, 19 nt, Artificial Sequence
  Description of Artificial Sequence: Synthetic oligonucleotide
  Sense strand starting at position 3974 of SEQ ID NO: 1563160
aguauaucagaauggcaag

SEQ ID NO: 1799864 - RNA, 19 nt, Artificial Sequence
  Description of Artificial Sequence: Synthetic oligonucleotide
  Antisense strand to SEQ ID NO: 1799863
cuugccauucugauauacu

SEQ ID NO: 1799865 - RNA, 19 nt, Artificial Sequence
  Description of Artificial Sequence: Synthetic oligonucleotide
  Sense strand starting at position 26 of SEQ ID NO: 1563161
ggcacuagaucauccugaa

SEQ ID NO: 1799866 - RNA, 19 nt, Artificial Sequence
  Description of Artificial Sequence: Synthetic oligonucleotide
  Antisense strand to SEQ ID NO: 1799865
uucaggaugaucuagugcc

SEQ ID NO: 1799867 - RNA, 19 nt, Artificial Sequence
  Description of Artificial Sequence: Synthetic oligonucleotide
  Sense strand starting at position 49 of SEQ ID NO: 1563161
guccuuucccaagaucaug

SEQ ID NO: 1799868 - RNA, 19 nt, Artificial Sequence
  Description of Artificial Sequence: Synthetic oligonucleotide
  Antisense strand to SEQ ID NO: 1799867
caugaucuugggaaaggac

SEQ ID NO: 1799869 - RNA, 19 nt, Artificial Sequence
  Description of Artificial Sequence: Synthetic oligonucleotide
  Sense strand starting at position 57 of SEQ ID NO: 1563161
ccaagaucaugacuauguu

SEQ ID NO: 1799870 - RNA, 19 nt, Artificial Sequence
  Description of Artificial Sequence: Synthetic oligonucleotide
  Antisense strand to SEQ ID NO: 1799869
aacauagucaugaucuugg

SEQ ID NO: 1799871 - RNA, 19 nt, Artificial Sequence
  Description of Artificial Sequence: Synthetic oligonucleotide
  Sense strand starting at position 106 of SEQ ID NO: 1563161
aaaugauugguggagcagu

SEQ ID NO: 1799872 - RNA, 19 nt, Artificial Sequence
  Description of Artificial Sequence: Synthetic oligonucleotide
  Antisense strand to SEQ ID NO: 1799871
acugcuccaccaaucauuu

SEQ ID NO: 1799873 - RNA, 19 nt, Artificial Sequence
  Description of Artificial Sequence: Synthetic oligonucleotide
  Sense strand starting at position 145 of SEQ ID NO: 1563161
aggagacucaagugcuaga

SEQ ID NO: 1799874 - RNA, 19 nt, Artificial Sequence
  Description of Artificial Sequence: Synthetic oligonucleotide
  Antisense strand to SEQ ID NO: 1799873
ucuagcacuugagucuccu

SEQ ID NO: 1799875 - RNA, 19 nt, Artificial Sequence
  Description of Artificial Sequence: Synthetic oligonucleotide
  Sense strand starting at position 380 of SEQ ID NO: 1563161
accggaugcccuuaagaac

SEQ ID NO: 1799876 - RNA, 19 nt, Artificial Sequence
  Description of Artificial Sequence: Synthetic oligonucleotide
  Antisense strand to SEQ ID NO: 1799875
guucuuaagggcauccggu

SEQ ID NO: 1799877 - RNA, 19 nt, Artificial Sequence
  Description of Artificial Sequence: Synthetic oligonucleotide
  Sense strand starting at position 727 of SEQ ID NO: 1563161
ggcuaagucagagaggcau

SEQ ID NO: 1799878 - RNA, 19 nt, Artificial Sequence
  Description of Artificial Sequence: Synthetic oligonucleotide
  Antisense strand to SEQ ID NO: 1799877
augccucucugacuuagcc

SEQ ID NO: 1799879 - RNA, 19 nt, Artificial Sequence
  Description of Artificial Sequence: Synthetic oligonucleotide
  Sense strand starting at position 790 of SEQ ID NO: 1563161
aaggucuccagguggagaa

SEQ ID NO: 1799880 - RNA, 19 nt, Artificial Sequence
  Description of Artificial Sequence: Synthetic oligonucleotide
  Antisense strand to SEQ ID NO: 1799879
uucuccaccuggagaccuu

SEQ ID NO: 1799881 - RNA, 19 nt, Artificial Sequence
  Description of Artificial Sequence: Synthetic oligonucleotide
  Sense strand starting at position 829 of SEQ ID NO: 1563161
ugaacuguuggaggauuau

SEQ ID NO: 1799882 - RNA, 19 nt, Artificial Sequence
  Description of Artificial Sequence: Synthetic oligonucleotide
  Antisense strand to SEQ ID NO: 1799881
auaauccuccaacaguuca

SEQ ID NO: 1799883 - RNA, 19 nt, Artificial Sequence
  Description of Artificial Sequence: Synthetic oligonucleotide
  Sense strand starting at position 838 of SEQ ID NO: 1563161
ggaggauuauacuaaacac

SEQ ID NO: 1799884 - RNA, 19 nt, Artificial Sequence
  Description of Artificial Sequence: Synthetic oligonucleotide
  Antisense strand to SEQ ID NO: 1799883
guguuuaguauaauccucc

SEQ ID NO: 1799885 - RNA, 19 nt, Artificial Sequence
  Description of Artificial Sequence: Synthetic oligonucleotide
  Sense strand starting at position 885 of SEQ ID NO: 1563161
agagaagagcucuguuaac

SEQ ID NO: 1799886 - RNA, 19 nt, Artificial Sequence
  Description of Artificial Sequence: Synthetic oligonucleotide
  Antisense strand to SEQ ID NO: 1799885
guuaacagagcucuucucu

SEQ ID NO: 1799887 - RNA, 19 nt, Artificial Sequence
  Description of Artificial Sequence: Synthetic oligonucleotide
  Sense strand starting at position 945 of SEQ ID NO: 1563161
agcugucucuccuugacaa

SEQ ID NO: 1799888 - RNA, 19 nt, Artificial Sequence
  Description of Artificial Sequence: Synthetic oligonucleotide
  Antisense strand to SEQ ID NO: 1799887
uugucaaggagagacagcu

SEQ ID NO: 1799889 - RNA, 19 nt, Artificial Sequence
  Description of Artificial Sequence: Synthetic oligonucleotide
  Sense strand starting at position 1286 of SEQ ID NO: 1563161
ugggauguuccugggcaca

SEQ ID NO: 1799890 - RNA, 19 nt, Artificial Sequence
  Description of Artificial Sequence: Synthetic oligonucleotide
  Antisense strand to SEQ ID NO: 1799889
ugugcccaggaacauccca

SEQ ID NO: 1799891 - RNA, 19 nt, Artificial Sequence
  Description of Artificial Sequence: Synthetic oligonucleotide
  Sense strand starting at position 1288 of SEQ ID NO: 1563161
ggauguuccugggcacaua

SEQ ID NO: 1799892 - RNA, 19 nt, Artificial Sequence
  Description of Artificial Sequence: Synthetic oligonucleotide
  Antisense strand to SEQ ID NO: 1799891
uaugugcccaggaacaucc

SEQ ID NO: 1799893 - RNA, 19 nt, Artificial Sequence
  Description of Artificial Sequence: Synthetic oligonucleotide
  Sense strand starting at position 1289 of SEQ ID NO: 1563161
gauguuccugggcacauaa

SEQ ID NO: 1799894 - RNA, 19 nt, Artificial Sequence
  Description of Artificial Sequence: Synthetic oligonucleotide
  Antisense strand to SEQ ID NO: 1799893
uuaugugcccaggaacauc

SEQ ID NO: 1799895 - RNA, 19 nt, Artificial Sequence
  Description of Artificial Sequence: Synthetic oligonucleotide
  Sense strand starting at position 2037 of SEQ ID NO: 1563161
agcggaaaguccuuuccaa

SEQ ID NO: 1799896 - RNA, 19 nt, Artificial Sequence
  Description of Artificial Sequence: Synthetic oligonucleotide
  Antisense strand to SEQ ID NO: 1799895
uuggaaaggacuuuccgcu

SEQ ID NO: 1799897 - RNA, 19 nt, Artificial Sequence
  Description of Artificial Sequence: Synthetic oligonucleotide
  Sense strand starting at position 2071 of SEQ ID NO: 1563161
ugugccaaucuccagaaua

SEQ ID NO: 1799898 - RNA, 19 nt, Artificial Sequence
  Description of Artificial Sequence: Synthetic oligonucleotide
  Antisense strand to SEQ ID NO: 1799897
uauucuggagauuggcaca

SEQ ID NO: 1799899 - RNA, 19 nt, Artificial Sequence
  Description of Artificial Sequence: Synthetic oligonucleotide
  Sense strand starting at position 2246 of SEQ ID NO: 1563161
ccauuaguaucuccaaguu

SEQ ID NO: 1799900 - RNA, 19 nt, Artificial Sequence
  Description of Artificial Sequence: Synthetic oligonucleotide
  Antisense strand to SEQ ID NO: 1799899
aacuuggagauacuaaugg

SEQ ID NO: 1799901 - RNA, 19 nt, Artificial Sequence
  Description of Artificial Sequence: Synthetic oligonucleotide
  Sense strand starting at position 2447 of SEQ ID NO: 1563161
uagcuuguugauggacgaa

SEQ ID NO: 1799902 - RNA, 19 nt, Artificial Sequence
  Description of Artificial Sequence: Synthetic oligonucleotide
  Antisense strand to SEQ ID NO: 1799901
uucguccaucaacaagcua

SEQ ID NO: 1799903 - RNA, 19 nt, Artificial Sequence
  Description of Artificial Sequence: Synthetic oligonucleotide
  Sense strand starting at position 2490 of SEQ ID NO: 1563161
gaaugaguugaaugcacau

SEQ ID NO: 1799904 - RNA, 19 nt, Artificial Sequence
  Description of Artificial Sequence: Synthetic oligonucleotide
  Antisense strand to SEQ ID NO: 1799903
augugcauucaacucauuc

SEQ ID NO: 1799905 - RNA, 19 nt, Artificial Sequence
  Description of Artificial Sequence: Synthetic oligonucleotide
  Sense strand starting at position 2655 of SEQ ID NO: 1563161
acaguaacucuaugagaug

SEQ ID NO: 1799906 - RNA, 19 nt, Artificial Sequence
  Description of Artificial Sequence: Synthetic oligonucleotide
  Antisense strand to SEQ ID NO: 1799905
caucucauagaguuacugu

SEQ ID NO: 1799907 - RNA, 19 nt, Artificial Sequence
  Description of Artificial Sequence: Synthetic oligonucleotide
  Sense strand starting at position 2831 of SEQ ID NO: 1563161
agagguugcaaccaaagua

SEQ ID NO: 1799908 - RNA, 19 nt, Artificial Sequence
  Description of Artificial Sequence: Synthetic oligonucleotide
  Antisense strand to SEQ ID NO: 1799907
uacuuugguugcaaccucu

SEQ ID NO: 1799909 - RNA, 19 nt, Artificial Sequence
  Description of Artificial Sequence: Synthetic oligonucleotide
  Sense strand starting at position 2853 of SEQ ID NO: 1563161
ggaguuacaguaugauauu

SEQ ID NO: 1799910 - RNA, 19 nt, Artificial Sequence
  Description of Artificial Sequence: Synthetic oligonucleotide
  Antisense strand to SEQ ID NO: 1799909
aauaucauacuguaacucc

SEQ ID NO: 1799911 - RNA, 19 nt, Artificial Sequence
  Description of Artificial Sequence: Synthetic oligonucleotide
  Sense strand starting at position 2886 of SEQ ID NO: 1563161
ggagauaauugacaugaag

SEQ ID NO: 1799912 - RNA, 19 nt, Artificial Sequence
  Description of Artificial Sequence: Synthetic oligonucleotide
  Antisense strand to SEQ ID NO: 1799911
cuucaugucaauuaucucc

SEQ ID NO: 1799913 - RNA, 19 nt, Artificial Sequence
  Description of Artificial Sequence: Synthetic oligonucleotide
  Sense strand starting at position 2903 of SEQ ID NO: 1563161
agacaucacuggccuguua

SEQ ID NO: 1799914 - RNA, 19 nt, Artificial Sequence
  Description of Artificial Sequence: Synthetic oligonucleotide
  Antisense strand to SEQ ID NO: 1799913
uaacaggccagugaugucu

SEQ ID NO: 1799915 - RNA, 19 nt, Artificial Sequence
  Description of Artificial Sequence: Synthetic oligonucleotide
  Sense strand starting at position 2905 of SEQ ID NO: 1563161
acaucacuggccuguuaca

SEQ ID NO: 1799916 - RNA, 19 nt, Artificial Sequence
  Description of Artificial Sequence: Synthetic oligonucleotide
  Antisense strand to SEQ ID NO: 1799915
uguaacaggccagugaugu

SEQ ID NO: 1799917 - RNA, 19 nt, Artificial Sequence
  Description of Artificial Sequence: Synthetic oligonucleotide
  Sense strand starting at position 2925 of SEQ ID NO: 1563161
guacuuuauuuguccucuu

SEQ ID NO: 1799918 - RNA, 19 nt, Artificial Sequence
  Description of Artificial Sequence: Synthetic oligonucleotide
  Antisense strand to SEQ ID NO: 1799917
aagaggacaaauaaaguac

SEQ ID NO: 1799919 - RNA, 19 nt, Artificial Sequence
  Description of Artificial Sequence: Synthetic oligonucleotide
  Sense strand starting at position 3035 of SEQ ID NO: 1563161
caucaugggagguguacaa

SEQ ID NO: 1799920 - RNA, 19 nt, Artificial Sequence
  Description of Artificial Sequence: Synthetic oligonucleotide
  Antisense strand to SEQ ID NO: 1799919
uuguacaccucccaugaug

SEQ ID NO: 1799921 - RNA, 19 nt, Artificial Sequence
  Description of Artificial Sequence: Synthetic oligonucleotide
  Sense strand starting at position 3348 of SEQ ID NO: 1563161
uuccuauagcacuacgauu

SEQ ID NO: 1799922 - RNA, 19 nt, Artificial Sequence
  Description of Artificial Sequence: Synthetic oligonucleotide
  Antisense strand to SEQ ID NO: 1799921
aaucguagugcuauaggaa

SEQ ID NO: 1799923 - RNA, 19 nt, Artificial Sequence
  Description of Artificial Sequence: Synthetic oligonucleotide
  Sense strand starting at position 3401 of SEQ ID NO: 1563161
cuggauguuacgggcugaa

SEQ ID NO: 1799924 - RNA, 19 nt, Artificial Sequence
  Description of Artificial Sequence: Synthetic oligonucleotide
  Antisense strand to SEQ ID NO: 1799923
uucagcccguaacauccag

SEQ ID NO: 1799925 - RNA, 19 nt, Artificial Sequence
  Description of Artificial Sequence: Synthetic oligonucleotide
  Sense strand starting at position 3540 of SEQ ID NO: 1563161
cugauaccuuguucucaga

SEQ ID NO: 1799926 - RNA, 19 nt, Artificial Sequence
  Description of Artificial Sequence: Synthetic oligonucleotide
  Antisense strand to SEQ ID NO: 1799925
ucugagaacaagguaucag

SEQ ID NO: 1799927 - RNA, 19 nt, Artificial Sequence
  Description of Artificial Sequence: Synthetic oligonucleotide
  Sense strand starting at position 3569 of SEQ ID NO: 1563161
ccaggauuauaagaaacuc

SEQ ID NO: 1799928 - RNA, 19 nt, Artificial Sequence
  Description of Artificial Sequence: Synthetic oligonucleotide
  Antisense strand to SEQ ID NO: 1799927
gaguuucuuauaauccugg

SEQ ID NO: 1799929 - RNA, 19 nt, Artificial Sequence
  Description of Artificial Sequence: Synthetic oligonucleotide
  Sense strand starting at position 3689 of SEQ ID NO: 1563161
cuuaaauggcauuaugugu

SEQ ID NO: 1799930 - RNA, 19 nt, Artificial Sequence
  Description of Artificial Sequence: Synthetic oligonucleotide
  Antisense strand to SEQ ID NO: 1799929
acacauaaugccauuuaag

SEQ ID NO: 1799931 - RNA, 19 nt, Artificial Sequence
  Description of Artificial Sequence: Synthetic oligonucleotide
  Sense strand starting at position 3851 of SEQ ID NO: 1563161
ugugacagaugcucaggau

SEQ ID NO: 1799932 - RNA, 19 nt, Artificial Sequence
  Description of Artificial Sequence: Synthetic oligonucleotide
  Antisense strand to SEQ ID NO: 1799931
auccugagcaucugucaca

SEQ ID NO: 1799933 - RNA, 19 nt, Artificial Sequence
  Description of Artificial Sequence: Synthetic oligonucleotide
  Sense strand starting at position 3873 of SEQ ID NO: 1563161
agacaaaguuccucaugga

SEQ ID NO: 1799934 - RNA, 19 nt, Artificial Sequence
  Description of Artificial Sequence: Synthetic oligonucleotide
  Antisense strand to SEQ ID NO: 1799933
uccaugaggaacuuugucu

SEQ ID NO: 1799935 - RNA, 19 nt, Artificial Sequence
  Description of Artificial Sequence: Synthetic oligonucleotide
  Sense strand starting at position 3957 of SEQ ID NO: 1563161
auuguaauaugugcucuga

SEQ ID NO: 1799936 - RNA, 19 nt, Artificial Sequence
  Description of Artificial Sequence: Synthetic oligonucleotide
  Antisense strand to SEQ ID NO: 1799935
ucagagcacauauuacaau

SEQ ID NO: 1799937 - RNA, 19 nt, Artificial Sequence
  Description of Artificial Sequence: Synthetic oligonucleotide
  Sense strand starting at position 3959 of SEQ ID NO: 1563161
uguaauaugugcucugaag

SEQ ID NO: 1799938 - RNA, 19 nt, Artificial Sequence
  Description of Artificial Sequence: Synthetic oligonucleotide
  Antisense strand to SEQ ID NO: 1799937
cuucagagcacauauuaca

SEQ ID NO: 1799939 - RNA, 19 nt, Artificial Sequence
  Description of Artificial Sequence: Synthetic oligonucleotide
  Sense strand starting at position 3961 of SEQ ID NO: 1563161
uaauaugugcucugaagga

SEQ ID NO: 1799940 - RNA, 19 nt, Artificial Sequence
  Description of Artificial Sequence: Synthetic oligonucleotide
  Antisense strand to SEQ ID NO: 1799939
uccuucagagcacauauua

SEQ ID NO: 1799941 - RNA, 19 nt, Artificial Sequence
  Description of Artificial Sequence: Synthetic oligonucleotide
  Sense strand starting at position 3965 of SEQ ID NO: 1563161
augugcucugaaggauaua

SEQ ID NO: 1799942 - RNA, 19 nt, Artificial Sequence
  Description of Artificial Sequence: Synthetic oligonucleotide
  Antisense strand to SEQ ID NO: 1799941
uauauccuucagagcacau

SEQ ID NO: 1799943 - RNA, 19 nt, Artificial Sequence
  Description of Artificial Sequence: Synthetic oligonucleotide
  Sense strand starting at position 3966 of SEQ ID NO: 1563161
ugugcucugaaggauauaa

SEQ ID NO: 1799944 - RNA, 19 nt, Artificial Sequence
  Description of Artificial Sequence: Synthetic oligonucleotide
  Antisense strand to SEQ ID NO: 1799943
uuauauccuucagagcaca

SEQ ID NO: 1799945 - RNA, 19 nt, Artificial Sequence
  Description of Artificial Sequence: Synthetic oligonucleotide
  Sense strand starting at position 120 of SEQ ID NO: 1563162
ggucaaauuuagcaccaaa

SEQ ID NO: 1799946 - RNA, 19 nt, Artificial Sequence
  Description of Artificial Sequence: Synthetic oligonucleotide
  Antisense strand to SEQ ID NO: 1799945
uuuggugcuaaauuugacc

SEQ ID NO: 1799947 - RNA, 19 nt, Artificial Sequence
  Description of Artificial Sequence: Synthetic oligonucleotide
  Sense strand starting at position 175 of SEQ ID NO: 1563162
caguuuguuaugggaaugu

SEQ ID NO: 1799948 - RNA, 19 nt, Artificial Sequence
  Description of Artificial Sequence: Synthetic oligonucleotide
  Antisense strand to SEQ ID NO: 1799947
acauucccauaacaaacug

SEQ ID NO: 1799949 - RNA, 19 nt, Artificial Sequence
  Description of Artificial Sequence: Synthetic oligonucleotide
  Sense strand starting at position 346 of SEQ ID NO: 1563162
uauuauucccaagguggau

SEQ ID NO: 1799950 - RNA, 19 nt, Artificial Sequence
  Description of Artificial Sequence: Synthetic oligonucleotide
  Antisense strand to SEQ ID NO: 1799949
auccaccuugggaauaaua

SEQ ID NO: 1799951 - RNA, 19 nt, Artificial Sequence
  Description of Artificial Sequence: Synthetic oligonucleotide
  Sense strand starting at position 567 of SEQ ID NO: 1563162
aucuuaaagcuuuaagguu

SEQ ID NO: 1799952 - RNA, 19 nt, Artificial Sequence
  Description of Artificial Sequence: Synthetic oligonucleotide
  Antisense strand to SEQ ID NO: 1799951
aaccuuaaagcuuuaagau

SEQ ID NO: 1799953 - RNA, 19 nt, Artificial Sequence
  Description of Artificial Sequence: Synthetic oligonucleotide
  Sense strand starting at position 915 of SEQ ID NO: 1563162
ggaguuuaaagguagucuu

SEQ ID NO: 1799954 - RNA, 19 nt, Artificial Sequence
  Description of Artificial Sequence: Synthetic oligonucleotide
  Antisense strand to SEQ ID NO: 1799953
aagacuaccuuuaaacucc

SEQ ID NO: 1799955 - RNA, 19 nt, Artificial Sequence
  Description of Artificial Sequence: Synthetic oligonucleotide
  Sense strand starting at position 925 of SEQ ID NO: 1563162
gguagucuucaaggaaaug

SEQ ID NO: 1799956 - RNA, 19 nt, Artificial Sequence
  Description of Artificial Sequence: Synthetic oligonucleotide
  Antisense strand to SEQ ID NO: 1799955
cauuuccuugaagacuacc

SEQ ID NO: 1799957 - RNA, 19 nt, Artificial Sequence
  Description of Artificial Sequence: Synthetic oligonucleotide
  Sense strand starting at position 996 of SEQ ID NO: 1563162
ccaugaacgccacauagau

SEQ ID NO: 1799958 - RNA, 19 nt, Artificial Sequence
  Description of Artificial Sequence: Synthetic oligonucleotide
  Antisense strand to SEQ ID NO: 1799957
aucuauguggcguucaugg

SEQ ID NO: 1799959 - RNA, 19 nt, Artificial Sequence
  Description of Artificial Sequence: Synthetic oligonucleotide
  Sense strand starting at position 1242 of SEQ ID NO: 1563162
cugucucugucugugauuu

SEQ ID NO: 1799960 - RNA, 19 nt, Artificial Sequence
  Description of Artificial Sequence: Synthetic oligonucleotide
  Antisense strand to SEQ ID NO: 1799959
aaaucacagacagagacag

SEQ ID NO: 1799961 - RNA, 19 nt, Artificial Sequence
  Description of Artificial Sequence: Synthetic oligonucleotide
  Sense strand starting at position 1273 of SEQ ID NO: 1563162
gguggcucucgggaugaaa

SEQ ID NO: 1799962 - RNA, 19 nt, Artificial Sequence
  Description of Artificial Sequence: Synthetic oligonucleotide
  Antisense strand to SEQ ID NO: 1799961
uuucaucccgagagccacc

SEQ ID NO: 1799963 - RNA, 19 nt, Artificial Sequence
  Description of Artificial Sequence: Synthetic oligonucleotide
  Sense strand starting at position 1275 of SEQ ID NO: 1563162
uggcucucgggaugaaauc

SEQ ID NO: 1799964 - RNA, 19 nt, Artificial Sequence
  Description of Artificial Sequence: Synthetic oligonucleotide
  Antisense strand to SEQ ID NO: 1799963
gauuucaucccgagagcca

SEQ ID NO: 1799965 - RNA, 19 nt, Artificial Sequence
  Description of Artificial Sequence: Synthetic oligonucleotide
  Sense strand starting at position 1286 of SEQ ID NO: 1563162
augaaaucaaagcgagagu

SEQ ID NO: 1799966 - RNA, 19 nt, Artificial Sequence
  Description of Artificial Sequence: Synthetic oligonucleotide
  Antisense strand to SEQ ID NO: 1799965
acucucgcuuugauuucau

SEQ ID NO: 1799967 - RNA, 19 nt, Artificial Sequence
  Description of Artificial Sequence: Synthetic oligonucleotide
  Sense strand starting at position 1287 of SEQ ID NO: 1563162
ugaaaucaaagcgagaguu

SEQ ID NO: 1799968 - RNA, 19 nt, Artificial Sequence
  Description of Artificial Sequence: Synthetic oligonucleotide
  Antisense strand to SEQ ID NO: 1799967
aacucucgcuuugauuuca

SEQ ID NO: 1799969 - RNA, 19 nt, Artificial Sequence
  Description of Artificial Sequence: Synthetic oligonucleotide
  Sense strand starting at position 1437 of SEQ ID NO: 1563162
ugcagaacacuguaguguu

SEQ ID NO: 1799970 - RNA, 19 nt, Artificial Sequence
  Description of Artificial Sequence: Synthetic oligonucleotide
  Antisense strand to SEQ ID NO: 1799969
aacacuacaguguucugca

SEQ ID NO: 1799971 - RNA, 19 nt, Artificial Sequence
  Description of Artificial Sequence: Synthetic oligonucleotide
  Sense strand starting at position 1498 of SEQ ID NO: 1563162
cugucagacuguccauaca

SEQ ID NO: 1799972 - RNA, 19 nt, Artificial Sequence
  Description of Artificial Sequence: Synthetic oligonucleotide
  Antisense strand to SEQ ID NO: 1799971
uguauggacagucugacag

SEQ ID NO: 1799973 - RNA, 19 nt, Artificial Sequence
  Description of Artificial Sequence: Synthetic oligonucleotide
  Sense strand starting at position 1542 of SEQ ID NO: 1563162
gaaguagggugguuagaga

SEQ ID NO: 1799974 - RNA, 19 nt, Artificial Sequence
  Description of Artificial Sequence: Synthetic oligonucleotide
  Antisense strand to SEQ ID NO: 1799973
ucucuaaccacccuacuuc

SEQ ID NO: 1799975 - RNA, 19 nt, Artificial Sequence
  Description of Artificial Sequence: Synthetic oligonucleotide
  Sense strand starting at position 1655 of SEQ ID NO: 1563162
uugucccuagcugagaaau

SEQ ID NO: 1799976 - RNA, 19 nt, Artificial Sequence
  Description of Artificial Sequence: Synthetic oligonucleotide
  Antisense strand to SEQ ID NO: 1799975
auuucucagcuagggacaa

SEQ ID NO: 1799977 - RNA, 19 nt, Artificial Sequence
  Description of Artificial Sequence: Synthetic oligonucleotide
  Sense strand starting at position 2375 of SEQ ID NO: 1563162
gagggaagauaaugaagaa

SEQ ID NO: 1799978 - RNA, 19 nt, Artificial Sequence
  Description of Artificial Sequence: Synthetic oligonucleotide
  Antisense strand to SEQ ID NO: 1799977
uucuucauuaucuucccuc

SEQ ID NO: 1799979 - RNA, 19 nt, Artificial Sequence
  Description of Artificial Sequence: Synthetic oligonucleotide
  Sense strand starting at position 2419 of SEQ ID NO: 1563162
aaaggauggugaggagaaa

SEQ ID NO: 1799980 - RNA, 19 nt, Artificial Sequence
  Description of Artificial Sequence: Synthetic oligonucleotide
  Antisense strand to SEQ ID NO: 1799979
uuucuccucaccauccuuu

SEQ ID NO: 1799981 - RNA, 19 nt, Artificial Sequence
  Description of Artificial Sequence: Synthetic oligonucleotide
  Sense strand starting at position 2471 of SEQ ID NO: 1563162
ggagaaugcaugugccuag

SEQ ID NO: 1799982 - RNA, 19 nt, Artificial Sequence
  Description of Artificial Sequence: Synthetic oligonucleotide
  Antisense strand to SEQ ID NO: 1799981
cuaggcacaugcauucucc

SEQ ID NO: 1799983 - RNA, 19 nt, Artificial Sequence
  Description of Artificial Sequence: Synthetic oligonucleotide
  Sense strand starting at position 2537 of SEQ ID NO: 1563162
uuggccacugccuaagaau

SEQ ID NO: 1799984 - RNA, 19 nt, Artificial Sequence
  Description of Artificial Sequence: Synthetic oligonucleotide
  Antisense strand to SEQ ID NO: 1799983
auucuuaggcaguggccaa

SEQ ID NO: 1799985 - RNA, 19 nt, Artificial Sequence
  Description of Artificial Sequence: Synthetic oligonucleotide
  Sense strand starting at position 2594 of SEQ ID NO: 1563162
accaguguuguggacagaa

SEQ ID NO: 1799986 - RNA, 19 nt, Artificial Sequence
  Description of Artificial Sequence: Synthetic oligonucleotide
  Antisense strand to SEQ ID NO: 1799985
uucuguccacaacacuggu

SEQ ID NO: 1799987 - RNA, 19 nt, Artificial Sequence
  Description of Artificial Sequence: Synthetic oligonucleotide
  Sense strand starting at position 2596 of SEQ ID NO: 1563162
caguguuguggacagaauc

SEQ ID NO: 1799988 - RNA, 19 nt, Artificial Sequence
  Description of Artificial Sequence: Synthetic oligonucleotide
  Antisense strand to SEQ ID NO: 1799987
gauucuguccacaacacug

SEQ ID NO: 1799989 - RNA, 19 nt, Artificial Sequence
  Description of Artificial Sequence: Synthetic oligonucleotide
  Sense strand starting at position 2650 of SEQ ID NO: 1563162
cuauuuggcuuucccugau

SEQ ID NO: 1799990 - RNA, 19 nt, Artificial Sequence
  Description of Artificial Sequence: Synthetic oligonucleotide
  Antisense strand to SEQ ID NO: 1799989
aucagggaaagccaaauag

SEQ ID NO: 1799991 - RNA, 19 nt, Artificial Sequence
  Description of Artificial Sequence: Synthetic oligonucleotide
  Sense strand starting at position 2654 of SEQ ID NO: 1563162
uuggcuuucccugauacca

SEQ ID NO: 1799992 - RNA, 19 nt, Artificial Sequence
  Description of Artificial Sequence: Synthetic oligonucleotide
  Antisense strand to SEQ ID NO: 1799991
ugguaucagggaaagccaa

SEQ ID NO: 1799993 - RNA, 19 nt, Artificial Sequence
  Description of Artificial Sequence: Synthetic oligonucleotide
  Sense strand starting at position 2675 of SEQ ID NO: 1563162
gcccuuaccuggucagauu

SEQ ID NO: 1799994 - RNA, 19 nt, Artificial Sequence
  Description of Artificial Sequence: Synthetic oligonucleotide
  Antisense strand to SEQ ID NO: 1799993
aaucugaccagguaagggc

SEQ ID NO: 1799995 - RNA, 19 nt, Artificial Sequence
  Description of Artificial Sequence: Synthetic oligonucleotide
  Sense strand starting at position 2745 of SEQ ID NO: 1563162
ccagcauucuggguacuau

SEQ ID NO: 1799996 - RNA, 19 nt, Artificial Sequence
  Description of Artificial Sequence: Synthetic oligonucleotide
  Antisense strand to SEQ ID NO: 1799995
auaguacccagaaugcugg

SEQ ID NO: 1799997 - RNA, 19 nt, Artificial Sequence
  Description of Artificial Sequence: Synthetic oligonucleotide
  Sense strand starting at position 2773 of SEQ ID NO: 1563162
ccagcauaggguuaaacau

SEQ ID NO: 1799998 - RNA, 19 nt, Artificial Sequence
  Description of Artificial Sequence: Synthetic oligonucleotide
  Antisense strand to SEQ ID NO: 1799997
auguuuaacccuaugcugg

SEQ ID NO: 1799999 - RNA, 19 nt, Artificial Sequence
  Description of Artificial Sequence: Synthetic oligonucleotide
  Sense strand starting at position 2781 of SEQ ID NO: 1563162
ggguuaaacauucgccaug

SEQ ID NO: 1800000 - RNA, 19 nt, Artificial Sequence
  Description of Artificial Sequence: Synthetic oligonucleotide
  Antisense strand to SEQ ID NO: 1799999
cauggcgaauguuuaaccc

SEQ ID NO: 1800001 - RNA, 19 nt, Artificial Sequence
  Description of Artificial Sequence: Synthetic oligonucleotide
  Sense strand starting at position 2783 of SEQ ID NO: 1563162
guuaaacauucgccaugga

SEQ ID NO: 1800002 - RNA, 19 nt, Artificial Sequence
  Description of Artificial Sequence: Synthetic oligonucleotide
  Antisense strand to SEQ ID NO: 1800001
uccauggcgaauguuuaac

SEQ ID NO: 1800003 - RNA, 19 nt, Artificial Sequence
  Description of Artificial Sequence: Synthetic oligonucleotide
  Sense strand starting at position 2784 of SEQ ID NO: 1563162
uuaaacauucgccauggaa

SEQ ID NO: 1800004 - RNA, 19 nt, Artificial Sequence
  Description of Artificial Sequence: Synthetic oligonucleotide
  Antisense strand to SEQ ID NO: 1800003
uuccauggcgaauguuuaa

SEQ ID NO: 1800005 - RNA, 19 nt, Artificial Sequence
  Description of Artificial Sequence: Synthetic oligonucleotide
  Sense strand starting at position 2930 of SEQ ID NO: 1563162
ucaaacuugcuguaugacu

SEQ ID NO: 1800006 - RNA, 19 nt, Artificial Sequence
  Description of Artificial Sequence: Synthetic oligonucleotide
  Antisense strand to SEQ ID NO: 1800005
agucauacagcaaguuuga

SEQ ID NO: 1800007 - RNA, 19 nt, Artificial Sequence
  Description of Artificial Sequence: Synthetic oligonucleotide
  Sense strand starting at position 3146 of SEQ ID NO: 1563162
auaggauuauaugacugaa

SEQ ID NO: 1800008 - RNA, 19 nt, Artificial Sequence
  Description of Artificial Sequence: Synthetic oligonucleotide
  Antisense strand to SEQ ID NO: 1800007
uucagucauauaauccuau

SEQ ID NO: 1800009 - RNA, 19 nt, Artificial Sequence
  Description of Artificial Sequence: Synthetic oligonucleotide
  Sense strand starting at position 3512 of SEQ ID NO: 1563162
aauguacuggccuguaaug

SEQ ID NO: 1800010 - RNA, 19 nt, Artificial Sequence
  Description of Artificial Sequence: Synthetic oligonucleotide
  Antisense strand to SEQ ID NO: 1800009
cauuacaggccaguacauu

SEQ ID NO: 1800011 - RNA, 19 nt, Artificial Sequence
  Description of Artificial Sequence: Synthetic oligonucleotide
  Sense strand starting at position 3519 of SEQ ID NO: 1563162
uggccuguaaugugaaaug

SEQ ID NO: 1800012 - RNA, 19 nt, Artificial Sequence
  Description of Artificial Sequence: Synthetic oligonucleotide
  Antisense strand to SEQ ID NO: 1800011
cauuucacauuacaggcca

SEQ ID NO: 1800013 - RNA, 19 nt, Artificial Sequence
  Description of Artificial Sequence: Synthetic oligonucleotide
  Sense strand starting at position 3582 of SEQ ID NO: 1563162
cuucuagauuauguugaga

SEQ ID NO: 1800014 - RNA, 19 nt, Artificial Sequence
  Description of Artificial Sequence: Synthetic oligonucleotide
  Antisense strand to SEQ ID NO: 1800013
ucucaacauaaucuagaag

SEQ ID NO: 1800015 - RNA, 19 nt, Artificial Sequence
  Description of Artificial Sequence: Synthetic oligonucleotide
  Sense strand starting at position 3646 of SEQ ID NO: 1563162
ucuuucuccuagucuuuga

SEQ ID NO: 1800016 - RNA, 19 nt, Artificial Sequence
  Description of Artificial Sequence: Synthetic oligonucleotide
  Antisense strand to SEQ ID NO: 1800015
ucaaagacuaggagaaaga

SEQ ID NO: 1800017 - RNA, 19 nt, Artificial Sequence
  Description of Artificial Sequence: Synthetic oligonucleotide
  Sense strand starting at position 3649 of SEQ ID NO: 1563162
uucuccuagucuuugaaag

SEQ ID NO: 1800018 - RNA, 19 nt, Artificial Sequence
  Description of Artificial Sequence: Synthetic oligonucleotide
  Antisense strand to SEQ ID NO: 1800017
cuuucaaagacuaggagaa

SEQ ID NO: 1800019 - RNA, 19 nt, Artificial Sequence
  Description of Artificial Sequence: Synthetic oligonucleotide
  Sense strand starting at position 3650 of SEQ ID NO: 1563162
ucuccuagucuuugaaagu

SEQ ID NO: 1800020 - RNA, 19 nt, Artificial Sequence
  Description of Artificial Sequence: Synthetic oligonucleotide
  Antisense strand to SEQ ID NO: 1800019
acuuucaaagacuaggaga

SEQ ID NO: 1800021 - RNA, 19 nt, Artificial Sequence
  Description of Artificial Sequence: Synthetic oligonucleotide
  Sense strand starting at position 3910 of SEQ ID NO: 1563162
ccacaugaccuguauguuu

SEQ ID NO: 1800022 - RNA, 19 nt, Artificial Sequence
  Description of Artificial Sequence: Synthetic oligonucleotide
  Antisense strand to SEQ ID NO: 1800021
aaacauacaggucaugugg

SEQ ID NO: 1800023 - RNA, 19 nt, Artificial Sequence
  Description of Artificial Sequence: Synthetic oligonucleotide
  Sense strand starting at position 3912 of SEQ ID NO: 1563162
acaugaccuguauguuuau

SEQ ID NO: 1800024 - RNA, 19 nt, Artificial Sequence
  Description of Artificial Sequence: Synthetic oligonucleotide
  Antisense strand to SEQ ID NO: 1800023
auaaacauacaggucaugu

SEQ ID NO: 1800025 - RNA, 19 nt, Artificial Sequence
  Description of Artificial Sequence: Synthetic oligonucleotide
  Sense strand starting at position 143 of SEQ ID NO: 1563163
aggaacugguuauucucaa

SEQ ID NO: 1800026 - RNA, 19 nt, Artificial Sequence
  Description of Artificial Sequence: Synthetic oligonucleotide
  Antisense strand to SEQ ID NO: 1800025
uugagaauaaccaguuccu

SEQ ID NO: 1800027 - RNA, 19 nt, Artificial Sequence
  Description of Artificial Sequence: Synthetic oligonucleotide
  Sense strand starting at position 144 of SEQ ID NO: 1563163
ggaacugguuauucucaac

SEQ ID NO: 1800028 - RNA, 19 nt, Artificial Sequence
  Description of Artificial Sequence: Synthetic oligonucleotide
  Antisense strand to SEQ ID NO: 1800027
guugagaauaaccaguucc

SEQ ID NO: 1800029 - RNA, 19 nt, Artificial Sequence
  Description of Artificial Sequence: Synthetic oligonucleotide
  Sense strand starting at position 178 of SEQ ID NO: 1563163
ugugcuaaugaguaacuuu

SEQ ID NO: 1800030 - RNA, 19 nt, Artificial Sequence
  Description of Artificial Sequence: Synthetic oligonucleotide
  Antisense strand to SEQ ID NO: 1800029
aaaguuacucauuagcaca

SEQ ID NO: 1800031 - RNA, 19 nt, Artificial Sequence
  Description of Artificial Sequence: Synthetic oligonucleotide
  Sense strand starting at position 208 of SEQ ID NO: 1563163
ggugauuucuuaguauagc

SEQ ID NO: 1800032 - RNA, 19 nt, Artificial Sequence
  Description of Artificial Sequence: Synthetic oligonucleotide
  Antisense strand to SEQ ID NO: 1800031
gcuauacuaagaaaucacc

SEQ ID NO: 1800033 - RNA, 19 nt, Artificial Sequence
  Description of Artificial Sequence: Synthetic oligonucleotide
  Sense strand starting at position 216 of SEQ ID NO: 1563163
cuuaguauagcagacuaca

SEQ ID NO: 1800034 - RNA, 19 nt, Artificial Sequence
  Description of Artificial Sequence: Synthetic oligonucleotide
  Antisense strand to SEQ ID NO: 1800033
uguagucugcuauacuaag

SEQ ID NO: 1800035 - RNA, 19 nt, Artificial Sequence
  Description of Artificial Sequence: Synthetic oligonucleotide
  Sense strand starting at position 278 of SEQ ID NO: 1563163
ccuuguuaagaauauguuu

SEQ ID NO: 1800036 - RNA, 19 nt, Artificial Sequence
  Description of Artificial Sequence: Synthetic oligonucleotide
  Antisense strand to SEQ ID NO: 1800035
aaacauauucuuaacaagg

SEQ ID NO: 1800037 - RNA, 19 nt, Artificial Sequence
  Description of Artificial Sequence: Synthetic oligonucleotide
  Sense strand starting at position 506 of SEQ ID NO: 1563163
gguaucccauccucaaaga

SEQ ID NO: 1800038 - RNA, 19 nt, Artificial Sequence
  Description of Artificial Sequence: Synthetic oligonucleotide
  Antisense strand to SEQ ID NO: 1800037
ucuuugaggaugggauacc

SEQ ID NO: 1800039 - RNA, 19 nt, Artificial Sequence
  Description of Artificial Sequence: Synthetic oligonucleotide
  Sense strand starting at position 519 of SEQ ID NO: 1563163
caaagauugccagggagcu

SEQ ID NO: 1800040 - RNA, 19 nt, Artificial Sequence
  Description of Artificial Sequence: Synthetic oligonucleotide
  Antisense strand to SEQ ID NO: 1800039
agcucccuggcaaucuuug

SEQ ID NO: 1800041 - RNA, 19 nt, Artificial Sequence
  Description of Artificial Sequence: Synthetic oligonucleotide
  Sense strand starting at position 575 of SEQ ID NO: 1563163
uuuggaagugaaugccuaa

SEQ ID NO: 1800042 - RNA, 19 nt, Artificial Sequence
  Description of Artificial Sequence: Synthetic oligonucleotide
  Antisense strand to SEQ ID NO: 1800041
uuaggcauucacuuccaaa

SEQ ID NO: 1800043 - RNA, 19 nt, Artificial Sequence
  Description of Artificial Sequence: Synthetic oligonucleotide
  Sense strand starting at position 578 of SEQ ID NO: 1563163
ggaagugaaugccuaagua

SEQ ID NO: 1800044 - RNA, 19 nt, Artificial Sequence
  Description of Artificial Sequence: Synthetic oligonucleotide
  Antisense strand to SEQ ID NO: 1800043
uacuuaggcauucacuucc

SEQ ID NO: 1800045 - RNA, 19 nt, Artificial Sequence
  Description of Artificial Sequence: Synthetic oligonucleotide
  Sense strand starting at position 879 of SEQ ID NO: 1563163
gggugugagguagguauuu

SEQ ID NO: 1800046 - RNA, 19 nt, Artificial Sequence
  Description of Artificial Sequence: Synthetic oligonucleotide
  Antisense strand to SEQ ID NO: 1800045
aaauaccuaccucacaccc

SEQ ID NO: 1800047 - RNA, 19 nt, Artificial Sequence
  Description of Artificial Sequence: Synthetic oligonucleotide
  Sense strand starting at position 888 of SEQ ID NO: 1563163
guagguauuucauuguggu

SEQ ID NO: 1800048 - RNA, 19 nt, Artificial Sequence
  Description of Artificial Sequence: Synthetic oligonucleotide
  Antisense strand to SEQ ID NO: 1800047
accacaaugaaauaccuac

SEQ ID NO: 1800049 - RNA, 19 nt, Artificial Sequence
  Description of Artificial Sequence: Synthetic oligonucleotide
  Sense strand starting at position 1012 of SEQ ID NO: 1563163
gaggauauuugugaaugug

SEQ ID NO: 1800050 - RNA, 19 nt, Artificial Sequence
  Description of Artificial Sequence: Synthetic oligonucleotide
  Antisense strand to SEQ ID NO: 1800049
cacauucacaaauauccuc

SEQ ID NO: 1800051 - RNA, 19 nt, Artificial Sequence
  Description of Artificial Sequence: Synthetic oligonucleotide
  Sense strand starting at position 1247 of SEQ ID NO: 1563163
uagcuaucugaugagcaca

SEQ ID NO: 1800052 - RNA, 19 nt, Artificial Sequence
  Description of Artificial Sequence: Synthetic oligonucleotide
  Antisense strand to SEQ ID NO: 1800051
ugugcucaucagauagcua

SEQ ID NO: 1800053 - RNA, 19 nt, Artificial Sequence
  Description of Artificial Sequence: Synthetic oligonucleotide
  Sense strand starting at position 1252 of SEQ ID NO: 1563163
aucugaugagcacaguuua

SEQ ID NO: 1800054 - RNA, 19 nt, Artificial Sequence
  Description of Artificial Sequence: Synthetic oligonucleotide
  Antisense strand to SEQ ID NO: 1800053
uaaacugugcucaucagau

SEQ ID NO: 1800055 - RNA, 19 nt, Artificial Sequence
  Description of Artificial Sequence: Synthetic oligonucleotide
  Sense strand starting at position 1275 of SEQ ID NO: 1563163
ccagcuuaucaauggauaa

SEQ ID NO: 1800056 - RNA, 19 nt, Artificial Sequence
  Description of Artificial Sequence: Synthetic oligonucleotide
  Antisense strand to SEQ ID NO: 1800055
uuauccauugauaagcugg

SEQ ID NO: 1800057 - RNA, 19 nt, Artificial Sequence
  Description of Artificial Sequence: Synthetic oligonucleotide
  Sense strand starting at position 1287 of SEQ ID NO: 1563163
uggauaauuuaucaggguu

SEQ ID NO: 1800058 - RNA, 19 nt, Artificial Sequence
  Description of Artificial Sequence: Synthetic oligonucleotide
  Antisense strand to SEQ ID NO: 1800057
aacccugauaaauuaucca

SEQ ID NO: 1800059 - RNA, 19 nt, Artificial Sequence
  Description of Artificial Sequence: Synthetic oligonucleotide
  Sense strand starting at position 1299 of SEQ ID NO: 1563163
caggguucugcagagucau

SEQ ID NO: 1800060 - RNA, 19 nt, Artificial Sequence
  Description of Artificial Sequence: Synthetic oligonucleotide
  Antisense strand to SEQ ID NO: 1800059
augacucugcagaacccug

SEQ ID NO: 1800061 - RNA, 19 nt, Artificial Sequence
  Description of Artificial Sequence: Synthetic oligonucleotide
  Sense strand starting at position 1325 of SEQ ID NO: 1563163
uuuacuguucuggagaguu

SEQ ID NO: 1800062 - RNA, 19 nt, Artificial Sequence
  Description of Artificial Sequence: Synthetic oligonucleotide
  Antisense strand to SEQ ID NO: 1800061
aacucuccagaacaguaaa

SEQ ID NO: 1800063 - RNA, 19 nt, Artificial Sequence
  Description of Artificial Sequence: Synthetic oligonucleotide
  Sense strand starting at position 1405 of SEQ ID NO: 1563163
ucauuagguuucccauaag

SEQ ID NO: 1800064 - RNA, 19 nt, Artificial Sequence
  Description of Artificial Sequence: Synthetic oligonucleotide
  Antisense strand to SEQ ID NO: 1800063
cuuaugggaaaccuaauga

SEQ ID NO: 1800065 - RNA, 19 nt, Artificial Sequence
  Description of Artificial Sequence: Synthetic oligonucleotide
  Sense strand starting at position 1473 of SEQ ID NO: 1563163
auauauggccugugaucaa

SEQ ID NO: 1800066 - RNA, 19 nt, Artificial Sequence
  Description of Artificial Sequence: Synthetic oligonucleotide
  Antisense strand to SEQ ID NO: 1800065
uugaucacaggccauauau

SEQ ID NO: 1800067 - RNA, 19 nt, Artificial Sequence
  Description of Artificial Sequence: Synthetic oligonucleotide
  Sense strand starting at position 1513 of SEQ ID NO: 1563163
gcacaugaagcugauauga

SEQ ID NO: 1800068 - RNA, 19 nt, Artificial Sequence
  Description of Artificial Sequence: Synthetic oligonucleotide
  Antisense strand to SEQ ID NO: 1800067
ucauaucagcuucaugugc

SEQ ID NO: 1800069 - RNA, 19 nt, Artificial Sequence
  Description of Artificial Sequence: Synthetic oligonucleotide
  Sense strand starting at position 1577 of SEQ ID NO: 1563163
agccaucucccuuggagaa

SEQ ID NO: 1800070 - RNA, 19 nt, Artificial Sequence
  Description of Artificial Sequence: Synthetic oligonucleotide
  Antisense strand to SEQ ID NO: 1800069
uucuccaagggagauggcu

SEQ ID NO: 1800071 - RNA, 19 nt, Artificial Sequence
  Description of Artificial Sequence: Synthetic oligonucleotide
  Sense strand starting at position 1640 of SEQ ID NO: 1563163
gccuucuaacuugauguca

SEQ ID NO: 1800072 - RNA, 19 nt, Artificial Sequence
  Description of Artificial Sequence: Synthetic oligonucleotide
  Antisense strand to SEQ ID NO: 1800071
ugacaucaaguuagaaggc

SEQ ID NO: 1800073 - RNA, 19 nt, Artificial Sequence
  Description of Artificial Sequence: Synthetic oligonucleotide
  Sense strand starting at position 1764 of SEQ ID NO: 1563163
ugaauuagggauugcugga

SEQ ID NO: 1800074 - RNA, 19 nt, Artificial Sequence
  Description of Artificial Sequence: Synthetic oligonucleotide
  Antisense strand to SEQ ID NO: 1800073
uccagcaaucccuaauuca

SEQ ID NO: 1800075 - RNA, 19 nt, Artificial Sequence
  Description of Artificial Sequence: Synthetic oligonucleotide
  Sense strand starting at position 1874 of SEQ ID NO: 1563163
ugaagauagugacauauuu

SEQ ID NO: 1800076 - RNA, 19 nt, Artificial Sequence
  Description of Artificial Sequence: Synthetic oligonucleotide
  Antisense strand to SEQ ID NO: 1800075
aaauaugucacuaucuuca

SEQ ID NO: 1800077 - RNA, 19 nt, Artificial Sequence
  Description of Artificial Sequence: Synthetic oligonucleotide
  Sense strand starting at position 2012 of SEQ ID NO: 1563163
agcuuagguuguccauuua

SEQ ID NO: 1800078 - RNA, 19 nt, Artificial Sequence
  Description of Artificial Sequence: Synthetic oligonucleotide
  Antisense strand to SEQ ID NO: 1800077
uaaauggacaaccuaagcu

SEQ ID NO: 1800079 - RNA, 19 nt, Artificial Sequence
  Description of Artificial Sequence: Synthetic oligonucleotide
  Sense strand starting at position 2160 of SEQ ID NO: 1563163
acuuuaagucaucauaguu

SEQ ID NO: 1800080 - RNA, 19 nt, Artificial Sequence
  Description of Artificial Sequence: Synthetic oligonucleotide
  Antisense strand to SEQ ID NO: 1800079
aacuaugaugacuuaaagu

SEQ ID NO: 1800081 - RNA, 19 nt, Artificial Sequence
  Description of Artificial Sequence: Synthetic oligonucleotide
  Sense strand starting at position 2217 of SEQ ID NO: 1563163
ugugccagggcucauuaaa

SEQ ID NO: 1800082 - RNA, 19 nt, Artificial Sequence
  Description of Artificial Sequence: Synthetic oligonucleotide
  Antisense strand to SEQ ID NO: 1800081
uuuaaugagcccuggcaca

SEQ ID NO: 1800083 - RNA, 19 nt, Artificial Sequence
  Description of Artificial Sequence: Synthetic oligonucleotide
  Sense strand starting at position 2411 of SEQ ID NO: 1563163
ucuguauuaggucaaaggu

SEQ ID NO: 1800084 - RNA, 19 nt, Artificial Sequence
  Description of Artificial Sequence: Synthetic oligonucleotide
  Antisense strand to SEQ ID NO: 1800083
accuuugaccuaauacaga

SEQ ID NO: 1800085 - RNA, 19 nt, Artificial Sequence
  Description of Artificial Sequence: Synthetic oligonucleotide
  Sense strand starting at position 2494 of SEQ ID NO: 1563163
acuguaucauacuuaguga

SEQ ID NO: 1800086 - RNA, 19 nt, Artificial Sequence
  Description of Artificial Sequence: Synthetic oligonucleotide
  Antisense strand to SEQ ID NO: 1800085
ucacuaaguaugauacagu

SEQ ID NO: 1800087 - RNA, 19 nt, Artificial Sequence
  Description of Artificial Sequence: Synthetic oligonucleotide
  Sense strand starting at position 2497 of SEQ ID NO: 1563163
guaucauacuuagugaacu

SEQ ID NO: 1800088 - RNA, 19 nt, Artificial Sequence
  Description of Artificial Sequence: Synthetic oligonucleotide
  Antisense strand to SEQ ID NO: 1800087
aguucacuaaguaugauac

SEQ ID NO: 1800089 - RNA, 19 nt, Artificial Sequence
  Description of Artificial Sequence: Synthetic oligonucleotide
  Sense strand starting at position 2570 of SEQ ID NO: 1563163
aagacaguacagugaguaa

SEQ ID NO: 1800090 - RNA, 19 nt, Artificial Sequence
  Description of Artificial Sequence: Synthetic oligonucleotide
  Antisense strand to SEQ ID NO: 1800089
uuacucacuguacugucuu

SEQ ID NO: 1800091 - RNA, 19 nt, Artificial Sequence
  Description of Artificial Sequence: Synthetic oligonucleotide
  Sense strand starting at position 2629 of SEQ ID NO: 1563163
cgaugcuguauuuguuaca

SEQ ID NO: 1800092 - RNA, 19 nt, Artificial Sequence
  Description of Artificial Sequence: Synthetic oligonucleotide
  Antisense strand to SEQ ID NO: 1800091
uguaacaaauacagcaucg

SEQ ID NO: 1800093 - RNA, 19 nt, Artificial Sequence
  Description of Artificial Sequence: Synthetic oligonucleotide
  Sense strand starting at position 2630 of SEQ ID NO: 1563163
gaugcuguauuuguuacaa

SEQ ID NO: 1800094 - RNA, 19 nt, Artificial Sequence
  Description of Artificial Sequence: Synthetic oligonucleotide
  Antisense strand to SEQ ID NO: 1800093
uuguaacaaauacagcauc

SEQ ID NO: 1800095 - RNA, 19 nt, Artificial Sequence
  Description of Artificial Sequence: Synthetic oligonucleotide
  Sense strand starting at position 3067 of SEQ ID NO: 1563163
aggaguguucaucagguau

SEQ ID NO: 1800096 - RNA, 19 nt, Artificial Sequence
  Description of Artificial Sequence: Synthetic oligonucleotide
  Antisense strand to SEQ ID NO: 1800095
auaccugaugaacacuccu

SEQ ID NO: 1800097 - RNA, 19 nt, Artificial Sequence
  Description of Artificial Sequence: Synthetic oligonucleotide
  Sense strand starting at position 3101 of SEQ ID NO: 1563163
ucacuuguuguuuaucuga

SEQ ID NO: 1800098 - RNA, 19 nt, Artificial Sequence
  Description of Artificial Sequence: Synthetic oligonucleotide
  Antisense strand to SEQ ID NO: 1800097
ucagauaaacaacaaguga

SEQ ID NO: 1800099 - RNA, 19 nt, Artificial Sequence
  Description of Artificial Sequence: Synthetic oligonucleotide
  Sense strand starting at position 3332 of SEQ ID NO: 1563163
aggaaaucaguaugcauug

SEQ ID NO: 1800100 - RNA, 19 nt, Artificial Sequence
  Description of Artificial Sequence: Synthetic oligonucleotide
  Antisense strand to SEQ ID NO: 1800099
caaugcauacugauuuccu

SEQ ID NO: 1800101 - RNA, 19 nt, Artificial Sequence
  Description of Artificial Sequence: Synthetic oligonucleotide
  Sense strand starting at position 3343 of SEQ ID NO: 1563163
augcauuggccauacuuau

SEQ ID NO: 1800102 - RNA, 19 nt, Artificial Sequence
  Description of Artificial Sequence: Synthetic oligonucleotide
  Antisense strand to SEQ ID NO: 1800101
auaaguauggccaaugcau

SEQ ID NO: 1800103 - RNA, 19 nt, Artificial Sequence
  Description of Artificial Sequence: Synthetic oligonucleotide
  Sense strand starting at position 3485 of SEQ ID NO: 1563163
acaguaugggcucacauau

SEQ ID NO: 1800104 - RNA, 19 nt, Artificial Sequence
  Description of Artificial Sequence: Synthetic oligonucleotide
  Antisense strand to SEQ ID NO: 1800103
auaugugagcccauacugu

SEQ ID NO: 1800105 - RNA, 19 nt, Artificial Sequence
  Description of Artificial Sequence: Synthetic oligonucleotide
  Sense strand starting at position 118 of SEQ ID NO: 1563164
cugagagcucuggguacau

SEQ ID NO: 1800106 - RNA, 19 nt, Artificial Sequence
  Description of Artificial Sequence: Synthetic oligonucleotide
  Antisense strand to SEQ ID NO: 1800105
auguacccagagcucucag

SEQ ID NO: 1800107 - RNA, 19 nt, Artificial Sequence
  Description of Artificial Sequence: Synthetic oligonucleotide
  Sense strand starting at position 120 of SEQ ID NO: 1563164
gagagcucuggguacauau

SEQ ID NO: 1800108 - RNA, 19 nt, Artificial Sequence
  Description of Artificial Sequence: Synthetic oligonucleotide
  Antisense strand to SEQ ID NO: 1800107
auauguacccagagcucuc

SEQ ID NO: 1800109 - RNA, 19 nt, Artificial Sequence
  Description of Artificial Sequence: Synthetic oligonucleotide
  Sense strand starting at position 285 of SEQ ID NO: 1563164
cuucgaugauuccucuaac

SEQ ID NO: 1800110 - RNA, 19 nt, Artificial Sequence
  Description of Artificial Sequence: Synthetic oligonucleotide
  Antisense strand to SEQ ID NO: 1800109
guuagaggaaucaucgaag

SEQ ID NO: 1800111 - RNA, 19 nt, Artificial Sequence
  Description of Artificial Sequence: Synthetic oligonucleotide
  Sense strand starting at position 288 of SEQ ID NO: 1563164
cgaugauuccucuaacccu

SEQ ID NO: 1800112 - RNA, 19 nt, Artificial Sequence
  Description of Artificial Sequence: Synthetic oligonucleotide
  Antisense strand to SEQ ID NO: 1800111
aggguuagaggaaucaucg

SEQ ID NO: 1800113 - RNA, 19 nt, Artificial Sequence
  Description of Artificial Sequence: Synthetic oligonucleotide
  Sense strand starting at position 335 of SEQ ID NO: 1563164
auuggcauccuccgaagau

SEQ ID NO: 1800114 - RNA, 19 nt, Artificial Sequence
  Description of Artificial Sequence: Synthetic oligonucleotide
  Antisense strand to SEQ ID NO: 1800113
aucuucggaggaugccaau

SEQ ID NO: 1800115 - RNA, 19 nt, Artificial Sequence
  Description of Artificial Sequence: Synthetic oligonucleotide
  Sense strand starting at position 347 of SEQ ID NO: 1563164
cgaagaugucgccacacau

SEQ ID NO: 1800116 - RNA, 19 nt, Artificial Sequence
  Description of Artificial Sequence: Synthetic oligonucleotide
  Antisense strand to SEQ ID NO: 1800115
auguguggcgacaucuucg

SEQ ID NO: 1800117 - RNA, 19 nt, Artificial Sequence
  Description of Artificial Sequence: Synthetic oligonucleotide
  Sense strand starting at position 416 of SEQ ID NO: 1563164
agccguacuggcgugaaau

SEQ ID NO: 1800118 - RNA, 19 nt, Artificial Sequence
  Description of Artificial Sequence: Synthetic oligonucleotide
  Antisense strand to SEQ ID NO: 1800117
auuucacgccaguacggcu

SEQ ID NO: 1800119 - RNA, 19 nt, Artificial Sequence
  Description of Artificial Sequence: Synthetic oligonucleotide
  Sense strand starting at position 426 of SEQ ID NO: 1563164
gcgugaaaugccuaaaggu

SEQ ID NO: 1800120 - RNA, 19 nt, Artificial Sequence
  Description of Artificial Sequence: Synthetic oligonucleotide
  Antisense strand to SEQ ID NO: 1800119
accuuuaggcauuucacgc

SEQ ID NO: 1800121 - RNA, 19 nt, Artificial Sequence
  Description of Artificial Sequence: Synthetic oligonucleotide
  Sense strand starting at position 539 of SEQ ID NO: 1563164
accucugcuccggagcaau

SEQ ID NO: 1800122 - RNA, 19 nt, Artificial Sequence
  Description of Artificial Sequence: Synthetic oligonucleotide
  Antisense strand to SEQ ID NO: 1800121
auugcuccggagcagaggu

SEQ ID NO: 1800123 - RNA, 19 nt, Artificial Sequence
  Description of Artificial Sequence: Synthetic oligonucleotide
  Sense strand starting at position 677 of SEQ ID NO: 1563164
ggaguaacguccucccaac

SEQ ID NO: 1800124 - RNA, 19 nt, Artificial Sequence
  Description of Artificial Sequence: Synthetic oligonucleotide
  Antisense strand to SEQ ID NO: 1800123
guugggaggacguuacucc

SEQ ID NO: 1800125 - RNA, 19 nt, Artificial Sequence
  Description of Artificial Sequence: Synthetic oligonucleotide
  Sense strand starting at position 745 of SEQ ID NO: 1563164
cuuguacuugcagaacaau

SEQ ID NO: 1800126 - RNA, 19 nt, Artificial Sequence
  Description of Artificial Sequence: Synthetic oligonucleotide
  Antisense strand to SEQ ID NO: 1800125
auuguucugcaaguacaag

SEQ ID NO: 1800127 - RNA, 19 nt, Artificial Sequence
  Description of Artificial Sequence: Synthetic oligonucleotide
  Sense strand starting at position 777 of SEQ ID NO: 1563164
uccgaaaugguguagauaa

SEQ ID NO: 1800128 - RNA, 19 nt, Artificial Sequence
  Description of Artificial Sequence: Synthetic oligonucleotide
  Antisense strand to SEQ ID NO: 1800127
uuaucuacaccauuucgga

SEQ ID NO: 1800129 - RNA, 19 nt, Artificial Sequence
  Description of Artificial Sequence: Synthetic oligonucleotide
  Sense strand starting at position 829 of SEQ ID NO: 1563164
ggcccauucgaguugcagu

SEQ ID NO: 1800130 - RNA, 19 nt, Artificial Sequence
  Description of Artificial Sequence: Synthetic oligonucleotide
  Antisense strand to SEQ ID NO: 1800129
acugcaacucgaaugggcc

SEQ ID NO: 1800131 - RNA, 19 nt, Artificial Sequence
  Description of Artificial Sequence: Synthetic oligonucleotide
  Sense strand starting at position 894 of SEQ ID NO: 1563164
ccuacuugguucuugacaa

SEQ ID NO: 1800132 - RNA, 19 nt, Artificial Sequence
  Description of Artificial Sequence: Synthetic oligonucleotide
  Antisense strand to SEQ ID NO: 1800131
uugucaagaaccaaguagg

SEQ ID NO: 1800133 - RNA, 19 nt, Artificial Sequence
  Description of Artificial Sequence: Synthetic oligonucleotide
  Sense strand starting at position 1406 of SEQ ID NO: 1563164
ggaagauugcuugagaguc

SEQ ID NO: 1800134 - RNA, 19 nt, Artificial Sequence
  Description of Artificial Sequence: Synthetic oligonucleotide
  Antisense strand to SEQ ID NO: 1800133
gacucucaagcaaucuucc

SEQ ID NO: 1800135 - RNA, 19 nt, Artificial Sequence
  Description of Artificial Sequence: Synthetic oligonucleotide
  Sense strand starting at position 1443 of SEQ ID NO: 1563164
aggcaaggaccucagucau

SEQ ID NO: 1800136 - RNA, 19 nt, Artificial Sequence
  Description of Artificial Sequence: Synthetic oligonucleotide
  Antisense strand to SEQ ID NO: 1800135
augacugagguccuugccu

SEQ ID NO: 1800137 - RNA, 19 nt, Artificial Sequence
  Description of Artificial Sequence: Synthetic oligonucleotide
  Sense strand starting at position 1449 of SEQ ID NO: 1563164
ggaccucagucaucccagu

SEQ ID NO: 1800138 - RNA, 19 nt, Artificial Sequence
  Description of Artificial Sequence: Synthetic oligonucleotide
  Antisense strand to SEQ ID NO: 1800137
acugggaugacugaggucc

SEQ ID NO: 1800139 - RNA, 19 nt, Artificial Sequence
  Description of Artificial Sequence: Synthetic oligonucleotide
  Sense strand starting at position 1599 of SEQ ID NO: 1563164
ccaagauucuggcuuggua

SEQ ID NO: 1800140 - RNA, 19 nt, Artificial Sequence
  Description of Artificial Sequence: Synthetic oligonucleotide
  Antisense strand to SEQ ID NO: 1800139
uaccaagccagaaucuugg

SEQ ID NO: 1800141 - RNA, 19 nt, Artificial Sequence
  Description of Artificial Sequence: Synthetic oligonucleotide
  Sense strand starting at position 1601 of SEQ ID NO: 1563164
aagauucuggcuugguaga

SEQ ID NO: 1800142 - RNA, 19 nt, Artificial Sequence
  Description of Artificial Sequence: Synthetic oligonucleotide
  Antisense strand to SEQ ID NO: 1800141
ucuaccaagccagaaucuu

SEQ ID NO: 1800143 - RNA, 19 nt, Artificial Sequence
  Description of Artificial Sequence: Synthetic oligonucleotide
  Sense strand starting at position 1602 of SEQ ID NO: 1563164
agauucuggcuugguagau

SEQ ID NO: 1800144 - RNA, 19 nt, Artificial Sequence
  Description of Artificial Sequence: Synthetic oligonucleotide
  Antisense strand to SEQ ID NO: 1800143
aucuaccaagccagaaucu

SEQ ID NO: 1800145 - RNA, 19 nt, Artificial Sequence
  Description of Artificial Sequence: Synthetic oligonucleotide
  Sense strand starting at position 2019 of SEQ ID NO: 1563164
ccacgucaaccaugagauc

SEQ ID NO: 1800146 - RNA, 19 nt, Artificial Sequence
  Description of Artificial Sequence: Synthetic oligonucleotide
  Antisense strand to SEQ ID NO: 1800145
gaucucaugguugacgugg

SEQ ID NO: 1800147 - RNA, 19 nt, Artificial Sequence
  Description of Artificial Sequence: Synthetic oligonucleotide
  Sense strand starting at position 2232 of SEQ ID NO: 1563164
uuucuuccucuucgaggaa

SEQ ID NO: 1800148 - RNA, 19 nt, Artificial Sequence
  Description of Artificial Sequence: Synthetic oligonucleotide
  Antisense strand to SEQ ID NO: 1800147
uuccucgaagaggaagaaa

SEQ ID NO: 1800149 - RNA, 19 nt, Artificial Sequence
  Description of Artificial Sequence: Synthetic oligonucleotide
  Sense strand starting at position 2235 of SEQ ID NO: 1563164
cuuccucuucgaggaauaa

SEQ ID NO: 1800150 - RNA, 19 nt, Artificial Sequence
  Description of Artificial Sequence: Synthetic oligonucleotide
  Antisense strand to SEQ ID NO: 1800149
uuauuccucgaagaggaag

SEQ ID NO: 1800151 - RNA, 19 nt, Artificial Sequence
  Description of Artificial Sequence: Synthetic oligonucleotide
  Sense strand starting at position 2236 of SEQ ID NO: 1563164
uuccucuucgaggaauaau

SEQ ID NO: 1800152 - RNA, 19 nt, Artificial Sequence
  Description of Artificial Sequence: Synthetic oligonucleotide
  Antisense strand to SEQ ID NO: 1800151
auuauuccucgaagaggaa

SEQ ID NO: 1800153 - RNA, 19 nt, Artificial Sequence
  Description of Artificial Sequence: Synthetic oligonucleotide
  Sense strand starting at position 2309 of SEQ ID NO: 1563164
acaagucaugaauguccua

SEQ ID NO: 1800154 - RNA, 19 nt, Artificial Sequence
  Description of Artificial Sequence: Synthetic oligonucleotide
  Antisense strand to SEQ ID NO: 1800153
uaggacauucaugacuugu

SEQ ID NO: 1800155 - RNA, 19 nt, Artificial Sequence
  Description of Artificial Sequence: Synthetic oligonucleotide
  Sense strand starting at position 2373 of SEQ ID NO: 1563164
gagauagaucgugggagug

SEQ ID NO: 1800156 - RNA, 19 nt, Artificial Sequence
  Description of Artificial Sequence: Synthetic oligonucleotide
  Antisense strand to SEQ ID NO: 1800155
cacucccacgaucuaucuc

SEQ ID NO: 1800157 - RNA, 19 nt, Artificial Sequence
  Description of Artificial Sequence: Synthetic oligonucleotide
  Sense strand starting at position 2374 of SEQ ID NO: 1563164
agauagaucgugggagugu

SEQ ID NO: 1800158 - RNA, 19 nt, Artificial Sequence
  Description of Artificial Sequence: Synthetic oligonucleotide
  Antisense strand to SEQ ID NO: 1800157
acacucccacgaucuaucu

SEQ ID NO: 1800159 - RNA, 19 nt, Artificial Sequence
  Description of Artificial Sequence: Synthetic oligonucleotide
  Sense strand starting at position 2472 of SEQ ID NO: 1563164
uuuccuuugaguggagagu

SEQ ID NO: 1800160 - RNA, 19 nt, Artificial Sequence
  Description of Artificial Sequence: Synthetic oligonucleotide
  Antisense strand to SEQ ID NO: 1800159
acucuccacucaaaggaaa

SEQ ID NO: 1800161 - RNA, 19 nt, Artificial Sequence
  Description of Artificial Sequence: Synthetic oligonucleotide
  Sense strand starting at position 2782 of SEQ ID NO: 1563164
cgaccaguugucuaaucuu

SEQ ID NO: 1800162 - RNA, 19 nt, Artificial Sequence
  Description of Artificial Sequence: Synthetic oligonucleotide
  Antisense strand to SEQ ID NO: 1800161
aagauuagacaacuggucg

SEQ ID NO: 1800163 - RNA, 19 nt, Artificial Sequence
  Description of Artificial Sequence: Synthetic oligonucleotide
  Sense strand starting at position 2943 of SEQ ID NO: 1563164
ugaaccucuugugauuuga

SEQ ID NO: 1800164 - RNA, 19 nt, Artificial Sequence
  Description of Artificial Sequence: Synthetic oligonucleotide
  Antisense strand to SEQ ID NO: 1800163
ucaaaucacaagagguuca

SEQ ID NO: 1800165 - RNA, 19 nt, Artificial Sequence
  Description of Artificial Sequence: Synthetic oligonucleotide
  Sense strand starting at position 3170 of SEQ ID NO: 1563164
augagugaccaagguggua

SEQ ID NO: 1800166 - RNA, 19 nt, Artificial Sequence
  Description of Artificial Sequence: Synthetic oligonucleotide
  Antisense strand to SEQ ID NO: 1800165
uaccaccuuggucacucau

SEQ ID NO: 1800167 - RNA, 19 nt, Artificial Sequence
  Description of Artificial Sequence: Synthetic oligonucleotide
  Sense strand starting at position 3172 of SEQ ID NO: 1563164
gagugaccaaggugguaaa

SEQ ID NO: 1800168 - RNA, 19 nt, Artificial Sequence
  Description of Artificial Sequence: Synthetic oligonucleotide
  Antisense strand to SEQ ID NO: 1800167
uuuaccaccuuggucacuc

SEQ ID NO: 1800169 - RNA, 19 nt, Artificial Sequence
  Description of Artificial Sequence: Synthetic oligonucleotide
  Sense strand starting at position 3196 of SEQ ID NO: 1563164
cguuuacucaggugaccaa

SEQ ID NO: 1800170 - RNA, 19 nt, Artificial Sequence
  Description of Artificial Sequence: Synthetic oligonucleotide
  Antisense strand to SEQ ID NO: 1800169
uuggucaccugaguaaacg

SEQ ID NO: 1800171 - RNA, 19 nt, Artificial Sequence
  Description of Artificial Sequence: Synthetic oligonucleotide
  Sense strand starting at position 3197 of SEQ ID NO: 1563164
guuuacucaggugaccaau

SEQ ID NO: 1800172 - RNA, 19 nt, Artificial Sequence
  Description of Artificial Sequence: Synthetic oligonucleotide
  Antisense strand to SEQ ID NO: 1800171
auuggucaccugaguaaac

SEQ ID NO: 1800173 - RNA, 19 nt, Artificial Sequence
  Description of Artificial Sequence: Synthetic oligonucleotide
  Sense strand starting at position 3319 of SEQ ID NO: 1563164
auucauggugccugaguga

SEQ ID NO: 1800174 - RNA, 19 nt, Artificial Sequence
  Description of Artificial Sequence: Synthetic oligonucleotide
  Antisense strand to SEQ ID NO: 1800173
ucacucaggcaccaugaau

SEQ ID NO: 1800175 - RNA, 19 nt, Artificial Sequence
  Description of Artificial Sequence: Synthetic oligonucleotide
  Sense strand starting at position 3332 of SEQ ID NO: 1563164
gagugagcauugcuccuaa

SEQ ID NO: 1800176 - RNA, 19 nt, Artificial Sequence
  Description of Artificial Sequence: Synthetic oligonucleotide
  Antisense strand to SEQ ID NO: 1800175
uuaggagcaaugcucacuc

SEQ ID NO: 1800177 - RNA, 19 nt, Artificial Sequence
  Description of Artificial Sequence: Synthetic oligonucleotide
  Sense strand starting at position 3431 of SEQ ID NO: 1563164
aaucuuguugcagaguuac

SEQ ID NO: 1800178 - RNA, 19 nt, Artificial Sequence
  Description of Artificial Sequence: Synthetic oligonucleotide
  Antisense strand to SEQ ID NO: 1800177
guaacucugcaacaagauu

SEQ ID NO: 1800179 - RNA, 19 nt, Artificial Sequence
  Description of Artificial Sequence: Synthetic oligonucleotide
  Sense strand starting at position 3487 of SEQ ID NO: 1563164
ccaaauguaugccuaagga

SEQ ID NO: 1800180 - RNA, 19 nt, Artificial Sequence
  Description of Artificial Sequence: Synthetic oligonucleotide
  Antisense strand to SEQ ID NO: 1800179
uccuuaggcauacauuugg

SEQ ID NO: 1800181 - RNA, 19 nt, Artificial Sequence
  Description of Artificial Sequence: Synthetic oligonucleotide
  Sense strand starting at position 3533 of SEQ ID NO: 1563164
ggcauucucacacggacaa

SEQ ID NO: 1800182 - RNA, 19 nt, Artificial Sequence
  Description of Artificial Sequence: Synthetic oligonucleotide
  Antisense strand to SEQ ID NO: 1800181
uuguccgugugagaaugcc

SEQ ID NO: 1800183 - RNA, 19 nt, Artificial Sequence
  Description of Artificial Sequence: Synthetic oligonucleotide
  Sense strand starting at position 3572 of SEQ ID NO: 1563164
uguggucauacguauauuc

SEQ ID NO: 1800184 - RNA, 19 nt, Artificial Sequence
  Description of Artificial Sequence: Synthetic oligonucleotide
  Antisense strand to SEQ ID NO: 1800183
gaauauacguaugaccaca

SEQ ID NO: 1800185 - RNA, 19 nt, Artificial Sequence
  Description of Artificial Sequence: Synthetic oligonucleotide
  Sense strand starting at position 61 of SEQ ID NO: 1563165
gcaguacagacauggguaa

SEQ ID NO: 1800186 - RNA, 19 nt, Artificial Sequence
  Description of Artificial Sequence: Synthetic oligonucleotide
  Antisense strand to SEQ ID NO: 1800185
uuacccaugucuguacugc

SEQ ID NO: 1800187 - RNA, 19 nt, Artificial Sequence
  Description of Artificial Sequence: Synthetic oligonucleotide
  Sense strand starting at position 110 of SEQ ID NO: 1563165
aucucagauucugcuauga

SEQ ID NO: 1800188 - RNA, 19 nt, Artificial Sequence
  Description of Artificial Sequence: Synthetic oligonucleotide
  Antisense strand to SEQ ID NO: 1800187
ucauagcagaaucugagau

SEQ ID NO: 1800189 - RNA, 19 nt, Artificial Sequence
  Description of Artificial Sequence: Synthetic oligonucleotide
  Sense strand starting at position 280 of SEQ ID NO: 1563165
gagccauugguggacgaau

SEQ ID NO: 1800190 - RNA, 19 nt, Artificial Sequence
  Description of Artificial Sequence: Synthetic oligonucleotide
  Antisense strand to SEQ ID NO: 1800189
auucguccaccaauggcuc

SEQ ID NO: 1800191 - RNA, 19 nt, Artificial Sequence
  Description of Artificial Sequence: Synthetic oligonucleotide
  Sense strand starting at position 445 of SEQ ID NO: 1563165
gggcaagggugucuuugaa

SEQ ID NO: 1800192 - RNA, 19 nt, Artificial Sequence
  Description of Artificial Sequence: Synthetic oligonucleotide
  Antisense strand to SEQ ID NO: 1800191
uucaaagacacccuugccc

SEQ ID NO: 1800193 - RNA, 19 nt, Artificial Sequence
  Description of Artificial Sequence: Synthetic oligonucleotide
  Sense strand starting at position 650 of SEQ ID NO: 1563165
auagacugucgacguuaga

SEQ ID NO: 1800194 - RNA, 19 nt, Artificial Sequence
  Description of Artificial Sequence: Synthetic oligonucleotide
  Antisense strand to SEQ ID NO: 1800193
ucuaacgucgacagucuau

SEQ ID NO: 1800195 - RNA, 19 nt, Artificial Sequence
  Description of Artificial Sequence: Synthetic oligonucleotide
  Sense strand starting at position 653 of SEQ ID NO: 1563165
gacugucgacguuagacaa

SEQ ID NO: 1800196 - RNA, 19 nt, Artificial Sequence
  Description of Artificial Sequence: Synthetic oligonucleotide
  Antisense strand to SEQ ID NO: 1800195
uugucuaacgucgacaguc

SEQ ID NO: 1800197 - RNA, 19 nt, Artificial Sequence
  Description of Artificial Sequence: Synthetic oligonucleotide
  Sense strand starting at position 729 of SEQ ID NO: 1563165
guguuugcacaucagaaug

SEQ ID NO: 1800198 - RNA, 19 nt, Artificial Sequence
  Description of Artificial Sequence: Synthetic oligonucleotide
  Antisense strand to SEQ ID NO: 1800197
cauucugaugugcaaacac

SEQ ID NO: 1800199 - RNA, 19 nt, Artificial Sequence
  Description of Artificial Sequence: Synthetic oligonucleotide
  Sense strand starting at position 734 of SEQ ID NO: 1563165
ugcacaucagaaugucaaa

SEQ ID NO: 1800200 - RNA, 19 nt, Artificial Sequence
  Description of Artificial Sequence: Synthetic oligonucleotide
  Antisense strand to SEQ ID NO: 1800199
uuugacauucugaugugca

SEQ ID NO: 1800201 - RNA, 19 nt, Artificial Sequence
  Description of Artificial Sequence: Synthetic oligonucleotide
  Sense strand starting at position 1105 of SEQ ID NO: 1563165
ccacgauuucucugcuaug

SEQ ID NO: 1800202 - RNA, 19 nt, Artificial Sequence
  Description of Artificial Sequence: Synthetic oligonucleotide
  Antisense strand to SEQ ID NO: 1800201
cauagcagagaaaucgugg

SEQ ID NO: 1800203 - RNA, 19 nt, Artificial Sequence
  Description of Artificial Sequence: Synthetic oligonucleotide
  Sense strand starting at position 1234 of SEQ ID NO: 1563165
ggccggaggugucuggaaa

SEQ ID NO: 1800204 - RNA, 19 nt, Artificial Sequence
  Description of Artificial Sequence: Synthetic oligonucleotide
  Antisense strand to SEQ ID NO: 1800203
uuuccagacaccuccggcc

SEQ ID NO: 1800205 - RNA, 19 nt, Artificial Sequence
  Description of Artificial Sequence: Synthetic oligonucleotide
  Sense strand starting at position 1235 of SEQ ID NO: 1563165
gccggaggugucuggaaag

SEQ ID NO: 1800206 - RNA, 19 nt, Artificial Sequence
  Description of Artificial Sequence: Synthetic oligonucleotide
  Antisense strand to SEQ ID NO: 1800205
cuuuccagacaccuccggc

SEQ ID NO: 1800207 - RNA, 19 nt, Artificial Sequence
  Description of Artificial Sequence: Synthetic oligonucleotide
  Sense strand starting at position 1237 of SEQ ID NO: 1563165
cggaggugucuggaaagca

SEQ ID NO: 1800208 - RNA, 19 nt, Artificial Sequence
  Description of Artificial Sequence: Synthetic oligonucleotide
  Antisense strand to SEQ ID NO: 1800207
ugcuuuccagacaccuccg

SEQ ID NO: 1800209 - RNA, 19 nt, Artificial Sequence
  Description of Artificial Sequence: Synthetic oligonucleotide
  Sense strand starting at position 1238 of SEQ ID NO: 1563165
ggaggugucuggaaagcag

SEQ ID NO: 1800210 - RNA, 19 nt, Artificial Sequence
  Description of Artificial Sequence: Synthetic oligonucleotide
  Antisense strand to SEQ ID NO: 1800209
cugcuuuccagacaccucc

SEQ ID NO: 1800211 - RNA, 19 nt, Artificial Sequence
  Description of Artificial Sequence: Synthetic oligonucleotide
  Sense strand starting at position 1275 of SEQ ID NO: 1563165
gguuuaauaccagauucuc

SEQ ID NO: 1800212 - RNA, 19 nt, Artificial Sequence
  Description of Artificial Sequence: Synthetic oligonucleotide
  Antisense strand to SEQ ID NO: 1800211
gagaaucugguauuaaacc

SEQ ID NO: 1800213 - RNA, 19 nt, Artificial Sequence
  Description of Artificial Sequence: Synthetic oligonucleotide
  Sense strand starting at position 1601 of SEQ ID NO: 1563165
gggugcgggccugaauauu

SEQ ID NO: 1800214 - RNA, 19 nt, Artificial Sequence
  Description of Artificial Sequence: Synthetic oligonucleotide
  Antisense strand to SEQ ID NO: 1800213
aauauucaggcccgcaccc

SEQ ID NO: 1800215 - RNA, 19 nt, Artificial Sequence
  Description of Artificial Sequence: Synthetic oligonucleotide
  Sense strand starting at position 1666 of SEQ ID NO: 1563165
cuucguaaagucuaucaaa

SEQ ID NO: 1800216 - RNA, 19 nt, Artificial Sequence
  Description of Artificial Sequence: Synthetic oligonucleotide
  Antisense strand to SEQ ID NO: 1800215
uuugauagacuuuacgaag

SEQ ID NO: 1800217 - RNA, 19 nt, Artificial Sequence
  Description of Artificial Sequence: Synthetic oligonucleotide
  Sense strand starting at position 2367 of SEQ ID NO: 1563165
ccuguuccaguauaguuaa

SEQ ID NO: 1800218 - RNA, 19 nt, Artificial Sequence
  Description of Artificial Sequence: Synthetic oligonucleotide
  Antisense strand to SEQ ID NO: 1800217
uuaacuauacuggaacagg

SEQ ID NO: 1800219 - RNA, 19 nt, Artificial Sequence
  Description of Artificial Sequence: Synthetic oligonucleotide
  Sense strand starting at position 2692 of SEQ ID NO: 1563165
uggaauauuucucaauaag

SEQ ID NO: 1800220 - RNA, 19 nt, Artificial Sequence
  Description of Artificial Sequence: Synthetic oligonucleotide
  Antisense strand to SEQ ID NO: 1800219
cuuauugagaaauauucca

SEQ ID NO: 1800221 - RNA, 19 nt, Artificial Sequence
  Description of Artificial Sequence: Synthetic oligonucleotide
  Sense strand starting at position 2723 of SEQ ID NO: 1563165
ccaugugaucuguaaauug

SEQ ID NO: 1800222 - RNA, 19 nt, Artificial Sequence
  Description of Artificial Sequence: Synthetic oligonucleotide
  Antisense strand to SEQ ID NO: 1800221
caauuuacagaucacaugg

SEQ ID NO: 1800223 - RNA, 19 nt, Artificial Sequence
  Description of Artificial Sequence: Synthetic oligonucleotide
  Sense strand starting at position 2921 of SEQ ID NO: 1563165
cuguaauuugauggcugua

SEQ ID NO: 1800224 - RNA, 19 nt, Artificial Sequence
  Description of Artificial Sequence: Synthetic oligonucleotide
  Antisense strand to SEQ ID NO: 1800223
uacagccaucaaauuacag

SEQ ID NO: 1800225 - RNA, 19 nt, Artificial Sequence
  Description of Artificial Sequence: Synthetic oligonucleotide
  Sense strand starting at position 2933 of SEQ ID NO: 1563165
ggcuguaaccaugacaguu

SEQ ID NO: 1800226 - RNA, 19 nt, Artificial Sequence
  Description of Artificial Sequence: Synthetic oligonucleotide
  Antisense strand to SEQ ID NO: 1800225
aacugucaugguuacagcc

SEQ ID NO: 1800227 - RNA, 19 nt, Artificial Sequence
  Description of Artificial Sequence: Synthetic oligonucleotide
  Sense strand starting at position 2954 of SEQ ID NO: 1563165
aaacaccugucuucggauu

SEQ ID NO: 1800228 - RNA, 19 nt, Artificial Sequence
  Description of Artificial Sequence: Synthetic oligonucleotide
  Antisense strand to SEQ ID NO: 1800227
aauccgaagacagguguuu

SEQ ID NO: 1800229 - RNA, 19 nt, Artificial Sequence
  Description of Artificial Sequence: Synthetic oligonucleotide
  Sense strand starting at position 2955 of SEQ ID NO: 1563165
aacaccugucuucggauua

SEQ ID NO: 1800230 - RNA, 19 nt, Artificial Sequence
  Description of Artificial Sequence: Synthetic oligonucleotide
  Antisense strand to SEQ ID NO: 1800229
uaauccgaagacagguguu

SEQ ID NO: 1800231 - RNA, 19 nt, Artificial Sequence
  Description of Artificial Sequence: Synthetic oligonucleotide
  Sense strand starting at position 3085 of SEQ ID NO: 1563165
gggagaugcugucucucua

SEQ ID NO: 1800232 - RNA, 19 nt, Artificial Sequence
  Description of Artificial Sequence: Synthetic oligonucleotide
  Antisense strand to SEQ ID NO: 1800231
uagagagacagcaucuccc

SEQ ID NO: 1800233 - RNA, 19 nt, Artificial Sequence
  Description of Artificial Sequence: Synthetic oligonucleotide
  Sense strand starting at position 3194 of SEQ ID NO: 1563165
agaugcagaccugguuaaa

SEQ ID NO: 1800234 - RNA, 19 nt, Artificial Sequence
  Description of Artificial Sequence: Synthetic oligonucleotide
  Antisense strand to SEQ ID NO: 1800233
uuuaaccaggucugcaucu

SEQ ID NO: 1800235 - RNA, 19 nt, Artificial Sequence
  Description of Artificial Sequence: Synthetic oligonucleotide
  Sense strand starting at position 3197 of SEQ ID NO: 1563165
ugcagaccugguuaaaugu

SEQ ID NO: 1800236 - RNA, 19 nt, Artificial Sequence
  Description of Artificial Sequence: Synthetic oligonucleotide
  Antisense strand to SEQ ID NO: 1800235
acauuuaaccaggucugca

SEQ ID NO: 1800237 - RNA, 19 nt, Artificial Sequence
  Description of Artificial Sequence: Synthetic oligonucleotide
  Sense strand starting at position 3250 of SEQ ID NO: 1563165
gaggaaacccauugaugca

SEQ ID NO: 1800238 - RNA, 19 nt, Artificial Sequence
  Description of Artificial Sequence: Synthetic oligonucleotide
  Antisense strand to SEQ ID NO: 1800237
ugcaucaauggguuuccuc

SEQ ID NO: 1800239 - RNA, 19 nt, Artificial Sequence
  Description of Artificial Sequence: Synthetic oligonucleotide
  Sense strand starting at position 3267 of SEQ ID NO: 1563165
cauagaaaggauugcuguu

SEQ ID NO: 1800240 - RNA, 19 nt, Artificial Sequence
  Description of Artificial Sequence: Synthetic oligonucleotide
  Antisense strand to SEQ ID NO: 1800239
aacagcaauccuuucuaug

SEQ ID NO: 1800241 - RNA, 19 nt, Artificial Sequence
  Description of Artificial Sequence: Synthetic oligonucleotide
  Sense strand starting at position 3408 of SEQ ID NO: 1563165
gugguuaccagugaaccuu

SEQ ID NO: 1800242 - RNA, 19 nt, Artificial Sequence
  Description of Artificial Sequence: Synthetic oligonucleotide
  Antisense strand to SEQ ID NO: 1800241
aagguucacugguaaccac

SEQ ID NO: 1800243 - RNA, 19 nt, Artificial Sequence
  Description of Artificial Sequence: Synthetic oligonucleotide
  Sense strand starting at position 3417 of SEQ ID NO: 1563165
agugaaccuugcuccaaac

SEQ ID NO: 1800244 - RNA, 19 nt, Artificial Sequence
  Description of Artificial Sequence: Synthetic oligonucleotide
  Antisense strand to SEQ ID NO: 1800243
guuuggagcaagguucacu

SEQ ID NO: 1800245 - RNA, 19 nt, Artificial Sequence
  Description of Artificial Sequence: Synthetic oligonucleotide
  Sense strand starting at position 3517 of SEQ ID NO: 1563165
ggaagagucuagccuuccu

SEQ ID NO: 1800246 - RNA, 19 nt, Artificial Sequence
  Description of Artificial Sequence: Synthetic oligonucleotide
  Antisense strand to SEQ ID NO: 1800245
aggaaggcuagacucuucc

SEQ ID NO: 1800247 - RNA, 19 nt, Artificial Sequence
  Description of Artificial Sequence: Synthetic oligonucleotide
  Sense strand starting at position 3586 of SEQ ID NO: 1563165
aauguaugcccagggaaca

SEQ ID NO: 1800248 - RNA, 19 nt, Artificial Sequence
  Description of Artificial Sequence: Synthetic oligonucleotide
  Antisense strand to SEQ ID NO: 1800247
uguucccugggcauacauu

SEQ ID NO: 1800249 - RNA, 19 nt, Artificial Sequence
  Description of Artificial Sequence: Synthetic oligonucleotide
  Sense strand starting at position 3587 of SEQ ID NO: 1563165
auguaugcccagggaacaa

SEQ ID NO: 1800250 - RNA, 19 nt, Artificial Sequence
  Description of Artificial Sequence: Synthetic oligonucleotide
  Antisense strand to SEQ ID NO: 1800249
uuguucccugggcauacau

SEQ ID NO: 1800251 - RNA, 19 nt, Artificial Sequence
  Description of Artificial Sequence: Synthetic oligonucleotide
  Sense strand starting at position 3680 of SEQ ID NO: 1563165
caaagcuuuguuugggauu

SEQ ID NO: 1800252 - RNA, 19 nt, Artificial Sequence
  Description of Artificial Sequence: Synthetic oligonucleotide
  Antisense strand to SEQ ID NO: 1800251
aaucccaaacaaagcuuug

SEQ ID NO: 1800253 - RNA, 19 nt, Artificial Sequence
  Description of Artificial Sequence: Synthetic oligonucleotide
  Sense strand starting at position 3686 of SEQ ID NO: 1563165
uuuguuugggauuauaugu

SEQ ID NO: 1800254 - RNA, 19 nt, Artificial Sequence
  Description of Artificial Sequence: Synthetic oligonucleotide
  Antisense strand to SEQ ID NO: 1800253
acauauaaucccaaacaaa

SEQ ID NO: 1800255 - RNA, 19 nt, Artificial Sequence
  Description of Artificial Sequence: Synthetic oligonucleotide
  Sense strand starting at position 3692 of SEQ ID NO: 1563165
ugggauuauaugugugguu

SEQ ID NO: 1800256 - RNA, 19 nt, Artificial Sequence
  Description of Artificial Sequence: Synthetic oligonucleotide
  Antisense strand to SEQ ID NO: 1800255
aaccacacauauaauccca

SEQ ID NO: 1800257 - RNA, 19 nt, Artificial Sequence
  Description of Artificial Sequence: Synthetic oligonucleotide
  Sense strand starting at position 3693 of SEQ ID NO: 1563165
gggauuauaugugugguua

SEQ ID NO: 1800258 - RNA, 19 nt, Artificial Sequence
  Description of Artificial Sequence: Synthetic oligonucleotide
  Antisense strand to SEQ ID NO: 1800257
uaaccacacauauaauccc

SEQ ID NO: 1800259 - RNA, 19 nt, Artificial Sequence
  Description of Artificial Sequence: Synthetic oligonucleotide
  Sense strand starting at position 3694 of SEQ ID NO: 1563165
ggauuauaugugugguuaa

SEQ ID NO: 1800260 - RNA, 19 nt, Artificial Sequence
  Description of Artificial Sequence: Synthetic oligonucleotide
  Antisense strand to SEQ ID NO: 1800259
uuaaccacacauauaaucc

SEQ ID NO: 1800261 - RNA, 19 nt, Artificial Sequence
  Description of Artificial Sequence: Synthetic oligonucleotide
  Sense strand starting at position 3697 of SEQ ID NO: 1563165
uuauaugugugguuaaaug

SEQ ID NO: 1800262 - RNA, 19 nt, Artificial Sequence
  Description of Artificial Sequence: Synthetic oligonucleotide
  Antisense strand to SEQ ID NO: 1800261
cauuuaaccacacauauaa

SEQ ID NO: 1800263 - RNA, 19 nt, Artificial Sequence
  Description of Artificial Sequence: Synthetic oligonucleotide
  Sense strand starting at position 3809 of SEQ ID NO: 1563165
ccaagagggucuguguuau

SEQ ID NO: 1800264 - RNA, 19 nt, Artificial Sequence
  Description of Artificial Sequence: Synthetic oligonucleotide
  Antisense strand to SEQ ID NO: 1800263
auaacacagacccucuugg

SEQ ID NO: 1800265 - RNA, 19 nt, Artificial Sequence
  Description of Artificial Sequence: Synthetic oligonucleotide
  Sense strand starting at position 372 of SEQ ID NO: 1563166
gggacaagauaauaauaau

SEQ ID NO: 1800266 - RNA, 19 nt, Artificial Sequence
  Description of Artificial Sequence: Synthetic oligonucleotide
  Antisense strand to SEQ ID NO: 1800265
auuauuauuaucuuguccc

SEQ ID NO: 1800267 - RNA, 19 nt, Artificial Sequence
  Description of Artificial Sequence: Synthetic oligonucleotide
  Sense strand starting at position 388 of SEQ ID NO: 1563166
aauugaaugcuagguagga

SEQ ID NO: 1800268 - RNA, 19 nt, Artificial Sequence
  Description of Artificial Sequence: Synthetic oligonucleotide
  Antisense strand to SEQ ID NO: 1800267
uccuaccuagcauucaauu

SEQ ID NO: 1800269 - RNA, 19 nt, Artificial Sequence
  Description of Artificial Sequence: Synthetic oligonucleotide
  Sense strand starting at position 389 of SEQ ID NO: 1563166
auugaaugcuagguaggaa

SEQ ID NO: 1800270 - RNA, 19 nt, Artificial Sequence
  Description of Artificial Sequence: Synthetic oligonucleotide
  Antisense strand to SEQ ID NO: 1800269
uuccuaccuagcauucaau

SEQ ID NO: 1800271 - RNA, 19 nt, Artificial Sequence
  Description of Artificial Sequence: Synthetic oligonucleotide
  Sense strand starting at position 401 of SEQ ID NO: 1563166
guaggaaauguagauuguu

SEQ ID NO: 1800272 - RNA, 19 nt, Artificial Sequence
  Description of Artificial Sequence: Synthetic oligonucleotide
  Antisense strand to SEQ ID NO: 1800271
aacaaucuacauuuccuac

SEQ ID NO: 1800273 - RNA, 19 nt, Artificial Sequence
  Description of Artificial Sequence: Synthetic oligonucleotide
  Sense strand starting at position 404 of SEQ ID NO: 1563166
ggaaauguagauuguugac

SEQ ID NO: 1800274 - RNA, 19 nt, Artificial Sequence
  Description of Artificial Sequence: Synthetic oligonucleotide
  Antisense strand to SEQ ID NO: 1800273
gucaacaaucuacauuucc

SEQ ID NO: 1800275 - RNA, 19 nt, Artificial Sequence
  Description of Artificial Sequence: Synthetic oligonucleotide
  Sense strand starting at position 406 of SEQ ID NO: 1563166
aaauguagauuguugacga

SEQ ID NO: 1800276 - RNA, 19 nt, Artificial Sequence
  Description of Artificial Sequence: Synthetic oligonucleotide
  Antisense strand to SEQ ID NO: 1800275
ucgucaacaaucuacauuu

SEQ ID NO: 1800277 - RNA, 19 nt, Artificial Sequence
  Description of Artificial Sequence: Synthetic oligonucleotide
  Sense strand starting at position 411 of SEQ ID NO: 1563166
uagauuguugacgaaaucu

SEQ ID NO: 1800278 - RNA, 19 nt, Artificial Sequence
  Description of Artificial Sequence: Synthetic oligonucleotide
  Antisense strand to SEQ ID NO: 1800277
agauuucgucaacaaucua

SEQ ID NO: 1800279 - RNA, 19 nt, Artificial Sequence
  Description of Artificial Sequence: Synthetic oligonucleotide
  Sense strand starting at position 419 of SEQ ID NO: 1563166
ugacgaaaucucuaugccu

SEQ ID NO: 1800280 - RNA, 19 nt, Artificial Sequence
  Description of Artificial Sequence: Synthetic oligonucleotide
  Antisense strand to SEQ ID NO: 1800279
aggcauagagauuucguca

SEQ ID NO: 1800281 - RNA, 19 nt, Artificial Sequence
  Description of Artificial Sequence: Synthetic oligonucleotide
  Sense strand starting at position 476 of SEQ ID NO: 1563166
gcccaaagccuagauaaug

SEQ ID NO: 1800282 - RNA, 19 nt, Artificial Sequence
  Description of Artificial Sequence: Synthetic oligonucleotide
  Antisense strand to SEQ ID NO: 1800281
cauuaucuaggcuuugggc

SEQ ID NO: 1800283 - RNA, 19 nt, Artificial Sequence
  Description of Artificial Sequence: Synthetic oligonucleotide
  Sense strand starting at position 836 of SEQ ID NO: 1563166
auuggaagagccuguccaa

SEQ ID NO: 1800284 - RNA, 19 nt, Artificial Sequence
  Description of Artificial Sequence: Synthetic oligonucleotide
  Antisense strand to SEQ ID NO: 1800283
uuggacaggcucuuccaau

SEQ ID NO: 1800285 - RNA, 19 nt, Artificial Sequence
  Description of Artificial Sequence: Synthetic oligonucleotide
  Sense strand starting at position 1035 of SEQ ID NO: 1563166
caaacuauccgauagguuu

SEQ ID NO: 1800286 - RNA, 19 nt, Artificial Sequence
  Description of Artificial Sequence: Synthetic oligonucleotide
  Antisense strand to SEQ ID NO: 1800285
aaaccuaucggauaguuug

SEQ ID NO: 1800287 - RNA, 19 nt, Artificial Sequence
  Description of Artificial Sequence: Synthetic oligonucleotide
  Sense strand starting at position 1148 of SEQ ID NO: 1563166
ucagacauguaccuagauu

SEQ ID NO: 1800288 - RNA, 19 nt, Artificial Sequence
  Description of Artificial Sequence: Synthetic oligonucleotide
  Antisense strand to SEQ ID NO: 1800287
aaucuagguacaugucuga

SEQ ID NO: 1800289 - RNA, 19 nt, Artificial Sequence
  Description of Artificial Sequence: Synthetic oligonucleotide
  Sense strand starting at position 1156 of SEQ ID NO: 1563166
guaccuagauuauuaccuu

SEQ ID NO: 1800290 - RNA, 19 nt, Artificial Sequence
  Description of Artificial Sequence: Synthetic oligonucleotide
  Antisense strand to SEQ ID NO: 1800289
aagguaauaaucuagguac

SEQ ID NO: 1800291 - RNA, 19 nt, Artificial Sequence
  Description of Artificial Sequence: Synthetic oligonucleotide
  Sense strand starting at position 1516 of SEQ ID NO: 1563166
cugacauaucgcguugcau

SEQ ID NO: 1800292 - RNA, 19 nt, Artificial Sequence
  Description of Artificial Sequence: Synthetic oligonucleotide
  Antisense strand to SEQ ID NO: 1800291
augcaacgcgauaugucag

SEQ ID NO: 1800293 - RNA, 19 nt, Artificial Sequence
  Description of Artificial Sequence: Synthetic oligonucleotide
  Sense strand starting at position 1517 of SEQ ID NO: 1563166
ugacauaucgcguugcauc

SEQ ID NO: 1800294 - RNA, 19 nt, Artificial Sequence
  Description of Artificial Sequence: Synthetic oligonucleotide
  Antisense strand to SEQ ID NO: 1800293
gaugcaacgcgauauguca

SEQ ID NO: 1800295 - RNA, 19 nt, Artificial Sequence
  Description of Artificial Sequence: Synthetic oligonucleotide
  Sense strand starting at position 1834 of SEQ ID NO: 1563166
uggaaucuuccagguacug

SEQ ID NO: 1800296 - RNA, 19 nt, Artificial Sequence
  Description of Artificial Sequence: Synthetic oligonucleotide
  Antisense strand to SEQ ID NO: 1800295
caguaccuggaagauucca

SEQ ID NO: 1800297 - RNA, 19 nt, Artificial Sequence
  Description of Artificial Sequence: Synthetic oligonucleotide
  Sense strand starting at position 2313 of SEQ ID NO: 1563166
ucugaaaucuagucccaga

SEQ ID NO: 1800298 - RNA, 19 nt, Artificial Sequence
  Description of Artificial Sequence: Synthetic oligonucleotide
  Antisense strand to SEQ ID NO: 1800297
ucugggacuagauuucaga

SEQ ID NO: 1800299 - RNA, 19 nt, Artificial Sequence
  Description of Artificial Sequence: Synthetic oligonucleotide
  Sense strand starting at position 2507 of SEQ ID NO: 1563166
aagaaugauguugggugau

SEQ ID NO: 1800300 - RNA, 19 nt, Artificial Sequence
  Description of Artificial Sequence: Synthetic oligonucleotide
  Antisense strand to SEQ ID NO: 1800299
aucacccaacaucauucuu

SEQ ID NO: 1800301 - RNA, 19 nt, Artificial Sequence
  Description of Artificial Sequence: Synthetic oligonucleotide
  Sense strand starting at position 2624 of SEQ ID NO: 1563166
cccugagugagcuaaucag

SEQ ID NO: 1800302 - RNA, 19 nt, Artificial Sequence
  Description of Artificial Sequence: Synthetic oligonucleotide
  Antisense strand to SEQ ID NO: 1800301
cugauuagcucacucaggg

SEQ ID NO: 1800303 - RNA, 19 nt, Artificial Sequence
  Description of Artificial Sequence: Synthetic oligonucleotide
  Sense strand starting at position 2671 of SEQ ID NO: 1563166
cuagaccagucuucugaau

SEQ ID NO: 1800304 - RNA, 19 nt, Artificial Sequence
  Description of Artificial Sequence: Synthetic oligonucleotide
  Antisense strand to SEQ ID NO: 1800303
auucagaagacuggucuag

SEQ ID NO: 1800305 - RNA, 19 nt, Artificial Sequence
  Description of Artificial Sequence: Synthetic oligonucleotide
  Sense strand starting at position 2796 of SEQ ID NO: 1563166
acaguagguaucugugaga

SEQ ID NO: 1800306 - RNA, 19 nt, Artificial Sequence
  Description of Artificial Sequence: Synthetic oligonucleotide
  Antisense strand to SEQ ID NO: 1800305
ucucacagauaccuacugu

SEQ ID NO: 1800307 - RNA, 19 nt, Artificial Sequence
  Description of Artificial Sequence: Synthetic oligonucleotide
  Sense strand starting at position 2803 of SEQ ID NO: 1563166
guaucugugagauaaagca

SEQ ID NO: 1800308 - RNA, 19 nt, Artificial Sequence
  Description of Artificial Sequence: Synthetic oligonucleotide
  Antisense strand to SEQ ID NO: 1800307
ugcuuuaucucacagauac

SEQ ID NO: 1800309 - RNA, 19 nt, Artificial Sequence
  Description of Artificial Sequence: Synthetic oligonucleotide
  Sense strand starting at position 2977 of SEQ ID NO: 1563166
uuuacuuacugguuugaua

SEQ ID NO: 1800310 - RNA, 19 nt, Artificial Sequence
  Description of Artificial Sequence: Synthetic oligonucleotide
  Antisense strand to SEQ ID NO: 1800309
uaucaaaccaguaaguaaa

SEQ ID NO: 1800311 - RNA, 19 nt, Artificial Sequence
  Description of Artificial Sequence: Synthetic oligonucleotide
  Sense strand starting at position 3347 of SEQ ID NO: 1563166
aguacuagaaugugauuga

SEQ ID NO: 1800312 - RNA, 19 nt, Artificial Sequence
  Description of Artificial Sequence: Synthetic oligonucleotide
  Antisense strand to SEQ ID NO: 1800311
ucaaucacauucuaguacu

SEQ ID NO: 1800313 - RNA, 19 nt, Artificial Sequence
  Description of Artificial Sequence: Synthetic oligonucleotide
  Sense strand starting at position 3351 of SEQ ID NO: 1563166
cuagaaugugauugaaauu

SEQ ID NO: 1800314 - RNA, 19 nt, Artificial Sequence
  Description of Artificial Sequence: Synthetic oligonucleotide
  Antisense strand to SEQ ID NO: 1800313
aauuucaaucacauucuag

SEQ ID NO: 1800315 - RNA, 19 nt, Artificial Sequence
  Description of Artificial Sequence: Synthetic oligonucleotide
  Sense strand starting at position 3398 of SEQ ID NO: 1563166
auaugauccuguguuuaga

SEQ ID NO: 1800316 - RNA, 19 nt, Artificial Sequence
  Description of Artificial Sequence: Synthetic oligonucleotide
  Antisense strand to SEQ ID NO: 1800315
ucuaaacacaggaucauau

SEQ ID NO: 1800317 - RNA, 19 nt, Artificial Sequence
  Description of Artificial Sequence: Synthetic oligonucleotide
  Sense strand starting at position 3400 of SEQ ID NO: 1563166
augauccuguguuuagaga

SEQ ID NO: 1800318 - RNA, 19 nt, Artificial Sequence
  Description of Artificial Sequence: Synthetic oligonucleotide
  Antisense strand to SEQ ID NO: 1800317
ucucuaaacacaggaucau

SEQ ID NO: 1800319 - RNA, 19 nt, Artificial Sequence
  Description of Artificial Sequence: Synthetic oligonucleotide
  Sense strand starting at position 3401 of SEQ ID NO: 1563166
ugauccuguguuuagagaa

SEQ ID NO: 1800320 - RNA, 19 nt, Artificial Sequence
  Description of Artificial Sequence: Synthetic oligonucleotide
  Antisense strand to SEQ ID NO: 1800319
uucucuaaacacaggauca

SEQ ID NO: 1800321 - RNA, 19 nt, Artificial Sequence
  Description of Artificial Sequence: Synthetic oligonucleotide
  Sense strand starting at position 3417 of SEQ ID NO: 1563166
gaaagaucauguguagcaa

SEQ ID NO: 1800322 - RNA, 19 nt, Artificial Sequence
  Description of Artificial Sequence: Synthetic oligonucleotide
  Antisense strand to SEQ ID NO: 1800321
uugcuacacaugaucuuuc

SEQ ID NO: 1800323 - RNA, 19 nt, Artificial Sequence
  Description of Artificial Sequence: Synthetic oligonucleotide
  Sense strand starting at position 3418 of SEQ ID NO: 1563166
aaagaucauguguagcaaa

SEQ ID NO: 1800324 - RNA, 19 nt, Artificial Sequence
  Description of Artificial Sequence: Synthetic oligonucleotide
  Antisense strand to SEQ ID NO: 1800323
uuugcuacacaugaucuuu

SEQ ID NO: 1800325 - RNA, 19 nt, Artificial Sequence
  Description of Artificial Sequence: Synthetic oligonucleotide
  Sense strand starting at position 3466 of SEQ ID NO: 1563166
aaaggacagucagaagaaa

SEQ ID NO: 1800326 - RNA, 19 nt, Artificial Sequence
  Description of Artificial Sequence: Synthetic oligonucleotide
  Antisense strand to SEQ ID NO: 1800325
uuucuucugacuguccuuu

SEQ ID NO: 1800327 - RNA, 19 nt, Artificial Sequence
  Description of Artificial Sequence: Synthetic oligonucleotide
  Sense strand starting at position 3566 of SEQ ID NO: 1563166
cagagucaugcccaugaug

SEQ ID NO: 1800328 - RNA, 19 nt, Artificial Sequence
  Description of Artificial Sequence: Synthetic oligonucleotide
  Antisense strand to SEQ ID NO: 1800327
caucaugggcaugacucug

SEQ ID NO: 1800329 - RNA, 19 nt, Artificial Sequence
  Description of Artificial Sequence: Synthetic oligonucleotide
  Sense strand starting at position 3699 of SEQ ID NO: 1563166
guagcuugucuacagggaa

SEQ ID NO: 1800330 - RNA, 19 nt, Artificial Sequence
  Description of Artificial Sequence: Synthetic oligonucleotide
  Antisense strand to SEQ ID NO: 1800329
uucccuguagacaagcuac

SEQ ID NO: 1800331 - RNA, 19 nt, Artificial Sequence
  Description of Artificial Sequence: Synthetic oligonucleotide
  Sense strand starting at position 3702 of SEQ ID NO: 1563166
gcuugucuacagggaaaga

SEQ ID NO: 1800332 - RNA, 19 nt, Artificial Sequence
  Description of Artificial Sequence: Synthetic oligonucleotide
  Antisense strand to SEQ ID NO: 1800331
ucuuucccuguagacaagc

SEQ ID NO: 1800333 - RNA, 19 nt, Artificial Sequence
  Description of Artificial Sequence: Synthetic oligonucleotide
  Sense strand starting at position 3725 of SEQ ID NO: 1563166
gcagguaagacugacggaa

SEQ ID NO: 1800334 - RNA, 19 nt, Artificial Sequence
  Description of Artificial Sequence: Synthetic oligonucleotide
  Antisense strand to SEQ ID NO: 1800333
uuccgucagucuuaccugc

SEQ ID NO: 1800335 - RNA, 19 nt, Artificial Sequence
  Description of Artificial Sequence: Synthetic oligonucleotide
  Sense strand starting at position 3844 of SEQ ID NO: 1563166
ugcagagaucccuagguuu

SEQ ID NO: 1800336 - RNA, 19 nt, Artificial Sequence
  Description of Artificial Sequence: Synthetic oligonucleotide
  Antisense strand to SEQ ID NO: 1800335
aaaccuagggaucucugca

SEQ ID NO: 1800337 - RNA, 19 nt, Artificial Sequence
  Description of Artificial Sequence: Synthetic oligonucleotide
  Sense strand starting at position 3846 of SEQ ID NO: 1563166
cagagaucccuagguuuga

SEQ ID NO: 1800338 - RNA, 19 nt, Artificial Sequence
  Description of Artificial Sequence: Synthetic oligonucleotide
  Antisense strand to SEQ ID NO: 1800337
ucaaaccuagggaucucug

SEQ ID NO: 1800339 - RNA, 19 nt, Artificial Sequence
  Description of Artificial Sequence: Synthetic oligonucleotide
  Sense strand starting at position 3888 of SEQ ID NO: 1563166
agucucuaugaaugggagu

SEQ ID NO: 1800340 - RNA, 19 nt, Artificial Sequence
  Description of Artificial Sequence: Synthetic oligonucleotide
  Antisense strand to SEQ ID NO: 1800339
acucccauucauagagacu

SEQ ID NO: 1800341 - RNA, 19 nt, Artificial Sequence
  Description of Artificial Sequence: Synthetic oligonucleotide
  Sense strand starting at position 3899 of SEQ ID NO: 1563166
augggagucuuuccuugag

SEQ ID NO: 1800342 - RNA, 19 nt, Artificial Sequence
  Description of Artificial Sequence: Synthetic oligonucleotide
  Antisense strand to SEQ ID NO: 1800341
cucaaggaaagacucccau

SEQ ID NO: 1800343 - RNA, 19 nt, Artificial Sequence
  Description of Artificial Sequence: Synthetic oligonucleotide
  Sense strand starting at position 3903 of SEQ ID NO: 1563166
gagucuuuccuugaggcau

SEQ ID NO: 1800344 - RNA, 19 nt, Artificial Sequence
  Description of Artificial Sequence: Synthetic oligonucleotide
  Antisense strand to SEQ ID NO: 1800343
augccucaaggaaagacuc

SEQ ID NO: 1800345 - RNA, 19 nt, Artificial Sequence
  Description of Artificial Sequence: Synthetic oligonucleotide
  Sense strand starting at position 603 of SEQ ID NO: 1563167
gggacaagauaauaauaau

SEQ ID NO: 1800346 - RNA, 19 nt, Artificial Sequence
  Description of Artificial Sequence: Synthetic oligonucleotide
  Antisense strand to SEQ ID NO: 1800345
auuauuauuaucuuguccc

SEQ ID NO: 1800347 - RNA, 19 nt, Artificial Sequence
  Description of Artificial Sequence: Synthetic oligonucleotide
  Sense strand starting at position 619 of SEQ ID NO: 1563167
aauugaaugcuagguagga

SEQ ID NO: 1800348 - RNA, 19 nt, Artificial Sequence
  Description of Artificial Sequence: Synthetic oligonucleotide
  Antisense strand to SEQ ID NO: 1800347
uccuaccuagcauucaauu

SEQ ID NO: 1800349 - RNA, 19 nt, Artificial Sequence
  Description of Artificial Sequence: Synthetic oligonucleotide
  Sense strand starting at position 620 of SEQ ID NO: 1563167
auugaaugcuagguaggaa

SEQ ID NO: 1800350 - RNA, 19 nt, Artificial Sequence
  Description of Artificial Sequence: Synthetic oligonucleotide
  Antisense strand to SEQ ID NO: 1800349
uuccuaccuagcauucaau

SEQ ID NO: 1800351 - RNA, 19 nt, Artificial Sequence
  Description of Artificial Sequence: Synthetic oligonucleotide
  Sense strand starting at position 632 of SEQ ID NO: 1563167
guaggaaauguagauuguu

SEQ ID NO: 1800352 - RNA, 19 nt, Artificial Sequence
  Description of Artificial Sequence: Synthetic oligonucleotide
  Antisense strand to SEQ ID NO: 1800351
aacaaucuacauuuccuac

SEQ ID NO: 1800353 - RNA, 19 nt, Artificial Sequence
  Description of Artificial Sequence: Synthetic oligonucleotide
  Sense strand starting at position 635 of SEQ ID NO: 1563167
ggaaauguagauuguugac

SEQ ID NO: 1800354 - RNA, 19 nt, Artificial Sequence
  Description of Artificial Sequence: Synthetic oligonucleotide
  Antisense strand to SEQ ID NO: 1800353
gucaacaaucuacauuucc

SEQ ID NO: 1800355 - RNA, 19 nt, Artificial Sequence
  Description of Artificial Sequence: Synthetic oligonucleotide
  Sense strand starting at position 637 of SEQ ID NO: 1563167
aaauguagauuguugacga

SEQ ID NO: 1800356 - RNA, 19 nt, Artificial Sequence
  Description of Artificial Sequence: Synthetic oligonucleotide
  Antisense strand to SEQ ID NO: 1800355
ucgucaacaaucuacauuu

SEQ ID NO: 1800357 - RNA, 19 nt, Artificial Sequence
  Description of Artificial Sequence: Synthetic oligonucleotide
  Sense strand starting at position 642 of SEQ ID NO: 1563167
uagauuguugacgaaaucu

SEQ ID NO: 1800358 - RNA, 19 nt, Artificial Sequence
  Description of Artificial Sequence: Synthetic oligonucleotide
  Antisense strand to SEQ ID NO: 1800357
agauuucgucaacaaucua

SEQ ID NO: 1800359 - RNA, 19 nt, Artificial Sequence
  Description of Artificial Sequence: Synthetic oligonucleotide
  Sense strand starting at position 650 of SEQ ID NO: 1563167
ugacgaaaucucuaugccu

SEQ ID NO: 1800360 - RNA, 19 nt, Artificial Sequence
  Description of Artificial Sequence: Synthetic oligonucleotide
  Antisense strand to SEQ ID NO: 1800359
aggcauagagauuucguca

SEQ ID NO: 1800361 - RNA, 19 nt, Artificial Sequence
  Description of Artificial Sequence: Synthetic oligonucleotide
  Sense strand starting at position 707 of SEQ ID NO: 1563167
gcccaaagccuagauaaug

SEQ ID NO: 1800362 - RNA, 19 nt, Artificial Sequence
  Description of Artificial Sequence: Synthetic oligonucleotide
  Antisense strand to SEQ ID NO: 1800361
cauuaucuaggcuuugggc

SEQ ID NO: 1800363 - RNA, 19 nt, Artificial Sequence
  Description of Artificial Sequence: Synthetic oligonucleotide
  Sense strand starting at position 1067 of SEQ ID NO: 1563167
auuggaagagccuguccaa

SEQ ID NO: 1800364 - RNA, 19 nt, Artificial Sequence
  Description of Artificial Sequence: Synthetic oligonucleotide
  Antisense strand to SEQ ID NO: 1800363
uuggacaggcucuuccaau

SEQ ID NO: 1800365 - RNA, 19 nt, Artificial Sequence
  Description of Artificial Sequence: Synthetic oligonucleotide
  Sense strand starting at position 1070 of SEQ ID NO: 1563167
ggaagagccuguccaaagu

SEQ ID NO: 1800366 - RNA, 19 nt, Artificial Sequence
  Description of Artificial Sequence: Synthetic oligonucleotide
  Antisense strand to SEQ ID NO: 1800365
acuuuggacaggcucuucc

SEQ ID NO: 1800367 - RNA, 19 nt, Artificial Sequence
  Description of Artificial Sequence: Synthetic oligonucleotide
  Sense strand starting at position 1266 of SEQ ID NO: 1563167
caaacuauccgauagguuu

SEQ ID NO: 1800368 - RNA, 19 nt, Artificial Sequence
  Description of Artificial Sequence: Synthetic oligonucleotide
  Antisense strand to SEQ ID NO: 1800367
aaaccuaucggauaguuug

SEQ ID NO: 1800369 - RNA, 19 nt, Artificial Sequence
  Description of Artificial Sequence: Synthetic oligonucleotide
  Sense strand starting at position 1379 of SEQ ID NO: 1563167
ucagacauguaccuagauu

SEQ ID NO: 1800370 - RNA, 19 nt, Artificial Sequence
  Description of Artificial Sequence: Synthetic oligonucleotide
  Antisense strand to SEQ ID NO: 1800369
aaucuagguacaugucuga

SEQ ID NO: 1800371 - RNA, 19 nt, Artificial Sequence
  Description of Artificial Sequence: Synthetic oligonucleotide
  Sense strand starting at position 1387 of SEQ ID NO: 1563167
guaccuagauuauuaccuu

SEQ ID NO: 1800372 - RNA, 19 nt, Artificial Sequence
  Description of Artificial Sequence: Synthetic oligonucleotide
  Antisense strand to SEQ ID NO: 1800371
aagguaauaaucuagguac

SEQ ID NO: 1800373 - RNA, 19 nt, Artificial Sequence
  Description of Artificial Sequence: Synthetic oligonucleotide
  Sense strand starting at position 1586 of SEQ ID NO: 1563167
gagccauggucaguaagac

SEQ ID NO: 1800374 - RNA, 19 nt, Artificial Sequence
  Description of Artificial Sequence: Synthetic oligonucleotide
  Antisense strand to SEQ ID NO: 1800373
gucuuacugaccauggcuc

SEQ ID NO: 1800375 - RNA, 19 nt, Artificial Sequence
  Description of Artificial Sequence: Synthetic oligonucleotide
  Sense strand starting at position 1747 of SEQ ID NO: 1563167
cugacauaucgcguugcau

SEQ ID NO: 1800376 - RNA, 19 nt, Artificial Sequence
  Description of Artificial Sequence: Synthetic oligonucleotide
  Antisense strand to SEQ ID NO: 1800375
augcaacgcgauaugucag

SEQ ID NO: 1800377 - RNA, 19 nt, Artificial Sequence
  Description of Artificial Sequence: Synthetic oligonucleotide
  Sense strand starting at position 1748 of SEQ ID NO: 1563167
ugacauaucgcguugcauc

SEQ ID NO: 1800378 - RNA, 19 nt, Artificial Sequence
  Description of Artificial Sequence: Synthetic oligonucleotide
  Antisense strand to SEQ ID NO: 1800377
gaugcaacgcgauauguca

SEQ ID NO: 1800379 - RNA, 19 nt, Artificial Sequence
  Description of Artificial Sequence: Synthetic oligonucleotide
  Sense strand starting at position 2065 of SEQ ID NO: 1563167
uggaaucuuccagguacug

SEQ ID NO: 1800380 - RNA, 19 nt, Artificial Sequence
  Description of Artificial Sequence: Synthetic oligonucleotide
  Antisense strand to SEQ ID NO: 1800379
caguaccuggaagauucca

SEQ ID NO: 1800381 - RNA, 19 nt, Artificial Sequence
  Description of Artificial Sequence: Synthetic oligonucleotide
  Sense strand starting at position 2544 of SEQ ID NO: 1563167
ucugaaaucuagucccaga

SEQ ID NO: 1800382 - RNA, 19 nt, Artificial Sequence
  Description of Artificial Sequence: Synthetic oligonucleotide
  Antisense strand to SEQ ID NO: 1800381
ucugggacuagauuucaga

SEQ ID NO: 1800383 - RNA, 19 nt, Artificial Sequence
  Description of Artificial Sequence: Synthetic oligonucleotide
  Sense strand starting at position 2738 of SEQ ID NO: 1563167
aagaaugauguugggugau

SEQ ID NO: 1800384 - RNA, 19 nt, Artificial Sequence
  Description of Artificial Sequence: Synthetic oligonucleotide
  Antisense strand to SEQ ID NO: 1800383
aucacccaacaucauucuu

SEQ ID NO: 1800385 - RNA, 19 nt, Artificial Sequence
  Description of Artificial Sequence: Synthetic oligonucleotide
  Sense strand starting at position 2784 of SEQ ID NO: 1563167
cuugguggagaguguuaca

SEQ ID NO: 1800386 - RNA, 19 nt, Artificial Sequence
  Description of Artificial Sequence: Synthetic oligonucleotide
  Antisense strand to SEQ ID NO: 1800385
uguaacacucuccaccaag

SEQ ID NO: 1800387 - RNA, 19 nt, Artificial Sequence
  Description of Artificial Sequence: Synthetic oligonucleotide
  Sense strand starting at position 2855 of SEQ ID NO: 1563167
cccugagugagcuaaucag

SEQ ID NO: 1800388 - RNA, 19 nt, Artificial Sequence
  Description of Artificial Sequence: Synthetic oligonucleotide
  Antisense strand to SEQ ID NO: 1800387
cugauuagcucacucaggg

SEQ ID NO: 1800389 - RNA, 19 nt, Artificial Sequence
  Description of Artificial Sequence: Synthetic oligonucleotide
  Sense strand starting at position 2902 of SEQ ID NO: 1563167
cuagaccagucuucugaau

SEQ ID NO: 1800390 - RNA, 19 nt, Artificial Sequence
  Description of Artificial Sequence: Synthetic oligonucleotide
  Antisense strand to SEQ ID NO: 1800389
auucagaagacuggucuag

SEQ ID NO: 1800391 - RNA, 19 nt, Artificial Sequence
  Description of Artificial Sequence: Synthetic oligonucleotide
  Sense strand starting at position 3027 of SEQ ID NO: 1563167
acaguagguaucugugaga

SEQ ID NO: 1800392 - RNA, 19 nt, Artificial Sequence
  Description of Artificial Sequence: Synthetic oligonucleotide
  Antisense strand to SEQ ID NO: 1800391
ucucacagauaccuacugu

SEQ ID NO: 1800393 - RNA, 19 nt, Artificial Sequence
  Description of Artificial Sequence: Synthetic oligonucleotide
  Sense strand starting at position 3034 of SEQ ID NO: 1563167
guaucugugagauaaagca

SEQ ID NO: 1800394 - RNA, 19 nt, Artificial Sequence
  Description of Artificial Sequence: Synthetic oligonucleotide
  Antisense strand to SEQ ID NO: 1800393
ugcuuuaucucacagauac

SEQ ID NO: 1800395 - RNA, 19 nt, Artificial Sequence
  Description of Artificial Sequence: Synthetic oligonucleotide
  Sense strand starting at position 3208 of SEQ ID NO: 1563167
uuuacuuacugguuugaua

SEQ ID NO: 1800396 - RNA, 19 nt, Artificial Sequence
  Description of Artificial Sequence: Synthetic oligonucleotide
  Antisense strand to SEQ ID NO: 1800395
uaucaaaccaguaaguaaa

SEQ ID NO: 1800397 - RNA, 19 nt, Artificial Sequence
  Description of Artificial Sequence: Synthetic oligonucleotide
  Sense strand starting at position 3576 of SEQ ID NO: 1563167
gcaguacuagaaugugauu

SEQ ID NO: 1800398 - RNA, 19 nt, Artificial Sequence
  Description of Artificial Sequence: Synthetic oligonucleotide
  Antisense strand to SEQ ID NO: 1800397
aaucacauucuaguacugc

SEQ ID NO: 1800399 - RNA, 19 nt, Artificial Sequence
  Description of Artificial Sequence: Synthetic oligonucleotide
  Sense strand starting at position 3578 of SEQ ID NO: 1563167
aguacuagaaugugauuga

SEQ ID NO: 1800400 - RNA, 19 nt, Artificial Sequence
  Description of Artificial Sequence: Synthetic oligonucleotide
  Antisense strand to SEQ ID NO: 1800399
ucaaucacauucuaguacu

SEQ ID NO: 1800401 - RNA, 19 nt, Artificial Sequence
  Description of Artificial Sequence: Synthetic oligonucleotide
  Sense strand starting at position 3582 of SEQ ID NO: 1563167
cuagaaugugauugaaauu

SEQ ID NO: 1800402 - RNA, 19 nt, Artificial Sequence
  Description of Artificial Sequence: Synthetic oligonucleotide
  Antisense strand to SEQ ID NO: 1800401
aauuucaaucacauucuag

SEQ ID NO: 1800403 - RNA, 19 nt, Artificial Sequence
  Description of Artificial Sequence: Synthetic oligonucleotide
  Sense strand starting at position 3629 of SEQ ID NO: 1563167
auaugauccuguguuuaga

SEQ ID NO: 1800404 - RNA, 19 nt, Artificial Sequence
  Description of Artificial Sequence: Synthetic oligonucleotide
  Antisense strand to SEQ ID NO: 1800403
ucuaaacacaggaucauau

SEQ ID NO: 1800405 - RNA, 19 nt, Artificial Sequence
  Description of Artificial Sequence: Synthetic oligonucleotide
  Sense strand starting at position 3631 of SEQ ID NO: 1563167
augauccuguguuuagaga

SEQ ID NO: 1800406 - RNA, 19 nt, Artificial Sequence
  Description of Artificial Sequence: Synthetic oligonucleotide
  Antisense strand to SEQ ID NO: 1800405
ucucuaaacacaggaucau

SEQ ID NO: 1800407 - RNA, 19 nt, Artificial Sequence
  Description of Artificial Sequence: Synthetic oligonucleotide
  Sense strand starting at position 3632 of SEQ ID NO: 1563167
ugauccuguguuuagagaa

SEQ ID NO: 1800408 - RNA, 19 nt, Artificial Sequence
  Description of Artificial Sequence: Synthetic oligonucleotide
  Antisense strand to SEQ ID NO: 1800407
uucucuaaacacaggauca

SEQ ID NO: 1800409 - RNA, 19 nt, Artificial Sequence
  Description of Artificial Sequence: Synthetic oligonucleotide
  Sense strand starting at position 3648 of SEQ ID NO: 1563167
gaaagaucauguguagcaa

SEQ ID NO: 1800410 - RNA, 19 nt, Artificial Sequence
  Description of Artificial Sequence: Synthetic oligonucleotide
  Antisense strand to SEQ ID NO: 1800409
uugcuacacaugaucuuuc

SEQ ID NO: 1800411 - RNA, 19 nt, Artificial Sequence
  Description of Artificial Sequence: Synthetic oligonucleotide
  Sense strand starting at position 3649 of SEQ ID NO: 1563167
aaagaucauguguagcaaa

SEQ ID NO: 1800412 - RNA, 19 nt, Artificial Sequence
  Description of Artificial Sequence: Synthetic oligonucleotide
  Antisense strand to SEQ ID NO: 1800411
uuugcuacacaugaucuuu

SEQ ID NO: 1800413 - RNA, 19 nt, Artificial Sequence
  Description of Artificial Sequence: Synthetic oligonucleotide
  Sense strand starting at position 3697 of SEQ ID NO: 1563167
aaaggacagucagaagaaa

SEQ ID NO: 1800414 - RNA, 19 nt, Artificial Sequence
  Description of Artificial Sequence: Synthetic oligonucleotide
  Antisense strand to SEQ ID NO: 1800413
uuucuucugacuguccuuu

SEQ ID NO: 1800415 - RNA, 19 nt, Artificial Sequence
  Description of Artificial Sequence: Synthetic oligonucleotide
  Sense strand starting at position 3787 of SEQ ID NO: 1563167
cuuucucuggcagagucau

SEQ ID NO: 1800416 - RNA, 19 nt, Artificial Sequence
  Description of Artificial Sequence: Synthetic oligonucleotide
  Antisense strand to SEQ ID NO: 1800415
augacucugccagagaaag

SEQ ID NO: 1800417 - RNA, 19 nt, Artificial Sequence
  Description of Artificial Sequence: Synthetic oligonucleotide
  Sense strand starting at position 3797 of SEQ ID NO: 1563167
cagagucaugcccaugaug

SEQ ID NO: 1800418 - RNA, 19 nt, Artificial Sequence
  Description of Artificial Sequence: Synthetic oligonucleotide
  Antisense strand to SEQ ID NO: 1800417
caucaugggcaugacucug

SEQ ID NO: 1800419 - RNA, 19 nt, Artificial Sequence
  Description of Artificial Sequence: Synthetic oligonucleotide
  Sense strand starting at position 3930 of SEQ ID NO: 1563167
guagcuugucuacagggaa

SEQ ID NO: 1800420 - RNA, 19 nt, Artificial Sequence
  Description of Artificial Sequence: Synthetic oligonucleotide
  Antisense strand to SEQ ID NO: 1800419
uucccuguagacaagcuac

SEQ ID NO: 1800421 - RNA, 19 nt, Artificial Sequence
  Description of Artificial Sequence: Synthetic oligonucleotide
  Sense strand starting at position 3933 of SEQ ID NO: 1563167
gcuugucuacagggaaaga

SEQ ID NO: 1800422 - RNA, 19 nt, Artificial Sequence
  Description of Artificial Sequence: Synthetic oligonucleotide
  Antisense strand to SEQ ID NO: 1800421
ucuuucccuguagacaagc

SEQ ID NO: 1800423 - RNA, 19 nt, Artificial Sequence
  Description of Artificial Sequence: Synthetic oligonucleotide
  Sense strand starting at position 3956 of SEQ ID NO: 1563167
gcagguaagacugacggaa

SEQ ID NO: 1800424 - RNA, 19 nt, Artificial Sequence
  Description of Artificial Sequence: Synthetic oligonucleotide
  Antisense strand to SEQ ID NO: 1800423
uuccgucagucuuaccugc

SEQ ID NO: 1800425 - RNA, 19 nt, Artificial Sequence
  Description of Artificial Sequence: Synthetic oligonucleotide
  Sense strand starting at position 1645 of SEQ ID NO: 1563168
uuuguugcaucauacagau

SEQ ID NO: 1800426 - RNA, 19 nt, Artificial Sequence
  Description of Artificial Sequence: Synthetic oligonucleotide
  Antisense strand to SEQ ID NO: 1800425
aucuguaugaugcaacaaa

SEQ ID NO: 1800427 - RNA, 19 nt, Artificial Sequence
  Description of Artificial Sequence: Synthetic oligonucleotide
  Sense strand starting at position 1691 of SEQ ID NO: 1563168
gaaccaugugcuuggugga

SEQ ID NO: 1800428 - RNA, 19 nt, Artificial Sequence
  Description of Artificial Sequence: Synthetic oligonucleotide
  Antisense strand to SEQ ID NO: 1800427
uccaccaagcacaugguuc

SEQ ID NO: 1800429 - RNA, 19 nt, Artificial Sequence
  Description of Artificial Sequence: Synthetic oligonucleotide
  Sense strand starting at position 1692 of SEQ ID NO: 1563168
aaccaugugcuugguggaa

SEQ ID NO: 1800430 - RNA, 19 nt, Artificial Sequence
  Description of Artificial Sequence: Synthetic oligonucleotide
  Antisense strand to SEQ ID NO: 1800429
uuccaccaagcacaugguu

SEQ ID NO: 1800431 - RNA, 19 nt, Artificial Sequence
  Description of Artificial Sequence: Synthetic oligonucleotide
  Sense strand starting at position 1694 of SEQ ID NO: 1563168
ccaugugcuugguggaaga

SEQ ID NO: 1800432 - RNA, 19 nt, Artificial Sequence
  Description of Artificial Sequence: Synthetic oligonucleotide
  Antisense strand to SEQ ID NO: 1800431
ucuuccaccaagcacaugg

SEQ ID NO: 1800433 - RNA, 19 nt, Artificial Sequence
  Description of Artificial Sequence: Synthetic oligonucleotide
  Sense strand starting at position 1696 of SEQ ID NO: 1563168
augugcuugguggaagaga

SEQ ID NO: 1800434 - RNA, 19 nt, Artificial Sequence
  Description of Artificial Sequence: Synthetic oligonucleotide
  Antisense strand to SEQ ID NO: 1800433
ucucuuccaccaagcacau

SEQ ID NO: 1800435 - RNA, 19 nt, Artificial Sequence
  Description of Artificial Sequence: Synthetic oligonucleotide
  Sense strand starting at position 1840 of SEQ ID NO: 1563168
gguaggaggucugacgaua

SEQ ID NO: 1800436 - RNA, 19 nt, Artificial Sequence
  Description of Artificial Sequence: Synthetic oligonucleotide
  Antisense strand to SEQ ID NO: 1800435
uaucgucagaccuccuacc

SEQ ID NO: 1800437 - RNA, 19 nt, Artificial Sequence
  Description of Artificial Sequence: Synthetic oligonucleotide
  Sense strand starting at position 1851 of SEQ ID NO: 1563168
ugacgauaaaugggagcaa

SEQ ID NO: 1800438 - RNA, 19 nt, Artificial Sequence
  Description of Artificial Sequence: Synthetic oligonucleotide
  Antisense strand to SEQ ID NO: 1800437
uugcucccauuuaucguca

SEQ ID NO: 1800439 - RNA, 19 nt, Artificial Sequence
  Description of Artificial Sequence: Synthetic oligonucleotide
  Sense strand starting at position 1883 of SEQ ID NO: 1563168
gacuuugauuucuacugga

SEQ ID NO: 1800440 - RNA, 19 nt, Artificial Sequence
  Description of Artificial Sequence: Synthetic oligonucleotide
  Antisense strand to SEQ ID NO: 1800439
uccaguagaaaucaaaguc

SEQ ID NO: 1800441 - RNA, 19 nt, Artificial Sequence
  Description of Artificial Sequence: Synthetic oligonucleotide
  Sense strand starting at position 1886 of SEQ ID NO: 1563168
uuugauuucuacuggaccu

SEQ ID NO: 1800442 - RNA, 19 nt, Artificial Sequence
  Description of Artificial Sequence: Synthetic oligonucleotide
  Antisense strand to SEQ ID NO: 1800441
agguccaguagaaaucaaa

SEQ ID NO: 1800443 - RNA, 19 nt, Artificial Sequence
  Description of Artificial Sequence: Synthetic oligonucleotide
  Sense strand starting at position 2075 of SEQ ID NO: 1563168
uagagaguuuguucuugau

SEQ ID NO: 1800444 - RNA, 19 nt, Artificial Sequence
  Description of Artificial Sequence: Synthetic oligonucleotide
  Antisense strand to SEQ ID NO: 1800443
aucaagaacaaacucucua

SEQ ID NO: 1800445 - RNA, 19 nt, Artificial Sequence
  Description of Artificial Sequence: Synthetic oligonucleotide
  Sense strand starting at position 2077 of SEQ ID NO: 1563168
gagaguuuguucuugaugg

SEQ ID NO: 1800446 - RNA, 19 nt, Artificial Sequence
  Description of Artificial Sequence: Synthetic oligonucleotide
  Antisense strand to SEQ ID NO: 1800445
ccaucaagaacaaacucuc

SEQ ID NO: 1800447 - RNA, 19 nt, Artificial Sequence
  Description of Artificial Sequence: Synthetic oligonucleotide
  Sense strand starting at position 2079 of SEQ ID NO: 1563168
gaguuuguucuugauggga

SEQ ID NO: 1800448 - RNA, 19 nt, Artificial Sequence
  Description of Artificial Sequence: Synthetic oligonucleotide
  Antisense strand to SEQ ID NO: 1800447
ucccaucaagaacaaacuc

SEQ ID NO: 1800449 - RNA, 19 nt, Artificial Sequence
  Description of Artificial Sequence: Synthetic oligonucleotide
  Sense strand starting at position 2081 of SEQ ID NO: 1563168
guuuguucuugaugggaca

SEQ ID NO: 1800450 - RNA, 19 nt, Artificial Sequence
  Description of Artificial Sequence: Synthetic oligonucleotide
  Antisense strand to SEQ ID NO: 1800449
ugucccaucaagaacaaac

SEQ ID NO: 1800451 - RNA, 19 nt, Artificial Sequence
  Description of Artificial Sequence: Synthetic oligonucleotide
  Sense strand starting at position 2083 of SEQ ID NO: 1563168
uuguucuugaugggacaga

SEQ ID NO: 1800452 - RNA, 19 nt, Artificial Sequence
  Description of Artificial Sequence: Synthetic oligonucleotide
  Antisense strand to SEQ ID NO: 1800451
ucugucccaucaagaacaa

SEQ ID NO: 1800453 - RNA, 19 nt, Artificial Sequence
  Description of Artificial Sequence: Synthetic oligonucleotide
  Sense strand starting at position 2181 of SEQ ID NO: 1563168
ccagaauuaaggugagggu

SEQ ID NO: 1800454 - RNA, 19 nt, Artificial Sequence
  Description of Artificial Sequence: Synthetic oligonucleotide
  Antisense strand to SEQ ID NO: 1800453
acccucaccuuaauucugg

SEQ ID NO: 1800455 - RNA, 19 nt, Artificial Sequence
  Description of Artificial Sequence: Synthetic oligonucleotide
  Sense strand starting at position 2429 of SEQ ID NO: 1563168
caggcagaucuauggacaa

SEQ ID NO: 1800456 - RNA, 19 nt, Artificial Sequence
  Description of Artificial Sequence: Synthetic oligonucleotide
  Antisense strand to SEQ ID NO: 1800455
uuguccauagaucugccug

SEQ ID NO: 1800457 - RNA, 19 nt, Artificial Sequence
  Description of Artificial Sequence: Synthetic oligonucleotide
  Sense strand starting at position 2471 of SEQ ID NO: 1563168
aaccgagucccugguagaa

SEQ ID NO: 1800458 - RNA, 19 nt, Artificial Sequence
  Description of Artificial Sequence: Synthetic oligonucleotide
  Antisense strand to SEQ ID NO: 1800457
uucuaccagggacucgguu

SEQ ID NO: 1800459 - RNA, 19 nt, Artificial Sequence
  Description of Artificial Sequence: Synthetic oligonucleotide
  Sense strand starting at position 2473 of SEQ ID NO: 1563168
ccgagucccugguagaaca

SEQ ID NO: 1800460 - RNA, 19 nt, Artificial Sequence
  Description of Artificial Sequence: Synthetic oligonucleotide
  Antisense strand to SEQ ID NO: 1800459
uguucuaccagggacucgg

SEQ ID NO: 1800461 - RNA, 19 nt, Artificial Sequence
  Description of Artificial Sequence: Synthetic oligonucleotide
  Sense strand starting at position 2516 of SEQ ID NO: 1563168
caaugucugccucgccaga

SEQ ID NO: 1800462 - RNA, 19 nt, Artificial Sequence
  Description of Artificial Sequence: Synthetic oligonucleotide
  Antisense strand to SEQ ID NO: 1800461
ucuggcgaggcagacauug

SEQ ID NO: 1800463 - RNA, 19 nt, Artificial Sequence
  Description of Artificial Sequence: Synthetic oligonucleotide
  Sense strand starting at position 2543 of SEQ ID NO: 1563168
ucuauauacuaauguguac

SEQ ID NO: 1800464 - RNA, 19 nt, Artificial Sequence
  Description of Artificial Sequence: Synthetic oligonucleotide
  Antisense strand to SEQ ID NO: 1800463
guacacauuaguauauaga

SEQ ID NO: 1800465 - RNA, 19 nt, Artificial Sequence
  Description of Artificial Sequence: Synthetic oligonucleotide
  Sense strand starting at position 2885 of SEQ ID NO: 1563168
auguuaaguacuugugaca

SEQ ID NO: 1800466 - RNA, 19 nt, Artificial Sequence
  Description of Artificial Sequence: Synthetic oligonucleotide
  Antisense strand to SEQ ID NO: 1800465
ugucacaaguacuuaacau

SEQ ID NO: 1800467 - RNA, 19 nt, Artificial Sequence
  Description of Artificial Sequence: Synthetic oligonucleotide
  Sense strand starting at position 2888 of SEQ ID NO: 1563168
uuaaguacuugugacacuu

SEQ ID NO: 1800468 - RNA, 19 nt, Artificial Sequence
  Description of Artificial Sequence: Synthetic oligonucleotide
  Antisense strand to SEQ ID NO: 1800467
aagugucacaaguacuuaa

SEQ ID NO: 1800469 - RNA, 19 nt, Artificial Sequence
  Description of Artificial Sequence: Synthetic oligonucleotide
  Sense strand starting at position 2896 of SEQ ID NO: 1563168
uugugacacuuaccaucua

SEQ ID NO: 1800470 - RNA, 19 nt, Artificial Sequence
  Description of Artificial Sequence: Synthetic oligonucleotide
  Antisense strand to SEQ ID NO: 1800469
uagaugguaagugucacaa

SEQ ID NO: 1800471 - RNA, 19 nt, Artificial Sequence
  Description of Artificial Sequence: Synthetic oligonucleotide
  Sense strand starting at position 2916 of SEQ ID NO: 1563168
gacauaggucccuguaccu

SEQ ID NO: 1800472 - RNA, 19 nt, Artificial Sequence
  Description of Artificial Sequence: Synthetic oligonucleotide
  Antisense strand to SEQ ID NO: 1800471
agguacagggaccuauguc

SEQ ID NO: 1800473 - RNA, 19 nt, Artificial Sequence
  Description of Artificial Sequence: Synthetic oligonucleotide
  Sense strand starting at position 3053 of SEQ ID NO: 1563168
cagacagaggcacguuauu

SEQ ID NO: 1800474 - RNA, 19 nt, Artificial Sequence
  Description of Artificial Sequence: Synthetic oligonucleotide
  Antisense strand to SEQ ID NO: 1800473
aauaacgugccucugucug

SEQ ID NO: 1800475 - RNA, 19 nt, Artificial Sequence
  Description of Artificial Sequence: Synthetic oligonucleotide
  Sense strand starting at position 3421 of SEQ ID NO: 1563168
ccuguaggguucuagggau

SEQ ID NO: 1800476 - RNA, 19 nt, Artificial Sequence
  Description of Artificial Sequence: Synthetic oligonucleotide
  Antisense strand to SEQ ID NO: 1800475
aucccuagaacccuacagg

SEQ ID NO: 1800477 - RNA, 19 nt, Artificial Sequence
  Description of Artificial Sequence: Synthetic oligonucleotide
  Sense strand starting at position 3579 of SEQ ID NO: 1563168
ucaaccuaucucuaggagu

SEQ ID NO: 1800478 - RNA, 19 nt, Artificial Sequence
  Description of Artificial Sequence: Synthetic oligonucleotide
  Antisense strand to SEQ ID NO: 1800477
acuccuagagauagguuga

SEQ ID NO: 1800479 - RNA, 19 nt, Artificial Sequence
  Description of Artificial Sequence: Synthetic oligonucleotide
  Sense strand starting at position 3803 of SEQ ID NO: 1563168
aguccuaagcuugguaagu

SEQ ID NO: 1800480 - RNA, 19 nt, Artificial Sequence
  Description of Artificial Sequence: Synthetic oligonucleotide
  Antisense strand to SEQ ID NO: 1800479
acuuaccaagcuuaggacu

SEQ ID NO: 1800481 - RNA, 19 nt, Artificial Sequence
  Description of Artificial Sequence: Synthetic oligonucleotide
  Sense strand starting at position 3804 of SEQ ID NO: 1563168
guccuaagcuugguaagua

SEQ ID NO: 1800482 - RNA, 19 nt, Artificial Sequence
  Description of Artificial Sequence: Synthetic oligonucleotide
  Antisense strand to SEQ ID NO: 1800481
uacuuaccaagcuuaggac

SEQ ID NO: 1800483 - RNA, 19 nt, Artificial Sequence
  Description of Artificial Sequence: Synthetic oligonucleotide
  Sense strand starting at position 3805 of SEQ ID NO: 1563168
uccuaagcuugguaaguaa

SEQ ID NO: 1800484 - RNA, 19 nt, Artificial Sequence
  Description of Artificial Sequence: Synthetic oligonucleotide
  Antisense strand to SEQ ID NO: 1800483
uuacuuaccaagcuuagga

SEQ ID NO: 1800485 - RNA, 19 nt, Artificial Sequence
  Description of Artificial Sequence: Synthetic oligonucleotide
  Sense strand starting at position 3824 of SEQ ID NO: 1563168
aaugcaguuuagggaaagu

SEQ ID NO: 1800486 - RNA, 19 nt, Artificial Sequence
  Description of Artificial Sequence: Synthetic oligonucleotide
  Antisense strand to SEQ ID NO: 1800485
acuuucccuaaacugcauu

SEQ ID NO: 1800487 - RNA, 19 nt, Artificial Sequence
  Description of Artificial Sequence: Synthetic oligonucleotide
  Sense strand starting at position 3882 of SEQ ID NO: 1563168
gcaccuaaguuccugucau

SEQ ID NO: 1800488 - RNA, 19 nt, Artificial Sequence
  Description of Artificial Sequence: Synthetic oligonucleotide
  Antisense strand to SEQ ID NO: 1800487
augacaggaacuuaggugc

SEQ ID NO: 1800489 - RNA, 19 nt, Artificial Sequence
  Description of Artificial Sequence: Synthetic oligonucleotide
  Sense strand starting at position 3910 of SEQ ID NO: 1563168
auggaacuccaaugguuua

SEQ ID NO: 1800490 - RNA, 19 nt, Artificial Sequence
  Description of Artificial Sequence: Synthetic oligonucleotide
  Antisense strand to SEQ ID NO: 1800489
uaaaccauuggaguuccau

SEQ ID NO: 1800491 - RNA, 19 nt, Artificial Sequence
  Description of Artificial Sequence: Synthetic oligonucleotide
  Sense strand starting at position 3913 of SEQ ID NO: 1563168
gaacuccaaugguuuagau

SEQ ID NO: 1800492 - RNA, 19 nt, Artificial Sequence
  Description of Artificial Sequence: Synthetic oligonucleotide
  Antisense strand to SEQ ID NO: 1800491
aucuaaaccauuggaguuc

SEQ ID NO: 1800493 - RNA, 19 nt, Artificial Sequence
  Description of Artificial Sequence: Synthetic oligonucleotide
  Sense strand starting at position 3925 of SEQ ID NO: 1563168
uuuagauagugucuguacu

SEQ ID NO: 1800494 - RNA, 19 nt, Artificial Sequence
  Description of Artificial Sequence: Synthetic oligonucleotide
  Antisense strand to SEQ ID NO: 1800493
aguacagacacuaucuaaa

SEQ ID NO: 1800495 - RNA, 19 nt, Artificial Sequence
  Description of Artificial Sequence: Synthetic oligonucleotide
  Sense strand starting at position 3927 of SEQ ID NO: 1563168
uagauagugucuguacuca

SEQ ID NO: 1800496 - RNA, 19 nt, Artificial Sequence
  Description of Artificial Sequence: Synthetic oligonucleotide
  Antisense strand to SEQ ID NO: 1800495
ugaguacagacacuaucua

SEQ ID NO: 1800497 - RNA, 19 nt, Artificial Sequence
  Description of Artificial Sequence: Synthetic oligonucleotide
  Sense strand starting at position 27 of SEQ ID NO: 1563169
caggcagaccuauggacaa

SEQ ID NO: 1800498 - RNA, 19 nt, Artificial Sequence
  Description of Artificial Sequence: Synthetic oligonucleotide
  Antisense strand to SEQ ID NO: 1800497
uuguccauaggucugccug

SEQ ID NO: 1800499 - RNA, 19 nt, Artificial Sequence
  Description of Artificial Sequence: Synthetic oligonucleotide
  Sense strand starting at position 69 of SEQ ID NO: 1563169
aacugaucuccuggugaca

SEQ ID NO: 1800500 - RNA, 19 nt, Artificial Sequence
  Description of Artificial Sequence: Synthetic oligonucleotide
  Antisense strand to SEQ ID NO: 1800499
ugucaccaggagaucaguu

SEQ ID NO: 1800501 - RNA, 19 nt, Artificial Sequence
  Description of Artificial Sequence: Synthetic oligonucleotide
  Sense strand starting at position 223 of SEQ ID NO: 1563169
cagugauugcccuagaaug

SEQ ID NO: 1800502 - RNA, 19 nt, Artificial Sequence
  Description of Artificial Sequence: Synthetic oligonucleotide
  Antisense strand to SEQ ID NO: 1800501
cauucuagggcaaucacug

SEQ ID NO: 1800503 - RNA, 19 nt, Artificial Sequence
  Description of Artificial Sequence: Synthetic oligonucleotide
  Sense strand starting at position 225 of SEQ ID NO: 1563169
gugauugcccuagaauguc

SEQ ID NO: 1800504 - RNA, 19 nt, Artificial Sequence
  Description of Artificial Sequence: Synthetic oligonucleotide
  Antisense strand to SEQ ID NO: 1800503
gacauucuagggcaaucac

SEQ ID NO: 1800505 - RNA, 19 nt, Artificial Sequence
  Description of Artificial Sequence: Synthetic oligonucleotide
  Sense strand starting at position 414 of SEQ ID NO: 1563169
gauggaauucucuagucga

SEQ ID NO: 1800506 - RNA, 19 nt, Artificial Sequence
  Description of Artificial Sequence: Synthetic oligonucleotide
  Antisense strand to SEQ ID NO: 1800505
ucgacuagagaauuccauc

SEQ ID NO: 1800507 - RNA, 19 nt, Artificial Sequence
  Description of Artificial Sequence: Synthetic oligonucleotide
  Sense strand starting at position 417 of SEQ ID NO: 1563169
ggaauucucuagucgaagu

SEQ ID NO: 1800508 - RNA, 19 nt, Artificial Sequence
  Description of Artificial Sequence: Synthetic oligonucleotide
  Antisense strand to SEQ ID NO: 1800507
acuucgacuagagaauucc

SEQ ID NO: 1800509 - RNA, 19 nt, Artificial Sequence
  Description of Artificial Sequence: Synthetic oligonucleotide
  Sense strand starting at position 664 of SEQ ID NO: 1563169
ggcacaguuucuuucugga

SEQ ID NO: 1800510 - RNA, 19 nt, Artificial Sequence
  Description of Artificial Sequence: Synthetic oligonucleotide
  Antisense strand to SEQ ID NO: 1800509
uccagaaagaaacugugcc

SEQ ID NO: 1800511 - RNA, 19 nt, Artificial Sequence
  Description of Artificial Sequence: Synthetic oligonucleotide
  Sense strand starting at position 669 of SEQ ID NO: 1563169
aguuucuuucuggauauaa

SEQ ID NO: 1800512 - RNA, 19 nt, Artificial Sequence
  Description of Artificial Sequence: Synthetic oligonucleotide
  Antisense strand to SEQ ID NO: 1800511
uuauauccagaaagaaacu

SEQ ID NO: 1800513 - RNA, 19 nt, Artificial Sequence
  Description of Artificial Sequence: Synthetic oligonucleotide
  Sense strand starting at position 671 of SEQ ID NO: 1563169
uuucuuucuggauauaagu

SEQ ID NO: 1800514 - RNA, 19 nt, Artificial Sequence
  Description of Artificial Sequence: Synthetic oligonucleotide
  Antisense strand to SEQ ID NO: 1800513
acuuauauccagaaagaaa

SEQ ID NO: 1800515 - RNA, 19 nt, Artificial Sequence
  Description of Artificial Sequence: Synthetic oligonucleotide
  Sense strand starting at position 684 of SEQ ID NO: 1563169
auaaguaccuguuuggcaa

SEQ ID NO: 1800516 - RNA, 19 nt, Artificial Sequence
  Description of Artificial Sequence: Synthetic oligonucleotide
  Antisense strand to SEQ ID NO: 1800515
uugccaaacagguacuuau

SEQ ID NO: 1800517 - RNA, 19 nt, Artificial Sequence
  Description of Artificial Sequence: Synthetic oligonucleotide
  Sense strand starting at position 685 of SEQ ID NO: 1563169
uaaguaccuguuuggcaaa

SEQ ID NO: 1800518 - RNA, 19 nt, Artificial Sequence
  Description of Artificial Sequence: Synthetic oligonucleotide
  Antisense strand to SEQ ID NO: 1800517
uuugccaaacagguacuua

SEQ ID NO: 1800519 - RNA, 19 nt, Artificial Sequence
  Description of Artificial Sequence: Synthetic oligonucleotide
  Sense strand starting at position 811 of SEQ ID NO: 1563169
gguaguaguagugguguua

SEQ ID NO: 1800520 - RNA, 19 nt, Artificial Sequence
  Description of Artificial Sequence: Synthetic oligonucleotide
  Antisense strand to SEQ ID NO: 1800519
uaacaccacuacuacuacc

SEQ ID NO: 1800521 - RNA, 19 nt, Artificial Sequence
  Description of Artificial Sequence: Synthetic oligonucleotide
  Sense strand starting at position 823 of SEQ ID NO: 1563169
gguguuaguagggacgaaa

SEQ ID NO: 1800522 - RNA, 19 nt, Artificial Sequence
  Description of Artificial Sequence: Synthetic oligonucleotide
  Antisense strand to SEQ ID NO: 1800521
uuucgucccuacuaacacc

SEQ ID NO: 1800523 - RNA, 19 nt, Artificial Sequence
  Description of Artificial Sequence: Synthetic oligonucleotide
  Sense strand starting at position 952 of SEQ ID NO: 1563169
acauaaugcggguaaggga

SEQ ID NO: 1800524 - RNA, 19 nt, Artificial Sequence
  Description of Artificial Sequence: Synthetic oligonucleotide
  Antisense strand to SEQ ID NO: 1800523
ucccuuacccgcauuaugu

SEQ ID NO: 1800525 - RNA, 19 nt, Artificial Sequence
  Description of Artificial Sequence: Synthetic oligonucleotide
  Sense strand starting at position 970 of SEQ ID NO: 1563169
aggacauguuaggaaagcu

SEQ ID NO: 1800526 - RNA, 19 nt, Artificial Sequence
  Description of Artificial Sequence: Synthetic oligonucleotide
  Antisense strand to SEQ ID NO: 1800525
agcuuuccuaacauguccu

SEQ ID NO: 1800527 - RNA, 19 nt, Artificial Sequence
  Description of Artificial Sequence: Synthetic oligonucleotide
  Sense strand starting at position 1160 of SEQ ID NO: 1563169
cauggagugcugcaaacuu

SEQ ID NO: 1800528 - RNA, 19 nt, Artificial Sequence
  Description of Artificial Sequence: Synthetic oligonucleotide
  Antisense strand to SEQ ID NO: 1800527
aaguuugcagcacuccaug

SEQ ID NO: 1800529 - RNA, 19 nt, Artificial Sequence
  Description of Artificial Sequence: Synthetic oligonucleotide
  Sense strand starting at position 1242 of SEQ ID NO: 1563169
gagagacgugguuauuaau

SEQ ID NO: 1800530 - RNA, 19 nt, Artificial Sequence
  Description of Artificial Sequence: Synthetic oligonucleotide
  Antisense strand to SEQ ID NO: 1800529
auuaauaaccacgucucuc

SEQ ID NO: 1800531 - RNA, 19 nt, Artificial Sequence
  Description of Artificial Sequence: Synthetic oligonucleotide
  Sense strand starting at position 1249 of SEQ ID NO: 1563169
gugguuauuaauggucaga

SEQ ID NO: 1800532 - RNA, 19 nt, Artificial Sequence
  Description of Artificial Sequence: Synthetic oligonucleotide
  Antisense strand to SEQ ID NO: 1800531
ucugaccauuaauaaccac

SEQ ID NO: 1800533 - RNA, 19 nt, Artificial Sequence
  Description of Artificial Sequence: Synthetic oligonucleotide
  Sense strand starting at position 1251 of SEQ ID NO: 1563169
gguuauuaauggucagacc

SEQ ID NO: 1800534 - RNA, 19 nt, Artificial Sequence
  Description of Artificial Sequence: Synthetic oligonucleotide
  Antisense strand to SEQ ID NO: 1800533
ggucugaccauuaauaacc

SEQ ID NO: 1800535 - RNA, 19 nt, Artificial Sequence
  Description of Artificial Sequence: Synthetic oligonucleotide
  Sense strand starting at position 1252 of SEQ ID NO: 1563169
guuauuaauggucagacca

SEQ ID NO: 1800536 - RNA, 19 nt, Artificial Sequence
  Description of Artificial Sequence: Synthetic oligonucleotide
  Antisense strand to SEQ ID NO: 1800535
uggucugaccauuaauaac

SEQ ID NO: 1800537 - RNA, 19 nt, Artificial Sequence
  Description of Artificial Sequence: Synthetic oligonucleotide
  Sense strand starting at position 1254 of SEQ ID NO: 1563169
uauuaauggucagaccagu

SEQ ID NO: 1800538 - RNA, 19 nt, Artificial Sequence
  Description of Artificial Sequence: Synthetic oligonucleotide
  Antisense strand to SEQ ID NO: 1800537
acuggucugaccauuaaua

SEQ ID NO: 1800539 - RNA, 19 nt, Artificial Sequence
  Description of Artificial Sequence: Synthetic oligonucleotide
  Sense strand starting at position 1475 of SEQ ID NO: 1563169
guguauggaaaucaagcua

SEQ ID NO: 1800540 - RNA, 19 nt, Artificial Sequence
  Description of Artificial Sequence: Synthetic oligonucleotide
  Antisense strand to SEQ ID NO: 1800539
uagcuugauuuccauacac

SEQ ID NO: 1800541 - RNA, 19 nt, Artificial Sequence
  Description of Artificial Sequence: Synthetic oligonucleotide
  Sense strand starting at position 1516 of SEQ ID NO: 1563169
uuaauuguugugugccauu

SEQ ID NO: 1800542 - RNA, 19 nt, Artificial Sequence
  Description of Artificial Sequence: Synthetic oligonucleotide
  Antisense strand to SEQ ID NO: 1800541
aauggcacacaacaauuaa

SEQ ID NO: 1800543 - RNA, 19 nt, Artificial Sequence
  Description of Artificial Sequence: Synthetic oligonucleotide
  Sense strand starting at position 2174 of SEQ ID NO: 1563169
auaccagaguguuucugua

SEQ ID NO: 1800544 - RNA, 19 nt, Artificial Sequence
  Description of Artificial Sequence: Synthetic oligonucleotide
  Antisense strand to SEQ ID NO: 1800543
uacagaaacacucugguau

SEQ ID NO: 1800545 - RNA, 19 nt, Artificial Sequence
  Description of Artificial Sequence: Synthetic oligonucleotide
  Sense strand starting at position 2176 of SEQ ID NO: 1563169
accagaguguuucuguauu

SEQ ID NO: 1800546 - RNA, 19 nt, Artificial Sequence
  Description of Artificial Sequence: Synthetic oligonucleotide
  Antisense strand to SEQ ID NO: 1800545
aauacagaaacacucuggu

SEQ ID NO: 1800547 - RNA, 19 nt, Artificial Sequence
  Description of Artificial Sequence: Synthetic oligonucleotide
  Sense strand starting at position 2178 of SEQ ID NO: 1563169
cagaguguuucuguauuag

SEQ ID NO: 1800548 - RNA, 19 nt, Artificial Sequence
  Description of Artificial Sequence: Synthetic oligonucleotide
  Antisense strand to SEQ ID NO: 1800547
cuaauacagaaacacucug

SEQ ID NO: 1800549 - RNA, 19 nt, Artificial Sequence
  Description of Artificial Sequence: Synthetic oligonucleotide
  Sense strand starting at position 2324 of SEQ ID NO: 1563169
cgaaguucguucuccaaac

SEQ ID NO: 1800550 - RNA, 19 nt, Artificial Sequence
  Description of Artificial Sequence: Synthetic oligonucleotide
  Antisense strand to SEQ ID NO: 1800549
guuuggagaacgaacuucg

SEQ ID NO: 1800551 - RNA, 19 nt, Artificial Sequence
  Description of Artificial Sequence: Synthetic oligonucleotide
  Sense strand starting at position 2325 of SEQ ID NO: 1563169
gaaguucguucuccaaaca

SEQ ID NO: 1800552 - RNA, 19 nt, Artificial Sequence
  Description of Artificial Sequence: Synthetic oligonucleotide
  Antisense strand to SEQ ID NO: 1800551
uguuuggagaacgaacuuc

SEQ ID NO: 1800553 - RNA, 19 nt, Artificial Sequence
  Description of Artificial Sequence: Synthetic oligonucleotide
  Sense strand starting at position 2386 of SEQ ID NO: 1563169
guaggaaagucagcaaaga

SEQ ID NO: 1800554 - RNA, 19 nt, Artificial Sequence
  Description of Artificial Sequence: Synthetic oligonucleotide
  Antisense strand to SEQ ID NO: 1800553
ucuuugcugacuuuccuac

SEQ ID NO: 1800555 - RNA, 19 nt, Artificial Sequence
  Description of Artificial Sequence: Synthetic oligonucleotide
  Sense strand starting at position 2406 of SEQ ID NO: 1563169
agucaagacugagauagga

SEQ ID NO: 1800556 - RNA, 19 nt, Artificial Sequence
  Description of Artificial Sequence: Synthetic oligonucleotide
  Antisense strand to SEQ ID NO: 1800555
uccuaucucagucuugacu

SEQ ID NO: 1800557 - RNA, 19 nt, Artificial Sequence
  Description of Artificial Sequence: Synthetic oligonucleotide
  Sense strand starting at position 2423 of SEQ ID NO: 1563169
gaggauacauacuaaucga

SEQ ID NO: 1800558 - RNA, 19 nt, Artificial Sequence
  Description of Artificial Sequence: Synthetic oligonucleotide
  Antisense strand to SEQ ID NO: 1800557
ucgauuaguauguauccuc

SEQ ID NO: 1800559 - RNA, 19 nt, Artificial Sequence
  Description of Artificial Sequence: Synthetic oligonucleotide
  Sense strand starting at position 2451 of SEQ ID NO: 1563169
cuuuguguuccuucgaguc

SEQ ID NO: 1800560 - RNA, 19 nt, Artificial Sequence
  Description of Artificial Sequence: Synthetic oligonucleotide
  Antisense strand to SEQ ID NO: 1800559
gacucgaaggaacacaaag

SEQ ID NO: 1800561 - RNA, 19 nt, Artificial Sequence
  Description of Artificial Sequence: Synthetic oligonucleotide
  Sense strand starting at position 2542 of SEQ ID NO: 1563169
guguuuguuaaauaggcaa

SEQ ID NO: 1800562 - RNA, 19 nt, Artificial Sequence
  Description of Artificial Sequence: Synthetic oligonucleotide
  Antisense strand to SEQ ID NO: 1800561
uugccuauuuaacaaacac

SEQ ID NO: 1800563 - RNA, 19 nt, Artificial Sequence
  Description of Artificial Sequence: Synthetic oligonucleotide
  Sense strand starting at position 2807 of SEQ ID NO: 1563169
cgauccaugucccuacaaa

SEQ ID NO: 1800564 - RNA, 19 nt, Artificial Sequence
  Description of Artificial Sequence: Synthetic oligonucleotide
  Antisense strand to SEQ ID NO: 1800563
uuuguagggacauggaucg

SEQ ID NO: 1800565 - RNA, 19 nt, Artificial Sequence
  Description of Artificial Sequence: Synthetic oligonucleotide
  Sense strand starting at position 3161 of SEQ ID NO: 1563169
cuuguuucuuaacuuugua

SEQ ID NO: 1800566 - RNA, 19 nt, Artificial Sequence
  Description of Artificial Sequence: Synthetic oligonucleotide
  Antisense strand to SEQ ID NO: 1800565
uacaaaguuaagaaacaag

SEQ ID NO: 1800567 - RNA, 19 nt, Artificial Sequence
  Description of Artificial Sequence: Synthetic oligonucleotide
  Sense strand starting at position 3175 of SEQ ID NO: 1563169
uuguauuaauugccguuau

SEQ ID NO: 1800568 - RNA, 19 nt, Artificial Sequence
  Description of Artificial Sequence: Synthetic oligonucleotide
  Antisense strand to SEQ ID NO: 1800567
auaacggcaauuaauacaa

SEQ ID NO: 1800569 - RNA, 19 nt, Artificial Sequence
  Description of Artificial Sequence: Synthetic oligonucleotide
  Sense strand starting at position 3179 of SEQ ID NO: 1563169
auuaauugccguuaugacu

SEQ ID NO: 1800570 - RNA, 19 nt, Artificial Sequence
  Description of Artificial Sequence: Synthetic oligonucleotide
  Antisense strand to SEQ ID NO: 1800569
agucauaacggcaauuaau

SEQ ID NO: 1800571 - RNA, 19 nt, Artificial Sequence
  Description of Artificial Sequence: Synthetic oligonucleotide
  Sense strand starting at position 3776 of SEQ ID NO: 1563169
aucaaauagcuguauaugu

SEQ ID NO: 1800572 - RNA, 19 nt, Artificial Sequence
  Description of Artificial Sequence: Synthetic oligonucleotide
  Antisense strand to SEQ ID NO: 1800571
acauauacagcuauuugau

SEQ ID NO: 1800573 - RNA, 19 nt, Artificial Sequence
  Description of Artificial Sequence: Synthetic oligonucleotide
  Sense strand starting at position 3784 of SEQ ID NO: 1563169
gcuguauaugugcagucuu

SEQ ID NO: 1800574 - RNA, 19 nt, Artificial Sequence
  Description of Artificial Sequence: Synthetic oligonucleotide
  Antisense strand to SEQ ID NO: 1800573
aagacugcacauauacagc

SEQ ID NO: 1800575 - RNA, 19 nt, Artificial Sequence
  Description of Artificial Sequence: Synthetic oligonucleotide
  Sense strand starting at position 3973 of SEQ ID NO: 1563169
uuuggcucugcgugaauuu

SEQ ID NO: 1800576 - RNA, 19 nt, Artificial Sequence
  Description of Artificial Sequence: Synthetic oligonucleotide
  Antisense strand to SEQ ID NO: 1800575
aaauucacgcagagccaaa

SEQ ID NO: 1800577 - RNA, 19 nt, Artificial Sequence
  Description of Artificial Sequence: Synthetic oligonucleotide
  Sense strand starting at position 84 of SEQ ID NO: 1563170
gauggaauucucuagucga

SEQ ID NO: 1800578 - RNA, 19 nt, Artificial Sequence
  Description of Artificial Sequence: Synthetic oligonucleotide
  Antisense strand to SEQ ID NO: 1800577
ucgacuagagaauuccauc

SEQ ID NO: 1800579 - RNA, 19 nt, Artificial Sequence
  Description of Artificial Sequence: Synthetic oligonucleotide
  Sense strand starting at position 87 of SEQ ID NO: 1563170
ggaauucucuagucgaagu

SEQ ID NO: 1800580 - RNA, 19 nt, Artificial Sequence
  Description of Artificial Sequence: Synthetic oligonucleotide
  Antisense strand to SEQ ID NO: 1800579
acuucgacuagagaauucc

SEQ ID NO: 1800581 - RNA, 19 nt, Artificial Sequence
  Description of Artificial Sequence: Synthetic oligonucleotide
  Sense strand starting at position 334 of SEQ ID NO: 1563170
ggcacaguuucuuucugga

SEQ ID NO: 1800582 - RNA, 19 nt, Artificial Sequence
  Description of Artificial Sequence: Synthetic oligonucleotide
  Antisense strand to SEQ ID NO: 1800581
uccagaaagaaacugugcc

SEQ ID NO: 1800583 - RNA, 19 nt, Artificial Sequence
  Description of Artificial Sequence: Synthetic oligonucleotide
  Sense strand starting at position 339 of SEQ ID NO: 1563170
aguuucuuucuggauauaa

SEQ ID NO: 1800584 - RNA, 19 nt, Artificial Sequence
  Description of Artificial Sequence: Synthetic oligonucleotide
  Antisense strand to SEQ ID NO: 1800583
uuauauccagaaagaaacu

SEQ ID NO: 1800585 - RNA, 19 nt, Artificial Sequence
  Description of Artificial Sequence: Synthetic oligonucleotide
  Sense strand starting at position 341 of SEQ ID NO: 1563170
uuucuuucuggauauaagu

SEQ ID NO: 1800586 - RNA, 19 nt, Artificial Sequence
  Description of Artificial Sequence: Synthetic oligonucleotide
  Antisense strand to SEQ ID NO: 1800585
acuuauauccagaaagaaa

SEQ ID NO: 1800587 - RNA, 19 nt, Artificial Sequence
  Description of Artificial Sequence: Synthetic oligonucleotide
  Sense strand starting at position 354 of SEQ ID NO: 1563170
auaaguaccuguuuggcaa

SEQ ID NO: 1800588 - RNA, 19 nt, Artificial Sequence
  Description of Artificial Sequence: Synthetic oligonucleotide
  Antisense strand to SEQ ID NO: 1800587
uugccaaacagguacuuau

SEQ ID NO: 1800589 - RNA, 19 nt, Artificial Sequence
  Description of Artificial Sequence: Synthetic oligonucleotide
  Sense strand starting at position 355 of SEQ ID NO: 1563170
uaaguaccuguuuggcaaa

SEQ ID NO: 1800590 - RNA, 19 nt, Artificial Sequence
  Description of Artificial Sequence: Synthetic oligonucleotide
  Antisense strand to SEQ ID NO: 1800589
uuugccaaacagguacuua

SEQ ID NO: 1800591 - RNA, 19 nt, Artificial Sequence
  Description of Artificial Sequence: Synthetic oligonucleotide
  Sense strand starting at position 481 of SEQ ID NO: 1563170
gguaguaguagugguguua

SEQ ID NO: 1800592 - RNA, 19 nt, Artificial Sequence
  Description of Artificial Sequence: Synthetic oligonucleotide
  Antisense strand to SEQ ID NO: 1800591
uaacaccacuacuacuacc

SEQ ID NO: 1800593 - RNA, 19 nt, Artificial Sequence
  Description of Artificial Sequence: Synthetic oligonucleotide
  Sense strand starting at position 493 of SEQ ID NO: 1563170
gguguuaguagggacgaaa

SEQ ID NO: 1800594 - RNA, 19 nt, Artificial Sequence
  Description of Artificial Sequence: Synthetic oligonucleotide
  Antisense strand to SEQ ID NO: 1800593
uuucgucccuacuaacacc

SEQ ID NO: 1800595 - RNA, 19 nt, Artificial Sequence
  Description of Artificial Sequence: Synthetic oligonucleotide
  Sense strand starting at position 622 of SEQ ID NO: 1563170
acauaaugcggguaaggga

SEQ ID NO: 1800596 - RNA, 19 nt, Artificial Sequence
  Description of Artificial Sequence: Synthetic oligonucleotide
  Antisense strand to SEQ ID NO: 1800595
ucccuuacccgcauuaugu

SEQ ID NO: 1800597 - RNA, 19 nt, Artificial Sequence
  Description of Artificial Sequence: Synthetic oligonucleotide
  Sense strand starting at position 830 of SEQ ID NO: 1563170
cauggagugcugcaaacuu

SEQ ID NO: 1800598 - RNA, 19 nt, Artificial Sequence
  Description of Artificial Sequence: Synthetic oligonucleotide
  Antisense strand to SEQ ID NO: 1800597
aaguuugcagcacuccaug

SEQ ID NO: 1800599 - RNA, 19 nt, Artificial Sequence
  Description of Artificial Sequence: Synthetic oligonucleotide
  Sense strand starting at position 912 of SEQ ID NO: 1563170
gagagacgugguuauuaau

SEQ ID NO: 1800600 - RNA, 19 nt, Artificial Sequence
  Description of Artificial Sequence: Synthetic oligonucleotide
  Antisense strand to SEQ ID NO: 1800599
auuaauaaccacgucucuc

SEQ ID NO: 1800601 - RNA, 19 nt, Artificial Sequence
  Description of Artificial Sequence: Synthetic oligonucleotide
  Sense strand starting at position 919 of SEQ ID NO: 1563170
gugguuauuaauggucaga

SEQ ID NO: 1800602 - RNA, 19 nt, Artificial Sequence
  Description of Artificial Sequence: Synthetic oligonucleotide
  Antisense strand to SEQ ID NO: 1800601
ucugaccauuaauaaccac

SEQ ID NO: 1800603 - RNA, 19 nt, Artificial Sequence
  Description of Artificial Sequence: Synthetic oligonucleotide
  Sense strand starting at position 921 of SEQ ID NO: 1563170
gguuauuaauggucagacc

SEQ ID NO: 1800604 - RNA, 19 nt, Artificial Sequence
  Description of Artificial Sequence: Synthetic oligonucleotide
  Antisense strand to SEQ ID NO: 1800603
ggucugaccauuaauaacc

SEQ ID NO: 1800605 - RNA, 19 nt, Artificial Sequence
  Description of Artificial Sequence: Synthetic oligonucleotide
  Sense strand starting at position 922 of SEQ ID NO: 1563170
guuauuaauggucagacca

SEQ ID NO: 1800606 - RNA, 19 nt, Artificial Sequence
  Description of Artificial Sequence: Synthetic oligonucleotide
  Antisense strand to SEQ ID NO: 1800605
uggucugaccauuaauaac

SEQ ID NO: 1800607 - RNA, 19 nt, Artificial Sequence
  Description of Artificial Sequence: Synthetic oligonucleotide
  Sense strand starting at position 1145 of SEQ ID NO: 1563170
guguauggaaaucaagcua

SEQ ID NO: 1800608 - RNA, 19 nt, Artificial Sequence
  Description of Artificial Sequence: Synthetic oligonucleotide
  Antisense strand to SEQ ID NO: 1800607
uagcuugauuuccauacac

SEQ ID NO: 1800609 - RNA, 19 nt, Artificial Sequence
  Description of Artificial Sequence: Synthetic oligonucleotide
  Sense strand starting at position 1844 of SEQ ID NO: 1563170
auaccagaguguuucugua

SEQ ID NO: 1800610 - RNA, 19 nt, Artificial Sequence
  Description of Artificial Sequence: Synthetic oligonucleotide
  Antisense strand to SEQ ID NO: 1800609
uacagaaacacucugguau

SEQ ID NO: 1800611 - RNA, 19 nt, Artificial Sequence
  Description of Artificial Sequence: Synthetic oligonucleotide
  Sense strand starting at position 1846 of SEQ ID NO: 1563170
accagaguguuucuguauu

SEQ ID NO: 1800612 - RNA, 19 nt, Artificial Sequence
  Description of Artificial Sequence: Synthetic oligonucleotide
  Antisense strand to SEQ ID NO: 1800611
aauacagaaacacucuggu

SEQ ID NO: 1800613 - RNA, 19 nt, Artificial Sequence
  Description of Artificial Sequence: Synthetic oligonucleotide
  Sense strand starting at position 1848 of SEQ ID NO: 1563170
cagaguguuucuguauuag

SEQ ID NO: 1800614 - RNA, 19 nt, Artificial Sequence
  Description of Artificial Sequence: Synthetic oligonucleotide
  Antisense strand to SEQ ID NO: 1800613
cuaauacagaaacacucug

SEQ ID NO: 1800615 - RNA, 19 nt, Artificial Sequence
  Description of Artificial Sequence: Synthetic oligonucleotide
  Sense strand starting at position 1994 of SEQ ID NO: 1563170
cgaaguucguucuccaaac

SEQ ID NO: 1800616 - RNA, 19 nt, Artificial Sequence
  Description of Artificial Sequence: Synthetic oligonucleotide
  Antisense strand to SEQ ID NO: 1800615
guuuggagaacgaacuucg

SEQ ID NO: 1800617 - RNA, 19 nt, Artificial Sequence
  Description of Artificial Sequence: Synthetic oligonucleotide
  Sense strand starting at position 1995 of SEQ ID NO: 1563170
gaaguucguucuccaaaca

SEQ ID NO: 1800618 - RNA, 19 nt, Artificial Sequence
  Description of Artificial Sequence: Synthetic oligonucleotide
  Antisense strand to SEQ ID NO: 1800617
uguuuggagaacgaacuuc

SEQ ID NO: 1800619 - RNA, 19 nt, Artificial Sequence
  Description of Artificial Sequence: Synthetic oligonucleotide
  Sense strand starting at position 2056 of SEQ ID NO: 1563170
guaggaaagucagcaaaga

SEQ ID NO: 1800620 - RNA, 19 nt, Artificial Sequence
  Description of Artificial Sequence: Synthetic oligonucleotide
  Antisense strand to SEQ ID NO: 1800619
ucuuugcugacuuuccuac

SEQ ID NO: 1800621 - RNA, 19 nt, Artificial Sequence
  Description of Artificial Sequence: Synthetic oligonucleotide
  Sense strand starting at position 2076 of SEQ ID NO: 1563170
agucaagacugagauagga

SEQ ID NO: 1800622 - RNA, 19 nt, Artificial Sequence
  Description of Artificial Sequence: Synthetic oligonucleotide
  Antisense strand to SEQ ID NO: 1800621
uccuaucucagucuugacu

SEQ ID NO: 1800623 - RNA, 19 nt, Artificial Sequence
  Description of Artificial Sequence: Synthetic oligonucleotide
  Sense strand starting at position 2093 of SEQ ID NO: 1563170
gaggauacauacuaaucga

SEQ ID NO: 1800624 - RNA, 19 nt, Artificial Sequence
  Description of Artificial Sequence: Synthetic oligonucleotide
  Antisense strand to SEQ ID NO: 1800623
ucgauuaguauguauccuc

SEQ ID NO: 1800625 - RNA, 19 nt, Artificial Sequence
  Description of Artificial Sequence: Synthetic oligonucleotide
  Sense strand starting at position 2121 of SEQ ID NO: 1563170
cuuuguguuccuucgaguc

SEQ ID NO: 1800626 - RNA, 19 nt, Artificial Sequence
  Description of Artificial Sequence: Synthetic oligonucleotide
  Antisense strand to SEQ ID NO: 1800625
gacucgaaggaacacaaag

SEQ ID NO: 1800627 - RNA, 19 nt, Artificial Sequence
  Description of Artificial Sequence: Synthetic oligonucleotide
  Sense strand starting at position 2212 of SEQ ID NO: 1563170
guguuuguuaaauaggcaa

SEQ ID NO: 1800628 - RNA, 19 nt, Artificial Sequence
  Description of Artificial Sequence: Synthetic oligonucleotide
  Antisense strand to SEQ ID NO: 1800627
uugccuauuuaacaaacac

SEQ ID NO: 1800629 - RNA, 19 nt, Artificial Sequence
  Description of Artificial Sequence: Synthetic oligonucleotide
  Sense strand starting at position 2477 of SEQ ID NO: 1563170
cgauccaugucccuacaaa

SEQ ID NO: 1800630 - RNA, 19 nt, Artificial Sequence
  Description of Artificial Sequence: Synthetic oligonucleotide
  Antisense strand to SEQ ID NO: 1800629
uuuguagggacauggaucg

SEQ ID NO: 1800631 - RNA, 19 nt, Artificial Sequence
  Description of Artificial Sequence: Synthetic oligonucleotide
  Sense strand starting at position 2831 of SEQ ID NO: 1563170
cuuguuucuuaacuuugua

SEQ ID NO: 1800632 - RNA, 19 nt, Artificial Sequence
  Description of Artificial Sequence: Synthetic oligonucleotide
  Antisense strand to SEQ ID NO: 1800631
uacaaaguuaagaaacaag

SEQ ID NO: 1800633 - RNA, 19 nt, Artificial Sequence
  Description of Artificial Sequence: Synthetic oligonucleotide
  Sense strand starting at position 2849 of SEQ ID NO: 1563170
auuaauugccguuaugacu

SEQ ID NO: 1800634 - RNA, 19 nt, Artificial Sequence
  Description of Artificial Sequence: Synthetic oligonucleotide
  Antisense strand to SEQ ID NO: 1800633
agucauaacggcaauuaau

SEQ ID NO: 1800635 - RNA, 19 nt, Artificial Sequence
  Description of Artificial Sequence: Synthetic oligonucleotide
  Sense strand starting at position 3446 of SEQ ID NO: 1563170
aucaaauagcuguauaugu

SEQ ID NO: 1800636 - RNA, 19 nt, Artificial Sequence
  Description of Artificial Sequence: Synthetic oligonucleotide
  Antisense strand to SEQ ID NO: 1800635
acauauacagcuauuugau

SEQ ID NO: 1800637 - RNA, 19 nt, Artificial Sequence
  Description of Artificial Sequence: Synthetic oligonucleotide
  Sense strand starting at position 3454 of SEQ ID NO: 1563170
gcuguauaugugcagucuu

SEQ ID NO: 1800638 - RNA, 19 nt, Artificial Sequence
  Description of Artificial Sequence: Synthetic oligonucleotide
  Antisense strand to SEQ ID NO: 1800637
aagacugcacauauacagc

SEQ ID NO: 1800639 - RNA, 19 nt, Artificial Sequence
  Description of Artificial Sequence: Synthetic oligonucleotide
  Sense strand starting at position 3643 of SEQ ID NO: 1563170
uuuggcucugcgugaauuu

SEQ ID NO: 1800640 - RNA, 19 nt, Artificial Sequence
  Description of Artificial Sequence: Synthetic oligonucleotide
  Antisense strand to SEQ ID NO: 1800639
aaauucacgcagagccaaa

SEQ ID NO: 1800641 - RNA, 19 nt, Artificial Sequence
  Description of Artificial Sequence: Synthetic oligonucleotide
  Sense strand starting at position 3672 of SEQ ID NO: 1563170
ucuucuaauucggugagaa

SEQ ID NO: 1800642 - RNA, 19 nt, Artificial Sequence
  Description of Artificial Sequence: Synthetic oligonucleotide
  Antisense strand to SEQ ID NO: 1800641
uucucaccgaauuagaaga

SEQ ID NO: 1800643 - RNA, 19 nt, Artificial Sequence
  Description of Artificial Sequence: Synthetic oligonucleotide
  Sense strand starting at position 3673 of SEQ ID NO: 1563170
cuucuaauucggugagaaa

SEQ ID NO: 1800644 - RNA, 19 nt, Artificial Sequence
  Description of Artificial Sequence: Synthetic oligonucleotide
  Antisense strand to SEQ ID NO: 1800643
uuucucaccgaauuagaag

SEQ ID NO: 1800645 - RNA, 19 nt, Artificial Sequence
  Description of Artificial Sequence: Synthetic oligonucleotide
  Sense strand starting at position 3674 of SEQ ID NO: 1563170
uucuaauucggugagaaau

SEQ ID NO: 1800646 - RNA, 19 nt, Artificial Sequence
  Description of Artificial Sequence: Synthetic oligonucleotide
  Antisense strand to SEQ ID NO: 1800645
auuucucaccgaauuagaa

SEQ ID NO: 1800647 - RNA, 19 nt, Artificial Sequence
  Description of Artificial Sequence: Synthetic oligonucleotide
  Sense strand starting at position 3680 of SEQ ID NO: 1563170
uucggugagaaaugucaau

SEQ ID NO: 1800648 - RNA, 19 nt, Artificial Sequence
  Description of Artificial Sequence: Synthetic oligonucleotide
  Antisense strand to SEQ ID NO: 1800647
auugacauuucucaccgaa

SEQ ID NO: 1800649 - RNA, 19 nt, Artificial Sequence
  Description of Artificial Sequence: Synthetic oligonucleotide
  Sense strand starting at position 3804 of SEQ ID NO: 1563170
cugcuuguuuccucuuuga

SEQ ID NO: 1800650 - RNA, 19 nt, Artificial Sequence
  Description of Artificial Sequence: Synthetic oligonucleotide
  Antisense strand to SEQ ID NO: 1800649
ucaaagaggaaacaagcag

SEQ ID NO: 1800651 - RNA, 19 nt, Artificial Sequence
  Description of Artificial Sequence: Synthetic oligonucleotide
  Sense strand starting at position 3807 of SEQ ID NO: 1563170
cuuguuuccucuuugauuu

SEQ ID NO: 1800652 - RNA, 19 nt, Artificial Sequence
  Description of Artificial Sequence: Synthetic oligonucleotide
  Antisense strand to SEQ ID NO: 1800651
aaaucaaagaggaaacaag

SEQ ID NO: 1800653 - RNA, 19 nt, Artificial Sequence
  Description of Artificial Sequence: Synthetic oligonucleotide
  Sense strand starting at position 3870 of SEQ ID NO: 1563170
gcuaaaguaugucuaucaa

SEQ ID NO: 1800654 - RNA, 19 nt, Artificial Sequence
  Description of Artificial Sequence: Synthetic oligonucleotide
  Antisense strand to SEQ ID NO: 1800653
uugauagacauacuuuagc

SEQ ID NO: 1800655 - RNA, 19 nt, Artificial Sequence
  Description of Artificial Sequence: Synthetic oligonucleotide
  Sense strand starting at position 3945 of SEQ ID NO: 1563170
auguaauuaucuuaggaac

SEQ ID NO: 1800656 - RNA, 19 nt, Artificial Sequence
  Description of Artificial Sequence: Synthetic oligonucleotide
  Antisense strand to SEQ ID NO: 1800655
guuccuaagauaauuacau

SEQ ID NO: 1800657 - RNA, 19 nt, Artificial Sequence
  Description of Artificial Sequence: Synthetic oligonucleotide
  Sense strand starting at position 73 of SEQ ID NO: 1563171
cagugauugcccuagaaug

SEQ ID NO: 1800658 - RNA, 19 nt, Artificial Sequence
  Description of Artificial Sequence: Synthetic oligonucleotide
  Antisense strand to SEQ ID NO: 1800657
cauucuagggcaaucacug

SEQ ID NO: 1800659 - RNA, 19 nt, Artificial Sequence
  Description of Artificial Sequence: Synthetic oligonucleotide
  Sense strand starting at position 75 of SEQ ID NO: 1563171
gugauugcccuagaauguc

SEQ ID NO: 1800660 - RNA, 19 nt, Artificial Sequence
  Description of Artificial Sequence: Synthetic oligonucleotide
  Antisense strand to SEQ ID NO: 1800659
gacauucuagggcaaucac

SEQ ID NO: 1800661 - RNA, 19 nt, Artificial Sequence
  Description of Artificial Sequence: Synthetic oligonucleotide
  Sense strand starting at position 264 of SEQ ID NO: 1563171
gauggaauucucuagucga

SEQ ID NO: 1800662 - RNA, 19 nt, Artificial Sequence
  Description of Artificial Sequence: Synthetic oligonucleotide
  Antisense strand to SEQ ID NO: 1800661
ucgacuagagaauuccauc

SEQ ID NO: 1800663 - RNA, 19 nt, Artificial Sequence
  Description of Artificial Sequence: Synthetic oligonucleotide
  Sense strand starting at position 267 of SEQ ID NO: 1563171
ggaauucucuagucgaagu

SEQ ID NO: 1800664 - RNA, 19 nt, Artificial Sequence
  Description of Artificial Sequence: Synthetic oligonucleotide
  Antisense strand to SEQ ID NO: 1800663
acuucgacuagagaauucc

SEQ ID NO: 1800665 - RNA, 19 nt, Artificial Sequence
  Description of Artificial Sequence: Synthetic oligonucleotide
  Sense strand starting at position 514 of SEQ ID NO: 1563171
ggcacaguuucuuucugga

SEQ ID NO: 1800666 - RNA, 19 nt, Artificial Sequence
  Description of Artificial Sequence: Synthetic oligonucleotide
  Antisense strand to SEQ ID NO: 1800665
uccagaaagaaacugugcc

SEQ ID NO: 1800667 - RNA, 19 nt, Artificial Sequence
  Description of Artificial Sequence: Synthetic oligonucleotide
  Sense strand starting at position 519 of SEQ ID NO: 1563171
aguuucuuucuggauauaa

SEQ ID NO: 1800668 - RNA, 19 nt, Artificial Sequence
  Description of Artificial Sequence: Synthetic oligonucleotide
  Antisense strand to SEQ ID NO: 1800667
uuauauccagaaagaaacu

SEQ ID NO: 1800669 - RNA, 19 nt, Artificial Sequence
  Description of Artificial Sequence: Synthetic oligonucleotide
  Sense strand starting at position 521 of SEQ ID NO: 1563171
uuucuuucuggauauaagu

SEQ ID NO: 1800670 - RNA, 19 nt, Artificial Sequence
  Description of Artificial Sequence: Synthetic oligonucleotide
  Antisense strand to SEQ ID NO: 1800669
acuuauauccagaaagaaa

SEQ ID NO: 1800671 - RNA, 19 nt, Artificial Sequence
  Description of Artificial Sequence: Synthetic oligonucleotide
  Sense strand starting at position 534 of SEQ ID NO: 1563171
auaaguaccuguuuggcaa

SEQ ID NO: 1800672 - RNA, 19 nt, Artificial Sequence
  Description of Artificial Sequence: Synthetic oligonucleotide
  Antisense strand to SEQ ID NO: 1800671
uugccaaacagguacuuau

SEQ ID NO: 1800673 - RNA, 19 nt, Artificial Sequence
  Description of Artificial Sequence: Synthetic oligonucleotide
  Sense strand starting at position 535 of SEQ ID NO: 1563171
uaaguaccuguuuggcaaa

SEQ ID NO: 1800674 - RNA, 19 nt, Artificial Sequence
  Description of Artificial Sequence: Synthetic oligonucleotide
  Antisense strand to SEQ ID NO: 1800673
uuugccaaacagguacuua

SEQ ID NO: 1800675 - RNA, 19 nt, Artificial Sequence
  Description of Artificial Sequence: Synthetic oligonucleotide
  Sense strand starting at position 661 of SEQ ID NO: 1563171
gguaguaguagugguguua

SEQ ID NO: 1800676 - RNA, 19 nt, Artificial Sequence
  Description of Artificial Sequence: Synthetic oligonucleotide
  Antisense strand to SEQ ID NO: 1800675
uaacaccacuacuacuacc

SEQ ID NO: 1800677 - RNA, 19 nt, Artificial Sequence
  Description of Artificial Sequence: Synthetic oligonucleotide
  Sense strand starting at position 673 of SEQ ID NO: 1563171
gguguuaguagggacgaaa

SEQ ID NO: 1800678 - RNA, 19 nt, Artificial Sequence
  Description of Artificial Sequence: Synthetic oligonucleotide
  Antisense strand to SEQ ID NO: 1800677
uuucgucccuacuaacacc

SEQ ID NO: 1800679 - RNA, 19 nt, Artificial Sequence
  Description of Artificial Sequence: Synthetic oligonucleotide
  Sense strand starting at position 802 of SEQ ID NO: 1563171
acauaaugcggguaaggga

SEQ ID NO: 1800680 - RNA, 19 nt, Artificial Sequence
  Description of Artificial Sequence: Synthetic oligonucleotide
  Antisense strand to SEQ ID NO: 1800679
ucccuuacccgcauuaugu

SEQ ID NO: 1800681 - RNA, 19 nt, Artificial Sequence
  Description of Artificial Sequence: Synthetic oligonucleotide
  Sense strand starting at position 820 of SEQ ID NO: 1563171
aggacauguuaggaaagcu

SEQ ID NO: 1800682 - RNA, 19 nt, Artificial Sequence
  Description of Artificial Sequence: Synthetic oligonucleotide
  Antisense strand to SEQ ID NO: 1800681
agcuuuccuaacauguccu

SEQ ID NO: 1800683 - RNA, 19 nt, Artificial Sequence
  Description of Artificial Sequence: Synthetic oligonucleotide
  Sense strand starting at position 1010 of SEQ ID NO: 1563171
cauggagugcugcaaacuu

SEQ ID NO: 1800684 - RNA, 19 nt, Artificial Sequence
  Description of Artificial Sequence: Synthetic oligonucleotide
  Antisense strand to SEQ ID NO: 1800683
aaguuugcagcacuccaug

SEQ ID NO: 1800685 - RNA, 19 nt, Artificial Sequence
  Description of Artificial Sequence: Synthetic oligonucleotide
  Sense strand starting at position 1092 of SEQ ID NO: 1563171
gagagacgugguuauuaau

SEQ ID NO: 1800686 - RNA, 19 nt, Artificial Sequence
  Description of Artificial Sequence: Synthetic oligonucleotide
  Antisense strand to SEQ ID NO: 1800685
auuaauaaccacgucucuc

SEQ ID NO: 1800687 - RNA, 19 nt, Artificial Sequence
  Description of Artificial Sequence: Synthetic oligonucleotide
  Sense strand starting at position 1099 of SEQ ID NO: 1563171
gugguuauuaauggucaga

SEQ ID NO: 1800688 - RNA, 19 nt, Artificial Sequence
  Description of Artificial Sequence: Synthetic oligonucleotide
  Antisense strand to SEQ ID NO: 1800687
ucugaccauuaauaaccac

SEQ ID NO: 1800689 - RNA, 19 nt, Artificial Sequence
  Description of Artificial Sequence: Synthetic oligonucleotide
  Sense strand starting at position 1101 of SEQ ID NO: 1563171
gguuauuaauggucagacc

SEQ ID NO: 1800690 - RNA, 19 nt, Artificial Sequence
  Description of Artificial Sequence: Synthetic oligonucleotide
  Antisense strand to SEQ ID NO: 1800689
ggucugaccauuaauaacc

SEQ ID NO: 1800691 - RNA, 19 nt, Artificial Sequence
  Description of Artificial Sequence: Synthetic oligonucleotide
  Sense strand starting at position 1102 of SEQ ID NO: 1563171
guuauuaauggucagacca

SEQ ID NO: 1800692 - RNA, 19 nt, Artificial Sequence
  Description of Artificial Sequence: Synthetic oligonucleotide
  Antisense strand to SEQ ID NO: 1800691
uggucugaccauuaauaac

SEQ ID NO: 1800693 - RNA, 19 nt, Artificial Sequence
  Description of Artificial Sequence: Synthetic oligonucleotide
  Sense strand starting at position 1325 of SEQ ID NO: 1563171
guguauggaaaucaagcua

SEQ ID NO: 1800694 - RNA, 19 nt, Artificial Sequence
  Description of Artificial Sequence: Synthetic oligonucleotide
  Antisense strand to SEQ ID NO: 1800693
uagcuugauuuccauacac

SEQ ID NO: 1800695 - RNA, 19 nt, Artificial Sequence
  Description of Artificial Sequence: Synthetic oligonucleotide
  Sense strand starting at position 2024 of SEQ ID NO: 1563171
auaccagaguguuucugua

SEQ ID NO: 1800696 - RNA, 19 nt, Artificial Sequence
  Description of Artificial Sequence: Synthetic oligonucleotide
  Antisense strand to SEQ ID NO: 1800695
uacagaaacacucugguau

SEQ ID NO: 1800697 - RNA, 19 nt, Artificial Sequence
  Description of Artificial Sequence: Synthetic oligonucleotide
  Sense strand starting at position 2026 of SEQ ID NO: 1563171
accagaguguuucuguauu

SEQ ID NO: 1800698 - RNA, 19 nt, Artificial Sequence
  Description of Artificial Sequence: Synthetic oligonucleotide
  Antisense strand to SEQ ID NO: 1800697
aauacagaaacacucuggu

SEQ ID NO: 1800699 - RNA, 19 nt, Artificial Sequence
  Description of Artificial Sequence: Synthetic oligonucleotide
  Sense strand starting at position 2028 of SEQ ID NO: 1563171
cagaguguuucuguauuag

SEQ ID NO: 1800700 - RNA, 19 nt, Artificial Sequence
  Description of Artificial Sequence: Synthetic oligonucleotide
  Antisense strand to SEQ ID NO: 1800699
cuaauacagaaacacucug

SEQ ID NO: 1800701 - RNA, 19 nt, Artificial Sequence
  Description of Artificial Sequence: Synthetic oligonucleotide
  Sense strand starting at position 2174 of SEQ ID NO: 1563171
cgaaguucguucuccaaac

SEQ ID NO: 1800702 - RNA, 19 nt, Artificial Sequence
  Description of Artificial Sequence: Synthetic oligonucleotide
  Antisense strand to SEQ ID NO: 1800701
guuuggagaacgaacuucg

SEQ ID NO: 1800703 - RNA, 19 nt, Artificial Sequence
  Description of Artificial Sequence: Synthetic oligonucleotide
  Sense strand starting at position 2175 of SEQ ID NO: 1563171
gaaguucguucuccaaaca

SEQ ID NO: 1800704 - RNA, 19 nt, Artificial Sequence
  Description of Artificial Sequence: Synthetic oligonucleotide
  Antisense strand to SEQ ID NO: 1800703
uguuuggagaacgaacuuc

SEQ ID NO: 1800705 - RNA, 19 nt, Artificial Sequence
  Description of Artificial Sequence: Synthetic oligonucleotide
  Sense strand starting at position 2236 of SEQ ID NO: 1563171
guaggaaagucagcaaaga

SEQ ID NO: 1800706 - RNA, 19 nt, Artificial Sequence
  Description of Artificial Sequence: Synthetic oligonucleotide
  Antisense strand to SEQ ID NO: 1800705
ucuuugcugacuuuccuac

SEQ ID NO: 1800707 - RNA, 19 nt, Artificial Sequence
  Description of Artificial Sequence: Synthetic oligonucleotide
  Sense strand starting at position 2256 of SEQ ID NO: 1563171
agucaagacugagauagga

SEQ ID NO: 1800708 - RNA, 19 nt, Artificial Sequence
  Description of Artificial Sequence: Synthetic oligonucleotide
  Antisense strand to SEQ ID NO: 1800707
uccuaucucagucuugacu

SEQ ID NO: 1800709 - RNA, 19 nt, Artificial Sequence
  Description of Artificial Sequence: Synthetic oligonucleotide
  Sense strand starting at position 2273 of SEQ ID NO: 1563171
gaggauacauacuaaucga

SEQ ID NO: 1800710 - RNA, 19 nt, Artificial Sequence
  Description of Artificial Sequence: Synthetic oligonucleotide
  Antisense strand to SEQ ID NO: 1800709
ucgauuaguauguauccuc

SEQ ID NO: 1800711 - RNA, 19 nt, Artificial Sequence
  Description of Artificial Sequence: Synthetic oligonucleotide
  Sense strand starting at position 2301 of SEQ ID NO: 1563171
cuuuguguuccuucgaguc

SEQ ID NO: 1800712 - RNA, 19 nt, Artificial Sequence
  Description of Artificial Sequence: Synthetic oligonucleotide
  Antisense strand to SEQ ID NO: 1800711
gacucgaaggaacacaaag

SEQ ID NO: 1800713 - RNA, 19 nt, Artificial Sequence
  Description of Artificial Sequence: Synthetic oligonucleotide
  Sense strand starting at position 2392 of SEQ ID NO: 1563171
guguuuguuaaauaggcaa

SEQ ID NO: 1800714 - RNA, 19 nt, Artificial Sequence
  Description of Artificial Sequence: Synthetic oligonucleotide
  Antisense strand to SEQ ID NO: 1800713
uugccuauuuaacaaacac

SEQ ID NO: 1800715 - RNA, 19 nt, Artificial Sequence
  Description of Artificial Sequence: Synthetic oligonucleotide
  Sense strand starting at position 2657 of SEQ ID NO: 1563171
cgauccaugucccuacaaa

SEQ ID NO: 1800716 - RNA, 19 nt, Artificial Sequence
  Description of Artificial Sequence: Synthetic oligonucleotide
  Antisense strand to SEQ ID NO: 1800715
uuuguagggacauggaucg

SEQ ID NO: 1800717 - RNA, 19 nt, Artificial Sequence
  Description of Artificial Sequence: Synthetic oligonucleotide
  Sense strand starting at position 3011 of SEQ ID NO: 1563171
cuuguuucuuaacuuugua

SEQ ID NO: 1800718 - RNA, 19 nt, Artificial Sequence
  Description of Artificial Sequence: Synthetic oligonucleotide
  Antisense strand to SEQ ID NO: 1800717
uacaaaguuaagaaacaag

SEQ ID NO: 1800719 - RNA, 19 nt, Artificial Sequence
  Description of Artificial Sequence: Synthetic oligonucleotide
  Sense strand starting at position 3025 of SEQ ID NO: 1563171
uuguauuaauugccguuau

SEQ ID NO: 1800720 - RNA, 19 nt, Artificial Sequence
  Description of Artificial Sequence: Synthetic oligonucleotide
  Antisense strand to SEQ ID NO: 1800719
auaacggcaauuaauacaa

SEQ ID NO: 1800721 - RNA, 19 nt, Artificial Sequence
  Description of Artificial Sequence: Synthetic oligonucleotide
  Sense strand starting at position 3029 of SEQ ID NO: 1563171
auuaauugccguuaugacu

SEQ ID NO: 1800722 - RNA, 19 nt, Artificial Sequence
  Description of Artificial Sequence: Synthetic oligonucleotide
  Antisense strand to SEQ ID NO: 1800721
agucauaacggcaauuaau

SEQ ID NO: 1800723 - RNA, 19 nt, Artificial Sequence
  Description of Artificial Sequence: Synthetic oligonucleotide
  Sense strand starting at position 3626 of SEQ ID NO: 1563171
aucaaauagcuguauaugu

SEQ ID NO: 1800724 - RNA, 19 nt, Artificial Sequence
  Description of Artificial Sequence: Synthetic oligonucleotide
  Antisense strand to SEQ ID NO: 1800723
acauauacagcuauuugau

SEQ ID NO: 1800725 - RNA, 19 nt, Artificial Sequence
  Description of Artificial Sequence: Synthetic oligonucleotide
  Sense strand starting at position 3634 of SEQ ID NO: 1563171
gcuguauaugugcagucuu

SEQ ID NO: 1800726 - RNA, 19 nt, Artificial Sequence
  Description of Artificial Sequence: Synthetic oligonucleotide
  Antisense strand to SEQ ID NO: 1800725
aagacugcacauauacagc

SEQ ID NO: 1800727 - RNA, 19 nt, Artificial Sequence
  Description of Artificial Sequence: Synthetic oligonucleotide
  Sense strand starting at position 3823 of SEQ ID NO: 1563171
uuuggcucugcgugaauuu

SEQ ID NO: 1800728 - RNA, 19 nt, Artificial Sequence
  Description of Artificial Sequence: Synthetic oligonucleotide
  Antisense strand to SEQ ID NO: 1800727
aaauucacgcagagccaaa

SEQ ID NO: 1800729 - RNA, 19 nt, Artificial Sequence
  Description of Artificial Sequence: Synthetic oligonucleotide
  Sense strand starting at position 3852 of SEQ ID NO: 1563171
ucuucuaauucggugagaa

SEQ ID NO: 1800730 - RNA, 19 nt, Artificial Sequence
  Description of Artificial Sequence: Synthetic oligonucleotide
  Antisense strand to SEQ ID NO: 1800729
uucucaccgaauuagaaga

SEQ ID NO: 1800731 - RNA, 19 nt, Artificial Sequence
  Description of Artificial Sequence: Synthetic oligonucleotide
  Sense strand starting at position 3853 of SEQ ID NO: 1563171
cuucuaauucggugagaaa

SEQ ID NO: 1800732 - RNA, 19 nt, Artificial Sequence
  Description of Artificial Sequence: Synthetic oligonucleotide
  Antisense strand to SEQ ID NO: 1800731
uuucucaccgaauuagaag

SEQ ID NO: 1800733 - RNA, 19 nt, Artificial Sequence
  Description of Artificial Sequence: Synthetic oligonucleotide
  Sense strand starting at position 3854 of SEQ ID NO: 1563171
uucuaauucggugagaaau

SEQ ID NO: 1800734 - RNA, 19 nt, Artificial Sequence
  Description of Artificial Sequence: Synthetic oligonucleotide
  Antisense strand to SEQ ID NO: 1800733
auuucucaccgaauuagaa

SEQ ID NO: 1800735 - RNA, 19 nt, Artificial Sequence
  Description of Artificial Sequence: Synthetic oligonucleotide
  Sense strand starting at position 3860 of SEQ ID NO: 1563171
uucggugagaaaugucaau

SEQ ID NO: 1800736 - RNA, 19 nt, Artificial Sequence
  Description of Artificial Sequence: Synthetic oligonucleotide
  Antisense strand to SEQ ID NO: 1800735
auugacauuucucaccgaa

SEQ ID NO: 1800737 - RNA, 19 nt, Artificial Sequence
  Description of Artificial Sequence: Synthetic oligonucleotide
  Sense strand starting at position 145 of SEQ ID NO: 1563172
uggccaaauggcuauugau

SEQ ID NO: 1800738 - RNA, 19 nt, Artificial Sequence
  Description of Artificial Sequence: Synthetic oligonucleotide
  Antisense strand to SEQ ID NO: 1800737
aucaauagccauuuggcca

SEQ ID NO: 1800739 - RNA, 19 nt, Artificial Sequence
  Description of Artificial Sequence: Synthetic oligonucleotide
  Sense strand starting at position 159 of SEQ ID NO: 1563172
uugauauccuggcuaaaug

SEQ ID NO: 1800740 - RNA, 19 nt, Artificial Sequence
  Description of Artificial Sequence: Synthetic oligonucleotide
  Antisense strand to SEQ ID NO: 1800739
cauuuagccaggauaucaa

SEQ ID NO: 1800741 - RNA, 19 nt, Artificial Sequence
  Description of Artificial Sequence: Synthetic oligonucleotide
  Sense strand starting at position 661 of SEQ ID NO: 1563172
cuugcuccaccugauugaa

SEQ ID NO: 1800742 - RNA, 19 nt, Artificial Sequence
  Description of Artificial Sequence: Synthetic oligonucleotide
  Antisense strand to SEQ ID NO: 1800741
uucaaucagguggagcaag

SEQ ID NO: 1800743 - RNA, 19 nt, Artificial Sequence
  Description of Artificial Sequence: Synthetic oligonucleotide
  Sense strand starting at position 663 of SEQ ID NO: 1563172
ugcuccaccugauugaaga

SEQ ID NO: 1800744 - RNA, 19 nt, Artificial Sequence
  Description of Artificial Sequence: Synthetic oligonucleotide
  Antisense strand to SEQ ID NO: 1800743
ucuucaaucagguggagca

SEQ ID NO: 1800745 - RNA, 19 nt, Artificial Sequence
  Description of Artificial Sequence: Synthetic oligonucleotide
  Sense strand starting at position 759 of SEQ ID NO: 1563172
gaugaaucugugggugaaa

SEQ ID NO: 1800746 - RNA, 19 nt, Artificial Sequence
  Description of Artificial Sequence: Synthetic oligonucleotide
  Antisense strand to SEQ ID NO: 1800745
uuucacccacagauucauc

SEQ ID NO: 1800747 - RNA, 19 nt, Artificial Sequence
  Description of Artificial Sequence: Synthetic oligonucleotide
  Sense strand starting at position 761 of SEQ ID NO: 1563172
ugaaucugugggugaaaca

SEQ ID NO: 1800748 - RNA, 19 nt, Artificial Sequence
  Description of Artificial Sequence: Synthetic oligonucleotide
  Antisense strand to SEQ ID NO: 1800747
uguuucacccacagauuca

SEQ ID NO: 1800749 - RNA, 19 nt, Artificial Sequence
  Description of Artificial Sequence: Synthetic oligonucleotide
  Sense strand starting at position 768 of SEQ ID NO: 1563172
gugggugaaacagaguauu

SEQ ID NO: 1800750 - RNA, 19 nt, Artificial Sequence
  Description of Artificial Sequence: Synthetic oligonucleotide
  Antisense strand to SEQ ID NO: 1800749
aauacucuguuucacccac

SEQ ID NO: 1800751 - RNA, 19 nt, Artificial Sequence
  Description of Artificial Sequence: Synthetic oligonucleotide
  Sense strand starting at position 833 of SEQ ID NO: 1563172
uuucgaguuggugauaaag

SEQ ID NO: 1800752 - RNA, 19 nt, Artificial Sequence
  Description of Artificial Sequence: Synthetic oligonucleotide
  Antisense strand to SEQ ID NO: 1800751
cuuuaucaccaacucgaaa

SEQ ID NO: 1800753 - RNA, 19 nt, Artificial Sequence
  Description of Artificial Sequence: Synthetic oligonucleotide
  Sense strand starting at position 953 of SEQ ID NO: 1563172
ggagaugggucucugcuau

SEQ ID NO: 1800754 - RNA, 19 nt, Artificial Sequence
  Description of Artificial Sequence: Synthetic oligonucleotide
  Antisense strand to SEQ ID NO: 1800753
auagcagagacccaucucc

SEQ ID NO: 1800755 - RNA, 19 nt, Artificial Sequence
  Description of Artificial Sequence: Synthetic oligonucleotide
  Sense strand starting at position 968 of SEQ ID NO: 1563172
cuaugauagcuaggagggu

SEQ ID NO: 1800756 - RNA, 19 nt, Artificial Sequence
  Description of Artificial Sequence: Synthetic oligonucleotide
  Antisense strand to SEQ ID NO: 1800755
acccuccuagcuaucauag

SEQ ID NO: 1800757 - RNA, 19 nt, Artificial Sequence
  Description of Artificial Sequence: Synthetic oligonucleotide
  Sense strand starting at position 1007 of SEQ ID NO: 1563172
gguagucuccuacaccaga

SEQ ID NO: 1800758 - RNA, 19 nt, Artificial Sequence
  Description of Artificial Sequence: Synthetic oligonucleotide
  Antisense strand to SEQ ID NO: 1800757
ucugguguaggagacuacc

SEQ ID NO: 1800759 - RNA, 19 nt, Artificial Sequence
  Description of Artificial Sequence: Synthetic oligonucleotide
  Sense strand starting at position 1077 of SEQ ID NO: 1563172
ucagauaaauuccuucguu

SEQ ID NO: 1800760 - RNA, 19 nt, Artificial Sequence
  Description of Artificial Sequence: Synthetic oligonucleotide
  Antisense strand to SEQ ID NO: 1800759
aacgaaggaauuuaucuga

SEQ ID NO: 1800761 - RNA, 19 nt, Artificial Sequence
  Description of Artificial Sequence: Synthetic oligonucleotide
  Sense strand starting at position 1137 of SEQ ID NO: 1563172
gaggauagagucuggcaga

SEQ ID NO: 1800762 - RNA, 19 nt, Artificial Sequence
  Description of Artificial Sequence: Synthetic oligonucleotide
  Antisense strand to SEQ ID NO: 1800761
ucugccagacucuauccuc

SEQ ID NO: 1800763 - RNA, 19 nt, Artificial Sequence
  Description of Artificial Sequence: Synthetic oligonucleotide
  Sense strand starting at position 1188 of SEQ ID NO: 1563172
gagaaaugaaaguguagug

SEQ ID NO: 1800764 - RNA, 19 nt, Artificial Sequence
  Description of Artificial Sequence: Synthetic oligonucleotide
  Antisense strand to SEQ ID NO: 1800763
cacuacacuuucauuucuc

SEQ ID NO: 1800765 - RNA, 19 nt, Artificial Sequence
  Description of Artificial Sequence: Synthetic oligonucleotide
  Sense strand starting at position 1250 of SEQ ID NO: 1563172
uuagacacuugaguuuaaa

SEQ ID NO: 1800766 - RNA, 19 nt, Artificial Sequence
  Description of Artificial Sequence: Synthetic oligonucleotide
  Antisense strand to SEQ ID NO: 1800765
uuuaaacucaagugucuaa

SEQ ID NO: 1800767 - RNA, 19 nt, Artificial Sequence
  Description of Artificial Sequence: Synthetic oligonucleotide
  Sense strand starting at position 1531 of SEQ ID NO: 1563172
ccuucucucgcugaaacuu

SEQ ID NO: 1800768 - RNA, 19 nt, Artificial Sequence
  Description of Artificial Sequence: Synthetic oligonucleotide
  Antisense strand to SEQ ID NO: 1800767
aaguuucagcgagagaagg

SEQ ID NO: 1800769 - RNA, 19 nt, Artificial Sequence
  Description of Artificial Sequence: Synthetic oligonucleotide
  Sense strand starting at position 1543 of SEQ ID NO: 1563172
gaaacuugugccgaaaccu

SEQ ID NO: 1800770 - RNA, 19 nt, Artificial Sequence
  Description of Artificial Sequence: Synthetic oligonucleotide
  Antisense strand to SEQ ID NO: 1800769
agguuucggcacaaguuuc

SEQ ID NO: 1800771 - RNA, 19 nt, Artificial Sequence
  Description of Artificial Sequence: Synthetic oligonucleotide
  Sense strand starting at position 2156 of SEQ ID NO: 1563172
cuuucugguguuugaauuu

SEQ ID NO: 1800772 - RNA, 19 nt, Artificial Sequence
  Description of Artificial Sequence: Synthetic oligonucleotide
  Antisense strand to SEQ ID NO: 1800771
aaauucaaacaccagaaag

SEQ ID NO: 1800773 - RNA, 19 nt, Artificial Sequence
  Description of Artificial Sequence: Synthetic oligonucleotide
  Sense strand starting at position 2261 of SEQ ID NO: 1563172
ggaauugucucauccuuuc

SEQ ID NO: 1800774 - RNA, 19 nt, Artificial Sequence
  Description of Artificial Sequence: Synthetic oligonucleotide
  Antisense strand to SEQ ID NO: 1800773
gaaaggaugagacaauucc

SEQ ID NO: 1800775 - RNA, 19 nt, Artificial Sequence
  Description of Artificial Sequence: Synthetic oligonucleotide
  Sense strand starting at position 2588 of SEQ ID NO: 1563172
ccucauugauuugaugaag

SEQ ID NO: 1800776 - RNA, 19 nt, Artificial Sequence
  Description of Artificial Sequence: Synthetic oligonucleotide
  Antisense strand to SEQ ID NO: 1800775
cuucaucaaaucaaugagg

SEQ ID NO: 1800777 - RNA, 19 nt, Artificial Sequence
  Description of Artificial Sequence: Synthetic oligonucleotide
  Sense strand starting at position 2599 of SEQ ID NO: 1563172
ugaugaaguuaguuuguau

SEQ ID NO: 1800778 - RNA, 19 nt, Artificial Sequence
  Description of Artificial Sequence: Synthetic oligonucleotide
  Antisense strand to SEQ ID NO: 1800777
auacaaacuaacuucauca

SEQ ID NO: 1800779 - RNA, 19 nt, Artificial Sequence
  Description of Artificial Sequence: Synthetic oligonucleotide
  Sense strand starting at position 2602 of SEQ ID NO: 1563172
ugaaguuaguuuguaucaa

SEQ ID NO: 1800780 - RNA, 19 nt, Artificial Sequence
  Description of Artificial Sequence: Synthetic oligonucleotide
  Antisense strand to SEQ ID NO: 1800779
uugauacaaacuaacuuca

SEQ ID NO: 1800781 - RNA, 19 nt, Artificial Sequence
  Description of Artificial Sequence: Synthetic oligonucleotide
  Sense strand starting at position 2612 of SEQ ID NO: 1563172
uuguaucaaguugaacaua

SEQ ID NO: 1800782 - RNA, 19 nt, Artificial Sequence
  Description of Artificial Sequence: Synthetic oligonucleotide
  Antisense strand to SEQ ID NO: 1800781
uauguucaacuugauacaa

SEQ ID NO: 1800783 - RNA, 19 nt, Artificial Sequence
  Description of Artificial Sequence: Synthetic oligonucleotide
  Sense strand starting at position 2637 of SEQ ID NO: 1563172
ucggacugcacaggaaaua

SEQ ID NO: 1800784 - RNA, 19 nt, Artificial Sequence
  Description of Artificial Sequence: Synthetic oligonucleotide
  Antisense strand to SEQ ID NO: 1800783
uauuuccugugcaguccga

SEQ ID NO: 1800785 - RNA, 19 nt, Artificial Sequence
  Description of Artificial Sequence: Synthetic oligonucleotide
  Sense strand starting at position 2763 of SEQ ID NO: 1563172
gaaggucaguguucuaauu

SEQ ID NO: 1800786 - RNA, 19 nt, Artificial Sequence
  Description of Artificial Sequence: Synthetic oligonucleotide
  Antisense strand to SEQ ID NO: 1800785
aauuagaacacugaccuuc

SEQ ID NO: 1800787 - RNA, 19 nt, Artificial Sequence
  Description of Artificial Sequence: Synthetic oligonucleotide
  Sense strand starting at position 2798 of SEQ ID NO: 1563172
agugaacuauugucccuuu

SEQ ID NO: 1800788 - RNA, 19 nt, Artificial Sequence
  Description of Artificial Sequence: Synthetic oligonucleotide
  Antisense strand to SEQ ID NO: 1800787
aaagggacaauaguucacu

SEQ ID NO: 1800789 - RNA, 19 nt, Artificial Sequence
  Description of Artificial Sequence: Synthetic oligonucleotide
  Sense strand starting at position 2842 of SEQ ID NO: 1563172
uuaggugucagaugacuga

SEQ ID NO: 1800790 - RNA, 19 nt, Artificial Sequence
  Description of Artificial Sequence: Synthetic oligonucleotide
  Antisense strand to SEQ ID NO: 1800789
ucagucaucugacaccuaa

SEQ ID NO: 1800791 - RNA, 19 nt, Artificial Sequence
  Description of Artificial Sequence: Synthetic oligonucleotide
  Sense strand starting at position 2845 of SEQ ID NO: 1563172
ggugucagaugacugagau

SEQ ID NO: 1800792 - RNA, 19 nt, Artificial Sequence
  Description of Artificial Sequence: Synthetic oligonucleotide
  Antisense strand to SEQ ID NO: 1800791
aucucagucaucugacacc

SEQ ID NO: 1800793 - RNA, 19 nt, Artificial Sequence
  Description of Artificial Sequence: Synthetic oligonucleotide
  Sense strand starting at position 2846 of SEQ ID NO: 1563172
gugucagaugacugagauc

SEQ ID NO: 1800794 - RNA, 19 nt, Artificial Sequence
  Description of Artificial Sequence: Synthetic oligonucleotide
  Antisense strand to SEQ ID NO: 1800793
gaucucagucaucugacac

SEQ ID NO: 1800795 - RNA, 19 nt, Artificial Sequence
  Description of Artificial Sequence: Synthetic oligonucleotide
  Sense strand starting at position 2870 of SEQ ID NO: 1563172
agaagauugcugggugacu

SEQ ID NO: 1800796 - RNA, 19 nt, Artificial Sequence
  Description of Artificial Sequence: Synthetic oligonucleotide
  Antisense strand to SEQ ID NO: 1800795
agucacccagcaaucuucu

SEQ ID NO: 1800797 - RNA, 19 nt, Artificial Sequence
  Description of Artificial Sequence: Synthetic oligonucleotide
  Sense strand starting at position 2871 of SEQ ID NO: 1563172
gaagauugcugggugacuu

SEQ ID NO: 1800798 - RNA, 19 nt, Artificial Sequence
  Description of Artificial Sequence: Synthetic oligonucleotide
  Antisense strand to SEQ ID NO: 1800797
aagucacccagcaaucuuc

SEQ ID NO: 1800799 - RNA, 19 nt, Artificial Sequence
  Description of Artificial Sequence: Synthetic oligonucleotide
  Sense strand starting at position 2872 of SEQ ID NO: 1563172
aagauugcugggugacuuu

SEQ ID NO: 1800800 - RNA, 19 nt, Artificial Sequence
  Description of Artificial Sequence: Synthetic oligonucleotide
  Antisense strand to SEQ ID NO: 1800799
aaagucacccagcaaucuu

SEQ ID NO: 1800801 - RNA, 19 nt, Artificial Sequence
  Description of Artificial Sequence: Synthetic oligonucleotide
  Sense strand starting at position 2964 of SEQ ID NO: 1563172
acagauuagugacuccaca

SEQ ID NO: 1800802 - RNA, 19 nt, Artificial Sequence
  Description of Artificial Sequence: Synthetic oligonucleotide
  Antisense strand to SEQ ID NO: 1800801
uguggagucacuaaucugu

SEQ ID NO: 1800803 - RNA, 19 nt, Artificial Sequence
  Description of Artificial Sequence: Synthetic oligonucleotide
  Sense strand starting at position 3030 of SEQ ID NO: 1563172
aaguuuguggugcaaccua

SEQ ID NO: 1800804 - RNA, 19 nt, Artificial Sequence
  Description of Artificial Sequence: Synthetic oligonucleotide
  Antisense strand to SEQ ID NO: 1800803
uagguugcaccacaaacuu

SEQ ID NO: 1800805 - RNA, 19 nt, Artificial Sequence
  Description of Artificial Sequence: Synthetic oligonucleotide
  Sense strand starting at position 3037 of SEQ ID NO: 1563172
uggugcaaccuauaaaucu

SEQ ID NO: 1800806 - RNA, 19 nt, Artificial Sequence
  Description of Artificial Sequence: Synthetic oligonucleotide
  Antisense strand to SEQ ID NO: 1800805
agauuuauagguugcacca

SEQ ID NO: 1800807 - RNA, 19 nt, Artificial Sequence
  Description of Artificial Sequence: Synthetic oligonucleotide
  Sense strand starting at position 3263 of SEQ ID NO: 1563172
ccugaugucugugucauuu

SEQ ID NO: 1800808 - RNA, 19 nt, Artificial Sequence
  Description of Artificial Sequence: Synthetic oligonucleotide
  Antisense strand to SEQ ID NO: 1800807
aaaugacacagacaucagg

SEQ ID NO: 1800809 - RNA, 19 nt, Artificial Sequence
  Description of Artificial Sequence: Synthetic oligonucleotide
  Sense strand starting at position 3434 of SEQ ID NO: 1563172
agaaguuaguccucaugca

SEQ ID NO: 1800810 - RNA, 19 nt, Artificial Sequence
  Description of Artificial Sequence: Synthetic oligonucleotide
  Antisense strand to SEQ ID NO: 1800809
ugcaugaggacuaacuucu

SEQ ID NO: 1800811 - RNA, 19 nt, Artificial Sequence
  Description of Artificial Sequence: Synthetic oligonucleotide
  Sense strand starting at position 3435 of SEQ ID NO: 1563172
gaaguuaguccucaugcau

SEQ ID NO: 1800812 - RNA, 19 nt, Artificial Sequence
  Description of Artificial Sequence: Synthetic oligonucleotide
  Antisense strand to SEQ ID NO: 1800811
augcaugaggacuaacuuc

SEQ ID NO: 1800813 - RNA, 19 nt, Artificial Sequence
  Description of Artificial Sequence: Synthetic oligonucleotide
  Sense strand starting at position 3628 of SEQ ID NO: 1563172
agaagucaauaugucacaa

SEQ ID NO: 1800814 - RNA, 19 nt, Artificial Sequence
  Description of Artificial Sequence: Synthetic oligonucleotide
  Antisense strand to SEQ ID NO: 1800813
uugugacauauugacuucu

SEQ ID NO: 1800815 - RNA, 19 nt, Artificial Sequence
  Description of Artificial Sequence: Synthetic oligonucleotide
  Sense strand starting at position 3909 of SEQ ID NO: 1563172
gacagaugacuugguguca

SEQ ID NO: 1800816 - RNA, 19 nt, Artificial Sequence
  Description of Artificial Sequence: Synthetic oligonucleotide
  Antisense strand to SEQ ID NO: 1800815
ugacaccaagucaucuguc

SEQ ID NO: 1800817 - RNA, 19 nt, Artificial Sequence
  Description of Artificial Sequence: Synthetic oligonucleotide
  Sense strand starting at position 144 of SEQ ID NO: 1563173
ggguuaccugucugaaaca

SEQ ID NO: 1800818 - RNA, 19 nt, Artificial Sequence
  Description of Artificial Sequence: Synthetic oligonucleotide
  Antisense strand to SEQ ID NO: 1800817
uguuucagacagguaaccc

SEQ ID NO: 1800819 - RNA, 19 nt, Artificial Sequence
  Description of Artificial Sequence: Synthetic oligonucleotide
  Sense strand starting at position 255 of SEQ ID NO: 1563173
acagcacuuuggucaggaa

SEQ ID NO: 1800820 - RNA, 19 nt, Artificial Sequence
  Description of Artificial Sequence: Synthetic oligonucleotide
  Antisense strand to SEQ ID NO: 1800819
uuccugaccaaagugcugu

SEQ ID NO: 1800821 - RNA, 19 nt, Artificial Sequence
  Description of Artificial Sequence: Synthetic oligonucleotide
  Sense strand starting at position 256 of SEQ ID NO: 1563173
cagcacuuuggucaggaaa

SEQ ID NO: 1800822 - RNA, 19 nt, Artificial Sequence
  Description of Artificial Sequence: Synthetic oligonucleotide
  Antisense strand to SEQ ID NO: 1800821
uuuccugaccaaagugcug

SEQ ID NO: 1800823 - RNA, 19 nt, Artificial Sequence
  Description of Artificial Sequence: Synthetic oligonucleotide
  Sense strand starting at position 307 of SEQ ID NO: 1563173
ugaaaugguucuuccuauu

SEQ ID NO: 1800824 - RNA, 19 nt, Artificial Sequence
  Description of Artificial Sequence: Synthetic oligonucleotide
  Antisense strand to SEQ ID NO: 1800823
aauaggaagaaccauuuca

SEQ ID NO: 1800825 - RNA, 19 nt, Artificial Sequence
  Description of Artificial Sequence: Synthetic oligonucleotide
  Sense strand starting at position 1243 of SEQ ID NO: 1563173
gggccaaacuuccuagaau

SEQ ID NO: 1800826 - RNA, 19 nt, Artificial Sequence
  Description of Artificial Sequence: Synthetic oligonucleotide
  Antisense strand to SEQ ID NO: 1800825
auucuaggaaguuuggccc

SEQ ID NO: 1800827 - RNA, 19 nt, Artificial Sequence
  Description of Artificial Sequence: Synthetic oligonucleotide
  Sense strand starting at position 1365 of SEQ ID NO: 1563173
ucuguaugaggcuagacau

SEQ ID NO: 1800828 - RNA, 19 nt, Artificial Sequence
  Description of Artificial Sequence: Synthetic oligonucleotide
  Antisense strand to SEQ ID NO: 1800827
augucuagccucauacaga

SEQ ID NO: 1800829 - RNA, 19 nt, Artificial Sequence
  Description of Artificial Sequence: Synthetic oligonucleotide
  Sense strand starting at position 1404 of SEQ ID NO: 1563173
ccaagacauguuuguugga

SEQ ID NO: 1800830 - RNA, 19 nt, Artificial Sequence
  Description of Artificial Sequence: Synthetic oligonucleotide
  Antisense strand to SEQ ID NO: 1800829
uccaacaaacaugucuugg

SEQ ID NO: 1800831 - RNA, 19 nt, Artificial Sequence
  Description of Artificial Sequence: Synthetic oligonucleotide
  Sense strand starting at position 1405 of SEQ ID NO: 1563173
caagacauguuuguuggau

SEQ ID NO: 1800832 - RNA, 19 nt, Artificial Sequence
  Description of Artificial Sequence: Synthetic oligonucleotide
  Antisense strand to SEQ ID NO: 1800831
auccaacaaacaugucuug

SEQ ID NO: 1800833 - RNA, 19 nt, Artificial Sequence
  Description of Artificial Sequence: Synthetic oligonucleotide
  Sense strand starting at position 1406 of SEQ ID NO: 1563173
aagacauguuuguuggaua

SEQ ID NO: 1800834 - RNA, 19 nt, Artificial Sequence
  Description of Artificial Sequence: Synthetic oligonucleotide
  Antisense strand to SEQ ID NO: 1800833
uauccaacaaacaugucuu

SEQ ID NO: 1800835 - RNA, 19 nt, Artificial Sequence
  Description of Artificial Sequence: Synthetic oligonucleotide
  Sense strand starting at position 1608 of SEQ ID NO: 1563173
agucucuauggagguugaa

SEQ ID NO: 1800836 - RNA, 19 nt, Artificial Sequence
  Description of Artificial Sequence: Synthetic oligonucleotide
  Antisense strand to SEQ ID NO: 1800835
uucaaccuccauagagacu

SEQ ID NO: 1800837 - RNA, 19 nt, Artificial Sequence
  Description of Artificial Sequence: Synthetic oligonucleotide
  Sense strand starting at position 1611 of SEQ ID NO: 1563173
cucuauggagguugaaagu

SEQ ID NO: 1800838 - RNA, 19 nt, Artificial Sequence
  Description of Artificial Sequence: Synthetic oligonucleotide
  Antisense strand to SEQ ID NO: 1800837
acuuucaaccuccauagag

SEQ ID NO: 1800839 - RNA, 19 nt, Artificial Sequence
  Description of Artificial Sequence: Synthetic oligonucleotide
  Sense strand starting at position 1708 of SEQ ID NO: 1563173
uaggccuuuggaugggaau

SEQ ID NO: 1800840 - RNA, 19 nt, Artificial Sequence
  Description of Artificial Sequence: Synthetic oligonucleotide
  Antisense strand to SEQ ID NO: 1800839
auucccauccaaaggccua

SEQ ID NO: 1800841 - RNA, 19 nt, Artificial Sequence
  Description of Artificial Sequence: Synthetic oligonucleotide
  Sense strand starting at position 1836 of SEQ ID NO: 1563173
ccugaaugucuauaggcua

SEQ ID NO: 1800842 - RNA, 19 nt, Artificial Sequence
  Description of Artificial Sequence: Synthetic oligonucleotide
  Antisense strand to SEQ ID NO: 1800841
uagccuauagacauucagg

SEQ ID NO: 1800843 - RNA, 19 nt, Artificial Sequence
  Description of Artificial Sequence: Synthetic oligonucleotide
  Sense strand starting at position 1849 of SEQ ID NO: 1563173
aggcuaugucaggaagggu

SEQ ID NO: 1800844 - RNA, 19 nt, Artificial Sequence
  Description of Artificial Sequence: Synthetic oligonucleotide
  Antisense strand to SEQ ID NO: 1800843
acccuuccugacauagccu

SEQ ID NO: 1800845 - RNA, 19 nt, Artificial Sequence
  Description of Artificial Sequence: Synthetic oligonucleotide
  Sense strand starting at position 1902 of SEQ ID NO: 1563173
ugcuaagagcaagggauau

SEQ ID NO: 1800846 - RNA, 19 nt, Artificial Sequence
  Description of Artificial Sequence: Synthetic oligonucleotide
  Antisense strand to SEQ ID NO: 1800845
auaucccuugcucuuagca

SEQ ID NO: 1800847 - RNA, 19 nt, Artificial Sequence
  Description of Artificial Sequence: Synthetic oligonucleotide
  Sense strand starting at position 1915 of SEQ ID NO: 1563173
ggauauagggcuuaguaug

SEQ ID NO: 1800848 - RNA, 19 nt, Artificial Sequence
  Description of Artificial Sequence: Synthetic oligonucleotide
  Antisense strand to SEQ ID NO: 1800847
cauacuaagcccuauaucc

SEQ ID NO: 1800849 - RNA, 19 nt, Artificial Sequence
  Description of Artificial Sequence: Synthetic oligonucleotide
  Sense strand starting at position 1925 of SEQ ID NO: 1563173
cuuaguaugggcuagaagu

SEQ ID NO: 1800850 - RNA, 19 nt, Artificial Sequence
  Description of Artificial Sequence: Synthetic oligonucleotide
  Antisense strand to SEQ ID NO: 1800849
acuucuagcccauacuaag

SEQ ID NO: 1800851 - RNA, 19 nt, Artificial Sequence
  Description of Artificial Sequence: Synthetic oligonucleotide
  Sense strand starting at position 1941 of SEQ ID NO: 1563173
aguagagggcuuuggaaua

SEQ ID NO: 1800852 - RNA, 19 nt, Artificial Sequence
  Description of Artificial Sequence: Synthetic oligonucleotide
  Antisense strand to SEQ ID NO: 1800851
uauuccaaagcccucuacu

SEQ ID NO: 1800853 - RNA, 19 nt, Artificial Sequence
  Description of Artificial Sequence: Synthetic oligonucleotide
  Sense strand starting at position 2216 of SEQ ID NO: 1563173
guaggagguugauucugau

SEQ ID NO: 1800854 - RNA, 19 nt, Artificial Sequence
  Description of Artificial Sequence: Synthetic oligonucleotide
  Antisense strand to SEQ ID NO: 1800853
aucagaaucaaccuccuac

SEQ ID NO: 1800855 - RNA, 19 nt, Artificial Sequence
  Description of Artificial Sequence: Synthetic oligonucleotide
  Sense strand starting at position 2223 of SEQ ID NO: 1563173
guugauucugaugauguua

SEQ ID NO: 1800856 - RNA, 19 nt, Artificial Sequence
  Description of Artificial Sequence: Synthetic oligonucleotide
  Antisense strand to SEQ ID NO: 1800855
uaacaucaucagaaucaac

SEQ ID NO: 1800857 - RNA, 19 nt, Artificial Sequence
  Description of Artificial Sequence: Synthetic oligonucleotide
  Sense strand starting at position 2251 of SEQ ID NO: 1563173
gaguuugagaaggguaacu

SEQ ID NO: 1800858 - RNA, 19 nt, Artificial Sequence
  Description of Artificial Sequence: Synthetic oligonucleotide
  Antisense strand to SEQ ID NO: 1800857
aguuacccuucucaaacuc

SEQ ID NO: 1800859 - RNA, 19 nt, Artificial Sequence
  Description of Artificial Sequence: Synthetic oligonucleotide
  Sense strand starting at position 2307 of SEQ ID NO: 1563173
cugggaucaaaguggaguu

SEQ ID NO: 1800860 - RNA, 19 nt, Artificial Sequence
  Description of Artificial Sequence: Synthetic oligonucleotide
  Antisense strand to SEQ ID NO: 1800859
aacuccacuuugaucccag

SEQ ID NO: 1800861 - RNA, 19 nt, Artificial Sequence
  Description of Artificial Sequence: Synthetic oligonucleotide
  Sense strand starting at position 2328 of SEQ ID NO: 1563173
aggucuuaaaggugaagca

SEQ ID NO: 1800862 - RNA, 19 nt, Artificial Sequence
  Description of Artificial Sequence: Synthetic oligonucleotide
  Antisense strand to SEQ ID NO: 1800861
ugcuucaccuuuaagaccu

SEQ ID NO: 1800863 - RNA, 19 nt, Artificial Sequence
  Description of Artificial Sequence: Synthetic oligonucleotide
  Sense strand starting at position 2329 of SEQ ID NO: 1563173
ggucuuaaaggugaagcau

SEQ ID NO: 1800864 - RNA, 19 nt, Artificial Sequence
  Description of Artificial Sequence: Synthetic oligonucleotide
  Antisense strand to SEQ ID NO: 1800863
augcuucaccuuuaagacc

SEQ ID NO: 1800865 - RNA, 19 nt, Artificial Sequence
  Description of Artificial Sequence: Synthetic oligonucleotide
  Sense strand starting at position 2520 of SEQ ID NO: 1563173
ugaagcugauguuuagaaa

SEQ ID NO: 1800866 - RNA, 19 nt, Artificial Sequence
  Description of Artificial Sequence: Synthetic oligonucleotide
  Antisense strand to SEQ ID NO: 1800865
uuucuaaacaucagcuuca

SEQ ID NO: 1800867 - RNA, 19 nt, Artificial Sequence
  Description of Artificial Sequence: Synthetic oligonucleotide
  Sense strand starting at position 2661 of SEQ ID NO: 1563173
cuucucuucucauuggaga

SEQ ID NO: 1800868 - RNA, 19 nt, Artificial Sequence
  Description of Artificial Sequence: Synthetic oligonucleotide
  Antisense strand to SEQ ID NO: 1800867
ucuccaaugagaagagaag

SEQ ID NO: 1800869 - RNA, 19 nt, Artificial Sequence
  Description of Artificial Sequence: Synthetic oligonucleotide
  Sense strand starting at position 2729 of SEQ ID NO: 1563173
caugcauguggagggaaua

SEQ ID NO: 1800870 - RNA, 19 nt, Artificial Sequence
  Description of Artificial Sequence: Synthetic oligonucleotide
  Antisense strand to SEQ ID NO: 1800869
uauucccuccacaugcaug

SEQ ID NO: 1800871 - RNA, 19 nt, Artificial Sequence
  Description of Artificial Sequence: Synthetic oligonucleotide
  Sense strand starting at position 2870 of SEQ ID NO: 1563173
cgcucauggaauuagagau

SEQ ID NO: 1800872 - RNA, 19 nt, Artificial Sequence
  Description of Artificial Sequence: Synthetic oligonucleotide
  Antisense strand to SEQ ID NO: 1800871
aucucuaauuccaugagcg

SEQ ID NO: 1800873 - RNA, 19 nt, Artificial Sequence
  Description of Artificial Sequence: Synthetic oligonucleotide
  Sense strand starting at position 2980 of SEQ ID NO: 1563173
aggcuucacgggcauagaa

SEQ ID NO: 1800874 - RNA, 19 nt, Artificial Sequence
  Description of Artificial Sequence: Synthetic oligonucleotide
  Antisense strand to SEQ ID NO: 1800873
uucuaugcccgugaagccu

SEQ ID NO: 1800875 - RNA, 19 nt, Artificial Sequence
  Description of Artificial Sequence: Synthetic oligonucleotide
  Sense strand starting at position 3061 of SEQ ID NO: 1563173
uacagcagucuggacauua

SEQ ID NO: 1800876 - RNA, 19 nt, Artificial Sequence
  Description of Artificial Sequence: Synthetic oligonucleotide
  Antisense strand to SEQ ID NO: 1800875
uaauguccagacugcugua

SEQ ID NO: 1800877 - RNA, 19 nt, Artificial Sequence
  Description of Artificial Sequence: Synthetic oligonucleotide
  Sense strand starting at position 3072 of SEQ ID NO: 1563173
ggacauuaguaguuaucua

SEQ ID NO: 1800878 - RNA, 19 nt, Artificial Sequence
  Description of Artificial Sequence: Synthetic oligonucleotide
  Antisense strand to SEQ ID NO: 1800877
uagauaacuacuaaugucc

SEQ ID NO: 1800879 - RNA, 19 nt, Artificial Sequence
  Description of Artificial Sequence: Synthetic oligonucleotide
  Sense strand starting at position 3079 of SEQ ID NO: 1563173
aguaguuaucuauagacac

SEQ ID NO: 1800880 - RNA, 19 nt, Artificial Sequence
  Description of Artificial Sequence: Synthetic oligonucleotide
  Antisense strand to SEQ ID NO: 1800879
gugucuauagauaacuacu

SEQ ID NO: 1800881 - RNA, 19 nt, Artificial Sequence
  Description of Artificial Sequence: Synthetic oligonucleotide
  Sense strand starting at position 3126 of SEQ ID NO: 1563173
guguccauuccucagagga

SEQ ID NO: 1800882 - RNA, 19 nt, Artificial Sequence
  Description of Artificial Sequence: Synthetic oligonucleotide
  Antisense strand to SEQ ID NO: 1800881
uccucugaggaauggacac

SEQ ID NO: 1800883 - RNA, 19 nt, Artificial Sequence
  Description of Artificial Sequence: Synthetic oligonucleotide
  Sense strand starting at position 3380 of SEQ ID NO: 1563173
ggaacugaugcuggacaua

SEQ ID NO: 1800884 - RNA, 19 nt, Artificial Sequence
  Description of Artificial Sequence: Synthetic oligonucleotide
  Antisense strand to SEQ ID NO: 1800883
uauguccagcaucaguucc

SEQ ID NO: 1800885 - RNA, 19 nt, Artificial Sequence
  Description of Artificial Sequence: Synthetic oligonucleotide
  Sense strand starting at position 3400 of SEQ ID NO: 1563173
aggaaagauuuguauacau

SEQ ID NO: 1800886 - RNA, 19 nt, Artificial Sequence
  Description of Artificial Sequence: Synthetic oligonucleotide
  Antisense strand to SEQ ID NO: 1800885
auguauacaaaucuuuccu

SEQ ID NO: 1800887 - RNA, 19 nt, Artificial Sequence
  Description of Artificial Sequence: Synthetic oligonucleotide
  Sense strand starting at position 3672 of SEQ ID NO: 1563173
ugggccucucgguaggaaa

SEQ ID NO: 1800888 - RNA, 19 nt, Artificial Sequence
  Description of Artificial Sequence: Synthetic oligonucleotide
  Antisense strand to SEQ ID NO: 1800887
uuuccuaccgagaggccca

SEQ ID NO: 1800889 - RNA, 19 nt, Artificial Sequence
  Description of Artificial Sequence: Synthetic oligonucleotide
  Sense strand starting at position 3717 of SEQ ID NO: 1563173
cauuauuaugauggaaugu

SEQ ID NO: 1800890 - RNA, 19 nt, Artificial Sequence
  Description of Artificial Sequence: Synthetic oligonucleotide
  Antisense strand to SEQ ID NO: 1800889
acauuccaucauaauaaug

SEQ ID NO: 1800891 - RNA, 19 nt, Artificial Sequence
  Description of Artificial Sequence: Synthetic oligonucleotide
  Sense strand starting at position 3860 of SEQ ID NO: 1563173
ggucuuaauccugggaacc

SEQ ID NO: 1800892 - RNA, 19 nt, Artificial Sequence
  Description of Artificial Sequence: Synthetic oligonucleotide
  Antisense strand to SEQ ID NO: 1800891
gguucccaggauuaagacc

SEQ ID NO: 1800893 - RNA, 19 nt, Artificial Sequence
  Description of Artificial Sequence: Synthetic oligonucleotide
  Sense strand starting at position 3878 of SEQ ID NO: 1563173
cgaugaacauuaccuuaua

SEQ ID NO: 1800894 - RNA, 19 nt, Artificial Sequence
  Description of Artificial Sequence: Synthetic oligonucleotide
  Antisense strand to SEQ ID NO: 1800893
uauaagguaauguucaucg

SEQ ID NO: 1800895 - RNA, 19 nt, Artificial Sequence
  Description of Artificial Sequence: Synthetic oligonucleotide
  Sense strand starting at position 3905 of SEQ ID NO: 1563173
agacuuugcagaugugaau

SEQ ID NO: 1800896 - RNA, 19 nt, Artificial Sequence
  Description of Artificial Sequence: Synthetic oligonucleotide
  Antisense strand to SEQ ID NO: 1800895
auucacaucugcaaagucu

SEQ ID NO: 1800897 - RNA, 19 nt, Artificial Sequence
  Description of Artificial Sequence: Synthetic oligonucleotide
  Sense strand starting at position 278 of SEQ ID NO: 1563174
uucuauuggguagauagua

SEQ ID NO: 1800898 - RNA, 19 nt, Artificial Sequence
  Description of Artificial Sequence: Synthetic oligonucleotide
  Antisense strand to SEQ ID NO: 1800897
uacuaucuacccaauagaa

SEQ ID NO: 1800899 - RNA, 19 nt, Artificial Sequence
  Description of Artificial Sequence: Synthetic oligonucleotide
  Sense strand starting at position 318 of SEQ ID NO: 1563174
cggacugauuucgggucua

SEQ ID NO: 1800900 - RNA, 19 nt, Artificial Sequence
  Description of Artificial Sequence: Synthetic oligonucleotide
  Antisense strand to SEQ ID NO: 1800899
uagacccgaaaucaguccg

SEQ ID NO: 1800901 - RNA, 19 nt, Artificial Sequence
  Description of Artificial Sequence: Synthetic oligonucleotide
  Sense strand starting at position 331 of SEQ ID NO: 1563174
ggucuagucuucgugugca

SEQ ID NO: 1800902 - RNA, 19 nt, Artificial Sequence
  Description of Artificial Sequence: Synthetic oligonucleotide
  Antisense strand to SEQ ID NO: 1800901
ugcacacgaagacuagacc

SEQ ID NO: 1800903 - RNA, 19 nt, Artificial Sequence
  Description of Artificial Sequence: Synthetic oligonucleotide
  Sense strand starting at position 334 of SEQ ID NO: 1563174
cuagucuucgugugcaacu

SEQ ID NO: 1800904 - RNA, 19 nt, Artificial Sequence
  Description of Artificial Sequence: Synthetic oligonucleotide
  Antisense strand to SEQ ID NO: 1800903
aguugcacacgaagacuag

SEQ ID NO: 1800905 - RNA, 19 nt, Artificial Sequence
  Description of Artificial Sequence: Synthetic oligonucleotide
  Sense strand starting at position 335 of SEQ ID NO: 1563174
uagucuucgugugcaacuu

SEQ ID NO: 1800906 - RNA, 19 nt, Artificial Sequence
  Description of Artificial Sequence: Synthetic oligonucleotide
  Antisense strand to SEQ ID NO: 1800905
aaguugcacacgaagacua

SEQ ID NO: 1800907 - RNA, 19 nt, Artificial Sequence
  Description of Artificial Sequence: Synthetic oligonucleotide
  Sense strand starting at position 336 of SEQ ID NO: 1563174
agucuucgugugcaacuuu

SEQ ID NO: 1800908 - RNA, 19 nt, Artificial Sequence
  Description of Artificial Sequence: Synthetic oligonucleotide
  Antisense strand to SEQ ID NO: 1800907
aaaguugcacacgaagacu

SEQ ID NO: 1800909 - RNA, 19 nt, Artificial Sequence
  Description of Artificial Sequence: Synthetic oligonucleotide
  Sense strand starting at position 343 of SEQ ID NO: 1563174
gugugcaacuuugugacuu

SEQ ID NO: 1800910 - RNA, 19 nt, Artificial Sequence
  Description of Artificial Sequence: Synthetic oligonucleotide
  Antisense strand to SEQ ID NO: 1800909
aagucacaaaguugcacac

SEQ ID NO: 1800911 - RNA, 19 nt, Artificial Sequence
  Description of Artificial Sequence: Synthetic oligonucleotide
  Sense strand starting at position 361 of SEQ ID NO: 1563174
ucacccuagucucugauua

SEQ ID NO: 1800912 - RNA, 19 nt, Artificial Sequence
  Description of Artificial Sequence: Synthetic oligonucleotide
  Antisense strand to SEQ ID NO: 1800911
uaaucagagacuaggguga

SEQ ID NO: 1800913 - RNA, 19 nt, Artificial Sequence
  Description of Artificial Sequence: Synthetic oligonucleotide
  Sense strand starting at position 363 of SEQ ID NO: 1563174
acccuagucucugauuagu

SEQ ID NO: 1800914 - RNA, 19 nt, Artificial Sequence
  Description of Artificial Sequence: Synthetic oligonucleotide
  Antisense strand to SEQ ID NO: 1800913
acuaaucagagacuagggu

SEQ ID NO: 1800915 - RNA, 19 nt, Artificial Sequence
  Description of Artificial Sequence: Synthetic oligonucleotide
  Sense strand starting at position 365 of SEQ ID NO: 1563174
ccuagucucugauuaguug

SEQ ID NO: 1800916 - RNA, 19 nt, Artificial Sequence
  Description of Artificial Sequence: Synthetic oligonucleotide
  Antisense strand to SEQ ID NO: 1800915
caacuaaucagagacuagg

SEQ ID NO: 1800917 - RNA, 19 nt, Artificial Sequence
  Description of Artificial Sequence: Synthetic oligonucleotide
  Sense strand starting at position 753 of SEQ ID NO: 1563174
cgcaaaugaagcugggaau

SEQ ID NO: 1800918 - RNA, 19 nt, Artificial Sequence
  Description of Artificial Sequence: Synthetic oligonucleotide
  Antisense strand to SEQ ID NO: 1800917
auucccagcuucauuugcg

SEQ ID NO: 1800919 - RNA, 19 nt, Artificial Sequence
  Description of Artificial Sequence: Synthetic oligonucleotide
  Sense strand starting at position 999 of SEQ ID NO: 1563174
gugucuuaccgagcguguu

SEQ ID NO: 1800920 - RNA, 19 nt, Artificial Sequence
  Description of Artificial Sequence: Synthetic oligonucleotide
  Antisense strand to SEQ ID NO: 1800919
aacacgcucgguaagacac

SEQ ID NO: 1800921 - RNA, 19 nt, Artificial Sequence
  Description of Artificial Sequence: Synthetic oligonucleotide
  Sense strand starting at position 1068 of SEQ ID NO: 1563174
gcgcgucuuagugggauga

SEQ ID NO: 1800922 - RNA, 19 nt, Artificial Sequence
  Description of Artificial Sequence: Synthetic oligonucleotide
  Antisense strand to SEQ ID NO: 1800921
ucaucccacuaagacgcgc

SEQ ID NO: 1800923 - RNA, 19 nt, Artificial Sequence
  Description of Artificial Sequence: Synthetic oligonucleotide
  Sense strand starting at position 2105 of SEQ ID NO: 1563174
gggcuaaggagcugauuaa

SEQ ID NO: 1800924 - RNA, 19 nt, Artificial Sequence
  Description of Artificial Sequence: Synthetic oligonucleotide
  Antisense strand to SEQ ID NO: 1800923
uuaaucagcuccuuagccc

SEQ ID NO: 1800925 - RNA, 19 nt, Artificial Sequence
  Description of Artificial Sequence: Synthetic oligonucleotide
  Sense strand starting at position 2283 of SEQ ID NO: 1563174
gguaguucacgucuguagu

SEQ ID NO: 1800926 - RNA, 19 nt, Artificial Sequence
  Description of Artificial Sequence: Synthetic oligonucleotide
  Antisense strand to SEQ ID NO: 1800925
acuacagacgugaacuacc

SEQ ID NO: 1800927 - RNA, 19 nt, Artificial Sequence
  Description of Artificial Sequence: Synthetic oligonucleotide
  Sense strand starting at position 2542 of SEQ ID NO: 1563174
uucucaaagcuugguguuu

SEQ ID NO: 1800928 - RNA, 19 nt, Artificial Sequence
  Description of Artificial Sequence: Synthetic oligonucleotide
  Antisense strand to SEQ ID NO: 1800927
aaacaccaagcuuugagaa

SEQ ID NO: 1800929 - RNA, 19 nt, Artificial Sequence
  Description of Artificial Sequence: Synthetic oligonucleotide
  Sense strand starting at position 2544 of SEQ ID NO: 1563174
cucaaagcuugguguuuga

SEQ ID NO: 1800930 - RNA, 19 nt, Artificial Sequence
  Description of Artificial Sequence: Synthetic oligonucleotide
  Antisense strand to SEQ ID NO: 1800929
ucaaacaccaagcuuugag

SEQ ID NO: 1800931 - RNA, 19 nt, Artificial Sequence
  Description of Artificial Sequence: Synthetic oligonucleotide
  Sense strand starting at position 2547 of SEQ ID NO: 1563174
aaagcuugguguuugaaau

SEQ ID NO: 1800932 - RNA, 19 nt, Artificial Sequence
  Description of Artificial Sequence: Synthetic oligonucleotide
  Antisense strand to SEQ ID NO: 1800931
auuucaaacaccaagcuuu

SEQ ID NO: 1800933 - RNA, 19 nt, Artificial Sequence
  Description of Artificial Sequence: Synthetic oligonucleotide
  Sense strand starting at position 2548 of SEQ ID NO: 1563174
aagcuugguguuugaaaug

SEQ ID NO: 1800934 - RNA, 19 nt, Artificial Sequence
  Description of Artificial Sequence: Synthetic oligonucleotide
  Antisense strand to SEQ ID NO: 1800933
cauuucaaacaccaagcuu

SEQ ID NO: 1800935 - RNA, 19 nt, Artificial Sequence
  Description of Artificial Sequence: Synthetic oligonucleotide
  Sense strand starting at position 2553 of SEQ ID NO: 1563174
ugguguuugaaaugucugu

SEQ ID NO: 1800936 - RNA, 19 nt, Artificial Sequence
  Description of Artificial Sequence: Synthetic oligonucleotide
  Antisense strand to SEQ ID NO: 1800935
acagacauuucaaacacca

SEQ ID NO: 1800937 - RNA, 19 nt, Artificial Sequence
  Description of Artificial Sequence: Synthetic oligonucleotide
  Sense strand starting at position 2560 of SEQ ID NO: 1563174
ugaaaugucuguuccggau

SEQ ID NO: 1800938 - RNA, 19 nt, Artificial Sequence
  Description of Artificial Sequence: Synthetic oligonucleotide
  Antisense strand to SEQ ID NO: 1800937
auccggaacagacauuuca

SEQ ID NO: 1800939 - RNA, 19 nt, Artificial Sequence
  Description of Artificial Sequence: Synthetic oligonucleotide
  Sense strand starting at position 2580 of SEQ ID NO: 1563174
cuggacuuguacucuaagu

SEQ ID NO: 1800940 - RNA, 19 nt, Artificial Sequence
  Description of Artificial Sequence: Synthetic oligonucleotide
  Antisense strand to SEQ ID NO: 1800939
acuuagaguacaaguccag

SEQ ID NO: 1800941 - RNA, 19 nt, Artificial Sequence
  Description of Artificial Sequence: Synthetic oligonucleotide
  Sense strand starting at position 2582 of SEQ ID NO: 1563174
ggacuuguacucuaagucu

SEQ ID NO: 1800942 - RNA, 19 nt, Artificial Sequence
  Description of Artificial Sequence: Synthetic oligonucleotide
  Antisense strand to SEQ ID NO: 1800941
agacuuagaguacaagucc

SEQ ID NO: 1800943 - RNA, 19 nt, Artificial Sequence
  Description of Artificial Sequence: Synthetic oligonucleotide
  Sense strand starting at position 2843 of SEQ ID NO: 1563174
ucaucagacugcuguugaa

SEQ ID NO: 1800944 - RNA, 19 nt, Artificial Sequence
  Description of Artificial Sequence: Synthetic oligonucleotide
  Antisense strand to SEQ ID NO: 1800943
uucaacagcagucugauga

SEQ ID NO: 1800945 - RNA, 19 nt, Artificial Sequence
  Description of Artificial Sequence: Synthetic oligonucleotide
  Sense strand starting at position 2846 of SEQ ID NO: 1563174
ucagacugcuguugaaauu

SEQ ID NO: 1800946 - RNA, 19 nt, Artificial Sequence
  Description of Artificial Sequence: Synthetic oligonucleotide
  Antisense strand to SEQ ID NO: 1800945
aauuucaacagcagucuga

SEQ ID NO: 1800947 - RNA, 19 nt, Artificial Sequence
  Description of Artificial Sequence: Synthetic oligonucleotide
  Sense strand starting at position 2847 of SEQ ID NO: 1563174
cagacugcuguugaaauua

SEQ ID NO: 1800948 - RNA, 19 nt, Artificial Sequence
  Description of Artificial Sequence: Synthetic oligonucleotide
  Antisense strand to SEQ ID NO: 1800947
uaauuucaacagcagucug

SEQ ID NO: 1800949 - RNA, 19 nt, Artificial Sequence
  Description of Artificial Sequence: Synthetic oligonucleotide
  Sense strand starting at position 3040 of SEQ ID NO: 1563174
aaagaucaaggcugagagu

SEQ ID NO: 1800950 - RNA, 19 nt, Artificial Sequence
  Description of Artificial Sequence: Synthetic oligonucleotide
  Antisense strand to SEQ ID NO: 1800949
acucucagccuugaucuuu

SEQ ID NO: 1800951 - RNA, 19 nt, Artificial Sequence
  Description of Artificial Sequence: Synthetic oligonucleotide
  Sense strand starting at position 3166 of SEQ ID NO: 1563174
gcaagaucuggucaaagua

SEQ ID NO: 1800952 - RNA, 19 nt, Artificial Sequence
  Description of Artificial Sequence: Synthetic oligonucleotide
  Antisense strand to SEQ ID NO: 1800951
uacuuugaccagaucuugc

SEQ ID NO: 1800953 - RNA, 19 nt, Artificial Sequence
  Description of Artificial Sequence: Synthetic oligonucleotide
  Sense strand starting at position 3201 of SEQ ID NO: 1563174
aggaaaugcuagcuuacaa

SEQ ID NO: 1800954 - RNA, 19 nt, Artificial Sequence
  Description of Artificial Sequence: Synthetic oligonucleotide
  Antisense strand to SEQ ID NO: 1800953
uuguaagcuagcauuuccu

SEQ ID NO: 1800955 - RNA, 19 nt, Artificial Sequence
  Description of Artificial Sequence: Synthetic oligonucleotide
  Sense strand starting at position 3290 of SEQ ID NO: 1563174
uccacuggucagggacaaa

SEQ ID NO: 1800956 - RNA, 19 nt, Artificial Sequence
  Description of Artificial Sequence: Synthetic oligonucleotide
  Antisense strand to SEQ ID NO: 1800955
uuugucccugaccagugga

SEQ ID NO: 1800957 - RNA, 19 nt, Artificial Sequence
  Description of Artificial Sequence: Synthetic oligonucleotide
  Sense strand starting at position 3580 of SEQ ID NO: 1563174
acucuauguugggugugua

SEQ ID NO: 1800958 - RNA, 19 nt, Artificial Sequence
  Description of Artificial Sequence: Synthetic oligonucleotide
  Antisense strand to SEQ ID NO: 1800957
uacacacccaacauagagu

SEQ ID NO: 1800959 - RNA, 19 nt, Artificial Sequence
  Description of Artificial Sequence: Synthetic oligonucleotide
  Sense strand starting at position 3616 of SEQ ID NO: 1563174
gguccuccucaccauuauu

SEQ ID NO: 1800960 - RNA, 19 nt, Artificial Sequence
  Description of Artificial Sequence: Synthetic oligonucleotide
  Antisense strand to SEQ ID NO: 1800959
aauaauggugaggaggacc

SEQ ID NO: 1800961 - RNA, 19 nt, Artificial Sequence
  Description of Artificial Sequence: Synthetic oligonucleotide
  Sense strand starting at position 3722 of SEQ ID NO: 1563174
ggguggaaguuuguguuga

SEQ ID NO: 1800962 - RNA, 19 nt, Artificial Sequence
  Description of Artificial Sequence: Synthetic oligonucleotide
  Antisense strand to SEQ ID NO: 1800961
ucaacacaaacuuccaccc

SEQ ID NO: 1800963 - RNA, 19 nt, Artificial Sequence
  Description of Artificial Sequence: Synthetic oligonucleotide
  Sense strand starting at position 3723 of SEQ ID NO: 1563174
gguggaaguuuguguugaa

SEQ ID NO: 1800964 - RNA, 19 nt, Artificial Sequence
  Description of Artificial Sequence: Synthetic oligonucleotide
  Antisense strand to SEQ ID NO: 1800963
uucaacacaaacuuccacc

SEQ ID NO: 1800965 - RNA, 19 nt, Artificial Sequence
  Description of Artificial Sequence: Synthetic oligonucleotide
  Sense strand starting at position 3724 of SEQ ID NO: 1563174
guggaaguuuguguugaaa

SEQ ID NO: 1800966 - RNA, 19 nt, Artificial Sequence
  Description of Artificial Sequence: Synthetic oligonucleotide
  Antisense strand to SEQ ID NO: 1800965
uuucaacacaaacuuccac

SEQ ID NO: 1800967 - RNA, 19 nt, Artificial Sequence
  Description of Artificial Sequence: Synthetic oligonucleotide
  Sense strand starting at position 3970 of SEQ ID NO: 1563174
cauuuauuacgcuggccau

SEQ ID NO: 1800968 - RNA, 19 nt, Artificial Sequence
  Description of Artificial Sequence: Synthetic oligonucleotide
  Antisense strand to SEQ ID NO: 1800967
auggccagcguaauaaaug

SEQ ID NO: 1800969 - RNA, 19 nt, Artificial Sequence
  Description of Artificial Sequence: Synthetic oligonucleotide
  Sense strand starting at position 3983 of SEQ ID NO: 1563174
ggccaucugucuggagcua

SEQ ID NO: 1800970 - RNA, 19 nt, Artificial Sequence
  Description of Artificial Sequence: Synthetic oligonucleotide
  Antisense strand to SEQ ID NO: 1800969
uagcuccagacagauggcc

SEQ ID NO: 1800971 - RNA, 19 nt, Artificial Sequence
  Description of Artificial Sequence: Synthetic oligonucleotide
  Sense strand starting at position 26 of SEQ ID NO: 1563175
ggugucuguccaggugaaa

SEQ ID NO: 1800972 - RNA, 19 nt, Artificial Sequence
  Description of Artificial Sequence: Synthetic oligonucleotide
  Antisense strand to SEQ ID NO: 1800971
uuucaccuggacagacacc

SEQ ID NO: 1800973 - RNA, 19 nt, Artificial Sequence
  Description of Artificial Sequence: Synthetic oligonucleotide
  Sense strand starting at position 143 of SEQ ID NO: 1563175
gagagaagcgauugguuga

SEQ ID NO: 1800974 - RNA, 19 nt, Artificial Sequence
  Description of Artificial Sequence: Synthetic oligonucleotide
  Antisense strand to SEQ ID NO: 1800973
ucaaccaaucgcuucucuc

SEQ ID NO: 1800975 - RNA, 19 nt, Artificial Sequence
  Description of Artificial Sequence: Synthetic oligonucleotide
  Sense strand starting at position 148 of SEQ ID NO: 1563175
aagcgauugguugagggau

SEQ ID NO: 1800976 - RNA, 19 nt, Artificial Sequence
  Description of Artificial Sequence: Synthetic oligonucleotide
  Antisense strand to SEQ ID NO: 1800975
aucccucaaccaaucgcuu

SEQ ID NO: 1800977 - RNA, 19 nt, Artificial Sequence
  Description of Artificial Sequence: Synthetic oligonucleotide
  Sense strand starting at position 250 of SEQ ID NO: 1563175
gacaaugagcuuugugaaa

SEQ ID NO: 1800978 - RNA, 19 nt, Artificial Sequence
  Description of Artificial Sequence: Synthetic oligonucleotide
  Antisense strand to SEQ ID NO: 1800977
uuucacaaagcucauuguc

SEQ ID NO: 1800979 - RNA, 19 nt, Artificial Sequence
  Description of Artificial Sequence: Synthetic oligonucleotide
  Sense strand starting at position 438 of SEQ ID NO: 1563175
ggcaacuguuccucucuca

SEQ ID NO: 1800980 - RNA, 19 nt, Artificial Sequence
  Description of Artificial Sequence: Synthetic oligonucleotide
  Antisense strand to SEQ ID NO: 1800979
ugagagaggaacaguugcc

SEQ ID NO: 1800981 - RNA, 19 nt, Artificial Sequence
  Description of Artificial Sequence: Synthetic oligonucleotide
  Sense strand starting at position 554 of SEQ ID NO: 1563175
auuauugauggaugucuaa

SEQ ID NO: 1800982 - RNA, 19 nt, Artificial Sequence
  Description of Artificial Sequence: Synthetic oligonucleotide
  Antisense strand to SEQ ID NO: 1800981
uuagacauccaucaauaau

SEQ ID NO: 1800983 - RNA, 19 nt, Artificial Sequence
  Description of Artificial Sequence: Synthetic oligonucleotide
  Sense strand starting at position 633 of SEQ ID NO: 1563175
ucauuugugcuuuguuuag

SEQ ID NO: 1800984 - RNA, 19 nt, Artificial Sequence
  Description of Artificial Sequence: Synthetic oligonucleotide
  Antisense strand to SEQ ID NO: 1800983
cuaaacaaagcacaaauga

SEQ ID NO: 1800985 - RNA, 19 nt, Artificial Sequence
  Description of Artificial Sequence: Synthetic oligonucleotide
  Sense strand starting at position 635 of SEQ ID NO: 1563175
auuugugcuuuguuuagaa

SEQ ID NO: 1800986 - RNA, 19 nt, Artificial Sequence
  Description of Artificial Sequence: Synthetic oligonucleotide
  Antisense strand to SEQ ID NO: 1800985
uucuaaacaaagcacaaau

SEQ ID NO: 1800987 - RNA, 19 nt, Artificial Sequence
  Description of Artificial Sequence: Synthetic oligonucleotide
  Sense strand starting at position 637 of SEQ ID NO: 1563175
uugugcuuuguuuagaaca

SEQ ID NO: 1800988 - RNA, 19 nt, Artificial Sequence
  Description of Artificial Sequence: Synthetic oligonucleotide
  Antisense strand to SEQ ID NO: 1800987
uguucuaaacaaagcacaa

SEQ ID NO: 1800989 - RNA, 19 nt, Artificial Sequence
  Description of Artificial Sequence: Synthetic oligonucleotide
  Sense strand starting at position 900 of SEQ ID NO: 1563175
ugcugccaauggucagaaa

SEQ ID NO: 1800990 - RNA, 19 nt, Artificial Sequence
  Description of Artificial Sequence: Synthetic oligonucleotide
  Antisense strand to SEQ ID NO: 1800989
uuucugaccauuggcagca

SEQ ID NO: 1800991 - RNA, 19 nt, Artificial Sequence
  Description of Artificial Sequence: Synthetic oligonucleotide
  Sense strand starting at position 1018 of SEQ ID NO: 1563175
guuuaucucugggugugga

SEQ ID NO: 1800992 - RNA, 19 nt, Artificial Sequence
  Description of Artificial Sequence: Synthetic oligonucleotide
  Antisense strand to SEQ ID NO: 1800991
uccacacccagagauaaac

SEQ ID NO: 1800993 - RNA, 19 nt, Artificial Sequence
  Description of Artificial Sequence: Synthetic oligonucleotide
  Sense strand starting at position 1138 of SEQ ID NO: 1563175
agagcaauggugcgaccau

SEQ ID NO: 1800994 - RNA, 19 nt, Artificial Sequence
  Description of Artificial Sequence: Synthetic oligonucleotide
  Antisense strand to SEQ ID NO: 1800993
auggucgcaccauugcucu

SEQ ID NO: 1800995 - RNA, 19 nt, Artificial Sequence
  Description of Artificial Sequence: Synthetic oligonucleotide
  Sense strand starting at position 1406 of SEQ ID NO: 1563175
ccgcaauguuauguauuua

SEQ ID NO: 1800996 - RNA, 19 nt, Artificial Sequence
  Description of Artificial Sequence: Synthetic oligonucleotide
  Antisense strand to SEQ ID NO: 1800995
uaaauacauaacauugcgg

SEQ ID NO: 1800997 - RNA, 19 nt, Artificial Sequence
  Description of Artificial Sequence: Synthetic oligonucleotide
  Sense strand starting at position 1483 of SEQ ID NO: 1563175
ugauaacagccuugaauga

SEQ ID NO: 1800998 - RNA, 19 nt, Artificial Sequence
  Description of Artificial Sequence: Synthetic oligonucleotide
  Antisense strand to SEQ ID NO: 1800997
ucauucaaggcuguuauca

SEQ ID NO: 1800999 - RNA, 19 nt, Artificial Sequence
  Description of Artificial Sequence: Synthetic oligonucleotide
  Sense strand starting at position 1490 of SEQ ID NO: 1563175
agccuugaaugaguuuaau

SEQ ID NO: 1801000 - RNA, 19 nt, Artificial Sequence
  Description of Artificial Sequence: Synthetic oligonucleotide
  Antisense strand to SEQ ID NO: 1800999
auuaaacucauucaaggcu

SEQ ID NO: 1801001 - RNA, 19 nt, Artificial Sequence
  Description of Artificial Sequence: Synthetic oligonucleotide
  Sense strand starting at position 1556 of SEQ ID NO: 1563175
aggccucuccugcagauua

SEQ ID NO: 1801002 - RNA, 19 nt, Artificial Sequence
  Description of Artificial Sequence: Synthetic oligonucleotide
  Antisense strand to SEQ ID NO: 1801001
uaaucugcaggagaggccu

SEQ ID NO: 1801003 - RNA, 19 nt, Artificial Sequence
  Description of Artificial Sequence: Synthetic oligonucleotide
  Sense strand starting at position 1558 of SEQ ID NO: 1563175
gccucuccugcagauuaga

SEQ ID NO: 1801004 - RNA, 19 nt, Artificial Sequence
  Description of Artificial Sequence: Synthetic oligonucleotide
  Antisense strand to SEQ ID NO: 1801003
ucuaaucugcaggagaggc

SEQ ID NO: 1801005 - RNA, 19 nt, Artificial Sequence
  Description of Artificial Sequence: Synthetic oligonucleotide
  Sense strand starting at position 1634 of SEQ ID NO: 1563175
acguuucugcuuuaucaaa

SEQ ID NO: 1801006 - RNA, 19 nt, Artificial Sequence
  Description of Artificial Sequence: Synthetic oligonucleotide
  Antisense strand to SEQ ID NO: 1801005
uuugauaaagcagaaacgu

SEQ ID NO: 1801007 - RNA, 19 nt, Artificial Sequence
  Description of Artificial Sequence: Synthetic oligonucleotide
  Sense strand starting at position 1810 of SEQ ID NO: 1563175
gaggaagguucucucccaa

SEQ ID NO: 1801008 - RNA, 19 nt, Artificial Sequence
  Description of Artificial Sequence: Synthetic oligonucleotide
  Antisense strand to SEQ ID NO: 1801007
uugggagagaaccuuccuc

SEQ ID NO: 1801009 - RNA, 19 nt, Artificial Sequence
  Description of Artificial Sequence: Synthetic oligonucleotide
  Sense strand starting at position 1863 of SEQ ID NO: 1563175
aaggcuuugagcugggaau

SEQ ID NO: 1801010 - RNA, 19 nt, Artificial Sequence
  Description of Artificial Sequence: Synthetic oligonucleotide
  Antisense strand to SEQ ID NO: 1801009
auucccagcucaaagccuu

SEQ ID NO: 1801011 - RNA, 19 nt, Artificial Sequence
  Description of Artificial Sequence: Synthetic oligonucleotide
  Sense strand starting at position 1865 of SEQ ID NO: 1563175
ggcuuugagcugggaauga

SEQ ID NO: 1801012 - RNA, 19 nt, Artificial Sequence
  Description of Artificial Sequence: Synthetic oligonucleotide
  Antisense strand to SEQ ID NO: 1801011
ucauucccagcucaaagcc

SEQ ID NO: 1801013 - RNA, 19 nt, Artificial Sequence
  Description of Artificial Sequence: Synthetic oligonucleotide
  Sense strand starting at position 1869 of SEQ ID NO: 1563175
uugagcugggaaugauuaa

SEQ ID NO: 1801014 - RNA, 19 nt, Artificial Sequence
  Description of Artificial Sequence: Synthetic oligonucleotide
  Antisense strand to SEQ ID NO: 1801013
uuaaucauucccagcucaa

SEQ ID NO: 1801015 - RNA, 19 nt, Artificial Sequence
  Description of Artificial Sequence: Synthetic oligonucleotide
  Sense strand starting at position 1879 of SEQ ID NO: 1563175
aaugauuaacuucgaguuu

SEQ ID NO: 1801016 - RNA, 19 nt, Artificial Sequence
  Description of Artificial Sequence: Synthetic oligonucleotide
  Antisense strand to SEQ ID NO: 1801015
aaacucgaaguuaaucauu

SEQ ID NO: 1801017 - RNA, 19 nt, Artificial Sequence
  Description of Artificial Sequence: Synthetic oligonucleotide
  Sense strand starting at position 2140 of SEQ ID NO: 1563175
agaugugagucaccguauu

SEQ ID NO: 1801018 - RNA, 19 nt, Artificial Sequence
  Description of Artificial Sequence: Synthetic oligonucleotide
  Antisense strand to SEQ ID NO: 1801017
aauacggugacucacaucu

SEQ ID NO: 1801019 - RNA, 19 nt, Artificial Sequence
  Description of Artificial Sequence: Synthetic oligonucleotide
  Sense strand starting at position 2150 of SEQ ID NO: 1563175
caccguauucugccagugu

SEQ ID NO: 1801020 - RNA, 19 nt, Artificial Sequence
  Description of Artificial Sequence: Synthetic oligonucleotide
  Antisense strand to SEQ ID NO: 1801019
acacuggcagaauacggug

SEQ ID NO: 1801021 - RNA, 19 nt, Artificial Sequence
  Description of Artificial Sequence: Synthetic oligonucleotide
  Sense strand starting at position 2181 of SEQ ID NO: 1563175
aagugauugccugugcugu

SEQ ID NO: 1801022 - RNA, 19 nt, Artificial Sequence
  Description of Artificial Sequence: Synthetic oligonucleotide
  Antisense strand to SEQ ID NO: 1801021
acagcacaggcaaucacuu

SEQ ID NO: 1801023 - RNA, 19 nt, Artificial Sequence
  Description of Artificial Sequence: Synthetic oligonucleotide
  Sense strand starting at position 2204 of SEQ ID NO: 1563175
cagggugcuggcuauaaua

SEQ ID NO: 1801024 - RNA, 19 nt, Artificial Sequence
  Description of Artificial Sequence: Synthetic oligonucleotide
  Antisense strand to SEQ ID NO: 1801023
uauuauagccagcacccug

SEQ ID NO: 1801025 - RNA, 19 nt, Artificial Sequence
  Description of Artificial Sequence: Synthetic oligonucleotide
  Sense strand starting at position 2206 of SEQ ID NO: 1563175
gggugcuggcuauaauaug

SEQ ID NO: 1801026 - RNA, 19 nt, Artificial Sequence
  Description of Artificial Sequence: Synthetic oligonucleotide
  Antisense strand to SEQ ID NO: 1801025
cauauuauagccagcaccc

SEQ ID NO: 1801027 - RNA, 19 nt, Artificial Sequence
  Description of Artificial Sequence: Synthetic oligonucleotide
  Sense strand starting at position 2663 of SEQ ID NO: 1563175
uugagugguaaaugaagua

SEQ ID NO: 1801028 - RNA, 19 nt, Artificial Sequence
  Description of Artificial Sequence: Synthetic oligonucleotide
  Antisense strand to SEQ ID NO: 1801027
uacuucauuuaccacucaa

SEQ ID NO: 1801029 - RNA, 19 nt, Artificial Sequence
  Description of Artificial Sequence: Synthetic oligonucleotide
  Sense strand starting at position 2834 of SEQ ID NO: 1563175
acccaagagcucgagacua

SEQ ID NO: 1801030 - RNA, 19 nt, Artificial Sequence
  Description of Artificial Sequence: Synthetic oligonucleotide
  Antisense strand to SEQ ID NO: 1801029
uagucucgagcucuugggu

SEQ ID NO: 1801031 - RNA, 19 nt, Artificial Sequence
  Description of Artificial Sequence: Synthetic oligonucleotide
  Sense strand starting at position 3130 of SEQ ID NO: 1563175
ucaagcaaugcuugguuua

SEQ ID NO: 1801032 - RNA, 19 nt, Artificial Sequence
  Description of Artificial Sequence: Synthetic oligonucleotide
  Antisense strand to SEQ ID NO: 1801031
uaaaccaagcauugcuuga

SEQ ID NO: 1801033 - RNA, 19 nt, Artificial Sequence
  Description of Artificial Sequence: Synthetic oligonucleotide
  Sense strand starting at position 3495 of SEQ ID NO: 1563175
gaggcacugcaugaucauu

SEQ ID NO: 1801034 - RNA, 19 nt, Artificial Sequence
  Description of Artificial Sequence: Synthetic oligonucleotide
  Antisense strand to SEQ ID NO: 1801033
aaugaucaugcagugccuc

SEQ ID NO: 1801035 - RNA, 19 nt, Artificial Sequence
  Description of Artificial Sequence: Synthetic oligonucleotide
  Sense strand starting at position 3503 of SEQ ID NO: 1563175
gcaugaucauugcugggaa

SEQ ID NO: 1801036 - RNA, 19 nt, Artificial Sequence
  Description of Artificial Sequence: Synthetic oligonucleotide
  Antisense strand to SEQ ID NO: 1801035
uucccagcaaugaucaugc

SEQ ID NO: 1801037 - RNA, 19 nt, Artificial Sequence
  Description of Artificial Sequence: Synthetic oligonucleotide
  Sense strand starting at position 3505 of SEQ ID NO: 1563175
augaucauugcugggaagu

SEQ ID NO: 1801038 - RNA, 19 nt, Artificial Sequence
  Description of Artificial Sequence: Synthetic oligonucleotide
  Antisense strand to SEQ ID NO: 1801037
acuucccagcaaugaucau

SEQ ID NO: 1801039 - RNA, 19 nt, Artificial Sequence
  Description of Artificial Sequence: Synthetic oligonucleotide
  Sense strand starting at position 3506 of SEQ ID NO: 1563175
ugaucauugcugggaaguu

SEQ ID NO: 1801040 - RNA, 19 nt, Artificial Sequence
  Description of Artificial Sequence: Synthetic oligonucleotide
  Antisense strand to SEQ ID NO: 1801039
aacuucccagcaaugauca

SEQ ID NO: 1801041 - RNA, 19 nt, Artificial Sequence
  Description of Artificial Sequence: Synthetic oligonucleotide
  Sense strand starting at position 3518 of SEQ ID NO: 1563175
ggaaguuacucuguagaau

SEQ ID NO: 1801042 - RNA, 19 nt, Artificial Sequence
  Description of Artificial Sequence: Synthetic oligonucleotide
  Antisense strand to SEQ ID NO: 1801041
auucuacagaguaacuucc

SEQ ID NO: 1801043 - RNA, 19 nt, Artificial Sequence
  Description of Artificial Sequence: Synthetic oligonucleotide
  Sense strand starting at position 3545 of SEQ ID NO: 1563175
acgcaauggucccuauuau

SEQ ID NO: 1801044 - RNA, 19 nt, Artificial Sequence
  Description of Artificial Sequence: Synthetic oligonucleotide
  Antisense strand to SEQ ID NO: 1801043
auaauagggaccauugcgu

SEQ ID NO: 1801045 - RNA, 19 nt, Artificial Sequence
  Description of Artificial Sequence: Synthetic oligonucleotide
  Sense strand starting at position 3546 of SEQ ID NO: 1563175
cgcaauggucccuauuauu

SEQ ID NO: 1801046 - RNA, 19 nt, Artificial Sequence
  Description of Artificial Sequence: Synthetic oligonucleotide
  Antisense strand to SEQ ID NO: 1801045
aauaauagggaccauugcg

SEQ ID NO: 1801047 - RNA, 19 nt, Artificial Sequence
  Description of Artificial Sequence: Synthetic oligonucleotide
  Sense strand starting at position 3640 of SEQ ID NO: 1563175
acaugcugggucugugaga

SEQ ID NO: 1801048 - RNA, 19 nt, Artificial Sequence
  Description of Artificial Sequence: Synthetic oligonucleotide
  Antisense strand to SEQ ID NO: 1801047
ucucacagacccagcaugu

SEQ ID NO: 1801049 - RNA, 19 nt, Artificial Sequence
  Description of Artificial Sequence: Synthetic oligonucleotide
  Sense strand starting at position 3641 of SEQ ID NO: 1563175
caugcugggucugugagaa

SEQ ID NO: 1801050 - RNA, 19 nt, Artificial Sequence
  Description of Artificial Sequence: Synthetic oligonucleotide
  Antisense strand to SEQ ID NO: 1801049
uucucacagacccagcaug

SEQ ID NO: 1801051 - RNA, 19 nt, Artificial Sequence
  Description of Artificial Sequence: Synthetic oligonucleotide
  Sense strand starting at position 262 of SEQ ID NO: 1563176
ucaaguuaagucugagcaa

SEQ ID NO: 1801052 - RNA, 19 nt, Artificial Sequence
  Description of Artificial Sequence: Synthetic oligonucleotide
  Antisense strand to SEQ ID NO: 1801051
uugcucagacuuaacuuga

SEQ ID NO: 1801053 - RNA, 19 nt, Artificial Sequence
  Description of Artificial Sequence: Synthetic oligonucleotide
  Sense strand starting at position 265 of SEQ ID NO: 1563176
aguuaagucugagcaacaa

SEQ ID NO: 1801054 - RNA, 19 nt, Artificial Sequence
  Description of Artificial Sequence: Synthetic oligonucleotide
  Antisense strand to SEQ ID NO: 1801053
uuguugcucagacuuaacu

SEQ ID NO: 1801055 - RNA, 19 nt, Artificial Sequence
  Description of Artificial Sequence: Synthetic oligonucleotide
  Sense strand starting at position 285 of SEQ ID NO: 1563176
gugagagccuaucucuaga

SEQ ID NO: 1801056 - RNA, 19 nt, Artificial Sequence
  Description of Artificial Sequence: Synthetic oligonucleotide
  Antisense strand to SEQ ID NO: 1801055
ucuagagauaggcucucac

SEQ ID NO: 1801057 - RNA, 19 nt, Artificial Sequence
  Description of Artificial Sequence: Synthetic oligonucleotide
  Sense strand starting at position 670 of SEQ ID NO: 1563176
cguauauacauguaacguu

SEQ ID NO: 1801058 - RNA, 19 nt, Artificial Sequence
  Description of Artificial Sequence: Synthetic oligonucleotide
  Antisense strand to SEQ ID NO: 1801057
aacguuacauguauauacg

SEQ ID NO: 1801059 - RNA, 19 nt, Artificial Sequence
  Description of Artificial Sequence: Synthetic oligonucleotide
  Sense strand starting at position 840 of SEQ ID NO: 1563176
gaacaugacugguuguguu

SEQ ID NO: 1801060 - RNA, 19 nt, Artificial Sequence
  Description of Artificial Sequence: Synthetic oligonucleotide
  Antisense strand to SEQ ID NO: 1801059
aacacaaccagucauguuc

SEQ ID NO: 1801061 - RNA, 19 nt, Artificial Sequence
  Description of Artificial Sequence: Synthetic oligonucleotide
  Sense strand starting at position 871 of SEQ ID NO: 1563176
cugguuauauuggugucua

SEQ ID NO: 1801062 - RNA, 19 nt, Artificial Sequence
  Description of Artificial Sequence: Synthetic oligonucleotide
  Antisense strand to SEQ ID NO: 1801061
uagacaccaauauaaccag

SEQ ID NO: 1801063 - RNA, 19 nt, Artificial Sequence
  Description of Artificial Sequence: Synthetic oligonucleotide
  Sense strand starting at position 913 of SEQ ID NO: 1563176
ugaacagucauaugacgua

SEQ ID NO: 1801064 - RNA, 19 nt, Artificial Sequence
  Description of Artificial Sequence: Synthetic oligonucleotide
  Antisense strand to SEQ ID NO: 1801063
uacgucauaugacuguuca

SEQ ID NO: 1801065 - RNA, 19 nt, Artificial Sequence
  Description of Artificial Sequence: Synthetic oligonucleotide
  Sense strand starting at position 918 of SEQ ID NO: 1563176
agucauaugacguacgguu

SEQ ID NO: 1801066 - RNA, 19 nt, Artificial Sequence
  Description of Artificial Sequence: Synthetic oligonucleotide
  Antisense strand to SEQ ID NO: 1801065
aaccguacgucauaugacu

SEQ ID NO: 1801067 - RNA, 19 nt, Artificial Sequence
  Description of Artificial Sequence: Synthetic oligonucleotide
  Sense strand starting at position 939 of SEQ ID NO: 1563176
auaucaagucuguggccua

SEQ ID NO: 1801068 - RNA, 19 nt, Artificial Sequence
  Description of Artificial Sequence: Synthetic oligonucleotide
  Antisense strand to SEQ ID NO: 1801067
uaggccacagacuugauau

SEQ ID NO: 1801069 - RNA, 19 nt, Artificial Sequence
  Description of Artificial Sequence: Synthetic oligonucleotide
  Sense strand starting at position 1029 of SEQ ID NO: 1563176
acuuuaacccuuggaaugu

SEQ ID NO: 1801070 - RNA, 19 nt, Artificial Sequence
  Description of Artificial Sequence: Synthetic oligonucleotide
  Antisense strand to SEQ ID NO: 1801069
acauuccaaggguuaaagu

SEQ ID NO: 1801071 - RNA, 19 nt, Artificial Sequence
  Description of Artificial Sequence: Synthetic oligonucleotide
  Sense strand starting at position 1112 of SEQ ID NO: 1563176
gacacaagguaucuuuaga

SEQ ID NO: 1801072 - RNA, 19 nt, Artificial Sequence
  Description of Artificial Sequence: Synthetic oligonucleotide
  Antisense strand to SEQ ID NO: 1801071
ucuaaagauaccuuguguc

SEQ ID NO: 1801073 - RNA, 19 nt, Artificial Sequence
  Description of Artificial Sequence: Synthetic oligonucleotide
  Sense strand starting at position 1117 of SEQ ID NO: 1563176
aagguaucuuuagaaagag

SEQ ID NO: 1801074 - RNA, 19 nt, Artificial Sequence
  Description of Artificial Sequence: Synthetic oligonucleotide
  Antisense strand to SEQ ID NO: 1801073
cucuuucuaaagauaccuu

SEQ ID NO: 1801075 - RNA, 19 nt, Artificial Sequence
  Description of Artificial Sequence: Synthetic oligonucleotide
  Sense strand starting at position 1256 of SEQ ID NO: 1563176
gcaagauccugucugaauu

SEQ ID NO: 1801076 - RNA, 19 nt, Artificial Sequence
  Description of Artificial Sequence: Synthetic oligonucleotide
  Antisense strand to SEQ ID NO: 1801075
aauucagacaggaucuugc

SEQ ID NO: 1801077 - RNA, 19 nt, Artificial Sequence
  Description of Artificial Sequence: Synthetic oligonucleotide
  Sense strand starting at position 1570 of SEQ ID NO: 1563176
gaaucuaguguggaugcaa

SEQ ID NO: 1801078 - RNA, 19 nt, Artificial Sequence
  Description of Artificial Sequence: Synthetic oligonucleotide
  Antisense strand to SEQ ID NO: 1801077
uugcauccacacuagauuc

SEQ ID NO: 1801079 - RNA, 19 nt, Artificial Sequence
  Description of Artificial Sequence: Synthetic oligonucleotide
  Sense strand starting at position 1726 of SEQ ID NO: 1563176
uugacagggacuuguuuga

SEQ ID NO: 1801080 - RNA, 19 nt, Artificial Sequence
  Description of Artificial Sequence: Synthetic oligonucleotide
  Antisense strand to SEQ ID NO: 1801079
ucaaacaagucccugucaa

SEQ ID NO: 1801081 - RNA, 19 nt, Artificial Sequence
  Description of Artificial Sequence: Synthetic oligonucleotide
  Sense strand starting at position 1828 of SEQ ID NO: 1563176
aggccaguuaccugacaug

SEQ ID NO: 1801082 - RNA, 19 nt, Artificial Sequence
  Description of Artificial Sequence: Synthetic oligonucleotide
  Antisense strand to SEQ ID NO: 1801081
caugucagguaacuggccu

SEQ ID NO: 1801083 - RNA, 19 nt, Artificial Sequence
  Description of Artificial Sequence: Synthetic oligonucleotide
  Sense strand starting at position 1884 of SEQ ID NO: 1563176
gaggcugcuccuuggaaga

SEQ ID NO: 1801084 - RNA, 19 nt, Artificial Sequence
  Description of Artificial Sequence: Synthetic oligonucleotide
  Antisense strand to SEQ ID NO: 1801083
ucuuccaaggagcagccuc

SEQ ID NO: 1801085 - RNA, 19 nt, Artificial Sequence
  Description of Artificial Sequence: Synthetic oligonucleotide
  Sense strand starting at position 1898 of SEQ ID NO: 1563176
gaagaaacgucuucuuccu

SEQ ID NO: 1801086 - RNA, 19 nt, Artificial Sequence
  Description of Artificial Sequence: Synthetic oligonucleotide
  Antisense strand to SEQ ID NO: 1801085
aggaagaagacguuucuuc

SEQ ID NO: 1801087 - RNA, 19 nt, Artificial Sequence
  Description of Artificial Sequence: Synthetic oligonucleotide
  Sense strand starting at position 2023 of SEQ ID NO: 1563176
caaguuagguugucccaga

SEQ ID NO: 1801088 - RNA, 19 nt, Artificial Sequence
  Description of Artificial Sequence: Synthetic oligonucleotide
  Antisense strand to SEQ ID NO: 1801087
ucugggacaaccuaacuug

SEQ ID NO: 1801089 - RNA, 19 nt, Artificial Sequence
  Description of Artificial Sequence: Synthetic oligonucleotide
  Sense strand starting at position 2024 of SEQ ID NO: 1563176
aaguuagguugucccagaa

SEQ ID NO: 1801090 - RNA, 19 nt, Artificial Sequence
  Description of Artificial Sequence: Synthetic oligonucleotide
  Antisense strand to SEQ ID NO: 1801089
uucugggacaaccuaacuu

SEQ ID NO: 1801091 - RNA, 19 nt, Artificial Sequence
  Description of Artificial Sequence: Synthetic oligonucleotide
  Sense strand starting at position 2263 of SEQ ID NO: 1563176
cuugaaucaucacuccgua

SEQ ID NO: 1801092 - RNA, 19 nt, Artificial Sequence
  Description of Artificial Sequence: Synthetic oligonucleotide
  Antisense strand to SEQ ID NO: 1801091
uacggagugaugauucaag

SEQ ID NO: 1801093 - RNA, 19 nt, Artificial Sequence
  Description of Artificial Sequence: Synthetic oligonucleotide
  Sense strand starting at position 2368 of SEQ ID NO: 1563176
caacuaugacuguguguac

SEQ ID NO: 1801094 - RNA, 19 nt, Artificial Sequence
  Description of Artificial Sequence: Synthetic oligonucleotide
  Antisense strand to SEQ ID NO: 1801093
guacacacagucauaguug

SEQ ID NO: 1801095 - RNA, 19 nt, Artificial Sequence
  Description of Artificial Sequence: Synthetic oligonucleotide
  Sense strand starting at position 2369 of SEQ ID NO: 1563176
aacuaugacuguguguaca

SEQ ID NO: 1801096 - RNA, 19 nt, Artificial Sequence
  Description of Artificial Sequence: Synthetic oligonucleotide
  Antisense strand to SEQ ID NO: 1801095
uguacacacagucauaguu

SEQ ID NO: 1801097 - RNA, 19 nt, Artificial Sequence
  Description of Artificial Sequence: Synthetic oligonucleotide
  Sense strand starting at position 2425 of SEQ ID NO: 1563176
cuaugugacucugucacua

SEQ ID NO: 1801098 - RNA, 19 nt, Artificial Sequence
  Description of Artificial Sequence: Synthetic oligonucleotide
  Antisense strand to SEQ ID NO: 1801097
uagugacagagucacauag

SEQ ID NO: 1801099 - RNA, 19 nt, Artificial Sequence
  Description of Artificial Sequence: Synthetic oligonucleotide
  Sense strand starting at position 2538 of SEQ ID NO: 1563176
aggcaacguuagguguaaa

SEQ ID NO: 1801100 - RNA, 19 nt, Artificial Sequence
  Description of Artificial Sequence: Synthetic oligonucleotide
  Antisense strand to SEQ ID NO: 1801099
uuuacaccuaacguugccu

SEQ ID NO: 1801101 - RNA, 19 nt, Artificial Sequence
  Description of Artificial Sequence: Synthetic oligonucleotide
  Sense strand starting at position 2593 of SEQ ID NO: 1563176
aagagcugucugcacacuu

SEQ ID NO: 1801102 - RNA, 19 nt, Artificial Sequence
  Description of Artificial Sequence: Synthetic oligonucleotide
  Antisense strand to SEQ ID NO: 1801101
aagugugcagacagcucuu

SEQ ID NO: 1801103 - RNA, 19 nt, Artificial Sequence
  Description of Artificial Sequence: Synthetic oligonucleotide
  Sense strand starting at position 2655 of SEQ ID NO: 1563176
gucucuauagccugaacau

SEQ ID NO: 1801104 - RNA, 19 nt, Artificial Sequence
  Description of Artificial Sequence: Synthetic oligonucleotide
  Antisense strand to SEQ ID NO: 1801103
auguucaggcuauagagac

SEQ ID NO: 1801105 - RNA, 19 nt, Artificial Sequence
  Description of Artificial Sequence: Synthetic oligonucleotide
  Sense strand starting at position 2830 of SEQ ID NO: 1563176
uauguugcucuugagggaa

SEQ ID NO: 1801106 - RNA, 19 nt, Artificial Sequence
  Description of Artificial Sequence: Synthetic oligonucleotide
  Antisense strand to SEQ ID NO: 1801105
uucccucaagagcaacaua

SEQ ID NO: 1801107 - RNA, 19 nt, Artificial Sequence
  Description of Artificial Sequence: Synthetic oligonucleotide
  Sense strand starting at position 2950 of SEQ ID NO: 1563176
gacuuucuauguucuggga

SEQ ID NO: 1801108 - RNA, 19 nt, Artificial Sequence
  Description of Artificial Sequence: Synthetic oligonucleotide
  Antisense strand to SEQ ID NO: 1801107
ucccagaacauagaaaguc

SEQ ID NO: 1801109 - RNA, 19 nt, Artificial Sequence
  Description of Artificial Sequence: Synthetic oligonucleotide
  Sense strand starting at position 2954 of SEQ ID NO: 1563176
uucuauguucugggaugag

SEQ ID NO: 1801110 - RNA, 19 nt, Artificial Sequence
  Description of Artificial Sequence: Synthetic oligonucleotide
  Antisense strand to SEQ ID NO: 1801109
cucaucccagaacauagaa

SEQ ID NO: 1801111 - RNA, 19 nt, Artificial Sequence
  Description of Artificial Sequence: Synthetic oligonucleotide
  Sense strand starting at position 3010 of SEQ ID NO: 1563176
gaggaugauucuuuauugu

SEQ ID NO: 1801112 - RNA, 19 nt, Artificial Sequence
  Description of Artificial Sequence: Synthetic oligonucleotide
  Antisense strand to SEQ ID NO: 1801111
acaauaaagaaucauccuc

SEQ ID NO: 1801113 - RNA, 19 nt, Artificial Sequence
  Description of Artificial Sequence: Synthetic oligonucleotide
  Sense strand starting at position 3082 of SEQ ID NO: 1563176
ccuagaagcagguagugau

SEQ ID NO: 1801114 - RNA, 19 nt, Artificial Sequence
  Description of Artificial Sequence: Synthetic oligonucleotide
  Antisense strand to SEQ ID NO: 1801113
aucacuaccugcuucuagg

SEQ ID NO: 1801115 - RNA, 19 nt, Artificial Sequence
  Description of Artificial Sequence: Synthetic oligonucleotide
  Sense strand starting at position 3116 of SEQ ID NO: 1563176
aguugugacaaccggaaau

SEQ ID NO: 1801116 - RNA, 19 nt, Artificial Sequence
  Description of Artificial Sequence: Synthetic oligonucleotide
  Antisense strand to SEQ ID NO: 1801115
auuuccgguugucacaacu

SEQ ID NO: 1801117 - RNA, 19 nt, Artificial Sequence
  Description of Artificial Sequence: Synthetic oligonucleotide
  Sense strand starting at position 3128 of SEQ ID NO: 1563176
cggaaauaucuccagccgu

SEQ ID NO: 1801118 - RNA, 19 nt, Artificial Sequence
  Description of Artificial Sequence: Synthetic oligonucleotide
  Antisense strand to SEQ ID NO: 1801117
acggcuggagauauuuccg

SEQ ID NO: 1801119 - RNA, 19 nt, Artificial Sequence
  Description of Artificial Sequence: Synthetic oligonucleotide
  Sense strand starting at position 3168 of SEQ ID NO: 1563176
gcagaaucacuccgguuga

SEQ ID NO: 1801120 - RNA, 19 nt, Artificial Sequence
  Description of Artificial Sequence: Synthetic oligonucleotide
  Antisense strand to SEQ ID NO: 1801119
ucaaccggagugauucugc

SEQ ID NO: 1801121 - RNA, 19 nt, Artificial Sequence
  Description of Artificial Sequence: Synthetic oligonucleotide
  Sense strand starting at position 3321 of SEQ ID NO: 1563176
cugaaacucuuagcacgaa

SEQ ID NO: 1801122 - RNA, 19 nt, Artificial Sequence
  Description of Artificial Sequence: Synthetic oligonucleotide
  Antisense strand to SEQ ID NO: 1801121
uucgugcuaagaguuucag

SEQ ID NO: 1801123 - RNA, 19 nt, Artificial Sequence
  Description of Artificial Sequence: Synthetic oligonucleotide
  Sense strand starting at position 3331 of SEQ ID NO: 1563176
uagcacgaacguuauacaa

SEQ ID NO: 1801124 - RNA, 19 nt, Artificial Sequence
  Description of Artificial Sequence: Synthetic oligonucleotide
  Antisense strand to SEQ ID NO: 1801123
uuguauaacguucgugcua

SEQ ID NO: 1801125 - RNA, 19 nt, Artificial Sequence
  Description of Artificial Sequence: Synthetic oligonucleotide
  Sense strand starting at position 3857 of SEQ ID NO: 1563176
gaacuaaaguggucucauu

SEQ ID NO: 1801126 - RNA, 19 nt, Artificial Sequence
  Description of Artificial Sequence: Synthetic oligonucleotide
  Antisense strand to SEQ ID NO: 1801125
aaugagaccacuuuaguuc

SEQ ID NO: 1801127 - RNA, 19 nt, Artificial Sequence
  Description of Artificial Sequence: Synthetic oligonucleotide
  Sense strand starting at position 3874 of SEQ ID NO: 1563176
uugucaucuugggcaccau

SEQ ID NO: 1801128 - RNA, 19 nt, Artificial Sequence
  Description of Artificial Sequence: Synthetic oligonucleotide
  Antisense strand to SEQ ID NO: 1801127
auggugcccaagaugacaa

SEQ ID NO: 1801129 - RNA, 19 nt, Artificial Sequence
  Description of Artificial Sequence: Synthetic oligonucleotide
  Sense strand starting at position 3875 of SEQ ID NO: 1563176
ugucaucuugggcaccaua

SEQ ID NO: 1801130 - RNA, 19 nt, Artificial Sequence
  Description of Artificial Sequence: Synthetic oligonucleotide
  Antisense strand to SEQ ID NO: 1801129
uauggugcccaagaugaca

SEQ ID NO: 1801131 - RNA, 19 nt, Artificial Sequence
  Description of Artificial Sequence: Synthetic oligonucleotide
  Sense strand starting at position 63 of SEQ ID NO: 1563177
acugauaacuugggauuua

SEQ ID NO: 1801132 - RNA, 19 nt, Artificial Sequence
  Description of Artificial Sequence: Synthetic oligonucleotide
  Antisense strand to SEQ ID NO: 1801131
uaaaucccaaguuaucagu

SEQ ID NO: 1801133 - RNA, 19 nt, Artificial Sequence
  Description of Artificial Sequence: Synthetic oligonucleotide
  Sense strand starting at position 64 of SEQ ID NO: 1563177
cugauaacuugggauuuag

SEQ ID NO: 1801134 - RNA, 19 nt, Artificial Sequence
  Description of Artificial Sequence: Synthetic oligonucleotide
  Antisense strand to SEQ ID NO: 1801133
cuaaaucccaaguuaucag

SEQ ID NO: 1801135 - RNA, 19 nt, Artificial Sequence
  Description of Artificial Sequence: Synthetic oligonucleotide
  Sense strand starting at position 159 of SEQ ID NO: 1563177
cuggguugcuggguuuaua

SEQ ID NO: 1801136 - RNA, 19 nt, Artificial Sequence
  Description of Artificial Sequence: Synthetic oligonucleotide
  Antisense strand to SEQ ID NO: 1801135
uauaaacccagcaacccag

SEQ ID NO: 1801137 - RNA, 19 nt, Artificial Sequence
  Description of Artificial Sequence: Synthetic oligonucleotide
  Sense strand starting at position 162 of SEQ ID NO: 1563177
gguugcuggguuuauaguu

SEQ ID NO: 1801138 - RNA, 19 nt, Artificial Sequence
  Description of Artificial Sequence: Synthetic oligonucleotide
  Antisense strand to SEQ ID NO: 1801137
aacuauaaacccagcaacc

SEQ ID NO: 1801139 - RNA, 19 nt, Artificial Sequence
  Description of Artificial Sequence: Synthetic oligonucleotide
  Sense strand starting at position 209 of SEQ ID NO: 1563177
cuuauaauaucugucagag

SEQ ID NO: 1801140 - RNA, 19 nt, Artificial Sequence
  Description of Artificial Sequence: Synthetic oligonucleotide
  Antisense strand to SEQ ID NO: 1801139
cucugacagauauuauaag

SEQ ID NO: 1801141 - RNA, 19 nt, Artificial Sequence
  Description of Artificial Sequence: Synthetic oligonucleotide
  Sense strand starting at position 234 of SEQ ID NO: 1563177
augaaacugcuugaucagu

SEQ ID NO: 1801142 - RNA, 19 nt, Artificial Sequence
  Description of Artificial Sequence: Synthetic oligonucleotide
  Antisense strand to SEQ ID NO: 1801141
acugaucaagcaguuucau

SEQ ID NO: 1801143 - RNA, 19 nt, Artificial Sequence
  Description of Artificial Sequence: Synthetic oligonucleotide
  Sense strand starting at position 236 of SEQ ID NO: 1563177
gaaacugcuugaucaguaa

SEQ ID NO: 1801144 - RNA, 19 nt, Artificial Sequence
  Description of Artificial Sequence: Synthetic oligonucleotide
  Antisense strand to SEQ ID NO: 1801143
uuacugaucaagcaguuuc

SEQ ID NO: 1801145 - RNA, 19 nt, Artificial Sequence
  Description of Artificial Sequence: Synthetic oligonucleotide
  Sense strand starting at position 239 of SEQ ID NO: 1563177
acugcuugaucaguaaaug

SEQ ID NO: 1801146 - RNA, 19 nt, Artificial Sequence
  Description of Artificial Sequence: Synthetic oligonucleotide
  Antisense strand to SEQ ID NO: 1801145
cauuuacugaucaagcagu

SEQ ID NO: 1801147 - RNA, 19 nt, Artificial Sequence
  Description of Artificial Sequence: Synthetic oligonucleotide
  Sense strand starting at position 340 of SEQ ID NO: 1563177
agauuuauguaagucacgu

SEQ ID NO: 1801148 - RNA, 19 nt, Artificial Sequence
  Description of Artificial Sequence: Synthetic oligonucleotide
  Antisense strand to SEQ ID NO: 1801147
acgugacuuacauaaaucu

SEQ ID NO: 1801149 - RNA, 19 nt, Artificial Sequence
  Description of Artificial Sequence: Synthetic oligonucleotide
  Sense strand starting at position 346 of SEQ ID NO: 1563177
auguaagucacgugaacuu

SEQ ID NO: 1801150 - RNA, 19 nt, Artificial Sequence
  Description of Artificial Sequence: Synthetic oligonucleotide
  Antisense strand to SEQ ID NO: 1801149
aaguucacgugacuuacau

SEQ ID NO: 1801151 - RNA, 19 nt, Artificial Sequence
  Description of Artificial Sequence: Synthetic oligonucleotide
  Sense strand starting at position 394 of SEQ ID NO: 1563177
augaguacucuuugacuug

SEQ ID NO: 1801152 - RNA, 19 nt, Artificial Sequence
  Description of Artificial Sequence: Synthetic oligonucleotide
  Antisense strand to SEQ ID NO: 1801151
caagucaaagaguacucau

SEQ ID NO: 1801153 - RNA, 19 nt, Artificial Sequence
  Description of Artificial Sequence: Synthetic oligonucleotide
  Sense strand starting at position 536 of SEQ ID NO: 1563177
ucagaacucuagcaagaga

SEQ ID NO: 1801154 - RNA, 19 nt, Artificial Sequence
  Description of Artificial Sequence: Synthetic oligonucleotide
  Antisense strand to SEQ ID NO: 1801153
ucucuugcuagaguucuga

SEQ ID NO: 1801155 - RNA, 19 nt, Artificial Sequence
  Description of Artificial Sequence: Synthetic oligonucleotide
  Sense strand starting at position 748 of SEQ ID NO: 1563177
gagagccugucuccacuaa

SEQ ID NO: 1801156 - RNA, 19 nt, Artificial Sequence
  Description of Artificial Sequence: Synthetic oligonucleotide
  Antisense strand to SEQ ID NO: 1801155
uuaguggagacaggcucuc

SEQ ID NO: 1801157 - RNA, 19 nt, Artificial Sequence
  Description of Artificial Sequence: Synthetic oligonucleotide
  Sense strand starting at position 749 of SEQ ID NO: 1563177
agagccugucuccacuaaa

SEQ ID NO: 1801158 - RNA, 19 nt, Artificial Sequence
  Description of Artificial Sequence: Synthetic oligonucleotide
  Antisense strand to SEQ ID NO: 1801157
uuuaguggagacaggcucu

SEQ ID NO: 1801159 - RNA, 19 nt, Artificial Sequence
  Description of Artificial Sequence: Synthetic oligonucleotide
  Sense strand starting at position 1040 of SEQ ID NO: 1563177
ugaccuuugggcuggaauu

SEQ ID NO: 1801160 - RNA, 19 nt, Artificial Sequence
  Description of Artificial Sequence: Synthetic oligonucleotide
  Antisense strand to SEQ ID NO: 1801159
aauuccagcccaaagguca

SEQ ID NO: 1801161 - RNA, 19 nt, Artificial Sequence
  Description of Artificial Sequence: Synthetic oligonucleotide
  Sense strand starting at position 1069 of SEQ ID NO: 1563177
uaaugugugcagcaguuua

SEQ ID NO: 1801162 - RNA, 19 nt, Artificial Sequence
  Description of Artificial Sequence: Synthetic oligonucleotide
  Antisense strand to SEQ ID NO: 1801161
uaaacugcugcacacauua

SEQ ID NO: 1801163 - RNA, 19 nt, Artificial Sequence
  Description of Artificial Sequence: Synthetic oligonucleotide
  Sense strand starting at position 1073 of SEQ ID NO: 1563177
gugugcagcaguuuaaagu

SEQ ID NO: 1801164 - RNA, 19 nt, Artificial Sequence
  Description of Artificial Sequence: Synthetic oligonucleotide
  Antisense strand to SEQ ID NO: 1801163
acuuuaaacugcugcacac

SEQ ID NO: 1801165 - RNA, 19 nt, Artificial Sequence
  Description of Artificial Sequence: Synthetic oligonucleotide
  Sense strand starting at position 1079 of SEQ ID NO: 1563177
agcaguuuaaagugugaac

SEQ ID NO: 1801166 - RNA, 19 nt, Artificial Sequence
  Description of Artificial Sequence: Synthetic oligonucleotide
  Antisense strand to SEQ ID NO: 1801165
guucacacuuuaaacugcu

SEQ ID NO: 1801167 - RNA, 19 nt, Artificial Sequence
  Description of Artificial Sequence: Synthetic oligonucleotide
  Sense strand starting at position 1081 of SEQ ID NO: 1563177
caguuuaaagugugaacaa

SEQ ID NO: 1801168 - RNA, 19 nt, Artificial Sequence
  Description of Artificial Sequence: Synthetic oligonucleotide
  Antisense strand to SEQ ID NO: 1801167
uuguucacacuuuaaacug

SEQ ID NO: 1801169 - RNA, 19 nt, Artificial Sequence
  Description of Artificial Sequence: Synthetic oligonucleotide
  Sense strand starting at position 1493 of SEQ ID NO: 1563177
uguugugugguucccugua

SEQ ID NO: 1801170 - RNA, 19 nt, Artificial Sequence
  Description of Artificial Sequence: Synthetic oligonucleotide
  Antisense strand to SEQ ID NO: 1801169
uacagggaaccacacaaca

SEQ ID NO: 1801171 - RNA, 19 nt, Artificial Sequence
  Description of Artificial Sequence: Synthetic oligonucleotide
  Sense strand starting at position 2010 of SEQ ID NO: 1563177
cguguagggcaccaauuaa

SEQ ID NO: 1801172 - RNA, 19 nt, Artificial Sequence
  Description of Artificial Sequence: Synthetic oligonucleotide
  Antisense strand to SEQ ID NO: 1801171
uuaauuggugcccuacacg

SEQ ID NO: 1801173 - RNA, 19 nt, Artificial Sequence
  Description of Artificial Sequence: Synthetic oligonucleotide
  Sense strand starting at position 2141 of SEQ ID NO: 1563177
gggugacagcuuggcuuua

SEQ ID NO: 1801174 - RNA, 19 nt, Artificial Sequence
  Description of Artificial Sequence: Synthetic oligonucleotide
  Antisense strand to SEQ ID NO: 1801173
uaaagccaagcugucaccc

SEQ ID NO: 1801175 - RNA, 19 nt, Artificial Sequence
  Description of Artificial Sequence: Synthetic oligonucleotide
  Sense strand starting at position 2142 of SEQ ID NO: 1563177
ggugacagcuuggcuuuau

SEQ ID NO: 1801176 - RNA, 19 nt, Artificial Sequence
  Description of Artificial Sequence: Synthetic oligonucleotide
  Antisense strand to SEQ ID NO: 1801175
auaaagccaagcugucacc

SEQ ID NO: 1801177 - RNA, 19 nt, Artificial Sequence
  Description of Artificial Sequence: Synthetic oligonucleotide
  Sense strand starting at position 2143 of SEQ ID NO: 1563177
gugacagcuuggcuuuaua

SEQ ID NO: 1801178 - RNA, 19 nt, Artificial Sequence
  Description of Artificial Sequence: Synthetic oligonucleotide
  Antisense strand to SEQ ID NO: 1801177
uauaaagccaagcugucac

SEQ ID NO: 1801179 - RNA, 19 nt, Artificial Sequence
  Description of Artificial Sequence: Synthetic oligonucleotide
  Sense strand starting at position 2180 of SEQ ID NO: 1563177
gacaucaaucgacacaugu

SEQ ID NO: 1801180 - RNA, 19 nt, Artificial Sequence
  Description of Artificial Sequence: Synthetic oligonucleotide
  Antisense strand to SEQ ID NO: 1801179
acaugugucgauugauguc

SEQ ID NO: 1801181 - RNA, 19 nt, Artificial Sequence
  Description of Artificial Sequence: Synthetic oligonucleotide
  Sense strand starting at position 2184 of SEQ ID NO: 1563177
ucaaucgacacaugugaga

SEQ ID NO: 1801182 - RNA, 19 nt, Artificial Sequence
  Description of Artificial Sequence: Synthetic oligonucleotide
  Antisense strand to SEQ ID NO: 1801181
ucucacaugugucgauuga

SEQ ID NO: 1801183 - RNA, 19 nt, Artificial Sequence
  Description of Artificial Sequence: Synthetic oligonucleotide
  Sense strand starting at position 2198 of SEQ ID NO: 1563177
ugagauguacauuggcuua

SEQ ID NO: 1801184 - RNA, 19 nt, Artificial Sequence
  Description of Artificial Sequence: Synthetic oligonucleotide
  Antisense strand to SEQ ID NO: 1801183
uaagccaauguacaucuca

SEQ ID NO: 1801185 - RNA, 19 nt, Artificial Sequence
  Description of Artificial Sequence: Synthetic oligonucleotide
  Sense strand starting at position 2210 of SEQ ID NO: 1563177
uggcuuaguccagaaaggu

SEQ ID NO: 1801186 - RNA, 19 nt, Artificial Sequence
  Description of Artificial Sequence: Synthetic oligonucleotide
  Antisense strand to SEQ ID NO: 1801185
accuuucuggacuaagcca

SEQ ID NO: 1801187 - RNA, 19 nt, Artificial Sequence
  Description of Artificial Sequence: Synthetic oligonucleotide
  Sense strand starting at position 2216 of SEQ ID NO: 1563177
aguccagaaaggugggauu

SEQ ID NO: 1801188 - RNA, 19 nt, Artificial Sequence
  Description of Artificial Sequence: Synthetic oligonucleotide
  Antisense strand to SEQ ID NO: 1801187
aaucccaccuuucuggacu

SEQ ID NO: 1801189 - RNA, 19 nt, Artificial Sequence
  Description of Artificial Sequence: Synthetic oligonucleotide
  Sense strand starting at position 2246 of SEQ ID NO: 1563177
gaggaacuuccaggucgua

SEQ ID NO: 1801190 - RNA, 19 nt, Artificial Sequence
  Description of Artificial Sequence: Synthetic oligonucleotide
  Antisense strand to SEQ ID NO: 1801189
uacgaccuggaaguuccuc

SEQ ID NO: 1801191 - RNA, 19 nt, Artificial Sequence
  Description of Artificial Sequence: Synthetic oligonucleotide
  Sense strand starting at position 2308 of SEQ ID NO: 1563177
aaaggaaaugucuggguga

SEQ ID NO: 1801192 - RNA, 19 nt, Artificial Sequence
  Description of Artificial Sequence: Synthetic oligonucleotide
  Antisense strand to SEQ ID NO: 1801191
ucacccagacauuuccuuu

SEQ ID NO: 1801193 - RNA, 19 nt, Artificial Sequence
  Description of Artificial Sequence: Synthetic oligonucleotide
  Sense strand starting at position 2311 of SEQ ID NO: 1563177
ggaaaugucugggugagga

SEQ ID NO: 1801194 - RNA, 19 nt, Artificial Sequence
  Description of Artificial Sequence: Synthetic oligonucleotide
  Antisense strand to SEQ ID NO: 1801193
uccucacccagacauuucc

SEQ ID NO: 1801195 - RNA, 19 nt, Artificial Sequence
  Description of Artificial Sequence: Synthetic oligonucleotide
  Sense strand starting at position 2445 of SEQ ID NO: 1563177
ugcuuaaccuuuccuggau

SEQ ID NO: 1801196 - RNA, 19 nt, Artificial Sequence
  Description of Artificial Sequence: Synthetic oligonucleotide
  Antisense strand to SEQ ID NO: 1801195
auccaggaaagguuaagca

SEQ ID NO: 1801197 - RNA, 19 nt, Artificial Sequence
  Description of Artificial Sequence: Synthetic oligonucleotide
  Sense strand starting at position 3172 of SEQ ID NO: 1563177
uguuuauuaugaucauggu

SEQ ID NO: 1801198 - RNA, 19 nt, Artificial Sequence
  Description of Artificial Sequence: Synthetic oligonucleotide
  Antisense strand to SEQ ID NO: 1801197
accaugaucauaauaaaca

SEQ ID NO: 1801199 - RNA, 19 nt, Artificial Sequence
  Description of Artificial Sequence: Synthetic oligonucleotide
  Sense strand starting at position 3173 of SEQ ID NO: 1563177
guuuauuaugaucaugguu

SEQ ID NO: 1801200 - RNA, 19 nt, Artificial Sequence
  Description of Artificial Sequence: Synthetic oligonucleotide
  Antisense strand to SEQ ID NO: 1801199
aaccaugaucauaauaaac

SEQ ID NO: 1801201 - RNA, 19 nt, Artificial Sequence
  Description of Artificial Sequence: Synthetic oligonucleotide
  Sense strand starting at position 3186 of SEQ ID NO: 1563177
augguuauauuuggauuga

SEQ ID NO: 1801202 - RNA, 19 nt, Artificial Sequence
  Description of Artificial Sequence: Synthetic oligonucleotide
  Antisense strand to SEQ ID NO: 1801201
ucaauccaaauauaaccau

SEQ ID NO: 1801203 - RNA, 19 nt, Artificial Sequence
  Description of Artificial Sequence: Synthetic oligonucleotide
  Sense strand starting at position 3187 of SEQ ID NO: 1563177
ugguuauauuuggauugag

SEQ ID NO: 1801204 - RNA, 19 nt, Artificial Sequence
  Description of Artificial Sequence: Synthetic oligonucleotide
  Antisense strand to SEQ ID NO: 1801203
cucaauccaaauauaacca

SEQ ID NO: 1801205 - RNA, 19 nt, Artificial Sequence
  Description of Artificial Sequence: Synthetic oligonucleotide
  Sense strand starting at position 3259 of SEQ ID NO: 1563177
ugcuucuucgguguaauuc

SEQ ID NO: 1801206 - RNA, 19 nt, Artificial Sequence
  Description of Artificial Sequence: Synthetic oligonucleotide
  Antisense strand to SEQ ID NO: 1801205
gaauuacaccgaagaagca

SEQ ID NO: 1801207 - RNA, 19 nt, Artificial Sequence
  Description of Artificial Sequence: Synthetic oligonucleotide
  Sense strand starting at position 3260 of SEQ ID NO: 1563177
gcuucuucgguguaauucu

SEQ ID NO: 1801208 - RNA, 19 nt, Artificial Sequence
  Description of Artificial Sequence: Synthetic oligonucleotide
  Antisense strand to SEQ ID NO: 1801207
agaauuacaccgaagaagc

SEQ ID NO: 1801209 - RNA, 19 nt, Artificial Sequence
  Description of Artificial Sequence: Synthetic oligonucleotide
  Sense strand starting at position 3875 of SEQ ID NO: 1563177
augagauugcacuauguug

SEQ ID NO: 1801210 - RNA, 19 nt, Artificial Sequence
  Description of Artificial Sequence: Synthetic oligonucleotide
  Antisense strand to SEQ ID NO: 1801209
caacauagugcaaucucau

SEQ ID NO: 1801211 - RNA, 19 nt, Artificial Sequence
  Description of Artificial Sequence: Synthetic oligonucleotide
  Sense strand starting at position 319 of SEQ ID NO: 1563178
uggaguagucucgcucugu

SEQ ID NO: 1801212 - RNA, 19 nt, Artificial Sequence
  Description of Artificial Sequence: Synthetic oligonucleotide
  Antisense strand to SEQ ID NO: 1801211
acagagcgagacuacucca

SEQ ID NO: 1801213 - RNA, 19 nt, Artificial Sequence
  Description of Artificial Sequence: Synthetic oligonucleotide
  Sense strand starting at position 1002 of SEQ ID NO: 1563178
agcuuugaauaagaacaua

SEQ ID NO: 1801214 - RNA, 19 nt, Artificial Sequence
  Description of Artificial Sequence: Synthetic oligonucleotide
  Antisense strand to SEQ ID NO: 1801213
uauguucuuauucaaagcu

SEQ ID NO: 1801215 - RNA, 19 nt, Artificial Sequence
  Description of Artificial Sequence: Synthetic oligonucleotide
  Sense strand starting at position 1071 of SEQ ID NO: 1563178
ccagacauuuagugaauau

SEQ ID NO: 1801216 - RNA, 19 nt, Artificial Sequence
  Description of Artificial Sequence: Synthetic oligonucleotide
  Antisense strand to SEQ ID NO: 1801215
auauucacuaaaugucugg

SEQ ID NO: 1801217 - RNA, 19 nt, Artificial Sequence
  Description of Artificial Sequence: Synthetic oligonucleotide
  Sense strand starting at position 1175 of SEQ ID NO: 1563178
uuaccuagauuaucuguga

SEQ ID NO: 1801218 - RNA, 19 nt, Artificial Sequence
  Description of Artificial Sequence: Synthetic oligonucleotide
  Antisense strand to SEQ ID NO: 1801217
ucacagauaaucuagguaa

SEQ ID NO: 1801219 - RNA, 19 nt, Artificial Sequence
  Description of Artificial Sequence: Synthetic oligonucleotide
  Sense strand starting at position 1300 of SEQ ID NO: 1563178
acugauaacuugggauuua

SEQ ID NO: 1801220 - RNA, 19 nt, Artificial Sequence
  Description of Artificial Sequence: Synthetic oligonucleotide
  Antisense strand to SEQ ID NO: 1801219
uaaaucccaaguuaucagu

SEQ ID NO: 1801221 - RNA, 19 nt, Artificial Sequence
  Description of Artificial Sequence: Synthetic oligonucleotide
  Sense strand starting at position 1301 of SEQ ID NO: 1563178
cugauaacuugggauuuag

SEQ ID NO: 1801222 - RNA, 19 nt, Artificial Sequence
  Description of Artificial Sequence: Synthetic oligonucleotide
  Antisense strand to SEQ ID NO: 1801221
cuaaaucccaaguuaucag

SEQ ID NO: 1801223 - RNA, 19 nt, Artificial Sequence
  Description of Artificial Sequence: Synthetic oligonucleotide
  Sense strand starting at position 1396 of SEQ ID NO: 1563178
cuggguugcuggguuuaua

SEQ ID NO: 1801224 - RNA, 19 nt, Artificial Sequence
  Description of Artificial Sequence: Synthetic oligonucleotide
  Antisense strand to SEQ ID NO: 1801223
uauaaacccagcaacccag

SEQ ID NO: 1801225 - RNA, 19 nt, Artificial Sequence
  Description of Artificial Sequence: Synthetic oligonucleotide
  Sense strand starting at position 1399 of SEQ ID NO: 1563178
gguugcuggguuuauaguu

SEQ ID NO: 1801226 - RNA, 19 nt, Artificial Sequence
  Description of Artificial Sequence: Synthetic oligonucleotide
  Antisense strand to SEQ ID NO: 1801225
aacuauaaacccagcaacc

SEQ ID NO: 1801227 - RNA, 19 nt, Artificial Sequence
  Description of Artificial Sequence: Synthetic oligonucleotide
  Sense strand starting at position 1446 of SEQ ID NO: 1563178
cuuauaauaucugucagag

SEQ ID NO: 1801228 - RNA, 19 nt, Artificial Sequence
  Description of Artificial Sequence: Synthetic oligonucleotide
  Antisense strand to SEQ ID NO: 1801227
cucugacagauauuauaag

SEQ ID NO: 1801229 - RNA, 19 nt, Artificial Sequence
  Description of Artificial Sequence: Synthetic oligonucleotide
  Sense strand starting at position 1471 of SEQ ID NO: 1563178
augaaacugcuugaucagu

SEQ ID NO: 1801230 - RNA, 19 nt, Artificial Sequence
  Description of Artificial Sequence: Synthetic oligonucleotide
  Antisense strand to SEQ ID NO: 1801229
acugaucaagcaguuucau

SEQ ID NO: 1801231 - RNA, 19 nt, Artificial Sequence
  Description of Artificial Sequence: Synthetic oligonucleotide
  Sense strand starting at position 1473 of SEQ ID NO: 1563178
gaaacugcuugaucaguaa

SEQ ID NO: 1801232 - RNA, 19 nt, Artificial Sequence
  Description of Artificial Sequence: Synthetic oligonucleotide
  Antisense strand to SEQ ID NO: 1801231
uuacugaucaagcaguuuc

SEQ ID NO: 1801233 - RNA, 19 nt, Artificial Sequence
  Description of Artificial Sequence: Synthetic oligonucleotide
  Sense strand starting at position 1476 of SEQ ID NO: 1563178
acugcuugaucaguaaaug

SEQ ID NO: 1801234 - RNA, 19 nt, Artificial Sequence
  Description of Artificial Sequence: Synthetic oligonucleotide
  Antisense strand to SEQ ID NO: 1801233
cauuuacugaucaagcagu

SEQ ID NO: 1801235 - RNA, 19 nt, Artificial Sequence
  Description of Artificial Sequence: Synthetic oligonucleotide
  Sense strand starting at position 1577 of SEQ ID NO: 1563178
agauuuauguaagucacgu

SEQ ID NO: 1801236 - RNA, 19 nt, Artificial Sequence
  Description of Artificial Sequence: Synthetic oligonucleotide
  Antisense strand to SEQ ID NO: 1801235
acgugacuuacauaaaucu

SEQ ID NO: 1801237 - RNA, 19 nt, Artificial Sequence
  Description of Artificial Sequence: Synthetic oligonucleotide
  Sense strand starting at position 1583 of SEQ ID NO: 1563178
auguaagucacgugaacuu

SEQ ID NO: 1801238 - RNA, 19 nt, Artificial Sequence
  Description of Artificial Sequence: Synthetic oligonucleotide
  Antisense strand to SEQ ID NO: 1801237
aaguucacgugacuuacau

SEQ ID NO: 1801239 - RNA, 19 nt, Artificial Sequence
  Description of Artificial Sequence: Synthetic oligonucleotide
  Sense strand starting at position 1631 of SEQ ID NO: 1563178
augaguacucuuugacuug

SEQ ID NO: 1801240 - RNA, 19 nt, Artificial Sequence
  Description of Artificial Sequence: Synthetic oligonucleotide
  Antisense strand to SEQ ID NO: 1801239
caagucaaagaguacucau

SEQ ID NO: 1801241 - RNA, 19 nt, Artificial Sequence
  Description of Artificial Sequence: Synthetic oligonucleotide
  Sense strand starting at position 1773 of SEQ ID NO: 1563178
ucagaacucuagcaagaga

SEQ ID NO: 1801242 - RNA, 19 nt, Artificial Sequence
  Description of Artificial Sequence: Synthetic oligonucleotide
  Antisense strand to SEQ ID NO: 1801241
ucucuugcuagaguucuga

SEQ ID NO: 1801243 - RNA, 19 nt, Artificial Sequence
  Description of Artificial Sequence: Synthetic oligonucleotide
  Sense strand starting at position 1985 of SEQ ID NO: 1563178
gagagccugucuccacuaa

SEQ ID NO: 1801244 - RNA, 19 nt, Artificial Sequence
  Description of Artificial Sequence: Synthetic oligonucleotide
  Antisense strand to SEQ ID NO: 1801243
uuaguggagacaggcucuc

SEQ ID NO: 1801245 - RNA, 19 nt, Artificial Sequence
  Description of Artificial Sequence: Synthetic oligonucleotide
  Sense strand starting at position 1986 of SEQ ID NO: 1563178
agagccugucuccacuaaa

SEQ ID NO: 1801246 - RNA, 19 nt, Artificial Sequence
  Description of Artificial Sequence: Synthetic oligonucleotide
  Antisense strand to SEQ ID NO: 1801245
uuuaguggagacaggcucu

SEQ ID NO: 1801247 - RNA, 19 nt, Artificial Sequence
  Description of Artificial Sequence: Synthetic oligonucleotide
  Sense strand starting at position 2277 of SEQ ID NO: 1563178
ugaccuuugggcuggaauu

SEQ ID NO: 1801248 - RNA, 19 nt, Artificial Sequence
  Description of Artificial Sequence: Synthetic oligonucleotide
  Antisense strand to SEQ ID NO: 1801247
aauuccagcccaaagguca

SEQ ID NO: 1801249 - RNA, 19 nt, Artificial Sequence
  Description of Artificial Sequence: Synthetic oligonucleotide
  Sense strand starting at position 2306 of SEQ ID NO: 1563178
uaaugugugcagcaguuua

SEQ ID NO: 1801250 - RNA, 19 nt, Artificial Sequence
  Description of Artificial Sequence: Synthetic oligonucleotide
  Antisense strand to SEQ ID NO: 1801249
uaaacugcugcacacauua

SEQ ID NO: 1801251 - RNA, 19 nt, Artificial Sequence
  Description of Artificial Sequence: Synthetic oligonucleotide
  Sense strand starting at position 2310 of SEQ ID NO: 1563178
gugugcagcaguuuaaagu

SEQ ID NO: 1801252 - RNA, 19 nt, Artificial Sequence
  Description of Artificial Sequence: Synthetic oligonucleotide
  Antisense strand to SEQ ID NO: 1801251
acuuuaaacugcugcacac

SEQ ID NO: 1801253 - RNA, 19 nt, Artificial Sequence
  Description of Artificial Sequence: Synthetic oligonucleotide
  Sense strand starting at position 2316 of SEQ ID NO: 1563178
agcaguuuaaagugugaac

SEQ ID NO: 1801254 - RNA, 19 nt, Artificial Sequence
  Description of Artificial Sequence: Synthetic oligonucleotide
  Antisense strand to SEQ ID NO: 1801253
guucacacuuuaaacugcu

SEQ ID NO: 1801255 - RNA, 19 nt, Artificial Sequence
  Description of Artificial Sequence: Synthetic oligonucleotide
  Sense strand starting at position 2318 of SEQ ID NO: 1563178
caguuuaaagugugaacaa

SEQ ID NO: 1801256 - RNA, 19 nt, Artificial Sequence
  Description of Artificial Sequence: Synthetic oligonucleotide
  Antisense strand to SEQ ID NO: 1801255
uuguucacacuuuaaacug

SEQ ID NO: 1801257 - RNA, 19 nt, Artificial Sequence
  Description of Artificial Sequence: Synthetic oligonucleotide
  Sense strand starting at position 2561 of SEQ ID NO: 1563178
aagugugcuggcugugaga

SEQ ID NO: 1801258 - RNA, 19 nt, Artificial Sequence
  Description of Artificial Sequence: Synthetic oligonucleotide
  Antisense strand to SEQ ID NO: 1801257
ucucacagccagcacacuu

SEQ ID NO: 1801259 - RNA, 19 nt, Artificial Sequence
  Description of Artificial Sequence: Synthetic oligonucleotide
  Sense strand starting at position 2591 of SEQ ID NO: 1563178
gugugucaccacugagucu

SEQ ID NO: 1801260 - RNA, 19 nt, Artificial Sequence
  Description of Artificial Sequence: Synthetic oligonucleotide
  Antisense strand to SEQ ID NO: 1801259
agacucaguggugacacac

SEQ ID NO: 1801261 - RNA, 19 nt, Artificial Sequence
  Description of Artificial Sequence: Synthetic oligonucleotide
  Sense strand starting at position 2730 of SEQ ID NO: 1563178
uguugugugguucccugua

SEQ ID NO: 1801262 - RNA, 19 nt, Artificial Sequence
  Description of Artificial Sequence: Synthetic oligonucleotide
  Antisense strand to SEQ ID NO: 1801261
uacagggaaccacacaaca

SEQ ID NO: 1801263 - RNA, 19 nt, Artificial Sequence
  Description of Artificial Sequence: Synthetic oligonucleotide
  Sense strand starting at position 3247 of SEQ ID NO: 1563178
cguguagggcaccaauuaa

SEQ ID NO: 1801264 - RNA, 19 nt, Artificial Sequence
  Description of Artificial Sequence: Synthetic oligonucleotide
  Antisense strand to SEQ ID NO: 1801263
uuaauuggugcccuacacg

SEQ ID NO: 1801265 - RNA, 19 nt, Artificial Sequence
  Description of Artificial Sequence: Synthetic oligonucleotide
  Sense strand starting at position 3378 of SEQ ID NO: 1563178
gggugacagcuuggcuuua

SEQ ID NO: 1801266 - RNA, 19 nt, Artificial Sequence
  Description of Artificial Sequence: Synthetic oligonucleotide
  Antisense strand to SEQ ID NO: 1801265
uaaagccaagcugucaccc

SEQ ID NO: 1801267 - RNA, 19 nt, Artificial Sequence
  Description of Artificial Sequence: Synthetic oligonucleotide
  Sense strand starting at position 3379 of SEQ ID NO: 1563178
ggugacagcuuggcuuuau

SEQ ID NO: 1801268 - RNA, 19 nt, Artificial Sequence
  Description of Artificial Sequence: Synthetic oligonucleotide
  Antisense strand to SEQ ID NO: 1801267
auaaagccaagcugucacc

SEQ ID NO: 1801269 - RNA, 19 nt, Artificial Sequence
  Description of Artificial Sequence: Synthetic oligonucleotide
  Sense strand starting at position 3380 of SEQ ID NO: 1563178
gugacagcuuggcuuuaua

SEQ ID NO: 1801270 - RNA, 19 nt, Artificial Sequence
  Description of Artificial Sequence: Synthetic oligonucleotide
  Antisense strand to SEQ ID NO: 1801269
uauaaagccaagcugucac

SEQ ID NO: 1801271 - RNA, 19 nt, Artificial Sequence
  Description of Artificial Sequence: Synthetic oligonucleotide
  Sense strand starting at position 3417 of SEQ ID NO: 1563178
gacaucaaucgacacaugu

SEQ ID NO: 1801272 - RNA, 19 nt, Artificial Sequence
  Description of Artificial Sequence: Synthetic oligonucleotide
  Antisense strand to SEQ ID NO: 1801271
acaugugucgauugauguc

SEQ ID NO: 1801273 - RNA, 19 nt, Artificial Sequence
  Description of Artificial Sequence: Synthetic oligonucleotide
  Sense strand starting at position 3421 of SEQ ID NO: 1563178
ucaaucgacacaugugaga

SEQ ID NO: 1801274 - RNA, 19 nt, Artificial Sequence
  Description of Artificial Sequence: Synthetic oligonucleotide
  Antisense strand to SEQ ID NO: 1801273
ucucacaugugucgauuga

SEQ ID NO: 1801275 - RNA, 19 nt, Artificial Sequence
  Description of Artificial Sequence: Synthetic oligonucleotide
  Sense strand starting at position 3435 of SEQ ID NO: 1563178
ugagauguacauuggcuua

SEQ ID NO: 1801276 - RNA, 19 nt, Artificial Sequence
  Description of Artificial Sequence: Synthetic oligonucleotide
  Antisense strand to SEQ ID NO: 1801275
uaagccaauguacaucuca

SEQ ID NO: 1801277 - RNA, 19 nt, Artificial Sequence
  Description of Artificial Sequence: Synthetic oligonucleotide
  Sense strand starting at position 3447 of SEQ ID NO: 1563178
uggcuuaguccagaaaggu

SEQ ID NO: 1801278 - RNA, 19 nt, Artificial Sequence
  Description of Artificial Sequence: Synthetic oligonucleotide
  Antisense strand to SEQ ID NO: 1801277
accuuucuggacuaagcca

SEQ ID NO: 1801279 - RNA, 19 nt, Artificial Sequence
  Description of Artificial Sequence: Synthetic oligonucleotide
  Sense strand starting at position 3453 of SEQ ID NO: 1563178
aguccagaaaggugggauu

SEQ ID NO: 1801280 - RNA, 19 nt, Artificial Sequence
  Description of Artificial Sequence: Synthetic oligonucleotide
  Antisense strand to SEQ ID NO: 1801279
aaucccaccuuucuggacu

SEQ ID NO: 1801281 - RNA, 19 nt, Artificial Sequence
  Description of Artificial Sequence: Synthetic oligonucleotide
  Sense strand starting at position 3483 of SEQ ID NO: 1563178
gaggaacuuccaggucgua

SEQ ID NO: 1801282 - RNA, 19 nt, Artificial Sequence
  Description of Artificial Sequence: Synthetic oligonucleotide
  Antisense strand to SEQ ID NO: 1801281
uacgaccuggaaguuccuc

SEQ ID NO: 1801283 - RNA, 19 nt, Artificial Sequence
  Description of Artificial Sequence: Synthetic oligonucleotide
  Sense strand starting at position 3530 of SEQ ID NO: 1563178
accuguaauuaguagaaag

SEQ ID NO: 1801284 - RNA, 19 nt, Artificial Sequence
  Description of Artificial Sequence: Synthetic oligonucleotide
  Antisense strand to SEQ ID NO: 1801283
cuuucuacuaauuacaggu

SEQ ID NO: 1801285 - RNA, 19 nt, Artificial Sequence
  Description of Artificial Sequence: Synthetic oligonucleotide
  Sense strand starting at position 3545 of SEQ ID NO: 1563178
aaaggaaaugucuggguga

SEQ ID NO: 1801286 - RNA, 19 nt, Artificial Sequence
  Description of Artificial Sequence: Synthetic oligonucleotide
  Antisense strand to SEQ ID NO: 1801285
ucacccagacauuuccuuu

SEQ ID NO: 1801287 - RNA, 19 nt, Artificial Sequence
  Description of Artificial Sequence: Synthetic oligonucleotide
  Sense strand starting at position 3548 of SEQ ID NO: 1563178
ggaaaugucugggugagga

SEQ ID NO: 1801288 - RNA, 19 nt, Artificial Sequence
  Description of Artificial Sequence: Synthetic oligonucleotide
  Antisense strand to SEQ ID NO: 1801287
uccucacccagacauuucc

SEQ ID NO: 1801289 - RNA, 19 nt, Artificial Sequence
  Description of Artificial Sequence: Synthetic oligonucleotide
  Sense strand starting at position 3682 of SEQ ID NO: 1563178
ugcuuaaccuuuccuggau

SEQ ID NO: 1801290 - RNA, 19 nt, Artificial Sequence
  Description of Artificial Sequence: Synthetic oligonucleotide
  Antisense strand to SEQ ID NO: 1801289
auccaggaaagguuaagca

SEQ ID NO: 1801291 - RNA, 19 nt, Artificial Sequence
  Description of Artificial Sequence: Synthetic oligonucleotide
  Sense strand starting at position 11 of SEQ ID NO: 1563179
uaugcaaaguuaguugaau

SEQ ID NO: 1801292 - RNA, 19 nt, Artificial Sequence
  Description of Artificial Sequence: Synthetic oligonucleotide
  Antisense strand to SEQ ID NO: 1801291
auucaacuaacuuugcaua

SEQ ID NO: 1801293 - RNA, 19 nt, Artificial Sequence
  Description of Artificial Sequence: Synthetic oligonucleotide
  Sense strand starting at position 12 of SEQ ID NO: 1563179
augcaaaguuaguugaauu

SEQ ID NO: 1801294 - RNA, 19 nt, Artificial Sequence
  Description of Artificial Sequence: Synthetic oligonucleotide
  Antisense strand to SEQ ID NO: 1801293
aauucaacuaacuuugcau

SEQ ID NO: 1801295 - RNA, 19 nt, Artificial Sequence
  Description of Artificial Sequence: Synthetic oligonucleotide
  Sense strand starting at position 399 of SEQ ID NO: 1563179
ucauauguaucuguuggaa

SEQ ID NO: 1801296 - RNA, 19 nt, Artificial Sequence
  Description of Artificial Sequence: Synthetic oligonucleotide
  Antisense strand to SEQ ID NO: 1801295
uuccaacagauacauauga

SEQ ID NO: 1801297 - RNA, 19 nt, Artificial Sequence
  Description of Artificial Sequence: Synthetic oligonucleotide
  Sense strand starting at position 402 of SEQ ID NO: 1563179
uauguaucuguuggaaauu

SEQ ID NO: 1801298 - RNA, 19 nt, Artificial Sequence
  Description of Artificial Sequence: Synthetic oligonucleotide
  Antisense strand to SEQ ID NO: 1801297
aauuuccaacagauacaua

SEQ ID NO: 1801299 - RNA, 19 nt, Artificial Sequence
  Description of Artificial Sequence: Synthetic oligonucleotide
  Sense strand starting at position 411 of SEQ ID NO: 1563179
guuggaaauuuacaguuua

SEQ ID NO: 1801300 - RNA, 19 nt, Artificial Sequence
  Description of Artificial Sequence: Synthetic oligonucleotide
  Antisense strand to SEQ ID NO: 1801299
uaaacuguaaauuuccaac

SEQ ID NO: 1801301 - RNA, 19 nt, Artificial Sequence
  Description of Artificial Sequence: Synthetic oligonucleotide
  Sense strand starting at position 473 of SEQ ID NO: 1563179
cacacuuacuaagucgaga

SEQ ID NO: 1801302 - RNA, 19 nt, Artificial Sequence
  Description of Artificial Sequence: Synthetic oligonucleotide
  Antisense strand to SEQ ID NO: 1801301
ucucgacuuaguaagugug

SEQ ID NO: 1801303 - RNA, 19 nt, Artificial Sequence
  Description of Artificial Sequence: Synthetic oligonucleotide
  Sense strand starting at position 538 of SEQ ID NO: 1563179
ugacucauaguagguuaca

SEQ ID NO: 1801304 - RNA, 19 nt, Artificial Sequence
  Description of Artificial Sequence: Synthetic oligonucleotide
  Antisense strand to SEQ ID NO: 1801303
uguaaccuacuaugaguca

SEQ ID NO: 1801305 - RNA, 19 nt, Artificial Sequence
  Description of Artificial Sequence: Synthetic oligonucleotide
  Sense strand starting at position 539 of SEQ ID NO: 1563179
gacucauaguagguuacaa

SEQ ID NO: 1801306 - RNA, 19 nt, Artificial Sequence
  Description of Artificial Sequence: Synthetic oligonucleotide
  Antisense strand to SEQ ID NO: 1801305
uuguaaccuacuaugaguc

SEQ ID NO: 1801307 - RNA, 19 nt, Artificial Sequence
  Description of Artificial Sequence: Synthetic oligonucleotide
  Sense strand starting at position 724 of SEQ ID NO: 1563179
uugucuuuggcagaagaca

SEQ ID NO: 1801308 - RNA, 19 nt, Artificial Sequence
  Description of Artificial Sequence: Synthetic oligonucleotide
  Antisense strand to SEQ ID NO: 1801307
ugucuucugccaaagacaa

SEQ ID NO: 1801309 - RNA, 19 nt, Artificial Sequence
  Description of Artificial Sequence: Synthetic oligonucleotide
  Sense strand starting at position 735 of SEQ ID NO: 1563179
agaagacacagacgugauu

SEQ ID NO: 1801310 - RNA, 19 nt, Artificial Sequence
  Description of Artificial Sequence: Synthetic oligonucleotide
  Antisense strand to SEQ ID NO: 1801309
aaucacgucugugucuucu

SEQ ID NO: 1801311 - RNA, 19 nt, Artificial Sequence
  Description of Artificial Sequence: Synthetic oligonucleotide
  Sense strand starting at position 802 of SEQ ID NO: 1563179
auuaguucccagcaugaaa

SEQ ID NO: 1801312 - RNA, 19 nt, Artificial Sequence
  Description of Artificial Sequence: Synthetic oligonucleotide
  Antisense strand to SEQ ID NO: 1801311
uuucaugcugggaacuaau

SEQ ID NO: 1801313 - RNA, 19 nt, Artificial Sequence
  Description of Artificial Sequence: Synthetic oligonucleotide
  Sense strand starting at position 827 of SEQ ID NO: 1563179
cuagacuugugagccauau

SEQ ID NO: 1801314 - RNA, 19 nt, Artificial Sequence
  Description of Artificial Sequence: Synthetic oligonucleotide
  Antisense strand to SEQ ID NO: 1801313
auauggcucacaagucuag

SEQ ID NO: 1801315 - RNA, 19 nt, Artificial Sequence
  Description of Artificial Sequence: Synthetic oligonucleotide
  Sense strand starting at position 1217 of SEQ ID NO: 1563179
gggcucuuggaugaauugu

SEQ ID NO: 1801316 - RNA, 19 nt, Artificial Sequence
  Description of Artificial Sequence: Synthetic oligonucleotide
  Antisense strand to SEQ ID NO: 1801315
acaauucauccaagagccc

SEQ ID NO: 1801317 - RNA, 19 nt, Artificial Sequence
  Description of Artificial Sequence: Synthetic oligonucleotide
  Sense strand starting at position 1223 of SEQ ID NO: 1563179
uuggaugaauugucucagu

SEQ ID NO: 1801318 - RNA, 19 nt, Artificial Sequence
  Description of Artificial Sequence: Synthetic oligonucleotide
  Antisense strand to SEQ ID NO: 1801317
acugagacaauucauccaa

SEQ ID NO: 1801319 - RNA, 19 nt, Artificial Sequence
  Description of Artificial Sequence: Synthetic oligonucleotide
  Sense strand starting at position 1228 of SEQ ID NO: 1563179
ugaauugucucaguggcaa

SEQ ID NO: 1801320 - RNA, 19 nt, Artificial Sequence
  Description of Artificial Sequence: Synthetic oligonucleotide
  Antisense strand to SEQ ID NO: 1801319
uugccacugagacaauuca

SEQ ID NO: 1801321 - RNA, 19 nt, Artificial Sequence
  Description of Artificial Sequence: Synthetic oligonucleotide
  Sense strand starting at position 1270 of SEQ ID NO: 1563179
ccaagagcauugucucaau

SEQ ID NO: 1801322 - RNA, 19 nt, Artificial Sequence
  Description of Artificial Sequence: Synthetic oligonucleotide
  Antisense strand to SEQ ID NO: 1801321
auugagacaaugcucuugg

SEQ ID NO: 1801323 - RNA, 19 nt, Artificial Sequence
  Description of Artificial Sequence: Synthetic oligonucleotide
  Sense strand starting at position 1390 of SEQ ID NO: 1563179
ugcagaaaccacugaauga

SEQ ID NO: 1801324 - RNA, 19 nt, Artificial Sequence
  Description of Artificial Sequence: Synthetic oligonucleotide
  Antisense strand to SEQ ID NO: 1801323
ucauucagugguuucugca

SEQ ID NO: 1801325 - RNA, 19 nt, Artificial Sequence
  Description of Artificial Sequence: Synthetic oligonucleotide
  Sense strand starting at position 1407 of SEQ ID NO: 1563179
gacuaaugguuauauuuag

SEQ ID NO: 1801326 - RNA, 19 nt, Artificial Sequence
  Description of Artificial Sequence: Synthetic oligonucleotide
  Antisense strand to SEQ ID NO: 1801325
cuaaauauaaccauuaguc

SEQ ID NO: 1801327 - RNA, 19 nt, Artificial Sequence
  Description of Artificial Sequence: Synthetic oligonucleotide
  Sense strand starting at position 1413 of SEQ ID NO: 1563179
ugguuauauuuaguuggca

SEQ ID NO: 1801328 - RNA, 19 nt, Artificial Sequence
  Description of Artificial Sequence: Synthetic oligonucleotide
  Antisense strand to SEQ ID NO: 1801327
ugccaacuaaauauaacca

SEQ ID NO: 1801329 - RNA, 19 nt, Artificial Sequence
  Description of Artificial Sequence: Synthetic oligonucleotide
  Sense strand starting at position 1415 of SEQ ID NO: 1563179
guuauauuuaguuggcagu

SEQ ID NO: 1801330 - RNA, 19 nt, Artificial Sequence
  Description of Artificial Sequence: Synthetic oligonucleotide
  Antisense strand to SEQ ID NO: 1801329
acugccaacuaaauauaac

SEQ ID NO: 1801331 - RNA, 19 nt, Artificial Sequence
  Description of Artificial Sequence: Synthetic oligonucleotide
  Sense strand starting at position 1464 of SEQ ID NO: 1563179
agccaaaugcauuacaaug

SEQ ID NO: 1801332 - RNA, 19 nt, Artificial Sequence
  Description of Artificial Sequence: Synthetic oligonucleotide
  Antisense strand to SEQ ID NO: 1801331
cauuguaaugcauuuggcu

SEQ ID NO: 1801333 - RNA, 19 nt, Artificial Sequence
  Description of Artificial Sequence: Synthetic oligonucleotide
  Sense strand starting at position 1495 of SEQ ID NO: 1563179
aucuguagucugcaaguua

SEQ ID NO: 1801334 - RNA, 19 nt, Artificial Sequence
  Description of Artificial Sequence: Synthetic oligonucleotide
  Antisense strand to SEQ ID NO: 1801333
uaacuugcagacuacagau

SEQ ID NO: 1801335 - RNA, 19 nt, Artificial Sequence
  Description of Artificial Sequence: Synthetic oligonucleotide
  Sense strand starting at position 1592 of SEQ ID NO: 1563179
gcauguauacucuggacac

SEQ ID NO: 1801336 - RNA, 19 nt, Artificial Sequence
  Description of Artificial Sequence: Synthetic oligonucleotide
  Antisense strand to SEQ ID NO: 1801335
guguccagaguauacaugc

SEQ ID NO: 1801337 - RNA, 19 nt, Artificial Sequence
  Description of Artificial Sequence: Synthetic oligonucleotide
  Sense strand starting at position 1665 of SEQ ID NO: 1563179
acacguucuugguuaagaa

SEQ ID NO: 1801338 - RNA, 19 nt, Artificial Sequence
  Description of Artificial Sequence: Synthetic oligonucleotide
  Antisense strand to SEQ ID NO: 1801337
uucuuaaccaagaacgugu

SEQ ID NO: 1801339 - RNA, 19 nt, Artificial Sequence
  Description of Artificial Sequence: Synthetic oligonucleotide
  Sense strand starting at position 1666 of SEQ ID NO: 1563179
cacguucuugguuaagaaa

SEQ ID NO: 1801340 - RNA, 19 nt, Artificial Sequence
  Description of Artificial Sequence: Synthetic oligonucleotide
  Antisense strand to SEQ ID NO: 1801339
uuucuuaaccaagaacgug

SEQ ID NO: 1801341 - RNA, 19 nt, Artificial Sequence
  Description of Artificial Sequence: Synthetic oligonucleotide
  Sense strand starting at position 1745 of SEQ ID NO: 1563179
agagaaacuugcucacacu

SEQ ID NO: 1801342 - RNA, 19 nt, Artificial Sequence
  Description of Artificial Sequence: Synthetic oligonucleotide
  Antisense strand to SEQ ID NO: 1801341
agugugagcaaguuucucu

SEQ ID NO: 1801343 - RNA, 19 nt, Artificial Sequence
  Description of Artificial Sequence: Synthetic oligonucleotide
  Sense strand starting at position 1824 of SEQ ID NO: 1563179
acaauaggucaauggaucu

SEQ ID NO: 1801344 - RNA, 19 nt, Artificial Sequence
  Description of Artificial Sequence: Synthetic oligonucleotide
  Antisense strand to SEQ ID NO: 1801343
agauccauugaccuauugu

SEQ ID NO: 1801345 - RNA, 19 nt, Artificial Sequence
  Description of Artificial Sequence: Synthetic oligonucleotide
  Sense strand starting at position 1854 of SEQ ID NO: 1563179
ccguuucuaccagagguua

SEQ ID NO: 1801346 - RNA, 19 nt, Artificial Sequence
  Description of Artificial Sequence: Synthetic oligonucleotide
  Antisense strand to SEQ ID NO: 1801345
uaaccucugguagaaacgg

SEQ ID NO: 1801347 - RNA, 19 nt, Artificial Sequence
  Description of Artificial Sequence: Synthetic oligonucleotide
  Sense strand starting at position 1926 of SEQ ID NO: 1563179
accuaucagccguauuauc

SEQ ID NO: 1801348 - RNA, 19 nt, Artificial Sequence
  Description of Artificial Sequence: Synthetic oligonucleotide
  Antisense strand to SEQ ID NO: 1801347
gauaauacggcugauaggu

SEQ ID NO: 1801349 - RNA, 19 nt, Artificial Sequence
  Description of Artificial Sequence: Synthetic oligonucleotide
  Sense strand starting at position 2008 of SEQ ID NO: 1563179
ugccucgaaucauuacgaa

SEQ ID NO: 1801350 - RNA, 19 nt, Artificial Sequence
  Description of Artificial Sequence: Synthetic oligonucleotide
  Antisense strand to SEQ ID NO: 1801349
uucguaaugauucgaggca

SEQ ID NO: 1801351 - RNA, 19 nt, Artificial Sequence
  Description of Artificial Sequence: Synthetic oligonucleotide
  Sense strand starting at position 2224 of SEQ ID NO: 1563179
gaauguucuuaucugggac

SEQ ID NO: 1801352 - RNA, 19 nt, Artificial Sequence
  Description of Artificial Sequence: Synthetic oligonucleotide
  Antisense strand to SEQ ID NO: 1801351
gucccagauaagaacauuc

SEQ ID NO: 1801353 - RNA, 19 nt, Artificial Sequence
  Description of Artificial Sequence: Synthetic oligonucleotide
  Sense strand starting at position 2268 of SEQ ID NO: 1563179
agaauuaagacuggcuguu

SEQ ID NO: 1801354 - RNA, 19 nt, Artificial Sequence
  Description of Artificial Sequence: Synthetic oligonucleotide
  Antisense strand to SEQ ID NO: 1801353
aacagccagucuuaauucu

SEQ ID NO: 1801355 - RNA, 19 nt, Artificial Sequence
  Description of Artificial Sequence: Synthetic oligonucleotide
  Sense strand starting at position 2357 of SEQ ID NO: 1563179
ggacaucugugcucccaac

SEQ ID NO: 1801356 - RNA, 19 nt, Artificial Sequence
  Description of Artificial Sequence: Synthetic oligonucleotide
  Antisense strand to SEQ ID NO: 1801355
guugggagcacagaugucc

SEQ ID NO: 1801357 - RNA, 19 nt, Artificial Sequence
  Description of Artificial Sequence: Synthetic oligonucleotide
  Sense strand starting at position 2477 of SEQ ID NO: 1563179
gcaggugugcuguucguca

SEQ ID NO: 1801358 - RNA, 19 nt, Artificial Sequence
  Description of Artificial Sequence: Synthetic oligonucleotide
  Antisense strand to SEQ ID NO: 1801357
ugacgaacagcacaccugc

SEQ ID NO: 1801359 - RNA, 19 nt, Artificial Sequence
  Description of Artificial Sequence: Synthetic oligonucleotide
  Sense strand starting at position 2636 of SEQ ID NO: 1563179
uggaacgcuccaugaaaca

SEQ ID NO: 1801360 - RNA, 19 nt, Artificial Sequence
  Description of Artificial Sequence: Synthetic oligonucleotide
  Antisense strand to SEQ ID NO: 1801359
uguuucauggagcguucca

SEQ ID NO: 1801361 - RNA, 19 nt, Artificial Sequence
  Description of Artificial Sequence: Synthetic oligonucleotide
  Sense strand starting at position 2839 of SEQ ID NO: 1563179
cccacuaguccauggauaa

SEQ ID NO: 1801362 - RNA, 19 nt, Artificial Sequence
  Description of Artificial Sequence: Synthetic oligonucleotide
  Antisense strand to SEQ ID NO: 1801361
uuauccauggacuaguggg

SEQ ID NO: 1801363 - RNA, 19 nt, Artificial Sequence
  Description of Artificial Sequence: Synthetic oligonucleotide
  Sense strand starting at position 2840 of SEQ ID NO: 1563179
ccacuaguccauggauaau

SEQ ID NO: 1801364 - RNA, 19 nt, Artificial Sequence
  Description of Artificial Sequence: Synthetic oligonucleotide
  Antisense strand to SEQ ID NO: 1801363
auuauccauggacuagugg

SEQ ID NO: 1801365 - RNA, 19 nt, Artificial Sequence
  Description of Artificial Sequence: Synthetic oligonucleotide
  Sense strand starting at position 3027 of SEQ ID NO: 1563179
agguaaauguaccuggaga

SEQ ID NO: 1801366 - RNA, 19 nt, Artificial Sequence
  Description of Artificial Sequence: Synthetic oligonucleotide
  Antisense strand to SEQ ID NO: 1801365
ucuccagguacauuuaccu

SEQ ID NO: 1801367 - RNA, 19 nt, Artificial Sequence
  Description of Artificial Sequence: Synthetic oligonucleotide
  Sense strand starting at position 3028 of SEQ ID NO: 1563179
gguaaauguaccuggagag

SEQ ID NO: 1801368 - RNA, 19 nt, Artificial Sequence
  Description of Artificial Sequence: Synthetic oligonucleotide
  Antisense strand to SEQ ID NO: 1801367
cucuccagguacauuuacc

SEQ ID NO: 1801369 - RNA, 19 nt, Artificial Sequence
  Description of Artificial Sequence: Synthetic oligonucleotide
  Sense strand starting at position 3088 of SEQ ID NO: 1563179
auguuaagaagaugugaac

SEQ ID NO: 1801370 - RNA, 19 nt, Artificial Sequence
  Description of Artificial Sequence: Synthetic oligonucleotide
  Antisense strand to SEQ ID NO: 1801369
guucacaucuucuuaacau

SEQ ID NO: 1801371 - RNA, 19 nt, Artificial Sequence
  Description of Artificial Sequence: Synthetic oligonucleotide
  Sense strand starting at position 221 of SEQ ID NO: 1563180
acuagacugugaucugcau

SEQ ID NO: 1801372 - RNA, 19 nt, Artificial Sequence
  Description of Artificial Sequence: Synthetic oligonucleotide
  Antisense strand to SEQ ID NO: 1801371
augcagaucacagucuagu

SEQ ID NO: 1801373 - RNA, 19 nt, Artificial Sequence
  Description of Artificial Sequence: Synthetic oligonucleotide
  Sense strand starting at position 225 of SEQ ID NO: 1563180
gacugugaucugcauucca

SEQ ID NO: 1801374 - RNA, 19 nt, Artificial Sequence
  Description of Artificial Sequence: Synthetic oligonucleotide
  Antisense strand to SEQ ID NO: 1801373
uggaaugcagaucacaguc

SEQ ID NO: 1801375 - RNA, 19 nt, Artificial Sequence
  Description of Artificial Sequence: Synthetic oligonucleotide
  Sense strand starting at position 300 of SEQ ID NO: 1563180
gccagauuggucuaucgau

SEQ ID NO: 1801376 - RNA, 19 nt, Artificial Sequence
  Description of Artificial Sequence: Synthetic oligonucleotide
  Antisense strand to SEQ ID NO: 1801375
aucgauagaccaaucuggc

SEQ ID NO: 1801377 - RNA, 19 nt, Artificial Sequence
  Description of Artificial Sequence: Synthetic oligonucleotide
  Sense strand starting at position 306 of SEQ ID NO: 1563180
uuggucuaucgauagagag

SEQ ID NO: 1801378 - RNA, 19 nt, Artificial Sequence
  Description of Artificial Sequence: Synthetic oligonucleotide
  Antisense strand to SEQ ID NO: 1801377
cucucuaucgauagaccaa

SEQ ID NO: 1801379 - RNA, 19 nt, Artificial Sequence
  Description of Artificial Sequence: Synthetic oligonucleotide
  Sense strand starting at position 308 of SEQ ID NO: 1563180
ggucuaucgauagagagua

SEQ ID NO: 1801380 - RNA, 19 nt, Artificial Sequence
  Description of Artificial Sequence: Synthetic oligonucleotide
  Antisense strand to SEQ ID NO: 1801379
uacucucuaucgauagacc

SEQ ID NO: 1801381 - RNA, 19 nt, Artificial Sequence
  Description of Artificial Sequence: Synthetic oligonucleotide
  Sense strand starting at position 342 of SEQ ID NO: 1563180
ccggguaccagagacuuua

SEQ ID NO: 1801382 - RNA, 19 nt, Artificial Sequence
  Description of Artificial Sequence: Synthetic oligonucleotide
  Antisense strand to SEQ ID NO: 1801381
uaaagucucugguacccgg

SEQ ID NO: 1801383 - RNA, 19 nt, Artificial Sequence
  Description of Artificial Sequence: Synthetic oligonucleotide
  Sense strand starting at position 391 of SEQ ID NO: 1563180
uguagacuaauguggugua

SEQ ID NO: 1801384 - RNA, 19 nt, Artificial Sequence
  Description of Artificial Sequence: Synthetic oligonucleotide
  Antisense strand to SEQ ID NO: 1801383
uacaccacauuagucuaca

SEQ ID NO: 1801385 - RNA, 19 nt, Artificial Sequence
  Description of Artificial Sequence: Synthetic oligonucleotide
  Sense strand starting at position 396 of SEQ ID NO: 1563180
acuaaugugguguauguau

SEQ ID NO: 1801386 - RNA, 19 nt, Artificial Sequence
  Description of Artificial Sequence: Synthetic oligonucleotide
  Antisense strand to SEQ ID NO: 1801385
auacauacaccacauuagu

SEQ ID NO: 1801387 - RNA, 19 nt, Artificial Sequence
  Description of Artificial Sequence: Synthetic oligonucleotide
  Sense strand starting at position 404 of SEQ ID NO: 1563180
gguguauguauauaaugaa

SEQ ID NO: 1801388 - RNA, 19 nt, Artificial Sequence
  Description of Artificial Sequence: Synthetic oligonucleotide
  Antisense strand to SEQ ID NO: 1801387
uucauuauauacauacacc

SEQ ID NO: 1801389 - RNA, 19 nt, Artificial Sequence
  Description of Artificial Sequence: Synthetic oligonucleotide
  Sense strand starting at position 444 of SEQ ID NO: 1563180
gaaugaagugcugacgcau

SEQ ID NO: 1801390 - RNA, 19 nt, Artificial Sequence
  Description of Artificial Sequence: Synthetic oligonucleotide
  Antisense strand to SEQ ID NO: 1801389
augcgucagcacuucauuc

SEQ ID NO: 1801391 - RNA, 19 nt, Artificial Sequence
  Description of Artificial Sequence: Synthetic oligonucleotide
  Sense strand starting at position 561 of SEQ ID NO: 1563180
ccaaauuccugugcugaag

SEQ ID NO: 1801392 - RNA, 19 nt, Artificial Sequence
  Description of Artificial Sequence: Synthetic oligonucleotide
  Antisense strand to SEQ ID NO: 1801391
cuucagcacaggaauuugg

SEQ ID NO: 1801393 - RNA, 19 nt, Artificial Sequence
  Description of Artificial Sequence: Synthetic oligonucleotide
  Sense strand starting at position 624 of SEQ ID NO: 1563180
agucuuuauagaggugauu

SEQ ID NO: 1801394 - RNA, 19 nt, Artificial Sequence
  Description of Artificial Sequence: Synthetic oligonucleotide
  Antisense strand to SEQ ID NO: 1801393
aaucaccucuauaaagacu

SEQ ID NO: 1801395 - RNA, 19 nt, Artificial Sequence
  Description of Artificial Sequence: Synthetic oligonucleotide
  Sense strand starting at position 635 of SEQ ID NO: 1563180
aggugauuaagguagcaug

SEQ ID NO: 1801396 - RNA, 19 nt, Artificial Sequence
  Description of Artificial Sequence: Synthetic oligonucleotide
  Antisense strand to SEQ ID NO: 1801395
caugcuaccuuaaucaccu

SEQ ID NO: 1801397 - RNA, 19 nt, Artificial Sequence
  Description of Artificial Sequence: Synthetic oligonucleotide
  Sense strand starting at position 664 of SEQ ID NO: 1563180
aguggacccuuauccaaua

SEQ ID NO: 1801398 - RNA, 19 nt, Artificial Sequence
  Description of Artificial Sequence: Synthetic oligonucleotide
  Antisense strand to SEQ ID NO: 1801397
uauuggauaaggguccacu

SEQ ID NO: 1801399 - RNA, 19 nt, Artificial Sequence
  Description of Artificial Sequence: Synthetic oligonucleotide
  Sense strand starting at position 899 of SEQ ID NO: 1563180
uuuauagcagccugaaaua

SEQ ID NO: 1801400 - RNA, 19 nt, Artificial Sequence
  Description of Artificial Sequence: Synthetic oligonucleotide
  Antisense strand to SEQ ID NO: 1801399
uauuucaggcugcuauaaa

SEQ ID NO: 1801401 - RNA, 19 nt, Artificial Sequence
  Description of Artificial Sequence: Synthetic oligonucleotide
  Sense strand starting at position 1178 of SEQ ID NO: 1563180
augaaauucuaagaagaga

SEQ ID NO: 1801402 - RNA, 19 nt, Artificial Sequence
  Description of Artificial Sequence: Synthetic oligonucleotide
  Antisense strand to SEQ ID NO: 1801401
ucucuucuuagaauuucau

SEQ ID NO: 1801403 - RNA, 19 nt, Artificial Sequence
  Description of Artificial Sequence: Synthetic oligonucleotide
  Sense strand starting at position 1276 of SEQ ID NO: 1563180
gggugacgguuguccaaca

SEQ ID NO: 1801404 - RNA, 19 nt, Artificial Sequence
  Description of Artificial Sequence: Synthetic oligonucleotide
  Antisense strand to SEQ ID NO: 1801403
uguuggacaaccgucaccc

SEQ ID NO: 1801405 - RNA, 19 nt, Artificial Sequence
  Description of Artificial Sequence: Synthetic oligonucleotide
  Sense strand starting at position 1286 of SEQ ID NO: 1563180
uguccaacacugugaaugu

SEQ ID NO: 1801406 - RNA, 19 nt, Artificial Sequence
  Description of Artificial Sequence: Synthetic oligonucleotide
  Antisense strand to SEQ ID NO: 1801405
acauucacaguguuggaca

SEQ ID NO: 1801407 - RNA, 19 nt, Artificial Sequence
  Description of Artificial Sequence: Synthetic oligonucleotide
  Sense strand starting at position 1783 of SEQ ID NO: 1563180
gcuauuccugccgauaaca

SEQ ID NO: 1801408 - RNA, 19 nt, Artificial Sequence
  Description of Artificial Sequence: Synthetic oligonucleotide
  Antisense strand to SEQ ID NO: 1801407
uguuaucggcaggaauagc

SEQ ID NO: 1801409 - RNA, 19 nt, Artificial Sequence
  Description of Artificial Sequence: Synthetic oligonucleotide
  Sense strand starting at position 1791 of SEQ ID NO: 1563180
ugccgauaacaucagacaa

SEQ ID NO: 1801410 - RNA, 19 nt, Artificial Sequence
  Description of Artificial Sequence: Synthetic oligonucleotide
  Antisense strand to SEQ ID NO: 1801409
uugucugauguuaucggca

SEQ ID NO: 1801411 - RNA, 19 nt, Artificial Sequence
  Description of Artificial Sequence: Synthetic oligonucleotide
  Sense strand starting at position 1846 of SEQ ID NO: 1563180
agacgugaacacuguggua

SEQ ID NO: 1801412 - RNA, 19 nt, Artificial Sequence
  Description of Artificial Sequence: Synthetic oligonucleotide
  Antisense strand to SEQ ID NO: 1801411
uaccacaguguucacgucu

SEQ ID NO: 1801413 - RNA, 19 nt, Artificial Sequence
  Description of Artificial Sequence: Synthetic oligonucleotide
  Sense strand starting at position 1848 of SEQ ID NO: 1563180
acgugaacacugugguaag

SEQ ID NO: 1801414 - RNA, 19 nt, Artificial Sequence
  Description of Artificial Sequence: Synthetic oligonucleotide
  Antisense strand to SEQ ID NO: 1801413
cuuaccacaguguucacgu

SEQ ID NO: 1801415 - RNA, 19 nt, Artificial Sequence
  Description of Artificial Sequence: Synthetic oligonucleotide
  Sense strand starting at position 1902 of SEQ ID NO: 1563180
aucuuuaccucacugaguu

SEQ ID NO: 1801416 - RNA, 19 nt, Artificial Sequence
  Description of Artificial Sequence: Synthetic oligonucleotide
  Antisense strand to SEQ ID NO: 1801415
aacucagugagguaaagau

SEQ ID NO: 1801417 - RNA, 19 nt, Artificial Sequence
  Description of Artificial Sequence: Synthetic oligonucleotide
  Sense strand starting at position 1903 of SEQ ID NO: 1563180
ucuuuaccucacugaguua

SEQ ID NO: 1801418 - RNA, 19 nt, Artificial Sequence
  Description of Artificial Sequence: Synthetic oligonucleotide
  Antisense strand to SEQ ID NO: 1801417
uaacucagugagguaaaga

SEQ ID NO: 1801419 - RNA, 19 nt, Artificial Sequence
  Description of Artificial Sequence: Synthetic oligonucleotide
  Sense strand starting at position 1906 of SEQ ID NO: 1563180
uuaccucacugaguuauua

SEQ ID NO: 1801420 - RNA, 19 nt, Artificial Sequence
  Description of Artificial Sequence: Synthetic oligonucleotide
  Antisense strand to SEQ ID NO: 1801419
uaauaacucagugagguaa

SEQ ID NO: 1801421 - RNA, 19 nt, Artificial Sequence
  Description of Artificial Sequence: Synthetic oligonucleotide
  Sense strand starting at position 1996 of SEQ ID NO: 1563180
ugucauaaaugugccauca

SEQ ID NO: 1801422 - RNA, 19 nt, Artificial Sequence
  Description of Artificial Sequence: Synthetic oligonucleotide
  Antisense strand to SEQ ID NO: 1801421
ugauggcacauuuaugaca

SEQ ID NO: 1801423 - RNA, 19 nt, Artificial Sequence
  Description of Artificial Sequence: Synthetic oligonucleotide
  Sense strand starting at position 2156 of SEQ ID NO: 1563180
cagugauauucguuaucag

SEQ ID NO: 1801424 - RNA, 19 nt, Artificial Sequence
  Description of Artificial Sequence: Synthetic oligonucleotide
  Antisense strand to SEQ ID NO: 1801423
cugauaacgaauaucacug

SEQ ID NO: 1801425 - RNA, 19 nt, Artificial Sequence
  Description of Artificial Sequence: Synthetic oligonucleotide
  Sense strand starting at position 2157 of SEQ ID NO: 1563180
agugauauucguuaucagu

SEQ ID NO: 1801426 - RNA, 19 nt, Artificial Sequence
  Description of Artificial Sequence: Synthetic oligonucleotide
  Antisense strand to SEQ ID NO: 1801425
acugauaacgaauaucacu

SEQ ID NO: 1801427 - RNA, 19 nt, Artificial Sequence
  Description of Artificial Sequence: Synthetic oligonucleotide
  Sense strand starting at position 2170 of SEQ ID NO: 1563180
aucaguucucacuguacaa

SEQ ID NO: 1801428 - RNA, 19 nt, Artificial Sequence
  Description of Artificial Sequence: Synthetic oligonucleotide
  Antisense strand to SEQ ID NO: 1801427
uuguacagugagaacugau

SEQ ID NO: 1801429 - RNA, 19 nt, Artificial Sequence
  Description of Artificial Sequence: Synthetic oligonucleotide
  Sense strand starting at position 2290 of SEQ ID NO: 1563180
guccguagccuguuagcaa

SEQ ID NO: 1801430 - RNA, 19 nt, Artificial Sequence
  Description of Artificial Sequence: Synthetic oligonucleotide
  Antisense strand to SEQ ID NO: 1801429
uugcuaacaggcuacggac

SEQ ID NO: 1801431 - RNA, 19 nt, Artificial Sequence
  Description of Artificial Sequence: Synthetic oligonucleotide
  Sense strand starting at position 2328 of SEQ ID NO: 1563180
gugaguggugggcaaauga

SEQ ID NO: 1801432 - RNA, 19 nt, Artificial Sequence
  Description of Artificial Sequence: Synthetic oligonucleotide
  Antisense strand to SEQ ID NO: 1801431
ucauuugcccaccacucac

SEQ ID NO: 1801433 - RNA, 19 nt, Artificial Sequence
  Description of Artificial Sequence: Synthetic oligonucleotide
  Sense strand starting at position 2445 of SEQ ID NO: 1563180
gagcgagaacucuauugug

SEQ ID NO: 1801434 - RNA, 19 nt, Artificial Sequence
  Description of Artificial Sequence: Synthetic oligonucleotide
  Antisense strand to SEQ ID NO: 1801433
cacaauagaguucucgcuc

SEQ ID NO: 1801435 - RNA, 19 nt, Artificial Sequence
  Description of Artificial Sequence: Synthetic oligonucleotide
  Sense strand starting at position 2600 of SEQ ID NO: 1563180
acacuacgaugaguuguau

SEQ ID NO: 1801436 - RNA, 19 nt, Artificial Sequence
  Description of Artificial Sequence: Synthetic oligonucleotide
  Antisense strand to SEQ ID NO: 1801435
auacaacucaucguagugu

SEQ ID NO: 1801437 - RNA, 19 nt, Artificial Sequence
  Description of Artificial Sequence: Synthetic oligonucleotide
  Sense strand starting at position 2772 of SEQ ID NO: 1563180
uggagaccauuguucuaua

SEQ ID NO: 1801438 - RNA, 19 nt, Artificial Sequence
  Description of Artificial Sequence: Synthetic oligonucleotide
  Antisense strand to SEQ ID NO: 1801437
uauagaacaauggucucca

SEQ ID NO: 1801439 - RNA, 19 nt, Artificial Sequence
  Description of Artificial Sequence: Synthetic oligonucleotide
  Sense strand starting at position 2777 of SEQ ID NO: 1563180
accauuguucuauacgaau

SEQ ID NO: 1801440 - RNA, 19 nt, Artificial Sequence
  Description of Artificial Sequence: Synthetic oligonucleotide
  Antisense strand to SEQ ID NO: 1801439
auucguauagaacaauggu

SEQ ID NO: 1801441 - RNA, 19 nt, Artificial Sequence
  Description of Artificial Sequence: Synthetic oligonucleotide
  Sense strand starting at position 2783 of SEQ ID NO: 1563180
guucuauacgaauauggca

SEQ ID NO: 1801442 - RNA, 19 nt, Artificial Sequence
  Description of Artificial Sequence: Synthetic oligonucleotide
  Antisense strand to SEQ ID NO: 1801441
ugccauauucguauagaac

SEQ ID NO: 1801443 - RNA, 19 nt, Artificial Sequence
  Description of Artificial Sequence: Synthetic oligonucleotide
  Sense strand starting at position 2872 of SEQ ID NO: 1563180
agugacaucagaggcuuaa

SEQ ID NO: 1801444 - RNA, 19 nt, Artificial Sequence
  Description of Artificial Sequence: Synthetic oligonucleotide
  Antisense strand to SEQ ID NO: 1801443
uuaagccucugaugucacu

SEQ ID NO: 1801445 - RNA, 19 nt, Artificial Sequence
  Description of Artificial Sequence: Synthetic oligonucleotide
  Sense strand starting at position 3084 of SEQ ID NO: 1563180
agugaugcauuccuauaau

SEQ ID NO: 1801446 - RNA, 19 nt, Artificial Sequence
  Description of Artificial Sequence: Synthetic oligonucleotide
  Antisense strand to SEQ ID NO: 1801445
auuauaggaaugcaucacu

SEQ ID NO: 1801447 - RNA, 19 nt, Artificial Sequence
  Description of Artificial Sequence: Synthetic oligonucleotide
  Sense strand starting at position 3144 of SEQ ID NO: 1563180
cugagaggucaggauugca

SEQ ID NO: 1801448 - RNA, 19 nt, Artificial Sequence
  Description of Artificial Sequence: Synthetic oligonucleotide
  Antisense strand to SEQ ID NO: 1801447
ugcaauccugaccucucag

SEQ ID NO: 1801449 - RNA, 19 nt, Artificial Sequence
  Description of Artificial Sequence: Synthetic oligonucleotide
  Sense strand starting at position 3591 of SEQ ID NO: 1563180
cagggauaauugccugaac

SEQ ID NO: 1801450 - RNA, 19 nt, Artificial Sequence
  Description of Artificial Sequence: Synthetic oligonucleotide
  Antisense strand to SEQ ID NO: 1801449
guucaggcaauuaucccug

SEQ ID NO: 1801451 - RNA, 19 nt, Artificial Sequence
  Description of Artificial Sequence: Synthetic oligonucleotide
  Sense strand starting at position 851 of SEQ ID NO: 1563181
cuuuccuuucccugcgaca

SEQ ID NO: 1801452 - RNA, 19 nt, Artificial Sequence
  Description of Artificial Sequence: Synthetic oligonucleotide
  Antisense strand to SEQ ID NO: 1801451
ugucgcagggaaaggaaag

SEQ ID NO: 1801453 - RNA, 19 nt, Artificial Sequence
  Description of Artificial Sequence: Synthetic oligonucleotide
  Sense strand starting at position 922 of SEQ ID NO: 1563181
ggacauuuguucuggaauu

SEQ ID NO: 1801454 - RNA, 19 nt, Artificial Sequence
  Description of Artificial Sequence: Synthetic oligonucleotide
  Antisense strand to SEQ ID NO: 1801453
aauuccagaacaaaugucc

SEQ ID NO: 1801455 - RNA, 19 nt, Artificial Sequence
  Description of Artificial Sequence: Synthetic oligonucleotide
  Sense strand starting at position 968 of SEQ ID NO: 1563181
uuaaacagcucgucuauuu

SEQ ID NO: 1801456 - RNA, 19 nt, Artificial Sequence
  Description of Artificial Sequence: Synthetic oligonucleotide
  Antisense strand to SEQ ID NO: 1801455
aaauagacgagcuguuuaa

SEQ ID NO: 1801457 - RNA, 19 nt, Artificial Sequence
  Description of Artificial Sequence: Synthetic oligonucleotide
  Sense strand starting at position 1055 of SEQ ID NO: 1563181
uaaggagcauuuggagaau

SEQ ID NO: 1801458 - RNA, 19 nt, Artificial Sequence
  Description of Artificial Sequence: Synthetic oligonucleotide
  Antisense strand to SEQ ID NO: 1801457
auucuccaaaugcuccuua

SEQ ID NO: 1801459 - RNA, 19 nt, Artificial Sequence
  Description of Artificial Sequence: Synthetic oligonucleotide
  Sense strand starting at position 1090 of SEQ ID NO: 1563181
cugcaaagcuuggguuuaa

SEQ ID NO: 1801460 - RNA, 19 nt, Artificial Sequence
  Description of Artificial Sequence: Synthetic oligonucleotide
  Antisense strand to SEQ ID NO: 1801459
uuaaacccaagcuuugcag

SEQ ID NO: 1801461 - RNA, 19 nt, Artificial Sequence
  Description of Artificial Sequence: Synthetic oligonucleotide
  Sense strand starting at position 1091 of SEQ ID NO: 1563181
ugcaaagcuuggguuuaaa

SEQ ID NO: 1801462 - RNA, 19 nt, Artificial Sequence
  Description of Artificial Sequence: Synthetic oligonucleotide
  Antisense strand to SEQ ID NO: 1801461
uuuaaacccaagcuuugca

SEQ ID NO: 1801463 - RNA, 19 nt, Artificial Sequence
  Description of Artificial Sequence: Synthetic oligonucleotide
  Sense strand starting at position 1111 of SEQ ID NO: 1563181
ggucacaaguaaucugcaa

SEQ ID NO: 1801464 - RNA, 19 nt, Artificial Sequence
  Description of Artificial Sequence: Synthetic oligonucleotide
  Antisense strand to SEQ ID NO: 1801463
uugcagauuacuugugacc

SEQ ID NO: 1801465 - RNA, 19 nt, Artificial Sequence
  Description of Artificial Sequence: Synthetic oligonucleotide
  Sense strand starting at position 1160 of SEQ ID NO: 1563181
acagaaaucuuccaaagag

SEQ ID NO: 1801466 - RNA, 19 nt, Artificial Sequence
  Description of Artificial Sequence: Synthetic oligonucleotide
  Antisense strand to SEQ ID NO: 1801465
cucuuuggaagauuucugu

SEQ ID NO: 1801467 - RNA, 19 nt, Artificial Sequence
  Description of Artificial Sequence: Synthetic oligonucleotide
  Sense strand starting at position 1553 of SEQ ID NO: 1563181
gcccaaugcccuuaguaag

SEQ ID NO: 1801468 - RNA, 19 nt, Artificial Sequence
  Description of Artificial Sequence: Synthetic oligonucleotide
  Antisense strand to SEQ ID NO: 1801467
cuuacuaagggcauugggc

SEQ ID NO: 1801469 - RNA, 19 nt, Artificial Sequence
  Description of Artificial Sequence: Synthetic oligonucleotide
  Sense strand starting at position 1693 of SEQ ID NO: 1563181
ggaugcugucgaugcagua

SEQ ID NO: 1801470 - RNA, 19 nt, Artificial Sequence
  Description of Artificial Sequence: Synthetic oligonucleotide
  Antisense strand to SEQ ID NO: 1801469
uacugcaucgacagcaucc

SEQ ID NO: 1801471 - RNA, 19 nt, Artificial Sequence
  Description of Artificial Sequence: Synthetic oligonucleotide
  Sense strand starting at position 1716 of SEQ ID NO: 1563181
gagagcaaaguuggagauu

SEQ ID NO: 1801472 - RNA, 19 nt, Artificial Sequence
  Description of Artificial Sequence: Synthetic oligonucleotide
  Antisense strand to SEQ ID NO: 1801471
aaucuccaacuuugcucuc

SEQ ID NO: 1801473 - RNA, 19 nt, Artificial Sequence
  Description of Artificial Sequence: Synthetic oligonucleotide
  Sense strand starting at position 1717 of SEQ ID NO: 1563181
agagcaaaguuggagauuu

SEQ ID NO: 1801474 - RNA, 19 nt, Artificial Sequence
  Description of Artificial Sequence: Synthetic oligonucleotide
  Antisense strand to SEQ ID NO: 1801473
aaaucuccaacuuugcucu

SEQ ID NO: 1801475 - RNA, 19 nt, Artificial Sequence
  Description of Artificial Sequence: Synthetic oligonucleotide
  Sense strand starting at position 1876 of SEQ ID NO: 1563181
ggguuagauagcggguuau

SEQ ID NO: 1801476 - RNA, 19 nt, Artificial Sequence
  Description of Artificial Sequence: Synthetic oligonucleotide
  Antisense strand to SEQ ID NO: 1801475
auaacccgcuaucuaaccc

SEQ ID NO: 1801477 - RNA, 19 nt, Artificial Sequence
  Description of Artificial Sequence: Synthetic oligonucleotide
  Sense strand starting at position 1886 of SEQ ID NO: 1563181
gcggguuauaacggauauu

SEQ ID NO: 1801478 - RNA, 19 nt, Artificial Sequence
  Description of Artificial Sequence: Synthetic oligonucleotide
  Antisense strand to SEQ ID NO: 1801477
aauauccguuauaacccgc

SEQ ID NO: 1801479 - RNA, 19 nt, Artificial Sequence
  Description of Artificial Sequence: Synthetic oligonucleotide
  Sense strand starting at position 1887 of SEQ ID NO: 1563181
cggguuauaacggauauua

SEQ ID NO: 1801480 - RNA, 19 nt, Artificial Sequence
  Description of Artificial Sequence: Synthetic oligonucleotide
  Antisense strand to SEQ ID NO: 1801479
uaauauccguuauaacccg

SEQ ID NO: 1801481 - RNA, 19 nt, Artificial Sequence
  Description of Artificial Sequence: Synthetic oligonucleotide
  Sense strand starting at position 1889 of SEQ ID NO: 1563181
gguuauaacggauauuauu

SEQ ID NO: 1801482 - RNA, 19 nt, Artificial Sequence
  Description of Artificial Sequence: Synthetic oligonucleotide
  Antisense strand to SEQ ID NO: 1801481
aauaauauccguuauaacc

SEQ ID NO: 1801483 - RNA, 19 nt, Artificial Sequence
  Description of Artificial Sequence: Synthetic oligonucleotide
  Sense strand starting at position 1895 of SEQ ID NO: 1563181
aacggauauuauugcgauc

SEQ ID NO: 1801484 - RNA, 19 nt, Artificial Sequence
  Description of Artificial Sequence: Synthetic oligonucleotide
  Antisense strand to SEQ ID NO: 1801483
gaucgcaauaauauccguu

SEQ ID NO: 1801485 - RNA, 19 nt, Artificial Sequence
  Description of Artificial Sequence: Synthetic oligonucleotide
  Sense strand starting at position 1897 of SEQ ID NO: 1563181
cggauauuauugcgaucuu

SEQ ID NO: 1801486 - RNA, 19 nt, Artificial Sequence
  Description of Artificial Sequence: Synthetic oligonucleotide
  Antisense strand to SEQ ID NO: 1801485
aagaucgcaauaauauccg

SEQ ID NO: 1801487 - RNA, 19 nt, Artificial Sequence
  Description of Artificial Sequence: Synthetic oligonucleotide
  Sense strand starting at position 1898 of SEQ ID NO: 1563181
ggauauuauugcgaucuuu

SEQ ID NO: 1801488 - RNA, 19 nt, Artificial Sequence
  Description of Artificial Sequence: Synthetic oligonucleotide
  Antisense strand to SEQ ID NO: 1801487
aaagaucgcaauaauaucc

SEQ ID NO: 1801489 - RNA, 19 nt, Artificial Sequence
  Description of Artificial Sequence: Synthetic oligonucleotide
  Sense strand starting at position 2268 of SEQ ID NO: 1563181
cccuuuaguguuggccgaa

SEQ ID NO: 1801490 - RNA, 19 nt, Artificial Sequence
  Description of Artificial Sequence: Synthetic oligonucleotide
  Antisense strand to SEQ ID NO: 1801489
uucggccaacacuaaaggg

SEQ ID NO: 1801491 - RNA, 19 nt, Artificial Sequence
  Description of Artificial Sequence: Synthetic oligonucleotide
  Sense strand starting at position 2271 of SEQ ID NO: 1563181
uuuaguguuggccgaaguu

SEQ ID NO: 1801492 - RNA, 19 nt, Artificial Sequence
  Description of Artificial Sequence: Synthetic oligonucleotide
  Antisense strand to SEQ ID NO: 1801491
aacuucggccaacacuaaa

SEQ ID NO: 1801493 - RNA, 19 nt, Artificial Sequence
  Description of Artificial Sequence: Synthetic oligonucleotide
  Sense strand starting at position 2286 of SEQ ID NO: 1563181
aguucuagcuuauugggau

SEQ ID NO: 1801494 - RNA, 19 nt, Artificial Sequence
  Description of Artificial Sequence: Synthetic oligonucleotide
  Antisense strand to SEQ ID NO: 1801493
aucccaauaagcuagaacu

SEQ ID NO: 1801495 - RNA, 19 nt, Artificial Sequence
  Description of Artificial Sequence: Synthetic oligonucleotide
  Sense strand starting at position 2301 of SEQ ID NO: 1563181
ggaugccaggccugugaau

SEQ ID NO: 1801496 - RNA, 19 nt, Artificial Sequence
  Description of Artificial Sequence: Synthetic oligonucleotide
  Antisense strand to SEQ ID NO: 1801495
auucacaggccuggcaucc

SEQ ID NO: 1801497 - RNA, 19 nt, Artificial Sequence
  Description of Artificial Sequence: Synthetic oligonucleotide
  Sense strand starting at position 2566 of SEQ ID NO: 1563181
aaggcauugcgcugucuau

SEQ ID NO: 1801498 - RNA, 19 nt, Artificial Sequence
  Description of Artificial Sequence: Synthetic oligonucleotide
  Antisense strand to SEQ ID NO: 1801497
auagacagcgcaaugccuu

SEQ ID NO: 1801499 - RNA, 19 nt, Artificial Sequence
  Description of Artificial Sequence: Synthetic oligonucleotide
  Sense strand starting at position 2600 of SEQ ID NO: 1563181
gacugugucucucuuguuu

SEQ ID NO: 1801500 - RNA, 19 nt, Artificial Sequence
  Description of Artificial Sequence: Synthetic oligonucleotide
  Antisense strand to SEQ ID NO: 1801499
aaacaagagagacacaguc

SEQ ID NO: 1801501 - RNA, 19 nt, Artificial Sequence
  Description of Artificial Sequence: Synthetic oligonucleotide
  Sense strand starting at position 2706 of SEQ ID NO: 1563181
cggccuucccuagagcauu

SEQ ID NO: 1801502 - RNA, 19 nt, Artificial Sequence
  Description of Artificial Sequence: Synthetic oligonucleotide
  Antisense strand to SEQ ID NO: 1801501
aaugcucuagggaaggccg

SEQ ID NO: 1801503 - RNA, 19 nt, Artificial Sequence
  Description of Artificial Sequence: Synthetic oligonucleotide
  Sense strand starting at position 2827 of SEQ ID NO: 1563181
cccacaaauucguaucugu

SEQ ID NO: 1801504 - RNA, 19 nt, Artificial Sequence
  Description of Artificial Sequence: Synthetic oligonucleotide
  Antisense strand to SEQ ID NO: 1801503
acagauacgaauuuguggg

SEQ ID NO: 1801505 - RNA, 19 nt, Artificial Sequence
  Description of Artificial Sequence: Synthetic oligonucleotide
  Sense strand starting at position 2950 of SEQ ID NO: 1563181
agccaaaucuaagcgucua

SEQ ID NO: 1801506 - RNA, 19 nt, Artificial Sequence
  Description of Artificial Sequence: Synthetic oligonucleotide
  Antisense strand to SEQ ID NO: 1801505
uagacgcuuagauuuggcu

SEQ ID NO: 1801507 - RNA, 19 nt, Artificial Sequence
  Description of Artificial Sequence: Synthetic oligonucleotide
  Sense strand starting at position 2973 of SEQ ID NO: 1563181
ucugaauucucaugaccug

SEQ ID NO: 1801508 - RNA, 19 nt, Artificial Sequence
  Description of Artificial Sequence: Synthetic oligonucleotide
  Antisense strand to SEQ ID NO: 1801507
caggucaugagaauucaga

SEQ ID NO: 1801509 - RNA, 19 nt, Artificial Sequence
  Description of Artificial Sequence: Synthetic oligonucleotide
  Sense strand starting at position 3032 of SEQ ID NO: 1563181
gcgccuuucuucccaaaca

SEQ ID NO: 1801510 - RNA, 19 nt, Artificial Sequence
  Description of Artificial Sequence: Synthetic oligonucleotide
  Antisense strand to SEQ ID NO: 1801509
uguuugggaagaaaggcgc

SEQ ID NO: 1801511 - RNA, 19 nt, Artificial Sequence
  Description of Artificial Sequence: Synthetic oligonucleotide
  Sense strand starting at position 3132 of SEQ ID NO: 1563181
ggugcagguucccagggau

SEQ ID NO: 1801512 - RNA, 19 nt, Artificial Sequence
  Description of Artificial Sequence: Synthetic oligonucleotide
  Antisense strand to SEQ ID NO: 1801511
aucccugggaaccugcacc

SEQ ID NO: 1801513 - RNA, 19 nt, Artificial Sequence
  Description of Artificial Sequence: Synthetic oligonucleotide
  Sense strand starting at position 3368 of SEQ ID NO: 1563181
ugcauaacucuuggaugcu

SEQ ID NO: 1801514 - RNA, 19 nt, Artificial Sequence
  Description of Artificial Sequence: Synthetic oligonucleotide
  Antisense strand to SEQ ID NO: 1801513
agcauccaagaguuaugca

SEQ ID NO: 1801515 - RNA, 19 nt, Artificial Sequence
  Description of Artificial Sequence: Synthetic oligonucleotide
  Sense strand starting at position 3473 of SEQ ID NO: 1563181
gcacauuaauaaugcgaau

SEQ ID NO: 1801516 - RNA, 19 nt, Artificial Sequence
  Description of Artificial Sequence: Synthetic oligonucleotide
  Antisense strand to SEQ ID NO: 1801515
auucgcauuauuaaugugc

SEQ ID NO: 1801517 - RNA, 19 nt, Artificial Sequence
  Description of Artificial Sequence: Synthetic oligonucleotide
  Sense strand starting at position 3485 of SEQ ID NO: 1563181
ugcgaauacuaauacugau

SEQ ID NO: 1801518 - RNA, 19 nt, Artificial Sequence
  Description of Artificial Sequence: Synthetic oligonucleotide
  Antisense strand to SEQ ID NO: 1801517
aucaguauuaguauucgca

SEQ ID NO: 1801519 - RNA, 19 nt, Artificial Sequence
  Description of Artificial Sequence: Synthetic oligonucleotide
  Sense strand starting at position 3575 of SEQ ID NO: 1563181
gcuuaauucucauccguuu

SEQ ID NO: 1801520 - RNA, 19 nt, Artificial Sequence
  Description of Artificial Sequence: Synthetic oligonucleotide
  Antisense strand to SEQ ID NO: 1801519
aaacggaugagaauuaagc

SEQ ID NO: 1801521 - RNA, 19 nt, Artificial Sequence
  Description of Artificial Sequence: Synthetic oligonucleotide
  Sense strand starting at position 3645 of SEQ ID NO: 1563181
ccgagccaucgcugacauu

SEQ ID NO: 1801522 - RNA, 19 nt, Artificial Sequence
  Description of Artificial Sequence: Synthetic oligonucleotide
  Antisense strand to SEQ ID NO: 1801521
aaugucagcgauggcucgg

SEQ ID NO: 1801523 - RNA, 19 nt, Artificial Sequence
  Description of Artificial Sequence: Synthetic oligonucleotide
  Sense strand starting at position 3646 of SEQ ID NO: 1563181
cgagccaucgcugacauuu

SEQ ID NO: 1801524 - RNA, 19 nt, Artificial Sequence
  Description of Artificial Sequence: Synthetic oligonucleotide
  Antisense strand to SEQ ID NO: 1801523
aaaugucagcgauggcucg

SEQ ID NO: 1801525 - RNA, 19 nt, Artificial Sequence
  Description of Artificial Sequence: Synthetic oligonucleotide
  Sense strand starting at position 3704 of SEQ ID NO: 1563181
gggaucucuccuugccuuu

SEQ ID NO: 1801526 - RNA, 19 nt, Artificial Sequence
  Description of Artificial Sequence: Synthetic oligonucleotide
  Antisense strand to SEQ ID NO: 1801525
aaaggcaaggagagauccc

SEQ ID NO: 1801527 - RNA, 19 nt, Artificial Sequence
  Description of Artificial Sequence: Synthetic oligonucleotide
  Sense strand starting at position 3792 of SEQ ID NO: 1563181
uaacauucugcgcgcugau

SEQ ID NO: 1801528 - RNA, 19 nt, Artificial Sequence
  Description of Artificial Sequence: Synthetic oligonucleotide
  Antisense strand to SEQ ID NO: 1801527
aucagcgcgcagaauguua

SEQ ID NO: 1801529 - RNA, 19 nt, Artificial Sequence
  Description of Artificial Sequence: Synthetic oligonucleotide
  Sense strand starting at position 3793 of SEQ ID NO: 1563181
aacauucugcgcgcugauu

SEQ ID NO: 1801530 - RNA, 19 nt, Artificial Sequence
  Description of Artificial Sequence: Synthetic oligonucleotide
  Antisense strand to SEQ ID NO: 1801529
aaucagcgcgcagaauguu

SEQ ID NO: 1801531 - RNA, 19 nt, Artificial Sequence
  Description of Artificial Sequence: Synthetic oligonucleotide
  Sense strand starting at position 32 of SEQ ID NO: 1563182
uuugacauugcugacaaua

SEQ ID NO: 1801532 - RNA, 19 nt, Artificial Sequence
  Description of Artificial Sequence: Synthetic oligonucleotide
  Antisense strand to SEQ ID NO: 1801531
uauugucagcaaugucaaa

SEQ ID NO: 1801533 - RNA, 19 nt, Artificial Sequence
  Description of Artificial Sequence: Synthetic oligonucleotide
  Sense strand starting at position 55 of SEQ ID NO: 1563182
acaggaauagcauaugcua

SEQ ID NO: 1801534 - RNA, 19 nt, Artificial Sequence
  Description of Artificial Sequence: Synthetic oligonucleotide
  Antisense strand to SEQ ID NO: 1801533
uagcauaugcuauuccugu

SEQ ID NO: 1801535 - RNA, 19 nt, Artificial Sequence
  Description of Artificial Sequence: Synthetic oligonucleotide
  Sense strand starting at position 200 of SEQ ID NO: 1563182
ggugauuucugguuugagu

SEQ ID NO: 1801536 - RNA, 19 nt, Artificial Sequence
  Description of Artificial Sequence: Synthetic oligonucleotide
  Antisense strand to SEQ ID NO: 1801535
acucaaaccagaaaucacc

SEQ ID NO: 1801537 - RNA, 19 nt, Artificial Sequence
  Description of Artificial Sequence: Synthetic oligonucleotide
  Sense strand starting at position 220 of SEQ ID NO: 1563182
ugauuucugguuugaguuu

SEQ ID NO: 1801538 - RNA, 19 nt, Artificial Sequence
  Description of Artificial Sequence: Synthetic oligonucleotide
  Antisense strand to SEQ ID NO: 1801537
aaacucaaaccagaaauca

SEQ ID NO: 1801539 - RNA, 19 nt, Artificial Sequence
  Description of Artificial Sequence: Synthetic oligonucleotide
  Sense strand starting at position 226 of SEQ ID NO: 1563182
cugguuugaguuuaacacu

SEQ ID NO: 1801540 - RNA, 19 nt, Artificial Sequence
  Description of Artificial Sequence: Synthetic oligonucleotide
  Antisense strand to SEQ ID NO: 1801539
aguguuaaacucaaaccag

SEQ ID NO: 1801541 - RNA, 19 nt, Artificial Sequence
  Description of Artificial Sequence: Synthetic oligonucleotide
  Sense strand starting at position 293 of SEQ ID NO: 1563182
ugggauaauuuaggaauua

SEQ ID NO: 1801542 - RNA, 19 nt, Artificial Sequence
  Description of Artificial Sequence: Synthetic oligonucleotide
  Antisense strand to SEQ ID NO: 1801541
uaauuccuaaauuauccca

SEQ ID NO: 1801543 - RNA, 19 nt, Artificial Sequence
  Description of Artificial Sequence: Synthetic oligonucleotide
  Sense strand starting at position 449 of SEQ ID NO: 1563182
auaguaucugacuguuaac

SEQ ID NO: 1801544 - RNA, 19 nt, Artificial Sequence
  Description of Artificial Sequence: Synthetic oligonucleotide
  Antisense strand to SEQ ID NO: 1801543
guuaacagucagauacuau

SEQ ID NO: 1801545 - RNA, 19 nt, Artificial Sequence
  Description of Artificial Sequence: Synthetic oligonucleotide
  Sense strand starting at position 1123 of SEQ ID NO: 1563182
guauuccagcuccagauua

SEQ ID NO: 1801546 - RNA, 19 nt, Artificial Sequence
  Description of Artificial Sequence: Synthetic oligonucleotide
  Antisense strand to SEQ ID NO: 1801545
uaaucuggagcuggaauac

SEQ ID NO: 1801547 - RNA, 19 nt, Artificial Sequence
  Description of Artificial Sequence: Synthetic oligonucleotide
  Sense strand starting at position 1520 of SEQ ID NO: 1563182
gagugcacuuaauuaaaga

SEQ ID NO: 1801548 - RNA, 19 nt, Artificial Sequence
  Description of Artificial Sequence: Synthetic oligonucleotide
  Antisense strand to SEQ ID NO: 1801547
ucuuuaauuaagugcacuc

SEQ ID NO: 1801549 - RNA, 19 nt, Artificial Sequence
  Description of Artificial Sequence: Synthetic oligonucleotide
  Sense strand starting at position 1600 of SEQ ID NO: 1563182
caauauugacuuuguugga

SEQ ID NO: 1801550 - RNA, 19 nt, Artificial Sequence
  Description of Artificial Sequence: Synthetic oligonucleotide
  Antisense strand to SEQ ID NO: 1801549
uccaacaaagucaauauug

SEQ ID NO: 1801551 - RNA, 19 nt, Artificial Sequence
  Description of Artificial Sequence: Synthetic oligonucleotide
  Sense strand starting at position 1644 of SEQ ID NO: 1563182
ugauuuaucuaugagaaca

SEQ ID NO: 1801552 - RNA, 19 nt, Artificial Sequence
  Description of Artificial Sequence: Synthetic oligonucleotide
  Antisense strand to SEQ ID NO: 1801551
uguucucauagauaaauca

SEQ ID NO: 1801553 - RNA, 19 nt, Artificial Sequence
  Description of Artificial Sequence: Synthetic oligonucleotide
  Sense strand starting at position 1812 of SEQ ID NO: 1563182
cccugaaaugugugacaaa

SEQ ID NO: 1801554 - RNA, 19 nt, Artificial Sequence
  Description of Artificial Sequence: Synthetic oligonucleotide
  Antisense strand to SEQ ID NO: 1801553
uuugucacacauuucaggg

SEQ ID NO: 1801555 - RNA, 19 nt, Artificial Sequence
  Description of Artificial Sequence: Synthetic oligonucleotide
  Sense strand starting at position 1844 of SEQ ID NO: 1563182
agaaaucucuuuccauggu

SEQ ID NO: 1801556 - RNA, 19 nt, Artificial Sequence
  Description of Artificial Sequence: Synthetic oligonucleotide
  Antisense strand to SEQ ID NO: 1801555
accauggaaagagauuucu

SEQ ID NO: 1801557 - RNA, 19 nt, Artificial Sequence
  Description of Artificial Sequence: Synthetic oligonucleotide
  Sense strand starting at position 2034 of SEQ ID NO: 1563182
gagaauccuggaugcaaau

SEQ ID NO: 1801558 - RNA, 19 nt, Artificial Sequence
  Description of Artificial Sequence: Synthetic oligonucleotide
  Antisense strand to SEQ ID NO: 1801557
auuugcauccaggauucuc

SEQ ID NO: 1801559 - RNA, 19 nt, Artificial Sequence
  Description of Artificial Sequence: Synthetic oligonucleotide
  Sense strand starting at position 2125 of SEQ ID NO: 1563182
cugaacucuguuuaugaau

SEQ ID NO: 1801560 - RNA, 19 nt, Artificial Sequence
  Description of Artificial Sequence: Synthetic oligonucleotide
  Antisense strand to SEQ ID NO: 1801559
auucauaaacagaguucag

SEQ ID NO: 1801561 - RNA, 19 nt, Artificial Sequence
  Description of Artificial Sequence: Synthetic oligonucleotide
  Sense strand starting at position 2161 of SEQ ID NO: 1563182
gugacaaucccaggaguga

SEQ ID NO: 1801562 - RNA, 19 nt, Artificial Sequence
  Description of Artificial Sequence: Synthetic oligonucleotide
  Antisense strand to SEQ ID NO: 1801561
ucacuccugggauugucac

SEQ ID NO: 1801563 - RNA, 19 nt, Artificial Sequence
  Description of Artificial Sequence: Synthetic oligonucleotide
  Sense strand starting at position 2261 of SEQ ID NO: 1563182
cucuacaaagcaugagaau

SEQ ID NO: 1801564 - RNA, 19 nt, Artificial Sequence
  Description of Artificial Sequence: Synthetic oligonucleotide
  Antisense strand to SEQ ID NO: 1801563
auucucaugcuuuguagag

SEQ ID NO: 1801565 - RNA, 19 nt, Artificial Sequence
  Description of Artificial Sequence: Synthetic oligonucleotide
  Sense strand starting at position 2291 of SEQ ID NO: 1563182
ugcccaaaucuuggcauuu

SEQ ID NO: 1801566 - RNA, 19 nt, Artificial Sequence
  Description of Artificial Sequence: Synthetic oligonucleotide
  Antisense strand to SEQ ID NO: 1801565
aaaugccaagauuugggca

SEQ ID NO: 1801567 - RNA, 19 nt, Artificial Sequence
  Description of Artificial Sequence: Synthetic oligonucleotide
  Sense strand starting at position 2292 of SEQ ID NO: 1563182
gcccaaaucuuggcauuuc

SEQ ID NO: 1801568 - RNA, 19 nt, Artificial Sequence
  Description of Artificial Sequence: Synthetic oligonucleotide
  Antisense strand to SEQ ID NO: 1801567
gaaaugccaagauuugggc

SEQ ID NO: 1801569 - RNA, 19 nt, Artificial Sequence
  Description of Artificial Sequence: Synthetic oligonucleotide
  Sense strand starting at position 2316 of SEQ ID NO: 1563182
agaauaaacuuuguuugga

SEQ ID NO: 1801570 - RNA, 19 nt, Artificial Sequence
  Description of Artificial Sequence: Synthetic oligonucleotide
  Antisense strand to SEQ ID NO: 1801569
uccaaacaaaguuuauucu

SEQ ID NO: 1801571 - RNA, 19 nt, Artificial Sequence
  Description of Artificial Sequence: Synthetic oligonucleotide
  Sense strand starting at position 2317 of SEQ ID NO: 1563182
gaauaaacuuuguuuggag

SEQ ID NO: 1801572 - RNA, 19 nt, Artificial Sequence
  Description of Artificial Sequence: Synthetic oligonucleotide
  Antisense strand to SEQ ID NO: 1801571
cuccaaacaaaguuuauuc

SEQ ID NO: 1801573 - RNA, 19 nt, Artificial Sequence
  Description of Artificial Sequence: Synthetic oligonucleotide
  Sense strand starting at position 2318 of SEQ ID NO: 1563182
aauaaacuuuguuuggagu

SEQ ID NO: 1801574 - RNA, 19 nt, Artificial Sequence
  Description of Artificial Sequence: Synthetic oligonucleotide
  Antisense strand to SEQ ID NO: 1801573
acuccaaacaaaguuuauu

SEQ ID NO: 1801575 - RNA, 19 nt, Artificial Sequence
  Description of Artificial Sequence: Synthetic oligonucleotide
  Sense strand starting at position 2361 of SEQ ID NO: 1563182
ggguuuagugaagagcuuu

SEQ ID NO: 1801576 - RNA, 19 nt, Artificial Sequence
  Description of Artificial Sequence: Synthetic oligonucleotide
  Antisense strand to SEQ ID NO: 1801575
aaagcucuucacuaaaccc

SEQ ID NO: 1801577 - RNA, 19 nt, Artificial Sequence
  Description of Artificial Sequence: Synthetic oligonucleotide
  Sense strand starting at position 2384 of SEQ ID NO: 1563182
gacagugacaagugguuaa

SEQ ID NO: 1801578 - RNA, 19 nt, Artificial Sequence
  Description of Artificial Sequence: Synthetic oligonucleotide
  Antisense strand to SEQ ID NO: 1801577
uuaaccacuugucacuguc

SEQ ID NO: 1801579 - RNA, 19 nt, Artificial Sequence
  Description of Artificial Sequence: Synthetic oligonucleotide
  Sense strand starting at position 2387 of SEQ ID NO: 1563182
agugacaagugguuaauca

SEQ ID NO: 1801580 - RNA, 19 nt, Artificial Sequence
  Description of Artificial Sequence: Synthetic oligonucleotide
  Antisense strand to SEQ ID NO: 1801579
ugauuaaccacuugucacu

SEQ ID NO: 1801581 - RNA, 19 nt, Artificial Sequence
  Description of Artificial Sequence: Synthetic oligonucleotide
  Sense strand starting at position 2388 of SEQ ID NO: 1563182
gugacaagugguuaaucaa

SEQ ID NO: 1801582 - RNA, 19 nt, Artificial Sequence
  Description of Artificial Sequence: Synthetic oligonucleotide
  Antisense strand to SEQ ID NO: 1801581
uugauuaaccacuugucac

SEQ ID NO: 1801583 - RNA, 19 nt, Artificial Sequence
  Description of Artificial Sequence: Synthetic oligonucleotide
  Sense strand starting at position 2448 of SEQ ID NO: 1563182
ccacguuugcugcuuuaau

SEQ ID NO: 1801584 - RNA, 19 nt, Artificial Sequence
  Description of Artificial Sequence: Synthetic oligonucleotide
  Antisense strand to SEQ ID NO: 1801583
auuaaagcagcaaacgugg

SEQ ID NO: 1801585 - RNA, 19 nt, Artificial Sequence
  Description of Artificial Sequence: Synthetic oligonucleotide
  Sense strand starting at position 2484 of SEQ ID NO: 1563182
ucuauuuccugagagaauu

SEQ ID NO: 1801586 - RNA, 19 nt, Artificial Sequence
  Description of Artificial Sequence: Synthetic oligonucleotide
  Antisense strand to SEQ ID NO: 1801585
aauucucucaggaaauaga

SEQ ID NO: 1801587 - RNA, 19 nt, Artificial Sequence
  Description of Artificial Sequence: Synthetic oligonucleotide
  Sense strand starting at position 2574 of SEQ ID NO: 1563182
aauuacuuuggcuaguaga

SEQ ID NO: 1801588 - RNA, 19 nt, Artificial Sequence
  Description of Artificial Sequence: Synthetic oligonucleotide
  Antisense strand to SEQ ID NO: 1801587
ucuacuagccaaaguaauu

SEQ ID NO: 1801589 - RNA, 19 nt, Artificial Sequence
  Description of Artificial Sequence: Synthetic oligonucleotide
  Sense strand starting at position 2584 of SEQ ID NO: 1563182
gcuaguagaaaugaaguuu

SEQ ID NO: 1801590 - RNA, 19 nt, Artificial Sequence
  Description of Artificial Sequence: Synthetic oligonucleotide
  Antisense strand to SEQ ID NO: 1801589
aaacuucauuucuacuagc

SEQ ID NO: 1801591 - RNA, 19 nt, Artificial Sequence
  Description of Artificial Sequence: Synthetic oligonucleotide
  Sense strand starting at position 2655 of SEQ ID NO: 1563182
cuacaagaucuacgaacuu

SEQ ID NO: 1801592 - RNA, 19 nt, Artificial Sequence
  Description of Artificial Sequence: Synthetic oligonucleotide
  Antisense strand to SEQ ID NO: 1801591
aaguucguagaucuuguag

SEQ ID NO: 1801593 - RNA, 19 nt, Artificial Sequence
  Description of Artificial Sequence: Synthetic oligonucleotide
  Sense strand starting at position 2719 of SEQ ID NO: 1563182
agcauuugcuacuuuaagu

SEQ ID NO: 1801594 - RNA, 19 nt, Artificial Sequence
  Description of Artificial Sequence: Synthetic oligonucleotide
  Antisense strand to SEQ ID NO: 1801593
acuuaaaguagcaaaugcu

SEQ ID NO: 1801595 - RNA, 19 nt, Artificial Sequence
  Description of Artificial Sequence: Synthetic oligonucleotide
  Sense strand starting at position 2925 of SEQ ID NO: 1563182
acgauauagaaauggguua

SEQ ID NO: 1801596 - RNA, 19 nt, Artificial Sequence
  Description of Artificial Sequence: Synthetic oligonucleotide
  Antisense strand to SEQ ID NO: 1801595
uaacccauuucuauaucgu

SEQ ID NO: 1801597 - RNA, 19 nt, Artificial Sequence
  Description of Artificial Sequence: Synthetic oligonucleotide
  Sense strand starting at position 3093 of SEQ ID NO: 1563182
gaguuauaauugguaucau

SEQ ID NO: 1801598 - RNA, 19 nt, Artificial Sequence
  Description of Artificial Sequence: Synthetic oligonucleotide
  Antisense strand to SEQ ID NO: 1801597
augauaccaauuauaacuc

SEQ ID NO: 1801599 - RNA, 19 nt, Artificial Sequence
  Description of Artificial Sequence: Synthetic oligonucleotide
  Sense strand starting at position 3136 of SEQ ID NO: 1563182
gcacucagugcuccuguua

SEQ ID NO: 1801600 - RNA, 19 nt, Artificial Sequence
  Description of Artificial Sequence: Synthetic oligonucleotide
  Antisense strand to SEQ ID NO: 1801599
uaacaggagcacugagugc

SEQ ID NO: 1801601 - RNA, 19 nt, Artificial Sequence
  Description of Artificial Sequence: Synthetic oligonucleotide
  Sense strand starting at position 3158 of SEQ ID NO: 1563182
agaucucuguagguucuaa

SEQ ID NO: 1801602 - RNA, 19 nt, Artificial Sequence
  Description of Artificial Sequence: Synthetic oligonucleotide
  Antisense strand to SEQ ID NO: 1801601
uuagaaccuacagagaucu

SEQ ID NO: 1801603 - RNA, 19 nt, Artificial Sequence
  Description of Artificial Sequence: Synthetic oligonucleotide
  Sense strand starting at position 3447 of SEQ ID NO: 1563182
guauguucuaagugggaaa

SEQ ID NO: 1801604 - RNA, 19 nt, Artificial Sequence
  Description of Artificial Sequence: Synthetic oligonucleotide
  Antisense strand to SEQ ID NO: 1801603
uuucccacuuagaacauac

SEQ ID NO: 1801605 - RNA, 19 nt, Artificial Sequence
  Description of Artificial Sequence: Synthetic oligonucleotide
  Sense strand starting at position 3449 of SEQ ID NO: 1563182
auguucuaagugggaaaua

SEQ ID NO: 1801606 - RNA, 19 nt, Artificial Sequence
  Description of Artificial Sequence: Synthetic oligonucleotide
  Antisense strand to SEQ ID NO: 1801605
uauuucccacuuagaacau

SEQ ID NO: 1801607 - RNA, 19 nt, Artificial Sequence
  Description of Artificial Sequence: Synthetic oligonucleotide
  Sense strand starting at position 3465 of SEQ ID NO: 1563182
auacuacucccuggagcau

SEQ ID NO: 1801608 - RNA, 19 nt, Artificial Sequence
  Description of Artificial Sequence: Synthetic oligonucleotide
  Antisense strand to SEQ ID NO: 1801607
augcuccagggaguaguau

SEQ ID NO: 1801609 - RNA, 19 nt, Artificial Sequence
  Description of Artificial Sequence: Synthetic oligonucleotide
  Sense strand starting at position 3875 of SEQ ID NO: 1563182
acccuaaagcuguauguau

SEQ ID NO: 1801610 - RNA, 19 nt, Artificial Sequence
  Description of Artificial Sequence: Synthetic oligonucleotide
  Antisense strand to SEQ ID NO: 1801609
auacauacagcuuuagggu

SEQ ID NO: 1801611 - RNA, 19 nt, Artificial Sequence
  Description of Artificial Sequence: Synthetic oligonucleotide
  Sense strand starting at position 58 of SEQ ID NO: 1563183
guauuccagcuccagauua

SEQ ID NO: 1801612 - RNA, 19 nt, Artificial Sequence
  Description of Artificial Sequence: Synthetic oligonucleotide
  Antisense strand to SEQ ID NO: 1801611
uaaucuggagcuggaauac

SEQ ID NO: 1801613 - RNA, 19 nt, Artificial Sequence
  Description of Artificial Sequence: Synthetic oligonucleotide
  Sense strand starting at position 455 of SEQ ID NO: 1563183
gagugcacuuaauuaaaga

SEQ ID NO: 1801614 - RNA, 19 nt, Artificial Sequence
  Description of Artificial Sequence: Synthetic oligonucleotide
  Antisense strand to SEQ ID NO: 1801613
ucuuuaauuaagugcacuc

SEQ ID NO: 1801615 - RNA, 19 nt, Artificial Sequence
  Description of Artificial Sequence: Synthetic oligonucleotide
  Sense strand starting at position 535 of SEQ ID NO: 1563183
caauauugacuuuguugga

SEQ ID NO: 1801616 - RNA, 19 nt, Artificial Sequence
  Description of Artificial Sequence: Synthetic oligonucleotide
  Antisense strand to SEQ ID NO: 1801615
uccaacaaagucaauauug

SEQ ID NO: 1801617 - RNA, 19 nt, Artificial Sequence
  Description of Artificial Sequence: Synthetic oligonucleotide
  Sense strand starting at position 579 of SEQ ID NO: 1563183
ugauuuaucuaugagaaca

SEQ ID NO: 1801618 - RNA, 19 nt, Artificial Sequence
  Description of Artificial Sequence: Synthetic oligonucleotide
  Antisense strand to SEQ ID NO: 1801617
uguucucauagauaaauca

SEQ ID NO: 1801619 - RNA, 19 nt, Artificial Sequence
  Description of Artificial Sequence: Synthetic oligonucleotide
  Sense strand starting at position 747 of SEQ ID NO: 1563183
cccugaaaugugugacaaa

SEQ ID NO: 1801620 - RNA, 19 nt, Artificial Sequence
  Description of Artificial Sequence: Synthetic oligonucleotide
  Antisense strand to SEQ ID NO: 1801619
uuugucacacauuucaggg

SEQ ID NO: 1801621 - RNA, 19 nt, Artificial Sequence
  Description of Artificial Sequence: Synthetic oligonucleotide
  Sense strand starting at position 779 of SEQ ID NO: 1563183
agaaaucucuuuccauggu

SEQ ID NO: 1801622 - RNA, 19 nt, Artificial Sequence
  Description of Artificial Sequence: Synthetic oligonucleotide
  Antisense strand to SEQ ID NO: 1801621
accauggaaagagauuucu

SEQ ID NO: 1801623 - RNA, 19 nt, Artificial Sequence
  Description of Artificial Sequence: Synthetic oligonucleotide
  Sense strand starting at position 969 of SEQ ID NO: 1563183
gagaauccuggaugcaaau

SEQ ID NO: 1801624 - RNA, 19 nt, Artificial Sequence
  Description of Artificial Sequence: Synthetic oligonucleotide
  Antisense strand to SEQ ID NO: 1801623
auuugcauccaggauucuc

SEQ ID NO: 1801625 - RNA, 19 nt, Artificial Sequence
  Description of Artificial Sequence: Synthetic oligonucleotide
  Sense strand starting at position 1060 of SEQ ID NO: 1563183
cugaacucuguuuaugaau

SEQ ID NO: 1801626 - RNA, 19 nt, Artificial Sequence
  Description of Artificial Sequence: Synthetic oligonucleotide
  Antisense strand to SEQ ID NO: 1801625
auucauaaacagaguucag

SEQ ID NO: 1801627 - RNA, 19 nt, Artificial Sequence
  Description of Artificial Sequence: Synthetic oligonucleotide
  Sense strand starting at position 1096 of SEQ ID NO: 1563183
gugacaaucccaggaguga

SEQ ID NO: 1801628 - RNA, 19 nt, Artificial Sequence
  Description of Artificial Sequence: Synthetic oligonucleotide
  Antisense strand to SEQ ID NO: 1801627
ucacuccugggauugucac

SEQ ID NO: 1801629 - RNA, 19 nt, Artificial Sequence
  Description of Artificial Sequence: Synthetic oligonucleotide
  Sense strand starting at position 1196 of SEQ ID NO: 1563183
cucuacaaagcaugagaau

SEQ ID NO: 1801630 - RNA, 19 nt, Artificial Sequence
  Description of Artificial Sequence: Synthetic oligonucleotide
  Antisense strand to SEQ ID NO: 1801629
auucucaugcuuuguagag

SEQ ID NO: 1801631 - RNA, 19 nt, Artificial Sequence
  Description of Artificial Sequence: Synthetic oligonucleotide
  Sense strand starting at position 1226 of SEQ ID NO: 1563183
ugcccaaaucuuggcauuu

SEQ ID NO: 1801632 - RNA, 19 nt, Artificial Sequence
  Description of Artificial Sequence: Synthetic oligonucleotide
  Antisense strand to SEQ ID NO: 1801631
aaaugccaagauuugggca

SEQ ID NO: 1801633 - RNA, 19 nt, Artificial Sequence
  Description of Artificial Sequence: Synthetic oligonucleotide
  Sense strand starting at position 1227 of SEQ ID NO: 1563183
gcccaaaucuuggcauuuc

SEQ ID NO: 1801634 - RNA, 19 nt, Artificial Sequence
  Description of Artificial Sequence: Synthetic oligonucleotide
  Antisense strand to SEQ ID NO: 1801633
gaaaugccaagauuugggc

SEQ ID NO: 1801635 - RNA, 19 nt, Artificial Sequence
  Description of Artificial Sequence: Synthetic oligonucleotide
  Sense strand starting at position 1251 of SEQ ID NO: 1563183
agaauaaacuuuguuugga

SEQ ID NO: 1801636 - RNA, 19 nt, Artificial Sequence
  Description of Artificial Sequence: Synthetic oligonucleotide
  Antisense strand to SEQ ID NO: 1801635
uccaaacaaaguuuauucu

SEQ ID NO: 1801637 - RNA, 19 nt, Artificial Sequence
  Description of Artificial Sequence: Synthetic oligonucleotide
  Sense strand starting at position 1252 of SEQ ID NO: 1563183
gaauaaacuuuguuuggag

SEQ ID NO: 1801638 - RNA, 19 nt, Artificial Sequence
  Description of Artificial Sequence: Synthetic oligonucleotide
  Antisense strand to SEQ ID NO: 1801637
cuccaaacaaaguuuauuc

SEQ ID NO: 1801639 - RNA, 19 nt, Artificial Sequence
  Description of Artificial Sequence: Synthetic oligonucleotide
  Sense strand starting at position 1253 of SEQ ID NO: 1563183
aauaaacuuuguuuggagu

SEQ ID NO: 1801640 - RNA, 19 nt, Artificial Sequence
  Description of Artificial Sequence: Synthetic oligonucleotide
  Antisense strand to SEQ ID NO: 1801639
acuccaaacaaaguuuauu

SEQ ID NO: 1801641 - RNA, 19 nt, Artificial Sequence
  Description of Artificial Sequence: Synthetic oligonucleotide
  Sense strand starting at position 1296 of SEQ ID NO: 1563183
ggguuuagugaagagcuuu

SEQ ID NO: 1801642 - RNA, 19 nt, Artificial Sequence
  Description of Artificial Sequence: Synthetic oligonucleotide
  Antisense strand to SEQ ID NO: 1801641
aaagcucuucacuaaaccc

SEQ ID NO: 1801643 - RNA, 19 nt, Artificial Sequence
  Description of Artificial Sequence: Synthetic oligonucleotide
  Sense strand starting at position 1319 of SEQ ID NO: 1563183
gacagugacaagugguuaa

SEQ ID NO: 1801644 - RNA, 19 nt, Artificial Sequence
  Description of Artificial Sequence: Synthetic oligonucleotide
  Antisense strand to SEQ ID NO: 1801643
uuaaccacuugucacuguc

SEQ ID NO: 1801645 - RNA, 19 nt, Artificial Sequence
  Description of Artificial Sequence: Synthetic oligonucleotide
  Sense strand starting at position 1322 of SEQ ID NO: 1563183
agugacaagugguuaauca

SEQ ID NO: 1801646 - RNA, 19 nt, Artificial Sequence
  Description of Artificial Sequence: Synthetic oligonucleotide
  Antisense strand to SEQ ID NO: 1801645
ugauuaaccacuugucacu

SEQ ID NO: 1801647 - RNA, 19 nt, Artificial Sequence
  Description of Artificial Sequence: Synthetic oligonucleotide
  Sense strand starting at position 1323 of SEQ ID NO: 1563183
gugacaagugguuaaucaa

SEQ ID NO: 1801648 - RNA, 19 nt, Artificial Sequence
  Description of Artificial Sequence: Synthetic oligonucleotide
  Antisense strand to SEQ ID NO: 1801647
uugauuaaccacuugucac

SEQ ID NO: 1801649 - RNA, 19 nt, Artificial Sequence
  Description of Artificial Sequence: Synthetic oligonucleotide
  Sense strand starting at position 1383 of SEQ ID NO: 1563183
ccacguuugcugcuuuaau

SEQ ID NO: 1801650 - RNA, 19 nt, Artificial Sequence
  Description of Artificial Sequence: Synthetic oligonucleotide
  Antisense strand to SEQ ID NO: 1801649
auuaaagcagcaaacgugg

SEQ ID NO: 1801651 - RNA, 19 nt, Artificial Sequence
  Description of Artificial Sequence: Synthetic oligonucleotide
  Sense strand starting at position 1509 of SEQ ID NO: 1563183
aauuacuuuggcuaguaga

SEQ ID NO: 1801652 - RNA, 19 nt, Artificial Sequence
  Description of Artificial Sequence: Synthetic oligonucleotide
  Antisense strand to SEQ ID NO: 1801651
ucuacuagccaaaguaauu

SEQ ID NO: 1801653 - RNA, 19 nt, Artificial Sequence
  Description of Artificial Sequence: Synthetic oligonucleotide
  Sense strand starting at position 1519 of SEQ ID NO: 1563183
gcuaguagaaaugaaguuu

SEQ ID NO: 1801654 - RNA, 19 nt, Artificial Sequence
  Description of Artificial Sequence: Synthetic oligonucleotide
  Antisense strand to SEQ ID NO: 1801653
aaacuucauuucuacuagc

SEQ ID NO: 1801655 - RNA, 19 nt, Artificial Sequence
  Description of Artificial Sequence: Synthetic oligonucleotide
  Sense strand starting at position 1590 of SEQ ID NO: 1563183
cuacaagaucuacgaacuu

SEQ ID NO: 1801656 - RNA, 19 nt, Artificial Sequence
  Description of Artificial Sequence: Synthetic oligonucleotide
  Antisense strand to SEQ ID NO: 1801655
aaguucguagaucuuguag

SEQ ID NO: 1801657 - RNA, 19 nt, Artificial Sequence
  Description of Artificial Sequence: Synthetic oligonucleotide
  Sense strand starting at position 1654 of SEQ ID NO: 1563183
agcauuugcuacuuuaagu

SEQ ID NO: 1801658 - RNA, 19 nt, Artificial Sequence
  Description of Artificial Sequence: Synthetic oligonucleotide
  Antisense strand to SEQ ID NO: 1801657
acuuaaaguagcaaaugcu

SEQ ID NO: 1801659 - RNA, 19 nt, Artificial Sequence
  Description of Artificial Sequence: Synthetic oligonucleotide
  Sense strand starting at position 1860 of SEQ ID NO: 1563183
acgauauagaaauggguua

SEQ ID NO: 1801660 - RNA, 19 nt, Artificial Sequence
  Description of Artificial Sequence: Synthetic oligonucleotide
  Antisense strand to SEQ ID NO: 1801659
uaacccauuucuauaucgu

SEQ ID NO: 1801661 - RNA, 19 nt, Artificial Sequence
  Description of Artificial Sequence: Synthetic oligonucleotide
  Sense strand starting at position 2028 of SEQ ID NO: 1563183
gaguuauaauugguaucau

SEQ ID NO: 1801662 - RNA, 19 nt, Artificial Sequence
  Description of Artificial Sequence: Synthetic oligonucleotide
  Antisense strand to SEQ ID NO: 1801661
augauaccaauuauaacuc

SEQ ID NO: 1801663 - RNA, 19 nt, Artificial Sequence
  Description of Artificial Sequence: Synthetic oligonucleotide
  Sense strand starting at position 2071 of SEQ ID NO: 1563183
gcacucagugcuccuguua

SEQ ID NO: 1801664 - RNA, 19 nt, Artificial Sequence
  Description of Artificial Sequence: Synthetic oligonucleotide
  Antisense strand to SEQ ID NO: 1801663
uaacaggagcacugagugc

SEQ ID NO: 1801665 - RNA, 19 nt, Artificial Sequence
  Description of Artificial Sequence: Synthetic oligonucleotide
  Sense strand starting at position 2384 of SEQ ID NO: 1563183
auguucuaagugggaaaua

SEQ ID NO: 1801666 - RNA, 19 nt, Artificial Sequence
  Description of Artificial Sequence: Synthetic oligonucleotide
  Antisense strand to SEQ ID NO: 1801665
uauuucccacuuagaacau

SEQ ID NO: 1801667 - RNA, 19 nt, Artificial Sequence
  Description of Artificial Sequence: Synthetic oligonucleotide
  Sense strand starting at position 3146 of SEQ ID NO: 1563183
cggccaagccuguauuuaa

SEQ ID NO: 1801668 - RNA, 19 nt, Artificial Sequence
  Description of Artificial Sequence: Synthetic oligonucleotide
  Antisense strand to SEQ ID NO: 1801667
uuaaauacaggcuuggccg

SEQ ID NO: 1801669 - RNA, 19 nt, Artificial Sequence
  Description of Artificial Sequence: Synthetic oligonucleotide
  Sense strand starting at position 3263 of SEQ ID NO: 1563183
agguucccuccugaucauu

SEQ ID NO: 1801670 - RNA, 19 nt, Artificial Sequence
  Description of Artificial Sequence: Synthetic oligonucleotide
  Antisense strand to SEQ ID NO: 1801669
aaugaucaggagggaaccu

SEQ ID NO: 1801671 - RNA, 19 nt, Artificial Sequence
  Description of Artificial Sequence: Synthetic oligonucleotide
  Sense strand starting at position 3331 of SEQ ID NO: 1563183
ugggcuauccuugaucaug

SEQ ID NO: 1801672 - RNA, 19 nt, Artificial Sequence
  Description of Artificial Sequence: Synthetic oligonucleotide
  Antisense strand to SEQ ID NO: 1801671
caugaucaaggauagccca

SEQ ID NO: 1801673 - RNA, 19 nt, Artificial Sequence
  Description of Artificial Sequence: Synthetic oligonucleotide
  Sense strand starting at position 3333 of SEQ ID NO: 1563183
ggcuauccuugaucaugga

SEQ ID NO: 1801674 - RNA, 19 nt, Artificial Sequence
  Description of Artificial Sequence: Synthetic oligonucleotide
  Antisense strand to SEQ ID NO: 1801673
uccaugaucaaggauagcc

SEQ ID NO: 1801675 - RNA, 19 nt, Artificial Sequence
  Description of Artificial Sequence: Synthetic oligonucleotide
  Sense strand starting at position 3334 of SEQ ID NO: 1563183
gcuauccuugaucauggaa

SEQ ID NO: 1801676 - RNA, 19 nt, Artificial Sequence
  Description of Artificial Sequence: Synthetic oligonucleotide
  Antisense strand to SEQ ID NO: 1801675
uuccaugaucaaggauagc

SEQ ID NO: 1801677 - RNA, 19 nt, Artificial Sequence
  Description of Artificial Sequence: Synthetic oligonucleotide
  Sense strand starting at position 3355 of SEQ ID NO: 1563183
gucauagugaaauggacaa

SEQ ID NO: 1801678 - RNA, 19 nt, Artificial Sequence
  Description of Artificial Sequence: Synthetic oligonucleotide
  Antisense strand to SEQ ID NO: 1801677
uuguccauuucacuaugac

SEQ ID NO: 1801679 - RNA, 19 nt, Artificial Sequence
  Description of Artificial Sequence: Synthetic oligonucleotide
  Sense strand starting at position 3384 of SEQ ID NO: 1563183
cuagguucuggaugaagua

SEQ ID NO: 1801680 - RNA, 19 nt, Artificial Sequence
  Description of Artificial Sequence: Synthetic oligonucleotide
  Antisense strand to SEQ ID NO: 1801679
uacuucauccagaaccuag

SEQ ID NO: 1801681 - RNA, 19 nt, Artificial Sequence
  Description of Artificial Sequence: Synthetic oligonucleotide
  Sense strand starting at position 3465 of SEQ ID NO: 1563183
acaagugaaauggguuuau

SEQ ID NO: 1801682 - RNA, 19 nt, Artificial Sequence
  Description of Artificial Sequence: Synthetic oligonucleotide
  Antisense strand to SEQ ID NO: 1801681
auaaacccauuucacuugu

SEQ ID NO: 1801683 - RNA, 19 nt, Artificial Sequence
  Description of Artificial Sequence: Synthetic oligonucleotide
  Sense strand starting at position 3665 of SEQ ID NO: 1563183
augacugccugguuaagaa

SEQ ID NO: 1801684 - RNA, 19 nt, Artificial Sequence
  Description of Artificial Sequence: Synthetic oligonucleotide
  Antisense strand to SEQ ID NO: 1801683
uucuuaaccaggcagucau

SEQ ID NO: 1801685 - RNA, 19 nt, Artificial Sequence
  Description of Artificial Sequence: Synthetic oligonucleotide
  Sense strand starting at position 3756 of SEQ ID NO: 1563183
aguguaucagagcacuaua

SEQ ID NO: 1801686 - RNA, 19 nt, Artificial Sequence
  Description of Artificial Sequence: Synthetic oligonucleotide
  Antisense strand to SEQ ID NO: 1801685
uauagugcucugauacacu

SEQ ID NO: 1801687 - RNA, 19 nt, Artificial Sequence
  Description of Artificial Sequence: Synthetic oligonucleotide
  Sense strand starting at position 3837 of SEQ ID NO: 1563183
cuuauauuaccugguagaa

SEQ ID NO: 1801688 - RNA, 19 nt, Artificial Sequence
  Description of Artificial Sequence: Synthetic oligonucleotide
  Antisense strand to SEQ ID NO: 1801687
uucuaccagguaauauaag

SEQ ID NO: 1801689 - RNA, 19 nt, Artificial Sequence
  Description of Artificial Sequence: Synthetic oligonucleotide
  Sense strand starting at position 3932 of SEQ ID NO: 1563183
ggcaaucauuuagucaugu

SEQ ID NO: 1801690 - RNA, 19 nt, Artificial Sequence
  Description of Artificial Sequence: Synthetic oligonucleotide
  Antisense strand to SEQ ID NO: 1801689
acaugacuaaaugauugcc

SEQ ID NO: 1801691 - RNA, 19 nt, Artificial Sequence
  Description of Artificial Sequence: Synthetic oligonucleotide
  Sense strand starting at position 7 of SEQ ID NO: 1563184
uaugaugaugauuguuacu

SEQ ID NO: 1801692 - RNA, 19 nt, Artificial Sequence
  Description of Artificial Sequence: Synthetic oligonucleotide
  Antisense strand to SEQ ID NO: 1801691
aguaacaaucaucaucaua

SEQ ID NO: 1801693 - RNA, 19 nt, Artificial Sequence
  Description of Artificial Sequence: Synthetic oligonucleotide
  Sense strand starting at position 12 of SEQ ID NO: 1563184
ugaugauuguuacuuaugu

SEQ ID NO: 1801694 - RNA, 19 nt, Artificial Sequence
  Description of Artificial Sequence: Synthetic oligonucleotide
  Antisense strand to SEQ ID NO: 1801693
acauaaguaacaaucauca

SEQ ID NO: 1801695 - RNA, 19 nt, Artificial Sequence
  Description of Artificial Sequence: Synthetic oligonucleotide
  Sense strand starting at position 13 of SEQ ID NO: 1563184
gaugauuguuacuuauguc

SEQ ID NO: 1801696 - RNA, 19 nt, Artificial Sequence
  Description of Artificial Sequence: Synthetic oligonucleotide
  Antisense strand to SEQ ID NO: 1801695
gacauaaguaacaaucauc

SEQ ID NO: 1801697 - RNA, 19 nt, Artificial Sequence
  Description of Artificial Sequence: Synthetic oligonucleotide
  Sense strand starting at position 191 of SEQ ID NO: 1563184
uuaguugucucauuaacaa

SEQ ID NO: 1801698 - RNA, 19 nt, Artificial Sequence
  Description of Artificial Sequence: Synthetic oligonucleotide
  Antisense strand to SEQ ID NO: 1801697
uuguuaaugagacaacuaa

SEQ ID NO: 1801699 - RNA, 19 nt, Artificial Sequence
  Description of Artificial Sequence: Synthetic oligonucleotide
  Sense strand starting at position 505 of SEQ ID NO: 1563184
cagggucuucgguaaugga

SEQ ID NO: 1801700 - RNA, 19 nt, Artificial Sequence
  Description of Artificial Sequence: Synthetic oligonucleotide
  Antisense strand to SEQ ID NO: 1801699
uccauuaccgaagacccug

SEQ ID NO: 1801701 - RNA, 19 nt, Artificial Sequence
  Description of Artificial Sequence: Synthetic oligonucleotide
  Sense strand starting at position 518 of SEQ ID NO: 1563184
aauggaagguuccuuuaca

SEQ ID NO: 1801702 - RNA, 19 nt, Artificial Sequence
  Description of Artificial Sequence: Synthetic oligonucleotide
  Antisense strand to SEQ ID NO: 1801701
uguaaaggaaccuuccauu

SEQ ID NO: 1801703 - RNA, 19 nt, Artificial Sequence
  Description of Artificial Sequence: Synthetic oligonucleotide
  Sense strand starting at position 519 of SEQ ID NO: 1563184
auggaagguuccuuuacaa

SEQ ID NO: 1801704 - RNA, 19 nt, Artificial Sequence
  Description of Artificial Sequence: Synthetic oligonucleotide
  Antisense strand to SEQ ID NO: 1801703
uuguaaaggaaccuuccau

SEQ ID NO: 1801705 - RNA, 19 nt, Artificial Sequence
  Description of Artificial Sequence: Synthetic oligonucleotide
  Sense strand starting at position 748 of SEQ ID NO: 1563184
ucgugccuccauuagauaa

SEQ ID NO: 1801706 - RNA, 19 nt, Artificial Sequence
  Description of Artificial Sequence: Synthetic oligonucleotide
  Antisense strand to SEQ ID NO: 1801705
uuaucuaauggaggcacga

SEQ ID NO: 1801707 - RNA, 19 nt, Artificial Sequence
  Description of Artificial Sequence: Synthetic oligonucleotide
  Sense strand starting at position 871 of SEQ ID NO: 1563184
ccuaaagauguaggaguuu

SEQ ID NO: 1801708 - RNA, 19 nt, Artificial Sequence
  Description of Artificial Sequence: Synthetic oligonucleotide
  Antisense strand to SEQ ID NO: 1801707
aaacuccuacaucuuuagg

SEQ ID NO: 1801709 - RNA, 19 nt, Artificial Sequence
  Description of Artificial Sequence: Synthetic oligonucleotide
  Sense strand starting at position 928 of SEQ ID NO: 1563184
cuagcaaagucuguaaaca

SEQ ID NO: 1801710 - RNA, 19 nt, Artificial Sequence
  Description of Artificial Sequence: Synthetic oligonucleotide
  Antisense strand to SEQ ID NO: 1801709
uguuuacagacuuugcuag

SEQ ID NO: 1801711 - RNA, 19 nt, Artificial Sequence
  Description of Artificial Sequence: Synthetic oligonucleotide
  Sense strand starting at position 1047 of SEQ ID NO: 1563184
aagagauguucuuuaguaa

SEQ ID NO: 1801712 - RNA, 19 nt, Artificial Sequence
  Description of Artificial Sequence: Synthetic oligonucleotide
  Antisense strand to SEQ ID NO: 1801711
uuacuaaagaacaucucuu

SEQ ID NO: 1801713 - RNA, 19 nt, Artificial Sequence
  Description of Artificial Sequence: Synthetic oligonucleotide
  Sense strand starting at position 1048 of SEQ ID NO: 1563184
agagauguucuuuaguaac

SEQ ID NO: 1801714 - RNA, 19 nt, Artificial Sequence
  Description of Artificial Sequence: Synthetic oligonucleotide
  Antisense strand to SEQ ID NO: 1801713
guuacuaaagaacaucucu

SEQ ID NO: 1801715 - RNA, 19 nt, Artificial Sequence
  Description of Artificial Sequence: Synthetic oligonucleotide
  Sense strand starting at position 1050 of SEQ ID NO: 1563184
agauguucuuuaguaacac

SEQ ID NO: 1801716 - RNA, 19 nt, Artificial Sequence
  Description of Artificial Sequence: Synthetic oligonucleotide
  Antisense strand to SEQ ID NO: 1801715
guguuacuaaagaacaucu

SEQ ID NO: 1801717 - RNA, 19 nt, Artificial Sequence
  Description of Artificial Sequence: Synthetic oligonucleotide
  Sense strand starting at position 1148 of SEQ ID NO: 1563184
uaugaaauaucugugguuu

SEQ ID NO: 1801718 - RNA, 19 nt, Artificial Sequence
  Description of Artificial Sequence: Synthetic oligonucleotide
  Antisense strand to SEQ ID NO: 1801717
aaaccacagauauuucaua

SEQ ID NO: 1801719 - RNA, 19 nt, Artificial Sequence
  Description of Artificial Sequence: Synthetic oligonucleotide
  Sense strand starting at position 1184 of SEQ ID NO: 1563184
acaugaacugguuaugcua

SEQ ID NO: 1801720 - RNA, 19 nt, Artificial Sequence
  Description of Artificial Sequence: Synthetic oligonucleotide
  Antisense strand to SEQ ID NO: 1801719
uagcauaaccaguucaugu

SEQ ID NO: 1801721 - RNA, 19 nt, Artificial Sequence
  Description of Artificial Sequence: Synthetic oligonucleotide
  Sense strand starting at position 1205 of SEQ ID NO: 1563184
gccauuugauaccugcauu

SEQ ID NO: 1801722 - RNA, 19 nt, Artificial Sequence
  Description of Artificial Sequence: Synthetic oligonucleotide
  Antisense strand to SEQ ID NO: 1801721
aaugcagguaucaaauggc

SEQ ID NO: 1801723 - RNA, 19 nt, Artificial Sequence
  Description of Artificial Sequence: Synthetic oligonucleotide
  Sense strand starting at position 1403 of SEQ ID NO: 1563184
caggcauuagcagaacguu

SEQ ID NO: 1801724 - RNA, 19 nt, Artificial Sequence
  Description of Artificial Sequence: Synthetic oligonucleotide
  Antisense strand to SEQ ID NO: 1801723
aacguucugcuaaugccug

SEQ ID NO: 1801725 - RNA, 19 nt, Artificial Sequence
  Description of Artificial Sequence: Synthetic oligonucleotide
  Sense strand starting at position 1542 of SEQ ID NO: 1563184
ccacacuuccuguagugua

SEQ ID NO: 1801726 - RNA, 19 nt, Artificial Sequence
  Description of Artificial Sequence: Synthetic oligonucleotide
  Antisense strand to SEQ ID NO: 1801725
uacacuacaggaagugugg

SEQ ID NO: 1801727 - RNA, 19 nt, Artificial Sequence
  Description of Artificial Sequence: Synthetic oligonucleotide
  Sense strand starting at position 1552 of SEQ ID NO: 1563184
uguaguguauaaucacaau

SEQ ID NO: 1801728 - RNA, 19 nt, Artificial Sequence
  Description of Artificial Sequence: Synthetic oligonucleotide
  Antisense strand to SEQ ID NO: 1801727
auugugauuauacacuaca

SEQ ID NO: 1801729 - RNA, 19 nt, Artificial Sequence
  Description of Artificial Sequence: Synthetic oligonucleotide
  Sense strand starting at position 1579 of SEQ ID NO: 1563184
agaagcaggucuguuuaga

SEQ ID NO: 1801730 - RNA, 19 nt, Artificial Sequence
  Description of Artificial Sequence: Synthetic oligonucleotide
  Antisense strand to SEQ ID NO: 1801729
ucuaaacagaccugcuucu

SEQ ID NO: 1801731 - RNA, 19 nt, Artificial Sequence
  Description of Artificial Sequence: Synthetic oligonucleotide
  Sense strand starting at position 1602 of SEQ ID NO: 1563184
agguccuaggcagacauau

SEQ ID NO: 1801732 - RNA, 19 nt, Artificial Sequence
  Description of Artificial Sequence: Synthetic oligonucleotide
  Antisense strand to SEQ ID NO: 1801731
auaugucugccuaggaccu

SEQ ID NO: 1801733 - RNA, 19 nt, Artificial Sequence
  Description of Artificial Sequence: Synthetic oligonucleotide
  Sense strand starting at position 1788 of SEQ ID NO: 1563184
aguggucacucuucucaaa

SEQ ID NO: 1801734 - RNA, 19 nt, Artificial Sequence
  Description of Artificial Sequence: Synthetic oligonucleotide
  Antisense strand to SEQ ID NO: 1801733
uuugagaagagugaccacu

SEQ ID NO: 1801735 - RNA, 19 nt, Artificial Sequence
  Description of Artificial Sequence: Synthetic oligonucleotide
  Sense strand starting at position 1970 of SEQ ID NO: 1563184
uaacaaugccguugaaaga

SEQ ID NO: 1801736 - RNA, 19 nt, Artificial Sequence
  Description of Artificial Sequence: Synthetic oligonucleotide
  Antisense strand to SEQ ID NO: 1801735
ucuuucaacggcauuguua

SEQ ID NO: 1801737 - RNA, 19 nt, Artificial Sequence
  Description of Artificial Sequence: Synthetic oligonucleotide
  Sense strand starting at position 1992 of SEQ ID NO: 1563184
ggagucagucccuagucuu

SEQ ID NO: 1801738 - RNA, 19 nt, Artificial Sequence
  Description of Artificial Sequence: Synthetic oligonucleotide
  Antisense strand to SEQ ID NO: 1801737
aagacuagggacugacucc

SEQ ID NO: 1801739 - RNA, 19 nt, Artificial Sequence
  Description of Artificial Sequence: Synthetic oligonucleotide
  Sense strand starting at position 2797 of SEQ ID NO: 1563184
ucuuuacagcugcaugauu

SEQ ID NO: 1801740 - RNA, 19 nt, Artificial Sequence
  Description of Artificial Sequence: Synthetic oligonucleotide
  Antisense strand to SEQ ID NO: 1801739
aaucaugcagcuguaaaga

SEQ ID NO: 1801741 - RNA, 19 nt, Artificial Sequence
  Description of Artificial Sequence: Synthetic oligonucleotide
  Sense strand starting at position 2799 of SEQ ID NO: 1563184
uuuacagcugcaugauuua

SEQ ID NO: 1801742 - RNA, 19 nt, Artificial Sequence
  Description of Artificial Sequence: Synthetic oligonucleotide
  Antisense strand to SEQ ID NO: 1801741
uaaaucaugcagcuguaaa

SEQ ID NO: 1801743 - RNA, 19 nt, Artificial Sequence
  Description of Artificial Sequence: Synthetic oligonucleotide
  Sense strand starting at position 3040 of SEQ ID NO: 1563184
uuaagaaggccuuggucau

SEQ ID NO: 1801744 - RNA, 19 nt, Artificial Sequence
  Description of Artificial Sequence: Synthetic oligonucleotide
  Antisense strand to SEQ ID NO: 1801743
augaccaaggccuucuuaa

SEQ ID NO: 1801745 - RNA, 19 nt, Artificial Sequence
  Description of Artificial Sequence: Synthetic oligonucleotide
  Sense strand starting at position 3041 of SEQ ID NO: 1563184
uaagaaggccuuggucauu

SEQ ID NO: 1801746 - RNA, 19 nt, Artificial Sequence
  Description of Artificial Sequence: Synthetic oligonucleotide
  Antisense strand to SEQ ID NO: 1801745
aaugaccaaggccuucuua

SEQ ID NO: 1801747 - RNA, 19 nt, Artificial Sequence
  Description of Artificial Sequence: Synthetic oligonucleotide
  Sense strand starting at position 3050 of SEQ ID NO: 1563184
cuuggucauuuauaaagac

SEQ ID NO: 1801748 - RNA, 19 nt, Artificial Sequence
  Description of Artificial Sequence: Synthetic oligonucleotide
  Antisense strand to SEQ ID NO: 1801747
gucuuuauaaaugaccaag

SEQ ID NO: 1801749 - RNA, 19 nt, Artificial Sequence
  Description of Artificial Sequence: Synthetic oligonucleotide
  Sense strand starting at position 3090 of SEQ ID NO: 1563184
caggcucagccugaagaaa

SEQ ID NO: 1801750 - RNA, 19 nt, Artificial Sequence
  Description of Artificial Sequence: Synthetic oligonucleotide
  Antisense strand to SEQ ID NO: 1801749
uuucuucaggcugagccug

SEQ ID NO: 1801751 - RNA, 19 nt, Artificial Sequence
  Description of Artificial Sequence: Synthetic oligonucleotide
  Sense strand starting at position 3154 of SEQ ID NO: 1563184
cuuuaauguguccagcacu

SEQ ID NO: 1801752 - RNA, 19 nt, Artificial Sequence
  Description of Artificial Sequence: Synthetic oligonucleotide
  Antisense strand to SEQ ID NO: 1801751
agugcuggacacauuaaag

SEQ ID NO: 1801753 - RNA, 19 nt, Artificial Sequence
  Description of Artificial Sequence: Synthetic oligonucleotide
  Sense strand starting at position 3311 of SEQ ID NO: 1563184
ucuguuaucuauuuaguuc

SEQ ID NO: 1801754 - RNA, 19 nt, Artificial Sequence
  Description of Artificial Sequence: Synthetic oligonucleotide
  Antisense strand to SEQ ID NO: 1801753
gaacuaaauagauaacaga

SEQ ID NO: 1801755 - RNA, 19 nt, Artificial Sequence
  Description of Artificial Sequence: Synthetic oligonucleotide
  Sense strand starting at position 3341 of SEQ ID NO: 1563184
uugucuaccucacucauga

SEQ ID NO: 1801756 - RNA, 19 nt, Artificial Sequence
  Description of Artificial Sequence: Synthetic oligonucleotide
  Antisense strand to SEQ ID NO: 1801755
ucaugagugagguagacaa

SEQ ID NO: 1801757 - RNA, 19 nt, Artificial Sequence
  Description of Artificial Sequence: Synthetic oligonucleotide
  Sense strand starting at position 3354 of SEQ ID NO: 1563184
ucaugaaguggucaagcaa

SEQ ID NO: 1801758 - RNA, 19 nt, Artificial Sequence
  Description of Artificial Sequence: Synthetic oligonucleotide
  Antisense strand to SEQ ID NO: 1801757
uugcuugaccacuucauga

SEQ ID NO: 1801759 - RNA, 19 nt, Artificial Sequence
  Description of Artificial Sequence: Synthetic oligonucleotide
  Sense strand starting at position 3450 of SEQ ID NO: 1563184
ugugaucagugacucugaa

SEQ ID NO: 1801760 - RNA, 19 nt, Artificial Sequence
  Description of Artificial Sequence: Synthetic oligonucleotide
  Antisense strand to SEQ ID NO: 1801759
uucagagucacugaucaca

SEQ ID NO: 1801761 - RNA, 19 nt, Artificial Sequence
  Description of Artificial Sequence: Synthetic oligonucleotide
  Sense strand starting at position 3587 of SEQ ID NO: 1563184
gacagaguaagguguuauu

SEQ ID NO: 1801762 - RNA, 19 nt, Artificial Sequence
  Description of Artificial Sequence: Synthetic oligonucleotide
  Antisense strand to SEQ ID NO: 1801761
aauaacaccuuacucuguc

SEQ ID NO: 1801763 - RNA, 19 nt, Artificial Sequence
  Description of Artificial Sequence: Synthetic oligonucleotide
  Sense strand starting at position 3663 of SEQ ID NO: 1563184
uucacaugugguuguggaa

SEQ ID NO: 1801764 - RNA, 19 nt, Artificial Sequence
  Description of Artificial Sequence: Synthetic oligonucleotide
  Antisense strand to SEQ ID NO: 1801763
uuccacaaccacaugugaa

SEQ ID NO: 1801765 - RNA, 19 nt, Artificial Sequence
  Description of Artificial Sequence: Synthetic oligonucleotide
  Sense strand starting at position 3757 of SEQ ID NO: 1563184
caaguaugacauuggcauu

SEQ ID NO: 1801766 - RNA, 19 nt, Artificial Sequence
  Description of Artificial Sequence: Synthetic oligonucleotide
  Antisense strand to SEQ ID NO: 1801765
aaugccaaugucauacuug

SEQ ID NO: 1801767 - RNA, 19 nt, Artificial Sequence
  Description of Artificial Sequence: Synthetic oligonucleotide
  Sense strand starting at position 3763 of SEQ ID NO: 1563184
ugacauuggcauugauaca

SEQ ID NO: 1801768 - RNA, 19 nt, Artificial Sequence
  Description of Artificial Sequence: Synthetic oligonucleotide
  Antisense strand to SEQ ID NO: 1801767
uguaucaaugccaauguca

SEQ ID NO: 1801769 - RNA, 19 nt, Artificial Sequence
  Description of Artificial Sequence: Synthetic oligonucleotide
  Sense strand starting at position 3839 of SEQ ID NO: 1563184
gcguacauuuaauucuaua

SEQ ID NO: 1801770 - RNA, 19 nt, Artificial Sequence
  Description of Artificial Sequence: Synthetic oligonucleotide
  Antisense strand to SEQ ID NO: 1801769
uauagaauuaaauguacgc

SEQ ID NO: 1801771 - RNA, 19 nt, Artificial Sequence
  Description of Artificial Sequence: Synthetic oligonucleotide
  Sense strand starting at position 236 of SEQ ID NO: 1563185
gacaguauaccagguauau

SEQ ID NO: 1801772 - RNA, 19 nt, Artificial Sequence
  Description of Artificial Sequence: Synthetic oligonucleotide
  Antisense strand to SEQ ID NO: 1801771
auauaccugguauacuguc

SEQ ID NO: 1801773 - RNA, 19 nt, Artificial Sequence
  Description of Artificial Sequence: Synthetic oligonucleotide
  Sense strand starting at position 462 of SEQ ID NO: 1563185
ccaggaugguauccugaca

SEQ ID NO: 1801774 - RNA, 19 nt, Artificial Sequence
  Description of Artificial Sequence: Synthetic oligonucleotide
  Antisense strand to SEQ ID NO: 1801773
ugucaggauaccauccugg

SEQ ID NO: 1801775 - RNA, 19 nt, Artificial Sequence
  Description of Artificial Sequence: Synthetic oligonucleotide
  Sense strand starting at position 859 of SEQ ID NO: 1563185
cccgauaaacuccaagguu

SEQ ID NO: 1801776 - RNA, 19 nt, Artificial Sequence
  Description of Artificial Sequence: Synthetic oligonucleotide
  Antisense strand to SEQ ID NO: 1801775
aaccuuggaguuuaucggg

SEQ ID NO: 1801777 - RNA, 19 nt, Artificial Sequence
  Description of Artificial Sequence: Synthetic oligonucleotide
  Sense strand starting at position 946 of SEQ ID NO: 1563185
aguuaaccaguauauuacu

SEQ ID NO: 1801778 - RNA, 19 nt, Artificial Sequence
  Description of Artificial Sequence: Synthetic oligonucleotide
  Antisense strand to SEQ ID NO: 1801777
aguaauauacugguuaacu

SEQ ID NO: 1801779 - RNA, 19 nt, Artificial Sequence
  Description of Artificial Sequence: Synthetic oligonucleotide
  Sense strand starting at position 984 of SEQ ID NO: 1563185
auaagaaccugugugcaaa

SEQ ID NO: 1801780 - RNA, 19 nt, Artificial Sequence
  Description of Artificial Sequence: Synthetic oligonucleotide
  Antisense strand to SEQ ID NO: 1801779
uuugcacacagguucuuau

SEQ ID NO: 1801781 - RNA, 19 nt, Artificial Sequence
  Description of Artificial Sequence: Synthetic oligonucleotide
  Sense strand starting at position 1057 of SEQ ID NO: 1563185
caccgaaguguguauuugu

SEQ ID NO: 1801782 - RNA, 19 nt, Artificial Sequence
  Description of Artificial Sequence: Synthetic oligonucleotide
  Antisense strand to SEQ ID NO: 1801781
acaaauacacacuucggug

SEQ ID NO: 1801783 - RNA, 19 nt, Artificial Sequence
  Description of Artificial Sequence: Synthetic oligonucleotide
  Sense strand starting at position 1062 of SEQ ID NO: 1563185
aaguguguauuugugggau

SEQ ID NO: 1801784 - RNA, 19 nt, Artificial Sequence
  Description of Artificial Sequence: Synthetic oligonucleotide
  Antisense strand to SEQ ID NO: 1801783
aucccacaaauacacacuu

SEQ ID NO: 1801785 - RNA, 19 nt, Artificial Sequence
  Description of Artificial Sequence: Synthetic oligonucleotide
  Sense strand starting at position 1065 of SEQ ID NO: 1563185
uguguauuugugggauucu

SEQ ID NO: 1801786 - RNA, 19 nt, Artificial Sequence
  Description of Artificial Sequence: Synthetic oligonucleotide
  Antisense strand to SEQ ID NO: 1801785
agaaucccacaaauacaca

SEQ ID NO: 1801787 - RNA, 19 nt, Artificial Sequence
  Description of Artificial Sequence: Synthetic oligonucleotide
  Sense strand starting at position 1124 of SEQ ID NO: 1563185
ccuguaagaugauucucca

SEQ ID NO: 1801788 - RNA, 19 nt, Artificial Sequence
  Description of Artificial Sequence: Synthetic oligonucleotide
  Antisense strand to SEQ ID NO: 1801787
uggagaaucaucuuacagg

SEQ ID NO: 1801789 - RNA, 19 nt, Artificial Sequence
  Description of Artificial Sequence: Synthetic oligonucleotide
  Sense strand starting at position 1127 of SEQ ID NO: 1563185
guaagaugauucuccaaug

SEQ ID NO: 1801790 - RNA, 19 nt, Artificial Sequence
  Description of Artificial Sequence: Synthetic oligonucleotide
  Antisense strand to SEQ ID NO: 1801789
cauuggagaaucaucuuac

SEQ ID NO: 1801791 - RNA, 19 nt, Artificial Sequence
  Description of Artificial Sequence: Synthetic oligonucleotide
  Sense strand starting at position 1185 of SEQ ID NO: 1563185
ugacucaaucagugcucaa

SEQ ID NO: 1801792 - RNA, 19 nt, Artificial Sequence
  Description of Artificial Sequence: Synthetic oligonucleotide
  Antisense strand to SEQ ID NO: 1801791
uugagcacugauugaguca

SEQ ID NO: 1801793 - RNA, 19 nt, Artificial Sequence
  Description of Artificial Sequence: Synthetic oligonucleotide
  Sense strand starting at position 1350 of SEQ ID NO: 1563185
gaaugauuccugggagcug

SEQ ID NO: 1801794 - RNA, 19 nt, Artificial Sequence
  Description of Artificial Sequence: Synthetic oligonucleotide
  Antisense strand to SEQ ID NO: 1801793
cagcucccaggaaucauuc

SEQ ID NO: 1801795 - RNA, 19 nt, Artificial Sequence
  Description of Artificial Sequence: Synthetic oligonucleotide
  Sense strand starting at position 1355 of SEQ ID NO: 1563185
auuccugggagcugaaauu

SEQ ID NO: 1801796 - RNA, 19 nt, Artificial Sequence
  Description of Artificial Sequence: Synthetic oligonucleotide
  Antisense strand to SEQ ID NO: 1801795
aauuucagcucccaggaau

SEQ ID NO: 1801797 - RNA, 19 nt, Artificial Sequence
  Description of Artificial Sequence: Synthetic oligonucleotide
  Sense strand starting at position 1401 of SEQ ID NO: 1563185
gaauuugucuugucuguag

SEQ ID NO: 1801798 - RNA, 19 nt, Artificial Sequence
  Description of Artificial Sequence: Synthetic oligonucleotide
  Antisense strand to SEQ ID NO: 1801797
cuacagacaagacaaauuc

SEQ ID NO: 1801799 - RNA, 19 nt, Artificial Sequence
  Description of Artificial Sequence: Synthetic oligonucleotide
  Sense strand starting at position 1403 of SEQ ID NO: 1563185
auuugucuugucuguagga

SEQ ID NO: 1801800 - RNA, 19 nt, Artificial Sequence
  Description of Artificial Sequence: Synthetic oligonucleotide
  Antisense strand to SEQ ID NO: 1801799
uccuacagacaagacaaau

SEQ ID NO: 1801801 - RNA, 19 nt, Artificial Sequence
  Description of Artificial Sequence: Synthetic oligonucleotide
  Sense strand starting at position 1448 of SEQ ID NO: 1563185
uugaacagcuguguaaaga

SEQ ID NO: 1801802 - RNA, 19 nt, Artificial Sequence
  Description of Artificial Sequence: Synthetic oligonucleotide
  Antisense strand to SEQ ID NO: 1801801
ucuuuacacagcuguucaa

SEQ ID NO: 1801803 - RNA, 19 nt, Artificial Sequence
  Description of Artificial Sequence: Synthetic oligonucleotide
  Sense strand starting at position 1449 of SEQ ID NO: 1563185
ugaacagcuguguaaagaa

SEQ ID NO: 1801804 - RNA, 19 nt, Artificial Sequence
  Description of Artificial Sequence: Synthetic oligonucleotide
  Antisense strand to SEQ ID NO: 1801803
uucuuuacacagcuguuca

SEQ ID NO: 1801805 - RNA, 19 nt, Artificial Sequence
  Description of Artificial Sequence: Synthetic oligonucleotide
  Sense strand starting at position 1466 of SEQ ID NO: 1563185
aauauauaccagugagcug

SEQ ID NO: 1801806 - RNA, 19 nt, Artificial Sequence
  Description of Artificial Sequence: Synthetic oligonucleotide
  Antisense strand to SEQ ID NO: 1801805
cagcucacugguauauauu

SEQ ID NO: 1801807 - RNA, 19 nt, Artificial Sequence
  Description of Artificial Sequence: Synthetic oligonucleotide
  Sense strand starting at position 1611 of SEQ ID NO: 1563185
gcccaucaauggguuugaa

SEQ ID NO: 1801808 - RNA, 19 nt, Artificial Sequence
  Description of Artificial Sequence: Synthetic oligonucleotide
  Antisense strand to SEQ ID NO: 1801807
uucaaacccauugaugggc

SEQ ID NO: 1801809 - RNA, 19 nt, Artificial Sequence
  Description of Artificial Sequence: Synthetic oligonucleotide
  Sense strand starting at position 1634 of SEQ ID NO: 1563185
gccugaugccaggaaaguc

SEQ ID NO: 1801810 - RNA, 19 nt, Artificial Sequence
  Description of Artificial Sequence: Synthetic oligonucleotide
  Antisense strand to SEQ ID NO: 1801809
gacuuuccuggcaucaggc

SEQ ID NO: 1801811 - RNA, 19 nt, Artificial Sequence
  Description of Artificial Sequence: Synthetic oligonucleotide
  Sense strand starting at position 1830 of SEQ ID NO: 1563185
ucaaauggucugcagcaaa

SEQ ID NO: 1801812 - RNA, 19 nt, Artificial Sequence
  Description of Artificial Sequence: Synthetic oligonucleotide
  Antisense strand to SEQ ID NO: 1801811
uuugcugcagaccauuuga

SEQ ID NO: 1801813 - RNA, 19 nt, Artificial Sequence
  Description of Artificial Sequence: Synthetic oligonucleotide
  Sense strand starting at position 1875 of SEQ ID NO: 1563185
ugcuaccugugaucagaga

SEQ ID NO: 1801814 - RNA, 19 nt, Artificial Sequence
  Description of Artificial Sequence: Synthetic oligonucleotide
  Antisense strand to SEQ ID NO: 1801813
ucucugaucacagguagca

SEQ ID NO: 1801815 - RNA, 19 nt, Artificial Sequence
  Description of Artificial Sequence: Synthetic oligonucleotide
  Sense strand starting at position 1893 of SEQ ID NO: 1563185
agaggcaugcgcucgugua

SEQ ID NO: 1801816 - RNA, 19 nt, Artificial Sequence
  Description of Artificial Sequence: Synthetic oligonucleotide
  Antisense strand to SEQ ID NO: 1801815
uacacgagcgcaugccucu

SEQ ID NO: 1801817 - RNA, 19 nt, Artificial Sequence
  Description of Artificial Sequence: Synthetic oligonucleotide
  Sense strand starting at position 2047 of SEQ ID NO: 1563185
ugaggaagccuuggaguuu

SEQ ID NO: 1801818 - RNA, 19 nt, Artificial Sequence
  Description of Artificial Sequence: Synthetic oligonucleotide
  Antisense strand to SEQ ID NO: 1801817
aaacuccaaggcuuccuca

SEQ ID NO: 1801819 - RNA, 19 nt, Artificial Sequence
  Description of Artificial Sequence: Synthetic oligonucleotide
  Sense strand starting at position 2071 of SEQ ID NO: 1563185
gaaggaaacucaguuugua

SEQ ID NO: 1801820 - RNA, 19 nt, Artificial Sequence
  Description of Artificial Sequence: Synthetic oligonucleotide
  Antisense strand to SEQ ID NO: 1801819
uacaaacugaguuuccuuc

SEQ ID NO: 1801821 - RNA, 19 nt, Artificial Sequence
  Description of Artificial Sequence: Synthetic oligonucleotide
  Sense strand starting at position 2074 of SEQ ID NO: 1563185
ggaaacucaguuuguaacu

SEQ ID NO: 1801822 - RNA, 19 nt, Artificial Sequence
  Description of Artificial Sequence: Synthetic oligonucleotide
  Antisense strand to SEQ ID NO: 1801821
aguuacaaacugaguuucc

SEQ ID NO: 1801823 - RNA, 19 nt, Artificial Sequence
  Description of Artificial Sequence: Synthetic oligonucleotide
  Sense strand starting at position 2328 of SEQ ID NO: 1563185
ugggaaaugugucuauaug

SEQ ID NO: 1801824 - RNA, 19 nt, Artificial Sequence
  Description of Artificial Sequence: Synthetic oligonucleotide
  Antisense strand to SEQ ID NO: 1801823
cauauagacacauuuccca

SEQ ID NO: 1801825 - RNA, 19 nt, Artificial Sequence
  Description of Artificial Sequence: Synthetic oligonucleotide
  Sense strand starting at position 2329 of SEQ ID NO: 1563185
gggaaaugugucuauaugu

SEQ ID NO: 1801826 - RNA, 19 nt, Artificial Sequence
  Description of Artificial Sequence: Synthetic oligonucleotide
  Antisense strand to SEQ ID NO: 1801825
acauauagacacauuuccc

SEQ ID NO: 1801827 - RNA, 19 nt, Artificial Sequence
  Description of Artificial Sequence: Synthetic oligonucleotide
  Sense strand starting at position 2492 of SEQ ID NO: 1563185
uggccugagauguggaaga

SEQ ID NO: 1801828 - RNA, 19 nt, Artificial Sequence
  Description of Artificial Sequence: Synthetic oligonucleotide
  Antisense strand to SEQ ID NO: 1801827
ucuuccacaucucaggcca

SEQ ID NO: 1801829 - RNA, 19 nt, Artificial Sequence
  Description of Artificial Sequence: Synthetic oligonucleotide
  Sense strand starting at position 2503 of SEQ ID NO: 1563185
guggaagagaccugcuauc

SEQ ID NO: 1801830 - RNA, 19 nt, Artificial Sequence
  Description of Artificial Sequence: Synthetic oligonucleotide
  Antisense strand to SEQ ID NO: 1801829
gauagcaggucucuuccac

SEQ ID NO: 1801831 - RNA, 19 nt, Artificial Sequence
  Description of Artificial Sequence: Synthetic oligonucleotide
  Sense strand starting at position 2984 of SEQ ID NO: 1563185
uccucucuuccagguagaa

SEQ ID NO: 1801832 - RNA, 19 nt, Artificial Sequence
  Description of Artificial Sequence: Synthetic oligonucleotide
  Antisense strand to SEQ ID NO: 1801831
uucuaccuggaagagagga

SEQ ID NO: 1801833 - RNA, 19 nt, Artificial Sequence
  Description of Artificial Sequence: Synthetic oligonucleotide
  Sense strand starting at position 3094 of SEQ ID NO: 1563185
agaugaggccuagauguuu

SEQ ID NO: 1801834 - RNA, 19 nt, Artificial Sequence
  Description of Artificial Sequence: Synthetic oligonucleotide
  Antisense strand to SEQ ID NO: 1801833
aaacaucuaggccucaucu

SEQ ID NO: 1801835 - RNA, 19 nt, Artificial Sequence
  Description of Artificial Sequence: Synthetic oligonucleotide
  Sense strand starting at position 3137 of SEQ ID NO: 1563185
acauuugguggcuguuauu

SEQ ID NO: 1801836 - RNA, 19 nt, Artificial Sequence
  Description of Artificial Sequence: Synthetic oligonucleotide
  Antisense strand to SEQ ID NO: 1801835
aauaacagccaccaaaugu

SEQ ID NO: 1801837 - RNA, 19 nt, Artificial Sequence
  Description of Artificial Sequence: Synthetic oligonucleotide
  Sense strand starting at position 3601 of SEQ ID NO: 1563185
gagagcuuuccauaucagc

SEQ ID NO: 1801838 - RNA, 19 nt, Artificial Sequence
  Description of Artificial Sequence: Synthetic oligonucleotide
  Antisense strand to SEQ ID NO: 1801837
gcugauauggaaagcucuc

SEQ ID NO: 1801839 - RNA, 19 nt, Artificial Sequence
  Description of Artificial Sequence: Synthetic oligonucleotide
  Sense strand starting at position 3661 of SEQ ID NO: 1563185
auuccauauugugccagaa

SEQ ID NO: 1801840 - RNA, 19 nt, Artificial Sequence
  Description of Artificial Sequence: Synthetic oligonucleotide
  Antisense strand to SEQ ID NO: 1801839
uucuggcacaauauggaau

SEQ ID NO: 1801841 - RNA, 19 nt, Artificial Sequence
  Description of Artificial Sequence: Synthetic oligonucleotide
  Sense strand starting at position 3665 of SEQ ID NO: 1563185
cauauugugccagaaguau

SEQ ID NO: 1801842 - RNA, 19 nt, Artificial Sequence
  Description of Artificial Sequence: Synthetic oligonucleotide
  Antisense strand to SEQ ID NO: 1801841
auacuucuggcacaauaug

SEQ ID NO: 1801843 - RNA, 19 nt, Artificial Sequence
  Description of Artificial Sequence: Synthetic oligonucleotide
  Sense strand starting at position 3715 of SEQ ID NO: 1563185
gucauuauuucuguuagua

SEQ ID NO: 1801844 - RNA, 19 nt, Artificial Sequence
  Description of Artificial Sequence: Synthetic oligonucleotide
  Antisense strand to SEQ ID NO: 1801843
uacuaacagaaauaaugac

SEQ ID NO: 1801845 - RNA, 19 nt, Artificial Sequence
  Description of Artificial Sequence: Synthetic oligonucleotide
  Sense strand starting at position 3725 of SEQ ID NO: 1563185
cuguuaguacuaugaaagg

SEQ ID NO: 1801846 - RNA, 19 nt, Artificial Sequence
  Description of Artificial Sequence: Synthetic oligonucleotide
  Antisense strand to SEQ ID NO: 1801845
ccuuucauaguacuaacag

SEQ ID NO: 1801847 - RNA, 19 nt, Artificial Sequence
  Description of Artificial Sequence: Synthetic oligonucleotide
  Sense strand starting at position 3785 of SEQ ID NO: 1563185
ggcaaauauuucuagagga

SEQ ID NO: 1801848 - RNA, 19 nt, Artificial Sequence
  Description of Artificial Sequence: Synthetic oligonucleotide
  Antisense strand to SEQ ID NO: 1801847
uccucuagaaauauuugcc

SEQ ID NO: 1801849 - RNA, 19 nt, Artificial Sequence
  Description of Artificial Sequence: Synthetic oligonucleotide
  Sense strand starting at position 3920 of SEQ ID NO: 1563185
agaucaguagauuguauga

SEQ ID NO: 1801850 - RNA, 19 nt, Artificial Sequence
  Description of Artificial Sequence: Synthetic oligonucleotide
  Antisense strand to SEQ ID NO: 1801849
ucauacaaucuacugaucu

SEQ ID NO: 1801851 - RNA, 19 nt, Artificial Sequence
  Description of Artificial Sequence: Synthetic oligonucleotide
  Sense strand starting at position 166 of SEQ ID NO: 1563186
ccaggaugguauccugaca

SEQ ID NO: 1801852 - RNA, 19 nt, Artificial Sequence
  Description of Artificial Sequence: Synthetic oligonucleotide
  Antisense strand to SEQ ID NO: 1801851
ugucaggauaccauccugg

SEQ ID NO: 1801853 - RNA, 19 nt, Artificial Sequence
  Description of Artificial Sequence: Synthetic oligonucleotide
  Sense strand starting at position 563 of SEQ ID NO: 1563186
cccgauaaacuccaagguu

SEQ ID NO: 1801854 - RNA, 19 nt, Artificial Sequence
  Description of Artificial Sequence: Synthetic oligonucleotide
  Antisense strand to SEQ ID NO: 1801853
aaccuuggaguuuaucggg

SEQ ID NO: 1801855 - RNA, 19 nt, Artificial Sequence
  Description of Artificial Sequence: Synthetic oligonucleotide
  Sense strand starting at position 650 of SEQ ID NO: 1563186
aguuaaccaguauauuacu

SEQ ID NO: 1801856 - RNA, 19 nt, Artificial Sequence
  Description of Artificial Sequence: Synthetic oligonucleotide
  Antisense strand to SEQ ID NO: 1801855
aguaauauacugguuaacu

SEQ ID NO: 1801857 - RNA, 19 nt, Artificial Sequence
  Description of Artificial Sequence: Synthetic oligonucleotide
  Sense strand starting at position 688 of SEQ ID NO: 1563186
auaagaaccugugugcaaa

SEQ ID NO: 1801858 - RNA, 19 nt, Artificial Sequence
  Description of Artificial Sequence: Synthetic oligonucleotide
  Antisense strand to SEQ ID NO: 1801857
uuugcacacagguucuuau

SEQ ID NO: 1801859 - RNA, 19 nt, Artificial Sequence
  Description of Artificial Sequence: Synthetic oligonucleotide
  Sense strand starting at position 761 of SEQ ID NO: 1563186
caccgaaguguguauuugu

SEQ ID NO: 1801860 - RNA, 19 nt, Artificial Sequence
  Description of Artificial Sequence: Synthetic oligonucleotide
  Antisense strand to SEQ ID NO: 1801859
acaaauacacacuucggug

SEQ ID NO: 1801861 - RNA, 19 nt, Artificial Sequence
  Description of Artificial Sequence: Synthetic oligonucleotide
  Sense strand starting at position 766 of SEQ ID NO: 1563186
aaguguguauuugugggau

SEQ ID NO: 1801862 - RNA, 19 nt, Artificial Sequence
  Description of Artificial Sequence: Synthetic oligonucleotide
  Antisense strand to SEQ ID NO: 1801861
aucccacaaauacacacuu

SEQ ID NO: 1801863 - RNA, 19 nt, Artificial Sequence
  Description of Artificial Sequence: Synthetic oligonucleotide
  Sense strand starting at position 769 of SEQ ID NO: 1563186
uguguauuugugggauucu

SEQ ID NO: 1801864 - RNA, 19 nt, Artificial Sequence
  Description of Artificial Sequence: Synthetic oligonucleotide
  Antisense strand to SEQ ID NO: 1801863
agaaucccacaaauacaca

SEQ ID NO: 1801865 - RNA, 19 nt, Artificial Sequence
  Description of Artificial Sequence: Synthetic oligonucleotide
  Sense strand starting at position 828 of SEQ ID NO: 1563186
ccuguaagaugauucucca

SEQ ID NO: 1801866 - RNA, 19 nt, Artificial Sequence
  Description of Artificial Sequence: Synthetic oligonucleotide
  Antisense strand to SEQ ID NO: 1801865
uggagaaucaucuuacagg

SEQ ID NO: 1801867 - RNA, 19 nt, Artificial Sequence
  Description of Artificial Sequence: Synthetic oligonucleotide
  Sense strand starting at position 831 of SEQ ID NO: 1563186
guaagaugauucuccaaug

SEQ ID NO: 1801868 - RNA, 19 nt, Artificial Sequence
  Description of Artificial Sequence: Synthetic oligonucleotide
  Antisense strand to SEQ ID NO: 1801867
cauuggagaaucaucuuac

SEQ ID NO: 1801869 - RNA, 19 nt, Artificial Sequence
  Description of Artificial Sequence: Synthetic oligonucleotide
  Sense strand starting at position 1054 of SEQ ID NO: 1563186
gaaugauuccugggagcug

SEQ ID NO: 1801870 - RNA, 19 nt, Artificial Sequence
  Description of Artificial Sequence: Synthetic oligonucleotide
  Antisense strand to SEQ ID NO: 1801869
cagcucccaggaaucauuc

SEQ ID NO: 1801871 - RNA, 19 nt, Artificial Sequence
  Description of Artificial Sequence: Synthetic oligonucleotide
  Sense strand starting at position 1059 of SEQ ID NO: 1563186
auuccugggagcugaaauu

SEQ ID NO: 1801872 - RNA, 19 nt, Artificial Sequence
  Description of Artificial Sequence: Synthetic oligonucleotide
  Antisense strand to SEQ ID NO: 1801871
aauuucagcucccaggaau

SEQ ID NO: 1801873 - RNA, 19 nt, Artificial Sequence
  Description of Artificial Sequence: Synthetic oligonucleotide
  Sense strand starting at position 1105 of SEQ ID NO: 1563186
gaauuugucuugucuguag

SEQ ID NO: 1801874 - RNA, 19 nt, Artificial Sequence
  Description of Artificial Sequence: Synthetic oligonucleotide
  Antisense strand to SEQ ID NO: 1801873
cuacagacaagacaaauuc

SEQ ID NO: 1801875 - RNA, 19 nt, Artificial Sequence
  Description of Artificial Sequence: Synthetic oligonucleotide
  Sense strand starting at position 1107 of SEQ ID NO: 1563186
auuugucuugucuguagga

SEQ ID NO: 1801876 - RNA, 19 nt, Artificial Sequence
  Description of Artificial Sequence: Synthetic oligonucleotide
  Antisense strand to SEQ ID NO: 1801875
uccuacagacaagacaaau

SEQ ID NO: 1801877 - RNA, 19 nt, Artificial Sequence
  Description of Artificial Sequence: Synthetic oligonucleotide
  Sense strand starting at position 1152 of SEQ ID NO: 1563186
uugaacagcuguguaaaga

SEQ ID NO: 1801878 - RNA, 19 nt, Artificial Sequence
  Description of Artificial Sequence: Synthetic oligonucleotide
  Antisense strand to SEQ ID NO: 1801877
ucuuuacacagcuguucaa

SEQ ID NO: 1801879 - RNA, 19 nt, Artificial Sequence
  Description of Artificial Sequence: Synthetic oligonucleotide
  Sense strand starting at position 1153 of SEQ ID NO: 1563186
ugaacagcuguguaaagaa

SEQ ID NO: 1801880 - RNA, 19 nt, Artificial Sequence
  Description of Artificial Sequence: Synthetic oligonucleotide
  Antisense strand to SEQ ID NO: 1801879
uucuuuacacagcuguuca

SEQ ID NO: 1801881 - RNA, 19 nt, Artificial Sequence
  Description of Artificial Sequence: Synthetic oligonucleotide
  Sense strand starting at position 1170 of SEQ ID NO: 1563186
aauauauaccagugagcug

SEQ ID NO: 1801882 - RNA, 19 nt, Artificial Sequence
  Description of Artificial Sequence: Synthetic oligonucleotide
  Antisense strand to SEQ ID NO: 1801881
cagcucacugguauauauu

SEQ ID NO: 1801883 - RNA, 19 nt, Artificial Sequence
  Description of Artificial Sequence: Synthetic oligonucleotide
  Sense strand starting at position 1315 of SEQ ID NO: 1563186
gcccaucaauggguuugaa

SEQ ID NO: 1801884 - RNA, 19 nt, Artificial Sequence
  Description of Artificial Sequence: Synthetic oligonucleotide
  Antisense strand to SEQ ID NO: 1801883
uucaaacccauugaugggc

SEQ ID NO: 1801885 - RNA, 19 nt, Artificial Sequence
  Description of Artificial Sequence: Synthetic oligonucleotide
  Sense strand starting at position 1338 of SEQ ID NO: 1563186
gccugaugccaggaaaguc

SEQ ID NO: 1801886 - RNA, 19 nt, Artificial Sequence
  Description of Artificial Sequence: Synthetic oligonucleotide
  Antisense strand to SEQ ID NO: 1801885
gacuuuccuggcaucaggc

SEQ ID NO: 1801887 - RNA, 19 nt, Artificial Sequence
  Description of Artificial Sequence: Synthetic oligonucleotide
  Sense strand starting at position 1534 of SEQ ID NO: 1563186
ucaaauggucugcagcaaa

SEQ ID NO: 1801888 - RNA, 19 nt, Artificial Sequence
  Description of Artificial Sequence: Synthetic oligonucleotide
  Antisense strand to SEQ ID NO: 1801887
uuugcugcagaccauuuga

SEQ ID NO: 1801889 - RNA, 19 nt, Artificial Sequence
  Description of Artificial Sequence: Synthetic oligonucleotide
  Sense strand starting at position 1579 of SEQ ID NO: 1563186
ugcuaccugugaucagaga

SEQ ID NO: 1801890 - RNA, 19 nt, Artificial Sequence
  Description of Artificial Sequence: Synthetic oligonucleotide
  Antisense strand to SEQ ID NO: 1801889
ucucugaucacagguagca

SEQ ID NO: 1801891 - RNA, 19 nt, Artificial Sequence
  Description of Artificial Sequence: Synthetic oligonucleotide
  Sense strand starting at position 1597 of SEQ ID NO: 1563186
agaggcaugcgcucgugua

SEQ ID NO: 1801892 - RNA, 19 nt, Artificial Sequence
  Description of Artificial Sequence: Synthetic oligonucleotide
  Antisense strand to SEQ ID NO: 1801891
uacacgagcgcaugccucu

SEQ ID NO: 1801893 - RNA, 19 nt, Artificial Sequence
  Description of Artificial Sequence: Synthetic oligonucleotide
  Sense strand starting at position 1751 of SEQ ID NO: 1563186
ugaggaagccuuggaguuu

SEQ ID NO: 1801894 - RNA, 19 nt, Artificial Sequence
  Description of Artificial Sequence: Synthetic oligonucleotide
  Antisense strand to SEQ ID NO: 1801893
aaacuccaaggcuuccuca

SEQ ID NO: 1801895 - RNA, 19 nt, Artificial Sequence
  Description of Artificial Sequence: Synthetic oligonucleotide
  Sense strand starting at position 1775 of SEQ ID NO: 1563186
gaaggaaacucaguuugua

SEQ ID NO: 1801896 - RNA, 19 nt, Artificial Sequence
  Description of Artificial Sequence: Synthetic oligonucleotide
  Antisense strand to SEQ ID NO: 1801895
uacaaacugaguuuccuuc

SEQ ID NO: 1801897 - RNA, 19 nt, Artificial Sequence
  Description of Artificial Sequence: Synthetic oligonucleotide
  Sense strand starting at position 1778 of SEQ ID NO: 1563186
ggaaacucaguuuguaacu

SEQ ID NO: 1801898 - RNA, 19 nt, Artificial Sequence
  Description of Artificial Sequence: Synthetic oligonucleotide
  Antisense strand to SEQ ID NO: 1801897
aguuacaaacugaguuucc

SEQ ID NO: 1801899 - RNA, 19 nt, Artificial Sequence
  Description of Artificial Sequence: Synthetic oligonucleotide
  Sense strand starting at position 2032 of SEQ ID NO: 1563186
ugggaaaugugucuauaug

SEQ ID NO: 1801900 - RNA, 19 nt, Artificial Sequence
  Description of Artificial Sequence: Synthetic oligonucleotide
  Antisense strand to SEQ ID NO: 1801899
cauauagacacauuuccca

SEQ ID NO: 1801901 - RNA, 19 nt, Artificial Sequence
  Description of Artificial Sequence: Synthetic oligonucleotide
  Sense strand starting at position 2033 of SEQ ID NO: 1563186
gggaaaugugucuauaugu

SEQ ID NO: 1801902 - RNA, 19 nt, Artificial Sequence
  Description of Artificial Sequence: Synthetic oligonucleotide
  Antisense strand to SEQ ID NO: 1801901
acauauagacacauuuccc

SEQ ID NO: 1801903 - RNA, 19 nt, Artificial Sequence
  Description of Artificial Sequence: Synthetic oligonucleotide
  Sense strand starting at position 2196 of SEQ ID NO: 1563186
uggccugagauguggaaga

SEQ ID NO: 1801904 - RNA, 19 nt, Artificial Sequence
  Description of Artificial Sequence: Synthetic oligonucleotide
  Antisense strand to SEQ ID NO: 1801903
ucuuccacaucucaggcca

SEQ ID NO: 1801905 - RNA, 19 nt, Artificial Sequence
  Description of Artificial Sequence: Synthetic oligonucleotide
  Sense strand starting at position 2207 of SEQ ID NO: 1563186
guggaagagaccugcuauc

SEQ ID NO: 1801906 - RNA, 19 nt, Artificial Sequence
  Description of Artificial Sequence: Synthetic oligonucleotide
  Antisense strand to SEQ ID NO: 1801905
gauagcaggucucuuccac

SEQ ID NO: 1801907 - RNA, 19 nt, Artificial Sequence
  Description of Artificial Sequence: Synthetic oligonucleotide
  Sense strand starting at position 2688 of SEQ ID NO: 1563186
uccucucuuccagguagaa

SEQ ID NO: 1801908 - RNA, 19 nt, Artificial Sequence
  Description of Artificial Sequence: Synthetic oligonucleotide
  Antisense strand to SEQ ID NO: 1801907
uucuaccuggaagagagga

SEQ ID NO: 1801909 - RNA, 19 nt, Artificial Sequence
  Description of Artificial Sequence: Synthetic oligonucleotide
  Sense strand starting at position 2798 of SEQ ID NO: 1563186
agaugaggccuagauguuu

SEQ ID NO: 1801910 - RNA, 19 nt, Artificial Sequence
  Description of Artificial Sequence: Synthetic oligonucleotide
  Antisense strand to SEQ ID NO: 1801909
aaacaucuaggccucaucu

SEQ ID NO: 1801911 - RNA, 19 nt, Artificial Sequence
  Description of Artificial Sequence: Synthetic oligonucleotide
  Sense strand starting at position 2841 of SEQ ID NO: 1563186
acauuugguggcuguuauu

SEQ ID NO: 1801912 - RNA, 19 nt, Artificial Sequence
  Description of Artificial Sequence: Synthetic oligonucleotide
  Antisense strand to SEQ ID NO: 1801911
aauaacagccaccaaaugu

SEQ ID NO: 1801913 - RNA, 19 nt, Artificial Sequence
  Description of Artificial Sequence: Synthetic oligonucleotide
  Sense strand starting at position 3305 of SEQ ID NO: 1563186
gagagcuuuccauaucagc

SEQ ID NO: 1801914 - RNA, 19 nt, Artificial Sequence
  Description of Artificial Sequence: Synthetic oligonucleotide
  Antisense strand to SEQ ID NO: 1801913
gcugauauggaaagcucuc

SEQ ID NO: 1801915 - RNA, 19 nt, Artificial Sequence
  Description of Artificial Sequence: Synthetic oligonucleotide
  Sense strand starting at position 3369 of SEQ ID NO: 1563186
cauauugugccagaaguau

SEQ ID NO: 1801916 - RNA, 19 nt, Artificial Sequence
  Description of Artificial Sequence: Synthetic oligonucleotide
  Antisense strand to SEQ ID NO: 1801915
auacuucuggcacaauaug

SEQ ID NO: 1801917 - RNA, 19 nt, Artificial Sequence
  Description of Artificial Sequence: Synthetic oligonucleotide
  Sense strand starting at position 3419 of SEQ ID NO: 1563186
gucauuauuucuguuagua

SEQ ID NO: 1801918 - RNA, 19 nt, Artificial Sequence
  Description of Artificial Sequence: Synthetic oligonucleotide
  Antisense strand to SEQ ID NO: 1801917
uacuaacagaaauaaugac

SEQ ID NO: 1801919 - RNA, 19 nt, Artificial Sequence
  Description of Artificial Sequence: Synthetic oligonucleotide
  Sense strand starting at position 3429 of SEQ ID NO: 1563186
cuguuaguacuaugaaagg

SEQ ID NO: 1801920 - RNA, 19 nt, Artificial Sequence
  Description of Artificial Sequence: Synthetic oligonucleotide
  Antisense strand to SEQ ID NO: 1801919
ccuuucauaguacuaacag

SEQ ID NO: 1801921 - RNA, 19 nt, Artificial Sequence
  Description of Artificial Sequence: Synthetic oligonucleotide
  Sense strand starting at position 3489 of SEQ ID NO: 1563186
ggcaaauauuucuagagga

SEQ ID NO: 1801922 - RNA, 19 nt, Artificial Sequence
  Description of Artificial Sequence: Synthetic oligonucleotide
  Antisense strand to SEQ ID NO: 1801921
uccucuagaaauauuugcc

SEQ ID NO: 1801923 - RNA, 19 nt, Artificial Sequence
  Description of Artificial Sequence: Synthetic oligonucleotide
  Sense strand starting at position 3624 of SEQ ID NO: 1563186
agaucaguagauuguauga

SEQ ID NO: 1801924 - RNA, 19 nt, Artificial Sequence
  Description of Artificial Sequence: Synthetic oligonucleotide
  Antisense strand to SEQ ID NO: 1801923
ucauacaaucuacugaucu

SEQ ID NO: 1801925 - RNA, 19 nt, Artificial Sequence
  Description of Artificial Sequence: Synthetic oligonucleotide
  Sense strand starting at position 3720 of SEQ ID NO: 1563186
uggagaucucuaugugauu

SEQ ID NO: 1801926 - RNA, 19 nt, Artificial Sequence
  Description of Artificial Sequence: Synthetic oligonucleotide
  Antisense strand to SEQ ID NO: 1801925
aaucacauagagaucucca

SEQ ID NO: 1801927 - RNA, 19 nt, Artificial Sequence
  Description of Artificial Sequence: Synthetic oligonucleotide
  Sense strand starting at position 3863 of SEQ ID NO: 1563186
cugagaaggccauaagcau

SEQ ID NO: 1801928 - RNA, 19 nt, Artificial Sequence
  Description of Artificial Sequence: Synthetic oligonucleotide
  Antisense strand to SEQ ID NO: 1801927
augcuuauggccuucucag

SEQ ID NO: 1801929 - RNA, 19 nt, Artificial Sequence
  Description of Artificial Sequence: Synthetic oligonucleotide
  Sense strand starting at position 3912 of SEQ ID NO: 1563186
ucugaagaaugauacauuu

SEQ ID NO: 1801930 - RNA, 19 nt, Artificial Sequence
  Description of Artificial Sequence: Synthetic oligonucleotide
  Antisense strand to SEQ ID NO: 1801929
aaauguaucauucuucaga

SEQ ID NO: 1801931 - RNA, 19 nt, Artificial Sequence
  Description of Artificial Sequence: Synthetic oligonucleotide
  Sense strand starting at position 180 of SEQ ID NO: 1563192
uggaaacugaugugccuau

SEQ ID NO: 1801932 - RNA, 19 nt, Artificial Sequence
  Description of Artificial Sequence: Synthetic oligonucleotide
  Antisense strand to SEQ ID NO: 1801931
auaggcacaucaguuucca

SEQ ID NO: 1801933 - RNA, 19 nt, Artificial Sequence
  Description of Artificial Sequence: Synthetic oligonucleotide
  Sense strand starting at position 187 of SEQ ID NO: 1563192
ugaugugccuaucuaauag

SEQ ID NO: 1801934 - RNA, 19 nt, Artificial Sequence
  Description of Artificial Sequence: Synthetic oligonucleotide
  Antisense strand to SEQ ID NO: 1801933
cuauuagauaggcacauca

SEQ ID NO: 1801935 - RNA, 19 nt, Artificial Sequence
  Description of Artificial Sequence: Synthetic oligonucleotide
  Sense strand starting at position 197 of SEQ ID NO: 1563192
aucuaauagugaguagaca

SEQ ID NO: 1801936 - RNA, 19 nt, Artificial Sequence
  Description of Artificial Sequence: Synthetic oligonucleotide
  Antisense strand to SEQ ID NO: 1801935
ugucuacucacuauuagau

SEQ ID NO: 1801937 - RNA, 19 nt, Artificial Sequence
  Description of Artificial Sequence: Synthetic oligonucleotide
  Sense strand starting at position 619 of SEQ ID NO: 1563192
gugaguguuauacaggaac

SEQ ID NO: 1801938 - RNA, 19 nt, Artificial Sequence
  Description of Artificial Sequence: Synthetic oligonucleotide
  Antisense strand to SEQ ID NO: 1801937
guuccuguauaacacucac

SEQ ID NO: 1801939 - RNA, 19 nt, Artificial Sequence
  Description of Artificial Sequence: Synthetic oligonucleotide
  Sense strand starting at position 622 of SEQ ID NO: 1563192
aguguuauacaggaacucu

SEQ ID NO: 1801940 - RNA, 19 nt, Artificial Sequence
  Description of Artificial Sequence: Synthetic oligonucleotide
  Antisense strand to SEQ ID NO: 1801939
agaguuccuguauaacacu

SEQ ID NO: 1801941 - RNA, 19 nt, Artificial Sequence
  Description of Artificial Sequence: Synthetic oligonucleotide
  Sense strand starting at position 1147 of SEQ ID NO: 1563192
ucaugagucucuuucuuga

SEQ ID NO: 1801942 - RNA, 19 nt, Artificial Sequence
  Description of Artificial Sequence: Synthetic oligonucleotide
  Antisense strand to SEQ ID NO: 1801941
ucaagaaagagacucauga

SEQ ID NO: 1801943 - RNA, 19 nt, Artificial Sequence
  Description of Artificial Sequence: Synthetic oligonucleotide
  Sense strand starting at position 1149 of SEQ ID NO: 1563192
augagucucuuucuugaau

SEQ ID NO: 1801944 - RNA, 19 nt, Artificial Sequence
  Description of Artificial Sequence: Synthetic oligonucleotide
  Antisense strand to SEQ ID NO: 1801943
auucaagaaagagacucau

SEQ ID NO: 1801945 - RNA, 19 nt, Artificial Sequence
  Description of Artificial Sequence: Synthetic oligonucleotide
  Sense strand starting at position 1152 of SEQ ID NO: 1563192
agucucuuucuugaaugua

SEQ ID NO: 1801946 - RNA, 19 nt, Artificial Sequence
  Description of Artificial Sequence: Synthetic oligonucleotide
  Antisense strand to SEQ ID NO: 1801945
uacauucaagaaagagacu

SEQ ID NO: 1801947 - RNA, 19 nt, Artificial Sequence
  Description of Artificial Sequence: Synthetic oligonucleotide
  Sense strand starting at position 1192 of SEQ ID NO: 1563192
ggcauaauguccucuggau

SEQ ID NO: 1801948 - RNA, 19 nt, Artificial Sequence
  Description of Artificial Sequence: Synthetic oligonucleotide
  Antisense strand to SEQ ID NO: 1801947
auccagaggacauuaugcc

SEQ ID NO: 1801949 - RNA, 19 nt, Artificial Sequence
  Description of Artificial Sequence: Synthetic oligonucleotide
  Sense strand starting at position 1230 of SEQ ID NO: 1563192
ucuugcauugcuucugcua

SEQ ID NO: 1801950 - RNA, 19 nt, Artificial Sequence
  Description of Artificial Sequence: Synthetic oligonucleotide
  Antisense strand to SEQ ID NO: 1801949
uagcagaagcaaugcaaga

SEQ ID NO: 1801951 - RNA, 19 nt, Artificial Sequence
  Description of Artificial Sequence: Synthetic oligonucleotide
  Sense strand starting at position 1231 of SEQ ID NO: 1563192
cuugcauugcuucugcuau

SEQ ID NO: 1801952 - RNA, 19 nt, Artificial Sequence
  Description of Artificial Sequence: Synthetic oligonucleotide
  Antisense strand to SEQ ID NO: 1801951
auagcagaagcaaugcaag

SEQ ID NO: 1801953 - RNA, 19 nt, Artificial Sequence
  Description of Artificial Sequence: Synthetic oligonucleotide
  Sense strand starting at position 1250 of SEQ ID NO: 1563192
ggcacuauuugggauuucu

SEQ ID NO: 1801954 - RNA, 19 nt, Artificial Sequence
  Description of Artificial Sequence: Synthetic oligonucleotide
  Antisense strand to SEQ ID NO: 1801953
agaaaucccaaauagugcc

SEQ ID NO: 1801955 - RNA, 19 nt, Artificial Sequence
  Description of Artificial Sequence: Synthetic oligonucleotide
  Sense strand starting at position 1299 of SEQ ID NO: 1563192
guagcaaagccuugacaac

SEQ ID NO: 1801956 - RNA, 19 nt, Artificial Sequence
  Description of Artificial Sequence: Synthetic oligonucleotide
  Antisense strand to SEQ ID NO: 1801955
guugucaaggcuuugcuac

SEQ ID NO: 1801957 - RNA, 19 nt, Artificial Sequence
  Description of Artificial Sequence: Synthetic oligonucleotide
  Sense strand starting at position 1386 of SEQ ID NO: 1563192
cugugaugucaccaggcua

SEQ ID NO: 1801958 - RNA, 19 nt, Artificial Sequence
  Description of Artificial Sequence: Synthetic oligonucleotide
  Antisense strand to SEQ ID NO: 1801957
uagccuggugacaucacag

SEQ ID NO: 1801959 - RNA, 19 nt, Artificial Sequence
  Description of Artificial Sequence: Synthetic oligonucleotide
  Sense strand starting at position 1518 of SEQ ID NO: 1563192
guagaacccuguccugaug

SEQ ID NO: 1801960 - RNA, 19 nt, Artificial Sequence
  Description of Artificial Sequence: Synthetic oligonucleotide
  Antisense strand to SEQ ID NO: 1801959
caucaggacaggguucuac

SEQ ID NO: 1801961 - RNA, 19 nt, Artificial Sequence
  Description of Artificial Sequence: Synthetic oligonucleotide
  Sense strand starting at position 1543 of SEQ ID NO: 1563192
cgccgagaugucagaguaa

SEQ ID NO: 1801962 - RNA, 19 nt, Artificial Sequence
  Description of Artificial Sequence: Synthetic oligonucleotide
  Antisense strand to SEQ ID NO: 1801961
uuacucugacaucucggcg

SEQ ID NO: 1801963 - RNA, 19 nt, Artificial Sequence
  Description of Artificial Sequence: Synthetic oligonucleotide
  Sense strand starting at position 2160 of SEQ ID NO: 1563192
gugugucuaaccuaauggu

SEQ ID NO: 1801964 - RNA, 19 nt, Artificial Sequence
  Description of Artificial Sequence: Synthetic oligonucleotide
  Antisense strand to SEQ ID NO: 1801963
accauuagguuagacacac

SEQ ID NO: 1801965 - RNA, 19 nt, Artificial Sequence
  Description of Artificial Sequence: Synthetic oligonucleotide
  Sense strand starting at position 2220 of SEQ ID NO: 1563192
agaguauucuggccgauaa

SEQ ID NO: 1801966 - RNA, 19 nt, Artificial Sequence
  Description of Artificial Sequence: Synthetic oligonucleotide
  Antisense strand to SEQ ID NO: 1801965
uuaucggccagaauacucu

SEQ ID NO: 1801967 - RNA, 19 nt, Artificial Sequence
  Description of Artificial Sequence: Synthetic oligonucleotide
  Sense strand starting at position 2221 of SEQ ID NO: 1563192
gaguauucuggccgauaaa

SEQ ID NO: 1801968 - RNA, 19 nt, Artificial Sequence
  Description of Artificial Sequence: Synthetic oligonucleotide
  Antisense strand to SEQ ID NO: 1801967
uuuaucggccagaauacuc

SEQ ID NO: 1801969 - RNA, 19 nt, Artificial Sequence
  Description of Artificial Sequence: Synthetic oligonucleotide
  Sense strand starting at position 2222 of SEQ ID NO: 1563192
aguauucuggccgauaaau

SEQ ID NO: 1801970 - RNA, 19 nt, Artificial Sequence
  Description of Artificial Sequence: Synthetic oligonucleotide
  Antisense strand to SEQ ID NO: 1801969
auuuaucggccagaauacu

SEQ ID NO: 1801971 - RNA, 19 nt, Artificial Sequence
  Description of Artificial Sequence: Synthetic oligonucleotide
  Sense strand starting at position 2232 of SEQ ID NO: 1563192
ccgauaaaucccuggcuac

SEQ ID NO: 1801972 - RNA, 19 nt, Artificial Sequence
  Description of Artificial Sequence: Synthetic oligonucleotide
  Antisense strand to SEQ ID NO: 1801971
guagccagggauuuaucgg

SEQ ID NO: 1801973 - RNA, 19 nt, Artificial Sequence
  Description of Artificial Sequence: Synthetic oligonucleotide
  Sense strand starting at position 2233 of SEQ ID NO: 1563192
cgauaaaucccuggcuacu

SEQ ID NO: 1801974 - RNA, 19 nt, Artificial Sequence
  Description of Artificial Sequence: Synthetic oligonucleotide
  Antisense strand to SEQ ID NO: 1801973
aguagccagggauuuaucg

SEQ ID NO: 1801975 - RNA, 19 nt, Artificial Sequence
  Description of Artificial Sequence: Synthetic oligonucleotide
  Sense strand starting at position 2492 of SEQ ID NO: 1563192
uggauaguucuagaacguc

SEQ ID NO: 1801976 - RNA, 19 nt, Artificial Sequence
  Description of Artificial Sequence: Synthetic oligonucleotide
  Antisense strand to SEQ ID NO: 1801975
gacguucuagaacuaucca

SEQ ID NO: 1801977 - RNA, 19 nt, Artificial Sequence
  Description of Artificial Sequence: Synthetic oligonucleotide
  Sense strand starting at position 2702 of SEQ ID NO: 1563192
ccgauuacaaauuguggua

SEQ ID NO: 1801978 - RNA, 19 nt, Artificial Sequence
  Description of Artificial Sequence: Synthetic oligonucleotide
  Antisense strand to SEQ ID NO: 1801977
uaccacaauuuguaaucgg

SEQ ID NO: 1801979 - RNA, 19 nt, Artificial Sequence
  Description of Artificial Sequence: Synthetic oligonucleotide
  Sense strand starting at position 2717 of SEQ ID NO: 1563192
gguaaauacucggcagaga

SEQ ID NO: 1801980 - RNA, 19 nt, Artificial Sequence
  Description of Artificial Sequence: Synthetic oligonucleotide
  Antisense strand to SEQ ID NO: 1801979
ucucugccgaguauuuacc

SEQ ID NO: 1801981 - RNA, 19 nt, Artificial Sequence
  Description of Artificial Sequence: Synthetic oligonucleotide
  Sense strand starting at position 2718 of SEQ ID NO: 1563192
guaaauacucggcagagaa

SEQ ID NO: 1801982 - RNA, 19 nt, Artificial Sequence
  Description of Artificial Sequence: Synthetic oligonucleotide
  Antisense strand to SEQ ID NO: 1801981
uucucugccgaguauuuac

SEQ ID NO: 1801983 - RNA, 19 nt, Artificial Sequence
  Description of Artificial Sequence: Synthetic oligonucleotide
  Sense strand starting at position 2720 of SEQ ID NO: 1563192
aaauacucggcagagaagu

SEQ ID NO: 1801984 - RNA, 19 nt, Artificial Sequence
  Description of Artificial Sequence: Synthetic oligonucleotide
  Antisense strand to SEQ ID NO: 1801983
acuucucugccgaguauuu

SEQ ID NO: 1801985 - RNA, 19 nt, Artificial Sequence
  Description of Artificial Sequence: Synthetic oligonucleotide
  Sense strand starting at position 2789 of SEQ ID NO: 1563192
gacugucguuaauuggaaa

SEQ ID NO: 1801986 - RNA, 19 nt, Artificial Sequence
  Description of Artificial Sequence: Synthetic oligonucleotide
  Antisense strand to SEQ ID NO: 1801985
uuuccaauuaacgacaguc

SEQ ID NO: 1801987 - RNA, 19 nt, Artificial Sequence
  Description of Artificial Sequence: Synthetic oligonucleotide
  Sense strand starting at position 2822 of SEQ ID NO: 1563192
agggaagguuaguuagacu

SEQ ID NO: 1801988 - RNA, 19 nt, Artificial Sequence
  Description of Artificial Sequence: Synthetic oligonucleotide
  Antisense strand to SEQ ID NO: 1801987
agucuaacuaaccuucccu

SEQ ID NO: 1801989 - RNA, 19 nt, Artificial Sequence
  Description of Artificial Sequence: Synthetic oligonucleotide
  Sense strand starting at position 2830 of SEQ ID NO: 1563192
uuaguuagacuuugaagca

SEQ ID NO: 1801990 - RNA, 19 nt, Artificial Sequence
  Description of Artificial Sequence: Synthetic oligonucleotide
  Antisense strand to SEQ ID NO: 1801989
ugcuucaaagucuaacuaa

SEQ ID NO: 1801991 - RNA, 19 nt, Artificial Sequence
  Description of Artificial Sequence: Synthetic oligonucleotide
  Sense strand starting at position 3010 of SEQ ID NO: 1563192
uggccuuguguuucgcaga

SEQ ID NO: 1801992 - RNA, 19 nt, Artificial Sequence
  Description of Artificial Sequence: Synthetic oligonucleotide
  Antisense strand to SEQ ID NO: 1801991
ucugcgaaacacaaggcca

SEQ ID NO: 1801993 - RNA, 19 nt, Artificial Sequence
  Description of Artificial Sequence: Synthetic oligonucleotide
  Sense strand starting at position 3089 of SEQ ID NO: 1563192
gggagagaauuagaaauca

SEQ ID NO: 1801994 - RNA, 19 nt, Artificial Sequence
  Description of Artificial Sequence: Synthetic oligonucleotide
  Antisense strand to SEQ ID NO: 1801993
ugauuucuaauucucuccc

SEQ ID NO: 1801995 - RNA, 19 nt, Artificial Sequence
  Description of Artificial Sequence: Synthetic oligonucleotide
  Sense strand starting at position 3166 of SEQ ID NO: 1563192
aucuuuaccugguuuacuu

SEQ ID NO: 1801996 - RNA, 19 nt, Artificial Sequence
  Description of Artificial Sequence: Synthetic oligonucleotide
  Antisense strand to SEQ ID NO: 1801995
aaguaaaccagguaaagau

SEQ ID NO: 1801997 - RNA, 19 nt, Artificial Sequence
  Description of Artificial Sequence: Synthetic oligonucleotide
  Sense strand starting at position 3189 of SEQ ID NO: 1563192
auggucuggugauauuuaa

SEQ ID NO: 1801998 - RNA, 19 nt, Artificial Sequence
  Description of Artificial Sequence: Synthetic oligonucleotide
  Antisense strand to SEQ ID NO: 1801997
uuaaauaucaccagaccau

SEQ ID NO: 1801999 - RNA, 19 nt, Artificial Sequence
  Description of Artificial Sequence: Synthetic oligonucleotide
  Sense strand starting at position 3426 of SEQ ID NO: 1563192
ugaauacagaccggauauu

SEQ ID NO: 1802000 - RNA, 19 nt, Artificial Sequence
  Description of Artificial Sequence: Synthetic oligonucleotide
  Antisense strand to SEQ ID NO: 1801999
aauauccggucuguauuca

SEQ ID NO: 1802001 - RNA, 19 nt, Artificial Sequence
  Description of Artificial Sequence: Synthetic oligonucleotide
  Sense strand starting at position 3450 of SEQ ID NO: 1563192
uucuaaaggaguuaguguu

SEQ ID NO: 1802002 - RNA, 19 nt, Artificial Sequence
  Description of Artificial Sequence: Synthetic oligonucleotide
  Antisense strand to SEQ ID NO: 1802001
aacacuaacuccuuuagaa

SEQ ID NO: 1802003 - RNA, 19 nt, Artificial Sequence
  Description of Artificial Sequence: Synthetic oligonucleotide
  Sense strand starting at position 3480 of SEQ ID NO: 1563192
guguaauaauggucucaua

SEQ ID NO: 1802004 - RNA, 19 nt, Artificial Sequence
  Description of Artificial Sequence: Synthetic oligonucleotide
  Antisense strand to SEQ ID NO: 1802003
uaugagaccauuauuacac

SEQ ID NO: 1802005 - RNA, 19 nt, Artificial Sequence
  Description of Artificial Sequence: Synthetic oligonucleotide
  Sense strand starting at position 3488 of SEQ ID NO: 1563192
auggucucauaguuauaua

SEQ ID NO: 1802006 - RNA, 19 nt, Artificial Sequence
  Description of Artificial Sequence: Synthetic oligonucleotide
  Antisense strand to SEQ ID NO: 1802005
uauauaacuaugagaccau

SEQ ID NO: 1802007 - RNA, 19 nt, Artificial Sequence
  Description of Artificial Sequence: Synthetic oligonucleotide
  Sense strand starting at position 3629 of SEQ ID NO: 1563192
uguuaaaucuaagcaguag

SEQ ID NO: 1802008 - RNA, 19 nt, Artificial Sequence
  Description of Artificial Sequence: Synthetic oligonucleotide
  Antisense strand to SEQ ID NO: 1802007
cuacugcuuagauuuaaca

SEQ ID NO: 1802009 - RNA, 19 nt, Artificial Sequence
  Description of Artificial Sequence: Synthetic oligonucleotide
  Sense strand starting at position 3735 of SEQ ID NO: 1563192
ggcuaagaaguauagcagu

SEQ ID NO: 1802010 - RNA, 19 nt, Artificial Sequence
  Description of Artificial Sequence: Synthetic oligonucleotide
  Antisense strand to SEQ ID NO: 1802009
acugcuauacuucuuagcc

SEQ ID NO: 1802011 - RNA, 19 nt, Artificial Sequence
  Description of Artificial Sequence: Synthetic oligonucleotide
  Sense strand starting at position 22 of SEQ ID NO: 1563193
agugaucguccuuaaauaa

SEQ ID NO: 1802012 - RNA, 19 nt, Artificial Sequence
  Description of Artificial Sequence: Synthetic oligonucleotide
  Antisense strand to SEQ ID NO: 1802011
uuauuuaaggacgaucacu

SEQ ID NO: 1802013 - RNA, 19 nt, Artificial Sequence
  Description of Artificial Sequence: Synthetic oligonucleotide
  Sense strand starting at position 128 of SEQ ID NO: 1563193
acaaauaacccucaguguu

SEQ ID NO: 1802014 - RNA, 19 nt, Artificial Sequence
  Description of Artificial Sequence: Synthetic oligonucleotide
  Antisense strand to SEQ ID NO: 1802013
aacacugaggguuauuugu

SEQ ID NO: 1802015 - RNA, 19 nt, Artificial Sequence
  Description of Artificial Sequence: Synthetic oligonucleotide
  Sense strand starting at position 268 of SEQ ID NO: 1563193
augcaaagcuacuuggauu

SEQ ID NO: 1802016 - RNA, 19 nt, Artificial Sequence
  Description of Artificial Sequence: Synthetic oligonucleotide
  Antisense strand to SEQ ID NO: 1802015
aauccaaguagcuuugcau

SEQ ID NO: 1802017 - RNA, 19 nt, Artificial Sequence
  Description of Artificial Sequence: Synthetic oligonucleotide
  Sense strand starting at position 276 of SEQ ID NO: 1563193
cuacuuggauuaucagcaa

SEQ ID NO: 1802018 - RNA, 19 nt, Artificial Sequence
  Description of Artificial Sequence: Synthetic oligonucleotide
  Antisense strand to SEQ ID NO: 1802017
uugcugauaauccaaguag

SEQ ID NO: 1802019 - RNA, 19 nt, Artificial Sequence
  Description of Artificial Sequence: Synthetic oligonucleotide
  Sense strand starting at position 279 of SEQ ID NO: 1563193
cuuggauuaucagcaaaua

SEQ ID NO: 1802020 - RNA, 19 nt, Artificial Sequence
  Description of Artificial Sequence: Synthetic oligonucleotide
  Antisense strand to SEQ ID NO: 1802019
uauuugcugauaauccaag

SEQ ID NO: 1802021 - RNA, 19 nt, Artificial Sequence
  Description of Artificial Sequence: Synthetic oligonucleotide
  Sense strand starting at position 427 of SEQ ID NO: 1563193
ucugaagacuuggcaauga

SEQ ID NO: 1802022 - RNA, 19 nt, Artificial Sequence
  Description of Artificial Sequence: Synthetic oligonucleotide
  Antisense strand to SEQ ID NO: 1802021
ucauugccaagucuucaga

SEQ ID NO: 1802023 - RNA, 19 nt, Artificial Sequence
  Description of Artificial Sequence: Synthetic oligonucleotide
  Sense strand starting at position 486 of SEQ ID NO: 1563193
uucucugaagcaggaauau

SEQ ID NO: 1802024 - RNA, 19 nt, Artificial Sequence
  Description of Artificial Sequence: Synthetic oligonucleotide
  Antisense strand to SEQ ID NO: 1802023
auauuccugcuucagagaa

SEQ ID NO: 1802025 - RNA, 19 nt, Artificial Sequence
  Description of Artificial Sequence: Synthetic oligonucleotide
  Sense strand starting at position 659 of SEQ ID NO: 1563193
aggaaacauuuccagugua

SEQ ID NO: 1802026 - RNA, 19 nt, Artificial Sequence
  Description of Artificial Sequence: Synthetic oligonucleotide
  Antisense strand to SEQ ID NO: 1802025
uacacuggaaauguuuccu

SEQ ID NO: 1802027 - RNA, 19 nt, Artificial Sequence
  Description of Artificial Sequence: Synthetic oligonucleotide
  Sense strand starting at position 716 of SEQ ID NO: 1563193
ggucaaauugcugagguuu

SEQ ID NO: 1802028 - RNA, 19 nt, Artificial Sequence
  Description of Artificial Sequence: Synthetic oligonucleotide
  Antisense strand to SEQ ID NO: 1802027
aaaccucagcaauuugacc

SEQ ID NO: 1802029 - RNA, 19 nt, Artificial Sequence
  Description of Artificial Sequence: Synthetic oligonucleotide
  Sense strand starting at position 915 of SEQ ID NO: 1563193
uguguuguucugccuuuaa

SEQ ID NO: 1802030 - RNA, 19 nt, Artificial Sequence
  Description of Artificial Sequence: Synthetic oligonucleotide
  Antisense strand to SEQ ID NO: 1802029
uuaaaggcagaacaacaca

SEQ ID NO: 1802031 - RNA, 19 nt, Artificial Sequence
  Description of Artificial Sequence: Synthetic oligonucleotide
  Sense strand starting at position 1150 of SEQ ID NO: 1563193
ccaugaggauuuggauaag

SEQ ID NO: 1802032 - RNA, 19 nt, Artificial Sequence
  Description of Artificial Sequence: Synthetic oligonucleotide
  Antisense strand to SEQ ID NO: 1802031
cuuauccaaauccucaugg

SEQ ID NO: 1802033 - RNA, 19 nt, Artificial Sequence
  Description of Artificial Sequence: Synthetic oligonucleotide
  Sense strand starting at position 1322 of SEQ ID NO: 1563193
cagaaauuguggcucuaaa

SEQ ID NO: 1802034 - RNA, 19 nt, Artificial Sequence
  Description of Artificial Sequence: Synthetic oligonucleotide
  Antisense strand to SEQ ID NO: 1802033
uuuagagccacaauuucug

SEQ ID NO: 1802035 - RNA, 19 nt, Artificial Sequence
  Description of Artificial Sequence: Synthetic oligonucleotide
  Sense strand starting at position 1356 of SEQ ID NO: 1563193
ucauuaaaggauugcuaau

SEQ ID NO: 1802036 - RNA, 19 nt, Artificial Sequence
  Description of Artificial Sequence: Synthetic oligonucleotide
  Antisense strand to SEQ ID NO: 1802035
auuagcaauccuuuaauga

SEQ ID NO: 1802037 - RNA, 19 nt, Artificial Sequence
  Description of Artificial Sequence: Synthetic oligonucleotide
  Sense strand starting at position 1459 of SEQ ID NO: 1563193
uuccauuuauaggaaguaa

SEQ ID NO: 1802038 - RNA, 19 nt, Artificial Sequence
  Description of Artificial Sequence: Synthetic oligonucleotide
  Antisense strand to SEQ ID NO: 1802037
uuacuuccuauaaauggaa

SEQ ID NO: 1802039 - RNA, 19 nt, Artificial Sequence
  Description of Artificial Sequence: Synthetic oligonucleotide
  Sense strand starting at position 1948 of SEQ ID NO: 1563193
gagaaugcugcagauuauc

SEQ ID NO: 1802040 - RNA, 19 nt, Artificial Sequence
  Description of Artificial Sequence: Synthetic oligonucleotide
  Antisense strand to SEQ ID NO: 1802039
gauaaucugcagcauucuc

SEQ ID NO: 1802041 - RNA, 19 nt, Artificial Sequence
  Description of Artificial Sequence: Synthetic oligonucleotide
  Sense strand starting at position 1994 of SEQ ID NO: 1563193
cuuguaaaguuucccagaa

SEQ ID NO: 1802042 - RNA, 19 nt, Artificial Sequence
  Description of Artificial Sequence: Synthetic oligonucleotide
  Antisense strand to SEQ ID NO: 1802041
uucugggaaacuuuacaag

SEQ ID NO: 1802043 - RNA, 19 nt, Artificial Sequence
  Description of Artificial Sequence: Synthetic oligonucleotide
  Sense strand starting at position 1995 of SEQ ID NO: 1563193
uuguaaaguuucccagaac

SEQ ID NO: 1802044 - RNA, 19 nt, Artificial Sequence
  Description of Artificial Sequence: Synthetic oligonucleotide
  Antisense strand to SEQ ID NO: 1802043
guucugggaaacuuuacaa

SEQ ID NO: 1802045 - RNA, 19 nt, Artificial Sequence
  Description of Artificial Sequence: Synthetic oligonucleotide
  Sense strand starting at position 2073 of SEQ ID NO: 1563193
ggaagcaucagaugacagu

SEQ ID NO: 1802046 - RNA, 19 nt, Artificial Sequence
  Description of Artificial Sequence: Synthetic oligonucleotide
  Antisense strand to SEQ ID NO: 1802045
acugucaucugaugcuucc

SEQ ID NO: 1802047 - RNA, 19 nt, Artificial Sequence
  Description of Artificial Sequence: Synthetic oligonucleotide
  Sense strand starting at position 2087 of SEQ ID NO: 1563193
acagucuauuccuuaagag

SEQ ID NO: 1802048 - RNA, 19 nt, Artificial Sequence
  Description of Artificial Sequence: Synthetic oligonucleotide
  Antisense strand to SEQ ID NO: 1802047
cucuuaaggaauagacugu

SEQ ID NO: 1802049 - RNA, 19 nt, Artificial Sequence
  Description of Artificial Sequence: Synthetic oligonucleotide
  Sense strand starting at position 2096 of SEQ ID NO: 1563193
uccuuaagagcucaaagca

SEQ ID NO: 1802050 - RNA, 19 nt, Artificial Sequence
  Description of Artificial Sequence: Synthetic oligonucleotide
  Antisense strand to SEQ ID NO: 1802049
ugcuuugagcucuuaagga

SEQ ID NO: 1802051 - RNA, 19 nt, Artificial Sequence
  Description of Artificial Sequence: Synthetic oligonucleotide
  Sense strand starting at position 2182 of SEQ ID NO: 1563193
cugauuugccuuuguaacu

SEQ ID NO: 1802052 - RNA, 19 nt, Artificial Sequence
  Description of Artificial Sequence: Synthetic oligonucleotide
  Antisense strand to SEQ ID NO: 1802051
aguuacaaaggcaaaucag

SEQ ID NO: 1802053 - RNA, 19 nt, Artificial Sequence
  Description of Artificial Sequence: Synthetic oligonucleotide
  Sense strand starting at position 2183 of SEQ ID NO: 1563193
ugauuugccuuuguaacuu

SEQ ID NO: 1802054 - RNA, 19 nt, Artificial Sequence
  Description of Artificial Sequence: Synthetic oligonucleotide
  Antisense strand to SEQ ID NO: 1802053
aaguuacaaaggcaaauca

SEQ ID NO: 1802055 - RNA, 19 nt, Artificial Sequence
  Description of Artificial Sequence: Synthetic oligonucleotide
  Sense strand starting at position 2258 of SEQ ID NO: 1563193
uuuccucaucuugggaagu

SEQ ID NO: 1802056 - RNA, 19 nt, Artificial Sequence
  Description of Artificial Sequence: Synthetic oligonucleotide
  Antisense strand to SEQ ID NO: 1802055
acuucccaagaugaggaaa

SEQ ID NO: 1802057 - RNA, 19 nt, Artificial Sequence
  Description of Artificial Sequence: Synthetic oligonucleotide
  Sense strand starting at position 2333 of SEQ ID NO: 1563193
auaagcuucggaggaaagu

SEQ ID NO: 1802058 - RNA, 19 nt, Artificial Sequence
  Description of Artificial Sequence: Synthetic oligonucleotide
  Antisense strand to SEQ ID NO: 1802057
acuuuccuccgaagcuuau

SEQ ID NO: 1802059 - RNA, 19 nt, Artificial Sequence
  Description of Artificial Sequence: Synthetic oligonucleotide
  Sense strand starting at position 2334 of SEQ ID NO: 1563193
uaagcuucggaggaaaguu

SEQ ID NO: 1802060 - RNA, 19 nt, Artificial Sequence
  Description of Artificial Sequence: Synthetic oligonucleotide
  Antisense strand to SEQ ID NO: 1802059
aacuuuccuccgaagcuua

SEQ ID NO: 1802061 - RNA, 19 nt, Artificial Sequence
  Description of Artificial Sequence: Synthetic oligonucleotide
  Sense strand starting at position 2416 of SEQ ID NO: 1563193
guuucuccacccuaagagu

SEQ ID NO: 1802062 - RNA, 19 nt, Artificial Sequence
  Description of Artificial Sequence: Synthetic oligonucleotide
  Antisense strand to SEQ ID NO: 1802061
acucuuaggguggagaaac

SEQ ID NO: 1802063 - RNA, 19 nt, Artificial Sequence
  Description of Artificial Sequence: Synthetic oligonucleotide
  Sense strand starting at position 2425 of SEQ ID NO: 1563193
cccuaagagucacuguaau

SEQ ID NO: 1802064 - RNA, 19 nt, Artificial Sequence
  Description of Artificial Sequence: Synthetic oligonucleotide
  Antisense strand to SEQ ID NO: 1802063
auuacagugacucuuaggg

SEQ ID NO: 1802065 - RNA, 19 nt, Artificial Sequence
  Description of Artificial Sequence: Synthetic oligonucleotide
  Sense strand starting at position 2491 of SEQ ID NO: 1563193
augguuuauguggaaaggu

SEQ ID NO: 1802066 - RNA, 19 nt, Artificial Sequence
  Description of Artificial Sequence: Synthetic oligonucleotide
  Antisense strand to SEQ ID NO: 1802065
accuuuccacauaaaccau

SEQ ID NO: 1802067 - RNA, 19 nt, Artificial Sequence
  Description of Artificial Sequence: Synthetic oligonucleotide
  Sense strand starting at position 2508 of SEQ ID NO: 1563193
gucccuuagggauggaaga

SEQ ID NO: 1802068 - RNA, 19 nt, Artificial Sequence
  Description of Artificial Sequence: Synthetic oligonucleotide
  Antisense strand to SEQ ID NO: 1802067
ucuuccaucccuaagggac

SEQ ID NO: 1802069 - RNA, 19 nt, Artificial Sequence
  Description of Artificial Sequence: Synthetic oligonucleotide
  Sense strand starting at position 2563 of SEQ ID NO: 1563193
guuauaucucagcagccaa

SEQ ID NO: 1802070 - RNA, 19 nt, Artificial Sequence
  Description of Artificial Sequence: Synthetic oligonucleotide
  Antisense strand to SEQ ID NO: 1802069
uuggcugcugagauauaac

SEQ ID NO: 1802071 - RNA, 19 nt, Artificial Sequence
  Description of Artificial Sequence: Synthetic oligonucleotide
  Sense strand starting at position 2839 of SEQ ID NO: 1563193
aagugauguuuccuagaaa

SEQ ID NO: 1802072 - RNA, 19 nt, Artificial Sequence
  Description of Artificial Sequence: Synthetic oligonucleotide
  Antisense strand to SEQ ID NO: 1802071
uuucuaggaaacaucacuu

SEQ ID NO: 1802073 - RNA, 19 nt, Artificial Sequence
  Description of Artificial Sequence: Synthetic oligonucleotide
  Sense strand starting at position 2842 of SEQ ID NO: 1563193
ugauguuuccuagaaaggu

SEQ ID NO: 1802074 - RNA, 19 nt, Artificial Sequence
  Description of Artificial Sequence: Synthetic oligonucleotide
  Antisense strand to SEQ ID NO: 1802073
accuuucuaggaaacauca

SEQ ID NO: 1802075 - RNA, 19 nt, Artificial Sequence
  Description of Artificial Sequence: Synthetic oligonucleotide
  Sense strand starting at position 3071 of SEQ ID NO: 1563193
cauggcuuaguugaauaaa

SEQ ID NO: 1802076 - RNA, 19 nt, Artificial Sequence
  Description of Artificial Sequence: Synthetic oligonucleotide
  Antisense strand to SEQ ID NO: 1802075
uuuauucaacuaagccaug

SEQ ID NO: 1802077 - RNA, 19 nt, Artificial Sequence
  Description of Artificial Sequence: Synthetic oligonucleotide
  Sense strand starting at position 3476 of SEQ ID NO: 1563193
caguuaugacucugagaaa

SEQ ID NO: 1802078 - RNA, 19 nt, Artificial Sequence
  Description of Artificial Sequence: Synthetic oligonucleotide
  Antisense strand to SEQ ID NO: 1802077
uuucucagagucauaacug

SEQ ID NO: 1802079 - RNA, 19 nt, Artificial Sequence
  Description of Artificial Sequence: Synthetic oligonucleotide
  Sense strand starting at position 3595 of SEQ ID NO: 1563193
gacugcuuacagcaggauu

SEQ ID NO: 1802080 - RNA, 19 nt, Artificial Sequence
  Description of Artificial Sequence: Synthetic oligonucleotide
  Antisense strand to SEQ ID NO: 1802079
aauccugcuguaagcaguc

SEQ ID NO: 1802081 - RNA, 19 nt, Artificial Sequence
  Description of Artificial Sequence: Synthetic oligonucleotide
  Sense strand starting at position 3646 of SEQ ID NO: 1563193
uguaaacuauucgcaggaa

SEQ ID NO: 1802082 - RNA, 19 nt, Artificial Sequence
  Description of Artificial Sequence: Synthetic oligonucleotide
  Antisense strand to SEQ ID NO: 1802081
uuccugcgaauaguuuaca

SEQ ID NO: 1802083 - RNA, 19 nt, Artificial Sequence
  Description of Artificial Sequence: Synthetic oligonucleotide
  Sense strand starting at position 3667 of SEQ ID NO: 1563193
aaggaugagguuugcagau

SEQ ID NO: 1802084 - RNA, 19 nt, Artificial Sequence
  Description of Artificial Sequence: Synthetic oligonucleotide
  Antisense strand to SEQ ID NO: 1802083
aucugcaaaccucauccuu

SEQ ID NO: 1802085 - RNA, 19 nt, Artificial Sequence
  Description of Artificial Sequence: Synthetic oligonucleotide
  Sense strand starting at position 3739 of SEQ ID NO: 1563193
aggcaacguccucaacaua

SEQ ID NO: 1802086 - RNA, 19 nt, Artificial Sequence
  Description of Artificial Sequence: Synthetic oligonucleotide
  Antisense strand to SEQ ID NO: 1802085
uauguugaggacguugccu

SEQ ID NO: 1802087 - RNA, 19 nt, Artificial Sequence
  Description of Artificial Sequence: Synthetic oligonucleotide
  Sense strand starting at position 3791 of SEQ ID NO: 1563193
aguuucuggcucuacagaa

SEQ ID NO: 1802088 - RNA, 19 nt, Artificial Sequence
  Description of Artificial Sequence: Synthetic oligonucleotide
  Antisense strand to SEQ ID NO: 1802087
uucuguagagccagaaacu

SEQ ID NO: 1802089 - RNA, 19 nt, Artificial Sequence
  Description of Artificial Sequence: Synthetic oligonucleotide
  Sense strand starting at position 3853 of SEQ ID NO: 1563193
gaugaauuaugguccacua

SEQ ID NO: 1802090 - RNA, 19 nt, Artificial Sequence
  Description of Artificial Sequence: Synthetic oligonucleotide
  Antisense strand to SEQ ID NO: 1802089
uaguggaccauaauucauc

SEQ ID NO: 1802091 - RNA, 19 nt, Artificial Sequence
  Description of Artificial Sequence: Synthetic oligonucleotide
  Sense strand starting at position 68 of SEQ ID NO: 1563194
ugagcuuuacuuuaggaac

SEQ ID NO: 1802092 - RNA, 19 nt, Artificial Sequence
  Description of Artificial Sequence: Synthetic oligonucleotide
  Antisense strand to SEQ ID NO: 1802091
guuccuaaaguaaagcuca

SEQ ID NO: 1802093 - RNA, 19 nt, Artificial Sequence
  Description of Artificial Sequence: Synthetic oligonucleotide
  Sense strand starting at position 237 of SEQ ID NO: 1563194
ugguaaugagaaugcuuau

SEQ ID NO: 1802094 - RNA, 19 nt, Artificial Sequence
  Description of Artificial Sequence: Synthetic oligonucleotide
  Antisense strand to SEQ ID NO: 1802093
auaagcauucucauuacca

SEQ ID NO: 1802095 - RNA, 19 nt, Artificial Sequence
  Description of Artificial Sequence: Synthetic oligonucleotide
  Sense strand starting at position 243 of SEQ ID NO: 1563194
ugagaaugcuuaucccuaa

SEQ ID NO: 1802096 - RNA, 19 nt, Artificial Sequence
  Description of Artificial Sequence: Synthetic oligonucleotide
  Antisense strand to SEQ ID NO: 1802095
uuagggauaagcauucuca

SEQ ID NO: 1802097 - RNA, 19 nt, Artificial Sequence
  Description of Artificial Sequence: Synthetic oligonucleotide
  Sense strand starting at position 354 of SEQ ID NO: 1563194
ucaucagguuucccugaaa

SEQ ID NO: 1802098 - RNA, 19 nt, Artificial Sequence
  Description of Artificial Sequence: Synthetic oligonucleotide
  Antisense strand to SEQ ID NO: 1802097
uuucagggaaaccugauga

SEQ ID NO: 1802099 - RNA, 19 nt, Artificial Sequence
  Description of Artificial Sequence: Synthetic oligonucleotide
  Sense strand starting at position 476 of SEQ ID NO: 1563194
uuaaauuugugcucugcaa

SEQ ID NO: 1802100 - RNA, 19 nt, Artificial Sequence
  Description of Artificial Sequence: Synthetic oligonucleotide
  Antisense strand to SEQ ID NO: 1802099
uugcagagcacaaauuuaa

SEQ ID NO: 1802101 - RNA, 19 nt, Artificial Sequence
  Description of Artificial Sequence: Synthetic oligonucleotide
  Sense strand starting at position 478 of SEQ ID NO: 1563194
aaauuugugcucugcaaag

SEQ ID NO: 1802102 - RNA, 19 nt, Artificial Sequence
  Description of Artificial Sequence: Synthetic oligonucleotide
  Antisense strand to SEQ ID NO: 1802101
cuuugcagagcacaaauuu

SEQ ID NO: 1802103 - RNA, 19 nt, Artificial Sequence
  Description of Artificial Sequence: Synthetic oligonucleotide
  Sense strand starting at position 512 of SEQ ID NO: 1563194
guguuuauacaccauaaac

SEQ ID NO: 1802104 - RNA, 19 nt, Artificial Sequence
  Description of Artificial Sequence: Synthetic oligonucleotide
  Antisense strand to SEQ ID NO: 1802103
guuuaugguguauaaacac

SEQ ID NO: 1802105 - RNA, 19 nt, Artificial Sequence
  Description of Artificial Sequence: Synthetic oligonucleotide
  Sense strand starting at position 813 of SEQ ID NO: 1563194
agagaagcccucuguagau

SEQ ID NO: 1802106 - RNA, 19 nt, Artificial Sequence
  Description of Artificial Sequence: Synthetic oligonucleotide
  Antisense strand to SEQ ID NO: 1802105
aucuacagagggcuucucu

SEQ ID NO: 1802107 - RNA, 19 nt, Artificial Sequence
  Description of Artificial Sequence: Synthetic oligonucleotide
  Sense strand starting at position 825 of SEQ ID NO: 1563194
uguagauugauaggagguu

SEQ ID NO: 1802108 - RNA, 19 nt, Artificial Sequence
  Description of Artificial Sequence: Synthetic oligonucleotide
  Antisense strand to SEQ ID NO: 1802107
aaccuccuaucaaucuaca

SEQ ID NO: 1802109 - RNA, 19 nt, Artificial Sequence
  Description of Artificial Sequence: Synthetic oligonucleotide
  Sense strand starting at position 1077 of SEQ ID NO: 1563194
uguaauacacccuggaaau

SEQ ID NO: 1802110 - RNA, 19 nt, Artificial Sequence
  Description of Artificial Sequence: Synthetic oligonucleotide
  Antisense strand to SEQ ID NO: 1802109
auuuccaggguguauuaca

SEQ ID NO: 1802111 - RNA, 19 nt, Artificial Sequence
  Description of Artificial Sequence: Synthetic oligonucleotide
  Sense strand starting at position 1193 of SEQ ID NO: 1563194
agaugcauucugcaaauac

SEQ ID NO: 1802112 - RNA, 19 nt, Artificial Sequence
  Description of Artificial Sequence: Synthetic oligonucleotide
  Antisense strand to SEQ ID NO: 1802111
guauuugcagaaugcaucu

SEQ ID NO: 1802113 - RNA, 19 nt, Artificial Sequence
  Description of Artificial Sequence: Synthetic oligonucleotide
  Sense strand starting at position 1225 of SEQ ID NO: 1563194
caagauuagcagugaggau

SEQ ID NO: 1802114 - RNA, 19 nt, Artificial Sequence
  Description of Artificial Sequence: Synthetic oligonucleotide
  Antisense strand to SEQ ID NO: 1802113
auccucacugcuaaucuug

SEQ ID NO: 1802115 - RNA, 19 nt, Artificial Sequence
  Description of Artificial Sequence: Synthetic oligonucleotide
  Sense strand starting at position 1505 of SEQ ID NO: 1563194
uuggcuaaauuucuugcua

SEQ ID NO: 1802116 - RNA, 19 nt, Artificial Sequence
  Description of Artificial Sequence: Synthetic oligonucleotide
  Antisense strand to SEQ ID NO: 1802115
uagcaagaaauuuagccaa

SEQ ID NO: 1802117 - RNA, 19 nt, Artificial Sequence
  Description of Artificial Sequence: Synthetic oligonucleotide
  Sense strand starting at position 1506 of SEQ ID NO: 1563194
uggcuaaauuucuugcuau

SEQ ID NO: 1802118 - RNA, 19 nt, Artificial Sequence
  Description of Artificial Sequence: Synthetic oligonucleotide
  Antisense strand to SEQ ID NO: 1802117
auagcaagaaauuuagcca

SEQ ID NO: 1802119 - RNA, 19 nt, Artificial Sequence
  Description of Artificial Sequence: Synthetic oligonucleotide
  Sense strand starting at position 2091 of SEQ ID NO: 1563194
ggcuccuucccugaaucaa

SEQ ID NO: 1802120 - RNA, 19 nt, Artificial Sequence
  Description of Artificial Sequence: Synthetic oligonucleotide
  Antisense strand to SEQ ID NO: 1802119
uugauucagggaaggagcc

SEQ ID NO: 1802121 - RNA, 19 nt, Artificial Sequence
  Description of Artificial Sequence: Synthetic oligonucleotide
  Sense strand starting at position 2154 of SEQ ID NO: 1563194
ggagauauucugggucacg

SEQ ID NO: 1802122 - RNA, 19 nt, Artificial Sequence
  Description of Artificial Sequence: Synthetic oligonucleotide
  Antisense strand to SEQ ID NO: 1802121
cgugacccagaauaucucc

SEQ ID NO: 1802123 - RNA, 19 nt, Artificial Sequence
  Description of Artificial Sequence: Synthetic oligonucleotide
  Sense strand starting at position 2155 of SEQ ID NO: 1563194
gagauauucugggucacga

SEQ ID NO: 1802124 - RNA, 19 nt, Artificial Sequence
  Description of Artificial Sequence: Synthetic oligonucleotide
  Antisense strand to SEQ ID NO: 1802123
ucgugacccagaauaucuc

SEQ ID NO: 1802125 - RNA, 19 nt, Artificial Sequence
  Description of Artificial Sequence: Synthetic oligonucleotide
  Sense strand starting at position 2232 of SEQ ID NO: 1563194
cagcgcuugagauaugaug

SEQ ID NO: 1802126 - RNA, 19 nt, Artificial Sequence
  Description of Artificial Sequence: Synthetic oligonucleotide
  Antisense strand to SEQ ID NO: 1802125
caucauaucucaagcgcug

SEQ ID NO: 1802127 - RNA, 19 nt, Artificial Sequence
  Description of Artificial Sequence: Synthetic oligonucleotide
  Sense strand starting at position 2258 of SEQ ID NO: 1563194
uggaaaucuuaagucaugu

SEQ ID NO: 1802128 - RNA, 19 nt, Artificial Sequence
  Description of Artificial Sequence: Synthetic oligonucleotide
  Antisense strand to SEQ ID NO: 1802127
acaugacuuaagauuucca

SEQ ID NO: 1802129 - RNA, 19 nt, Artificial Sequence
  Description of Artificial Sequence: Synthetic oligonucleotide
  Sense strand starting at position 2282 of SEQ ID NO: 1563194
ucaauugagaguuggauau

SEQ ID NO: 1802130 - RNA, 19 nt, Artificial Sequence
  Description of Artificial Sequence: Synthetic oligonucleotide
  Antisense strand to SEQ ID NO: 1802129
auauccaacucucaauuga

SEQ ID NO: 1802131 - RNA, 19 nt, Artificial Sequence
  Description of Artificial Sequence: Synthetic oligonucleotide
  Sense strand starting at position 2286 of SEQ ID NO: 1563194
uugagaguuggauaucagu

SEQ ID NO: 1802132 - RNA, 19 nt, Artificial Sequence
  Description of Artificial Sequence: Synthetic oligonucleotide
  Antisense strand to SEQ ID NO: 1802131
acugauauccaacucucaa

SEQ ID NO: 1802133 - RNA, 19 nt, Artificial Sequence
  Description of Artificial Sequence: Synthetic oligonucleotide
  Sense strand starting at position 2472 of SEQ ID NO: 1563194
uuucuuauuugugucaauc

SEQ ID NO: 1802134 - RNA, 19 nt, Artificial Sequence
  Description of Artificial Sequence: Synthetic oligonucleotide
  Antisense strand to SEQ ID NO: 1802133
gauugacacaaauaagaaa

SEQ ID NO: 1802135 - RNA, 19 nt, Artificial Sequence
  Description of Artificial Sequence: Synthetic oligonucleotide
  Sense strand starting at position 2508 of SEQ ID NO: 1563194
guggauuauucuuucugau

SEQ ID NO: 1802136 - RNA, 19 nt, Artificial Sequence
  Description of Artificial Sequence: Synthetic oligonucleotide
  Antisense strand to SEQ ID NO: 1802135
aucagaaagaauaauccac

SEQ ID NO: 1802137 - RNA, 19 nt, Artificial Sequence
  Description of Artificial Sequence: Synthetic oligonucleotide
  Sense strand starting at position 2663 of SEQ ID NO: 1563194
gccaaauuucuguaguggu

SEQ ID NO: 1802138 - RNA, 19 nt, Artificial Sequence
  Description of Artificial Sequence: Synthetic oligonucleotide
  Antisense strand to SEQ ID NO: 1802137
accacuacagaaauuuggc

SEQ ID NO: 1802139 - RNA, 19 nt, Artificial Sequence
  Description of Artificial Sequence: Synthetic oligonucleotide
  Sense strand starting at position 2739 of SEQ ID NO: 1563194
gucaguuucccagacauau

SEQ ID NO: 1802140 - RNA, 19 nt, Artificial Sequence
  Description of Artificial Sequence: Synthetic oligonucleotide
  Antisense strand to SEQ ID NO: 1802139
auaugucugggaaacugac

SEQ ID NO: 1802141 - RNA, 19 nt, Artificial Sequence
  Description of Artificial Sequence: Synthetic oligonucleotide
  Sense strand starting at position 2750 of SEQ ID NO: 1563194
agacauauguaacuccuga

SEQ ID NO: 1802142 - RNA, 19 nt, Artificial Sequence
  Description of Artificial Sequence: Synthetic oligonucleotide
  Antisense strand to SEQ ID NO: 1802141
ucaggaguuacauaugucu

SEQ ID NO: 1802143 - RNA, 19 nt, Artificial Sequence
  Description of Artificial Sequence: Synthetic oligonucleotide
  Sense strand starting at position 2927 of SEQ ID NO: 1563194
uacucaaguggcugagaau

SEQ ID NO: 1802144 - RNA, 19 nt, Artificial Sequence
  Description of Artificial Sequence: Synthetic oligonucleotide
  Antisense strand to SEQ ID NO: 1802143
auucucagccacuugagua

SEQ ID NO: 1802145 - RNA, 19 nt, Artificial Sequence
  Description of Artificial Sequence: Synthetic oligonucleotide
  Sense strand starting at position 2956 of SEQ ID NO: 1563194
cugacauucugggcacauu

SEQ ID NO: 1802146 - RNA, 19 nt, Artificial Sequence
  Description of Artificial Sequence: Synthetic oligonucleotide
  Antisense strand to SEQ ID NO: 1802145
aaugugcccagaaugucag

SEQ ID NO: 1802147 - RNA, 19 nt, Artificial Sequence
  Description of Artificial Sequence: Synthetic oligonucleotide
  Sense strand starting at position 3090 of SEQ ID NO: 1563194
acuguaauguuacuaauca

SEQ ID NO: 1802148 - RNA, 19 nt, Artificial Sequence
  Description of Artificial Sequence: Synthetic oligonucleotide
  Antisense strand to SEQ ID NO: 1802147
ugauuaguaacauuacagu

SEQ ID NO: 1802149 - RNA, 19 nt, Artificial Sequence
  Description of Artificial Sequence: Synthetic oligonucleotide
  Sense strand starting at position 3250 of SEQ ID NO: 1563194
aguagauguugaucucuau

SEQ ID NO: 1802150 - RNA, 19 nt, Artificial Sequence
  Description of Artificial Sequence: Synthetic oligonucleotide
  Antisense strand to SEQ ID NO: 1802149
auagagaucaacaucuacu

SEQ ID NO: 1802151 - RNA, 19 nt, Artificial Sequence
  Description of Artificial Sequence: Synthetic oligonucleotide
  Sense strand starting at position 3253 of SEQ ID NO: 1563194
agauguugaucucuaucuu

SEQ ID NO: 1802152 - RNA, 19 nt, Artificial Sequence
  Description of Artificial Sequence: Synthetic oligonucleotide
  Antisense strand to SEQ ID NO: 1802151
aagauagagaucaacaucu

SEQ ID NO: 1802153 - RNA, 19 nt, Artificial Sequence
  Description of Artificial Sequence: Synthetic oligonucleotide
  Sense strand starting at position 3442 of SEQ ID NO: 1563194
gggaguuaggagugacaug

SEQ ID NO: 1802154 - RNA, 19 nt, Artificial Sequence
  Description of Artificial Sequence: Synthetic oligonucleotide
  Antisense strand to SEQ ID NO: 1802153
caugucacuccuaacuccc

SEQ ID NO: 1802155 - RNA, 19 nt, Artificial Sequence
  Description of Artificial Sequence: Synthetic oligonucleotide
  Sense strand starting at position 3447 of SEQ ID NO: 1563194
uuaggagugacaugaccuu

SEQ ID NO: 1802156 - RNA, 19 nt, Artificial Sequence
  Description of Artificial Sequence: Synthetic oligonucleotide
  Antisense strand to SEQ ID NO: 1802155
aaggucaugucacuccuaa

SEQ ID NO: 1802157 - RNA, 19 nt, Artificial Sequence
  Description of Artificial Sequence: Synthetic oligonucleotide
  Sense strand starting at position 3514 of SEQ ID NO: 1563194
uggguaauuggagguuuga

SEQ ID NO: 1802158 - RNA, 19 nt, Artificial Sequence
  Description of Artificial Sequence: Synthetic oligonucleotide
  Antisense strand to SEQ ID NO: 1802157
ucaaaccuccaauuaccca

SEQ ID NO: 1802159 - RNA, 19 nt, Artificial Sequence
  Description of Artificial Sequence: Synthetic oligonucleotide
  Sense strand starting at position 3523 of SEQ ID NO: 1563194
ggagguuugauguauacuu

SEQ ID NO: 1802160 - RNA, 19 nt, Artificial Sequence
  Description of Artificial Sequence: Synthetic oligonucleotide
  Antisense strand to SEQ ID NO: 1802159
aaguauacaucaaaccucc

SEQ ID NO: 1802161 - RNA, 19 nt, Artificial Sequence
  Description of Artificial Sequence: Synthetic oligonucleotide
  Sense strand starting at position 3525 of SEQ ID NO: 1563194
agguuugauguauacuuaa

SEQ ID NO: 1802162 - RNA, 19 nt, Artificial Sequence
  Description of Artificial Sequence: Synthetic oligonucleotide
  Antisense strand to SEQ ID NO: 1802161
uuaaguauacaucaaaccu

SEQ ID NO: 1802163 - RNA, 19 nt, Artificial Sequence
  Description of Artificial Sequence: Synthetic oligonucleotide
  Sense strand starting at position 3528 of SEQ ID NO: 1563194
uuugauguauacuuaagac

SEQ ID NO: 1802164 - RNA, 19 nt, Artificial Sequence
  Description of Artificial Sequence: Synthetic oligonucleotide
  Antisense strand to SEQ ID NO: 1802163
gucuuaaguauacaucaaa

SEQ ID NO: 1802165 - RNA, 19 nt, Artificial Sequence
  Description of Artificial Sequence: Synthetic oligonucleotide
  Sense strand starting at position 3682 of SEQ ID NO: 1563194
gggaaaugauuccugccaa

SEQ ID NO: 1802166 - RNA, 19 nt, Artificial Sequence
  Description of Artificial Sequence: Synthetic oligonucleotide
  Antisense strand to SEQ ID NO: 1802165
uuggcaggaaucauuuccc

SEQ ID NO: 1802167 - RNA, 19 nt, Artificial Sequence
  Description of Artificial Sequence: Synthetic oligonucleotide
  Sense strand starting at position 3742 of SEQ ID NO: 1563194
gcagaauggagccacaagu

SEQ ID NO: 1802168 - RNA, 19 nt, Artificial Sequence
  Description of Artificial Sequence: Synthetic oligonucleotide
  Antisense strand to SEQ ID NO: 1802167
acuuguggcuccauucugc

SEQ ID NO: 1802169 - RNA, 19 nt, Artificial Sequence
  Description of Artificial Sequence: Synthetic oligonucleotide
  Sense strand starting at position 3878 of SEQ ID NO: 1563194
ugcucauuucuugggcaca

SEQ ID NO: 1802170 - RNA, 19 nt, Artificial Sequence
  Description of Artificial Sequence: Synthetic oligonucleotide
  Antisense strand to SEQ ID NO: 1802169
ugugcccaagaaaugagca

SEQ ID NO: 1802171 - RNA, 19 nt, Artificial Sequence
  Description of Artificial Sequence: Synthetic oligonucleotide
  Sense strand starting at position 221 of SEQ ID NO: 1563195
uccugagcuccauggcaga

SEQ ID NO: 1802172 - RNA, 19 nt, Artificial Sequence
  Description of Artificial Sequence: Synthetic oligonucleotide
  Antisense strand to SEQ ID NO: 1802171
ucugccauggagcucagga

SEQ ID NO: 1802173 - RNA, 19 nt, Artificial Sequence
  Description of Artificial Sequence: Synthetic oligonucleotide
  Sense strand starting at position 328 of SEQ ID NO: 1563195
cuuccuuugaucugggaga

SEQ ID NO: 1802174 - RNA, 19 nt, Artificial Sequence
  Description of Artificial Sequence: Synthetic oligonucleotide
  Antisense strand to SEQ ID NO: 1802173
ucucccagaucaaaggaag

SEQ ID NO: 1802175 - RNA, 19 nt, Artificial Sequence
  Description of Artificial Sequence: Synthetic oligonucleotide
  Sense strand starting at position 351 of SEQ ID NO: 1563195
agagcucuuguggauaaau

SEQ ID NO: 1802176 - RNA, 19 nt, Artificial Sequence
  Description of Artificial Sequence: Synthetic oligonucleotide
  Antisense strand to SEQ ID NO: 1802175
auuuauccacaagagcucu

SEQ ID NO: 1802177 - RNA, 19 nt, Artificial Sequence
  Description of Artificial Sequence: Synthetic oligonucleotide
  Sense strand starting at position 417 of SEQ ID NO: 1563195
agagaugcucgggagcaga

SEQ ID NO: 1802178 - RNA, 19 nt, Artificial Sequence
  Description of Artificial Sequence: Synthetic oligonucleotide
  Antisense strand to SEQ ID NO: 1802177
ucugcucccgagcaucucu

SEQ ID NO: 1802179 - RNA, 19 nt, Artificial Sequence
  Description of Artificial Sequence: Synthetic oligonucleotide
  Sense strand starting at position 652 of SEQ ID NO: 1563195
agagaacagucucuggguu

SEQ ID NO: 1802180 - RNA, 19 nt, Artificial Sequence
  Description of Artificial Sequence: Synthetic oligonucleotide
  Antisense strand to SEQ ID NO: 1802179
aacccagagacuguucucu

SEQ ID NO: 1802181 - RNA, 19 nt, Artificial Sequence
  Description of Artificial Sequence: Synthetic oligonucleotide
  Sense strand starting at position 654 of SEQ ID NO: 1563195
agaacagucucuggguuga

SEQ ID NO: 1802182 - RNA, 19 nt, Artificial Sequence
  Description of Artificial Sequence: Synthetic oligonucleotide
  Antisense strand to SEQ ID NO: 1802181
ucaacccagagacuguucu

SEQ ID NO: 1802183 - RNA, 19 nt, Artificial Sequence
  Description of Artificial Sequence: Synthetic oligonucleotide
  Sense strand starting at position 998 of SEQ ID NO: 1563195
cccagaucuuucuagacag

SEQ ID NO: 1802184 - RNA, 19 nt, Artificial Sequence
  Description of Artificial Sequence: Synthetic oligonucleotide
  Antisense strand to SEQ ID NO: 1802183
cugucuagaaagaucuggg

SEQ ID NO: 1802185 - RNA, 19 nt, Artificial Sequence
  Description of Artificial Sequence: Synthetic oligonucleotide
  Sense strand starting at position 1299 of SEQ ID NO: 1563195
gguugagcacaccggaaau

SEQ ID NO: 1802186 - RNA, 19 nt, Artificial Sequence
  Description of Artificial Sequence: Synthetic oligonucleotide
  Antisense strand to SEQ ID NO: 1802185
auuuccggugugcucaacc

SEQ ID NO: 1802187 - RNA, 19 nt, Artificial Sequence
  Description of Artificial Sequence: Synthetic oligonucleotide
  Sense strand starting at position 1464 of SEQ ID NO: 1563195
cggagaacuccugauugug

SEQ ID NO: 1802188 - RNA, 19 nt, Artificial Sequence
  Description of Artificial Sequence: Synthetic oligonucleotide
  Antisense strand to SEQ ID NO: 1802187
cacaaucaggaguucuccg

SEQ ID NO: 1802189 - RNA, 19 nt, Artificial Sequence
  Description of Artificial Sequence: Synthetic oligonucleotide
  Sense strand starting at position 1466 of SEQ ID NO: 1563195
gagaacuccugauugugga

SEQ ID NO: 1802190 - RNA, 19 nt, Artificial Sequence
  Description of Artificial Sequence: Synthetic oligonucleotide
  Antisense strand to SEQ ID NO: 1802189
uccacaaucaggaguucuc

SEQ ID NO: 1802191 - RNA, 19 nt, Artificial Sequence
  Description of Artificial Sequence: Synthetic oligonucleotide
  Sense strand starting at position 2054 of SEQ ID NO: 1563195
ggucccaucuuccagaaua

SEQ ID NO: 1802192 - RNA, 19 nt, Artificial Sequence
  Description of Artificial Sequence: Synthetic oligonucleotide
  Antisense strand to SEQ ID NO: 1802191
uauucuggaagaugggacc

SEQ ID NO: 1802193 - RNA, 19 nt, Artificial Sequence
  Description of Artificial Sequence: Synthetic oligonucleotide
  Sense strand starting at position 2064 of SEQ ID NO: 1563195
uccagaauauucucggcaa

SEQ ID NO: 1802194 - RNA, 19 nt, Artificial Sequence
  Description of Artificial Sequence: Synthetic oligonucleotide
  Antisense strand to SEQ ID NO: 1802193
uugccgagaauauucugga

SEQ ID NO: 1802195 - RNA, 19 nt, Artificial Sequence
  Description of Artificial Sequence: Synthetic oligonucleotide
  Sense strand starting at position 2065 of SEQ ID NO: 1563195
ccagaauauucucggcaaa

SEQ ID NO: 1802196 - RNA, 19 nt, Artificial Sequence
  Description of Artificial Sequence: Synthetic oligonucleotide
  Antisense strand to SEQ ID NO: 1802195
uuugccgagaauauucugg

SEQ ID NO: 1802197 - RNA, 19 nt, Artificial Sequence
  Description of Artificial Sequence: Synthetic oligonucleotide
  Sense strand starting at position 2067 of SEQ ID NO: 1563195
agaauauucucggcaaauc

SEQ ID NO: 1802198 - RNA, 19 nt, Artificial Sequence
  Description of Artificial Sequence: Synthetic oligonucleotide
  Antisense strand to SEQ ID NO: 1802197
gauuugccgagaauauucu

SEQ ID NO: 1802199 - RNA, 19 nt, Artificial Sequence
  Description of Artificial Sequence: Synthetic oligonucleotide
  Sense strand starting at position 2108 of SEQ ID NO: 1563195
ccucgaagugcagaaauca

SEQ ID NO: 1802200 - RNA, 19 nt, Artificial Sequence
  Description of Artificial Sequence: Synthetic oligonucleotide
  Antisense strand to SEQ ID NO: 1802199
ugauuucugcacuucgagg

SEQ ID NO: 1802201 - RNA, 19 nt, Artificial Sequence
  Description of Artificial Sequence: Synthetic oligonucleotide
  Sense strand starting at position 2435 of SEQ ID NO: 1563195
ccugcucuugccugguuaa

SEQ ID NO: 1802202 - RNA, 19 nt, Artificial Sequence
  Description of Artificial Sequence: Synthetic oligonucleotide
  Antisense strand to SEQ ID NO: 1802201
uuaaccaggcaagagcagg

SEQ ID NO: 1802203 - RNA, 19 nt, Artificial Sequence
  Description of Artificial Sequence: Synthetic oligonucleotide
  Sense strand starting at position 2438 of SEQ ID NO: 1563195
gcucuugccugguuaagau

SEQ ID NO: 1802204 - RNA, 19 nt, Artificial Sequence
  Description of Artificial Sequence: Synthetic oligonucleotide
  Antisense strand to SEQ ID NO: 1802203
aucuuaaccaggcaagagc

SEQ ID NO: 1802205 - RNA, 19 nt, Artificial Sequence
  Description of Artificial Sequence: Synthetic oligonucleotide
  Sense strand starting at position 2525 of SEQ ID NO: 1563195
uucuguggcccugagagua

SEQ ID NO: 1802206 - RNA, 19 nt, Artificial Sequence
  Description of Artificial Sequence: Synthetic oligonucleotide
  Antisense strand to SEQ ID NO: 1802205
uacucucagggccacagaa

SEQ ID NO: 1802207 - RNA, 19 nt, Artificial Sequence
  Description of Artificial Sequence: Synthetic oligonucleotide
  Sense strand starting at position 2887 of SEQ ID NO: 1563195
ugccgagcaucgcaaaguu

SEQ ID NO: 1802208 - RNA, 19 nt, Artificial Sequence
  Description of Artificial Sequence: Synthetic oligonucleotide
  Antisense strand to SEQ ID NO: 1802207
aacuuugcgaugcucggca

SEQ ID NO: 1802209 - RNA, 19 nt, Artificial Sequence
  Description of Artificial Sequence: Synthetic oligonucleotide
  Sense strand starting at position 3032 of SEQ ID NO: 1563195
ccgagcuaagccugucaca

SEQ ID NO: 1802210 - RNA, 19 nt, Artificial Sequence
  Description of Artificial Sequence: Synthetic oligonucleotide
  Antisense strand to SEQ ID NO: 1802209
ugugacaggcuuagcucgg

SEQ ID NO: 1802211 - RNA, 19 nt, Artificial Sequence
  Description of Artificial Sequence: Synthetic oligonucleotide
  Sense strand starting at position 3043 of SEQ ID NO: 1563195
cugucacauccucauggaa

SEQ ID NO: 1802212 - RNA, 19 nt, Artificial Sequence
  Description of Artificial Sequence: Synthetic oligonucleotide
  Antisense strand to SEQ ID NO: 1802211
uuccaugaggaugugacag

SEQ ID NO: 1802213 - RNA, 19 nt, Artificial Sequence
  Description of Artificial Sequence: Synthetic oligonucleotide
  Sense strand starting at position 3045 of SEQ ID NO: 1563195
gucacauccucauggaacu

SEQ ID NO: 1802214 - RNA, 19 nt, Artificial Sequence
  Description of Artificial Sequence: Synthetic oligonucleotide
  Antisense strand to SEQ ID NO: 1802213
aguuccaugaggaugugac

SEQ ID NO: 1802215 - RNA, 19 nt, Artificial Sequence
  Description of Artificial Sequence: Synthetic oligonucleotide
  Sense strand starting at position 3152 of SEQ ID NO: 1563195
ggaagcuccuggcucagaa

SEQ ID NO: 1802216 - RNA, 19 nt, Artificial Sequence
  Description of Artificial Sequence: Synthetic oligonucleotide
  Antisense strand to SEQ ID NO: 1802215
uucugagccaggagcuucc

SEQ ID NO: 1802217 - RNA, 19 nt, Artificial Sequence
  Description of Artificial Sequence: Synthetic oligonucleotide
  Sense strand starting at position 3165 of SEQ ID NO: 1563195
ucagaagcauccguuggaa

SEQ ID NO: 1802218 - RNA, 19 nt, Artificial Sequence
  Description of Artificial Sequence: Synthetic oligonucleotide
  Antisense strand to SEQ ID NO: 1802217
uuccaacggaugcuucuga

SEQ ID NO: 1802219 - RNA, 19 nt, Artificial Sequence
  Description of Artificial Sequence: Synthetic oligonucleotide
  Sense strand starting at position 3167 of SEQ ID NO: 1563195
agaagcauccguuggaaac

SEQ ID NO: 1802220 - RNA, 19 nt, Artificial Sequence
  Description of Artificial Sequence: Synthetic oligonucleotide
  Antisense strand to SEQ ID NO: 1802219
guuuccaacggaugcuucu

SEQ ID NO: 1802221 - RNA, 19 nt, Artificial Sequence
  Description of Artificial Sequence: Synthetic oligonucleotide
  Sense strand starting at position 3190 of SEQ ID NO: 1563195
ggcccagagcccugaagaa

SEQ ID NO: 1802222 - RNA, 19 nt, Artificial Sequence
  Description of Artificial Sequence: Synthetic oligonucleotide
  Antisense strand to SEQ ID NO: 1802221
uucuucagggcucugggcc

SEQ ID NO: 1802223 - RNA, 19 nt, Artificial Sequence
  Description of Artificial Sequence: Synthetic oligonucleotide
  Sense strand starting at position 3257 of SEQ ID NO: 1563195
gccuuauucucaggagagg

SEQ ID NO: 1802224 - RNA, 19 nt, Artificial Sequence
  Description of Artificial Sequence: Synthetic oligonucleotide
  Antisense strand to SEQ ID NO: 1802223
ccucuccugagaauaaggc

SEQ ID NO: 1802225 - RNA, 19 nt, Artificial Sequence
  Description of Artificial Sequence: Synthetic oligonucleotide
  Sense strand starting at position 3306 of SEQ ID NO: 1563195
cacagugacccauguuuga

SEQ ID NO: 1802226 - RNA, 19 nt, Artificial Sequence
  Description of Artificial Sequence: Synthetic oligonucleotide
  Antisense strand to SEQ ID NO: 1802225
ucaaacaugggucacugug

SEQ ID NO: 1802227 - RNA, 19 nt, Artificial Sequence
  Description of Artificial Sequence: Synthetic oligonucleotide
  Sense strand starting at position 3341 of SEQ ID NO: 1563195
cgcguuuacucucgcgaca

SEQ ID NO: 1802228 - RNA, 19 nt, Artificial Sequence
  Description of Artificial Sequence: Synthetic oligonucleotide
  Antisense strand to SEQ ID NO: 1802227
ugucgcgagaguaaacgcg

SEQ ID NO: 1802229 - RNA, 19 nt, Artificial Sequence
  Description of Artificial Sequence: Synthetic oligonucleotide
  Sense strand starting at position 3343 of SEQ ID NO: 1563195
cguuuacucucgcgacaca

SEQ ID NO: 1802230 - RNA, 19 nt, Artificial Sequence
  Description of Artificial Sequence: Synthetic oligonucleotide
  Antisense strand to SEQ ID NO: 1802229
ugugucgcgagaguaaacg

SEQ ID NO: 1802231 - RNA, 19 nt, Artificial Sequence
  Description of Artificial Sequence: Synthetic oligonucleotide
  Sense strand starting at position 3344 of SEQ ID NO: 1563195
guuuacucucgcgacacau

SEQ ID NO: 1802232 - RNA, 19 nt, Artificial Sequence
  Description of Artificial Sequence: Synthetic oligonucleotide
  Antisense strand to SEQ ID NO: 1802231
augugucgcgagaguaaac

SEQ ID NO: 1802233 - RNA, 19 nt, Artificial Sequence
  Description of Artificial Sequence: Synthetic oligonucleotide
  Sense strand starting at position 3460 of SEQ ID NO: 1563195
ugcaguuggucaccugaca

SEQ ID NO: 1802234 - RNA, 19 nt, Artificial Sequence
  Description of Artificial Sequence: Synthetic oligonucleotide
  Antisense strand to SEQ ID NO: 1802233
ugucaggugaccaacugca

SEQ ID NO: 1802235 - RNA, 19 nt, Artificial Sequence
  Description of Artificial Sequence: Synthetic oligonucleotide
  Sense strand starting at position 3465 of SEQ ID NO: 1563195
uuggucaccugacacauau

SEQ ID NO: 1802236 - RNA, 19 nt, Artificial Sequence
  Description of Artificial Sequence: Synthetic oligonucleotide
  Antisense strand to SEQ ID NO: 1802235
auaugugucaggugaccaa

SEQ ID NO: 1802237 - RNA, 19 nt, Artificial Sequence
  Description of Artificial Sequence: Synthetic oligonucleotide
  Sense strand starting at position 3530 of SEQ ID NO: 1563195
acaggugcucaacaaguuu

SEQ ID NO: 1802238 - RNA, 19 nt, Artificial Sequence
  Description of Artificial Sequence: Synthetic oligonucleotide
  Antisense strand to SEQ ID NO: 1802237
aaacuuguugagcaccugu

SEQ ID NO: 1802239 - RNA, 19 nt, Artificial Sequence
  Description of Artificial Sequence: Synthetic oligonucleotide
  Sense strand starting at position 3752 of SEQ ID NO: 1563195
gggugcuguguggacgaau

SEQ ID NO: 1802240 - RNA, 19 nt, Artificial Sequence
  Description of Artificial Sequence: Synthetic oligonucleotide
  Antisense strand to SEQ ID NO: 1802239
auucguccacacagcaccc

SEQ ID NO: 1802241 - RNA, 19 nt, Artificial Sequence
  Description of Artificial Sequence: Synthetic oligonucleotide
  Sense strand starting at position 3753 of SEQ ID NO: 1563195
ggugcuguguggacgaauu

SEQ ID NO: 1802242 - RNA, 19 nt, Artificial Sequence
  Description of Artificial Sequence: Synthetic oligonucleotide
  Antisense strand to SEQ ID NO: 1802241
aauucguccacacagcacc

SEQ ID NO: 1802243 - RNA, 19 nt, Artificial Sequence
  Description of Artificial Sequence: Synthetic oligonucleotide
  Sense strand starting at position 27 of SEQ ID NO: 1563196
acaagaaugucagcuuccu

SEQ ID NO: 1802244 - RNA, 19 nt, Artificial Sequence
  Description of Artificial Sequence: Synthetic oligonucleotide
  Antisense strand to SEQ ID NO: 1802243
aggaagcugacauucuugu

SEQ ID NO: 1802245 - RNA, 19 nt, Artificial Sequence
  Description of Artificial Sequence: Synthetic oligonucleotide
  Sense strand starting at position 143 of SEQ ID NO: 1563196
augggugaaugcccuaaga

SEQ ID NO: 1802246 - RNA, 19 nt, Artificial Sequence
  Description of Artificial Sequence: Synthetic oligonucleotide
  Antisense strand to SEQ ID NO: 1802245
ucuuagggcauucacccau

SEQ ID NO: 1802247 - RNA, 19 nt, Artificial Sequence
  Description of Artificial Sequence: Synthetic oligonucleotide
  Sense strand starting at position 145 of SEQ ID NO: 1563196
gggugaaugcccuaagacu

SEQ ID NO: 1802248 - RNA, 19 nt, Artificial Sequence
  Description of Artificial Sequence: Synthetic oligonucleotide
  Antisense strand to SEQ ID NO: 1802247
agucuuagggcauucaccc

SEQ ID NO: 1802249 - RNA, 19 nt, Artificial Sequence
  Description of Artificial Sequence: Synthetic oligonucleotide
  Sense strand starting at position 167 of SEQ ID NO: 1563196
ggauccuggcuagauguuu

SEQ ID NO: 1802250 - RNA, 19 nt, Artificial Sequence
  Description of Artificial Sequence: Synthetic oligonucleotide
  Antisense strand to SEQ ID NO: 1802249
aaacaucuagccaggaucc

SEQ ID NO: 1802251 - RNA, 19 nt, Artificial Sequence
  Description of Artificial Sequence: Synthetic oligonucleotide
  Sense strand starting at position 642 of SEQ ID NO: 1563196
ggacucaguuccuauuuga

SEQ ID NO: 1802252 - RNA, 19 nt, Artificial Sequence
  Description of Artificial Sequence: Synthetic oligonucleotide
  Antisense strand to SEQ ID NO: 1802251
ucaaauaggaacugagucc

SEQ ID NO: 1802253 - RNA, 19 nt, Artificial Sequence
  Description of Artificial Sequence: Synthetic oligonucleotide
  Sense strand starting at position 776 of SEQ ID NO: 1563196
agcagagacuugcuaucuu

SEQ ID NO: 1802254 - RNA, 19 nt, Artificial Sequence
  Description of Artificial Sequence: Synthetic oligonucleotide
  Antisense strand to SEQ ID NO: 1802253
aagauagcaagucucugcu

SEQ ID NO: 1802255 - RNA, 19 nt, Artificial Sequence
  Description of Artificial Sequence: Synthetic oligonucleotide
  Sense strand starting at position 790 of SEQ ID NO: 1563196
aucuuagagucaucucaug

SEQ ID NO: 1802256 - RNA, 19 nt, Artificial Sequence
  Description of Artificial Sequence: Synthetic oligonucleotide
  Antisense strand to SEQ ID NO: 1802255
caugagaugacucuaagau

SEQ ID NO: 1802257 - RNA, 19 nt, Artificial Sequence
  Description of Artificial Sequence: Synthetic oligonucleotide
  Sense strand starting at position 921 of SEQ ID NO: 1563196
guaucuaucaacuguagug

SEQ ID NO: 1802258 - RNA, 19 nt, Artificial Sequence
  Description of Artificial Sequence: Synthetic oligonucleotide
  Antisense strand to SEQ ID NO: 1802257
cacuacaguugauagauac

SEQ ID NO: 1802259 - RNA, 19 nt, Artificial Sequence
  Description of Artificial Sequence: Synthetic oligonucleotide
  Sense strand starting at position 923 of SEQ ID NO: 1563196
aucuaucaacuguagugaa

SEQ ID NO: 1802260 - RNA, 19 nt, Artificial Sequence
  Description of Artificial Sequence: Synthetic oligonucleotide
  Antisense strand to SEQ ID NO: 1802259
uucacuacaguugauagau

SEQ ID NO: 1802261 - RNA, 19 nt, Artificial Sequence
  Description of Artificial Sequence: Synthetic oligonucleotide
  Sense strand starting at position 931 of SEQ ID NO: 1563196
acuguagugaaacauugua

SEQ ID NO: 1802262 - RNA, 19 nt, Artificial Sequence
  Description of Artificial Sequence: Synthetic oligonucleotide
  Antisense strand to SEQ ID NO: 1802261
uacaauguuucacuacagu

SEQ ID NO: 1802263 - RNA, 19 nt, Artificial Sequence
  Description of Artificial Sequence: Synthetic oligonucleotide
  Sense strand starting at position 939 of SEQ ID NO: 1563196
gaaacauuguaucucgaca

SEQ ID NO: 1802264 - RNA, 19 nt, Artificial Sequence
  Description of Artificial Sequence: Synthetic oligonucleotide
  Antisense strand to SEQ ID NO: 1802263
ugucgagauacaauguuuc

SEQ ID NO: 1802265 - RNA, 19 nt, Artificial Sequence
  Description of Artificial Sequence: Synthetic oligonucleotide
  Sense strand starting at position 944 of SEQ ID NO: 1563196
auuguaucucgacaaaccu

SEQ ID NO: 1802266 - RNA, 19 nt, Artificial Sequence
  Description of Artificial Sequence: Synthetic oligonucleotide
  Antisense strand to SEQ ID NO: 1802265
agguuugucgagauacaau

SEQ ID NO: 1802267 - RNA, 19 nt, Artificial Sequence
  Description of Artificial Sequence: Synthetic oligonucleotide
  Sense strand starting at position 962 of SEQ ID NO: 1563196
uuacuuuccuuggcaguga

SEQ ID NO: 1802268 - RNA, 19 nt, Artificial Sequence
  Description of Artificial Sequence: Synthetic oligonucleotide
  Antisense strand to SEQ ID NO: 1802267
ucacugccaaggaaaguaa

SEQ ID NO: 1802269 - RNA, 19 nt, Artificial Sequence
  Description of Artificial Sequence: Synthetic oligonucleotide
  Sense strand starting at position 983 of SEQ ID NO: 1563196
ccaagauaaugacaucagu

SEQ ID NO: 1802270 - RNA, 19 nt, Artificial Sequence
  Description of Artificial Sequence: Synthetic oligonucleotide
  Antisense strand to SEQ ID NO: 1802269
acugaugucauuaucuugg

SEQ ID NO: 1802271 - RNA, 19 nt, Artificial Sequence
  Description of Artificial Sequence: Synthetic oligonucleotide
  Sense strand starting at position 989 of SEQ ID NO: 1563196
uaaugacaucaguguagca

SEQ ID NO: 1802272 - RNA, 19 nt, Artificial Sequence
  Description of Artificial Sequence: Synthetic oligonucleotide
  Antisense strand to SEQ ID NO: 1802271
ugcuacacugaugucauua

SEQ ID NO: 1802273 - RNA, 19 nt, Artificial Sequence
  Description of Artificial Sequence: Synthetic oligonucleotide
  Sense strand starting at position 1020 of SEQ ID NO: 1563196
gcacuaaacaggugagcau

SEQ ID NO: 1802274 - RNA, 19 nt, Artificial Sequence
  Description of Artificial Sequence: Synthetic oligonucleotide
  Antisense strand to SEQ ID NO: 1802273
augcucaccuguuuagugc

SEQ ID NO: 1802275 - RNA, 19 nt, Artificial Sequence
  Description of Artificial Sequence: Synthetic oligonucleotide
  Sense strand starting at position 1091 of SEQ ID NO: 1563196
ccauuagcuguaugagcuu

SEQ ID NO: 1802276 - RNA, 19 nt, Artificial Sequence
  Description of Artificial Sequence: Synthetic oligonucleotide
  Antisense strand to SEQ ID NO: 1802275
aagcucauacagcuaaugg

SEQ ID NO: 1802277 - RNA, 19 nt, Artificial Sequence
  Description of Artificial Sequence: Synthetic oligonucleotide
  Sense strand starting at position 1097 of SEQ ID NO: 1563196
gcuguaugagcuuggacaa

SEQ ID NO: 1802278 - RNA, 19 nt, Artificial Sequence
  Description of Artificial Sequence: Synthetic oligonucleotide
  Antisense strand to SEQ ID NO: 1802277
uuguccaagcucauacagc

SEQ ID NO: 1802279 - RNA, 19 nt, Artificial Sequence
  Description of Artificial Sequence: Synthetic oligonucleotide
  Sense strand starting at position 1201 of SEQ ID NO: 1563196
auccaaagugcuugguacu

SEQ ID NO: 1802280 - RNA, 19 nt, Artificial Sequence
  Description of Artificial Sequence: Synthetic oligonucleotide
  Antisense strand to SEQ ID NO: 1802279
aguaccaagcacuuuggau

SEQ ID NO: 1802281 - RNA, 19 nt, Artificial Sequence
  Description of Artificial Sequence: Synthetic oligonucleotide
  Sense strand starting at position 1243 of SEQ ID NO: 1563196
cgucgcuuccuccaaucaa

SEQ ID NO: 1802282 - RNA, 19 nt, Artificial Sequence
  Description of Artificial Sequence: Synthetic oligonucleotide
  Antisense strand to SEQ ID NO: 1802281
uugauuggaggaagcgacg

SEQ ID NO: 1802283 - RNA, 19 nt, Artificial Sequence
  Description of Artificial Sequence: Synthetic oligonucleotide
  Sense strand starting at position 1294 of SEQ ID NO: 1563196
cacugaagcguuuacuaca

SEQ ID NO: 1802284 - RNA, 19 nt, Artificial Sequence
  Description of Artificial Sequence: Synthetic oligonucleotide
  Antisense strand to SEQ ID NO: 1802283
uguaguaaacgcuucagug

SEQ ID NO: 1802285 - RNA, 19 nt, Artificial Sequence
  Description of Artificial Sequence: Synthetic oligonucleotide
  Sense strand starting at position 2493 of SEQ ID NO: 1563196
cucccugauacaggugaga

SEQ ID NO: 1802286 - RNA, 19 nt, Artificial Sequence
  Description of Artificial Sequence: Synthetic oligonucleotide
  Antisense strand to SEQ ID NO: 1802285
ucucaccuguaucagggag

SEQ ID NO: 1802287 - RNA, 19 nt, Artificial Sequence
  Description of Artificial Sequence: Synthetic oligonucleotide
  Sense strand starting at position 2506 of SEQ ID NO: 1563196
gugagaggagacuguaauc

SEQ ID NO: 1802288 - RNA, 19 nt, Artificial Sequence
  Description of Artificial Sequence: Synthetic oligonucleotide
  Antisense strand to SEQ ID NO: 1802287
gauuacagucuccucucac

SEQ ID NO: 1802289 - RNA, 19 nt, Artificial Sequence
  Description of Artificial Sequence: Synthetic oligonucleotide
  Sense strand starting at position 2511 of SEQ ID NO: 1563196
aggagacuguaaucccuua

SEQ ID NO: 1802290 - RNA, 19 nt, Artificial Sequence
  Description of Artificial Sequence: Synthetic oligonucleotide
  Antisense strand to SEQ ID NO: 1802289
uaagggauuacagucuccu

SEQ ID NO: 1802291 - RNA, 19 nt, Artificial Sequence
  Description of Artificial Sequence: Synthetic oligonucleotide
  Sense strand starting at position 2516 of SEQ ID NO: 1563196
acuguaaucccuuagaacg

SEQ ID NO: 1802292 - RNA, 19 nt, Artificial Sequence
  Description of Artificial Sequence: Synthetic oligonucleotide
  Antisense strand to SEQ ID NO: 1802291
cguucuaagggauuacagu

SEQ ID NO: 1802293 - RNA, 19 nt, Artificial Sequence
  Description of Artificial Sequence: Synthetic oligonucleotide
  Sense strand starting at position 2987 of SEQ ID NO: 1563196
gauuguagucaugauuguc

SEQ ID NO: 1802294 - RNA, 19 nt, Artificial Sequence
  Description of Artificial Sequence: Synthetic oligonucleotide
  Antisense strand to SEQ ID NO: 1802293
gacaaucaugacuacaauc

SEQ ID NO: 1802295 - RNA, 19 nt, Artificial Sequence
  Description of Artificial Sequence: Synthetic oligonucleotide
  Sense strand starting at position 2990 of SEQ ID NO: 1563196
uguagucaugauugucaca

SEQ ID NO: 1802296 - RNA, 19 nt, Artificial Sequence
  Description of Artificial Sequence: Synthetic oligonucleotide
  Antisense strand to SEQ ID NO: 1802295
ugugacaaucaugacuaca

SEQ ID NO: 1802297 - RNA, 19 nt, Artificial Sequence
  Description of Artificial Sequence: Synthetic oligonucleotide
  Sense strand starting at position 2992 of SEQ ID NO: 1563196
uagucaugauugucacaug

SEQ ID NO: 1802298 - RNA, 19 nt, Artificial Sequence
  Description of Artificial Sequence: Synthetic oligonucleotide
  Antisense strand to SEQ ID NO: 1802297
caugugacaaucaugacua

SEQ ID NO: 1802299 - RNA, 19 nt, Artificial Sequence
  Description of Artificial Sequence: Synthetic oligonucleotide
  Sense strand starting at position 3036 of SEQ ID NO: 1563196
ggcaguugagcuggagaga

SEQ ID NO: 1802300 - RNA, 19 nt, Artificial Sequence
  Description of Artificial Sequence: Synthetic oligonucleotide
  Antisense strand to SEQ ID NO: 1802299
ucucuccagcucaacugcc

SEQ ID NO: 1802301 - RNA, 19 nt, Artificial Sequence
  Description of Artificial Sequence: Synthetic oligonucleotide
  Sense strand starting at position 3178 of SEQ ID NO: 1563196
uggccauuuccaggccuua

SEQ ID NO: 1802302 - RNA, 19 nt, Artificial Sequence
  Description of Artificial Sequence: Synthetic oligonucleotide
  Antisense strand to SEQ ID NO: 1802301
uaaggccuggaaauggcca

SEQ ID NO: 1802303 - RNA, 19 nt, Artificial Sequence
  Description of Artificial Sequence: Synthetic oligonucleotide
  Sense strand starting at position 3190 of SEQ ID NO: 1563196
ggccuuaacuagcugagga

SEQ ID NO: 1802304 - RNA, 19 nt, Artificial Sequence
  Description of Artificial Sequence: Synthetic oligonucleotide
  Antisense strand to SEQ ID NO: 1802303
uccucagcuaguuaaggcc

SEQ ID NO: 1802305 - RNA, 19 nt, Artificial Sequence
  Description of Artificial Sequence: Synthetic oligonucleotide
  Sense strand starting at position 3230 of SEQ ID NO: 1563196
cacuguaucccaggagaau

SEQ ID NO: 1802306 - RNA, 19 nt, Artificial Sequence
  Description of Artificial Sequence: Synthetic oligonucleotide
  Antisense strand to SEQ ID NO: 1802305
auucuccugggauacagug

SEQ ID NO: 1802307 - RNA, 19 nt, Artificial Sequence
  Description of Artificial Sequence: Synthetic oligonucleotide
  Sense strand starting at position 3264 of SEQ ID NO: 1563196
aggaaagcaugucuauuau

SEQ ID NO: 1802308 - RNA, 19 nt, Artificial Sequence
  Description of Artificial Sequence: Synthetic oligonucleotide
  Antisense strand to SEQ ID NO: 1802307
auaauagacaugcuuuccu

SEQ ID NO: 1802309 - RNA, 19 nt, Artificial Sequence
  Description of Artificial Sequence: Synthetic oligonucleotide
  Sense strand starting at position 3313 of SEQ ID NO: 1563196
ggcaaauacuuccucugga

SEQ ID NO: 1802310 - RNA, 19 nt, Artificial Sequence
  Description of Artificial Sequence: Synthetic oligonucleotide
  Antisense strand to SEQ ID NO: 1802309
uccagaggaaguauuugcc

SEQ ID NO: 1802311 - RNA, 19 nt, Artificial Sequence
  Description of Artificial Sequence: Synthetic oligonucleotide
  Sense strand starting at position 3314 of SEQ ID NO: 1563196
gcaaauacuuccucuggaa

SEQ ID NO: 1802312 - RNA, 19 nt, Artificial Sequence
  Description of Artificial Sequence: Synthetic oligonucleotide
  Antisense strand to SEQ ID NO: 1802311
uuccagaggaaguauuugc

SEQ ID NO: 1802313 - RNA, 19 nt, Artificial Sequence
  Description of Artificial Sequence: Synthetic oligonucleotide
  Sense strand starting at position 3514 of SEQ ID NO: 1563196
guugacaguuuggucuaga

SEQ ID NO: 1802314 - RNA, 19 nt, Artificial Sequence
  Description of Artificial Sequence: Synthetic oligonucleotide
  Antisense strand to SEQ ID NO: 1802313
ucuagaccaaacugucaac

SEQ ID NO: 1802315 - RNA, 19 nt, Artificial Sequence
  Description of Artificial Sequence: Synthetic oligonucleotide
  Sense strand starting at position 3515 of SEQ ID NO: 1563196
uugacaguuuggucuagag

SEQ ID NO: 1802316 - RNA, 19 nt, Artificial Sequence
  Description of Artificial Sequence: Synthetic oligonucleotide
  Antisense strand to SEQ ID NO: 1802315
cucuagaccaaacugucaa

SEQ ID NO: 1802317 - RNA, 19 nt, Artificial Sequence
  Description of Artificial Sequence: Synthetic oligonucleotide
  Sense strand starting at position 3550 of SEQ ID NO: 1563196
ggucaugauacagggucau

SEQ ID NO: 1802318 - RNA, 19 nt, Artificial Sequence
  Description of Artificial Sequence: Synthetic oligonucleotide
  Antisense strand to SEQ ID NO: 1802317
augacccuguaucaugacc

SEQ ID NO: 1802319 - RNA, 19 nt, Artificial Sequence
  Description of Artificial Sequence: Synthetic oligonucleotide
  Sense strand starting at position 3563 of SEQ ID NO: 1563196
ggucaugaauauuccaaag

SEQ ID NO: 1802320 - RNA, 19 nt, Artificial Sequence
  Description of Artificial Sequence: Synthetic oligonucleotide
  Antisense strand to SEQ ID NO: 1802319
cuuuggaauauucaugacc

SEQ ID NO: 1802321 - RNA, 19 nt, Artificial Sequence
  Description of Artificial Sequence: Synthetic oligonucleotide
  Sense strand starting at position 3708 of SEQ ID NO: 1563196
gggacuucaucuuuagggu

SEQ ID NO: 1802322 - RNA, 19 nt, Artificial Sequence
  Description of Artificial Sequence: Synthetic oligonucleotide
  Antisense strand to SEQ ID NO: 1802321
acccuaaagaugaaguccc

SEQ ID NO: 1802323 - RNA, 19 nt, Artificial Sequence
  Description of Artificial Sequence: Synthetic oligonucleotide
  Sense strand starting at position 56 of SEQ ID NO: 1563197
guucuuguucuguaugaac

SEQ ID NO: 1802324 - RNA, 19 nt, Artificial Sequence
  Description of Artificial Sequence: Synthetic oligonucleotide
  Antisense strand to SEQ ID NO: 1802323
guucauacagaacaagaac

SEQ ID NO: 1802325 - RNA, 19 nt, Artificial Sequence
  Description of Artificial Sequence: Synthetic oligonucleotide
  Sense strand starting at position 68 of SEQ ID NO: 1563197
uaugaacucggcuaugcua

SEQ ID NO: 1802326 - RNA, 19 nt, Artificial Sequence
  Description of Artificial Sequence: Synthetic oligonucleotide
  Antisense strand to SEQ ID NO: 1802325
uagcauagccgaguucaua

SEQ ID NO: 1802327 - RNA, 19 nt, Artificial Sequence
  Description of Artificial Sequence: Synthetic oligonucleotide
  Sense strand starting at position 282 of SEQ ID NO: 1563197
cccucaaaguaucucagua

SEQ ID NO: 1802328 - RNA, 19 nt, Artificial Sequence
  Description of Artificial Sequence: Synthetic oligonucleotide
  Antisense strand to SEQ ID NO: 1802327
uacugagauacuuugaggg

SEQ ID NO: 1802329 - RNA, 19 nt, Artificial Sequence
  Description of Artificial Sequence: Synthetic oligonucleotide
  Sense strand starting at position 416 of SEQ ID NO: 1563197
gggacagagaucugcagau

SEQ ID NO: 1802330 - RNA, 19 nt, Artificial Sequence
  Description of Artificial Sequence: Synthetic oligonucleotide
  Antisense strand to SEQ ID NO: 1802329
aucugcagaucucuguccc

SEQ ID NO: 1802331 - RNA, 19 nt, Artificial Sequence
  Description of Artificial Sequence: Synthetic oligonucleotide
  Sense strand starting at position 441 of SEQ ID NO: 1563197
agcauacuggugcagaauu

SEQ ID NO: 1802332 - RNA, 19 nt, Artificial Sequence
  Description of Artificial Sequence: Synthetic oligonucleotide
  Antisense strand to SEQ ID NO: 1802331
aauucugcaccaguaugcu

SEQ ID NO: 1802333 - RNA, 19 nt, Artificial Sequence
  Description of Artificial Sequence: Synthetic oligonucleotide
  Sense strand starting at position 443 of SEQ ID NO: 1563197
cauacuggugcagaauuaa

SEQ ID NO: 1802334 - RNA, 19 nt, Artificial Sequence
  Description of Artificial Sequence: Synthetic oligonucleotide
  Antisense strand to SEQ ID NO: 1802333
uuaauucugcaccaguaug

SEQ ID NO: 1802335 - RNA, 19 nt, Artificial Sequence
  Description of Artificial Sequence: Synthetic oligonucleotide
  Sense strand starting at position 1004 of SEQ ID NO: 1563197
ggcaccaccucaucugaaa

SEQ ID NO: 1802336 - RNA, 19 nt, Artificial Sequence
  Description of Artificial Sequence: Synthetic oligonucleotide
  Antisense strand to SEQ ID NO: 1802335
uuucagaugagguggugcc

SEQ ID NO: 1802337 - RNA, 19 nt, Artificial Sequence
  Description of Artificial Sequence: Synthetic oligonucleotide
  Sense strand starting at position 1142 of SEQ ID NO: 1563197
gcaguaagaggccacguau

SEQ ID NO: 1802338 - RNA, 19 nt, Artificial Sequence
  Description of Artificial Sequence: Synthetic oligonucleotide
  Antisense strand to SEQ ID NO: 1802337
auacguggccucuuacugc

SEQ ID NO: 1802339 - RNA, 19 nt, Artificial Sequence
  Description of Artificial Sequence: Synthetic oligonucleotide
  Sense strand starting at position 1179 of SEQ ID NO: 1563197
cuugcugaaugcuuaggaa

SEQ ID NO: 1802340 - RNA, 19 nt, Artificial Sequence
  Description of Artificial Sequence: Synthetic oligonucleotide
  Antisense strand to SEQ ID NO: 1802339
uuccuaagcauucagcaag

SEQ ID NO: 1802341 - RNA, 19 nt, Artificial Sequence
  Description of Artificial Sequence: Synthetic oligonucleotide
  Sense strand starting at position 1191 of SEQ ID NO: 1563197
uuaggaaucuagguucuac

SEQ ID NO: 1802342 - RNA, 19 nt, Artificial Sequence
  Description of Artificial Sequence: Synthetic oligonucleotide
  Antisense strand to SEQ ID NO: 1802341
guagaaccuagauuccuaa

SEQ ID NO: 1802343 - RNA, 19 nt, Artificial Sequence
  Description of Artificial Sequence: Synthetic oligonucleotide
  Sense strand starting at position 1220 of SEQ ID NO: 1563197
accauuuauugacauguga

SEQ ID NO: 1802344 - RNA, 19 nt, Artificial Sequence
  Description of Artificial Sequence: Synthetic oligonucleotide
  Antisense strand to SEQ ID NO: 1802343
ucacaugucaauaaauggu

SEQ ID NO: 1802345 - RNA, 19 nt, Artificial Sequence
  Description of Artificial Sequence: Synthetic oligonucleotide
  Sense strand starting at position 1227 of SEQ ID NO: 1563197
auugacaugugacccuaaa

SEQ ID NO: 1802346 - RNA, 19 nt, Artificial Sequence
  Description of Artificial Sequence: Synthetic oligonucleotide
  Antisense strand to SEQ ID NO: 1802345
uuuagggucacaugucaau

SEQ ID NO: 1802347 - RNA, 19 nt, Artificial Sequence
  Description of Artificial Sequence: Synthetic oligonucleotide
  Sense strand starting at position 1313 of SEQ ID NO: 1563197
uuguauucgccuuaagaaa

SEQ ID NO: 1802348 - RNA, 19 nt, Artificial Sequence
  Description of Artificial Sequence: Synthetic oligonucleotide
  Antisense strand to SEQ ID NO: 1802347
uuucuuaaggcgaauacaa

SEQ ID NO: 1802349 - RNA, 19 nt, Artificial Sequence
  Description of Artificial Sequence: Synthetic oligonucleotide
  Sense strand starting at position 1545 of SEQ ID NO: 1563197
agaaaugcaucuccguacu

SEQ ID NO: 1802350 - RNA, 19 nt, Artificial Sequence
  Description of Artificial Sequence: Synthetic oligonucleotide
  Antisense strand to SEQ ID NO: 1802349
aguacggagaugcauuucu

SEQ ID NO: 1802351 - RNA, 19 nt, Artificial Sequence
  Description of Artificial Sequence: Synthetic oligonucleotide
  Sense strand starting at position 2111 of SEQ ID NO: 1563197
gccugauaggcgggacuua

SEQ ID NO: 1802352 - RNA, 19 nt, Artificial Sequence
  Description of Artificial Sequence: Synthetic oligonucleotide
  Antisense strand to SEQ ID NO: 1802351
uaagucccgccuaucaggc

SEQ ID NO: 1802353 - RNA, 19 nt, Artificial Sequence
  Description of Artificial Sequence: Synthetic oligonucleotide
  Sense strand starting at position 2112 of SEQ ID NO: 1563197
ccugauaggcgggacuuaa

SEQ ID NO: 1802354 - RNA, 19 nt, Artificial Sequence
  Description of Artificial Sequence: Synthetic oligonucleotide
  Antisense strand to SEQ ID NO: 1802353
uuaagucccgccuaucagg

SEQ ID NO: 1802355 - RNA, 19 nt, Artificial Sequence
  Description of Artificial Sequence: Synthetic oligonucleotide
  Sense strand starting at position 2543 of SEQ ID NO: 1563197
ucauguaaacaacgauuau

SEQ ID NO: 1802356 - RNA, 19 nt, Artificial Sequence
  Description of Artificial Sequence: Synthetic oligonucleotide
  Antisense strand to SEQ ID NO: 1802355
auaaucguuguuuacauga

SEQ ID NO: 1802357 - RNA, 19 nt, Artificial Sequence
  Description of Artificial Sequence: Synthetic oligonucleotide
  Sense strand starting at position 2560 of SEQ ID NO: 1563197
auuuguuauuaugucgcaa

SEQ ID NO: 1802358 - RNA, 19 nt, Artificial Sequence
  Description of Artificial Sequence: Synthetic oligonucleotide
  Antisense strand to SEQ ID NO: 1802357
uugcgacauaauaacaaau

SEQ ID NO: 1802359 - RNA, 19 nt, Artificial Sequence
  Description of Artificial Sequence: Synthetic oligonucleotide
  Sense strand starting at position 2575 of SEQ ID NO: 1563197
gcaauuaauuuaugggaca

SEQ ID NO: 1802360 - RNA, 19 nt, Artificial Sequence
  Description of Artificial Sequence: Synthetic oligonucleotide
  Antisense strand to SEQ ID NO: 1802359
ugucccauaaauuaauugc

SEQ ID NO: 1802361 - RNA, 19 nt, Artificial Sequence
  Description of Artificial Sequence: Synthetic oligonucleotide
  Sense strand starting at position 2605 of SEQ ID NO: 1563197
aaagaaguauuacugguua

SEQ ID NO: 1802362 - RNA, 19 nt, Artificial Sequence
  Description of Artificial Sequence: Synthetic oligonucleotide
  Antisense strand to SEQ ID NO: 1802361
uaaccaguaauacuucuuu

SEQ ID NO: 1802363 - RNA, 19 nt, Artificial Sequence
  Description of Artificial Sequence: Synthetic oligonucleotide
  Sense strand starting at position 2609 of SEQ ID NO: 1563197
aaguauuacugguuaucug

SEQ ID NO: 1802364 - RNA, 19 nt, Artificial Sequence
  Description of Artificial Sequence: Synthetic oligonucleotide
  Antisense strand to SEQ ID NO: 1802363
cagauaaccaguaauacuu

SEQ ID NO: 1802365 - RNA, 19 nt, Artificial Sequence
  Description of Artificial Sequence: Synthetic oligonucleotide
  Sense strand starting at position 2610 of SEQ ID NO: 1563197
aguauuacugguuaucuga

SEQ ID NO: 1802366 - RNA, 19 nt, Artificial Sequence
  Description of Artificial Sequence: Synthetic oligonucleotide
  Antisense strand to SEQ ID NO: 1802365
ucagauaaccaguaauacu

SEQ ID NO: 1802367 - RNA, 19 nt, Artificial Sequence
  Description of Artificial Sequence: Synthetic oligonucleotide
  Sense strand starting at position 2613 of SEQ ID NO: 1563197
auuacugguuaucugaaau

SEQ ID NO: 1802368 - RNA, 19 nt, Artificial Sequence
  Description of Artificial Sequence: Synthetic oligonucleotide
  Antisense strand to SEQ ID NO: 1802367
auuucagauaaccaguaau

SEQ ID NO: 1802369 - RNA, 19 nt, Artificial Sequence
  Description of Artificial Sequence: Synthetic oligonucleotide
  Sense strand starting at position 2638 of SEQ ID NO: 1563197
auaacuggguauccuauau

SEQ ID NO: 1802370 - RNA, 19 nt, Artificial Sequence
  Description of Artificial Sequence: Synthetic oligonucleotide
  Antisense strand to SEQ ID NO: 1802369
auauaggauacccaguuau

SEQ ID NO: 1802371 - RNA, 19 nt, Artificial Sequence
  Description of Artificial Sequence: Synthetic oligonucleotide
  Sense strand starting at position 2770 of SEQ ID NO: 1563197
ugggcaagguguucuauga

SEQ ID NO: 1802372 - RNA, 19 nt, Artificial Sequence
  Description of Artificial Sequence: Synthetic oligonucleotide
  Antisense strand to SEQ ID NO: 1802371
ucauagaacaccuugccca

SEQ ID NO: 1802373 - RNA, 19 nt, Artificial Sequence
  Description of Artificial Sequence: Synthetic oligonucleotide
  Sense strand starting at position 2774 of SEQ ID NO: 1563197
caagguguucuaugaggau

SEQ ID NO: 1802374 - RNA, 19 nt, Artificial Sequence
  Description of Artificial Sequence: Synthetic oligonucleotide
  Antisense strand to SEQ ID NO: 1802373
auccucauagaacaccuug

SEQ ID NO: 1802375 - RNA, 19 nt, Artificial Sequence
  Description of Artificial Sequence: Synthetic oligonucleotide
  Sense strand starting at position 2778 of SEQ ID NO: 1563197
guguucuaugaggauguau

SEQ ID NO: 1802376 - RNA, 19 nt, Artificial Sequence
  Description of Artificial Sequence: Synthetic oligonucleotide
  Antisense strand to SEQ ID NO: 1802375
auacauccucauagaacac

SEQ ID NO: 1802377 - RNA, 19 nt, Artificial Sequence
  Description of Artificial Sequence: Synthetic oligonucleotide
  Sense strand starting at position 2780 of SEQ ID NO: 1563197
guucuaugaggauguauga

SEQ ID NO: 1802378 - RNA, 19 nt, Artificial Sequence
  Description of Artificial Sequence: Synthetic oligonucleotide
  Antisense strand to SEQ ID NO: 1802377
ucauacauccucauagaac

SEQ ID NO: 1802379 - RNA, 19 nt, Artificial Sequence
  Description of Artificial Sequence: Synthetic oligonucleotide
  Sense strand starting at position 2917 of SEQ ID NO: 1563197
gcugaugaccuugaaaggu

SEQ ID NO: 1802380 - RNA, 19 nt, Artificial Sequence
  Description of Artificial Sequence: Synthetic oligonucleotide
  Antisense strand to SEQ ID NO: 1802379
accuuucaaggucaucagc

SEQ ID NO: 1802381 - RNA, 19 nt, Artificial Sequence
  Description of Artificial Sequence: Synthetic oligonucleotide
  Sense strand starting at position 3018 of SEQ ID NO: 1563197
cagguuaagcaucaguaau

SEQ ID NO: 1802382 - RNA, 19 nt, Artificial Sequence
  Description of Artificial Sequence: Synthetic oligonucleotide
  Antisense strand to SEQ ID NO: 1802381
auuacugaugcuuaaccug

SEQ ID NO: 1802383 - RNA, 19 nt, Artificial Sequence
  Description of Artificial Sequence: Synthetic oligonucleotide
  Sense strand starting at position 3020 of SEQ ID NO: 1563197
gguuaagcaucaguaauca

SEQ ID NO: 1802384 - RNA, 19 nt, Artificial Sequence
  Description of Artificial Sequence: Synthetic oligonucleotide
  Antisense strand to SEQ ID NO: 1802383
ugauuacugaugcuuaacc

SEQ ID NO: 1802385 - RNA, 19 nt, Artificial Sequence
  Description of Artificial Sequence: Synthetic oligonucleotide
  Sense strand starting at position 3044 of SEQ ID NO: 1563197
gagauuauaugagagagga

SEQ ID NO: 1802386 - RNA, 19 nt, Artificial Sequence
  Description of Artificial Sequence: Synthetic oligonucleotide
  Antisense strand to SEQ ID NO: 1802385
uccucucucauauaaucuc

SEQ ID NO: 1802387 - RNA, 19 nt, Artificial Sequence
  Description of Artificial Sequence: Synthetic oligonucleotide
  Sense strand starting at position 3087 of SEQ ID NO: 1563197
aggcacauuuauugaggau

SEQ ID NO: 1802388 - RNA, 19 nt, Artificial Sequence
  Description of Artificial Sequence: Synthetic oligonucleotide
  Antisense strand to SEQ ID NO: 1802387
auccucaauaaaugugccu

SEQ ID NO: 1802389 - RNA, 19 nt, Artificial Sequence
  Description of Artificial Sequence: Synthetic oligonucleotide
  Sense strand starting at position 3142 of SEQ ID NO: 1563197
gaaggcguuugagcaugau

SEQ ID NO: 1802390 - RNA, 19 nt, Artificial Sequence
  Description of Artificial Sequence: Synthetic oligonucleotide
  Antisense strand to SEQ ID NO: 1802389
aucaugcucaaacgccuuc

SEQ ID NO: 1802391 - RNA, 19 nt, Artificial Sequence
  Description of Artificial Sequence: Synthetic oligonucleotide
  Sense strand starting at position 3145 of SEQ ID NO: 1563197
ggcguuugagcaugauuua

SEQ ID NO: 1802392 - RNA, 19 nt, Artificial Sequence
  Description of Artificial Sequence: Synthetic oligonucleotide
  Antisense strand to SEQ ID NO: 1802391
uaaaucaugcucaaacgcc

SEQ ID NO: 1802393 - RNA, 19 nt, Artificial Sequence
  Description of Artificial Sequence: Synthetic oligonucleotide
  Sense strand starting at position 3146 of SEQ ID NO: 1563197
gcguuugagcaugauuuac

SEQ ID NO: 1802394 - RNA, 19 nt, Artificial Sequence
  Description of Artificial Sequence: Synthetic oligonucleotide
  Antisense strand to SEQ ID NO: 1802393
guaaaucaugcucaaacgc

SEQ ID NO: 1802395 - RNA, 19 nt, Artificial Sequence
  Description of Artificial Sequence: Synthetic oligonucleotide
  Sense strand starting at position 3428 of SEQ ID NO: 1563197
gugggaagauccuuugaca

SEQ ID NO: 1802396 - RNA, 19 nt, Artificial Sequence
  Description of Artificial Sequence: Synthetic oligonucleotide
  Antisense strand to SEQ ID NO: 1802395
ugucaaaggaucuucccac

SEQ ID NO: 1802397 - RNA, 19 nt, Artificial Sequence
  Description of Artificial Sequence: Synthetic oligonucleotide
  Sense strand starting at position 3583 of SEQ ID NO: 1563197
cucucaaauuuagggaaca

SEQ ID NO: 1802398 - RNA, 19 nt, Artificial Sequence
  Description of Artificial Sequence: Synthetic oligonucleotide
  Antisense strand to SEQ ID NO: 1802397
uguucccuaaauuugagag

SEQ ID NO: 1802399 - RNA, 19 nt, Artificial Sequence
  Description of Artificial Sequence: Synthetic oligonucleotide
  Sense strand starting at position 3719 of SEQ ID NO: 1563197
uuccaucaggcaugugaaa

SEQ ID NO: 1802400 - RNA, 19 nt, Artificial Sequence
  Description of Artificial Sequence: Synthetic oligonucleotide
  Antisense strand to SEQ ID NO: 1802399
uuucacaugccugauggaa

SEQ ID NO: 1802401 - RNA, 19 nt, Artificial Sequence
  Description of Artificial Sequence: Synthetic oligonucleotide
  Sense strand starting at position 3784 of SEQ ID NO: 1563197
uaaugugacugacucgaaa

SEQ ID NO: 1802402 - RNA, 19 nt, Artificial Sequence
  Description of Artificial Sequence: Synthetic oligonucleotide
  Antisense strand to SEQ ID NO: 1802401
uuucgagucagucacauua

SEQ ID NO: 1802403 - RNA, 19 nt, Artificial Sequence
  Description of Artificial Sequence: Synthetic oligonucleotide
  Sense strand starting at position 194 of SEQ ID NO: 1563198
ggaagauguggcuguuaga

SEQ ID NO: 1802404 - RNA, 19 nt, Artificial Sequence
  Description of Artificial Sequence: Synthetic oligonucleotide
  Antisense strand to SEQ ID NO: 1802403
ucuaacagccacaucuucc

SEQ ID NO: 1802405 - RNA, 19 nt, Artificial Sequence
  Description of Artificial Sequence: Synthetic oligonucleotide
  Sense strand starting at position 292 of SEQ ID NO: 1563198
uucuaucuaucaguccaga

SEQ ID NO: 1802406 - RNA, 19 nt, Artificial Sequence
  Description of Artificial Sequence: Synthetic oligonucleotide
  Antisense strand to SEQ ID NO: 1802405
ucuggacugauagauagaa

SEQ ID NO: 1802407 - RNA, 19 nt, Artificial Sequence
  Description of Artificial Sequence: Synthetic oligonucleotide
  Sense strand starting at position 418 of SEQ ID NO: 1563198
aauauauaacguuagugag

SEQ ID NO: 1802408 - RNA, 19 nt, Artificial Sequence
  Description of Artificial Sequence: Synthetic oligonucleotide
  Antisense strand to SEQ ID NO: 1802407
cucacuaacguuauauauu

SEQ ID NO: 1802409 - RNA, 19 nt, Artificial Sequence
  Description of Artificial Sequence: Synthetic oligonucleotide
  Sense strand starting at position 420 of SEQ ID NO: 1563198
uauauaacguuagugagau

SEQ ID NO: 1802410 - RNA, 19 nt, Artificial Sequence
  Description of Artificial Sequence: Synthetic oligonucleotide
  Antisense strand to SEQ ID NO: 1802409
aucucacuaacguuauaua

SEQ ID NO: 1802411 - RNA, 19 nt, Artificial Sequence
  Description of Artificial Sequence: Synthetic oligonucleotide
  Sense strand starting at position 510 of SEQ ID NO: 1563198
cucucaugucaugaccuua

SEQ ID NO: 1802412 - RNA, 19 nt, Artificial Sequence
  Description of Artificial Sequence: Synthetic oligonucleotide
  Antisense strand to SEQ ID NO: 1802411
uaaggucaugacaugagag

SEQ ID NO: 1802413 - RNA, 19 nt, Artificial Sequence
  Description of Artificial Sequence: Synthetic oligonucleotide
  Sense strand starting at position 671 of SEQ ID NO: 1563198
acucaauuguauguaaacu

SEQ ID NO: 1802414 - RNA, 19 nt, Artificial Sequence
  Description of Artificial Sequence: Synthetic oligonucleotide
  Antisense strand to SEQ ID NO: 1802413
aguuuacauacaauugagu

SEQ ID NO: 1802415 - RNA, 19 nt, Artificial Sequence
  Description of Artificial Sequence: Synthetic oligonucleotide
  Sense strand starting at position 1031 of SEQ ID NO: 1563198
cugucuuauuucuugugca

SEQ ID NO: 1802416 - RNA, 19 nt, Artificial Sequence
  Description of Artificial Sequence: Synthetic oligonucleotide
  Antisense strand to SEQ ID NO: 1802415
ugcacaagaaauaagacag

SEQ ID NO: 1802417 - RNA, 19 nt, Artificial Sequence
  Description of Artificial Sequence: Synthetic oligonucleotide
  Sense strand starting at position 1165 of SEQ ID NO: 1563198
agauaaagagucugugauu

SEQ ID NO: 1802418 - RNA, 19 nt, Artificial Sequence
  Description of Artificial Sequence: Synthetic oligonucleotide
  Antisense strand to SEQ ID NO: 1802417
aaucacagacucuuuaucu

SEQ ID NO: 1802419 - RNA, 19 nt, Artificial Sequence
  Description of Artificial Sequence: Synthetic oligonucleotide
  Sense strand starting at position 1166 of SEQ ID NO: 1563198
gauaaagagucugugauua

SEQ ID NO: 1802420 - RNA, 19 nt, Artificial Sequence
  Description of Artificial Sequence: Synthetic oligonucleotide
  Antisense strand to SEQ ID NO: 1802419
uaaucacagacucuuuauc

SEQ ID NO: 1802421 - RNA, 19 nt, Artificial Sequence
  Description of Artificial Sequence: Synthetic oligonucleotide
  Sense strand starting at position 1213 of SEQ ID NO: 1563198
ugaauugugaaacgauaag

SEQ ID NO: 1802422 - RNA, 19 nt, Artificial Sequence
  Description of Artificial Sequence: Synthetic oligonucleotide
  Antisense strand to SEQ ID NO: 1802421
cuuaucguuucacaauuca

SEQ ID NO: 1802423 - RNA, 19 nt, Artificial Sequence
  Description of Artificial Sequence: Synthetic oligonucleotide
  Sense strand starting at position 1230 of SEQ ID NO: 1563198
aguguuugugcuuaagaua

SEQ ID NO: 1802424 - RNA, 19 nt, Artificial Sequence
  Description of Artificial Sequence: Synthetic oligonucleotide
  Antisense strand to SEQ ID NO: 1802423
uaucuuaagcacaaacacu

SEQ ID NO: 1802425 - RNA, 19 nt, Artificial Sequence
  Description of Artificial Sequence: Synthetic oligonucleotide
  Sense strand starting at position 1244 of SEQ ID NO: 1563198
agauaaucucaacgucuac

SEQ ID NO: 1802426 - RNA, 19 nt, Artificial Sequence
  Description of Artificial Sequence: Synthetic oligonucleotide
  Antisense strand to SEQ ID NO: 1802425
guagacguugagauuaucu

SEQ ID NO: 1802427 - RNA, 19 nt, Artificial Sequence
  Description of Artificial Sequence: Synthetic oligonucleotide
  Sense strand starting at position 1253 of SEQ ID NO: 1563198
caacgucuacaacgaagaa

SEQ ID NO: 1802428 - RNA, 19 nt, Artificial Sequence
  Description of Artificial Sequence: Synthetic oligonucleotide
  Antisense strand to SEQ ID NO: 1802427
uucuucguuguagacguug

SEQ ID NO: 1802429 - RNA, 19 nt, Artificial Sequence
  Description of Artificial Sequence: Synthetic oligonucleotide
  Sense strand starting at position 1471 of SEQ ID NO: 1563198
aguauaaagaggugucacu

SEQ ID NO: 1802430 - RNA, 19 nt, Artificial Sequence
  Description of Artificial Sequence: Synthetic oligonucleotide
  Antisense strand to SEQ ID NO: 1802429
agugacaccucuuuauacu

SEQ ID NO: 1802431 - RNA, 19 nt, Artificial Sequence
  Description of Artificial Sequence: Synthetic oligonucleotide
  Sense strand starting at position 1480 of SEQ ID NO: 1563198
aggugucacuaagcaaaga

SEQ ID NO: 1802432 - RNA, 19 nt, Artificial Sequence
  Description of Artificial Sequence: Synthetic oligonucleotide
  Antisense strand to SEQ ID NO: 1802431
ucuuugcuuagugacaccu

SEQ ID NO: 1802433 - RNA, 19 nt, Artificial Sequence
  Description of Artificial Sequence: Synthetic oligonucleotide
  Sense strand starting at position 1547 of SEQ ID NO: 1563198
ucaauuaauuggguaacgu

SEQ ID NO: 1802434 - RNA, 19 nt, Artificial Sequence
  Description of Artificial Sequence: Synthetic oligonucleotide
  Antisense strand to SEQ ID NO: 1802433
acguuacccaauuaauuga

SEQ ID NO: 1802435 - RNA, 19 nt, Artificial Sequence
  Description of Artificial Sequence: Synthetic oligonucleotide
  Sense strand starting at position 1548 of SEQ ID NO: 1563198
caauuaauuggguaacgua

SEQ ID NO: 1802436 - RNA, 19 nt, Artificial Sequence
  Description of Artificial Sequence: Synthetic oligonucleotide
  Antisense strand to SEQ ID NO: 1802435
uacguuacccaauuaauug

SEQ ID NO: 1802437 - RNA, 19 nt, Artificial Sequence
  Description of Artificial Sequence: Synthetic oligonucleotide
  Sense strand starting at position 1612 of SEQ ID NO: 1563198
ugacacaggucaggauuua

SEQ ID NO: 1802438 - RNA, 19 nt, Artificial Sequence
  Description of Artificial Sequence: Synthetic oligonucleotide
  Antisense strand to SEQ ID NO: 1802437
uaaauccugaccuguguca

SEQ ID NO: 1802439 - RNA, 19 nt, Artificial Sequence
  Description of Artificial Sequence: Synthetic oligonucleotide
  Sense strand starting at position 1674 of SEQ ID NO: 1563198
uguaguuaauaccugaauu

SEQ ID NO: 1802440 - RNA, 19 nt, Artificial Sequence
  Description of Artificial Sequence: Synthetic oligonucleotide
  Antisense strand to SEQ ID NO: 1802439
aauucagguauuaacuaca

SEQ ID NO: 1802441 - RNA, 19 nt, Artificial Sequence
  Description of Artificial Sequence: Synthetic oligonucleotide
  Sense strand starting at position 1814 of SEQ ID NO: 1563198
ggacuuaccugguuucucu

SEQ ID NO: 1802442 - RNA, 19 nt, Artificial Sequence
  Description of Artificial Sequence: Synthetic oligonucleotide
  Antisense strand to SEQ ID NO: 1802441
agagaaaccagguaagucc

SEQ ID NO: 1802443 - RNA, 19 nt, Artificial Sequence
  Description of Artificial Sequence: Synthetic oligonucleotide
  Sense strand starting at position 2189 of SEQ ID NO: 1563198
guacgaguccacuauccca

SEQ ID NO: 1802444 - RNA, 19 nt, Artificial Sequence
  Description of Artificial Sequence: Synthetic oligonucleotide
  Antisense strand to SEQ ID NO: 1802443
ugggauaguggacucguac

SEQ ID NO: 1802445 - RNA, 19 nt, Artificial Sequence
  Description of Artificial Sequence: Synthetic oligonucleotide
  Sense strand starting at position 2317 of SEQ ID NO: 1563198
agucaucuuccacauaguu

SEQ ID NO: 1802446 - RNA, 19 nt, Artificial Sequence
  Description of Artificial Sequence: Synthetic oligonucleotide
  Antisense strand to SEQ ID NO: 1802445
aacuauguggaagaugacu

SEQ ID NO: 1802447 - RNA, 19 nt, Artificial Sequence
  Description of Artificial Sequence: Synthetic oligonucleotide
  Sense strand starting at position 2379 of SEQ ID NO: 1563198
guuaacugccaagauguaa

SEQ ID NO: 1802448 - RNA, 19 nt, Artificial Sequence
  Description of Artificial Sequence: Synthetic oligonucleotide
  Antisense strand to SEQ ID NO: 1802447
uuacaucuuggcaguuaac

SEQ ID NO: 1802449 - RNA, 19 nt, Artificial Sequence
  Description of Artificial Sequence: Synthetic oligonucleotide
  Sense strand starting at position 2465 of SEQ ID NO: 1563198
caguuagacuguguuaacu

SEQ ID NO: 1802450 - RNA, 19 nt, Artificial Sequence
  Description of Artificial Sequence: Synthetic oligonucleotide
  Antisense strand to SEQ ID NO: 1802449
aguuaacacagucuaacug

SEQ ID NO: 1802451 - RNA, 19 nt, Artificial Sequence
  Description of Artificial Sequence: Synthetic oligonucleotide
  Sense strand starting at position 2601 of SEQ ID NO: 1563198
agccuaauuccagauguaa

SEQ ID NO: 1802452 - RNA, 19 nt, Artificial Sequence
  Description of Artificial Sequence: Synthetic oligonucleotide
  Antisense strand to SEQ ID NO: 1802451
uuacaucuggaauuaggcu

SEQ ID NO: 1802453 - RNA, 19 nt, Artificial Sequence
  Description of Artificial Sequence: Synthetic oligonucleotide
  Sense strand starting at position 2609 of SEQ ID NO: 1563198
uccagauguaagugccaga

SEQ ID NO: 1802454 - RNA, 19 nt, Artificial Sequence
  Description of Artificial Sequence: Synthetic oligonucleotide
  Antisense strand to SEQ ID NO: 1802453
ucuggcacuuacaucugga

SEQ ID NO: 1802455 - RNA, 19 nt, Artificial Sequence
  Description of Artificial Sequence: Synthetic oligonucleotide
  Sense strand starting at position 2614 of SEQ ID NO: 1563198
auguaagugccagaacuau

SEQ ID NO: 1802456 - RNA, 19 nt, Artificial Sequence
  Description of Artificial Sequence: Synthetic oligonucleotide
  Antisense strand to SEQ ID NO: 1802455
auaguucuggcacuuacau

SEQ ID NO: 1802457 - RNA, 19 nt, Artificial Sequence
  Description of Artificial Sequence: Synthetic oligonucleotide
  Sense strand starting at position 2812 of SEQ ID NO: 1563198
agaagauuccggugaugca

SEQ ID NO: 1802458 - RNA, 19 nt, Artificial Sequence
  Description of Artificial Sequence: Synthetic oligonucleotide
  Antisense strand to SEQ ID NO: 1802457
ugcaucaccggaaucuucu

SEQ ID NO: 1802459 - RNA, 19 nt, Artificial Sequence
  Description of Artificial Sequence: Synthetic oligonucleotide
  Sense strand starting at position 2813 of SEQ ID NO: 1563198
gaagauuccggugaugcaa

SEQ ID NO: 1802460 - RNA, 19 nt, Artificial Sequence
  Description of Artificial Sequence: Synthetic oligonucleotide
  Antisense strand to SEQ ID NO: 1802459
uugcaucaccggaaucuuc

SEQ ID NO: 1802461 - RNA, 19 nt, Artificial Sequence
  Description of Artificial Sequence: Synthetic oligonucleotide
  Sense strand starting at position 3260 of SEQ ID NO: 1563198
ggcacaaaguaagcauauu

SEQ ID NO: 1802462 - RNA, 19 nt, Artificial Sequence
  Description of Artificial Sequence: Synthetic oligonucleotide
  Antisense strand to SEQ ID NO: 1802461
aauaugcuuacuuugugcc

SEQ ID NO: 1802463 - RNA, 19 nt, Artificial Sequence
  Description of Artificial Sequence: Synthetic oligonucleotide
  Sense strand starting at position 3309 of SEQ ID NO: 1563198
uugucaagucccuauuaag

SEQ ID NO: 1802464 - RNA, 19 nt, Artificial Sequence
  Description of Artificial Sequence: Synthetic oligonucleotide
  Antisense strand to SEQ ID NO: 1802463
cuuaauagggacuugacaa

SEQ ID NO: 1802465 - RNA, 19 nt, Artificial Sequence
  Description of Artificial Sequence: Synthetic oligonucleotide
  Sense strand starting at position 3369 of SEQ ID NO: 1563198
uuaggucugugauuaagua

SEQ ID NO: 1802466 - RNA, 19 nt, Artificial Sequence
  Description of Artificial Sequence: Synthetic oligonucleotide
  Antisense strand to SEQ ID NO: 1802465
uacuuaaucacagaccuaa

SEQ ID NO: 1802467 - RNA, 19 nt, Artificial Sequence
  Description of Artificial Sequence: Synthetic oligonucleotide
  Sense strand starting at position 3370 of SEQ ID NO: 1563198
uaggucugugauuaaguau

SEQ ID NO: 1802468 - RNA, 19 nt, Artificial Sequence
  Description of Artificial Sequence: Synthetic oligonucleotide
  Antisense strand to SEQ ID NO: 1802467
auacuuaaucacagaccua

SEQ ID NO: 1802469 - RNA, 19 nt, Artificial Sequence
  Description of Artificial Sequence: Synthetic oligonucleotide
  Sense strand starting at position 3373 of SEQ ID NO: 1563198
gucugugauuaaguauuuc

SEQ ID NO: 1802470 - RNA, 19 nt, Artificial Sequence
  Description of Artificial Sequence: Synthetic oligonucleotide
  Antisense strand to SEQ ID NO: 1802469
gaaauacuuaaucacagac

SEQ ID NO: 1802471 - RNA, 19 nt, Artificial Sequence
  Description of Artificial Sequence: Synthetic oligonucleotide
  Sense strand starting at position 3566 of SEQ ID NO: 1563198
uuaaguggguuuccaaaua

SEQ ID NO: 1802472 - RNA, 19 nt, Artificial Sequence
  Description of Artificial Sequence: Synthetic oligonucleotide
  Antisense strand to SEQ ID NO: 1802471
uauuuggaaacccacuuaa

SEQ ID NO: 1802473 - RNA, 19 nt, Artificial Sequence
  Description of Artificial Sequence: Synthetic oligonucleotide
  Sense strand starting at position 3727 of SEQ ID NO: 1563198
aguuuaucacuaugagcug

SEQ ID NO: 1802474 - RNA, 19 nt, Artificial Sequence
  Description of Artificial Sequence: Synthetic oligonucleotide
  Antisense strand to SEQ ID NO: 1802473
cagcucauagugauaaacu

SEQ ID NO: 1802475 - RNA, 19 nt, Artificial Sequence
  Description of Artificial Sequence: Synthetic oligonucleotide
  Sense strand starting at position 3762 of SEQ ID NO: 1563198
ccauguacauucuuaggca

SEQ ID NO: 1802476 - RNA, 19 nt, Artificial Sequence
  Description of Artificial Sequence: Synthetic oligonucleotide
  Antisense strand to SEQ ID NO: 1802475
ugccuaagaauguacaugg

SEQ ID NO: 1802477 - RNA, 19 nt, Artificial Sequence
  Description of Artificial Sequence: Synthetic oligonucleotide
  Sense strand starting at position 3871 of SEQ ID NO: 1563198
gcagaagugugaucauagg

SEQ ID NO: 1802478 - RNA, 19 nt, Artificial Sequence
  Description of Artificial Sequence: Synthetic oligonucleotide
  Antisense strand to SEQ ID NO: 1802477
ccuaugaucacacuucugc

SEQ ID NO: 1802479 - RNA, 19 nt, Artificial Sequence
  Description of Artificial Sequence: Synthetic oligonucleotide
  Sense strand starting at position 3881 of SEQ ID NO: 1563198
gaucauagguccuuguaac

SEQ ID NO: 1802480 - RNA, 19 nt, Artificial Sequence
  Description of Artificial Sequence: Synthetic oligonucleotide
  Antisense strand to SEQ ID NO: 1802479
guuacaaggaccuaugauc

SEQ ID NO: 1802481 - RNA, 19 nt, Artificial Sequence
  Description of Artificial Sequence: Synthetic oligonucleotide
  Sense strand starting at position 3887 of SEQ ID NO: 1563198
agguccuuguaaccuuaaa

SEQ ID NO: 1802482 - RNA, 19 nt, Artificial Sequence
  Description of Artificial Sequence: Synthetic oligonucleotide
  Antisense strand to SEQ ID NO: 1802481
uuuaagguuacaaggaccu

SEQ ID NO: 1802483 - RNA, 19 nt, Artificial Sequence
  Description of Artificial Sequence: Synthetic oligonucleotide
  Sense strand starting at position 25 of SEQ ID NO: 1563199
gcacucaacuuaguuauga

SEQ ID NO: 1802484 - RNA, 19 nt, Artificial Sequence
  Description of Artificial Sequence: Synthetic oligonucleotide
  Antisense strand to SEQ ID NO: 1802483
ucauaacuaaguugagugc

SEQ ID NO: 1802485 - RNA, 19 nt, Artificial Sequence
  Description of Artificial Sequence: Synthetic oligonucleotide
  Sense strand starting at position 125 of SEQ ID NO: 1563199
ucagaaauucuauauacgu

SEQ ID NO: 1802486 - RNA, 19 nt, Artificial Sequence
  Description of Artificial Sequence: Synthetic oligonucleotide
  Antisense strand to SEQ ID NO: 1802485
acguauauagaauuucuga

SEQ ID NO: 1802487 - RNA, 19 nt, Artificial Sequence
  Description of Artificial Sequence: Synthetic oligonucleotide
  Sense strand starting at position 196 of SEQ ID NO: 1563199
aaauguagacuuugugaaa

SEQ ID NO: 1802488 - RNA, 19 nt, Artificial Sequence
  Description of Artificial Sequence: Synthetic oligonucleotide
  Antisense strand to SEQ ID NO: 1802487
uuucacaaagucuacauuu

SEQ ID NO: 1802489 - RNA, 19 nt, Artificial Sequence
  Description of Artificial Sequence: Synthetic oligonucleotide
  Sense strand starting at position 197 of SEQ ID NO: 1563199
aauguagacuuugugaaac

SEQ ID NO: 1802490 - RNA, 19 nt, Artificial Sequence
  Description of Artificial Sequence: Synthetic oligonucleotide
  Antisense strand to SEQ ID NO: 1802489
guuucacaaagucuacauu

SEQ ID NO: 1802491 - RNA, 19 nt, Artificial Sequence
  Description of Artificial Sequence: Synthetic oligonucleotide
  Sense strand starting at position 251 of SEQ ID NO: 1563199
guacaccauccaugcauau

SEQ ID NO: 1802492 - RNA, 19 nt, Artificial Sequence
  Description of Artificial Sequence: Synthetic oligonucleotide
  Antisense strand to SEQ ID NO: 1802491
auaugcauggaugguguac

SEQ ID NO: 1802493 - RNA, 19 nt, Artificial Sequence
  Description of Artificial Sequence: Synthetic oligonucleotide
  Sense strand starting at position 270 of SEQ ID NO: 1563199
gaacaugagugccugguaa

SEQ ID NO: 1802494 - RNA, 19 nt, Artificial Sequence
  Description of Artificial Sequence: Synthetic oligonucleotide
  Antisense strand to SEQ ID NO: 1802493
uuaccaggcacucauguuc

SEQ ID NO: 1802495 - RNA, 19 nt, Artificial Sequence
  Description of Artificial Sequence: Synthetic oligonucleotide
  Sense strand starting at position 300 of SEQ ID NO: 1563199
caaguuauacuggguacca

SEQ ID NO: 1802496 - RNA, 19 nt, Artificial Sequence
  Description of Artificial Sequence: Synthetic oligonucleotide
  Antisense strand to SEQ ID NO: 1802495
ugguacccaguauaacuug

SEQ ID NO: 1802497 - RNA, 19 nt, Artificial Sequence
  Description of Artificial Sequence: Synthetic oligonucleotide
  Sense strand starting at position 351 of SEQ ID NO: 1563199
uguuguauuugagccuacu

SEQ ID NO: 1802498 - RNA, 19 nt, Artificial Sequence
  Description of Artificial Sequence: Synthetic oligonucleotide
  Antisense strand to SEQ ID NO: 1802497
aguaggcucaaauacaaca

SEQ ID NO: 1802499 - RNA, 19 nt, Artificial Sequence
  Description of Artificial Sequence: Synthetic oligonucleotide
  Sense strand starting at position 389 of SEQ ID NO: 1563199
gccacaaucguguacacaa

SEQ ID NO: 1802500 - RNA, 19 nt, Artificial Sequence
  Description of Artificial Sequence: Synthetic oligonucleotide
  Antisense strand to SEQ ID NO: 1802499
uuguguacacgauuguggc

SEQ ID NO: 1802501 - RNA, 19 nt, Artificial Sequence
  Description of Artificial Sequence: Synthetic oligonucleotide
  Sense strand starting at position 397 of SEQ ID NO: 1563199
cguguacacaacuagagau

SEQ ID NO: 1802502 - RNA, 19 nt, Artificial Sequence
  Description of Artificial Sequence: Synthetic oligonucleotide
  Antisense strand to SEQ ID NO: 1802501
aucucuaguuguguacacg

SEQ ID NO: 1802503 - RNA, 19 nt, Artificial Sequence
  Description of Artificial Sequence: Synthetic oligonucleotide
  Sense strand starting at position 579 of SEQ ID NO: 1563199
aggcacauuucgccaacuu

SEQ ID NO: 1802504 - RNA, 19 nt, Artificial Sequence
  Description of Artificial Sequence: Synthetic oligonucleotide
  Antisense strand to SEQ ID NO: 1802503
aaguuggcgaaaugugccu

SEQ ID NO: 1802505 - RNA, 19 nt, Artificial Sequence
  Description of Artificial Sequence: Synthetic oligonucleotide
  Sense strand starting at position 651 of SEQ ID NO: 1563199
aaggaugcaucuccgagua

SEQ ID NO: 1802506 - RNA, 19 nt, Artificial Sequence
  Description of Artificial Sequence: Synthetic oligonucleotide
  Antisense strand to SEQ ID NO: 1802505
uacucggagaugcauccuu

SEQ ID NO: 1802507 - RNA, 19 nt, Artificial Sequence
  Description of Artificial Sequence: Synthetic oligonucleotide
  Sense strand starting at position 830 of SEQ ID NO: 1563199
uaauaaacgugcuugauug

SEQ ID NO: 1802508 - RNA, 19 nt, Artificial Sequence
  Description of Artificial Sequence: Synthetic oligonucleotide
  Antisense strand to SEQ ID NO: 1802507
caaucaagcacguuuauua

SEQ ID NO: 1802509 - RNA, 19 nt, Artificial Sequence
  Description of Artificial Sequence: Synthetic oligonucleotide
  Sense strand starting at position 838 of SEQ ID NO: 1563199
gugcuugauugguuaagag

SEQ ID NO: 1802510 - RNA, 19 nt, Artificial Sequence
  Description of Artificial Sequence: Synthetic oligonucleotide
  Antisense strand to SEQ ID NO: 1802509
cucuuaaccaaucaagcac

SEQ ID NO: 1802511 - RNA, 19 nt, Artificial Sequence
  Description of Artificial Sequence: Synthetic oligonucleotide
  Sense strand starting at position 1041 of SEQ ID NO: 1563199
auacuaggguccucuggaa

SEQ ID NO: 1802512 - RNA, 19 nt, Artificial Sequence
  Description of Artificial Sequence: Synthetic oligonucleotide
  Antisense strand to SEQ ID NO: 1802511
uuccagaggacccuaguau

SEQ ID NO: 1802513 - RNA, 19 nt, Artificial Sequence
  Description of Artificial Sequence: Synthetic oligonucleotide
  Sense strand starting at position 1336 of SEQ ID NO: 1563199
aguuucuaggcccaaagau

SEQ ID NO: 1802514 - RNA, 19 nt, Artificial Sequence
  Description of Artificial Sequence: Synthetic oligonucleotide
  Antisense strand to SEQ ID NO: 1802513
aucuuugggccuagaaacu

SEQ ID NO: 1802515 - RNA, 19 nt, Artificial Sequence
  Description of Artificial Sequence: Synthetic oligonucleotide
  Sense strand starting at position 2018 of SEQ ID NO: 1563199
cacagagucuuauuggcua

SEQ ID NO: 1802516 - RNA, 19 nt, Artificial Sequence
  Description of Artificial Sequence: Synthetic oligonucleotide
  Antisense strand to SEQ ID NO: 1802515
uagccaauaagacucugug

SEQ ID NO: 1802517 - RNA, 19 nt, Artificial Sequence
  Description of Artificial Sequence: Synthetic oligonucleotide
  Sense strand starting at position 2023 of SEQ ID NO: 1563199
agucuuauuggcuacggaa

SEQ ID NO: 1802518 - RNA, 19 nt, Artificial Sequence
  Description of Artificial Sequence: Synthetic oligonucleotide
  Antisense strand to SEQ ID NO: 1802517
uuccguagccaauaagacu

SEQ ID NO: 1802519 - RNA, 19 nt, Artificial Sequence
  Description of Artificial Sequence: Synthetic oligonucleotide
  Sense strand starting at position 2025 of SEQ ID NO: 1563199
ucuuauuggcuacggaaau

SEQ ID NO: 1802520 - RNA, 19 nt, Artificial Sequence
  Description of Artificial Sequence: Synthetic oligonucleotide
  Antisense strand to SEQ ID NO: 1802519
auuuccguagccaauaaga

SEQ ID NO: 1802521 - RNA, 19 nt, Artificial Sequence
  Description of Artificial Sequence: Synthetic oligonucleotide
  Sense strand starting at position 2122 of SEQ ID NO: 1563199
agucccaauugaccugaaa

SEQ ID NO: 1802522 - RNA, 19 nt, Artificial Sequence
  Description of Artificial Sequence: Synthetic oligonucleotide
  Antisense strand to SEQ ID NO: 1802521
uuucaggucaauugggacu

SEQ ID NO: 1802523 - RNA, 19 nt, Artificial Sequence
  Description of Artificial Sequence: Synthetic oligonucleotide
  Sense strand starting at position 2146 of SEQ ID NO: 1563199
agugacauaguuugacuuu

SEQ ID NO: 1802524 - RNA, 19 nt, Artificial Sequence
  Description of Artificial Sequence: Synthetic oligonucleotide
  Antisense strand to SEQ ID NO: 1802523
aaagucaaacuaugucacu

SEQ ID NO: 1802525 - RNA, 19 nt, Artificial Sequence
  Description of Artificial Sequence: Synthetic oligonucleotide
  Sense strand starting at position 2244 of SEQ ID NO: 1563199
gagaguuuacuauaugcuc

SEQ ID NO: 1802526 - RNA, 19 nt, Artificial Sequence
  Description of Artificial Sequence: Synthetic oligonucleotide
  Antisense strand to SEQ ID NO: 1802525
gagcauauaguaaacucuc

SEQ ID NO: 1802527 - RNA, 19 nt, Artificial Sequence
  Description of Artificial Sequence: Synthetic oligonucleotide
  Sense strand starting at position 2303 of SEQ ID NO: 1563199
cuuuacacucucugaggua

SEQ ID NO: 1802528 - RNA, 19 nt, Artificial Sequence
  Description of Artificial Sequence: Synthetic oligonucleotide
  Antisense strand to SEQ ID NO: 1802527
uaccucagagaguguaaag

SEQ ID NO: 1802529 - RNA, 19 nt, Artificial Sequence
  Description of Artificial Sequence: Synthetic oligonucleotide
  Sense strand starting at position 2452 of SEQ ID NO: 1563199
cuaggcuaucaucaaguua

SEQ ID NO: 1802530 - RNA, 19 nt, Artificial Sequence
  Description of Artificial Sequence: Synthetic oligonucleotide
  Antisense strand to SEQ ID NO: 1802529
uaacuugaugauagccuag

SEQ ID NO: 1802531 - RNA, 19 nt, Artificial Sequence
  Description of Artificial Sequence: Synthetic oligonucleotide
  Sense strand starting at position 2467 of SEQ ID NO: 1563199
guuauuugcuuuccuagau

SEQ ID NO: 1802532 - RNA, 19 nt, Artificial Sequence
  Description of Artificial Sequence: Synthetic oligonucleotide
  Antisense strand to SEQ ID NO: 1802531
aucuaggaaagcaaauaac

SEQ ID NO: 1802533 - RNA, 19 nt, Artificial Sequence
  Description of Artificial Sequence: Synthetic oligonucleotide
  Sense strand starting at position 2507 of SEQ ID NO: 1563199
acaccaacaugcuuggaaa

SEQ ID NO: 1802534 - RNA, 19 nt, Artificial Sequence
  Description of Artificial Sequence: Synthetic oligonucleotide
  Antisense strand to SEQ ID NO: 1802533
uuuccaagcauguuggugu

SEQ ID NO: 1802535 - RNA, 19 nt, Artificial Sequence
  Description of Artificial Sequence: Synthetic oligonucleotide
  Sense strand starting at position 2518 of SEQ ID NO: 1563199
cuuggaaauguauaugugu

SEQ ID NO: 1802536 - RNA, 19 nt, Artificial Sequence
  Description of Artificial Sequence: Synthetic oligonucleotide
  Antisense strand to SEQ ID NO: 1802535
acacauauacauuuccaag

SEQ ID NO: 1802537 - RNA, 19 nt, Artificial Sequence
  Description of Artificial Sequence: Synthetic oligonucleotide
  Sense strand starting at position 2615 of SEQ ID NO: 1563199
ugaauaaagugucucuuag

SEQ ID NO: 1802538 - RNA, 19 nt, Artificial Sequence
  Description of Artificial Sequence: Synthetic oligonucleotide
  Antisense strand to SEQ ID NO: 1802537
cuaagagacacuuuauuca

SEQ ID NO: 1802539 - RNA, 19 nt, Artificial Sequence
  Description of Artificial Sequence: Synthetic oligonucleotide
  Sense strand starting at position 2698 of SEQ ID NO: 1563199
ugaugugauguuuagcuca

SEQ ID NO: 1802540 - RNA, 19 nt, Artificial Sequence
  Description of Artificial Sequence: Synthetic oligonucleotide
  Antisense strand to SEQ ID NO: 1802539
ugagcuaaacaucacauca

SEQ ID NO: 1802541 - RNA, 19 nt, Artificial Sequence
  Description of Artificial Sequence: Synthetic oligonucleotide
  Sense strand starting at position 2703 of SEQ ID NO: 1563199
ugauguuuagcucacaaac

SEQ ID NO: 1802542 - RNA, 19 nt, Artificial Sequence
  Description of Artificial Sequence: Synthetic oligonucleotide
  Antisense strand to SEQ ID NO: 1802541
guuugugagcuaaacauca

SEQ ID NO: 1802543 - RNA, 19 nt, Artificial Sequence
  Description of Artificial Sequence: Synthetic oligonucleotide
  Sense strand starting at position 2754 of SEQ ID NO: 1563199
agaggaagcuuggcuggau

SEQ ID NO: 1802544 - RNA, 19 nt, Artificial Sequence
  Description of Artificial Sequence: Synthetic oligonucleotide
  Antisense strand to SEQ ID NO: 1802543
auccagccaagcuuccucu

SEQ ID NO: 1802545 - RNA, 19 nt, Artificial Sequence
  Description of Artificial Sequence: Synthetic oligonucleotide
  Sense strand starting at position 2757 of SEQ ID NO: 1563199
ggaagcuuggcuggaugau

SEQ ID NO: 1802546 - RNA, 19 nt, Artificial Sequence
  Description of Artificial Sequence: Synthetic oligonucleotide
  Antisense strand to SEQ ID NO: 1802545
aucauccagccaagcuucc

SEQ ID NO: 1802547 - RNA, 19 nt, Artificial Sequence
  Description of Artificial Sequence: Synthetic oligonucleotide
  Sense strand starting at position 2763 of SEQ ID NO: 1563199
uuggcuggaugaucuguaa

SEQ ID NO: 1802548 - RNA, 19 nt, Artificial Sequence
  Description of Artificial Sequence: Synthetic oligonucleotide
  Antisense strand to SEQ ID NO: 1802547
uuacagaucauccagccaa

SEQ ID NO: 1802549 - RNA, 19 nt, Artificial Sequence
  Description of Artificial Sequence: Synthetic oligonucleotide
  Sense strand starting at position 2766 of SEQ ID NO: 1563199
gcuggaugaucuguaaaug

SEQ ID NO: 1802550 - RNA, 19 nt, Artificial Sequence
  Description of Artificial Sequence: Synthetic oligonucleotide
  Antisense strand to SEQ ID NO: 1802549
cauuuacagaucauccagc

SEQ ID NO: 1802551 - RNA, 19 nt, Artificial Sequence
  Description of Artificial Sequence: Synthetic oligonucleotide
  Sense strand starting at position 2821 of SEQ ID NO: 1563199
auugguaaucucugcuaau

SEQ ID NO: 1802552 - RNA, 19 nt, Artificial Sequence
  Description of Artificial Sequence: Synthetic oligonucleotide
  Antisense strand to SEQ ID NO: 1802551
auuagcagagauuaccaau

SEQ ID NO: 1802553 - RNA, 19 nt, Artificial Sequence
  Description of Artificial Sequence: Synthetic oligonucleotide
  Sense strand starting at position 3031 of SEQ ID NO: 1563199
aucugauaggcucaggcaa

SEQ ID NO: 1802554 - RNA, 19 nt, Artificial Sequence
  Description of Artificial Sequence: Synthetic oligonucleotide
  Antisense strand to SEQ ID NO: 1802553
uugccugagccuaucagau

SEQ ID NO: 1802555 - RNA, 19 nt, Artificial Sequence
  Description of Artificial Sequence: Synthetic oligonucleotide
  Sense strand starting at position 3539 of SEQ ID NO: 1563199
ugcagugaauuugaaugau

SEQ ID NO: 1802556 - RNA, 19 nt, Artificial Sequence
  Description of Artificial Sequence: Synthetic oligonucleotide
  Antisense strand to SEQ ID NO: 1802555
aucauucaaauucacugca

SEQ ID NO: 1802557 - RNA, 19 nt, Artificial Sequence
  Description of Artificial Sequence: Synthetic oligonucleotide
  Sense strand starting at position 3624 of SEQ ID NO: 1563199
guaaauagucaacauguua

SEQ ID NO: 1802558 - RNA, 19 nt, Artificial Sequence
  Description of Artificial Sequence: Synthetic oligonucleotide
  Antisense strand to SEQ ID NO: 1802557
uaacauguugacuauuuac

SEQ ID NO: 1802559 - RNA, 19 nt, Artificial Sequence
  Description of Artificial Sequence: Synthetic oligonucleotide
  Sense strand starting at position 3652 of SEQ ID NO: 1563199
uggcguuucgaacaaggaa

SEQ ID NO: 1802560 - RNA, 19 nt, Artificial Sequence
  Description of Artificial Sequence: Synthetic oligonucleotide
  Antisense strand to SEQ ID NO: 1802559
uuccuuguucgaaacgcca

SEQ ID NO: 1802561 - RNA, 19 nt, Artificial Sequence
  Description of Artificial Sequence: Synthetic oligonucleotide
  Sense strand starting at position 3895 of SEQ ID NO: 1563199
ugaaguuacaagggucaca

SEQ ID NO: 1802562 - RNA, 19 nt, Artificial Sequence
  Description of Artificial Sequence: Synthetic oligonucleotide
  Antisense strand to SEQ ID NO: 1802561
ugugacccuuguaacuuca

SEQ ID NO: 1802563 - RNA, 19 nt, Artificial Sequence
  Description of Artificial Sequence: Synthetic oligonucleotide
  Sense strand starting at position 27 of SEQ ID NO: 1563200
cguuacuaugaucaacaca

SEQ ID NO: 1802564 - RNA, 19 nt, Artificial Sequence
  Description of Artificial Sequence: Synthetic oligonucleotide
  Antisense strand to SEQ ID NO: 1802563
uguguugaucauaguaacg

SEQ ID NO: 1802565 - RNA, 19 nt, Artificial Sequence
  Description of Artificial Sequence: Synthetic oligonucleotide
  Sense strand starting at position 432 of SEQ ID NO: 1563200
uggaaaguaugacuaucua

SEQ ID NO: 1802566 - RNA, 19 nt, Artificial Sequence
  Description of Artificial Sequence: Synthetic oligonucleotide
  Antisense strand to SEQ ID NO: 1802565
uagauagucauacuuucca

SEQ ID NO: 1802567 - RNA, 19 nt, Artificial Sequence
  Description of Artificial Sequence: Synthetic oligonucleotide
  Sense strand starting at position 548 of SEQ ID NO: 1563200
ugaugucaucacugagauc

SEQ ID NO: 1802568 - RNA, 19 nt, Artificial Sequence
  Description of Artificial Sequence: Synthetic oligonucleotide
  Antisense strand to SEQ ID NO: 1802567
gaucucagugaugacauca

SEQ ID NO: 1802569 - RNA, 19 nt, Artificial Sequence
  Description of Artificial Sequence: Synthetic oligonucleotide
  Sense strand starting at position 593 of SEQ ID NO: 1563200
uuggccuuucguguaggua

SEQ ID NO: 1802570 - RNA, 19 nt, Artificial Sequence
  Description of Artificial Sequence: Synthetic oligonucleotide
  Antisense strand to SEQ ID NO: 1802569
uaccuacacgaaaggccaa

SEQ ID NO: 1802571 - RNA, 19 nt, Artificial Sequence
  Description of Artificial Sequence: Synthetic oligonucleotide
  Sense strand starting at position 1651 of SEQ ID NO: 1563200
uuaugaagaccauggguuu

SEQ ID NO: 1802572 - RNA, 19 nt, Artificial Sequence
  Description of Artificial Sequence: Synthetic oligonucleotide
  Antisense strand to SEQ ID NO: 1802571
aaacccauggucuucauaa

SEQ ID NO: 1802573 - RNA, 19 nt, Artificial Sequence
  Description of Artificial Sequence: Synthetic oligonucleotide
  Sense strand starting at position 1686 of SEQ ID NO: 1563200
aagagaugguaugucacaa

SEQ ID NO: 1802574 - RNA, 19 nt, Artificial Sequence
  Description of Artificial Sequence: Synthetic oligonucleotide
  Antisense strand to SEQ ID NO: 1802573
uugugacauaccaucucuu

SEQ ID NO: 1802575 - RNA, 19 nt, Artificial Sequence
  Description of Artificial Sequence: Synthetic oligonucleotide
  Sense strand starting at position 1957 of SEQ ID NO: 1563200
gagaaauaacaugggcuuu

SEQ ID NO: 1802576 - RNA, 19 nt, Artificial Sequence
  Description of Artificial Sequence: Synthetic oligonucleotide
  Antisense strand to SEQ ID NO: 1802575
aaagcccauguuauuucuc

SEQ ID NO: 1802577 - RNA, 19 nt, Artificial Sequence
  Description of Artificial Sequence: Synthetic oligonucleotide
  Sense strand starting at position 1968 of SEQ ID NO: 1563200
ugggcuuuaaccgaaugga

SEQ ID NO: 1802578 - RNA, 19 nt, Artificial Sequence
  Description of Artificial Sequence: Synthetic oligonucleotide
  Antisense strand to SEQ ID NO: 1802577
uccauucgguuaaagccca

SEQ ID NO: 1802579 - RNA, 19 nt, Artificial Sequence
  Description of Artificial Sequence: Synthetic oligonucleotide
  Sense strand starting at position 2013 of SEQ ID NO: 1563200
cuaaguuaucaugauguca

SEQ ID NO: 1802580 - RNA, 19 nt, Artificial Sequence
  Description of Artificial Sequence: Synthetic oligonucleotide
  Antisense strand to SEQ ID NO: 1802579
ugacaucaugauaacuuag

SEQ ID NO: 1802581 - RNA, 19 nt, Artificial Sequence
  Description of Artificial Sequence: Synthetic oligonucleotide
  Sense strand starting at position 2024 of SEQ ID NO: 1563200
ugaugucacugaccacaau

SEQ ID NO: 1802582 - RNA, 19 nt, Artificial Sequence
  Description of Artificial Sequence: Synthetic oligonucleotide
  Antisense strand to SEQ ID NO: 1802581
auuguggucagugacauca

SEQ ID NO: 1802583 - RNA, 19 nt, Artificial Sequence
  Description of Artificial Sequence: Synthetic oligonucleotide
  Sense strand starting at position 2060 of SEQ ID NO: 1563200
guagguuccagucaauaga

SEQ ID NO: 1802584 - RNA, 19 nt, Artificial Sequence
  Description of Artificial Sequence: Synthetic oligonucleotide
  Antisense strand to SEQ ID NO: 1802583
ucuauugacuggaaccuac

SEQ ID NO: 1802585 - RNA, 19 nt, Artificial Sequence
  Description of Artificial Sequence: Synthetic oligonucleotide
  Sense strand starting at position 2120 of SEQ ID NO: 1563200
ugguauccuaguuagagau

SEQ ID NO: 1802586 - RNA, 19 nt, Artificial Sequence
  Description of Artificial Sequence: Synthetic oligonucleotide
  Antisense strand to SEQ ID NO: 1802585
aucucuaacuaggauacca

SEQ ID NO: 1802587 - RNA, 19 nt, Artificial Sequence
  Description of Artificial Sequence: Synthetic oligonucleotide
  Sense strand starting at position 2196 of SEQ ID NO: 1563200
ugaugauguccugaacucu

SEQ ID NO: 1802588 - RNA, 19 nt, Artificial Sequence
  Description of Artificial Sequence: Synthetic oligonucleotide
  Antisense strand to SEQ ID NO: 1802587
agaguucaggacaucauca

SEQ ID NO: 1802589 - RNA, 19 nt, Artificial Sequence
  Description of Artificial Sequence: Synthetic oligonucleotide
  Sense strand starting at position 2349 of SEQ ID NO: 1563200
cagguauccggguaagaua

SEQ ID NO: 1802590 - RNA, 19 nt, Artificial Sequence
  Description of Artificial Sequence: Synthetic oligonucleotide
  Antisense strand to SEQ ID NO: 1802589
uaucuuacccggauaccug

SEQ ID NO: 1802591 - RNA, 19 nt, Artificial Sequence
  Description of Artificial Sequence: Synthetic oligonucleotide
  Sense strand starting at position 2372 of SEQ ID NO: 1563200
agaguuccucaccacagua

SEQ ID NO: 1802592 - RNA, 19 nt, Artificial Sequence
  Description of Artificial Sequence: Synthetic oligonucleotide
  Antisense strand to SEQ ID NO: 1802591
uacuguggugaggaacucu

SEQ ID NO: 1802593 - RNA, 19 nt, Artificial Sequence
  Description of Artificial Sequence: Synthetic oligonucleotide
  Sense strand starting at position 2510 of SEQ ID NO: 1563200
aguguaugcauggaauuau

SEQ ID NO: 1802594 - RNA, 19 nt, Artificial Sequence
  Description of Artificial Sequence: Synthetic oligonucleotide
  Antisense strand to SEQ ID NO: 1802593
auaauuccaugcauacacu

SEQ ID NO: 1802595 - RNA, 19 nt, Artificial Sequence
  Description of Artificial Sequence: Synthetic oligonucleotide
  Sense strand starting at position 2588 of SEQ ID NO: 1563200
gcagguagucaagagauga

SEQ ID NO: 1802596 - RNA, 19 nt, Artificial Sequence
  Description of Artificial Sequence: Synthetic oligonucleotide
  Antisense strand to SEQ ID NO: 1802595
ucaucucuugacuaccugc

SEQ ID NO: 1802597 - RNA, 19 nt, Artificial Sequence
  Description of Artificial Sequence: Synthetic oligonucleotide
  Sense strand starting at position 2630 of SEQ ID NO: 1563200
gccucagaaccuuaagauu

SEQ ID NO: 1802598 - RNA, 19 nt, Artificial Sequence
  Description of Artificial Sequence: Synthetic oligonucleotide
  Antisense strand to SEQ ID NO: 1802597
aaucuuaagguucugaggc

SEQ ID NO: 1802599 - RNA, 19 nt, Artificial Sequence
  Description of Artificial Sequence: Synthetic oligonucleotide
  Sense strand starting at position 2814 of SEQ ID NO: 1563200
gaaucuagcuaagugauua

SEQ ID NO: 1802600 - RNA, 19 nt, Artificial Sequence
  Description of Artificial Sequence: Synthetic oligonucleotide
  Antisense strand to SEQ ID NO: 1802599
uaaucacuuagcuagauuc

SEQ ID NO: 1802601 - RNA, 19 nt, Artificial Sequence
  Description of Artificial Sequence: Synthetic oligonucleotide
  Sense strand starting at position 2825 of SEQ ID NO: 1563200
agugauuauguggaccuua

SEQ ID NO: 1802602 - RNA, 19 nt, Artificial Sequence
  Description of Artificial Sequence: Synthetic oligonucleotide
  Antisense strand to SEQ ID NO: 1802601
uaagguccacauaaucacu

SEQ ID NO: 1802603 - RNA, 19 nt, Artificial Sequence
  Description of Artificial Sequence: Synthetic oligonucleotide
  Sense strand starting at position 2869 of SEQ ID NO: 1563200
cagacaucgagguaaguga

SEQ ID NO: 1802604 - RNA, 19 nt, Artificial Sequence
  Description of Artificial Sequence: Synthetic oligonucleotide
  Antisense strand to SEQ ID NO: 1802603
ucacuuaccucgaugucug

SEQ ID NO: 1802605 - RNA, 19 nt, Artificial Sequence
  Description of Artificial Sequence: Synthetic oligonucleotide
  Sense strand starting at position 2888 of SEQ ID NO: 1563200
cgaugauguccucaacaug

SEQ ID NO: 1802606 - RNA, 19 nt, Artificial Sequence
  Description of Artificial Sequence: Synthetic oligonucleotide
  Antisense strand to SEQ ID NO: 1802605
cauguugaggacaucaucg

SEQ ID NO: 1802607 - RNA, 19 nt, Artificial Sequence
  Description of Artificial Sequence: Synthetic oligonucleotide
  Sense strand starting at position 2955 of SEQ ID NO: 1563200
gggcucuaccaauaaguau

SEQ ID NO: 1802608 - RNA, 19 nt, Artificial Sequence
  Description of Artificial Sequence: Synthetic oligonucleotide
  Antisense strand to SEQ ID NO: 1802607
auacuuauugguagagccc

SEQ ID NO: 1802609 - RNA, 19 nt, Artificial Sequence
  Description of Artificial Sequence: Synthetic oligonucleotide
  Sense strand starting at position 2972 of SEQ ID NO: 1563200
auuggaauccaugagcuuu

SEQ ID NO: 1802610 - RNA, 19 nt, Artificial Sequence
  Description of Artificial Sequence: Synthetic oligonucleotide
  Antisense strand to SEQ ID NO: 1802609
aaagcucauggauuccaau

SEQ ID NO: 1802611 - RNA, 19 nt, Artificial Sequence
  Description of Artificial Sequence: Synthetic oligonucleotide
  Sense strand starting at position 3006 of SEQ ID NO: 1563200
cuaguuuagagauauugug

SEQ ID NO: 1802612 - RNA, 19 nt, Artificial Sequence
  Description of Artificial Sequence: Synthetic oligonucleotide
  Antisense strand to SEQ ID NO: 1802611
cacaauaucucuaaacuag

SEQ ID NO: 1802613 - RNA, 19 nt, Artificial Sequence
  Description of Artificial Sequence: Synthetic oligonucleotide
  Sense strand starting at position 3056 of SEQ ID NO: 1563200
cagguaucuaggcaaguga

SEQ ID NO: 1802614 - RNA, 19 nt, Artificial Sequence
  Description of Artificial Sequence: Synthetic oligonucleotide
  Antisense strand to SEQ ID NO: 1802613
ucacuugccuagauaccug

SEQ ID NO: 1802615 - RNA, 19 nt, Artificial Sequence
  Description of Artificial Sequence: Synthetic oligonucleotide
  Sense strand starting at position 3064 of SEQ ID NO: 1563200
uaggcaagugaucauaacu

SEQ ID NO: 1802616 - RNA, 19 nt, Artificial Sequence
  Description of Artificial Sequence: Synthetic oligonucleotide
  Antisense strand to SEQ ID NO: 1802615
aguuaugaucacuugccua

SEQ ID NO: 1802617 - RNA, 19 nt, Artificial Sequence
  Description of Artificial Sequence: Synthetic oligonucleotide
  Sense strand starting at position 3093 of SEQ ID NO: 1563200
caguaaugaccuugagauu

SEQ ID NO: 1802618 - RNA, 19 nt, Artificial Sequence
  Description of Artificial Sequence: Synthetic oligonucleotide
  Antisense strand to SEQ ID NO: 1802617
aaucucaaggucauuacug

SEQ ID NO: 1802619 - RNA, 19 nt, Artificial Sequence
  Description of Artificial Sequence: Synthetic oligonucleotide
  Sense strand starting at position 3189 of SEQ ID NO: 1563200
cauuaauggguuuguaaag

SEQ ID NO: 1802620 - RNA, 19 nt, Artificial Sequence
  Description of Artificial Sequence: Synthetic oligonucleotide
  Antisense strand to SEQ ID NO: 1802619
cuuuacaaacccauuaaug

SEQ ID NO: 1802621 - RNA, 19 nt, Artificial Sequence
  Description of Artificial Sequence: Synthetic oligonucleotide
  Sense strand starting at position 3190 of SEQ ID NO: 1563200
auuaauggguuuguaaaga

SEQ ID NO: 1802622 - RNA, 19 nt, Artificial Sequence
  Description of Artificial Sequence: Synthetic oligonucleotide
  Antisense strand to SEQ ID NO: 1802621
ucuuuacaaacccauuaau

SEQ ID NO: 1802623 - RNA, 19 nt, Artificial Sequence
  Description of Artificial Sequence: Synthetic oligonucleotide
  Sense strand starting at position 3376 of SEQ ID NO: 1563200
cuuaucacacgguagacau

SEQ ID NO: 1802624 - RNA, 19 nt, Artificial Sequence
  Description of Artificial Sequence: Synthetic oligonucleotide
  Antisense strand to SEQ ID NO: 1802623
augucuaccgugugauaag

SEQ ID NO: 1802625 - RNA, 19 nt, Artificial Sequence
  Description of Artificial Sequence: Synthetic oligonucleotide
  Sense strand starting at position 3407 of SEQ ID NO: 1563200
aaguuuacauaagugauga

SEQ ID NO: 1802626 - RNA, 19 nt, Artificial Sequence
  Description of Artificial Sequence: Synthetic oligonucleotide
  Antisense strand to SEQ ID NO: 1802625
ucaucacuuauguaaacuu

SEQ ID NO: 1802627 - RNA, 19 nt, Artificial Sequence
  Description of Artificial Sequence: Synthetic oligonucleotide
  Sense strand starting at position 3533 of SEQ ID NO: 1563200
cuuacuagugcagagauaa

SEQ ID NO: 1802628 - RNA, 19 nt, Artificial Sequence
  Description of Artificial Sequence: Synthetic oligonucleotide
  Antisense strand to SEQ ID NO: 1802627
uuaucucugcacuaguaag

SEQ ID NO: 1802629 - RNA, 19 nt, Artificial Sequence
  Description of Artificial Sequence: Synthetic oligonucleotide
  Sense strand starting at position 3555 of SEQ ID NO: 1563200
uuugaaaucuggcuaugac

SEQ ID NO: 1802630 - RNA, 19 nt, Artificial Sequence
  Description of Artificial Sequence: Synthetic oligonucleotide
  Antisense strand to SEQ ID NO: 1802629
gucauagccagauuucaaa

SEQ ID NO: 1802631 - RNA, 19 nt, Artificial Sequence
  Description of Artificial Sequence: Synthetic oligonucleotide
  Sense strand starting at position 3556 of SEQ ID NO: 1563200
uugaaaucuggcuaugacu

SEQ ID NO: 1802632 - RNA, 19 nt, Artificial Sequence
  Description of Artificial Sequence: Synthetic oligonucleotide
  Antisense strand to SEQ ID NO: 1802631
agucauagccagauuucaa

SEQ ID NO: 1802633 - RNA, 19 nt, Artificial Sequence
  Description of Artificial Sequence: Synthetic oligonucleotide
  Sense strand starting at position 3558 of SEQ ID NO: 1563200
gaaaucuggcuaugacuga

SEQ ID NO: 1802634 - RNA, 19 nt, Artificial Sequence
  Description of Artificial Sequence: Synthetic oligonucleotide
  Antisense strand to SEQ ID NO: 1802633
ucagucauagccagauuuc

SEQ ID NO: 1802635 - RNA, 19 nt, Artificial Sequence
  Description of Artificial Sequence: Synthetic oligonucleotide
  Sense strand starting at position 3620 of SEQ ID NO: 1563200
cucaguauugacuauggua

SEQ ID NO: 1802636 - RNA, 19 nt, Artificial Sequence
  Description of Artificial Sequence: Synthetic oligonucleotide
  Antisense strand to SEQ ID NO: 1802635
uaccauagucaauacugag

SEQ ID NO: 1802637 - RNA, 19 nt, Artificial Sequence
  Description of Artificial Sequence: Synthetic oligonucleotide
  Sense strand starting at position 3688 of SEQ ID NO: 1563200
cuggauauucugcaaguau

SEQ ID NO: 1802638 - RNA, 19 nt, Artificial Sequence
  Description of Artificial Sequence: Synthetic oligonucleotide
  Antisense strand to SEQ ID NO: 1802637
auacuugcagaauauccag

SEQ ID NO: 1802639 - RNA, 19 nt, Artificial Sequence
  Description of Artificial Sequence: Synthetic oligonucleotide
  Sense strand starting at position 3737 of SEQ ID NO: 1563200
agugauucucaugagaugu

SEQ ID NO: 1802640 - RNA, 19 nt, Artificial Sequence
  Description of Artificial Sequence: Synthetic oligonucleotide
  Antisense strand to SEQ ID NO: 1802639
acaucucaugagaaucacu

SEQ ID NO: 1802641 - RNA, 19 nt, Artificial Sequence
  Description of Artificial Sequence: Synthetic oligonucleotide
  Sense strand starting at position 3753 of SEQ ID NO: 1563200
ugugucauggucuaaauag

SEQ ID NO: 1802642 - RNA, 19 nt, Artificial Sequence
  Description of Artificial Sequence: Synthetic oligonucleotide
  Antisense strand to SEQ ID NO: 1802641
cuauuuagaccaugacaca

SEQ ID NO: 1802643 - RNA, 19 nt, Artificial Sequence
  Description of Artificial Sequence: Synthetic oligonucleotide
  Sense strand starting at position 1559 of SEQ ID NO: 1563201
ggaagagggccugguuaga

SEQ ID NO: 1802644 - RNA, 19 nt, Artificial Sequence
  Description of Artificial Sequence: Synthetic oligonucleotide
  Antisense strand to SEQ ID NO: 1802643
ucuaaccaggcccucuucc

SEQ ID NO: 1802645 - RNA, 19 nt, Artificial Sequence
  Description of Artificial Sequence: Synthetic oligonucleotide
  Sense strand starting at position 1661 of SEQ ID NO: 1563201
ccaggaaagccauguuaug

SEQ ID NO: 1802646 - RNA, 19 nt, Artificial Sequence
  Description of Artificial Sequence: Synthetic oligonucleotide
  Antisense strand to SEQ ID NO: 1802645
cauaacauggcuuuccugg

SEQ ID NO: 1802647 - RNA, 19 nt, Artificial Sequence
  Description of Artificial Sequence: Synthetic oligonucleotide
  Sense strand starting at position 1667 of SEQ ID NO: 1563201
aagccauguuaugagggau

SEQ ID NO: 1802648 - RNA, 19 nt, Artificial Sequence
  Description of Artificial Sequence: Synthetic oligonucleotide
  Antisense strand to SEQ ID NO: 1802647
aucccucauaacauggcuu

SEQ ID NO: 1802649 - RNA, 19 nt, Artificial Sequence
  Description of Artificial Sequence: Synthetic oligonucleotide
  Sense strand starting at position 1670 of SEQ ID NO: 1563201
ccauguuaugagggauaca

SEQ ID NO: 1802650 - RNA, 19 nt, Artificial Sequence
  Description of Artificial Sequence: Synthetic oligonucleotide
  Antisense strand to SEQ ID NO: 1802649
uguaucccucauaacaugg

SEQ ID NO: 1802651 - RNA, 19 nt, Artificial Sequence
  Description of Artificial Sequence: Synthetic oligonucleotide
  Sense strand starting at position 2944 of SEQ ID NO: 1563201
gcaacuaccuguccuagga

SEQ ID NO: 1802652 - RNA, 19 nt, Artificial Sequence
  Description of Artificial Sequence: Synthetic oligonucleotide
  Antisense strand to SEQ ID NO: 1802651
uccuaggacagguaguugc

SEQ ID NO: 1802653 - RNA, 19 nt, Artificial Sequence
  Description of Artificial Sequence: Synthetic oligonucleotide
  Sense strand starting at position 3061 of SEQ ID NO: 1563201
gcucgcucauguucuugaa

SEQ ID NO: 1802654 - RNA, 19 nt, Artificial Sequence
  Description of Artificial Sequence: Synthetic oligonucleotide
  Antisense strand to SEQ ID NO: 1802653
uucaagaacaugagcgagc

SEQ ID NO: 1802655 - RNA, 19 nt, Artificial Sequence
  Description of Artificial Sequence: Synthetic oligonucleotide
  Sense strand starting at position 3063 of SEQ ID NO: 1563201
ucgcucauguucuugaaca

SEQ ID NO: 1802656 - RNA, 19 nt, Artificial Sequence
  Description of Artificial Sequence: Synthetic oligonucleotide
  Antisense strand to SEQ ID NO: 1802655
uguucaagaacaugagcga

SEQ ID NO: 1802657 - RNA, 19 nt, Artificial Sequence
  Description of Artificial Sequence: Synthetic oligonucleotide
  Sense strand starting at position 3064 of SEQ ID NO: 1563201
cgcucauguucuugaacau

SEQ ID NO: 1802658 - RNA, 19 nt, Artificial Sequence
  Description of Artificial Sequence: Synthetic oligonucleotide
  Antisense strand to SEQ ID NO: 1802657
auguucaagaacaugagcg

SEQ ID NO: 1802659 - RNA, 19 nt, Artificial Sequence
  Description of Artificial Sequence: Synthetic oligonucleotide
  Sense strand starting at position 3065 of SEQ ID NO: 1563201
gcucauguucuugaacaua

SEQ ID NO: 1802660 - RNA, 19 nt, Artificial Sequence
  Description of Artificial Sequence: Synthetic oligonucleotide
  Antisense strand to SEQ ID NO: 1802659
uauguucaagaacaugagc

SEQ ID NO: 1802661 - RNA, 19 nt, Artificial Sequence
  Description of Artificial Sequence: Synthetic oligonucleotide
  Sense strand starting at position 3073 of SEQ ID NO: 1563201
ucuugaacauaccaugagu

SEQ ID NO: 1802662 - RNA, 19 nt, Artificial Sequence
  Description of Artificial Sequence: Synthetic oligonucleotide
  Antisense strand to SEQ ID NO: 1802661
acucaugguauguucaaga

SEQ ID NO: 1802663 - RNA, 19 nt, Artificial Sequence
  Description of Artificial Sequence: Synthetic oligonucleotide
  Sense strand starting at position 3075 of SEQ ID NO: 1563201
uugaacauaccaugaguau

SEQ ID NO: 1802664 - RNA, 19 nt, Artificial Sequence
  Description of Artificial Sequence: Synthetic oligonucleotide
  Antisense strand to SEQ ID NO: 1802663
auacucaugguauguucaa

SEQ ID NO: 1802665 - RNA, 19 nt, Artificial Sequence
  Description of Artificial Sequence: Synthetic oligonucleotide
  Sense strand starting at position 3183 of SEQ ID NO: 1563201
cccaguaguucucuuucca

SEQ ID NO: 1802666 - RNA, 19 nt, Artificial Sequence
  Description of Artificial Sequence: Synthetic oligonucleotide
  Antisense strand to SEQ ID NO: 1802665
uggaaagagaacuacuggg

SEQ ID NO: 1802667 - RNA, 19 nt, Artificial Sequence
  Description of Artificial Sequence: Synthetic oligonucleotide
  Sense strand starting at position 3368 of SEQ ID NO: 1563201
uccucuuccugcccagaga

SEQ ID NO: 1802668 - RNA, 19 nt, Artificial Sequence
  Description of Artificial Sequence: Synthetic oligonucleotide
  Antisense strand to SEQ ID NO: 1802667
ucucugggcaggaagagga

SEQ ID NO: 1802669 - RNA, 19 nt, Artificial Sequence
  Description of Artificial Sequence: Synthetic oligonucleotide
  Sense strand starting at position 3841 of SEQ ID NO: 1563201
accgcaugcugucacuaau

SEQ ID NO: 1802670 - RNA, 19 nt, Artificial Sequence
  Description of Artificial Sequence: Synthetic oligonucleotide
  Antisense strand to SEQ ID NO: 1802669
auuagugacagcaugcggu

SEQ ID NO: 1802671 - RNA, 19 nt, Artificial Sequence
  Description of Artificial Sequence: Synthetic oligonucleotide
  Sense strand starting at position 3844 of SEQ ID NO: 1563201
gcaugcugucacuaaucua

SEQ ID NO: 1802672 - RNA, 19 nt, Artificial Sequence
  Description of Artificial Sequence: Synthetic oligonucleotide
  Antisense strand to SEQ ID NO: 1802671
uagauuagugacagcaugc

SEQ ID NO: 1802673 - RNA, 19 nt, Artificial Sequence
  Description of Artificial Sequence: Synthetic oligonucleotide
  Sense strand starting at position 3847 of SEQ ID NO: 1563201
ugcugucacuaaucuagga

SEQ ID NO: 1802674 - RNA, 19 nt, Artificial Sequence
  Description of Artificial Sequence: Synthetic oligonucleotide
  Antisense strand to SEQ ID NO: 1802673
uccuagauuagugacagca

SEQ ID NO: 1802675 - RNA, 19 nt, Artificial Sequence
  Description of Artificial Sequence: Synthetic oligonucleotide
  Sense strand starting at position 3851 of SEQ ID NO: 1563201
gucacuaaucuaggagcau

SEQ ID NO: 1802676 - RNA, 19 nt, Artificial Sequence
  Description of Artificial Sequence: Synthetic oligonucleotide
  Antisense strand to SEQ ID NO: 1802675
augcuccuagauuagugac

SEQ ID NO: 1802677 - RNA, 19 nt, Artificial Sequence
  Description of Artificial Sequence: Synthetic oligonucleotide
  Sense strand starting at position 3852 of SEQ ID NO: 1563201
ucacuaaucuaggagcaua

SEQ ID NO: 1802678 - RNA, 19 nt, Artificial Sequence
  Description of Artificial Sequence: Synthetic oligonucleotide
  Antisense strand to SEQ ID NO: 1802677
uaugcuccuagauuaguga

SEQ ID NO: 1802679 - RNA, 19 nt, Artificial Sequence
  Description of Artificial Sequence: Synthetic oligonucleotide
  Sense strand starting at position 3890 of SEQ ID NO: 1563201
cacccagaucaguggaaua

SEQ ID NO: 1802680 - RNA, 19 nt, Artificial Sequence
  Description of Artificial Sequence: Synthetic oligonucleotide
  Antisense strand to SEQ ID NO: 1802679
uauuccacugaucugggug

SEQ ID NO: 1802681 - RNA, 19 nt, Artificial Sequence
  Description of Artificial Sequence: Synthetic oligonucleotide
  Sense strand starting at position 3909 of SEQ ID NO: 1563201
ggagauggcuucccucaac

SEQ ID NO: 1802682 - RNA, 19 nt, Artificial Sequence
  Description of Artificial Sequence: Synthetic oligonucleotide
  Antisense strand to SEQ ID NO: 1802681
guugagggaagccaucucc

SEQ ID NO: 1802683 - RNA, 19 nt, Artificial Sequence
  Description of Artificial Sequence: Synthetic oligonucleotide
  Sense strand starting at position 339 of SEQ ID NO: 1563202
aaaguuuccuagcugagua

SEQ ID NO: 1802684 - RNA, 19 nt, Artificial Sequence
  Description of Artificial Sequence: Synthetic oligonucleotide
  Antisense strand to SEQ ID NO: 1802683
uacucagcuaggaaacuuu

SEQ ID NO: 1802685 - RNA, 19 nt, Artificial Sequence
  Description of Artificial Sequence: Synthetic oligonucleotide
  Sense strand starting at position 358 of SEQ ID NO: 1563202
uggagugcucaguagaaau

SEQ ID NO: 1802686 - RNA, 19 nt, Artificial Sequence
  Description of Artificial Sequence: Synthetic oligonucleotide
  Antisense strand to SEQ ID NO: 1802685
auuucuacugagcacucca

SEQ ID NO: 1802687 - RNA, 19 nt, Artificial Sequence
  Description of Artificial Sequence: Synthetic oligonucleotide
  Sense strand starting at position 384 of SEQ ID NO: 1563202
cuugaaguauaucuagcau

SEQ ID NO: 1802688 - RNA, 19 nt, Artificial Sequence
  Description of Artificial Sequence: Synthetic oligonucleotide
  Antisense strand to SEQ ID NO: 1802687
augcuagauauacuucaag

SEQ ID NO: 1802689 - RNA, 19 nt, Artificial Sequence
  Description of Artificial Sequence: Synthetic oligonucleotide
  Sense strand starting at position 406 of SEQ ID NO: 1563202
cugagacuucccugggaua

SEQ ID NO: 1802690 - RNA, 19 nt, Artificial Sequence
  Description of Artificial Sequence: Synthetic oligonucleotide
  Antisense strand to SEQ ID NO: 1802689
uaucccagggaagucucag

SEQ ID NO: 1802691 - RNA, 19 nt, Artificial Sequence
  Description of Artificial Sequence: Synthetic oligonucleotide
  Sense strand starting at position 407 of SEQ ID NO: 1563202
ugagacuucccugggauac

SEQ ID NO: 1802692 - RNA, 19 nt, Artificial Sequence
  Description of Artificial Sequence: Synthetic oligonucleotide
  Antisense strand to SEQ ID NO: 1802691
guaucccagggaagucuca

SEQ ID NO: 1802693 - RNA, 19 nt, Artificial Sequence
  Description of Artificial Sequence: Synthetic oligonucleotide
  Sense strand starting at position 417 of SEQ ID NO: 1563202
cugggauacuuaucuuccu

SEQ ID NO: 1802694 - RNA, 19 nt, Artificial Sequence
  Description of Artificial Sequence: Synthetic oligonucleotide
  Antisense strand to SEQ ID NO: 1802693
aggaagauaaguaucccag

SEQ ID NO: 1802695 - RNA, 19 nt, Artificial Sequence
  Description of Artificial Sequence: Synthetic oligonucleotide
  Sense strand starting at position 418 of SEQ ID NO: 1563202
ugggauacuuaucuuccuu

SEQ ID NO: 1802696 - RNA, 19 nt, Artificial Sequence
  Description of Artificial Sequence: Synthetic oligonucleotide
  Antisense strand to SEQ ID NO: 1802695
aaggaagauaaguauccca

SEQ ID NO: 1802697 - RNA, 19 nt, Artificial Sequence
  Description of Artificial Sequence: Synthetic oligonucleotide
  Sense strand starting at position 439 of SEQ ID NO: 1563202
ggacaacucuagucaugug

SEQ ID NO: 1802698 - RNA, 19 nt, Artificial Sequence
  Description of Artificial Sequence: Synthetic oligonucleotide
  Antisense strand to SEQ ID NO: 1802697
cacaugacuagaguugucc

SEQ ID NO: 1802699 - RNA, 19 nt, Artificial Sequence
  Description of Artificial Sequence: Synthetic oligonucleotide
  Sense strand starting at position 504 of SEQ ID NO: 1563202
aagagauacuuaccguaau

SEQ ID NO: 1802700 - RNA, 19 nt, Artificial Sequence
  Description of Artificial Sequence: Synthetic oligonucleotide
  Antisense strand to SEQ ID NO: 1802699
auuacgguaaguaucucuu

SEQ ID NO: 1802701 - RNA, 19 nt, Artificial Sequence
  Description of Artificial Sequence: Synthetic oligonucleotide
  Sense strand starting at position 787 of SEQ ID NO: 1563202
gcagguuaugauggaacau

SEQ ID NO: 1802702 - RNA, 19 nt, Artificial Sequence
  Description of Artificial Sequence: Synthetic oligonucleotide
  Antisense strand to SEQ ID NO: 1802701
auguuccaucauaaccugc

SEQ ID NO: 1802703 - RNA, 19 nt, Artificial Sequence
  Description of Artificial Sequence: Synthetic oligonucleotide
  Sense strand starting at position 799 of SEQ ID NO: 1563202
ggaacauucuucuuucuag

SEQ ID NO: 1802704 - RNA, 19 nt, Artificial Sequence
  Description of Artificial Sequence: Synthetic oligonucleotide
  Antisense strand to SEQ ID NO: 1802703
cuagaaagaagaauguucc

SEQ ID NO: 1802705 - RNA, 19 nt, Artificial Sequence
  Description of Artificial Sequence: Synthetic oligonucleotide
  Sense strand starting at position 822 of SEQ ID NO: 1563202
gugagucuuaccucgcucu

SEQ ID NO: 1802706 - RNA, 19 nt, Artificial Sequence
  Description of Artificial Sequence: Synthetic oligonucleotide
  Antisense strand to SEQ ID NO: 1802705
agagcgagguaagacucac

SEQ ID NO: 1802707 - RNA, 19 nt, Artificial Sequence
  Description of Artificial Sequence: Synthetic oligonucleotide
  Sense strand starting at position 1495 of SEQ ID NO: 1563202
aggcuauacuucuuuaagu

SEQ ID NO: 1802708 - RNA, 19 nt, Artificial Sequence
  Description of Artificial Sequence: Synthetic oligonucleotide
  Antisense strand to SEQ ID NO: 1802707
acuuaaagaaguauagccu

SEQ ID NO: 1802709 - RNA, 19 nt, Artificial Sequence
  Description of Artificial Sequence: Synthetic oligonucleotide
  Sense strand starting at position 1508 of SEQ ID NO: 1563202
uuaagucugggaugcuaau

SEQ ID NO: 1802710 - RNA, 19 nt, Artificial Sequence
  Description of Artificial Sequence: Synthetic oligonucleotide
  Antisense strand to SEQ ID NO: 1802709
auuagcaucccagacuuaa

SEQ ID NO: 1802711 - RNA, 19 nt, Artificial Sequence
  Description of Artificial Sequence: Synthetic oligonucleotide
  Sense strand starting at position 1603 of SEQ ID NO: 1563202
uuaggaaguggcugaaauu

SEQ ID NO: 1802712 - RNA, 19 nt, Artificial Sequence
  Description of Artificial Sequence: Synthetic oligonucleotide
  Antisense strand to SEQ ID NO: 1802711
aauuucagccacuuccuaa

SEQ ID NO: 1802713 - RNA, 19 nt, Artificial Sequence
  Description of Artificial Sequence: Synthetic oligonucleotide
  Sense strand starting at position 1612 of SEQ ID NO: 1563202
ggcugaaauuaacuagauc

SEQ ID NO: 1802714 - RNA, 19 nt, Artificial Sequence
  Description of Artificial Sequence: Synthetic oligonucleotide
  Antisense strand to SEQ ID NO: 1802713
gaucuaguuaauuucagcc

SEQ ID NO: 1802715 - RNA, 19 nt, Artificial Sequence
  Description of Artificial Sequence: Synthetic oligonucleotide
  Sense strand starting at position 1735 of SEQ ID NO: 1563202
acucaagacuccuugguuu

SEQ ID NO: 1802716 - RNA, 19 nt, Artificial Sequence
  Description of Artificial Sequence: Synthetic oligonucleotide
  Antisense strand to SEQ ID NO: 1802715
aaaccaaggagucuugagu

SEQ ID NO: 1802717 - RNA, 19 nt, Artificial Sequence
  Description of Artificial Sequence: Synthetic oligonucleotide
  Sense strand starting at position 1861 of SEQ ID NO: 1563202
augcacucuugggucaaua

SEQ ID NO: 1802718 - RNA, 19 nt, Artificial Sequence
  Description of Artificial Sequence: Synthetic oligonucleotide
  Antisense strand to SEQ ID NO: 1802717
uauugacccaagagugcau

SEQ ID NO: 1802719 - RNA, 19 nt, Artificial Sequence
  Description of Artificial Sequence: Synthetic oligonucleotide
  Sense strand starting at position 1863 of SEQ ID NO: 1563202
gcacucuugggucaauacu

SEQ ID NO: 1802720 - RNA, 19 nt, Artificial Sequence
  Description of Artificial Sequence: Synthetic oligonucleotide
  Antisense strand to SEQ ID NO: 1802719
aguauugacccaagagugc

SEQ ID NO: 1802721 - RNA, 19 nt, Artificial Sequence
  Description of Artificial Sequence: Synthetic oligonucleotide
  Sense strand starting at position 1869 of SEQ ID NO: 1563202
uugggucaauacucacaga

SEQ ID NO: 1802722 - RNA, 19 nt, Artificial Sequence
  Description of Artificial Sequence: Synthetic oligonucleotide
  Antisense strand to SEQ ID NO: 1802721
ucugugaguauugacccaa

SEQ ID NO: 1802723 - RNA, 19 nt, Artificial Sequence
  Description of Artificial Sequence: Synthetic oligonucleotide
  Sense strand starting at position 2039 of SEQ ID NO: 1563202
cuuaauagugaaugcauau

SEQ ID NO: 1802724 - RNA, 19 nt, Artificial Sequence
  Description of Artificial Sequence: Synthetic oligonucleotide
  Antisense strand to SEQ ID NO: 1802723
auaugcauucacuauuaag

SEQ ID NO: 1802725 - RNA, 19 nt, Artificial Sequence
  Description of Artificial Sequence: Synthetic oligonucleotide
  Sense strand starting at position 2051 of SEQ ID NO: 1563202
ugcauauaacuaugaggag

SEQ ID NO: 1802726 - RNA, 19 nt, Artificial Sequence
  Description of Artificial Sequence: Synthetic oligonucleotide
  Antisense strand to SEQ ID NO: 1802725
cuccucauaguuauaugca

SEQ ID NO: 1802727 - RNA, 19 nt, Artificial Sequence
  Description of Artificial Sequence: Synthetic oligonucleotide
  Sense strand starting at position 2182 of SEQ ID NO: 1563202
ugacucucuuuccuaggau

SEQ ID NO: 1802728 - RNA, 19 nt, Artificial Sequence
  Description of Artificial Sequence: Synthetic oligonucleotide
  Antisense strand to SEQ ID NO: 1802727
auccuaggaaagagaguca

SEQ ID NO: 1802729 - RNA, 19 nt, Artificial Sequence
  Description of Artificial Sequence: Synthetic oligonucleotide
  Sense strand starting at position 2284 of SEQ ID NO: 1563202
cucacaggcuacucagaaa

SEQ ID NO: 1802730 - RNA, 19 nt, Artificial Sequence
  Description of Artificial Sequence: Synthetic oligonucleotide
  Antisense strand to SEQ ID NO: 1802729
uuucugaguagccugugag

SEQ ID NO: 1802731 - RNA, 19 nt, Artificial Sequence
  Description of Artificial Sequence: Synthetic oligonucleotide
  Sense strand starting at position 2715 of SEQ ID NO: 1563202
ucaaaugucuuucuauagu

SEQ ID NO: 1802732 - RNA, 19 nt, Artificial Sequence
  Description of Artificial Sequence: Synthetic oligonucleotide
  Antisense strand to SEQ ID NO: 1802731
acuauagaaagacauuuga

SEQ ID NO: 1802733 - RNA, 19 nt, Artificial Sequence
  Description of Artificial Sequence: Synthetic oligonucleotide
  Sense strand starting at position 2725 of SEQ ID NO: 1563202
uucuauaguuggccaauuu

SEQ ID NO: 1802734 - RNA, 19 nt, Artificial Sequence
  Description of Artificial Sequence: Synthetic oligonucleotide
  Antisense strand to SEQ ID NO: 1802733
aaauuggccaacuauagaa

SEQ ID NO: 1802735 - RNA, 19 nt, Artificial Sequence
  Description of Artificial Sequence: Synthetic oligonucleotide
  Sense strand starting at position 2760 of SEQ ID NO: 1563202
aagguccacugguuauauu

SEQ ID NO: 1802736 - RNA, 19 nt, Artificial Sequence
  Description of Artificial Sequence: Synthetic oligonucleotide
  Antisense strand to SEQ ID NO: 1802735
aauauaaccaguggaccuu

SEQ ID NO: 1802737 - RNA, 19 nt, Artificial Sequence
  Description of Artificial Sequence: Synthetic oligonucleotide
  Sense strand starting at position 2814 of SEQ ID NO: 1563202
cucugucugucauuauaaa

SEQ ID NO: 1802738 - RNA, 19 nt, Artificial Sequence
  Description of Artificial Sequence: Synthetic oligonucleotide
  Antisense strand to SEQ ID NO: 1802737
uuuauaaugacagacagag

SEQ ID NO: 1802739 - RNA, 19 nt, Artificial Sequence
  Description of Artificial Sequence: Synthetic oligonucleotide
  Sense strand starting at position 2863 of SEQ ID NO: 1563202
acaaauguauggguuaaug

SEQ ID NO: 1802740 - RNA, 19 nt, Artificial Sequence
  Description of Artificial Sequence: Synthetic oligonucleotide
  Antisense strand to SEQ ID NO: 1802739
cauuaacccauacauuugu

SEQ ID NO: 1802741 - RNA, 19 nt, Artificial Sequence
  Description of Artificial Sequence: Synthetic oligonucleotide
  Sense strand starting at position 3013 of SEQ ID NO: 1563202
cuuugacauuuagagucau

SEQ ID NO: 1802742 - RNA, 19 nt, Artificial Sequence
  Description of Artificial Sequence: Synthetic oligonucleotide
  Antisense strand to SEQ ID NO: 1802741
augacucuaaaugucaaag

SEQ ID NO: 1802743 - RNA, 19 nt, Artificial Sequence
  Description of Artificial Sequence: Synthetic oligonucleotide
  Sense strand starting at position 3065 of SEQ ID NO: 1563202
aguguacuucccuaaugac

SEQ ID NO: 1802744 - RNA, 19 nt, Artificial Sequence
  Description of Artificial Sequence: Synthetic oligonucleotide
  Antisense strand to SEQ ID NO: 1802743
gucauuagggaaguacacu

SEQ ID NO: 1802745 - RNA, 19 nt, Artificial Sequence
  Description of Artificial Sequence: Synthetic oligonucleotide
  Sense strand starting at position 3074 of SEQ ID NO: 1563202
cccuaaugacuaugguuua

SEQ ID NO: 1802746 - RNA, 19 nt, Artificial Sequence
  Description of Artificial Sequence: Synthetic oligonucleotide
  Antisense strand to SEQ ID NO: 1802745
uaaaccauagucauuaggg

SEQ ID NO: 1802747 - RNA, 19 nt, Artificial Sequence
  Description of Artificial Sequence: Synthetic oligonucleotide
  Sense strand starting at position 3111 of SEQ ID NO: 1563202
auugauauguccuugaagu

SEQ ID NO: 1802748 - RNA, 19 nt, Artificial Sequence
  Description of Artificial Sequence: Synthetic oligonucleotide
  Antisense strand to SEQ ID NO: 1802747
acuucaaggacauaucaau

SEQ ID NO: 1802749 - RNA, 19 nt, Artificial Sequence
  Description of Artificial Sequence: Synthetic oligonucleotide
  Sense strand starting at position 3112 of SEQ ID NO: 1563202
uugauauguccuugaaguu

SEQ ID NO: 1802750 - RNA, 19 nt, Artificial Sequence
  Description of Artificial Sequence: Synthetic oligonucleotide
  Antisense strand to SEQ ID NO: 1802749
aacuucaaggacauaucaa

SEQ ID NO: 1802751 - RNA, 19 nt, Artificial Sequence
  Description of Artificial Sequence: Synthetic oligonucleotide
  Sense strand starting at position 3475 of SEQ ID NO: 1563202
uuagauuuaugagagaguu

SEQ ID NO: 1802752 - RNA, 19 nt, Artificial Sequence
  Description of Artificial Sequence: Synthetic oligonucleotide
  Antisense strand to SEQ ID NO: 1802751
aacucucucauaaaucuaa

SEQ ID NO: 1802753 - RNA, 19 nt, Artificial Sequence
  Description of Artificial Sequence: Synthetic oligonucleotide
  Sense strand starting at position 3481 of SEQ ID NO: 1563202
uuaugagagaguugcaaag

SEQ ID NO: 1802754 - RNA, 19 nt, Artificial Sequence
  Description of Artificial Sequence: Synthetic oligonucleotide
  Antisense strand to SEQ ID NO: 1802753
cuuugcaacucucucauaa

SEQ ID NO: 1802755 - RNA, 19 nt, Artificial Sequence
  Description of Artificial Sequence: Synthetic oligonucleotide
  Sense strand starting at position 3676 of SEQ ID NO: 1563202
ccaggaucccauuggaauc

SEQ ID NO: 1802756 - RNA, 19 nt, Artificial Sequence
  Description of Artificial Sequence: Synthetic oligonucleotide
  Antisense strand to SEQ ID NO: 1802755
gauuccaaugggauccugg

SEQ ID NO: 1802757 - RNA, 19 nt, Artificial Sequence
  Description of Artificial Sequence: Synthetic oligonucleotide
  Sense strand starting at position 3786 of SEQ ID NO: 1563202
acauacucagauuggguua

SEQ ID NO: 1802758 - RNA, 19 nt, Artificial Sequence
  Description of Artificial Sequence: Synthetic oligonucleotide
  Antisense strand to SEQ ID NO: 1802757
uaacccaaucugaguaugu

SEQ ID NO: 1802759 - RNA, 19 nt, Artificial Sequence
  Description of Artificial Sequence: Synthetic oligonucleotide
  Sense strand starting at position 3789 of SEQ ID NO: 1563202
uacucagauuggguuaguu

SEQ ID NO: 1802760 - RNA, 19 nt, Artificial Sequence
  Description of Artificial Sequence: Synthetic oligonucleotide
  Antisense strand to SEQ ID NO: 1802759
aacuaacccaaucugagua

SEQ ID NO: 1802761 - RNA, 19 nt, Artificial Sequence
  Description of Artificial Sequence: Synthetic oligonucleotide
  Sense strand starting at position 3983 of SEQ ID NO: 1563202
gcauguuccucuguauuuc

SEQ ID NO: 1802762 - RNA, 19 nt, Artificial Sequence
  Description of Artificial Sequence: Synthetic oligonucleotide
  Antisense strand to SEQ ID NO: 1802761
gaaauacagaggaacaugc

SEQ ID NO: 1802763 - RNA, 19 nt, Artificial Sequence
  Description of Artificial Sequence: Synthetic oligonucleotide
  Sense strand starting at position 51 of SEQ ID NO: 1563203
agucuugcuuccuccauuu

SEQ ID NO: 1802764 - RNA, 19 nt, Artificial Sequence
  Description of Artificial Sequence: Synthetic oligonucleotide
  Antisense strand to SEQ ID NO: 1802763
aaauggaggaagcaagacu

SEQ ID NO: 1802765 - RNA, 19 nt, Artificial Sequence
  Description of Artificial Sequence: Synthetic oligonucleotide
  Sense strand starting at position 184 of SEQ ID NO: 1563203
uaccgccaucuggauuauu

SEQ ID NO: 1802766 - RNA, 19 nt, Artificial Sequence
  Description of Artificial Sequence: Synthetic oligonucleotide
  Antisense strand to SEQ ID NO: 1802765
aauaauccagauggcggua

SEQ ID NO: 1802767 - RNA, 19 nt, Artificial Sequence
  Description of Artificial Sequence: Synthetic oligonucleotide
  Sense strand starting at position 268 of SEQ ID NO: 1563203
gagcuagaguaaucucuga

SEQ ID NO: 1802768 - RNA, 19 nt, Artificial Sequence
  Description of Artificial Sequence: Synthetic oligonucleotide
  Antisense strand to SEQ ID NO: 1802767
ucagagauuacucuagcuc

SEQ ID NO: 1802769 - RNA, 19 nt, Artificial Sequence
  Description of Artificial Sequence: Synthetic oligonucleotide
  Sense strand starting at position 652 of SEQ ID NO: 1563203
ggucauaaaugggcaguua

SEQ ID NO: 1802770 - RNA, 19 nt, Artificial Sequence
  Description of Artificial Sequence: Synthetic oligonucleotide
  Antisense strand to SEQ ID NO: 1802769
uaacugcccauuuaugacc

SEQ ID NO: 1802771 - RNA, 19 nt, Artificial Sequence
  Description of Artificial Sequence: Synthetic oligonucleotide
  Sense strand starting at position 653 of SEQ ID NO: 1563203
gucauaaaugggcaguuaa

SEQ ID NO: 1802772 - RNA, 19 nt, Artificial Sequence
  Description of Artificial Sequence: Synthetic oligonucleotide
  Antisense strand to SEQ ID NO: 1802771
uuaacugcccauuuaugac

SEQ ID NO: 1802773 - RNA, 19 nt, Artificial Sequence
  Description of Artificial Sequence: Synthetic oligonucleotide
  Sense strand starting at position 761 of SEQ ID NO: 1563203
ugguuucuugccuaucacu

SEQ ID NO: 1802774 - RNA, 19 nt, Artificial Sequence
  Description of Artificial Sequence: Synthetic oligonucleotide
  Antisense strand to SEQ ID NO: 1802773
agugauaggcaagaaacca

SEQ ID NO: 1802775 - RNA, 19 nt, Artificial Sequence
  Description of Artificial Sequence: Synthetic oligonucleotide
  Sense strand starting at position 775 of SEQ ID NO: 1563203
ucacuucuggguggaggua

SEQ ID NO: 1802776 - RNA, 19 nt, Artificial Sequence
  Description of Artificial Sequence: Synthetic oligonucleotide
  Antisense strand to SEQ ID NO: 1802775
uaccuccacccagaaguga

SEQ ID NO: 1802777 - RNA, 19 nt, Artificial Sequence
  Description of Artificial Sequence: Synthetic oligonucleotide
  Sense strand starting at position 790 of SEQ ID NO: 1563203
gguaguaaggacugugaau

SEQ ID NO: 1802778 - RNA, 19 nt, Artificial Sequence
  Description of Artificial Sequence: Synthetic oligonucleotide
  Antisense strand to SEQ ID NO: 1802777
auucacaguccuuacuacc

SEQ ID NO: 1802779 - RNA, 19 nt, Artificial Sequence
  Description of Artificial Sequence: Synthetic oligonucleotide
  Sense strand starting at position 792 of SEQ ID NO: 1563203
uaguaaggacugugaauga

SEQ ID NO: 1802780 - RNA, 19 nt, Artificial Sequence
  Description of Artificial Sequence: Synthetic oligonucleotide
  Antisense strand to SEQ ID NO: 1802779
ucauucacaguccuuacua

SEQ ID NO: 1802781 - RNA, 19 nt, Artificial Sequence
  Description of Artificial Sequence: Synthetic oligonucleotide
  Sense strand starting at position 803 of SEQ ID NO: 1563203
gugaaugaguucuccauuc

SEQ ID NO: 1802782 - RNA, 19 nt, Artificial Sequence
  Description of Artificial Sequence: Synthetic oligonucleotide
  Antisense strand to SEQ ID NO: 1802781
gaauggagaacucauucac

SEQ ID NO: 1802783 - RNA, 19 nt, Artificial Sequence
  Description of Artificial Sequence: Synthetic oligonucleotide
  Sense strand starting at position 933 of SEQ ID NO: 1563203
ccaaccuauguuggacauu

SEQ ID NO: 1802784 - RNA, 19 nt, Artificial Sequence
  Description of Artificial Sequence: Synthetic oligonucleotide
  Antisense strand to SEQ ID NO: 1802783
aauguccaacauagguugg

SEQ ID NO: 1802785 - RNA, 19 nt, Artificial Sequence
  Description of Artificial Sequence: Synthetic oligonucleotide
  Sense strand starting at position 1095 of SEQ ID NO: 1563203
ggauaaauaccuugcuaag

SEQ ID NO: 1802786 - RNA, 19 nt, Artificial Sequence
  Description of Artificial Sequence: Synthetic oligonucleotide
  Antisense strand to SEQ ID NO: 1802785
cuuagcaagguauuuaucc

SEQ ID NO: 1802787 - RNA, 19 nt, Artificial Sequence
  Description of Artificial Sequence: Synthetic oligonucleotide
  Sense strand starting at position 1257 of SEQ ID NO: 1563203
cuugcaaggucacuuaauu

SEQ ID NO: 1802788 - RNA, 19 nt, Artificial Sequence
  Description of Artificial Sequence: Synthetic oligonucleotide
  Antisense strand to SEQ ID NO: 1802787
aauuaagugaccuugcaag

SEQ ID NO: 1802789 - RNA, 19 nt, Artificial Sequence
  Description of Artificial Sequence: Synthetic oligonucleotide
  Sense strand starting at position 1381 of SEQ ID NO: 1563203
guggccagcauagaaauaa

SEQ ID NO: 1802790 - RNA, 19 nt, Artificial Sequence
  Description of Artificial Sequence: Synthetic oligonucleotide
  Antisense strand to SEQ ID NO: 1802789
uuauuucuaugcuggccac

SEQ ID NO: 1802791 - RNA, 19 nt, Artificial Sequence
  Description of Artificial Sequence: Synthetic oligonucleotide
  Sense strand starting at position 1441 of SEQ ID NO: 1563203
auggauaaauugucgaauu

SEQ ID NO: 1802792 - RNA, 19 nt, Artificial Sequence
  Description of Artificial Sequence: Synthetic oligonucleotide
  Antisense strand to SEQ ID NO: 1802791
aauucgacaauuuauccau

SEQ ID NO: 1802793 - RNA, 19 nt, Artificial Sequence
  Description of Artificial Sequence: Synthetic oligonucleotide
  Sense strand starting at position 1451 of SEQ ID NO: 1563203
ugucgaauuccucaggaug

SEQ ID NO: 1802794 - RNA, 19 nt, Artificial Sequence
  Description of Artificial Sequence: Synthetic oligonucleotide
  Antisense strand to SEQ ID NO: 1802793
cauccugaggaauucgaca

SEQ ID NO: 1802795 - RNA, 19 nt, Artificial Sequence
  Description of Artificial Sequence: Synthetic oligonucleotide
  Sense strand starting at position 1897 of SEQ ID NO: 1563203
gcugaagacucacugauaa

SEQ ID NO: 1802796 - RNA, 19 nt, Artificial Sequence
  Description of Artificial Sequence: Synthetic oligonucleotide
  Antisense strand to SEQ ID NO: 1802795
uuaucagugagucuucagc

SEQ ID NO: 1802797 - RNA, 19 nt, Artificial Sequence
  Description of Artificial Sequence: Synthetic oligonucleotide
  Sense strand starting at position 2211 of SEQ ID NO: 1563203
uggguauugccuggacuga

SEQ ID NO: 1802798 - RNA, 19 nt, Artificial Sequence
  Description of Artificial Sequence: Synthetic oligonucleotide
  Antisense strand to SEQ ID NO: 1802797
ucaguccaggcaauaccca

SEQ ID NO: 1802799 - RNA, 19 nt, Artificial Sequence
  Description of Artificial Sequence: Synthetic oligonucleotide
  Sense strand starting at position 2215 of SEQ ID NO: 1563203
uauugccuggacugagauu

SEQ ID NO: 1802800 - RNA, 19 nt, Artificial Sequence
  Description of Artificial Sequence: Synthetic oligonucleotide
  Antisense strand to SEQ ID NO: 1802799
aaucucaguccaggcaaua

SEQ ID NO: 1802801 - RNA, 19 nt, Artificial Sequence
  Description of Artificial Sequence: Synthetic oligonucleotide
  Sense strand starting at position 2221 of SEQ ID NO: 1563203
cuggacugagauugugaca

SEQ ID NO: 1802802 - RNA, 19 nt, Artificial Sequence
  Description of Artificial Sequence: Synthetic oligonucleotide
  Antisense strand to SEQ ID NO: 1802801
ugucacaaucucaguccag

SEQ ID NO: 1802803 - RNA, 19 nt, Artificial Sequence
  Description of Artificial Sequence: Synthetic oligonucleotide
  Sense strand starting at position 2246 of SEQ ID NO: 1563203
ugcgcacuuggcuagagaa

SEQ ID NO: 1802804 - RNA, 19 nt, Artificial Sequence
  Description of Artificial Sequence: Synthetic oligonucleotide
  Antisense strand to SEQ ID NO: 1802803
uucucuagccaagugcgca

SEQ ID NO: 1802805 - RNA, 19 nt, Artificial Sequence
  Description of Artificial Sequence: Synthetic oligonucleotide
  Sense strand starting at position 2248 of SEQ ID NO: 1563203
cgcacuuggcuagagaaau

SEQ ID NO: 1802806 - RNA, 19 nt, Artificial Sequence
  Description of Artificial Sequence: Synthetic oligonucleotide
  Antisense strand to SEQ ID NO: 1802805
auuucucuagccaagugcg

SEQ ID NO: 1802807 - RNA, 19 nt, Artificial Sequence
  Description of Artificial Sequence: Synthetic oligonucleotide
  Sense strand starting at position 2254 of SEQ ID NO: 1563203
uggcuagagaaaugugaug

SEQ ID NO: 1802808 - RNA, 19 nt, Artificial Sequence
  Description of Artificial Sequence: Synthetic oligonucleotide
  Antisense strand to SEQ ID NO: 1802807
caucacauuucucuagcca

SEQ ID NO: 1802809 - RNA, 19 nt, Artificial Sequence
  Description of Artificial Sequence: Synthetic oligonucleotide
  Sense strand starting at position 2256 of SEQ ID NO: 1563203
gcuagagaaaugugaugaa

SEQ ID NO: 1802810 - RNA, 19 nt, Artificial Sequence
  Description of Artificial Sequence: Synthetic oligonucleotide
  Antisense strand to SEQ ID NO: 1802809
uucaucacauuucucuagc

SEQ ID NO: 1802811 - RNA, 19 nt, Artificial Sequence
  Description of Artificial Sequence: Synthetic oligonucleotide
  Sense strand starting at position 2268 of SEQ ID NO: 1563203
ugaugaaacccugguguga

SEQ ID NO: 1802812 - RNA, 19 nt, Artificial Sequence
  Description of Artificial Sequence: Synthetic oligonucleotide
  Antisense strand to SEQ ID NO: 1802811
ucacaccaggguuucauca

SEQ ID NO: 1802813 - RNA, 19 nt, Artificial Sequence
  Description of Artificial Sequence: Synthetic oligonucleotide
  Sense strand starting at position 2272 of SEQ ID NO: 1563203
gaaacccuggugugaaagu

SEQ ID NO: 1802814 - RNA, 19 nt, Artificial Sequence
  Description of Artificial Sequence: Synthetic oligonucleotide
  Antisense strand to SEQ ID NO: 1802813
acuuucacaccaggguuuc

SEQ ID NO: 1802815 - RNA, 19 nt, Artificial Sequence
  Description of Artificial Sequence: Synthetic oligonucleotide
  Sense strand starting at position 2421 of SEQ ID NO: 1563203
auggucucucagugacaau

SEQ ID NO: 1802816 - RNA, 19 nt, Artificial Sequence
  Description of Artificial Sequence: Synthetic oligonucleotide
  Antisense strand to SEQ ID NO: 1802815
auugucacugagagaccau

SEQ ID NO: 1802817 - RNA, 19 nt, Artificial Sequence
  Description of Artificial Sequence: Synthetic oligonucleotide
  Sense strand starting at position 2469 of SEQ ID NO: 1563203
caggcaaggccuuagaaau

SEQ ID NO: 1802818 - RNA, 19 nt, Artificial Sequence
  Description of Artificial Sequence: Synthetic oligonucleotide
  Antisense strand to SEQ ID NO: 1802817
auuucuaaggccuugccug

SEQ ID NO: 1802819 - RNA, 19 nt, Artificial Sequence
  Description of Artificial Sequence: Synthetic oligonucleotide
  Sense strand starting at position 2558 of SEQ ID NO: 1563203
gagcuaucauagguacuga

SEQ ID NO: 1802820 - RNA, 19 nt, Artificial Sequence
  Description of Artificial Sequence: Synthetic oligonucleotide
  Antisense strand to SEQ ID NO: 1802819
ucaguaccuaugauagcuc

SEQ ID NO: 1802821 - RNA, 19 nt, Artificial Sequence
  Description of Artificial Sequence: Synthetic oligonucleotide
  Sense strand starting at position 2613 of SEQ ID NO: 1563203
guauauuauucuguguaca

SEQ ID NO: 1802822 - RNA, 19 nt, Artificial Sequence
  Description of Artificial Sequence: Synthetic oligonucleotide
  Antisense strand to SEQ ID NO: 1802821
uguacacagaauaauauac

SEQ ID NO: 1802823 - RNA, 19 nt, Artificial Sequence
  Description of Artificial Sequence: Synthetic oligonucleotide
  Sense strand starting at position 2615 of SEQ ID NO: 1563203
auauuauucuguguacaug

SEQ ID NO: 1802824 - RNA, 19 nt, Artificial Sequence
  Description of Artificial Sequence: Synthetic oligonucleotide
  Antisense strand to SEQ ID NO: 1802823
cauguacacagaauaauau

SEQ ID NO: 1802825 - RNA, 19 nt, Artificial Sequence
  Description of Artificial Sequence: Synthetic oligonucleotide
  Sense strand starting at position 2618 of SEQ ID NO: 1563203
uuauucuguguacaugaaa

SEQ ID NO: 1802826 - RNA, 19 nt, Artificial Sequence
  Description of Artificial Sequence: Synthetic oligonucleotide
  Antisense strand to SEQ ID NO: 1802825
uuucauguacacagaauaa

SEQ ID NO: 1802827 - RNA, 19 nt, Artificial Sequence
  Description of Artificial Sequence: Synthetic oligonucleotide
  Sense strand starting at position 2749 of SEQ ID NO: 1563203
guucucugucuugauagga

SEQ ID NO: 1802828 - RNA, 19 nt, Artificial Sequence
  Description of Artificial Sequence: Synthetic oligonucleotide
  Antisense strand to SEQ ID NO: 1802827
uccuaucaagacagagaac

SEQ ID NO: 1802829 - RNA, 19 nt, Artificial Sequence
  Description of Artificial Sequence: Synthetic oligonucleotide
  Sense strand starting at position 2757 of SEQ ID NO: 1563203
ucuugauaggacugugagu

SEQ ID NO: 1802830 - RNA, 19 nt, Artificial Sequence
  Description of Artificial Sequence: Synthetic oligonucleotide
  Antisense strand to SEQ ID NO: 1802829
acucacaguccuaucaaga

SEQ ID NO: 1802831 - RNA, 19 nt, Artificial Sequence
  Description of Artificial Sequence: Synthetic oligonucleotide
  Sense strand starting at position 2759 of SEQ ID NO: 1563203
uugauaggacugugaguua

SEQ ID NO: 1802832 - RNA, 19 nt, Artificial Sequence
  Description of Artificial Sequence: Synthetic oligonucleotide
  Antisense strand to SEQ ID NO: 1802831
uaacucacaguccuaucaa

SEQ ID NO: 1802833 - RNA, 19 nt, Artificial Sequence
  Description of Artificial Sequence: Synthetic oligonucleotide
  Sense strand starting at position 2790 of SEQ ID NO: 1563203
ccucauuacucagugagua

SEQ ID NO: 1802834 - RNA, 19 nt, Artificial Sequence
  Description of Artificial Sequence: Synthetic oligonucleotide
  Antisense strand to SEQ ID NO: 1802833
uacucacugaguaaugagg

SEQ ID NO: 1802835 - RNA, 19 nt, Artificial Sequence
  Description of Artificial Sequence: Synthetic oligonucleotide
  Sense strand starting at position 2791 of SEQ ID NO: 1563203
cucauuacucagugaguau

SEQ ID NO: 1802836 - RNA, 19 nt, Artificial Sequence
  Description of Artificial Sequence: Synthetic oligonucleotide
  Antisense strand to SEQ ID NO: 1802835
auacucacugaguaaugag

SEQ ID NO: 1802837 - RNA, 19 nt, Artificial Sequence
  Description of Artificial Sequence: Synthetic oligonucleotide
  Sense strand starting at position 2794 of SEQ ID NO: 1563203
auuacucagugaguauaca

SEQ ID NO: 1802838 - RNA, 19 nt, Artificial Sequence
  Description of Artificial Sequence: Synthetic oligonucleotide
  Antisense strand to SEQ ID NO: 1802837
uguauacucacugaguaau

SEQ ID NO: 1802839 - RNA, 19 nt, Artificial Sequence
  Description of Artificial Sequence: Synthetic oligonucleotide
  Sense strand starting at position 3400 of SEQ ID NO: 1563203
ucaacuacucgguagguuu

SEQ ID NO: 1802840 - RNA, 19 nt, Artificial Sequence
  Description of Artificial Sequence: Synthetic oligonucleotide
  Antisense strand to SEQ ID NO: 1802839
aaaccuaccgaguaguuga

SEQ ID NO: 1802841 - RNA, 19 nt, Artificial Sequence
  Description of Artificial Sequence: Synthetic oligonucleotide
  Sense strand starting at position 3449 of SEQ ID NO: 1563203
gaguucccucaaggucaua

SEQ ID NO: 1802842 - RNA, 19 nt, Artificial Sequence
  Description of Artificial Sequence: Synthetic oligonucleotide
  Antisense strand to SEQ ID NO: 1802841
uaugaccuugagggaacuc

SEQ ID NO: 1802843 - RNA, 19 nt, Artificial Sequence
  Description of Artificial Sequence: Synthetic oligonucleotide
  Sense strand starting at position 2 of SEQ ID NO: 1563204
ccacaaaugcuuugggaug

SEQ ID NO: 1802844 - RNA, 19 nt, Artificial Sequence
  Description of Artificial Sequence: Synthetic oligonucleotide
  Antisense strand to SEQ ID NO: 1802843
caucccaaagcauuugugg

SEQ ID NO: 1802845 - RNA, 19 nt, Artificial Sequence
  Description of Artificial Sequence: Synthetic oligonucleotide
  Sense strand starting at position 80 of SEQ ID NO: 1563204
caucaucagggcuagaguu

SEQ ID NO: 1802846 - RNA, 19 nt, Artificial Sequence
  Description of Artificial Sequence: Synthetic oligonucleotide
  Antisense strand to SEQ ID NO: 1802845
aacucuagcccugaugaug

SEQ ID NO: 1802847 - RNA, 19 nt, Artificial Sequence
  Description of Artificial Sequence: Synthetic oligonucleotide
  Sense strand starting at position 90 of SEQ ID NO: 1563204
gcuagaguugaauaugcca

SEQ ID NO: 1802848 - RNA, 19 nt, Artificial Sequence
  Description of Artificial Sequence: Synthetic oligonucleotide
  Antisense strand to SEQ ID NO: 1802847
uggcauauucaacucuagc

SEQ ID NO: 1802849 - RNA, 19 nt, Artificial Sequence
  Description of Artificial Sequence: Synthetic oligonucleotide
  Sense strand starting at position 157 of SEQ ID NO: 1563204
cgauuuggcauucgguaga

SEQ ID NO: 1802850 - RNA, 19 nt, Artificial Sequence
  Description of Artificial Sequence: Synthetic oligonucleotide
  Antisense strand to SEQ ID NO: 1802849
ucuaccgaaugccaaaucg

SEQ ID NO: 1802851 - RNA, 19 nt, Artificial Sequence
  Description of Artificial Sequence: Synthetic oligonucleotide
  Sense strand starting at position 160 of SEQ ID NO: 1563204
uuuggcauucgguagauaa

SEQ ID NO: 1802852 - RNA, 19 nt, Artificial Sequence
  Description of Artificial Sequence: Synthetic oligonucleotide
  Antisense strand to SEQ ID NO: 1802851
uuaucuaccgaaugccaaa

SEQ ID NO: 1802853 - RNA, 19 nt, Artificial Sequence
  Description of Artificial Sequence: Synthetic oligonucleotide
  Sense strand starting at position 162 of SEQ ID NO: 1563204
uggcauucgguagauaaac

SEQ ID NO: 1802854 - RNA, 19 nt, Artificial Sequence
  Description of Artificial Sequence: Synthetic oligonucleotide
  Antisense strand to SEQ ID NO: 1802853
guuuaucuaccgaaugcca

SEQ ID NO: 1802855 - RNA, 19 nt, Artificial Sequence
  Description of Artificial Sequence: Synthetic oligonucleotide
  Sense strand starting at position 164 of SEQ ID NO: 1563204
gcauucgguagauaaacgu

SEQ ID NO: 1802856 - RNA, 19 nt, Artificial Sequence
  Description of Artificial Sequence: Synthetic oligonucleotide
  Antisense strand to SEQ ID NO: 1802855
acguuuaucuaccgaaugc

SEQ ID NO: 1802857 - RNA, 19 nt, Artificial Sequence
  Description of Artificial Sequence: Synthetic oligonucleotide
  Sense strand starting at position 168 of SEQ ID NO: 1563204
ucgguagauaaacgucuua

SEQ ID NO: 1802858 - RNA, 19 nt, Artificial Sequence
  Description of Artificial Sequence: Synthetic oligonucleotide
  Antisense strand to SEQ ID NO: 1802857
uaagacguuuaucuaccga

SEQ ID NO: 1802859 - RNA, 19 nt, Artificial Sequence
  Description of Artificial Sequence: Synthetic oligonucleotide
  Sense strand starting at position 173 of SEQ ID NO: 1563204
agauaaacgucuuaaaucc

SEQ ID NO: 1802860 - RNA, 19 nt, Artificial Sequence
  Description of Artificial Sequence: Synthetic oligonucleotide
  Antisense strand to SEQ ID NO: 1802859
ggauuuaagacguuuaucu

SEQ ID NO: 1802861 - RNA, 19 nt, Artificial Sequence
  Description of Artificial Sequence: Synthetic oligonucleotide
  Sense strand starting at position 240 of SEQ ID NO: 1563204
uccaguuuccuuuguguag

SEQ ID NO: 1802862 - RNA, 19 nt, Artificial Sequence
  Description of Artificial Sequence: Synthetic oligonucleotide
  Antisense strand to SEQ ID NO: 1802861
cuacacaaaggaaacugga

SEQ ID NO: 1802863 - RNA, 19 nt, Artificial Sequence
  Description of Artificial Sequence: Synthetic oligonucleotide
  Sense strand starting at position 241 of SEQ ID NO: 1563204
ccaguuuccuuuguguaga

SEQ ID NO: 1802864 - RNA, 19 nt, Artificial Sequence
  Description of Artificial Sequence: Synthetic oligonucleotide
  Antisense strand to SEQ ID NO: 1802863
ucuacacaaaggaaacugg

SEQ ID NO: 1802865 - RNA, 19 nt, Artificial Sequence
  Description of Artificial Sequence: Synthetic oligonucleotide
  Sense strand starting at position 243 of SEQ ID NO: 1563204
aguuuccuuuguguagaaa

SEQ ID NO: 1802866 - RNA, 19 nt, Artificial Sequence
  Description of Artificial Sequence: Synthetic oligonucleotide
  Antisense strand to SEQ ID NO: 1802865
uuucuacacaaaggaaacu

SEQ ID NO: 1802867 - RNA, 19 nt, Artificial Sequence
  Description of Artificial Sequence: Synthetic oligonucleotide
  Sense strand starting at position 244 of SEQ ID NO: 1563204
guuuccuuuguguagaaau

SEQ ID NO: 1802868 - RNA, 19 nt, Artificial Sequence
  Description of Artificial Sequence: Synthetic oligonucleotide
  Antisense strand to SEQ ID NO: 1802867
auuucuacacaaaggaaac

SEQ ID NO: 1802869 - RNA, 19 nt, Artificial Sequence
  Description of Artificial Sequence: Synthetic oligonucleotide
  Sense strand starting at position 246 of SEQ ID NO: 1563204
uuccuuuguguagaaauca

SEQ ID NO: 1802870 - RNA, 19 nt, Artificial Sequence
  Description of Artificial Sequence: Synthetic oligonucleotide
  Antisense strand to SEQ ID NO: 1802869
ugauuucuacacaaaggaa

SEQ ID NO: 1802871 - RNA, 19 nt, Artificial Sequence
  Description of Artificial Sequence: Synthetic oligonucleotide
  Sense strand starting at position 256 of SEQ ID NO: 1563204
uagaaaucagauugucugu

SEQ ID NO: 1802872 - RNA, 19 nt, Artificial Sequence
  Description of Artificial Sequence: Synthetic oligonucleotide
  Antisense strand to SEQ ID NO: 1802871
acagacaaucugauuucua

SEQ ID NO: 1802873 - RNA, 19 nt, Artificial Sequence
  Description of Artificial Sequence: Synthetic oligonucleotide
  Sense strand starting at position 265 of SEQ ID NO: 1563204
gauugucuguccucuaaag

SEQ ID NO: 1802874 - RNA, 19 nt, Artificial Sequence
  Description of Artificial Sequence: Synthetic oligonucleotide
  Antisense strand to SEQ ID NO: 1802873
cuuuagaggacagacaauc

SEQ ID NO: 1802875 - RNA, 19 nt, Artificial Sequence
  Description of Artificial Sequence: Synthetic oligonucleotide
  Sense strand starting at position 267 of SEQ ID NO: 1563204
uugucuguccucuaaagcu

SEQ ID NO: 1802876 - RNA, 19 nt, Artificial Sequence
  Description of Artificial Sequence: Synthetic oligonucleotide
  Antisense strand to SEQ ID NO: 1802875
agcuuuagaggacagacaa

SEQ ID NO: 1802877 - RNA, 19 nt, Artificial Sequence
  Description of Artificial Sequence: Synthetic oligonucleotide
  Sense strand starting at position 324 of SEQ ID NO: 1563204
cgucuugucaacuguacga

SEQ ID NO: 1802878 - RNA, 19 nt, Artificial Sequence
  Description of Artificial Sequence: Synthetic oligonucleotide
  Antisense strand to SEQ ID NO: 1802877
ucguacaguugacaagacg

SEQ ID NO: 1802879 - RNA, 19 nt, Artificial Sequence
  Description of Artificial Sequence: Synthetic oligonucleotide
  Sense strand starting at position 382 of SEQ ID NO: 1563204
gcauacuuucuaugguauc

SEQ ID NO: 1802880 - RNA, 19 nt, Artificial Sequence
  Description of Artificial Sequence: Synthetic oligonucleotide
  Antisense strand to SEQ ID NO: 1802879
gauaccauagaaaguaugc

SEQ ID NO: 1802881 - RNA, 19 nt, Artificial Sequence
  Description of Artificial Sequence: Synthetic oligonucleotide
  Sense strand starting at position 455 of SEQ ID NO: 1563204
uuggccuuauuuguaauau

SEQ ID NO: 1802882 - RNA, 19 nt, Artificial Sequence
  Description of Artificial Sequence: Synthetic oligonucleotide
  Antisense strand to SEQ ID NO: 1802881
auauuacaaauaaggccaa

SEQ ID NO: 1802883 - RNA, 19 nt, Artificial Sequence
  Description of Artificial Sequence: Synthetic oligonucleotide
  Sense strand starting at position 456 of SEQ ID NO: 1563204
uggccuuauuuguaauauc

SEQ ID NO: 1802884 - RNA, 19 nt, Artificial Sequence
  Description of Artificial Sequence: Synthetic oligonucleotide
  Antisense strand to SEQ ID NO: 1802883
gauauuacaaauaaggcca

SEQ ID NO: 1802885 - RNA, 19 nt, Artificial Sequence
  Description of Artificial Sequence: Synthetic oligonucleotide
  Sense strand starting at position 459 of SEQ ID NO: 1563204
ccuuauuuguaauaucgua

SEQ ID NO: 1802886 - RNA, 19 nt, Artificial Sequence
  Description of Artificial Sequence: Synthetic oligonucleotide
  Antisense strand to SEQ ID NO: 1802885
uacgauauuacaaauaagg

SEQ ID NO: 1802887 - RNA, 19 nt, Artificial Sequence
  Description of Artificial Sequence: Synthetic oligonucleotide
  Sense strand starting at position 479 of SEQ ID NO: 1563204
uuuaaauagggauguguuc

SEQ ID NO: 1802888 - RNA, 19 nt, Artificial Sequence
  Description of Artificial Sequence: Synthetic oligonucleotide
  Antisense strand to SEQ ID NO: 1802887
gaacacaucccuauuuaaa

SEQ ID NO: 1802889 - RNA, 19 nt, Artificial Sequence
  Description of Artificial Sequence: Synthetic oligonucleotide
  Sense strand starting at position 485 of SEQ ID NO: 1563204
uagggauguguucagguau

SEQ ID NO: 1802890 - RNA, 19 nt, Artificial Sequence
  Description of Artificial Sequence: Synthetic oligonucleotide
  Antisense strand to SEQ ID NO: 1802889
auaccugaacacaucccua

SEQ ID NO: 1802891 - RNA, 19 nt, Artificial Sequence
  Description of Artificial Sequence: Synthetic oligonucleotide
  Sense strand starting at position 578 of SEQ ID NO: 1563204
ccuccacaggcugaguaau

SEQ ID NO: 1802892 - RNA, 19 nt, Artificial Sequence
  Description of Artificial Sequence: Synthetic oligonucleotide
  Antisense strand to SEQ ID NO: 1802891
auuacucagccuguggagg

SEQ ID NO: 1802893 - RNA, 19 nt, Artificial Sequence
  Description of Artificial Sequence: Synthetic oligonucleotide
  Sense strand starting at position 612 of SEQ ID NO: 1563204
gcgcaauaccagugagacu

SEQ ID NO: 1802894 - RNA, 19 nt, Artificial Sequence
  Description of Artificial Sequence: Synthetic oligonucleotide
  Antisense strand to SEQ ID NO: 1802893
agucucacugguauugcgc

SEQ ID NO: 1802895 - RNA, 19 nt, Artificial Sequence
  Description of Artificial Sequence: Synthetic oligonucleotide
  Sense strand starting at position 613 of SEQ ID NO: 1563204
cgcaauaccagugagacua

SEQ ID NO: 1802896 - RNA, 19 nt, Artificial Sequence
  Description of Artificial Sequence: Synthetic oligonucleotide
  Antisense strand to SEQ ID NO: 1802895
uagucucacugguauugcg

SEQ ID NO: 1802897 - RNA, 19 nt, Artificial Sequence
  Description of Artificial Sequence: Synthetic oligonucleotide
  Sense strand starting at position 625 of SEQ ID NO: 1563204
gagacuaguuaggaggaca

SEQ ID NO: 1802898 - RNA, 19 nt, Artificial Sequence
  Description of Artificial Sequence: Synthetic oligonucleotide
  Antisense strand to SEQ ID NO: 1802897
uguccuccuaacuagucuc

SEQ ID NO: 1802899 - RNA, 19 nt, Artificial Sequence
  Description of Artificial Sequence: Synthetic oligonucleotide
  Sense strand starting at position 676 of SEQ ID NO: 1563204
uggugcaagucuuccgaau

SEQ ID NO: 1802900 - RNA, 19 nt, Artificial Sequence
  Description of Artificial Sequence: Synthetic oligonucleotide
  Antisense strand to SEQ ID NO: 1802899
auucggaagacuugcacca

SEQ ID NO: 1802901 - RNA, 19 nt, Artificial Sequence
  Description of Artificial Sequence: Synthetic oligonucleotide
  Sense strand starting at position 740 of SEQ ID NO: 1563204
gggcaucauuuccagaacu

SEQ ID NO: 1802902 - RNA, 19 nt, Artificial Sequence
  Description of Artificial Sequence: Synthetic oligonucleotide
  Antisense strand to SEQ ID NO: 1802901
aguucuggaaaugaugccc

SEQ ID NO: 1802903 - RNA, 19 nt, Artificial Sequence
  Description of Artificial Sequence: Synthetic oligonucleotide
  Sense strand starting at position 751 of SEQ ID NO: 1563204
ccagaacuguaacauagau

SEQ ID NO: 1802904 - RNA, 19 nt, Artificial Sequence
  Description of Artificial Sequence: Synthetic oligonucleotide
  Antisense strand to SEQ ID NO: 1802903
aucuauguuacaguucugg

SEQ ID NO: 1802905 - RNA, 19 nt, Artificial Sequence
  Description of Artificial Sequence: Synthetic oligonucleotide
  Sense strand starting at position 855 of SEQ ID NO: 1563204
cugggaaggguuggcaaua

SEQ ID NO: 1802906 - RNA, 19 nt, Artificial Sequence
  Description of Artificial Sequence: Synthetic oligonucleotide
  Antisense strand to SEQ ID NO: 1802905
uauugccaacccuucccag

SEQ ID NO: 1802907 - RNA, 19 nt, Artificial Sequence
  Description of Artificial Sequence: Synthetic oligonucleotide
  Sense strand starting at position 856 of SEQ ID NO: 1563204
ugggaaggguuggcaauaa

SEQ ID NO: 1802908 - RNA, 19 nt, Artificial Sequence
  Description of Artificial Sequence: Synthetic oligonucleotide
  Antisense strand to SEQ ID NO: 1802907
uuauugccaacccuuccca

SEQ ID NO: 1802909 - RNA, 19 nt, Artificial Sequence
  Description of Artificial Sequence: Synthetic oligonucleotide
  Sense strand starting at position 1130 of SEQ ID NO: 1563204
agguuucccacaggaagau

SEQ ID NO: 1802910 - RNA, 19 nt, Artificial Sequence
  Description of Artificial Sequence: Synthetic oligonucleotide
  Antisense strand to SEQ ID NO: 1802909
aucuuccugugggaaaccu

SEQ ID NO: 1802911 - RNA, 19 nt, Artificial Sequence
  Description of Artificial Sequence: Synthetic oligonucleotide
  Sense strand starting at position 1360 of SEQ ID NO: 1563204
uuccguucgcuggucaauu

SEQ ID NO: 1802912 - RNA, 19 nt, Artificial Sequence
  Description of Artificial Sequence: Synthetic oligonucleotide
  Antisense strand to SEQ ID NO: 1802911
aauugaccagcgaacggaa

SEQ ID NO: 1802913 - RNA, 19 nt, Artificial Sequence
  Description of Artificial Sequence: Synthetic oligonucleotide
  Sense strand starting at position 1361 of SEQ ID NO: 1563204
uccguucgcuggucaauua

SEQ ID NO: 1802914 - RNA, 19 nt, Artificial Sequence
  Description of Artificial Sequence: Synthetic oligonucleotide
  Antisense strand to SEQ ID NO: 1802913
uaauugaccagcgaacgga

SEQ ID NO: 1802915 - RNA, 19 nt, Artificial Sequence
  Description of Artificial Sequence: Synthetic oligonucleotide
  Sense strand starting at position 1844 of SEQ ID NO: 1563204
gagaaaguucuagacgcag

SEQ ID NO: 1802916 - RNA, 19 nt, Artificial Sequence
  Description of Artificial Sequence: Synthetic oligonucleotide
  Antisense strand to SEQ ID NO: 1802915
cugcgucuagaacuuucuc

SEQ ID NO: 1802917 - RNA, 19 nt, Artificial Sequence
  Description of Artificial Sequence: Synthetic oligonucleotide
  Sense strand starting at position 1846 of SEQ ID NO: 1563204
gaaaguucuagacgcagua

SEQ ID NO: 1802918 - RNA, 19 nt, Artificial Sequence
  Description of Artificial Sequence: Synthetic oligonucleotide
  Antisense strand to SEQ ID NO: 1802917
uacugcgucuagaacuuuc

SEQ ID NO: 1802919 - RNA, 19 nt, Artificial Sequence
  Description of Artificial Sequence: Synthetic oligonucleotide
  Sense strand starting at position 1856 of SEQ ID NO: 1563204
gacgcaguauccucagaag

SEQ ID NO: 1802920 - RNA, 19 nt, Artificial Sequence
  Description of Artificial Sequence: Synthetic oligonucleotide
  Antisense strand to SEQ ID NO: 1802919
cuucugaggauacugcguc

SEQ ID NO: 1802921 - RNA, 19 nt, Artificial Sequence
  Description of Artificial Sequence: Synthetic oligonucleotide
  Sense strand starting at position 2206 of SEQ ID NO: 1563204
ccgaguuucccacagucaa

SEQ ID NO: 1802922 - RNA, 19 nt, Artificial Sequence
  Description of Artificial Sequence: Synthetic oligonucleotide
  Antisense strand to SEQ ID NO: 1802921
uugacugugggaaacucgg

SEQ ID NO: 1802923 - RNA, 19 nt, Artificial Sequence
  Description of Artificial Sequence: Synthetic oligonucleotide
  Sense strand starting at position 28 of SEQ ID NO: 1563205
ccacaaaugcuuugggaug

SEQ ID NO: 1802924 - RNA, 19 nt, Artificial Sequence
  Description of Artificial Sequence: Synthetic oligonucleotide
  Antisense strand to SEQ ID NO: 1802923
caucccaaagcauuugugg

SEQ ID NO: 1802925 - RNA, 19 nt, Artificial Sequence
  Description of Artificial Sequence: Synthetic oligonucleotide
  Sense strand starting at position 106 of SEQ ID NO: 1563205
caucaucagggcuagaguu

SEQ ID NO: 1802926 - RNA, 19 nt, Artificial Sequence
  Description of Artificial Sequence: Synthetic oligonucleotide
  Antisense strand to SEQ ID NO: 1802925
aacucuagcccugaugaug

SEQ ID NO: 1802927 - RNA, 19 nt, Artificial Sequence
  Description of Artificial Sequence: Synthetic oligonucleotide
  Sense strand starting at position 116 of SEQ ID NO: 1563205
gcuagaguugaauaugcca

SEQ ID NO: 1802928 - RNA, 19 nt, Artificial Sequence
  Description of Artificial Sequence: Synthetic oligonucleotide
  Antisense strand to SEQ ID NO: 1802927
uggcauauucaacucuagc

SEQ ID NO: 1802929 - RNA, 19 nt, Artificial Sequence
  Description of Artificial Sequence: Synthetic oligonucleotide
  Sense strand starting at position 183 of SEQ ID NO: 1563205
cgauuuggcauucgguaga

SEQ ID NO: 1802930 - RNA, 19 nt, Artificial Sequence
  Description of Artificial Sequence: Synthetic oligonucleotide
  Antisense strand to SEQ ID NO: 1802929
ucuaccgaaugccaaaucg

SEQ ID NO: 1802931 - RNA, 19 nt, Artificial Sequence
  Description of Artificial Sequence: Synthetic oligonucleotide
  Sense strand starting at position 186 of SEQ ID NO: 1563205
uuuggcauucgguagauaa

SEQ ID NO: 1802932 - RNA, 19 nt, Artificial Sequence
  Description of Artificial Sequence: Synthetic oligonucleotide
  Antisense strand to SEQ ID NO: 1802931
uuaucuaccgaaugccaaa

SEQ ID NO: 1802933 - RNA, 19 nt, Artificial Sequence
  Description of Artificial Sequence: Synthetic oligonucleotide
  Sense strand starting at position 188 of SEQ ID NO: 1563205
uggcauucgguagauaaac

SEQ ID NO: 1802934 - RNA, 19 nt, Artificial Sequence
  Description of Artificial Sequence: Synthetic oligonucleotide
  Antisense strand to SEQ ID NO: 1802933
guuuaucuaccgaaugcca

SEQ ID NO: 1802935 - RNA, 19 nt, Artificial Sequence
  Description of Artificial Sequence: Synthetic oligonucleotide
  Sense strand starting at position 190 of SEQ ID NO: 1563205
gcauucgguagauaaacgu

SEQ ID NO: 1802936 - RNA, 19 nt, Artificial Sequence
  Description of Artificial Sequence: Synthetic oligonucleotide
  Antisense strand to SEQ ID NO: 1802935
acguuuaucuaccgaaugc

SEQ ID NO: 1802937 - RNA, 19 nt, Artificial Sequence
  Description of Artificial Sequence: Synthetic oligonucleotide
  Sense strand starting at position 194 of SEQ ID NO: 1563205
ucgguagauaaacgucuua

SEQ ID NO: 1802938 - RNA, 19 nt, Artificial Sequence
  Description of Artificial Sequence: Synthetic oligonucleotide
  Antisense strand to SEQ ID NO: 1802937
uaagacguuuaucuaccga

SEQ ID NO: 1802939 - RNA, 19 nt, Artificial Sequence
  Description of Artificial Sequence: Synthetic oligonucleotide
  Sense strand starting at position 199 of SEQ ID NO: 1563205
agauaaacgucuuaaaucc

SEQ ID NO: 1802940 - RNA, 19 nt, Artificial Sequence
  Description of Artificial Sequence: Synthetic oligonucleotide
  Antisense strand to SEQ ID NO: 1802939
ggauuuaagacguuuaucu

SEQ ID NO: 1802941 - RNA, 19 nt, Artificial Sequence
  Description of Artificial Sequence: Synthetic oligonucleotide
  Sense strand starting at position 266 of SEQ ID NO: 1563205
uccaguuuccuuuguguag

SEQ ID NO: 1802942 - RNA, 19 nt, Artificial Sequence
  Description of Artificial Sequence: Synthetic oligonucleotide
  Antisense strand to SEQ ID NO: 1802941
cuacacaaaggaaacugga

SEQ ID NO: 1802943 - RNA, 19 nt, Artificial Sequence
  Description of Artificial Sequence: Synthetic oligonucleotide
  Sense strand starting at position 267 of SEQ ID NO: 1563205
ccaguuuccuuuguguaga

SEQ ID NO: 1802944 - RNA, 19 nt, Artificial Sequence
  Description of Artificial Sequence: Synthetic oligonucleotide
  Antisense strand to SEQ ID NO: 1802943
ucuacacaaaggaaacugg

SEQ ID NO: 1802945 - RNA, 19 nt, Artificial Sequence
  Description of Artificial Sequence: Synthetic oligonucleotide
  Sense strand starting at position 269 of SEQ ID NO: 1563205
aguuuccuuuguguagaaa

SEQ ID NO: 1802946 - RNA, 19 nt, Artificial Sequence
  Description of Artificial Sequence: Synthetic oligonucleotide
  Antisense strand to SEQ ID NO: 1802945
uuucuacacaaaggaaacu

SEQ ID NO: 1802947 - RNA, 19 nt, Artificial Sequence
  Description of Artificial Sequence: Synthetic oligonucleotide
  Sense strand starting at position 270 of SEQ ID NO: 1563205
guuuccuuuguguagaaau

SEQ ID NO: 1802948 - RNA, 19 nt, Artificial Sequence
  Description of Artificial Sequence: Synthetic oligonucleotide
  Antisense strand to SEQ ID NO: 1802947
auuucuacacaaaggaaac

SEQ ID NO: 1802949 - RNA, 19 nt, Artificial Sequence
  Description of Artificial Sequence: Synthetic oligonucleotide
  Sense strand starting at position 272 of SEQ ID NO: 1563205
uuccuuuguguagaaauca

SEQ ID NO: 1802950 - RNA, 19 nt, Artificial Sequence
  Description of Artificial Sequence: Synthetic oligonucleotide
  Antisense strand to SEQ ID NO: 1802949
ugauuucuacacaaaggaa

SEQ ID NO: 1802951 - RNA, 19 nt, Artificial Sequence
  Description of Artificial Sequence: Synthetic oligonucleotide
  Sense strand starting at position 282 of SEQ ID NO: 1563205
uagaaaucagauugucugu

SEQ ID NO: 1802952 - RNA, 19 nt, Artificial Sequence
  Description of Artificial Sequence: Synthetic oligonucleotide
  Antisense strand to SEQ ID NO: 1802951
acagacaaucugauuucua

SEQ ID NO: 1802953 - RNA, 19 nt, Artificial Sequence
  Description of Artificial Sequence: Synthetic oligonucleotide
  Sense strand starting at position 291 of SEQ ID NO: 1563205
gauugucuguccucuaaag

SEQ ID NO: 1802954 - RNA, 19 nt, Artificial Sequence
  Description of Artificial Sequence: Synthetic oligonucleotide
  Antisense strand to SEQ ID NO: 1802953
cuuuagaggacagacaauc

SEQ ID NO: 1802955 - RNA, 19 nt, Artificial Sequence
  Description of Artificial Sequence: Synthetic oligonucleotide
  Sense strand starting at position 293 of SEQ ID NO: 1563205
uugucuguccucuaaagcu

SEQ ID NO: 1802956 - RNA, 19 nt, Artificial Sequence
  Description of Artificial Sequence: Synthetic oligonucleotide
  Antisense strand to SEQ ID NO: 1802955
agcuuuagaggacagacaa

SEQ ID NO: 1802957 - RNA, 19 nt, Artificial Sequence
  Description of Artificial Sequence: Synthetic oligonucleotide
  Sense strand starting at position 350 of SEQ ID NO: 1563205
cgucuugucaacuguacga

SEQ ID NO: 1802958 - RNA, 19 nt, Artificial Sequence
  Description of Artificial Sequence: Synthetic oligonucleotide
  Antisense strand to SEQ ID NO: 1802957
ucguacaguugacaagacg

SEQ ID NO: 1802959 - RNA, 19 nt, Artificial Sequence
  Description of Artificial Sequence: Synthetic oligonucleotide
  Sense strand starting at position 408 of SEQ ID NO: 1563205
gcauacuuucuaugguauc

SEQ ID NO: 1802960 - RNA, 19 nt, Artificial Sequence
  Description of Artificial Sequence: Synthetic oligonucleotide
  Antisense strand to SEQ ID NO: 1802959
gauaccauagaaaguaugc

SEQ ID NO: 1802961 - RNA, 19 nt, Artificial Sequence
  Description of Artificial Sequence: Synthetic oligonucleotide
  Sense strand starting at position 481 of SEQ ID NO: 1563205
uuggccuuauuuguaauau

SEQ ID NO: 1802962 - RNA, 19 nt, Artificial Sequence
  Description of Artificial Sequence: Synthetic oligonucleotide
  Antisense strand to SEQ ID NO: 1802961
auauuacaaauaaggccaa

SEQ ID NO: 1802963 - RNA, 19 nt, Artificial Sequence
  Description of Artificial Sequence: Synthetic oligonucleotide
  Sense strand starting at position 482 of SEQ ID NO: 1563205
uggccuuauuuguaauauc

SEQ ID NO: 1802964 - RNA, 19 nt, Artificial Sequence
  Description of Artificial Sequence: Synthetic oligonucleotide
  Antisense strand to SEQ ID NO: 1802963
gauauuacaaauaaggcca

SEQ ID NO: 1802965 - RNA, 19 nt, Artificial Sequence
  Description of Artificial Sequence: Synthetic oligonucleotide
  Sense strand starting at position 485 of SEQ ID NO: 1563205
ccuuauuuguaauaucgua

SEQ ID NO: 1802966 - RNA, 19 nt, Artificial Sequence
  Description of Artificial Sequence: Synthetic oligonucleotide
  Antisense strand to SEQ ID NO: 1802965
uacgauauuacaaauaagg

SEQ ID NO: 1802967 - RNA, 19 nt, Artificial Sequence
  Description of Artificial Sequence: Synthetic oligonucleotide
  Sense strand starting at position 505 of SEQ ID NO: 1563205
uuuaaauagggauguguuc

SEQ ID NO: 1802968 - RNA, 19 nt, Artificial Sequence
  Description of Artificial Sequence: Synthetic oligonucleotide
  Antisense strand to SEQ ID NO: 1802967
gaacacaucccuauuuaaa

SEQ ID NO: 1802969 - RNA, 19 nt, Artificial Sequence
  Description of Artificial Sequence: Synthetic oligonucleotide
  Sense strand starting at position 511 of SEQ ID NO: 1563205
uagggauguguucagguau

SEQ ID NO: 1802970 - RNA, 19 nt, Artificial Sequence
  Description of Artificial Sequence: Synthetic oligonucleotide
  Antisense strand to SEQ ID NO: 1802969
auaccugaacacaucccua

SEQ ID NO: 1802971 - RNA, 19 nt, Artificial Sequence
  Description of Artificial Sequence: Synthetic oligonucleotide
  Sense strand starting at position 604 of SEQ ID NO: 1563205
ccuccacaggcugaguaau

SEQ ID NO: 1802972 - RNA, 19 nt, Artificial Sequence
  Description of Artificial Sequence: Synthetic oligonucleotide
  Antisense strand to SEQ ID NO: 1802971
auuacucagccuguggagg

SEQ ID NO: 1802973 - RNA, 19 nt, Artificial Sequence
  Description of Artificial Sequence: Synthetic oligonucleotide
  Sense strand starting at position 638 of SEQ ID NO: 1563205
gcgcaauaccagugagacu

SEQ ID NO: 1802974 - RNA, 19 nt, Artificial Sequence
  Description of Artificial Sequence: Synthetic oligonucleotide
  Antisense strand to SEQ ID NO: 1802973
agucucacugguauugcgc

SEQ ID NO: 1802975 - RNA, 19 nt, Artificial Sequence
  Description of Artificial Sequence: Synthetic oligonucleotide
  Sense strand starting at position 639 of SEQ ID NO: 1563205
cgcaauaccagugagacua

SEQ ID NO: 1802976 - RNA, 19 nt, Artificial Sequence
  Description of Artificial Sequence: Synthetic oligonucleotide
  Antisense strand to SEQ ID NO: 1802975
uagucucacugguauugcg

SEQ ID NO: 1802977 - RNA, 19 nt, Artificial Sequence
  Description of Artificial Sequence: Synthetic oligonucleotide
  Sense strand starting at position 651 of SEQ ID NO: 1563205
gagacuaguuaggaggaca

SEQ ID NO: 1802978 - RNA, 19 nt, Artificial Sequence
  Description of Artificial Sequence: Synthetic oligonucleotide
  Antisense strand to SEQ ID NO: 1802977
uguccuccuaacuagucuc

SEQ ID NO: 1802979 - RNA, 19 nt, Artificial Sequence
  Description of Artificial Sequence: Synthetic oligonucleotide
  Sense strand starting at position 702 of SEQ ID NO: 1563205
uggugcaagucuuccgaau

SEQ ID NO: 1802980 - RNA, 19 nt, Artificial Sequence
  Description of Artificial Sequence: Synthetic oligonucleotide
  Antisense strand to SEQ ID NO: 1802979
auucggaagacuugcacca

SEQ ID NO: 1802981 - RNA, 19 nt, Artificial Sequence
  Description of Artificial Sequence: Synthetic oligonucleotide
  Sense strand starting at position 766 of SEQ ID NO: 1563205
gggcaucauuuccagaacu

SEQ ID NO: 1802982 - RNA, 19 nt, Artificial Sequence
  Description of Artificial Sequence: Synthetic oligonucleotide
  Antisense strand to SEQ ID NO: 1802981
aguucuggaaaugaugccc

SEQ ID NO: 1802983 - RNA, 19 nt, Artificial Sequence
  Description of Artificial Sequence: Synthetic oligonucleotide
  Sense strand starting at position 777 of SEQ ID NO: 1563205
ccagaacuguaacauagau

SEQ ID NO: 1802984 - RNA, 19 nt, Artificial Sequence
  Description of Artificial Sequence: Synthetic oligonucleotide
  Antisense strand to SEQ ID NO: 1802983
aucuauguuacaguucugg

SEQ ID NO: 1802985 - RNA, 19 nt, Artificial Sequence
  Description of Artificial Sequence: Synthetic oligonucleotide
  Sense strand starting at position 881 of SEQ ID NO: 1563205
cugggaaggguuggcaaua

SEQ ID NO: 1802986 - RNA, 19 nt, Artificial Sequence
  Description of Artificial Sequence: Synthetic oligonucleotide
  Antisense strand to SEQ ID NO: 1802985
uauugccaacccuucccag

SEQ ID NO: 1802987 - RNA, 19 nt, Artificial Sequence
  Description of Artificial Sequence: Synthetic oligonucleotide
  Sense strand starting at position 882 of SEQ ID NO: 1563205
ugggaaggguuggcaauaa

SEQ ID NO: 1802988 - RNA, 19 nt, Artificial Sequence
  Description of Artificial Sequence: Synthetic oligonucleotide
  Antisense strand to SEQ ID NO: 1802987
uuauugccaacccuuccca

SEQ ID NO: 1802989 - RNA, 19 nt, Artificial Sequence
  Description of Artificial Sequence: Synthetic oligonucleotide
  Sense strand starting at position 1156 of SEQ ID NO: 1563205
agguuucccacaggaagau

SEQ ID NO: 1802990 - RNA, 19 nt, Artificial Sequence
  Description of Artificial Sequence: Synthetic oligonucleotide
  Antisense strand to SEQ ID NO: 1802989
aucuuccugugggaaaccu

SEQ ID NO: 1802991 - RNA, 19 nt, Artificial Sequence
  Description of Artificial Sequence: Synthetic oligonucleotide
  Sense strand starting at position 1386 of SEQ ID NO: 1563205
uuccguucgcuggucaauu

SEQ ID NO: 1802992 - RNA, 19 nt, Artificial Sequence
  Description of Artificial Sequence: Synthetic oligonucleotide
  Antisense strand to SEQ ID NO: 1802991
aauugaccagcgaacggaa

SEQ ID NO: 1802993 - RNA, 19 nt, Artificial Sequence
  Description of Artificial Sequence: Synthetic oligonucleotide
  Sense strand starting at position 1387 of SEQ ID NO: 1563205
uccguucgcuggucaauua

SEQ ID NO: 1802994 - RNA, 19 nt, Artificial Sequence
  Description of Artificial Sequence: Synthetic oligonucleotide
  Antisense strand to SEQ ID NO: 1802993
uaauugaccagcgaacgga

SEQ ID NO: 1802995 - RNA, 19 nt, Artificial Sequence
  Description of Artificial Sequence: Synthetic oligonucleotide
  Sense strand starting at position 1870 of SEQ ID NO: 1563205
gagaaaguucuagacgcag

SEQ ID NO: 1802996 - RNA, 19 nt, Artificial Sequence
  Description of Artificial Sequence: Synthetic oligonucleotide
  Antisense strand to SEQ ID NO: 1802995
cugcgucuagaacuuucuc

SEQ ID NO: 1802997 - RNA, 19 nt, Artificial Sequence
  Description of Artificial Sequence: Synthetic oligonucleotide
  Sense strand starting at position 1872 of SEQ ID NO: 1563205
gaaaguucuagacgcagua

SEQ ID NO: 1802998 - RNA, 19 nt, Artificial Sequence
  Description of Artificial Sequence: Synthetic oligonucleotide
  Antisense strand to SEQ ID NO: 1802997
uacugcgucuagaacuuuc

SEQ ID NO: 1802999 - RNA, 19 nt, Artificial Sequence
  Description of Artificial Sequence: Synthetic oligonucleotide
  Sense strand starting at position 1882 of SEQ ID NO: 1563205
gacgcaguauccucagaag

SEQ ID NO: 1803000 - RNA, 19 nt, Artificial Sequence
  Description of Artificial Sequence: Synthetic oligonucleotide
  Antisense strand to SEQ ID NO: 1802999
cuucugaggauacugcguc

SEQ ID NO: 1803001 - RNA, 19 nt, Artificial Sequence
  Description of Artificial Sequence: Synthetic oligonucleotide
  Sense strand starting at position 2232 of SEQ ID NO: 1563205
ccgaguuucccacagucaa

SEQ ID NO: 1803002 - RNA, 19 nt, Artificial Sequence
  Description of Artificial Sequence: Synthetic oligonucleotide
  Antisense strand to SEQ ID NO: 1803001
uugacugugggaaacucgg

SEQ ID NO: 1803003 - RNA, 19 nt, Artificial Sequence
  Description of Artificial Sequence: Synthetic oligonucleotide
  Sense strand starting at position 6 of SEQ ID NO: 1563206
gagacuaguuaggaggaca

SEQ ID NO: 1803004 - RNA, 19 nt, Artificial Sequence
  Description of Artificial Sequence: Synthetic oligonucleotide
  Antisense strand to SEQ ID NO: 1803003
uguccuccuaacuagucuc

SEQ ID NO: 1803005 - RNA, 19 nt, Artificial Sequence
  Description of Artificial Sequence: Synthetic oligonucleotide
  Sense strand starting at position 57 of SEQ ID NO: 1563206
uggugcaagucuuccgaau

SEQ ID NO: 1803006 - RNA, 19 nt, Artificial Sequence
  Description of Artificial Sequence: Synthetic oligonucleotide
  Antisense strand to SEQ ID NO: 1803005
auucggaagacuugcacca

SEQ ID NO: 1803007 - RNA, 19 nt, Artificial Sequence
  Description of Artificial Sequence: Synthetic oligonucleotide
  Sense strand starting at position 121 of SEQ ID NO: 1563206
gggcaucauuuccagaacu

SEQ ID NO: 1803008 - RNA, 19 nt, Artificial Sequence
  Description of Artificial Sequence: Synthetic oligonucleotide
  Antisense strand to SEQ ID NO: 1803007
aguucuggaaaugaugccc

SEQ ID NO: 1803009 - RNA, 19 nt, Artificial Sequence
  Description of Artificial Sequence: Synthetic oligonucleotide
  Sense strand starting at position 132 of SEQ ID NO: 1563206
ccagaacuguaacauagau

SEQ ID NO: 1803010 - RNA, 19 nt, Artificial Sequence
  Description of Artificial Sequence: Synthetic oligonucleotide
  Antisense strand to SEQ ID NO: 1803009
aucuauguuacaguucugg

SEQ ID NO: 1803011 - RNA, 19 nt, Artificial Sequence
  Description of Artificial Sequence: Synthetic oligonucleotide
  Sense strand starting at position 209 of SEQ ID NO: 1563206
cugagcaagucaugacgaa

SEQ ID NO: 1803012 - RNA, 19 nt, Artificial Sequence
  Description of Artificial Sequence: Synthetic oligonucleotide
  Antisense strand to SEQ ID NO: 1803011
uucgucaugacuugcucag

SEQ ID NO: 1803013 - RNA, 19 nt, Artificial Sequence
  Description of Artificial Sequence: Synthetic oligonucleotide
  Sense strand starting at position 236 of SEQ ID NO: 1563206
cugggaaggguuggcaaua

SEQ ID NO: 1803014 - RNA, 19 nt, Artificial Sequence
  Description of Artificial Sequence: Synthetic oligonucleotide
  Antisense strand to SEQ ID NO: 1803013
uauugccaacccuucccag

SEQ ID NO: 1803015 - RNA, 19 nt, Artificial Sequence
  Description of Artificial Sequence: Synthetic oligonucleotide
  Sense strand starting at position 237 of SEQ ID NO: 1563206
ugggaaggguuggcaauaa

SEQ ID NO: 1803016 - RNA, 19 nt, Artificial Sequence
  Description of Artificial Sequence: Synthetic oligonucleotide
  Antisense strand to SEQ ID NO: 1803015
uuauugccaacccuuccca

SEQ ID NO: 1803017 - RNA, 19 nt, Artificial Sequence
  Description of Artificial Sequence: Synthetic oligonucleotide
  Sense strand starting at position 492 of SEQ ID NO: 1563206
gacucauccuguugcuaga

SEQ ID NO: 1803018 - RNA, 19 nt, Artificial Sequence
  Description of Artificial Sequence: Synthetic oligonucleotide
  Antisense strand to SEQ ID NO: 1803017
ucuagcaacaggaugaguc

SEQ ID NO: 1803019 - RNA, 19 nt, Artificial Sequence
  Description of Artificial Sequence: Synthetic oligonucleotide
  Sense strand starting at position 511 of SEQ ID NO: 1563206
agguuucccacaggaagau

SEQ ID NO: 1803020 - RNA, 19 nt, Artificial Sequence
  Description of Artificial Sequence: Synthetic oligonucleotide
  Antisense strand to SEQ ID NO: 1803019
aucuuccugugggaaaccu

SEQ ID NO: 1803021 - RNA, 19 nt, Artificial Sequence
  Description of Artificial Sequence: Synthetic oligonucleotide
  Sense strand starting at position 741 of SEQ ID NO: 1563206
uuccguucgcuggucaauu

SEQ ID NO: 1803022 - RNA, 19 nt, Artificial Sequence
  Description of Artificial Sequence: Synthetic oligonucleotide
  Antisense strand to SEQ ID NO: 1803021
aauugaccagcgaacggaa

SEQ ID NO: 1803023 - RNA, 19 nt, Artificial Sequence
  Description of Artificial Sequence: Synthetic oligonucleotide
  Sense strand starting at position 742 of SEQ ID NO: 1563206
uccguucgcuggucaauua

SEQ ID NO: 1803024 - RNA, 19 nt, Artificial Sequence
  Description of Artificial Sequence: Synthetic oligonucleotide
  Antisense strand to SEQ ID NO: 1803023
uaauugaccagcgaacgga

SEQ ID NO: 1803025 - RNA, 19 nt, Artificial Sequence
  Description of Artificial Sequence: Synthetic oligonucleotide
  Sense strand starting at position 860 of SEQ ID NO: 1563206
aggcguucuucgggaagag

SEQ ID NO: 1803026 - RNA, 19 nt, Artificial Sequence
  Description of Artificial Sequence: Synthetic oligonucleotide
  Antisense strand to SEQ ID NO: 1803025
cucuucccgaagaacgccu

SEQ ID NO: 1803027 - RNA, 19 nt, Artificial Sequence
  Description of Artificial Sequence: Synthetic oligonucleotide
  Sense strand starting at position 1225 of SEQ ID NO: 1563206
gagaaaguucuagacgcag

SEQ ID NO: 1803028 - RNA, 19 nt, Artificial Sequence
  Description of Artificial Sequence: Synthetic oligonucleotide
  Antisense strand to SEQ ID NO: 1803027
cugcgucuagaacuuucuc

SEQ ID NO: 1803029 - RNA, 19 nt, Artificial Sequence
  Description of Artificial Sequence: Synthetic oligonucleotide
  Sense strand starting at position 1227 of SEQ ID NO: 1563206
gaaaguucuagacgcagua

SEQ ID NO: 1803030 - RNA, 19 nt, Artificial Sequence
  Description of Artificial Sequence: Synthetic oligonucleotide
  Antisense strand to SEQ ID NO: 1803029
uacugcgucuagaacuuuc

SEQ ID NO: 1803031 - RNA, 19 nt, Artificial Sequence
  Description of Artificial Sequence: Synthetic oligonucleotide
  Sense strand starting at position 1237 of SEQ ID NO: 1563206
gacgcaguauccucagaag

SEQ ID NO: 1803032 - RNA, 19 nt, Artificial Sequence
  Description of Artificial Sequence: Synthetic oligonucleotide
  Antisense strand to SEQ ID NO: 1803031
cuucugaggauacugcguc

SEQ ID NO: 1803033 - RNA, 19 nt, Artificial Sequence
  Description of Artificial Sequence: Synthetic oligonucleotide
  Sense strand starting at position 1240 of SEQ ID NO: 1563206
gcaguauccucagaagcca

SEQ ID NO: 1803034 - RNA, 19 nt, Artificial Sequence
  Description of Artificial Sequence: Synthetic oligonucleotide
  Antisense strand to SEQ ID NO: 1803033
uggcuucugaggauacugc

SEQ ID NO: 1803035 - RNA, 19 nt, Artificial Sequence
  Description of Artificial Sequence: Synthetic oligonucleotide
  Sense strand starting at position 1587 of SEQ ID NO: 1563206
ccgaguuucccacagucaa

SEQ ID NO: 1803036 - RNA, 19 nt, Artificial Sequence
  Description of Artificial Sequence: Synthetic oligonucleotide
  Antisense strand to SEQ ID NO: 1803035
uugacugugggaaacucgg

SEQ ID NO: 1803037 - RNA, 19 nt, Artificial Sequence
  Description of Artificial Sequence: Synthetic oligonucleotide
  Sense strand starting at position 3693 of SEQ ID NO: 1563206
ggagguuguccuggccuua

SEQ ID NO: 1803038 - RNA, 19 nt, Artificial Sequence
  Description of Artificial Sequence: Synthetic oligonucleotide
  Antisense strand to SEQ ID NO: 1803037
uaaggccaggacaaccucc

SEQ ID NO: 1803039 - RNA, 19 nt, Artificial Sequence
  Description of Artificial Sequence: Synthetic oligonucleotide
  Sense strand starting at position 3776 of SEQ ID NO: 1563206
ggaggagacgccugccauu

SEQ ID NO: 1803040 - RNA, 19 nt, Artificial Sequence
  Description of Artificial Sequence: Synthetic oligonucleotide
  Antisense strand to SEQ ID NO: 1803039
aauggcaggcgucuccucc

SEQ ID NO: 1803041 - RNA, 19 nt, Artificial Sequence
  Description of Artificial Sequence: Synthetic oligonucleotide
  Sense strand starting at position 3898 of SEQ ID NO: 1563206
gcauuaugggcaugacuca

SEQ ID NO: 1803042 - RNA, 19 nt, Artificial Sequence
  Description of Artificial Sequence: Synthetic oligonucleotide
  Antisense strand to SEQ ID NO: 1803041
ugagucaugcccauaaugc

SEQ ID NO: 1803043 - RNA, 19 nt, Artificial Sequence
  Description of Artificial Sequence: Synthetic oligonucleotide
  Sense strand starting at position 9 of SEQ ID NO: 1563207
gauugucuguccucuaaag

SEQ ID NO: 1803044 - RNA, 19 nt, Artificial Sequence
  Description of Artificial Sequence: Synthetic oligonucleotide
  Antisense strand to SEQ ID NO: 1803043
cuuuagaggacagacaauc

SEQ ID NO: 1803045 - RNA, 19 nt, Artificial Sequence
  Description of Artificial Sequence: Synthetic oligonucleotide
  Sense strand starting at position 11 of SEQ ID NO: 1563207
uugucuguccucuaaagcu

SEQ ID NO: 1803046 - RNA, 19 nt, Artificial Sequence
  Description of Artificial Sequence: Synthetic oligonucleotide
  Antisense strand to SEQ ID NO: 1803045
agcuuuagaggacagacaa

SEQ ID NO: 1803047 - RNA, 19 nt, Artificial Sequence
  Description of Artificial Sequence: Synthetic oligonucleotide
  Sense strand starting at position 68 of SEQ ID NO: 1563207
cgucuugucaacuguacga

SEQ ID NO: 1803048 - RNA, 19 nt, Artificial Sequence
  Description of Artificial Sequence: Synthetic oligonucleotide
  Antisense strand to SEQ ID NO: 1803047
ucguacaguugacaagacg

SEQ ID NO: 1803049 - RNA, 19 nt, Artificial Sequence
  Description of Artificial Sequence: Synthetic oligonucleotide
  Sense strand starting at position 124 of SEQ ID NO: 1563207
cugcauacuuucuauggua

SEQ ID NO: 1803050 - RNA, 19 nt, Artificial Sequence
  Description of Artificial Sequence: Synthetic oligonucleotide
  Antisense strand to SEQ ID NO: 1803049
uaccauagaaaguaugcag

SEQ ID NO: 1803051 - RNA, 19 nt, Artificial Sequence
  Description of Artificial Sequence: Synthetic oligonucleotide
  Sense strand starting at position 126 of SEQ ID NO: 1563207
gcauacuuucuaugguauc

SEQ ID NO: 1803052 - RNA, 19 nt, Artificial Sequence
  Description of Artificial Sequence: Synthetic oligonucleotide
  Antisense strand to SEQ ID NO: 1803051
gauaccauagaaaguaugc

SEQ ID NO: 1803053 - RNA, 19 nt, Artificial Sequence
  Description of Artificial Sequence: Synthetic oligonucleotide
  Sense strand starting at position 199 of SEQ ID NO: 1563207
uuggccuuauuuguaauau

SEQ ID NO: 1803054 - RNA, 19 nt, Artificial Sequence
  Description of Artificial Sequence: Synthetic oligonucleotide
  Antisense strand to SEQ ID NO: 1803053
auauuacaaauaaggccaa

SEQ ID NO: 1803055 - RNA, 19 nt, Artificial Sequence
  Description of Artificial Sequence: Synthetic oligonucleotide
  Sense strand starting at position 200 of SEQ ID NO: 1563207
uggccuuauuuguaauauc

SEQ ID NO: 1803056 - RNA, 19 nt, Artificial Sequence
  Description of Artificial Sequence: Synthetic oligonucleotide
  Antisense strand to SEQ ID NO: 1803055
gauauuacaaauaaggcca

SEQ ID NO: 1803057 - RNA, 19 nt, Artificial Sequence
  Description of Artificial Sequence: Synthetic oligonucleotide
  Sense strand starting at position 203 of SEQ ID NO: 1563207
ccuuauuuguaauaucgua

SEQ ID NO: 1803058 - RNA, 19 nt, Artificial Sequence
  Description of Artificial Sequence: Synthetic oligonucleotide
  Antisense strand to SEQ ID NO: 1803057
uacgauauuacaaauaagg

SEQ ID NO: 1803059 - RNA, 19 nt, Artificial Sequence
  Description of Artificial Sequence: Synthetic oligonucleotide
  Sense strand starting at position 223 of SEQ ID NO: 1563207
uuuaaauagggauguguuc

SEQ ID NO: 1803060 - RNA, 19 nt, Artificial Sequence
  Description of Artificial Sequence: Synthetic oligonucleotide
  Antisense strand to SEQ ID NO: 1803059
gaacacaucccuauuuaaa

SEQ ID NO: 1803061 - RNA, 19 nt, Artificial Sequence
  Description of Artificial Sequence: Synthetic oligonucleotide
  Sense strand starting at position 229 of SEQ ID NO: 1563207
uagggauguguucagguau

SEQ ID NO: 1803062 - RNA, 19 nt, Artificial Sequence
  Description of Artificial Sequence: Synthetic oligonucleotide
  Antisense strand to SEQ ID NO: 1803061
auaccugaacacaucccua

SEQ ID NO: 1803063 - RNA, 19 nt, Artificial Sequence
  Description of Artificial Sequence: Synthetic oligonucleotide
  Sense strand starting at position 322 of SEQ ID NO: 1563207
ccuccacaggcugaguaau

SEQ ID NO: 1803064 - RNA, 19 nt, Artificial Sequence
  Description of Artificial Sequence: Synthetic oligonucleotide
  Antisense strand to SEQ ID NO: 1803063
auuacucagccuguggagg

SEQ ID NO: 1803065 - RNA, 19 nt, Artificial Sequence
  Description of Artificial Sequence: Synthetic oligonucleotide
  Sense strand starting at position 356 of SEQ ID NO: 1563207
gcgcaauaccagugagacu

SEQ ID NO: 1803066 - RNA, 19 nt, Artificial Sequence
  Description of Artificial Sequence: Synthetic oligonucleotide
  Antisense strand to SEQ ID NO: 1803065
agucucacugguauugcgc

SEQ ID NO: 1803067 - RNA, 19 nt, Artificial Sequence
  Description of Artificial Sequence: Synthetic oligonucleotide
  Sense strand starting at position 357 of SEQ ID NO: 1563207
cgcaauaccagugagacua

SEQ ID NO: 1803068 - RNA, 19 nt, Artificial Sequence
  Description of Artificial Sequence: Synthetic oligonucleotide
  Antisense strand to SEQ ID NO: 1803067
uagucucacugguauugcg

SEQ ID NO: 1803069 - RNA, 19 nt, Artificial Sequence
  Description of Artificial Sequence: Synthetic oligonucleotide
  Sense strand starting at position 369 of SEQ ID NO: 1563207
gagacuaguuaggaggaca

SEQ ID NO: 1803070 - RNA, 19 nt, Artificial Sequence
  Description of Artificial Sequence: Synthetic oligonucleotide
  Antisense strand to SEQ ID NO: 1803069
uguccuccuaacuagucuc

SEQ ID NO: 1803071 - RNA, 19 nt, Artificial Sequence
  Description of Artificial Sequence: Synthetic oligonucleotide
  Sense strand starting at position 420 of SEQ ID NO: 1563207
uggugcaagucuuccgaau

SEQ ID NO: 1803072 - RNA, 19 nt, Artificial Sequence
  Description of Artificial Sequence: Synthetic oligonucleotide
  Antisense strand to SEQ ID NO: 1803071
auucggaagacuugcacca

SEQ ID NO: 1803073 - RNA, 19 nt, Artificial Sequence
  Description of Artificial Sequence: Synthetic oligonucleotide
  Sense strand starting at position 484 of SEQ ID NO: 1563207
gggcaucauuuccagaacu

SEQ ID NO: 1803074 - RNA, 19 nt, Artificial Sequence
  Description of Artificial Sequence: Synthetic oligonucleotide
  Antisense strand to SEQ ID NO: 1803073
aguucuggaaaugaugccc

SEQ ID NO: 1803075 - RNA, 19 nt, Artificial Sequence
  Description of Artificial Sequence: Synthetic oligonucleotide
  Sense strand starting at position 495 of SEQ ID NO: 1563207
ccagaacuguaacauagau

SEQ ID NO: 1803076 - RNA, 19 nt, Artificial Sequence
  Description of Artificial Sequence: Synthetic oligonucleotide
  Antisense strand to SEQ ID NO: 1803075
aucuauguuacaguucugg

SEQ ID NO: 1803077 - RNA, 19 nt, Artificial Sequence
  Description of Artificial Sequence: Synthetic oligonucleotide
  Sense strand starting at position 572 of SEQ ID NO: 1563207
cugagcaagucaugacgaa

SEQ ID NO: 1803078 - RNA, 19 nt, Artificial Sequence
  Description of Artificial Sequence: Synthetic oligonucleotide
  Antisense strand to SEQ ID NO: 1803077
uucgucaugacuugcucag

SEQ ID NO: 1803079 - RNA, 19 nt, Artificial Sequence
  Description of Artificial Sequence: Synthetic oligonucleotide
  Sense strand starting at position 599 of SEQ ID NO: 1563207
cugggaaggguuggcaaua

SEQ ID NO: 1803080 - RNA, 19 nt, Artificial Sequence
  Description of Artificial Sequence: Synthetic oligonucleotide
  Antisense strand to SEQ ID NO: 1803079
uauugccaacccuucccag

SEQ ID NO: 1803081 - RNA, 19 nt, Artificial Sequence
  Description of Artificial Sequence: Synthetic oligonucleotide
  Sense strand starting at position 600 of SEQ ID NO: 1563207
ugggaaggguuggcaauaa

SEQ ID NO: 1803082 - RNA, 19 nt, Artificial Sequence
  Description of Artificial Sequence: Synthetic oligonucleotide
  Antisense strand to SEQ ID NO: 1803081
uuauugccaacccuuccca

SEQ ID NO: 1803083 - RNA, 19 nt, Artificial Sequence
  Description of Artificial Sequence: Synthetic oligonucleotide
  Sense strand starting at position 855 of SEQ ID NO: 1563207
gacucauccuguugcuaga

SEQ ID NO: 1803084 - RNA, 19 nt, Artificial Sequence
  Description of Artificial Sequence: Synthetic oligonucleotide
  Antisense strand to SEQ ID NO: 1803083
ucuagcaacaggaugaguc

SEQ ID NO: 1803085 - RNA, 19 nt, Artificial Sequence
  Description of Artificial Sequence: Synthetic oligonucleotide
  Sense strand starting at position 874 of SEQ ID NO: 1563207
agguuucccacaggaagau

SEQ ID NO: 1803086 - RNA, 19 nt, Artificial Sequence
  Description of Artificial Sequence: Synthetic oligonucleotide
  Antisense strand to SEQ ID NO: 1803085
aucuuccugugggaaaccu

SEQ ID NO: 1803087 - RNA, 19 nt, Artificial Sequence
  Description of Artificial Sequence: Synthetic oligonucleotide
  Sense strand starting at position 1104 of SEQ ID NO: 1563207
uuccguucgcuggucaauu

SEQ ID NO: 1803088 - RNA, 19 nt, Artificial Sequence
  Description of Artificial Sequence: Synthetic oligonucleotide
  Antisense strand to SEQ ID NO: 1803087
aauugaccagcgaacggaa

SEQ ID NO: 1803089 - RNA, 19 nt, Artificial Sequence
  Description of Artificial Sequence: Synthetic oligonucleotide
  Sense strand starting at position 1105 of SEQ ID NO: 1563207
uccguucgcuggucaauua

SEQ ID NO: 1803090 - RNA, 19 nt, Artificial Sequence
  Description of Artificial Sequence: Synthetic oligonucleotide
  Antisense strand to SEQ ID NO: 1803089
uaauugaccagcgaacgga

SEQ ID NO: 1803091 - RNA, 19 nt, Artificial Sequence
  Description of Artificial Sequence: Synthetic oligonucleotide
  Sense strand starting at position 1223 of SEQ ID NO: 1563207
aggcguucuucgggaagag

SEQ ID NO: 1803092 - RNA, 19 nt, Artificial Sequence
  Description of Artificial Sequence: Synthetic oligonucleotide
  Antisense strand to SEQ ID NO: 1803091
cucuucccgaagaacgccu

SEQ ID NO: 1803093 - RNA, 19 nt, Artificial Sequence
  Description of Artificial Sequence: Synthetic oligonucleotide
  Sense strand starting at position 1588 of SEQ ID NO: 1563207
gagaaaguucuagacgcag

SEQ ID NO: 1803094 - RNA, 19 nt, Artificial Sequence
  Description of Artificial Sequence: Synthetic oligonucleotide
  Antisense strand to SEQ ID NO: 1803093
cugcgucuagaacuuucuc

SEQ ID NO: 1803095 - RNA, 19 nt, Artificial Sequence
  Description of Artificial Sequence: Synthetic oligonucleotide
  Sense strand starting at position 1590 of SEQ ID NO: 1563207
gaaaguucuagacgcagua

SEQ ID NO: 1803096 - RNA, 19 nt, Artificial Sequence
  Description of Artificial Sequence: Synthetic oligonucleotide
  Antisense strand to SEQ ID NO: 1803095
uacugcgucuagaacuuuc

SEQ ID NO: 1803097 - RNA, 19 nt, Artificial Sequence
  Description of Artificial Sequence: Synthetic oligonucleotide
  Sense strand starting at position 1600 of SEQ ID NO: 1563207
gacgcaguauccucagaag

SEQ ID NO: 1803098 - RNA, 19 nt, Artificial Sequence
  Description of Artificial Sequence: Synthetic oligonucleotide
  Antisense strand to SEQ ID NO: 1803097
cuucugaggauacugcguc

SEQ ID NO: 1803099 - RNA, 19 nt, Artificial Sequence
  Description of Artificial Sequence: Synthetic oligonucleotide
  Sense strand starting at position 1603 of SEQ ID NO: 1563207
gcaguauccucagaagcca

SEQ ID NO: 1803100 - RNA, 19 nt, Artificial Sequence
  Description of Artificial Sequence: Synthetic oligonucleotide
  Antisense strand to SEQ ID NO: 1803099
uggcuucugaggauacugc

SEQ ID NO: 1803101 - RNA, 19 nt, Artificial Sequence
  Description of Artificial Sequence: Synthetic oligonucleotide
  Sense strand starting at position 1950 of SEQ ID NO: 1563207
ccgaguuucccacagucaa

SEQ ID NO: 1803102 - RNA, 19 nt, Artificial Sequence
  Description of Artificial Sequence: Synthetic oligonucleotide
  Antisense strand to SEQ ID NO: 1803101
uugacugugggaaacucgg

SEQ ID NO: 1803103 - RNA, 19 nt, Artificial Sequence
  Description of Artificial Sequence: Synthetic oligonucleotide
  Sense strand starting at position 61 of SEQ ID NO: 1563208
gcaaacguggucgccuaau

SEQ ID NO: 1803104 - RNA, 19 nt, Artificial Sequence
  Description of Artificial Sequence: Synthetic oligonucleotide
  Antisense strand to SEQ ID NO: 1803103
auuaggcgaccacguuugc

SEQ ID NO: 1803105 - RNA, 19 nt, Artificial Sequence
  Description of Artificial Sequence: Synthetic oligonucleotide
  Sense strand starting at position 216 of SEQ ID NO: 1563208
gugucacugccaggaauac

SEQ ID NO: 1803106 - RNA, 19 nt, Artificial Sequence
  Description of Artificial Sequence: Synthetic oligonucleotide
  Antisense strand to SEQ ID NO: 1803105
guauuccuggcagugacac

SEQ ID NO: 1803107 - RNA, 19 nt, Artificial Sequence
  Description of Artificial Sequence: Synthetic oligonucleotide
  Sense strand starting at position 507 of SEQ ID NO: 1563208
gcgggaaacuuugcaagaa

SEQ ID NO: 1803108 - RNA, 19 nt, Artificial Sequence
  Description of Artificial Sequence: Synthetic oligonucleotide
  Antisense strand to SEQ ID NO: 1803107
uucuugcaaaguuucccgc

SEQ ID NO: 1803109 - RNA, 19 nt, Artificial Sequence
  Description of Artificial Sequence: Synthetic oligonucleotide
  Sense strand starting at position 953 of SEQ ID NO: 1563208
gcuguuuguguggugugua

SEQ ID NO: 1803110 - RNA, 19 nt, Artificial Sequence
  Description of Artificial Sequence: Synthetic oligonucleotide
  Antisense strand to SEQ ID NO: 1803109
uacacaccacacaaacagc

SEQ ID NO: 1803111 - RNA, 19 nt, Artificial Sequence
  Description of Artificial Sequence: Synthetic oligonucleotide
  Sense strand starting at position 1124 of SEQ ID NO: 1563208
ccgggauuugcgugcaaga

SEQ ID NO: 1803112 - RNA, 19 nt, Artificial Sequence
  Description of Artificial Sequence: Synthetic oligonucleotide
  Antisense strand to SEQ ID NO: 1803111
ucuugcacgcaaaucccgg

SEQ ID NO: 1803113 - RNA, 19 nt, Artificial Sequence
  Description of Artificial Sequence: Synthetic oligonucleotide
  Sense strand starting at position 1639 of SEQ ID NO: 1563208
cuaccuuccggguaggaga

SEQ ID NO: 1803114 - RNA, 19 nt, Artificial Sequence
  Description of Artificial Sequence: Synthetic oligonucleotide
  Antisense strand to SEQ ID NO: 1803113
ucuccuacccggaagguag

SEQ ID NO: 1803115 - RNA, 19 nt, Artificial Sequence
  Description of Artificial Sequence: Synthetic oligonucleotide
  Sense strand starting at position 1800 of SEQ ID NO: 1563208
ggugucucagaucgaaaga

SEQ ID NO: 1803116 - RNA, 19 nt, Artificial Sequence
  Description of Artificial Sequence: Synthetic oligonucleotide
  Antisense strand to SEQ ID NO: 1803115
ucuuucgaucugagacacc

SEQ ID NO: 1803117 - RNA, 19 nt, Artificial Sequence
  Description of Artificial Sequence: Synthetic oligonucleotide
  Sense strand starting at position 2036 of SEQ ID NO: 1563208
gguggaggacugugcuaaa

SEQ ID NO: 1803118 - RNA, 19 nt, Artificial Sequence
  Description of Artificial Sequence: Synthetic oligonucleotide
  Antisense strand to SEQ ID NO: 1803117
uuuagcacaguccuccacc

SEQ ID NO: 1803119 - RNA, 19 nt, Artificial Sequence
  Description of Artificial Sequence: Synthetic oligonucleotide
  Sense strand starting at position 2163 of SEQ ID NO: 1563208
ggguaaagcucaguuacuc

SEQ ID NO: 1803120 - RNA, 19 nt, Artificial Sequence
  Description of Artificial Sequence: Synthetic oligonucleotide
  Antisense strand to SEQ ID NO: 1803119
gaguaacugagcuuuaccc

SEQ ID NO: 1803121 - RNA, 19 nt, Artificial Sequence
  Description of Artificial Sequence: Synthetic oligonucleotide
  Sense strand starting at position 2188 of SEQ ID NO: 1563208
guaagugacuuagugagga

SEQ ID NO: 1803122 - RNA, 19 nt, Artificial Sequence
  Description of Artificial Sequence: Synthetic oligonucleotide
  Antisense strand to SEQ ID NO: 1803121
uccucacuaagucacuuac

SEQ ID NO: 1803123 - RNA, 19 nt, Artificial Sequence
  Description of Artificial Sequence: Synthetic oligonucleotide
  Sense strand starting at position 2222 of SEQ ID NO: 1563208
cugaguucagggugguuaa

SEQ ID NO: 1803124 - RNA, 19 nt, Artificial Sequence
  Description of Artificial Sequence: Synthetic oligonucleotide
  Antisense strand to SEQ ID NO: 1803123
uuaaccacccugaacucag

SEQ ID NO: 1803125 - RNA, 19 nt, Artificial Sequence
  Description of Artificial Sequence: Synthetic oligonucleotide
  Sense strand starting at position 2237 of SEQ ID NO: 1563208
uuaaacaugcuguaaguau

SEQ ID NO: 1803126 - RNA, 19 nt, Artificial Sequence
  Description of Artificial Sequence: Synthetic oligonucleotide
  Antisense strand to SEQ ID NO: 1803125
auacuuacagcauguuuaa

SEQ ID NO: 1803127 - RNA, 19 nt, Artificial Sequence
  Description of Artificial Sequence: Synthetic oligonucleotide
  Sense strand starting at position 2241 of SEQ ID NO: 1563208
acaugcuguaaguauguua

SEQ ID NO: 1803128 - RNA, 19 nt, Artificial Sequence
  Description of Artificial Sequence: Synthetic oligonucleotide
  Antisense strand to SEQ ID NO: 1803127
uaacauacuuacagcaugu

SEQ ID NO: 1803129 - RNA, 19 nt, Artificial Sequence
  Description of Artificial Sequence: Synthetic oligonucleotide
  Sense strand starting at position 2283 of SEQ ID NO: 1563208
guacaaaccugucuacaaa

SEQ ID NO: 1803130 - RNA, 19 nt, Artificial Sequence
  Description of Artificial Sequence: Synthetic oligonucleotide
  Antisense strand to SEQ ID NO: 1803129
uuuguagacagguuuguac

SEQ ID NO: 1803131 - RNA, 19 nt, Artificial Sequence
  Description of Artificial Sequence: Synthetic oligonucleotide
  Sense strand starting at position 2324 of SEQ ID NO: 1563208
guauauuuggcguguaaca

SEQ ID NO: 1803132 - RNA, 19 nt, Artificial Sequence
  Description of Artificial Sequence: Synthetic oligonucleotide
  Antisense strand to SEQ ID NO: 1803131
uguuacacgccaaauauac

SEQ ID NO: 1803133 - RNA, 19 nt, Artificial Sequence
  Description of Artificial Sequence: Synthetic oligonucleotide
  Sense strand starting at position 2401 of SEQ ID NO: 1563208
auaaaugauugacagaauc

SEQ ID NO: 1803134 - RNA, 19 nt, Artificial Sequence
  Description of Artificial Sequence: Synthetic oligonucleotide
  Antisense strand to SEQ ID NO: 1803133
gauucugucaaucauuuau

SEQ ID NO: 1803135 - RNA, 19 nt, Artificial Sequence
  Description of Artificial Sequence: Synthetic oligonucleotide
  Sense strand starting at position 2650 of SEQ ID NO: 1563208
guuccuguucuguaggauu

SEQ ID NO: 1803136 - RNA, 19 nt, Artificial Sequence
  Description of Artificial Sequence: Synthetic oligonucleotide
  Antisense strand to SEQ ID NO: 1803135
aauccuacagaacaggaac

SEQ ID NO: 1803137 - RNA, 19 nt, Artificial Sequence
  Description of Artificial Sequence: Synthetic oligonucleotide
  Sense strand starting at position 2796 of SEQ ID NO: 1563208
gggaacguggcuuauaucu

SEQ ID NO: 1803138 - RNA, 19 nt, Artificial Sequence
  Description of Artificial Sequence: Synthetic oligonucleotide
  Antisense strand to SEQ ID NO: 1803137
agauauaagccacguuccc

SEQ ID NO: 1803139 - RNA, 19 nt, Artificial Sequence
  Description of Artificial Sequence: Synthetic oligonucleotide
  Sense strand starting at position 2901 of SEQ ID NO: 1563208
agucaucuacuuuaaccga

SEQ ID NO: 1803140 - RNA, 19 nt, Artificial Sequence
  Description of Artificial Sequence: Synthetic oligonucleotide
  Antisense strand to SEQ ID NO: 1803139
ucgguuaaaguagaugacu

SEQ ID NO: 1803141 - RNA, 19 nt, Artificial Sequence
  Description of Artificial Sequence: Synthetic oligonucleotide
  Sense strand starting at position 2941 of SEQ ID NO: 1563208
ugggaccacaucugugauu

SEQ ID NO: 1803142 - RNA, 19 nt, Artificial Sequence
  Description of Artificial Sequence: Synthetic oligonucleotide
  Antisense strand to SEQ ID NO: 1803141
aaucacagaugugguccca

SEQ ID NO: 1803143 - RNA, 19 nt, Artificial Sequence
  Description of Artificial Sequence: Synthetic oligonucleotide
  Sense strand starting at position 2944 of SEQ ID NO: 1563208
gaccacaucugugauuuga

SEQ ID NO: 1803144 - RNA, 19 nt, Artificial Sequence
  Description of Artificial Sequence: Synthetic oligonucleotide
  Antisense strand to SEQ ID NO: 1803143
ucaaaucacagaugugguc

SEQ ID NO: 1803145 - RNA, 19 nt, Artificial Sequence
  Description of Artificial Sequence: Synthetic oligonucleotide
  Sense strand starting at position 2997 of SEQ ID NO: 1563208
cuucucguggcccaagaaa

SEQ ID NO: 1803146 - RNA, 19 nt, Artificial Sequence
  Description of Artificial Sequence: Synthetic oligonucleotide
  Antisense strand to SEQ ID NO: 1803145
uuucuugggccacgagaag

SEQ ID NO: 1803147 - RNA, 19 nt, Artificial Sequence
  Description of Artificial Sequence: Synthetic oligonucleotide
  Sense strand starting at position 3039 of SEQ ID NO: 1563208
uuagauagcucaguagaau

SEQ ID NO: 1803148 - RNA, 19 nt, Artificial Sequence
  Description of Artificial Sequence: Synthetic oligonucleotide
  Antisense strand to SEQ ID NO: 1803147
auucuacugagcuaucuaa

SEQ ID NO: 1803149 - RNA, 19 nt, Artificial Sequence
  Description of Artificial Sequence: Synthetic oligonucleotide
  Sense strand starting at position 3066 of SEQ ID NO: 1563208
auaccauauagugggagua

SEQ ID NO: 1803150 - RNA, 19 nt, Artificial Sequence
  Description of Artificial Sequence: Synthetic oligonucleotide
  Antisense strand to SEQ ID NO: 1803149
uacucccacuauaugguau

SEQ ID NO: 1803151 - RNA, 19 nt, Artificial Sequence
  Description of Artificial Sequence: Synthetic oligonucleotide
  Sense strand starting at position 3067 of SEQ ID NO: 1563208
uaccauauagugggaguaa

SEQ ID NO: 1803152 - RNA, 19 nt, Artificial Sequence
  Description of Artificial Sequence: Synthetic oligonucleotide
  Antisense strand to SEQ ID NO: 1803151
uuacucccacuauauggua

SEQ ID NO: 1803153 - RNA, 19 nt, Artificial Sequence
  Description of Artificial Sequence: Synthetic oligonucleotide
  Sense strand starting at position 3080 of SEQ ID NO: 1563208
gaguaaguaggguaaaguu

SEQ ID NO: 1803154 - RNA, 19 nt, Artificial Sequence
  Description of Artificial Sequence: Synthetic oligonucleotide
  Antisense strand to SEQ ID NO: 1803153
aacuuuacccuacuuacuc

SEQ ID NO: 1803155 - RNA, 19 nt, Artificial Sequence
  Description of Artificial Sequence: Synthetic oligonucleotide
  Sense strand starting at position 3194 of SEQ ID NO: 1563208
cauguuaccugagugugaa

SEQ ID NO: 1803156 - RNA, 19 nt, Artificial Sequence
  Description of Artificial Sequence: Synthetic oligonucleotide
  Antisense strand to SEQ ID NO: 1803155
uucacacucagguaacaug

SEQ ID NO: 1803157 - RNA, 19 nt, Artificial Sequence
  Description of Artificial Sequence: Synthetic oligonucleotide
  Sense strand starting at position 3195 of SEQ ID NO: 1563208
auguuaccugagugugaac

SEQ ID NO: 1803158 - RNA, 19 nt, Artificial Sequence
  Description of Artificial Sequence: Synthetic oligonucleotide
  Antisense strand to SEQ ID NO: 1803157
guucacacucagguaacau

SEQ ID NO: 1803159 - RNA, 19 nt, Artificial Sequence
  Description of Artificial Sequence: Synthetic oligonucleotide
  Sense strand starting at position 3197 of SEQ ID NO: 1563208
guuaccugagugugaacuu

SEQ ID NO: 1803160 - RNA, 19 nt, Artificial Sequence
  Description of Artificial Sequence: Synthetic oligonucleotide
  Antisense strand to SEQ ID NO: 1803159
aaguucacacucagguaac

SEQ ID NO: 1803161 - RNA, 19 nt, Artificial Sequence
  Description of Artificial Sequence: Synthetic oligonucleotide
  Sense strand starting at position 3353 of SEQ ID NO: 1563208
auguauauauucuccaagu

SEQ ID NO: 1803162 - RNA, 19 nt, Artificial Sequence
  Description of Artificial Sequence: Synthetic oligonucleotide
  Antisense strand to SEQ ID NO: 1803161
acuuggagaauauauacau

SEQ ID NO: 1803163 - RNA, 19 nt, Artificial Sequence
  Description of Artificial Sequence: Synthetic oligonucleotide
  Sense strand starting at position 3354 of SEQ ID NO: 1563208
uguauauauucuccaaguu

SEQ ID NO: 1803164 - RNA, 19 nt, Artificial Sequence
  Description of Artificial Sequence: Synthetic oligonucleotide
  Antisense strand to SEQ ID NO: 1803163
aacuuggagaauauauaca

SEQ ID NO: 1803165 - RNA, 19 nt, Artificial Sequence
  Description of Artificial Sequence: Synthetic oligonucleotide
  Sense strand starting at position 3355 of SEQ ID NO: 1563208
guauauauucuccaaguua

SEQ ID NO: 1803166 - RNA, 19 nt, Artificial Sequence
  Description of Artificial Sequence: Synthetic oligonucleotide
  Antisense strand to SEQ ID NO: 1803165
uaacuuggagaauauauac

SEQ ID NO: 1803167 - RNA, 19 nt, Artificial Sequence
  Description of Artificial Sequence: Synthetic oligonucleotide
  Sense strand starting at position 3371 of SEQ ID NO: 1563208
uuacgacccuaucuugauu

SEQ ID NO: 1803168 - RNA, 19 nt, Artificial Sequence
  Description of Artificial Sequence: Synthetic oligonucleotide
  Antisense strand to SEQ ID NO: 1803167
aaucaagauagggucguaa

SEQ ID NO: 1803169 - RNA, 19 nt, Artificial Sequence
  Description of Artificial Sequence: Synthetic oligonucleotide
  Sense strand starting at position 3374 of SEQ ID NO: 1563208
cgacccuaucuugauuaua

SEQ ID NO: 1803170 - RNA, 19 nt, Artificial Sequence
  Description of Artificial Sequence: Synthetic oligonucleotide
  Antisense strand to SEQ ID NO: 1803169
uauaaucaagauagggucg

SEQ ID NO: 1803171 - RNA, 19 nt, Artificial Sequence
  Description of Artificial Sequence: Synthetic oligonucleotide
  Sense strand starting at position 3786 of SEQ ID NO: 1563208
guuggaagcaucugaugau

SEQ ID NO: 1803172 - RNA, 19 nt, Artificial Sequence
  Description of Artificial Sequence: Synthetic oligonucleotide
  Antisense strand to SEQ ID NO: 1803171
aucaucagaugcuuccaac

SEQ ID NO: 1803173 - RNA, 19 nt, Artificial Sequence
  Description of Artificial Sequence: Synthetic oligonucleotide
  Sense strand starting at position 3799 of SEQ ID NO: 1563208
gaugauucccaaggagguc

SEQ ID NO: 1803174 - RNA, 19 nt, Artificial Sequence
  Description of Artificial Sequence: Synthetic oligonucleotide
  Antisense strand to SEQ ID NO: 1803173
gaccuccuugggaaucauc

SEQ ID NO: 1803175 - RNA, 19 nt, Artificial Sequence
  Description of Artificial Sequence: Synthetic oligonucleotide
  Sense strand starting at position 3839 of SEQ ID NO: 1563208
cuggguuguaguugagaac

SEQ ID NO: 1803176 - RNA, 19 nt, Artificial Sequence
  Description of Artificial Sequence: Synthetic oligonucleotide
  Antisense strand to SEQ ID NO: 1803175
guucucaacuacaacccag

SEQ ID NO: 1803177 - RNA, 19 nt, Artificial Sequence
  Description of Artificial Sequence: Synthetic oligonucleotide
  Sense strand starting at position 3840 of SEQ ID NO: 1563208
uggguuguaguugagaaca

SEQ ID NO: 1803178 - RNA, 19 nt, Artificial Sequence
  Description of Artificial Sequence: Synthetic oligonucleotide
  Antisense strand to SEQ ID NO: 1803177
uguucucaacuacaaccca

SEQ ID NO: 1803179 - RNA, 19 nt, Artificial Sequence
  Description of Artificial Sequence: Synthetic oligonucleotide
  Sense strand starting at position 3851 of SEQ ID NO: 1563208
ugagaacaaccuugccaaa

SEQ ID NO: 1803180 - RNA, 19 nt, Artificial Sequence
  Description of Artificial Sequence: Synthetic oligonucleotide
  Antisense strand to SEQ ID NO: 1803179
uuuggcaagguuguucuca

SEQ ID NO: 1803181 - RNA, 19 nt, Artificial Sequence
  Description of Artificial Sequence: Synthetic oligonucleotide
  Sense strand starting at position 3916 of SEQ ID NO: 1563208
agagguuugggaugcuaau

SEQ ID NO: 1803182 - RNA, 19 nt, Artificial Sequence
  Description of Artificial Sequence: Synthetic oligonucleotide
  Antisense strand to SEQ ID NO: 1803181
auuagcaucccaaaccucu

SEQ ID NO: 1803183 - RNA, 19 nt, Artificial Sequence
  Description of Artificial Sequence: Synthetic oligonucleotide
  Sense strand starting at position 9 of SEQ ID NO: 1563209
gccauuuccuccuagucuu

SEQ ID NO: 1803184 - RNA, 19 nt, Artificial Sequence
  Description of Artificial Sequence: Synthetic oligonucleotide
  Antisense strand to SEQ ID NO: 1803183
aagacuaggaggaaauggc

SEQ ID NO: 1803185 - RNA, 19 nt, Artificial Sequence
  Description of Artificial Sequence: Synthetic oligonucleotide
  Sense strand starting at position 97 of SEQ ID NO: 1563209
ccucuagcgucuucucaaa

SEQ ID NO: 1803186 - RNA, 19 nt, Artificial Sequence
  Description of Artificial Sequence: Synthetic oligonucleotide
  Antisense strand to SEQ ID NO: 1803185
uuugagaagacgcuagagg

SEQ ID NO: 1803187 - RNA, 19 nt, Artificial Sequence
  Description of Artificial Sequence: Synthetic oligonucleotide
  Sense strand starting at position 150 of SEQ ID NO: 1563209
cgagcugucuagucuagac

SEQ ID NO: 1803188 - RNA, 19 nt, Artificial Sequence
  Description of Artificial Sequence: Synthetic oligonucleotide
  Antisense strand to SEQ ID NO: 1803187
gucuagacuagacagcucg

SEQ ID NO: 1803189 - RNA, 19 nt, Artificial Sequence
  Description of Artificial Sequence: Synthetic oligonucleotide
  Sense strand starting at position 338 of SEQ ID NO: 1563209
gcuggagaucgcggacuuu

SEQ ID NO: 1803190 - RNA, 19 nt, Artificial Sequence
  Description of Artificial Sequence: Synthetic oligonucleotide
  Antisense strand to SEQ ID NO: 1803189
aaaguccgcgaucuccagc

SEQ ID NO: 1803191 - RNA, 19 nt, Artificial Sequence
  Description of Artificial Sequence: Synthetic oligonucleotide
  Sense strand starting at position 528 of SEQ ID NO: 1563209
aaggcucucuccguaaaca

SEQ ID NO: 1803192 - RNA, 19 nt, Artificial Sequence
  Description of Artificial Sequence: Synthetic oligonucleotide
  Antisense strand to SEQ ID NO: 1803191
uguuuacggagagagccuu

SEQ ID NO: 1803193 - RNA, 19 nt, Artificial Sequence
  Description of Artificial Sequence: Synthetic oligonucleotide
  Sense strand starting at position 680 of SEQ ID NO: 1563209
gcaaguuccucuucgccua

SEQ ID NO: 1803194 - RNA, 19 nt, Artificial Sequence
  Description of Artificial Sequence: Synthetic oligonucleotide
  Antisense strand to SEQ ID NO: 1803193
uaggcgaagaggaacuugc

SEQ ID NO: 1803195 - RNA, 19 nt, Artificial Sequence
  Description of Artificial Sequence: Synthetic oligonucleotide
  Sense strand starting at position 947 of SEQ ID NO: 1563209
cgcagauuauaaucuuaaa

SEQ ID NO: 1803196 - RNA, 19 nt, Artificial Sequence
  Description of Artificial Sequence: Synthetic oligonucleotide
  Antisense strand to SEQ ID NO: 1803195
uuuaagauuauaaucugcg

SEQ ID NO: 1803197 - RNA, 19 nt, Artificial Sequence
  Description of Artificial Sequence: Synthetic oligonucleotide
  Sense strand starting at position 1029 of SEQ ID NO: 1563209
ucugcucgauuucuuagua

SEQ ID NO: 1803198 - RNA, 19 nt, Artificial Sequence
  Description of Artificial Sequence: Synthetic oligonucleotide
  Antisense strand to SEQ ID NO: 1803197
uacuaagaaaucgagcaga

SEQ ID NO: 1803199 - RNA, 19 nt, Artificial Sequence
  Description of Artificial Sequence: Synthetic oligonucleotide
  Sense strand starting at position 1033 of SEQ ID NO: 1563209
cucgauuucuuaguaguuu

SEQ ID NO: 1803200 - RNA, 19 nt, Artificial Sequence
  Description of Artificial Sequence: Synthetic oligonucleotide
  Antisense strand to SEQ ID NO: 1803199
aaacuacuaagaaaucgag

SEQ ID NO: 1803201 - RNA, 19 nt, Artificial Sequence
  Description of Artificial Sequence: Synthetic oligonucleotide
  Sense strand starting at position 1193 of SEQ ID NO: 1563209
cgacguuccacuuggagga

SEQ ID NO: 1803202 - RNA, 19 nt, Artificial Sequence
  Description of Artificial Sequence: Synthetic oligonucleotide
  Antisense strand to SEQ ID NO: 1803201
uccuccaaguggaacgucg

SEQ ID NO: 1803203 - RNA, 19 nt, Artificial Sequence
  Description of Artificial Sequence: Synthetic oligonucleotide
  Sense strand starting at position 1270 of SEQ ID NO: 1563209
caguucuuucccgagucga

SEQ ID NO: 1803204 - RNA, 19 nt, Artificial Sequence
  Description of Artificial Sequence: Synthetic oligonucleotide
  Antisense strand to SEQ ID NO: 1803203
ucgacucgggaaagaacug

SEQ ID NO: 1803205 - RNA, 19 nt, Artificial Sequence
  Description of Artificial Sequence: Synthetic oligonucleotide
  Sense strand starting at position 1322 of SEQ ID NO: 1563209
cuuccugcucgcgagcuaa

SEQ ID NO: 1803206 - RNA, 19 nt, Artificial Sequence
  Description of Artificial Sequence: Synthetic oligonucleotide
  Antisense strand to SEQ ID NO: 1803205
uuagcucgcgagcaggaag

SEQ ID NO: 1803207 - RNA, 19 nt, Artificial Sequence
  Description of Artificial Sequence: Synthetic oligonucleotide
  Sense strand starting at position 1738 of SEQ ID NO: 1563209
cgggcacugaccugaaauc

SEQ ID NO: 1803208 - RNA, 19 nt, Artificial Sequence
  Description of Artificial Sequence: Synthetic oligonucleotide
  Antisense strand to SEQ ID NO: 1803207
gauuucaggucagugcccg

SEQ ID NO: 1803209 - RNA, 19 nt, Artificial Sequence
  Description of Artificial Sequence: Synthetic oligonucleotide
  Sense strand starting at position 1782 of SEQ ID NO: 1563209
cugcgauccggcucuuuga

SEQ ID NO: 1803210 - RNA, 19 nt, Artificial Sequence
  Description of Artificial Sequence: Synthetic oligonucleotide
  Antisense strand to SEQ ID NO: 1803209
ucaaagagccggaucgcag

SEQ ID NO: 1803211 - RNA, 19 nt, Artificial Sequence
  Description of Artificial Sequence: Synthetic oligonucleotide
  Sense strand starting at position 1891 of SEQ ID NO: 1563209
gacguuaacgagcggagaa

SEQ ID NO: 1803212 - RNA, 19 nt, Artificial Sequence
  Description of Artificial Sequence: Synthetic oligonucleotide
  Antisense strand to SEQ ID NO: 1803211
uucuccgcucguuaacguc

SEQ ID NO: 1803213 - RNA, 19 nt, Artificial Sequence
  Description of Artificial Sequence: Synthetic oligonucleotide
  Sense strand starting at position 2268 of SEQ ID NO: 1563209
gugugugaguguuggccaa

SEQ ID NO: 1803214 - RNA, 19 nt, Artificial Sequence
  Description of Artificial Sequence: Synthetic oligonucleotide
  Antisense strand to SEQ ID NO: 1803213
uuggccaacacucacacac

SEQ ID NO: 1803215 - RNA, 19 nt, Artificial Sequence
  Description of Artificial Sequence: Synthetic oligonucleotide
  Sense strand starting at position 3273 of SEQ ID NO: 1563209
uuucccauuucgguguuaa

SEQ ID NO: 1803216 - RNA, 19 nt, Artificial Sequence
  Description of Artificial Sequence: Synthetic oligonucleotide
  Antisense strand to SEQ ID NO: 1803215
uuaacaccgaaaugggaaa

SEQ ID NO: 1803217 - RNA, 19 nt, Artificial Sequence
  Description of Artificial Sequence: Synthetic oligonucleotide
  Sense strand starting at position 3274 of SEQ ID NO: 1563209
uucccauuucgguguuaaa

SEQ ID NO: 1803218 - RNA, 19 nt, Artificial Sequence
  Description of Artificial Sequence: Synthetic oligonucleotide
  Antisense strand to SEQ ID NO: 1803217
uuuaacaccgaaaugggaa

SEQ ID NO: 1803219 - RNA, 19 nt, Artificial Sequence
  Description of Artificial Sequence: Synthetic oligonucleotide
  Sense strand starting at position 3362 of SEQ ID NO: 1563209
acguuucaauuguguggga

SEQ ID NO: 1803220 - RNA, 19 nt, Artificial Sequence
  Description of Artificial Sequence: Synthetic oligonucleotide
  Antisense strand to SEQ ID NO: 1803219
ucccacacaauugaaacgu

SEQ ID NO: 1803221 - RNA, 19 nt, Artificial Sequence
  Description of Artificial Sequence: Synthetic oligonucleotide
  Sense strand starting at position 3363 of SEQ ID NO: 1563209
cguuucaauugugugggaa

SEQ ID NO: 1803222 - RNA, 19 nt, Artificial Sequence
  Description of Artificial Sequence: Synthetic oligonucleotide
  Antisense strand to SEQ ID NO: 1803221
uucccacacaauugaaacg

SEQ ID NO: 1803223 - RNA, 19 nt, Artificial Sequence
  Description of Artificial Sequence: Synthetic oligonucleotide
  Sense strand starting at position 3364 of SEQ ID NO: 1563209
guuucaauugugugggaau

SEQ ID NO: 1803224 - RNA, 19 nt, Artificial Sequence
  Description of Artificial Sequence: Synthetic oligonucleotide
  Antisense strand to SEQ ID NO: 1803223
auucccacacaauugaaac

SEQ ID NO: 1803225 - RNA, 19 nt, Artificial Sequence
  Description of Artificial Sequence: Synthetic oligonucleotide
  Sense strand starting at position 3366 of SEQ ID NO: 1563209
uucaauugugugggaauug

SEQ ID NO: 1803226 - RNA, 19 nt, Artificial Sequence
  Description of Artificial Sequence: Synthetic oligonucleotide
  Antisense strand to SEQ ID NO: 1803225
caauucccacacaauugaa

SEQ ID NO: 1803227 - RNA, 19 nt, Artificial Sequence
  Description of Artificial Sequence: Synthetic oligonucleotide
  Sense strand starting at position 3367 of SEQ ID NO: 1563209
ucaauugugugggaauugu

SEQ ID NO: 1803228 - RNA, 19 nt, Artificial Sequence
  Description of Artificial Sequence: Synthetic oligonucleotide
  Antisense strand to SEQ ID NO: 1803227
acaauucccacacaauuga

SEQ ID NO: 1803229 - RNA, 19 nt, Artificial Sequence
  Description of Artificial Sequence: Synthetic oligonucleotide
  Sense strand starting at position 3375 of SEQ ID NO: 1563209
gugggaauuguuuggaggu

SEQ ID NO: 1803230 - RNA, 19 nt, Artificial Sequence
  Description of Artificial Sequence: Synthetic oligonucleotide
  Antisense strand to SEQ ID NO: 1803229
accuccaaacaauucccac

SEQ ID NO: 1803231 - RNA, 19 nt, Artificial Sequence
  Description of Artificial Sequence: Synthetic oligonucleotide
  Sense strand starting at position 3454 of SEQ ID NO: 1563209
cggagauccgccuguauuu

SEQ ID NO: 1803232 - RNA, 19 nt, Artificial Sequence
  Description of Artificial Sequence: Synthetic oligonucleotide
  Antisense strand to SEQ ID NO: 1803231
aaauacaggcggaucuccg

SEQ ID NO: 1803233 - RNA, 19 nt, Artificial Sequence
  Description of Artificial Sequence: Synthetic oligonucleotide
  Sense strand starting at position 3463 of SEQ ID NO: 1563209
gccuguauuucucccgguu

SEQ ID NO: 1803234 - RNA, 19 nt, Artificial Sequence
  Description of Artificial Sequence: Synthetic oligonucleotide
  Antisense strand to SEQ ID NO: 1803233
aaccgggagaaauacaggc

SEQ ID NO: 1803235 - RNA, 19 nt, Artificial Sequence
  Description of Artificial Sequence: Synthetic oligonucleotide
  Sense strand starting at position 3498 of SEQ ID NO: 1563209
gucuguaccucugaugguu

SEQ ID NO: 1803236 - RNA, 19 nt, Artificial Sequence
  Description of Artificial Sequence: Synthetic oligonucleotide
  Antisense strand to SEQ ID NO: 1803235
aaccaucagagguacagac

SEQ ID NO: 1803237 - RNA, 19 nt, Artificial Sequence
  Description of Artificial Sequence: Synthetic oligonucleotide
  Sense strand starting at position 3550 of SEQ ID NO: 1563209
gggagauuaucucccgcgu

SEQ ID NO: 1803238 - RNA, 19 nt, Artificial Sequence
  Description of Artificial Sequence: Synthetic oligonucleotide
  Antisense strand to SEQ ID NO: 1803237
acgcgggagauaaucuccc

SEQ ID NO: 1803239 - RNA, 19 nt, Artificial Sequence
  Description of Artificial Sequence: Synthetic oligonucleotide
  Sense strand starting at position 3552 of SEQ ID NO: 1563209
gagauuaucucccgcguuu

SEQ ID NO: 1803240 - RNA, 19 nt, Artificial Sequence
  Description of Artificial Sequence: Synthetic oligonucleotide
  Antisense strand to SEQ ID NO: 1803239
aaacgcgggagauaaucuc

SEQ ID NO: 1803241 - RNA, 19 nt, Artificial Sequence
  Description of Artificial Sequence: Synthetic oligonucleotide
  Sense strand starting at position 3629 of SEQ ID NO: 1563209
ucgguaacgucgugcugau

SEQ ID NO: 1803242 - RNA, 19 nt, Artificial Sequence
  Description of Artificial Sequence: Synthetic oligonucleotide
  Antisense strand to SEQ ID NO: 1803241
aucagcacgacguuaccga

SEQ ID NO: 1803243 - RNA, 19 nt, Artificial Sequence
  Description of Artificial Sequence: Synthetic oligonucleotide
  Sense strand starting at position 3693 of SEQ ID NO: 1563209
ucaauugacacguauugag

SEQ ID NO: 1803244 - RNA, 19 nt, Artificial Sequence
  Description of Artificial Sequence: Synthetic oligonucleotide
  Antisense strand to SEQ ID NO: 1803243
cucaauacgugucaauuga

SEQ ID NO: 1803245 - RNA, 19 nt, Artificial Sequence
  Description of Artificial Sequence: Synthetic oligonucleotide
  Sense strand starting at position 38 of SEQ ID NO: 1563210
aguauauacuucuccaguu

SEQ ID NO: 1803246 - RNA, 19 nt, Artificial Sequence
  Description of Artificial Sequence: Synthetic oligonucleotide
  Antisense strand to SEQ ID NO: 1803245
aacuggagaaguauauacu

SEQ ID NO: 1803247 - RNA, 19 nt, Artificial Sequence
  Description of Artificial Sequence: Synthetic oligonucleotide
  Sense strand starting at position 39 of SEQ ID NO: 1563210
guauauacuucuccaguua

SEQ ID NO: 1803248 - RNA, 19 nt, Artificial Sequence
  Description of Artificial Sequence: Synthetic oligonucleotide
  Antisense strand to SEQ ID NO: 1803247
uaacuggagaaguauauac

SEQ ID NO: 1803249 - RNA, 19 nt, Artificial Sequence
  Description of Artificial Sequence: Synthetic oligonucleotide
  Sense strand starting at position 172 of SEQ ID NO: 1563210
gaucuugaaucccagggaa

SEQ ID NO: 1803250 - RNA, 19 nt, Artificial Sequence
  Description of Artificial Sequence: Synthetic oligonucleotide
  Antisense strand to SEQ ID NO: 1803249
uucccugggauucaagauc

SEQ ID NO: 1803251 - RNA, 19 nt, Artificial Sequence
  Description of Artificial Sequence: Synthetic oligonucleotide
  Sense strand starting at position 184 of SEQ ID NO: 1563210
cagggaaagccauauuguu

SEQ ID NO: 1803252 - RNA, 19 nt, Artificial Sequence
  Description of Artificial Sequence: Synthetic oligonucleotide
  Antisense strand to SEQ ID NO: 1803251
aacaauauggcuuucccug

SEQ ID NO: 1803253 - RNA, 19 nt, Artificial Sequence
  Description of Artificial Sequence: Synthetic oligonucleotide
  Sense strand starting at position 201 of SEQ ID NO: 1563210
uucugugucuuggugauuu

SEQ ID NO: 1803254 - RNA, 19 nt, Artificial Sequence
  Description of Artificial Sequence: Synthetic oligonucleotide
  Antisense strand to SEQ ID NO: 1803253
aaaucaccaagacacagaa

SEQ ID NO: 1803255 - RNA, 19 nt, Artificial Sequence
  Description of Artificial Sequence: Synthetic oligonucleotide
  Sense strand starting at position 205 of SEQ ID NO: 1563210
gugucuuggugauuuaucu

SEQ ID NO: 1803256 - RNA, 19 nt, Artificial Sequence
  Description of Artificial Sequence: Synthetic oligonucleotide
  Antisense strand to SEQ ID NO: 1803255
agauaaaucaccaagacac

SEQ ID NO: 1803257 - RNA, 19 nt, Artificial Sequence
  Description of Artificial Sequence: Synthetic oligonucleotide
  Sense strand starting at position 212 of SEQ ID NO: 1563210
ggugauuuaucugauguau

SEQ ID NO: 1803258 - RNA, 19 nt, Artificial Sequence
  Description of Artificial Sequence: Synthetic oligonucleotide
  Antisense strand to SEQ ID NO: 1803257
auacaucagauaaaucacc

SEQ ID NO: 1803259 - RNA, 19 nt, Artificial Sequence
  Description of Artificial Sequence: Synthetic oligonucleotide
  Sense strand starting at position 861 of SEQ ID NO: 1563210
cucuuugaccaaggguuau

SEQ ID NO: 1803260 - RNA, 19 nt, Artificial Sequence
  Description of Artificial Sequence: Synthetic oligonucleotide
  Antisense strand to SEQ ID NO: 1803259
auaacccuuggucaaagag

SEQ ID NO: 1803261 - RNA, 19 nt, Artificial Sequence
  Description of Artificial Sequence: Synthetic oligonucleotide
  Sense strand starting at position 945 of SEQ ID NO: 1563210
ggcacaucuuggucaacca

SEQ ID NO: 1803262 - RNA, 19 nt, Artificial Sequence
  Description of Artificial Sequence: Synthetic oligonucleotide
  Antisense strand to SEQ ID NO: 1803261
ugguugaccaagaugugcc

SEQ ID NO: 1803263 - RNA, 19 nt, Artificial Sequence
  Description of Artificial Sequence: Synthetic oligonucleotide
  Sense strand starting at position 946 of SEQ ID NO: 1563210
gcacaucuuggucaaccaa

SEQ ID NO: 1803264 - RNA, 19 nt, Artificial Sequence
  Description of Artificial Sequence: Synthetic oligonucleotide
  Antisense strand to SEQ ID NO: 1803263
uugguugaccaagaugugc

SEQ ID NO: 1803265 - RNA, 19 nt, Artificial Sequence
  Description of Artificial Sequence: Synthetic oligonucleotide
  Sense strand starting at position 1038 of SEQ ID NO: 1563210
ggucucaacuuccuuugau

SEQ ID NO: 1803266 - RNA, 19 nt, Artificial Sequence
  Description of Artificial Sequence: Synthetic oligonucleotide
  Antisense strand to SEQ ID NO: 1803265
aucaaaggaaguugagacc

SEQ ID NO: 1803267 - RNA, 19 nt, Artificial Sequence
  Description of Artificial Sequence: Synthetic oligonucleotide
  Sense strand starting at position 1089 of SEQ ID NO: 1563210
agccucaugaggugagaaa

SEQ ID NO: 1803268 - RNA, 19 nt, Artificial Sequence
  Description of Artificial Sequence: Synthetic oligonucleotide
  Antisense strand to SEQ ID NO: 1803267
uuucucaccucaugaggcu

SEQ ID NO: 1803269 - RNA, 19 nt, Artificial Sequence
  Description of Artificial Sequence: Synthetic oligonucleotide
  Sense strand starting at position 1132 of SEQ ID NO: 1563210
gccaguucccaguagaaau

SEQ ID NO: 1803270 - RNA, 19 nt, Artificial Sequence
  Description of Artificial Sequence: Synthetic oligonucleotide
  Antisense strand to SEQ ID NO: 1803269
auuucuacugggaacuggc

SEQ ID NO: 1803271 - RNA, 19 nt, Artificial Sequence
  Description of Artificial Sequence: Synthetic oligonucleotide
  Sense strand starting at position 1605 of SEQ ID NO: 1563210
gucugacaguuguuaauga

SEQ ID NO: 1803272 - RNA, 19 nt, Artificial Sequence
  Description of Artificial Sequence: Synthetic oligonucleotide
  Antisense strand to SEQ ID NO: 1803271
ucauuaacaacugucagac

SEQ ID NO: 1803273 - RNA, 19 nt, Artificial Sequence
  Description of Artificial Sequence: Synthetic oligonucleotide
  Sense strand starting at position 1610 of SEQ ID NO: 1563210
acaguuguuaaugaguaga

SEQ ID NO: 1803274 - RNA, 19 nt, Artificial Sequence
  Description of Artificial Sequence: Synthetic oligonucleotide
  Antisense strand to SEQ ID NO: 1803273
ucuacucauuaacaacugu

SEQ ID NO: 1803275 - RNA, 19 nt, Artificial Sequence
  Description of Artificial Sequence: Synthetic oligonucleotide
  Sense strand starting at position 1612 of SEQ ID NO: 1563210
aguuguuaaugaguagaca

SEQ ID NO: 1803276 - RNA, 19 nt, Artificial Sequence
  Description of Artificial Sequence: Synthetic oligonucleotide
  Antisense strand to SEQ ID NO: 1803275
ugucuacucauuaacaacu

SEQ ID NO: 1803277 - RNA, 19 nt, Artificial Sequence
  Description of Artificial Sequence: Synthetic oligonucleotide
  Sense strand starting at position 1613 of SEQ ID NO: 1563210
guuguuaaugaguagacaa

SEQ ID NO: 1803278 - RNA, 19 nt, Artificial Sequence
  Description of Artificial Sequence: Synthetic oligonucleotide
  Antisense strand to SEQ ID NO: 1803277
uugucuacucauuaacaac

SEQ ID NO: 1803279 - RNA, 19 nt, Artificial Sequence
  Description of Artificial Sequence: Synthetic oligonucleotide
  Sense strand starting at position 1615 of SEQ ID NO: 1563210
uguuaaugaguagacaagu

SEQ ID NO: 1803280 - RNA, 19 nt, Artificial Sequence
  Description of Artificial Sequence: Synthetic oligonucleotide
  Antisense strand to SEQ ID NO: 1803279
acuugucuacucauuaaca

SEQ ID NO: 1803281 - RNA, 19 nt, Artificial Sequence
  Description of Artificial Sequence: Synthetic oligonucleotide
  Sense strand starting at position 1628 of SEQ ID NO: 1563210
acaagugcuagcuggcaaa

SEQ ID NO: 1803282 - RNA, 19 nt, Artificial Sequence
  Description of Artificial Sequence: Synthetic oligonucleotide
  Antisense strand to SEQ ID NO: 1803281
uuugccagcuagcacuugu

SEQ ID NO: 1803283 - RNA, 19 nt, Artificial Sequence
  Description of Artificial Sequence: Synthetic oligonucleotide
  Sense strand starting at position 1682 of SEQ ID NO: 1563210
aagagauagcauggcagau

SEQ ID NO: 1803284 - RNA, 19 nt, Artificial Sequence
  Description of Artificial Sequence: Synthetic oligonucleotide
  Antisense strand to SEQ ID NO: 1803283
aucugccaugcuaucucuu

SEQ ID NO: 1803285 - RNA, 19 nt, Artificial Sequence
  Description of Artificial Sequence: Synthetic oligonucleotide
  Sense strand starting at position 2093 of SEQ ID NO: 1563210
acagcaucagaauguuaaa

SEQ ID NO: 1803286 - RNA, 19 nt, Artificial Sequence
  Description of Artificial Sequence: Synthetic oligonucleotide
  Antisense strand to SEQ ID NO: 1803285
uuuaacauucugaugcugu

SEQ ID NO: 1803287 - RNA, 19 nt, Artificial Sequence
  Description of Artificial Sequence: Synthetic oligonucleotide
  Sense strand starting at position 2246 of SEQ ID NO: 1563210
gacagauaugcuugaguag

SEQ ID NO: 1803288 - RNA, 19 nt, Artificial Sequence
  Description of Artificial Sequence: Synthetic oligonucleotide
  Antisense strand to SEQ ID NO: 1803287
cuacucaagcauaucuguc

SEQ ID NO: 1803289 - RNA, 19 nt, Artificial Sequence
  Description of Artificial Sequence: Synthetic oligonucleotide
  Sense strand starting at position 2353 of SEQ ID NO: 1563210
cccauauaugaauggugca

SEQ ID NO: 1803290 - RNA, 19 nt, Artificial Sequence
  Description of Artificial Sequence: Synthetic oligonucleotide
  Antisense strand to SEQ ID NO: 1803289
ugcaccauucauauauggg

SEQ ID NO: 1803291 - RNA, 19 nt, Artificial Sequence
  Description of Artificial Sequence: Synthetic oligonucleotide
  Sense strand starting at position 2406 of SEQ ID NO: 1563210
ucucuaauccauggguacu

SEQ ID NO: 1803292 - RNA, 19 nt, Artificial Sequence
  Description of Artificial Sequence: Synthetic oligonucleotide
  Antisense strand to SEQ ID NO: 1803291
aguacccauggauuagaga

SEQ ID NO: 1803293 - RNA, 19 nt, Artificial Sequence
  Description of Artificial Sequence: Synthetic oligonucleotide
  Sense strand starting at position 2424 of SEQ ID NO: 1563210
ugaaguauuugagugacgu

SEQ ID NO: 1803294 - RNA, 19 nt, Artificial Sequence
  Description of Artificial Sequence: Synthetic oligonucleotide
  Antisense strand to SEQ ID NO: 1803293
acgucacucaaauacuuca

SEQ ID NO: 1803295 - RNA, 19 nt, Artificial Sequence
  Description of Artificial Sequence: Synthetic oligonucleotide
  Sense strand starting at position 2505 of SEQ ID NO: 1563210
cauugacuuugaguuggaa

SEQ ID NO: 1803296 - RNA, 19 nt, Artificial Sequence
  Description of Artificial Sequence: Synthetic oligonucleotide
  Antisense strand to SEQ ID NO: 1803295
uuccaacucaaagucaaug

SEQ ID NO: 1803297 - RNA, 19 nt, Artificial Sequence
  Description of Artificial Sequence: Synthetic oligonucleotide
  Sense strand starting at position 2508 of SEQ ID NO: 1563210
ugacuuugaguuggaaaua

SEQ ID NO: 1803298 - RNA, 19 nt, Artificial Sequence
  Description of Artificial Sequence: Synthetic oligonucleotide
  Antisense strand to SEQ ID NO: 1803297
uauuuccaacucaaaguca

SEQ ID NO: 1803299 - RNA, 19 nt, Artificial Sequence
  Description of Artificial Sequence: Synthetic oligonucleotide
  Sense strand starting at position 2509 of SEQ ID NO: 1563210
gacuuugaguuggaaauaa

SEQ ID NO: 1803300 - RNA, 19 nt, Artificial Sequence
  Description of Artificial Sequence: Synthetic oligonucleotide
  Antisense strand to SEQ ID NO: 1803299
uuauuuccaacucaaaguc

SEQ ID NO: 1803301 - RNA, 19 nt, Artificial Sequence
  Description of Artificial Sequence: Synthetic oligonucleotide
  Sense strand starting at position 3101 of SEQ ID NO: 1563210
caaugagcuugccuugaga

SEQ ID NO: 1803302 - RNA, 19 nt, Artificial Sequence
  Description of Artificial Sequence: Synthetic oligonucleotide
  Antisense strand to SEQ ID NO: 1803301
ucucaaggcaagcucauug

SEQ ID NO: 1803303 - RNA, 19 nt, Artificial Sequence
  Description of Artificial Sequence: Synthetic oligonucleotide
  Sense strand starting at position 3121 of SEQ ID NO: 1563210
ccuuaagcucuugaguuag

SEQ ID NO: 1803304 - RNA, 19 nt, Artificial Sequence
  Description of Artificial Sequence: Synthetic oligonucleotide
  Antisense strand to SEQ ID NO: 1803303
cuaacucaagagcuuaagg

SEQ ID NO: 1803305 - RNA, 19 nt, Artificial Sequence
  Description of Artificial Sequence: Synthetic oligonucleotide
  Sense strand starting at position 3132 of SEQ ID NO: 1563210
ugaguuagcuuauuagcua

SEQ ID NO: 1803306 - RNA, 19 nt, Artificial Sequence
  Description of Artificial Sequence: Synthetic oligonucleotide
  Antisense strand to SEQ ID NO: 1803305
uagcuaauaagcuaacuca

SEQ ID NO: 1803307 - RNA, 19 nt, Artificial Sequence
  Description of Artificial Sequence: Synthetic oligonucleotide
  Sense strand starting at position 3184 of SEQ ID NO: 1563210
acccuacagugaucagaau

SEQ ID NO: 1803308 - RNA, 19 nt, Artificial Sequence
  Description of Artificial Sequence: Synthetic oligonucleotide
  Antisense strand to SEQ ID NO: 1803307
auucugaucacuguagggu

SEQ ID NO: 1803309 - RNA, 19 nt, Artificial Sequence
  Description of Artificial Sequence: Synthetic oligonucleotide
  Sense strand starting at position 3195 of SEQ ID NO: 1563210
aucagaauugaaugcuguu

SEQ ID NO: 1803310 - RNA, 19 nt, Artificial Sequence
  Description of Artificial Sequence: Synthetic oligonucleotide
  Antisense strand to SEQ ID NO: 1803309
aacagcauucaauucugau

SEQ ID NO: 1803311 - RNA, 19 nt, Artificial Sequence
  Description of Artificial Sequence: Synthetic oligonucleotide
  Sense strand starting at position 3238 of SEQ ID NO: 1563210
auaagauauaguuguacga

SEQ ID NO: 1803312 - RNA, 19 nt, Artificial Sequence
  Description of Artificial Sequence: Synthetic oligonucleotide
  Antisense strand to SEQ ID NO: 1803311
ucguacaacuauaucuuau

SEQ ID NO: 1803313 - RNA, 19 nt, Artificial Sequence
  Description of Artificial Sequence: Synthetic oligonucleotide
  Sense strand starting at position 3242 of SEQ ID NO: 1563210
gauauaguuguacgaggga

SEQ ID NO: 1803314 - RNA, 19 nt, Artificial Sequence
  Description of Artificial Sequence: Synthetic oligonucleotide
  Antisense strand to SEQ ID NO: 1803313
ucccucguacaacuauauc

SEQ ID NO: 1803315 - RNA, 19 nt, Artificial Sequence
  Description of Artificial Sequence: Synthetic oligonucleotide
  Sense strand starting at position 3487 of SEQ ID NO: 1563210
uaugucacggcauguuaga

SEQ ID NO: 1803316 - RNA, 19 nt, Artificial Sequence
  Description of Artificial Sequence: Synthetic oligonucleotide
  Antisense strand to SEQ ID NO: 1803315
ucuaacaugccgugacaua

SEQ ID NO: 1803317 - RNA, 19 nt, Artificial Sequence
  Description of Artificial Sequence: Synthetic oligonucleotide
  Sense strand starting at position 3896 of SEQ ID NO: 1563210
gagggcuacuaucugaaau

SEQ ID NO: 1803318 - RNA, 19 nt, Artificial Sequence
  Description of Artificial Sequence: Synthetic oligonucleotide
  Antisense strand to SEQ ID NO: 1803317
auuucagauaguagcccuc

SEQ ID NO: 1803319 - RNA, 19 nt, Artificial Sequence
  Description of Artificial Sequence: Synthetic oligonucleotide
  Sense strand starting at position 3923 of SEQ ID NO: 1563210
caggauaggccuugcugua

SEQ ID NO: 1803320 - RNA, 19 nt, Artificial Sequence
  Description of Artificial Sequence: Synthetic oligonucleotide
  Antisense strand to SEQ ID NO: 1803319
uacagcaaggccuauccug

SEQ ID NO: 1803321 - RNA, 19 nt, Artificial Sequence
  Description of Artificial Sequence: Synthetic oligonucleotide
  Sense strand starting at position 3954 of SEQ ID NO: 1563210
aaaccaucggaaugaggua

SEQ ID NO: 1803322 - RNA, 19 nt, Artificial Sequence
  Description of Artificial Sequence: Synthetic oligonucleotide
  Antisense strand to SEQ ID NO: 1803321
uaccucauuccgaugguuu

SEQ ID NO: 1803323 - RNA, 19 nt, Artificial Sequence
  Description of Artificial Sequence: Synthetic oligonucleotide
  Sense strand starting at position 3975 of SEQ ID NO: 1563210
ggaguagccacguggauau

SEQ ID NO: 1803324 - RNA, 19 nt, Artificial Sequence
  Description of Artificial Sequence: Synthetic oligonucleotide
  Antisense strand to SEQ ID NO: 1803323
auauccacguggcuacucc

SEQ ID NO: 1803325 - RNA, 19 nt, Artificial Sequence
  Description of Artificial Sequence: Synthetic oligonucleotide
  Sense strand starting at position 35 of SEQ ID NO: 1563211
gccaucaacucaucagaug

SEQ ID NO: 1803326 - RNA, 19 nt, Artificial Sequence
  Description of Artificial Sequence: Synthetic oligonucleotide
  Antisense strand to SEQ ID NO: 1803325
caucugaugaguugauggc

SEQ ID NO: 1803327 - RNA, 19 nt, Artificial Sequence
  Description of Artificial Sequence: Synthetic oligonucleotide
  Sense strand starting at position 597 of SEQ ID NO: 1563211
ugcacagucugucucuaaa

SEQ ID NO: 1803328 - RNA, 19 nt, Artificial Sequence
  Description of Artificial Sequence: Synthetic oligonucleotide
  Antisense strand to SEQ ID NO: 1803327
uuuagagacagacugugca

SEQ ID NO: 1803329 - RNA, 19 nt, Artificial Sequence
  Description of Artificial Sequence: Synthetic oligonucleotide
  Sense strand starting at position 600 of SEQ ID NO: 1563211
acagucugucucuaaauca

SEQ ID NO: 1803330 - RNA, 19 nt, Artificial Sequence
  Description of Artificial Sequence: Synthetic oligonucleotide
  Antisense strand to SEQ ID NO: 1803329
ugauuuagagacagacugu

SEQ ID NO: 1803331 - RNA, 19 nt, Artificial Sequence
  Description of Artificial Sequence: Synthetic oligonucleotide
  Sense strand starting at position 676 of SEQ ID NO: 1563211
gaaaucaacucgggaauuu

SEQ ID NO: 1803332 - RNA, 19 nt, Artificial Sequence
  Description of Artificial Sequence: Synthetic oligonucleotide
  Antisense strand to SEQ ID NO: 1803331
aaauucccgaguugauuuc

SEQ ID NO: 1803333 - RNA, 19 nt, Artificial Sequence
  Description of Artificial Sequence: Synthetic oligonucleotide
  Sense strand starting at position 1068 of SEQ ID NO: 1563211
gugaaagucugagucauuc

SEQ ID NO: 1803334 - RNA, 19 nt, Artificial Sequence
  Description of Artificial Sequence: Synthetic oligonucleotide
  Antisense strand to SEQ ID NO: 1803333
gaaugacucagacuuucac

SEQ ID NO: 1803335 - RNA, 19 nt, Artificial Sequence
  Description of Artificial Sequence: Synthetic oligonucleotide
  Sense strand starting at position 1077 of SEQ ID NO: 1563211
ugagucauuccucauuccu

SEQ ID NO: 1803336 - RNA, 19 nt, Artificial Sequence
  Description of Artificial Sequence: Synthetic oligonucleotide
  Antisense strand to SEQ ID NO: 1803335
aggaaugaggaaugacuca

SEQ ID NO: 1803337 - RNA, 19 nt, Artificial Sequence
  Description of Artificial Sequence: Synthetic oligonucleotide
  Sense strand starting at position 1140 of SEQ ID NO: 1563211
aggauaagcucgucccaga

SEQ ID NO: 1803338 - RNA, 19 nt, Artificial Sequence
  Description of Artificial Sequence: Synthetic oligonucleotide
  Antisense strand to SEQ ID NO: 1803337
ucugggacgagcuuauccu

SEQ ID NO: 1803339 - RNA, 19 nt, Artificial Sequence
  Description of Artificial Sequence: Synthetic oligonucleotide
  Sense strand starting at position 1153 of SEQ ID NO: 1563211
cccagaaagucagcaucaa

SEQ ID NO: 1803340 - RNA, 19 nt, Artificial Sequence
  Description of Artificial Sequence: Synthetic oligonucleotide
  Antisense strand to SEQ ID NO: 1803339
uugaugcugacuuucuggg

SEQ ID NO: 1803341 - RNA, 19 nt, Artificial Sequence
  Description of Artificial Sequence: Synthetic oligonucleotide
  Sense strand starting at position 1157 of SEQ ID NO: 1563211
gaaagucagcaucaaguau

SEQ ID NO: 1803342 - RNA, 19 nt, Artificial Sequence
  Description of Artificial Sequence: Synthetic oligonucleotide
  Antisense strand to SEQ ID NO: 1803341
auacuugaugcugacuuuc

SEQ ID NO: 1803343 - RNA, 19 nt, Artificial Sequence
  Description of Artificial Sequence: Synthetic oligonucleotide
  Sense strand starting at position 1175 of SEQ ID NO: 1563211
ucuaauaagcuucgaaauc

SEQ ID NO: 1803344 - RNA, 19 nt, Artificial Sequence
  Description of Artificial Sequence: Synthetic oligonucleotide
  Antisense strand to SEQ ID NO: 1803343
gauuucgaagcuuauuaga

SEQ ID NO: 1803345 - RNA, 19 nt, Artificial Sequence
  Description of Artificial Sequence: Synthetic oligonucleotide
  Sense strand starting at position 1835 of SEQ ID NO: 1563211
ccucucugacaucgugaga

SEQ ID NO: 1803346 - RNA, 19 nt, Artificial Sequence
  Description of Artificial Sequence: Synthetic oligonucleotide
  Antisense strand to SEQ ID NO: 1803345
ucucacgaugucagagagg

SEQ ID NO: 1803347 - RNA, 19 nt, Artificial Sequence
  Description of Artificial Sequence: Synthetic oligonucleotide
  Sense strand starting at position 1924 of SEQ ID NO: 1563211
ugagguaacugcuugguaa

SEQ ID NO: 1803348 - RNA, 19 nt, Artificial Sequence
  Description of Artificial Sequence: Synthetic oligonucleotide
  Antisense strand to SEQ ID NO: 1803347
uuaccaagcaguuaccuca

SEQ ID NO: 1803349 - RNA, 19 nt, Artificial Sequence
  Description of Artificial Sequence: Synthetic oligonucleotide
  Sense strand starting at position 1925 of SEQ ID NO: 1563211
gagguaacugcuugguaac

SEQ ID NO: 1803350 - RNA, 19 nt, Artificial Sequence
  Description of Artificial Sequence: Synthetic oligonucleotide
  Antisense strand to SEQ ID NO: 1803349
guuaccaagcaguuaccuc

SEQ ID NO: 1803351 - RNA, 19 nt, Artificial Sequence
  Description of Artificial Sequence: Synthetic oligonucleotide
  Sense strand starting at position 1926 of SEQ ID NO: 1563211
agguaacugcuugguaacu

SEQ ID NO: 1803352 - RNA, 19 nt, Artificial Sequence
  Description of Artificial Sequence: Synthetic oligonucleotide
  Antisense strand to SEQ ID NO: 1803351
aguuaccaagcaguuaccu

SEQ ID NO: 1803353 - RNA, 19 nt, Artificial Sequence
  Description of Artificial Sequence: Synthetic oligonucleotide
  Sense strand starting at position 2166 of SEQ ID NO: 1563211
gugugaauauauguagaua

SEQ ID NO: 1803354 - RNA, 19 nt, Artificial Sequence
  Description of Artificial Sequence: Synthetic oligonucleotide
  Antisense strand to SEQ ID NO: 1803353
uaucuacauauauucacac

SEQ ID NO: 1803355 - RNA, 19 nt, Artificial Sequence
  Description of Artificial Sequence: Synthetic oligonucleotide
  Sense strand starting at position 2224 of SEQ ID NO: 1563211
ggaagccaacaguguaauu

SEQ ID NO: 1803356 - RNA, 19 nt, Artificial Sequence
  Description of Artificial Sequence: Synthetic oligonucleotide
  Antisense strand to SEQ ID NO: 1803355
aauuacacuguuggcuucc

SEQ ID NO: 1803357 - RNA, 19 nt, Artificial Sequence
  Description of Artificial Sequence: Synthetic oligonucleotide
  Sense strand starting at position 2284 of SEQ ID NO: 1563211
guaagagacuuucuaaauc

SEQ ID NO: 1803358 - RNA, 19 nt, Artificial Sequence
  Description of Artificial Sequence: Synthetic oligonucleotide
  Antisense strand to SEQ ID NO: 1803357
gauuuagaaagucucuuac

SEQ ID NO: 1803359 - RNA, 19 nt, Artificial Sequence
  Description of Artificial Sequence: Synthetic oligonucleotide
  Sense strand starting at position 2297 of SEQ ID NO: 1563211
uaaaucuuccugcgggacu

SEQ ID NO: 1803360 - RNA, 19 nt, Artificial Sequence
  Description of Artificial Sequence: Synthetic oligonucleotide
  Antisense strand to SEQ ID NO: 1803359
agucccgcaggaagauuua

SEQ ID NO: 1803361 - RNA, 19 nt, Artificial Sequence
  Description of Artificial Sequence: Synthetic oligonucleotide
  Sense strand starting at position 2745 of SEQ ID NO: 1563211
ugagaagauucgguaugug

SEQ ID NO: 1803362 - RNA, 19 nt, Artificial Sequence
  Description of Artificial Sequence: Synthetic oligonucleotide
  Antisense strand to SEQ ID NO: 1803361
cacauaccgaaucuucuca

SEQ ID NO: 1803363 - RNA, 19 nt, Artificial Sequence
  Description of Artificial Sequence: Synthetic oligonucleotide
  Sense strand starting at position 2748 of SEQ ID NO: 1563211
gaagauucgguaugugguu

SEQ ID NO: 1803364 - RNA, 19 nt, Artificial Sequence
  Description of Artificial Sequence: Synthetic oligonucleotide
  Antisense strand to SEQ ID NO: 1803363
aaccacauaccgaaucuuc

SEQ ID NO: 1803365 - RNA, 19 nt, Artificial Sequence
  Description of Artificial Sequence: Synthetic oligonucleotide
  Sense strand starting at position 2974 of SEQ ID NO: 1563211
gguacuacaucuguucgaa

SEQ ID NO: 1803366 - RNA, 19 nt, Artificial Sequence
  Description of Artificial Sequence: Synthetic oligonucleotide
  Antisense strand to SEQ ID NO: 1803365
uucgaacagauguaguacc

SEQ ID NO: 1803367 - RNA, 19 nt, Artificial Sequence
  Description of Artificial Sequence: Synthetic oligonucleotide
  Sense strand starting at position 2977 of SEQ ID NO: 1563211
acuacaucuguucgaauaa

SEQ ID NO: 1803368 - RNA, 19 nt, Artificial Sequence
  Description of Artificial Sequence: Synthetic oligonucleotide
  Antisense strand to SEQ ID NO: 1803367
uuauucgaacagauguagu

SEQ ID NO: 1803369 - RNA, 19 nt, Artificial Sequence
  Description of Artificial Sequence: Synthetic oligonucleotide
  Sense strand starting at position 3137 of SEQ ID NO: 1563211
aggacagcaccaugucuua

SEQ ID NO: 1803370 - RNA, 19 nt, Artificial Sequence
  Description of Artificial Sequence: Synthetic oligonucleotide
  Antisense strand to SEQ ID NO: 1803369
uaagacauggugcuguccu

SEQ ID NO: 1803371 - RNA, 19 nt, Artificial Sequence
  Description of Artificial Sequence: Synthetic oligonucleotide
  Sense strand starting at position 3327 of SEQ ID NO: 1563211
gugagaagcaaagguguau

SEQ ID NO: 1803372 - RNA, 19 nt, Artificial Sequence
  Description of Artificial Sequence: Synthetic oligonucleotide
  Antisense strand to SEQ ID NO: 1803371
auacaccuuugcuucucac

SEQ ID NO: 1803373 - RNA, 19 nt, Artificial Sequence
  Description of Artificial Sequence: Synthetic oligonucleotide
  Sense strand starting at position 3338 of SEQ ID NO: 1563211
agguguauauuguuaggua

SEQ ID NO: 1803374 - RNA, 19 nt, Artificial Sequence
  Description of Artificial Sequence: Synthetic oligonucleotide
  Antisense strand to SEQ ID NO: 1803373
uaccuaacaauauacaccu

SEQ ID NO: 1803375 - RNA, 19 nt, Artificial Sequence
  Description of Artificial Sequence: Synthetic oligonucleotide
  Sense strand starting at position 3380 of SEQ ID NO: 1563211
cguuccagaguguacauau

SEQ ID NO: 1803376 - RNA, 19 nt, Artificial Sequence
  Description of Artificial Sequence: Synthetic oligonucleotide
  Antisense strand to SEQ ID NO: 1803375
auauguacacucuggaacg

SEQ ID NO: 1803377 - RNA, 19 nt, Artificial Sequence
  Description of Artificial Sequence: Synthetic oligonucleotide
  Sense strand starting at position 3392 of SEQ ID NO: 1563211
uacauauguguaggaggau

SEQ ID NO: 1803378 - RNA, 19 nt, Artificial Sequence
  Description of Artificial Sequence: Synthetic oligonucleotide
  Antisense strand to SEQ ID NO: 1803377
auccuccuacacauaugua

SEQ ID NO: 1803379 - RNA, 19 nt, Artificial Sequence
  Description of Artificial Sequence: Synthetic oligonucleotide
  Sense strand starting at position 3441 of SEQ ID NO: 1563211
cacugugcugguuaccaau

SEQ ID NO: 1803380 - RNA, 19 nt, Artificial Sequence
  Description of Artificial Sequence: Synthetic oligonucleotide
  Antisense strand to SEQ ID NO: 1803379
auugguaaccagcacagug

SEQ ID NO: 1803381 - RNA, 19 nt, Artificial Sequence
  Description of Artificial Sequence: Synthetic oligonucleotide
  Sense strand starting at position 3535 of SEQ ID NO: 1563211
ucccuuugccagugacaca

SEQ ID NO: 1803382 - RNA, 19 nt, Artificial Sequence
  Description of Artificial Sequence: Synthetic oligonucleotide
  Antisense strand to SEQ ID NO: 1803381
ugugucacuggcaaaggga

SEQ ID NO: 1803383 - RNA, 19 nt, Artificial Sequence
  Description of Artificial Sequence: Synthetic oligonucleotide
  Sense strand starting at position 3553 of SEQ ID NO: 1563211
aauuuaagccuuuggcagu

SEQ ID NO: 1803384 - RNA, 19 nt, Artificial Sequence
  Description of Artificial Sequence: Synthetic oligonucleotide
  Antisense strand to SEQ ID NO: 1803383
acugccaaaggcuuaaauu

SEQ ID NO: 1803385 - RNA, 19 nt, Artificial Sequence
  Description of Artificial Sequence: Synthetic oligonucleotide
  Sense strand starting at position 3632 of SEQ ID NO: 1563211
gcucucugaggacauugau

SEQ ID NO: 1803386 - RNA, 19 nt, Artificial Sequence
  Description of Artificial Sequence: Synthetic oligonucleotide
  Antisense strand to SEQ ID NO: 1803385
aucaauguccucagagagc

SEQ ID NO: 1803387 - RNA, 19 nt, Artificial Sequence
  Description of Artificial Sequence: Synthetic oligonucleotide
  Sense strand starting at position 3660 of SEQ ID NO: 1563211
agcuuucuccugcaggaga

SEQ ID NO: 1803388 - RNA, 19 nt, Artificial Sequence
  Description of Artificial Sequence: Synthetic oligonucleotide
  Antisense strand to SEQ ID NO: 1803387
ucuccugcaggagaaagcu

SEQ ID NO: 1803389 - RNA, 19 nt, Artificial Sequence
  Description of Artificial Sequence: Synthetic oligonucleotide
  Sense strand starting at position 3678 of SEQ ID NO: 1563211
agggcagauuuccaguacu

SEQ ID NO: 1803390 - RNA, 19 nt, Artificial Sequence
  Description of Artificial Sequence: Synthetic oligonucleotide
  Antisense strand to SEQ ID NO: 1803389
aguacuggaaaucugcccu

SEQ ID NO: 1803391 - RNA, 19 nt, Artificial Sequence
  Description of Artificial Sequence: Synthetic oligonucleotide
  Sense strand starting at position 3692 of SEQ ID NO: 1563211
guacuuuaaagagggcaua

SEQ ID NO: 1803392 - RNA, 19 nt, Artificial Sequence
  Description of Artificial Sequence: Synthetic oligonucleotide
  Antisense strand to SEQ ID NO: 1803391
uaugcccucuuuaaaguac

SEQ ID NO: 1803393 - RNA, 19 nt, Artificial Sequence
  Description of Artificial Sequence: Synthetic oligonucleotide
  Sense strand starting at position 3706 of SEQ ID NO: 1563211
gcauauuugcagcaaguuc

SEQ ID NO: 1803394 - RNA, 19 nt, Artificial Sequence
  Description of Artificial Sequence: Synthetic oligonucleotide
  Antisense strand to SEQ ID NO: 1803393
gaacuugcugcaaauaugc

SEQ ID NO: 1803395 - RNA, 19 nt, Artificial Sequence
  Description of Artificial Sequence: Synthetic oligonucleotide
  Sense strand starting at position 3715 of SEQ ID NO: 1563211
cagcaaguucgugaaguug

SEQ ID NO: 1803396 - RNA, 19 nt, Artificial Sequence
  Description of Artificial Sequence: Synthetic oligonucleotide
  Antisense strand to SEQ ID NO: 1803395
caacuucacgaacuugcug

SEQ ID NO: 1803397 - RNA, 19 nt, Artificial Sequence
  Description of Artificial Sequence: Synthetic oligonucleotide
  Sense strand starting at position 3739 of SEQ ID NO: 1563211
uuggguuuccagcaaauuc

SEQ ID NO: 1803398 - RNA, 19 nt, Artificial Sequence
  Description of Artificial Sequence: Synthetic oligonucleotide
  Antisense strand to SEQ ID NO: 1803397
gaauuugcuggaaacccaa

SEQ ID NO: 1803399 - RNA, 19 nt, Artificial Sequence
  Description of Artificial Sequence: Synthetic oligonucleotide
  Sense strand starting at position 3761 of SEQ ID NO: 1563211
agaacagauuuacagcaaa

SEQ ID NO: 1803400 - RNA, 19 nt, Artificial Sequence
  Description of Artificial Sequence: Synthetic oligonucleotide
  Antisense strand to SEQ ID NO: 1803399
uuugcuguaaaucuguucu

SEQ ID NO: 1803401 - RNA, 19 nt, Artificial Sequence
  Description of Artificial Sequence: Synthetic oligonucleotide
  Sense strand starting at position 3842 of SEQ ID NO: 1563211
uguuucuuauaccuguaau

SEQ ID NO: 1803402 - RNA, 19 nt, Artificial Sequence
  Description of Artificial Sequence: Synthetic oligonucleotide
  Antisense strand to SEQ ID NO: 1803401
auuacagguauaagaaaca

SEQ ID NO: 1803403 - RNA, 19 nt, Artificial Sequence
  Description of Artificial Sequence: Synthetic oligonucleotide
  Sense strand starting at position 3852 of SEQ ID NO: 1563211
accuguaauuuguaaagaa

SEQ ID NO: 1803404 - RNA, 19 nt, Artificial Sequence
  Description of Artificial Sequence: Synthetic oligonucleotide
  Antisense strand to SEQ ID NO: 1803403
uucuuuacaaauuacaggu

SEQ ID NO: 1803405 - RNA, 19 nt, Artificial Sequence
  Description of Artificial Sequence: Synthetic oligonucleotide
  Sense strand starting at position 187 of SEQ ID NO: 1563212
uagugcugaucagcaagua

SEQ ID NO: 1803406 - RNA, 19 nt, Artificial Sequence
  Description of Artificial Sequence: Synthetic oligonucleotide
  Antisense strand to SEQ ID NO: 1803405
uacuugcugaucagcacua

SEQ ID NO: 1803407 - RNA, 19 nt, Artificial Sequence
  Description of Artificial Sequence: Synthetic oligonucleotide
  Sense strand starting at position 188 of SEQ ID NO: 1563212
agugcugaucagcaaguau

SEQ ID NO: 1803408 - RNA, 19 nt, Artificial Sequence
  Description of Artificial Sequence: Synthetic oligonucleotide
  Antisense strand to SEQ ID NO: 1803407
auacuugcugaucagcacu

SEQ ID NO: 1803409 - RNA, 19 nt, Artificial Sequence
  Description of Artificial Sequence: Synthetic oligonucleotide
  Sense strand starting at position 199 of SEQ ID NO: 1563212
gcaaguauuuauuaaguga

SEQ ID NO: 1803410 - RNA, 19 nt, Artificial Sequence
  Description of Artificial Sequence: Synthetic oligonucleotide
  Antisense strand to SEQ ID NO: 1803409
ucacuuaauaaauacuugc

SEQ ID NO: 1803411 - RNA, 19 nt, Artificial Sequence
  Description of Artificial Sequence: Synthetic oligonucleotide
  Sense strand starting at position 586 of SEQ ID NO: 1563212
gcacaucaugaacauguaa

SEQ ID NO: 1803412 - RNA, 19 nt, Artificial Sequence
  Description of Artificial Sequence: Synthetic oligonucleotide
  Antisense strand to SEQ ID NO: 1803411
uuacauguucaugaugugc

SEQ ID NO: 1803413 - RNA, 19 nt, Artificial Sequence
  Description of Artificial Sequence: Synthetic oligonucleotide
  Sense strand starting at position 597 of SEQ ID NO: 1563212
acauguaaauucgaaagca

SEQ ID NO: 1803414 - RNA, 19 nt, Artificial Sequence
  Description of Artificial Sequence: Synthetic oligonucleotide
  Antisense strand to SEQ ID NO: 1803413
ugcuuucgaauuuacaugu

SEQ ID NO: 1803415 - RNA, 19 nt, Artificial Sequence
  Description of Artificial Sequence: Synthetic oligonucleotide
  Sense strand starting at position 617 of SEQ ID NO: 1563212
gggucuguuuccguaauaa

SEQ ID NO: 1803416 - RNA, 19 nt, Artificial Sequence
  Description of Artificial Sequence: Synthetic oligonucleotide
  Antisense strand to SEQ ID NO: 1803415
uuauuacggaaacagaccc

SEQ ID NO: 1803417 - RNA, 19 nt, Artificial Sequence
  Description of Artificial Sequence: Synthetic oligonucleotide
  Sense strand starting at position 629 of SEQ ID NO: 1563212
guaauaacuuuagggaaac

SEQ ID NO: 1803418 - RNA, 19 nt, Artificial Sequence
  Description of Artificial Sequence: Synthetic oligonucleotide
  Antisense strand to SEQ ID NO: 1803417
guuucccuaaaguuauuac

SEQ ID NO: 1803419 - RNA, 19 nt, Artificial Sequence
  Description of Artificial Sequence: Synthetic oligonucleotide
  Sense strand starting at position 1012 of SEQ ID NO: 1563212
gcucguuucucuuuggacu

SEQ ID NO: 1803420 - RNA, 19 nt, Artificial Sequence
  Description of Artificial Sequence: Synthetic oligonucleotide
  Antisense strand to SEQ ID NO: 1803419
aguccaaagagaaacgagc

SEQ ID NO: 1803421 - RNA, 19 nt, Artificial Sequence
  Description of Artificial Sequence: Synthetic oligonucleotide
  Sense strand starting at position 1634 of SEQ ID NO: 1563212
ccugcaaggacucgggaau

SEQ ID NO: 1803422 - RNA, 19 nt, Artificial Sequence
  Description of Artificial Sequence: Synthetic oligonucleotide
  Antisense strand to SEQ ID NO: 1803421
auucccgaguccuugcagg

SEQ ID NO: 1803423 - RNA, 19 nt, Artificial Sequence
  Description of Artificial Sequence: Synthetic oligonucleotide
  Sense strand starting at position 1728 of SEQ ID NO: 1563212
cuauguucccaagaauguu

SEQ ID NO: 1803424 - RNA, 19 nt, Artificial Sequence
  Description of Artificial Sequence: Synthetic oligonucleotide
  Antisense strand to SEQ ID NO: 1803423
aacauucuugggaacauag

SEQ ID NO: 1803425 - RNA, 19 nt, Artificial Sequence
  Description of Artificial Sequence: Synthetic oligonucleotide
  Sense strand starting at position 2181 of SEQ ID NO: 1563212
guuggaguuuacccaucuu

SEQ ID NO: 1803426 - RNA, 19 nt, Artificial Sequence
  Description of Artificial Sequence: Synthetic oligonucleotide
  Antisense strand to SEQ ID NO: 1803425
aagauggguaaacuccaac

SEQ ID NO: 1803427 - RNA, 19 nt, Artificial Sequence
  Description of Artificial Sequence: Synthetic oligonucleotide
  Sense strand starting at position 2292 of SEQ ID NO: 1563212
cuguguauaugcuuccuaa

SEQ ID NO: 1803428 - RNA, 19 nt, Artificial Sequence
  Description of Artificial Sequence: Synthetic oligonucleotide
  Antisense strand to SEQ ID NO: 1803427
uuaggaagcauauacacag

SEQ ID NO: 1803429 - RNA, 19 nt, Artificial Sequence
  Description of Artificial Sequence: Synthetic oligonucleotide
  Sense strand starting at position 2483 of SEQ ID NO: 1563212
agagcauucucacuuguuu

SEQ ID NO: 1803430 - RNA, 19 nt, Artificial Sequence
  Description of Artificial Sequence: Synthetic oligonucleotide
  Antisense strand to SEQ ID NO: 1803429
aaacaagugagaaugcucu

SEQ ID NO: 1803431 - RNA, 19 nt, Artificial Sequence
  Description of Artificial Sequence: Synthetic oligonucleotide
  Sense strand starting at position 2583 of SEQ ID NO: 1563212
ggaaacaguucuguuguca

SEQ ID NO: 1803432 - RNA, 19 nt, Artificial Sequence
  Description of Artificial Sequence: Synthetic oligonucleotide
  Antisense strand to SEQ ID NO: 1803431
ugacaacagaacuguuucc

SEQ ID NO: 1803433 - RNA, 19 nt, Artificial Sequence
  Description of Artificial Sequence: Synthetic oligonucleotide
  Sense strand starting at position 2587 of SEQ ID NO: 1563212
acaguucuguugucagauc

SEQ ID NO: 1803434 - RNA, 19 nt, Artificial Sequence
  Description of Artificial Sequence: Synthetic oligonucleotide
  Antisense strand to SEQ ID NO: 1803433
gaucugacaacagaacugu

SEQ ID NO: 1803435 - RNA, 19 nt, Artificial Sequence
  Description of Artificial Sequence: Synthetic oligonucleotide
  Sense strand starting at position 2596 of SEQ ID NO: 1563212
uugucagaucuuggccauu

SEQ ID NO: 1803436 - RNA, 19 nt, Artificial Sequence
  Description of Artificial Sequence: Synthetic oligonucleotide
  Antisense strand to SEQ ID NO: 1803435
aauggccaagaucugacaa

SEQ ID NO: 1803437 - RNA, 19 nt, Artificial Sequence
  Description of Artificial Sequence: Synthetic oligonucleotide
  Sense strand starting at position 2635 of SEQ ID NO: 1563212
uuuauccuucugggacaaa

SEQ ID NO: 1803438 - RNA, 19 nt, Artificial Sequence
  Description of Artificial Sequence: Synthetic oligonucleotide
  Antisense strand to SEQ ID NO: 1803437
uuugucccagaaggauaaa

SEQ ID NO: 1803439 - RNA, 19 nt, Artificial Sequence
  Description of Artificial Sequence: Synthetic oligonucleotide
  Sense strand starting at position 2636 of SEQ ID NO: 1563212
uuauccuucugggacaaau

SEQ ID NO: 1803440 - RNA, 19 nt, Artificial Sequence
  Description of Artificial Sequence: Synthetic oligonucleotide
  Antisense strand to SEQ ID NO: 1803439
auuugucccagaaggauaa

SEQ ID NO: 1803441 - RNA, 19 nt, Artificial Sequence
  Description of Artificial Sequence: Synthetic oligonucleotide
  Sense strand starting at position 2757 of SEQ ID NO: 1563212
aguggcuaucacuguugau

SEQ ID NO: 1803442 - RNA, 19 nt, Artificial Sequence
  Description of Artificial Sequence: Synthetic oligonucleotide
  Antisense strand to SEQ ID NO: 1803441
aucaacagugauagccacu

SEQ ID NO: 1803443 - RNA, 19 nt, Artificial Sequence
  Description of Artificial Sequence: Synthetic oligonucleotide
  Sense strand starting at position 2769 of SEQ ID NO: 1563212
uguugaugguuugaagacu

SEQ ID NO: 1803444 - RNA, 19 nt, Artificial Sequence
  Description of Artificial Sequence: Synthetic oligonucleotide
  Antisense strand to SEQ ID NO: 1803443
agucuucaaaccaucaaca

SEQ ID NO: 1803445 - RNA, 19 nt, Artificial Sequence
  Description of Artificial Sequence: Synthetic oligonucleotide
  Sense strand starting at position 2820 of SEQ ID NO: 1563212
gguugagugacgcagagau

SEQ ID NO: 1803446 - RNA, 19 nt, Artificial Sequence
  Description of Artificial Sequence: Synthetic oligonucleotide
  Antisense strand to SEQ ID NO: 1803445
aucucugcgucacucaacc

SEQ ID NO: 1803447 - RNA, 19 nt, Artificial Sequence
  Description of Artificial Sequence: Synthetic oligonucleotide
  Sense strand starting at position 2840 of SEQ ID NO: 1563212
gaguaucccugcccugaca

SEQ ID NO: 1803448 - RNA, 19 nt, Artificial Sequence
  Description of Artificial Sequence: Synthetic oligonucleotide
  Antisense strand to SEQ ID NO: 1803447
ugucagggcagggauacuc

SEQ ID NO: 1803449 - RNA, 19 nt, Artificial Sequence
  Description of Artificial Sequence: Synthetic oligonucleotide
  Sense strand starting at position 2875 of SEQ ID NO: 1563212
cuggucuuccacuguuaua

SEQ ID NO: 1803450 - RNA, 19 nt, Artificial Sequence
  Description of Artificial Sequence: Synthetic oligonucleotide
  Antisense strand to SEQ ID NO: 1803449
uauaacaguggaagaccag

SEQ ID NO: 1803451 - RNA, 19 nt, Artificial Sequence
  Description of Artificial Sequence: Synthetic oligonucleotide
  Sense strand starting at position 2887 of SEQ ID NO: 1563212
uguuauauucgagagcuuc

SEQ ID NO: 1803452 - RNA, 19 nt, Artificial Sequence
  Description of Artificial Sequence: Synthetic oligonucleotide
  Antisense strand to SEQ ID NO: 1803451
gaagcucucgaauauaaca

SEQ ID NO: 1803453 - RNA, 19 nt, Artificial Sequence
  Description of Artificial Sequence: Synthetic oligonucleotide
  Sense strand starting at position 2975 of SEQ ID NO: 1563212
uggugaccuuaauauauca

SEQ ID NO: 1803454 - RNA, 19 nt, Artificial Sequence
  Description of Artificial Sequence: Synthetic oligonucleotide
  Antisense strand to SEQ ID NO: 1803453
ugauauauuaaggucacca

SEQ ID NO: 1803455 - RNA, 19 nt, Artificial Sequence
  Description of Artificial Sequence: Synthetic oligonucleotide
  Sense strand starting at position 3039 of SEQ ID NO: 1563212
acucacuucucagcauagu

SEQ ID NO: 1803456 - RNA, 19 nt, Artificial Sequence
  Description of Artificial Sequence: Synthetic oligonucleotide
  Antisense strand to SEQ ID NO: 1803455
acuaugcugagaagugagu

SEQ ID NO: 1803457 - RNA, 19 nt, Artificial Sequence
  Description of Artificial Sequence: Synthetic oligonucleotide
  Sense strand starting at position 3040 of SEQ ID NO: 1563212
cucacuucucagcauaguu

SEQ ID NO: 1803458 - RNA, 19 nt, Artificial Sequence
  Description of Artificial Sequence: Synthetic oligonucleotide
  Antisense strand to SEQ ID NO: 1803457
aacuaugcugagaagugag

SEQ ID NO: 1803459 - RNA, 19 nt, Artificial Sequence
  Description of Artificial Sequence: Synthetic oligonucleotide
  Sense strand starting at position 3103 of SEQ ID NO: 1563212
cagcucuguggugagagau

SEQ ID NO: 1803460 - RNA, 19 nt, Artificial Sequence
  Description of Artificial Sequence: Synthetic oligonucleotide
  Antisense strand to SEQ ID NO: 1803459
aucucucaccacagagcug

SEQ ID NO: 1803461 - RNA, 19 nt, Artificial Sequence
  Description of Artificial Sequence: Synthetic oligonucleotide
  Sense strand starting at position 3164 of SEQ ID NO: 1563212
gggagcaguucucaaaccu

SEQ ID NO: 1803462 - RNA, 19 nt, Artificial Sequence
  Description of Artificial Sequence: Synthetic oligonucleotide
  Antisense strand to SEQ ID NO: 1803461
agguuugagaacugcuccc

SEQ ID NO: 1803463 - RNA, 19 nt, Artificial Sequence
  Description of Artificial Sequence: Synthetic oligonucleotide
  Sense strand starting at position 3218 of SEQ ID NO: 1563212
aaagucucuuugggacauu

SEQ ID NO: 1803464 - RNA, 19 nt, Artificial Sequence
  Description of Artificial Sequence: Synthetic oligonucleotide
  Antisense strand to SEQ ID NO: 1803463
aaugucccaaagagacuuu

SEQ ID NO: 1803465 - RNA, 19 nt, Artificial Sequence
  Description of Artificial Sequence: Synthetic oligonucleotide
  Sense strand starting at position 3219 of SEQ ID NO: 1563212
aagucucuuugggacauuu

SEQ ID NO: 1803466 - RNA, 19 nt, Artificial Sequence
  Description of Artificial Sequence: Synthetic oligonucleotide
  Antisense strand to SEQ ID NO: 1803465
aaaugucccaaagagacuu

SEQ ID NO: 1803467 - RNA, 19 nt, Artificial Sequence
  Description of Artificial Sequence: Synthetic oligonucleotide
  Sense strand starting at position 3311 of SEQ ID NO: 1563212
cccagaagagcuuagucuu

SEQ ID NO: 1803468 - RNA, 19 nt, Artificial Sequence
  Description of Artificial Sequence: Synthetic oligonucleotide
  Antisense strand to SEQ ID NO: 1803467
aagacuaagcucuucuggg

SEQ ID NO: 1803469 - RNA, 19 nt, Artificial Sequence
  Description of Artificial Sequence: Synthetic oligonucleotide
  Sense strand starting at position 3451 of SEQ ID NO: 1563212
uguggaagcccuuaauacu

SEQ ID NO: 1803470 - RNA, 19 nt, Artificial Sequence
  Description of Artificial Sequence: Synthetic oligonucleotide
  Antisense strand to SEQ ID NO: 1803469
aguauuaagggcuuccaca

SEQ ID NO: 1803471 - RNA, 19 nt, Artificial Sequence
  Description of Artificial Sequence: Synthetic oligonucleotide
  Sense strand starting at position 3675 of SEQ ID NO: 1563212
ccagaaauguggcuauuau

SEQ ID NO: 1803472 - RNA, 19 nt, Artificial Sequence
  Description of Artificial Sequence: Synthetic oligonucleotide
  Antisense strand to SEQ ID NO: 1803471
auaauagccacauuucugg

SEQ ID NO: 1803473 - RNA, 19 nt, Artificial Sequence
  Description of Artificial Sequence: Synthetic oligonucleotide
  Sense strand starting at position 3676 of SEQ ID NO: 1563212
cagaaauguggcuauuauc

SEQ ID NO: 1803474 - RNA, 19 nt, Artificial Sequence
  Description of Artificial Sequence: Synthetic oligonucleotide
  Antisense strand to SEQ ID NO: 1803473
gauaauagccacauuucug

SEQ ID NO: 1803475 - RNA, 19 nt, Artificial Sequence
  Description of Artificial Sequence: Synthetic oligonucleotide
  Sense strand starting at position 3682 of SEQ ID NO: 1563212
uguggcuauuauccuugaa

SEQ ID NO: 1803476 - RNA, 19 nt, Artificial Sequence
  Description of Artificial Sequence: Synthetic oligonucleotide
  Antisense strand to SEQ ID NO: 1803475
uucaaggauaauagccaca

SEQ ID NO: 1803477 - RNA, 19 nt, Artificial Sequence
  Description of Artificial Sequence: Synthetic oligonucleotide
  Sense strand starting at position 3684 of SEQ ID NO: 1563212
uggcuauuauccuugaauc

SEQ ID NO: 1803478 - RNA, 19 nt, Artificial Sequence
  Description of Artificial Sequence: Synthetic oligonucleotide
  Antisense strand to SEQ ID NO: 1803477
gauucaaggauaauagcca

SEQ ID NO: 1803479 - RNA, 19 nt, Artificial Sequence
  Description of Artificial Sequence: Synthetic oligonucleotide
  Sense strand starting at position 3685 of SEQ ID NO: 1563212
ggcuauuauccuugaauca

SEQ ID NO: 1803480 - RNA, 19 nt, Artificial Sequence
  Description of Artificial Sequence: Synthetic oligonucleotide
  Antisense strand to SEQ ID NO: 1803479
ugauucaaggauaauagcc

SEQ ID NO: 1803481 - RNA, 19 nt, Artificial Sequence
  Description of Artificial Sequence: Synthetic oligonucleotide
  Sense strand starting at position 3734 of SEQ ID NO: 1563212
accaaaucugguuaagucu

SEQ ID NO: 1803482 - RNA, 19 nt, Artificial Sequence
  Description of Artificial Sequence: Synthetic oligonucleotide
  Antisense strand to SEQ ID NO: 1803481
agacuuaaccagauuuggu

SEQ ID NO: 1803483 - RNA, 19 nt, Artificial Sequence
  Description of Artificial Sequence: Synthetic oligonucleotide
  Sense strand starting at position 3741 of SEQ ID NO: 1563212
cugguuaagucucaauuua

SEQ ID NO: 1803484 - RNA, 19 nt, Artificial Sequence
  Description of Artificial Sequence: Synthetic oligonucleotide
  Antisense strand to SEQ ID NO: 1803483
uaaauugagacuuaaccag

SEQ ID NO: 1803485 - RNA, 19 nt, Artificial Sequence
  Description of Artificial Sequence: Synthetic oligonucleotide
  Sense strand starting at position 18 of SEQ ID NO: 1563213
ggaggugauugucuucauc

SEQ ID NO: 1803486 - RNA, 19 nt, Artificial Sequence
  Description of Artificial Sequence: Synthetic oligonucleotide
  Antisense strand to SEQ ID NO: 1803485
gaugaagacaaucaccucc

SEQ ID NO: 1803487 - RNA, 19 nt, Artificial Sequence
  Description of Artificial Sequence: Synthetic oligonucleotide
  Sense strand starting at position 63 of SEQ ID NO: 1563213
agagaugugucucuuacau

SEQ ID NO: 1803488 - RNA, 19 nt, Artificial Sequence
  Description of Artificial Sequence: Synthetic oligonucleotide
  Antisense strand to SEQ ID NO: 1803487
auguaagagacacaucucu

SEQ ID NO: 1803489 - RNA, 19 nt, Artificial Sequence
  Description of Artificial Sequence: Synthetic oligonucleotide
  Sense strand starting at position 123 of SEQ ID NO: 1563213
ugucacaaguguuuaguaa

SEQ ID NO: 1803490 - RNA, 19 nt, Artificial Sequence
  Description of Artificial Sequence: Synthetic oligonucleotide
  Antisense strand to SEQ ID NO: 1803489
uuacuaaacacuugugaca

SEQ ID NO: 1803491 - RNA, 19 nt, Artificial Sequence
  Description of Artificial Sequence: Synthetic oligonucleotide
  Sense strand starting at position 124 of SEQ ID NO: 1563213
gucacaaguguuuaguaag

SEQ ID NO: 1803492 - RNA, 19 nt, Artificial Sequence
  Description of Artificial Sequence: Synthetic oligonucleotide
  Antisense strand to SEQ ID NO: 1803491
cuuacuaaacacuugugac

SEQ ID NO: 1803493 - RNA, 19 nt, Artificial Sequence
  Description of Artificial Sequence: Synthetic oligonucleotide
  Sense strand starting at position 134 of SEQ ID NO: 1563213
uuuaguaagugcucacauc

SEQ ID NO: 1803494 - RNA, 19 nt, Artificial Sequence
  Description of Artificial Sequence: Synthetic oligonucleotide
  Antisense strand to SEQ ID NO: 1803493
gaugugagcacuuacuaaa

SEQ ID NO: 1803495 - RNA, 19 nt, Artificial Sequence
  Description of Artificial Sequence: Synthetic oligonucleotide
  Sense strand starting at position 156 of SEQ ID NO: 1563213
uuuauaagguggucacauu

SEQ ID NO: 1803496 - RNA, 19 nt, Artificial Sequence
  Description of Artificial Sequence: Synthetic oligonucleotide
  Antisense strand to SEQ ID NO: 1803495
aaugugaccaccuuauaaa

SEQ ID NO: 1803497 - RNA, 19 nt, Artificial Sequence
  Description of Artificial Sequence: Synthetic oligonucleotide
  Sense strand starting at position 182 of SEQ ID NO: 1563213
aucaguaauacguguucca

SEQ ID NO: 1803498 - RNA, 19 nt, Artificial Sequence
  Description of Artificial Sequence: Synthetic oligonucleotide
  Antisense strand to SEQ ID NO: 1803497
uggaacacguauuacugau

SEQ ID NO: 1803499 - RNA, 19 nt, Artificial Sequence
  Description of Artificial Sequence: Synthetic oligonucleotide
  Sense strand starting at position 185 of SEQ ID NO: 1563213
aguaauacguguuccauuu

SEQ ID NO: 1803500 - RNA, 19 nt, Artificial Sequence
  Description of Artificial Sequence: Synthetic oligonucleotide
  Antisense strand to SEQ ID NO: 1803499
aaauggaacacguauuacu

SEQ ID NO: 1803501 - RNA, 19 nt, Artificial Sequence
  Description of Artificial Sequence: Synthetic oligonucleotide
  Sense strand starting at position 212 of SEQ ID NO: 1563213
aagaaauuauggguaagca

SEQ ID NO: 1803502 - RNA, 19 nt, Artificial Sequence
  Description of Artificial Sequence: Synthetic oligonucleotide
  Antisense strand to SEQ ID NO: 1803501
ugcuuacccauaauuucuu

SEQ ID NO: 1803503 - RNA, 19 nt, Artificial Sequence
  Description of Artificial Sequence: Synthetic oligonucleotide
  Sense strand starting at position 216 of SEQ ID NO: 1563213
aauuauggguaagcaagaa

SEQ ID NO: 1803504 - RNA, 19 nt, Artificial Sequence
  Description of Artificial Sequence: Synthetic oligonucleotide
  Antisense strand to SEQ ID NO: 1803503
uucuugcuuacccauaauu

SEQ ID NO: 1803505 - RNA, 19 nt, Artificial Sequence
  Description of Artificial Sequence: Synthetic oligonucleotide
  Sense strand starting at position 347 of SEQ ID NO: 1563213
uuaggugcauguuuaagau

SEQ ID NO: 1803506 - RNA, 19 nt, Artificial Sequence
  Description of Artificial Sequence: Synthetic oligonucleotide
  Antisense strand to SEQ ID NO: 1803505
aucuuaaacaugcaccuaa

SEQ ID NO: 1803507 - RNA, 19 nt, Artificial Sequence
  Description of Artificial Sequence: Synthetic oligonucleotide
  Sense strand starting at position 533 of SEQ ID NO: 1563213
agaaauagguaacaucaaa

SEQ ID NO: 1803508 - RNA, 19 nt, Artificial Sequence
  Description of Artificial Sequence: Synthetic oligonucleotide
  Antisense strand to SEQ ID NO: 1803507
uuugauguuaccuauuucu

SEQ ID NO: 1803509 - RNA, 19 nt, Artificial Sequence
  Description of Artificial Sequence: Synthetic oligonucleotide
  Sense strand starting at position 550 of SEQ ID NO: 1563213
aaacguuuacgacaaaggu

SEQ ID NO: 1803510 - RNA, 19 nt, Artificial Sequence
  Description of Artificial Sequence: Synthetic oligonucleotide
  Antisense strand to SEQ ID NO: 1803509
accuuugucguaaacguuu

SEQ ID NO: 1803511 - RNA, 19 nt, Artificial Sequence
  Description of Artificial Sequence: Synthetic oligonucleotide
  Sense strand starting at position 571 of SEQ ID NO: 1563213
accacaaauguguaaguuu

SEQ ID NO: 1803512 - RNA, 19 nt, Artificial Sequence
  Description of Artificial Sequence: Synthetic oligonucleotide
  Antisense strand to SEQ ID NO: 1803511
aaacuuacacauuuguggu

SEQ ID NO: 1803513 - RNA, 19 nt, Artificial Sequence
  Description of Artificial Sequence: Synthetic oligonucleotide
  Sense strand starting at position 979 of SEQ ID NO: 1563213
ccacgaugagauuguuuaa

SEQ ID NO: 1803514 - RNA, 19 nt, Artificial Sequence
  Description of Artificial Sequence: Synthetic oligonucleotide
  Antisense strand to SEQ ID NO: 1803513
uuaaacaaucucaucgugg

SEQ ID NO: 1803515 - RNA, 19 nt, Artificial Sequence
  Description of Artificial Sequence: Synthetic oligonucleotide
  Sense strand starting at position 1048 of SEQ ID NO: 1563213
gacucaauucuuggugaac

SEQ ID NO: 1803516 - RNA, 19 nt, Artificial Sequence
  Description of Artificial Sequence: Synthetic oligonucleotide
  Antisense strand to SEQ ID NO: 1803515
guucaccaagaauugaguc

SEQ ID NO: 1803517 - RNA, 19 nt, Artificial Sequence
  Description of Artificial Sequence: Synthetic oligonucleotide
  Sense strand starting at position 1049 of SEQ ID NO: 1563213
acucaauucuuggugaacu

SEQ ID NO: 1803518 - RNA, 19 nt, Artificial Sequence
  Description of Artificial Sequence: Synthetic oligonucleotide
  Antisense strand to SEQ ID NO: 1803517
aguucaccaagaauugagu

SEQ ID NO: 1803519 - RNA, 19 nt, Artificial Sequence
  Description of Artificial Sequence: Synthetic oligonucleotide
  Sense strand starting at position 2023 of SEQ ID NO: 1563213
cgagguaagacucaguguu

SEQ ID NO: 1803520 - RNA, 19 nt, Artificial Sequence
  Description of Artificial Sequence: Synthetic oligonucleotide
  Antisense strand to SEQ ID NO: 1803519
aacacugagucuuaccucg

SEQ ID NO: 1803521 - RNA, 19 nt, Artificial Sequence
  Description of Artificial Sequence: Synthetic oligonucleotide
  Sense strand starting at position 2057 of SEQ ID NO: 1563213
gcuguugucaucgccagag

SEQ ID NO: 1803522 - RNA, 19 nt, Artificial Sequence
  Description of Artificial Sequence: Synthetic oligonucleotide
  Antisense strand to SEQ ID NO: 1803521
cucuggcgaugacaacagc

SEQ ID NO: 1803523 - RNA, 19 nt, Artificial Sequence
  Description of Artificial Sequence: Synthetic oligonucleotide
  Sense strand starting at position 2198 of SEQ ID NO: 1563213
cucuguauauucuugagac

SEQ ID NO: 1803524 - RNA, 19 nt, Artificial Sequence
  Description of Artificial Sequence: Synthetic oligonucleotide
  Antisense strand to SEQ ID NO: 1803523
gucucaagaauauacagag

SEQ ID NO: 1803525 - RNA, 19 nt, Artificial Sequence
  Description of Artificial Sequence: Synthetic oligonucleotide
  Sense strand starting at position 2200 of SEQ ID NO: 1563213
cuguauauucuugagacuu

SEQ ID NO: 1803526 - RNA, 19 nt, Artificial Sequence
  Description of Artificial Sequence: Synthetic oligonucleotide
  Antisense strand to SEQ ID NO: 1803525
aagucucaagaauauacag

SEQ ID NO: 1803527 - RNA, 19 nt, Artificial Sequence
  Description of Artificial Sequence: Synthetic oligonucleotide
  Sense strand starting at position 2238 of SEQ ID NO: 1563213
gacggaagguaucuucuca

SEQ ID NO: 1803528 - RNA, 19 nt, Artificial Sequence
  Description of Artificial Sequence: Synthetic oligonucleotide
  Antisense strand to SEQ ID NO: 1803527
ugagaagauaccuuccguc

SEQ ID NO: 1803529 - RNA, 19 nt, Artificial Sequence
  Description of Artificial Sequence: Synthetic oligonucleotide
  Sense strand starting at position 2242 of SEQ ID NO: 1563213
gaagguaucuucucaggga

SEQ ID NO: 1803530 - RNA, 19 nt, Artificial Sequence
  Description of Artificial Sequence: Synthetic oligonucleotide
  Antisense strand to SEQ ID NO: 1803529
ucccugagaagauaccuuc

SEQ ID NO: 1803531 - RNA, 19 nt, Artificial Sequence
  Description of Artificial Sequence: Synthetic oligonucleotide
  Sense strand starting at position 2536 of SEQ ID NO: 1563213
cgggauuaaaguugggcaa

SEQ ID NO: 1803532 - RNA, 19 nt, Artificial Sequence
  Description of Artificial Sequence: Synthetic oligonucleotide
  Antisense strand to SEQ ID NO: 1803531
uugcccaacuuuaaucccg

SEQ ID NO: 1803533 - RNA, 19 nt, Artificial Sequence
  Description of Artificial Sequence: Synthetic oligonucleotide
  Sense strand starting at position 2537 of SEQ ID NO: 1563213
gggauuaaaguugggcaaa

SEQ ID NO: 1803534 - RNA, 19 nt, Artificial Sequence
  Description of Artificial Sequence: Synthetic oligonucleotide
  Antisense strand to SEQ ID NO: 1803533
uuugcccaacuuuaauccc

SEQ ID NO: 1803535 - RNA, 19 nt, Artificial Sequence
  Description of Artificial Sequence: Synthetic oligonucleotide
  Sense strand starting at position 2569 of SEQ ID NO: 1563213
cuguccuguuaagucauua

SEQ ID NO: 1803536 - RNA, 19 nt, Artificial Sequence
  Description of Artificial Sequence: Synthetic oligonucleotide
  Antisense strand to SEQ ID NO: 1803535
uaaugacuuaacaggacag

SEQ ID NO: 1803537 - RNA, 19 nt, Artificial Sequence
  Description of Artificial Sequence: Synthetic oligonucleotide
  Sense strand starting at position 2573 of SEQ ID NO: 1563213
ccuguuaagucauuauaua

SEQ ID NO: 1803538 - RNA, 19 nt, Artificial Sequence
  Description of Artificial Sequence: Synthetic oligonucleotide
  Antisense strand to SEQ ID NO: 1803537
uauauaaugacuuaacagg

SEQ ID NO: 1803539 - RNA, 19 nt, Artificial Sequence
  Description of Artificial Sequence: Synthetic oligonucleotide
  Sense strand starting at position 2787 of SEQ ID NO: 1563213
aaacgauaaguaugucuuu

SEQ ID NO: 1803540 - RNA, 19 nt, Artificial Sequence
  Description of Artificial Sequence: Synthetic oligonucleotide
  Antisense strand to SEQ ID NO: 1803539
aaagacauacuuaucguuu

SEQ ID NO: 1803541 - RNA, 19 nt, Artificial Sequence
  Description of Artificial Sequence: Synthetic oligonucleotide
  Sense strand starting at position 2788 of SEQ ID NO: 1563213
aacgauaaguaugucuuua

SEQ ID NO: 1803542 - RNA, 19 nt, Artificial Sequence
  Description of Artificial Sequence: Synthetic oligonucleotide
  Antisense strand to SEQ ID NO: 1803541
uaaagacauacuuaucguu

SEQ ID NO: 1803543 - RNA, 19 nt, Artificial Sequence
  Description of Artificial Sequence: Synthetic oligonucleotide
  Sense strand starting at position 2790 of SEQ ID NO: 1563213
cgauaaguaugucuuuauu

SEQ ID NO: 1803544 - RNA, 19 nt, Artificial Sequence
  Description of Artificial Sequence: Synthetic oligonucleotide
  Antisense strand to SEQ ID NO: 1803543
aauaaagacauacuuaucg

SEQ ID NO: 1803545 - RNA, 19 nt, Artificial Sequence
  Description of Artificial Sequence: Synthetic oligonucleotide
  Sense strand starting at position 2839 of SEQ ID NO: 1563213
uccagagacaucuacggua

SEQ ID NO: 1803546 - RNA, 19 nt, Artificial Sequence
  Description of Artificial Sequence: Synthetic oligonucleotide
  Antisense strand to SEQ ID NO: 1803545
uaccguagaugucucugga

SEQ ID NO: 1803547 - RNA, 19 nt, Artificial Sequence
  Description of Artificial Sequence: Synthetic oligonucleotide
  Sense strand starting at position 2841 of SEQ ID NO: 1563213
cagagacaucuacgguaaa

SEQ ID NO: 1803548 - RNA, 19 nt, Artificial Sequence
  Description of Artificial Sequence: Synthetic oligonucleotide
  Antisense strand to SEQ ID NO: 1803547
uuuaccguagaugucucug

SEQ ID NO: 1803549 - RNA, 19 nt, Artificial Sequence
  Description of Artificial Sequence: Synthetic oligonucleotide
  Sense strand starting at position 3265 of SEQ ID NO: 1563213
ggauccuaggccuaaaugu

SEQ ID NO: 1803550 - RNA, 19 nt, Artificial Sequence
  Description of Artificial Sequence: Synthetic oligonucleotide
  Antisense strand to SEQ ID NO: 1803549
acauuuaggccuaggaucc

SEQ ID NO: 1803551 - RNA, 19 nt, Artificial Sequence
  Description of Artificial Sequence: Synthetic oligonucleotide
  Sense strand starting at position 3485 of SEQ ID NO: 1563213
guauuuguaucugacaaug

SEQ ID NO: 1803552 - RNA, 19 nt, Artificial Sequence
  Description of Artificial Sequence: Synthetic oligonucleotide
  Antisense strand to SEQ ID NO: 1803551
cauugucagauacaaauac

SEQ ID NO: 1803553 - RNA, 19 nt, Artificial Sequence
  Description of Artificial Sequence: Synthetic oligonucleotide
  Sense strand starting at position 3487 of SEQ ID NO: 1563213
auuuguaucugacaauggu

SEQ ID NO: 1803554 - RNA, 19 nt, Artificial Sequence
  Description of Artificial Sequence: Synthetic oligonucleotide
  Antisense strand to SEQ ID NO: 1803553
accauugucagauacaaau

SEQ ID NO: 1803555 - RNA, 19 nt, Artificial Sequence
  Description of Artificial Sequence: Synthetic oligonucleotide
  Sense strand starting at position 3651 of SEQ ID NO: 1563213
cucauuaacuaucagggaa

SEQ ID NO: 1803556 - RNA, 19 nt, Artificial Sequence
  Description of Artificial Sequence: Synthetic oligonucleotide
  Antisense strand to SEQ ID NO: 1803555
uucccugauaguuaaugag

SEQ ID NO: 1803557 - RNA, 19 nt, Artificial Sequence
  Description of Artificial Sequence: Synthetic oligonucleotide
  Sense strand starting at position 3721 of SEQ ID NO: 1563213
gaacuuaaagucugacagu

SEQ ID NO: 1803558 - RNA, 19 nt, Artificial Sequence
  Description of Artificial Sequence: Synthetic oligonucleotide
  Antisense strand to SEQ ID NO: 1803557
acugucagacuuuaaguuc

SEQ ID NO: 1803559 - RNA, 19 nt, Artificial Sequence
  Description of Artificial Sequence: Synthetic oligonucleotide
  Sense strand starting at position 3769 of SEQ ID NO: 1563213
agaaacucucacugauugu

SEQ ID NO: 1803560 - RNA, 19 nt, Artificial Sequence
  Description of Artificial Sequence: Synthetic oligonucleotide
  Antisense strand to SEQ ID NO: 1803559
acaaucagugagaguuucu

SEQ ID NO: 1803561 - RNA, 19 nt, Artificial Sequence
  Description of Artificial Sequence: Synthetic oligonucleotide
  Sense strand starting at position 3778 of SEQ ID NO: 1563213
cacugauuguuggugagaa

SEQ ID NO: 1803562 - RNA, 19 nt, Artificial Sequence
  Description of Artificial Sequence: Synthetic oligonucleotide
  Antisense strand to SEQ ID NO: 1803561
uucucaccaacaaucagug

SEQ ID NO: 1803563 - RNA, 19 nt, Artificial Sequence
  Description of Artificial Sequence: Synthetic oligonucleotide
  Sense strand starting at position 3780 of SEQ ID NO: 1563213
cugauuguuggugagaagu

SEQ ID NO: 1803564 - RNA, 19 nt, Artificial Sequence
  Description of Artificial Sequence: Synthetic oligonucleotide
  Antisense strand to SEQ ID NO: 1803563
acuucucaccaacaaucag

SEQ ID NO: 1803565 - RNA, 19 nt, Artificial Sequence
  Description of Artificial Sequence: Synthetic oligonucleotide
  Sense strand starting at position 8 of SEQ ID NO: 1563214
agagaugugucucuuacau

SEQ ID NO: 1803566 - RNA, 19 nt, Artificial Sequence
  Description of Artificial Sequence: Synthetic oligonucleotide
  Antisense strand to SEQ ID NO: 1803565
auguaagagacacaucucu

SEQ ID NO: 1803567 - RNA, 19 nt, Artificial Sequence
  Description of Artificial Sequence: Synthetic oligonucleotide
  Sense strand starting at position 10 of SEQ ID NO: 1563214
agaugugucucuuacauuu

SEQ ID NO: 1803568 - RNA, 19 nt, Artificial Sequence
  Description of Artificial Sequence: Synthetic oligonucleotide
  Antisense strand to SEQ ID NO: 1803567
aaauguaagagacacaucu

SEQ ID NO: 1803569 - RNA, 19 nt, Artificial Sequence
  Description of Artificial Sequence: Synthetic oligonucleotide
  Sense strand starting at position 68 of SEQ ID NO: 1563214
ugucacaaguguuuaguaa

SEQ ID NO: 1803570 - RNA, 19 nt, Artificial Sequence
  Description of Artificial Sequence: Synthetic oligonucleotide
  Antisense strand to SEQ ID NO: 1803569
uuacuaaacacuugugaca

SEQ ID NO: 1803571 - RNA, 19 nt, Artificial Sequence
  Description of Artificial Sequence: Synthetic oligonucleotide
  Sense strand starting at position 69 of SEQ ID NO: 1563214
gucacaaguguuuaguaag

SEQ ID NO: 1803572 - RNA, 19 nt, Artificial Sequence
  Description of Artificial Sequence: Synthetic oligonucleotide
  Antisense strand to SEQ ID NO: 1803571
cuuacuaaacacuugugac

SEQ ID NO: 1803573 - RNA, 19 nt, Artificial Sequence
  Description of Artificial Sequence: Synthetic oligonucleotide
  Sense strand starting at position 79 of SEQ ID NO: 1563214
uuuaguaagugcucacauc

SEQ ID NO: 1803574 - RNA, 19 nt, Artificial Sequence
  Description of Artificial Sequence: Synthetic oligonucleotide
  Antisense strand to SEQ ID NO: 1803573
gaugugagcacuuacuaaa

SEQ ID NO: 1803575 - RNA, 19 nt, Artificial Sequence
  Description of Artificial Sequence: Synthetic oligonucleotide
  Sense strand starting at position 101 of SEQ ID NO: 1563214
uuuauaagguggucacauu

SEQ ID NO: 1803576 - RNA, 19 nt, Artificial Sequence
  Description of Artificial Sequence: Synthetic oligonucleotide
  Antisense strand to SEQ ID NO: 1803575
aaugugaccaccuuauaaa

SEQ ID NO: 1803577 - RNA, 19 nt, Artificial Sequence
  Description of Artificial Sequence: Synthetic oligonucleotide
  Sense strand starting at position 127 of SEQ ID NO: 1563214
aucaguaauacguguucca

SEQ ID NO: 1803578 - RNA, 19 nt, Artificial Sequence
  Description of Artificial Sequence: Synthetic oligonucleotide
  Antisense strand to SEQ ID NO: 1803577
uggaacacguauuacugau

SEQ ID NO: 1803579 - RNA, 19 nt, Artificial Sequence
  Description of Artificial Sequence: Synthetic oligonucleotide
  Sense strand starting at position 130 of SEQ ID NO: 1563214
aguaauacguguuccauuu

SEQ ID NO: 1803580 - RNA, 19 nt, Artificial Sequence
  Description of Artificial Sequence: Synthetic oligonucleotide
  Antisense strand to SEQ ID NO: 1803579
aaauggaacacguauuacu

SEQ ID NO: 1803581 - RNA, 19 nt, Artificial Sequence
  Description of Artificial Sequence: Synthetic oligonucleotide
  Sense strand starting at position 157 of SEQ ID NO: 1563214
aagaaauuauggguaagca

SEQ ID NO: 1803582 - RNA, 19 nt, Artificial Sequence
  Description of Artificial Sequence: Synthetic oligonucleotide
  Antisense strand to SEQ ID NO: 1803581
ugcuuacccauaauuucuu

SEQ ID NO: 1803583 - RNA, 19 nt, Artificial Sequence
  Description of Artificial Sequence: Synthetic oligonucleotide
  Sense strand starting at position 161 of SEQ ID NO: 1563214
aauuauggguaagcaagaa

SEQ ID NO: 1803584 - RNA, 19 nt, Artificial Sequence
  Description of Artificial Sequence: Synthetic oligonucleotide
  Antisense strand to SEQ ID NO: 1803583
uucuugcuuacccauaauu

SEQ ID NO: 1803585 - RNA, 19 nt, Artificial Sequence
  Description of Artificial Sequence: Synthetic oligonucleotide
  Sense strand starting at position 292 of SEQ ID NO: 1563214
uuaggugcauguuuaagau

SEQ ID NO: 1803586 - RNA, 19 nt, Artificial Sequence
  Description of Artificial Sequence: Synthetic oligonucleotide
  Antisense strand to SEQ ID NO: 1803585
aucuuaaacaugcaccuaa

SEQ ID NO: 1803587 - RNA, 19 nt, Artificial Sequence
  Description of Artificial Sequence: Synthetic oligonucleotide
  Sense strand starting at position 478 of SEQ ID NO: 1563214
agaaauagguaacaucaaa

SEQ ID NO: 1803588 - RNA, 19 nt, Artificial Sequence
  Description of Artificial Sequence: Synthetic oligonucleotide
  Antisense strand to SEQ ID NO: 1803587
uuugauguuaccuauuucu

SEQ ID NO: 1803589 - RNA, 19 nt, Artificial Sequence
  Description of Artificial Sequence: Synthetic oligonucleotide
  Sense strand starting at position 495 of SEQ ID NO: 1563214
aaacguuuacgacaaaggu

SEQ ID NO: 1803590 - RNA, 19 nt, Artificial Sequence
  Description of Artificial Sequence: Synthetic oligonucleotide
  Antisense strand to SEQ ID NO: 1803589
accuuugucguaaacguuu

SEQ ID NO: 1803591 - RNA, 19 nt, Artificial Sequence
  Description of Artificial Sequence: Synthetic oligonucleotide
  Sense strand starting at position 516 of SEQ ID NO: 1563214
accacaaauguguaaguuu

SEQ ID NO: 1803592 - RNA, 19 nt, Artificial Sequence
  Description of Artificial Sequence: Synthetic oligonucleotide
  Antisense strand to SEQ ID NO: 1803591
aaacuuacacauuuguggu

SEQ ID NO: 1803593 - RNA, 19 nt, Artificial Sequence
  Description of Artificial Sequence: Synthetic oligonucleotide
  Sense strand starting at position 924 of SEQ ID NO: 1563214
ccacgaugagauuguuuaa

SEQ ID NO: 1803594 - RNA, 19 nt, Artificial Sequence
  Description of Artificial Sequence: Synthetic oligonucleotide
  Antisense strand to SEQ ID NO: 1803593
uuaaacaaucucaucgugg

SEQ ID NO: 1803595 - RNA, 19 nt, Artificial Sequence
  Description of Artificial Sequence: Synthetic oligonucleotide
  Sense strand starting at position 993 of SEQ ID NO: 1563214
gacucaauucuuggugaac

SEQ ID NO: 1803596 - RNA, 19 nt, Artificial Sequence
  Description of Artificial Sequence: Synthetic oligonucleotide
  Antisense strand to SEQ ID NO: 1803595
guucaccaagaauugaguc

SEQ ID NO: 1803597 - RNA, 19 nt, Artificial Sequence
  Description of Artificial Sequence: Synthetic oligonucleotide
  Sense strand starting at position 994 of SEQ ID NO: 1563214
acucaauucuuggugaacu

SEQ ID NO: 1803598 - RNA, 19 nt, Artificial Sequence
  Description of Artificial Sequence: Synthetic oligonucleotide
  Antisense strand to SEQ ID NO: 1803597
aguucaccaagaauugagu

SEQ ID NO: 1803599 - RNA, 19 nt, Artificial Sequence
  Description of Artificial Sequence: Synthetic oligonucleotide
  Sense strand starting at position 1968 of SEQ ID NO: 1563214
cgagguaagacucaguguu

SEQ ID NO: 1803600 - RNA, 19 nt, Artificial Sequence
  Description of Artificial Sequence: Synthetic oligonucleotide
  Antisense strand to SEQ ID NO: 1803599
aacacugagucuuaccucg

SEQ ID NO: 1803601 - RNA, 19 nt, Artificial Sequence
  Description of Artificial Sequence: Synthetic oligonucleotide
  Sense strand starting at position 2002 of SEQ ID NO: 1563214
gcuguugucaucgccagag

SEQ ID NO: 1803602 - RNA, 19 nt, Artificial Sequence
  Description of Artificial Sequence: Synthetic oligonucleotide
  Antisense strand to SEQ ID NO: 1803601
cucuggcgaugacaacagc

SEQ ID NO: 1803603 - RNA, 19 nt, Artificial Sequence
  Description of Artificial Sequence: Synthetic oligonucleotide
  Sense strand starting at position 2143 of SEQ ID NO: 1563214
cucuguauauucuugagac

SEQ ID NO: 1803604 - RNA, 19 nt, Artificial Sequence
  Description of Artificial Sequence: Synthetic oligonucleotide
  Antisense strand to SEQ ID NO: 1803603
gucucaagaauauacagag

SEQ ID NO: 1803605 - RNA, 19 nt, Artificial Sequence
  Description of Artificial Sequence: Synthetic oligonucleotide
  Sense strand starting at position 2145 of SEQ ID NO: 1563214
cuguauauucuugagacuu

SEQ ID NO: 1803606 - RNA, 19 nt, Artificial Sequence
  Description of Artificial Sequence: Synthetic oligonucleotide
  Antisense strand to SEQ ID NO: 1803605
aagucucaagaauauacag

SEQ ID NO: 1803607 - RNA, 19 nt, Artificial Sequence
  Description of Artificial Sequence: Synthetic oligonucleotide
  Sense strand starting at position 2183 of SEQ ID NO: 1563214
gacggaagguaucuucuca

SEQ ID NO: 1803608 - RNA, 19 nt, Artificial Sequence
  Description of Artificial Sequence: Synthetic oligonucleotide
  Antisense strand to SEQ ID NO: 1803607
ugagaagauaccuuccguc

SEQ ID NO: 1803609 - RNA, 19 nt, Artificial Sequence
  Description of Artificial Sequence: Synthetic oligonucleotide
  Sense strand starting at position 2187 of SEQ ID NO: 1563214
gaagguaucuucucaggga

SEQ ID NO: 1803610 - RNA, 19 nt, Artificial Sequence
  Description of Artificial Sequence: Synthetic oligonucleotide
  Antisense strand to SEQ ID NO: 1803609
ucccugagaagauaccuuc

SEQ ID NO: 1803611 - RNA, 19 nt, Artificial Sequence
  Description of Artificial Sequence: Synthetic oligonucleotide
  Sense strand starting at position 2481 of SEQ ID NO: 1563214
cgggauuaaaguugggcaa

SEQ ID NO: 1803612 - RNA, 19 nt, Artificial Sequence
  Description of Artificial Sequence: Synthetic oligonucleotide
  Antisense strand to SEQ ID NO: 1803611
uugcccaacuuuaaucccg

SEQ ID NO: 1803613 - RNA, 19 nt, Artificial Sequence
  Description of Artificial Sequence: Synthetic oligonucleotide
  Sense strand starting at position 2482 of SEQ ID NO: 1563214
gggauuaaaguugggcaaa

SEQ ID NO: 1803614 - RNA, 19 nt, Artificial Sequence
  Description of Artificial Sequence: Synthetic oligonucleotide
  Antisense strand to SEQ ID NO: 1803613
uuugcccaacuuuaauccc

SEQ ID NO: 1803615 - RNA, 19 nt, Artificial Sequence
  Description of Artificial Sequence: Synthetic oligonucleotide
  Sense strand starting at position 2514 of SEQ ID NO: 1563214
cuguccuguuaagucauua

SEQ ID NO: 1803616 - RNA, 19 nt, Artificial Sequence
  Description of Artificial Sequence: Synthetic oligonucleotide
  Antisense strand to SEQ ID NO: 1803615
uaaugacuuaacaggacag

SEQ ID NO: 1803617 - RNA, 19 nt, Artificial Sequence
  Description of Artificial Sequence: Synthetic oligonucleotide
  Sense strand starting at position 2518 of SEQ ID NO: 1563214
ccuguuaagucauuauaua

SEQ ID NO: 1803618 - RNA, 19 nt, Artificial Sequence
  Description of Artificial Sequence: Synthetic oligonucleotide
  Antisense strand to SEQ ID NO: 1803617
uauauaaugacuuaacagg

SEQ ID NO: 1803619 - RNA, 19 nt, Artificial Sequence
  Description of Artificial Sequence: Synthetic oligonucleotide
  Sense strand starting at position 2732 of SEQ ID NO: 1563214
aaacgauaaguaugucuuu

SEQ ID NO: 1803620 - RNA, 19 nt, Artificial Sequence
  Description of Artificial Sequence: Synthetic oligonucleotide
  Antisense strand to SEQ ID NO: 1803619
aaagacauacuuaucguuu

SEQ ID NO: 1803621 - RNA, 19 nt, Artificial Sequence
  Description of Artificial Sequence: Synthetic oligonucleotide
  Sense strand starting at position 2733 of SEQ ID NO: 1563214
aacgauaaguaugucuuua

SEQ ID NO: 1803622 - RNA, 19 nt, Artificial Sequence
  Description of Artificial Sequence: Synthetic oligonucleotide
  Antisense strand to SEQ ID NO: 1803621
uaaagacauacuuaucguu

SEQ ID NO: 1803623 - RNA, 19 nt, Artificial Sequence
  Description of Artificial Sequence: Synthetic oligonucleotide
  Sense strand starting at position 2735 of SEQ ID NO: 1563214
cgauaaguaugucuuuauu

SEQ ID NO: 1803624 - RNA, 19 nt, Artificial Sequence
  Description of Artificial Sequence: Synthetic oligonucleotide
  Antisense strand to SEQ ID NO: 1803623
aauaaagacauacuuaucg

SEQ ID NO: 1803625 - RNA, 19 nt, Artificial Sequence
  Description of Artificial Sequence: Synthetic oligonucleotide
  Sense strand starting at position 2784 of SEQ ID NO: 1563214
uccagagacaucuacggua

SEQ ID NO: 1803626 - RNA, 19 nt, Artificial Sequence
  Description of Artificial Sequence: Synthetic oligonucleotide
  Antisense strand to SEQ ID NO: 1803625
uaccguagaugucucugga

SEQ ID NO: 1803627 - RNA, 19 nt, Artificial Sequence
  Description of Artificial Sequence: Synthetic oligonucleotide
  Sense strand starting at position 2786 of SEQ ID NO: 1563214
cagagacaucuacgguaaa

SEQ ID NO: 1803628 - RNA, 19 nt, Artificial Sequence
  Description of Artificial Sequence: Synthetic oligonucleotide
  Antisense strand to SEQ ID NO: 1803627
uuuaccguagaugucucug

SEQ ID NO: 1803629 - RNA, 19 nt, Artificial Sequence
  Description of Artificial Sequence: Synthetic oligonucleotide
  Sense strand starting at position 3210 of SEQ ID NO: 1563214
ggauccuaggccuaaaugu

SEQ ID NO: 1803630 - RNA, 19 nt, Artificial Sequence
  Description of Artificial Sequence: Synthetic oligonucleotide
  Antisense strand to SEQ ID NO: 1803629
acauuuaggccuaggaucc

SEQ ID NO: 1803631 - RNA, 19 nt, Artificial Sequence
  Description of Artificial Sequence: Synthetic oligonucleotide
  Sense strand starting at position 3430 of SEQ ID NO: 1563214
guauuuguaucugacaaug

SEQ ID NO: 1803632 - RNA, 19 nt, Artificial Sequence
  Description of Artificial Sequence: Synthetic oligonucleotide
  Antisense strand to SEQ ID NO: 1803631
cauugucagauacaaauac

SEQ ID NO: 1803633 - RNA, 19 nt, Artificial Sequence
  Description of Artificial Sequence: Synthetic oligonucleotide
  Sense strand starting at position 3432 of SEQ ID NO: 1563214
auuuguaucugacaauggu

SEQ ID NO: 1803634 - RNA, 19 nt, Artificial Sequence
  Description of Artificial Sequence: Synthetic oligonucleotide
  Antisense strand to SEQ ID NO: 1803633
accauugucagauacaaau

SEQ ID NO: 1803635 - RNA, 19 nt, Artificial Sequence
  Description of Artificial Sequence: Synthetic oligonucleotide
  Sense strand starting at position 3596 of SEQ ID NO: 1563214
cucauuaacuaucagggaa

SEQ ID NO: 1803636 - RNA, 19 nt, Artificial Sequence
  Description of Artificial Sequence: Synthetic oligonucleotide
  Antisense strand to SEQ ID NO: 1803635
uucccugauaguuaaugag

SEQ ID NO: 1803637 - RNA, 19 nt, Artificial Sequence
  Description of Artificial Sequence: Synthetic oligonucleotide
  Sense strand starting at position 3666 of SEQ ID NO: 1563214
gaacuuaaagucugacagu

SEQ ID NO: 1803638 - RNA, 19 nt, Artificial Sequence
  Description of Artificial Sequence: Synthetic oligonucleotide
  Antisense strand to SEQ ID NO: 1803637
acugucagacuuuaaguuc

SEQ ID NO: 1803639 - RNA, 19 nt, Artificial Sequence
  Description of Artificial Sequence: Synthetic oligonucleotide
  Sense strand starting at position 3714 of SEQ ID NO: 1563214
agaaacucucacugauugu

SEQ ID NO: 1803640 - RNA, 19 nt, Artificial Sequence
  Description of Artificial Sequence: Synthetic oligonucleotide
  Antisense strand to SEQ ID NO: 1803639
acaaucagugagaguuucu

SEQ ID NO: 1803641 - RNA, 19 nt, Artificial Sequence
  Description of Artificial Sequence: Synthetic oligonucleotide
  Sense strand starting at position 3723 of SEQ ID NO: 1563214
cacugauuguuggugagaa

SEQ ID NO: 1803642 - RNA, 19 nt, Artificial Sequence
  Description of Artificial Sequence: Synthetic oligonucleotide
  Antisense strand to SEQ ID NO: 1803641
uucucaccaacaaucagug

SEQ ID NO: 1803643 - RNA, 19 nt, Artificial Sequence
  Description of Artificial Sequence: Synthetic oligonucleotide
  Sense strand starting at position 3725 of SEQ ID NO: 1563214
cugauuguuggugagaagu

SEQ ID NO: 1803644 - RNA, 19 nt, Artificial Sequence
  Description of Artificial Sequence: Synthetic oligonucleotide
  Antisense strand to SEQ ID NO: 1803643
acuucucaccaacaaucag

SEQ ID NO: 1803645 - RNA, 19 nt, Artificial Sequence
  Description of Artificial Sequence: Synthetic oligonucleotide
  Sense strand starting at position 32 of SEQ ID NO: 1563215
ugucacaaguguuuaguaa

SEQ ID NO: 1803646 - RNA, 19 nt, Artificial Sequence
  Description of Artificial Sequence: Synthetic oligonucleotide
  Antisense strand to SEQ ID NO: 1803645
uuacuaaacacuugugaca

SEQ ID NO: 1803647 - RNA, 19 nt, Artificial Sequence
  Description of Artificial Sequence: Synthetic oligonucleotide
  Sense strand starting at position 33 of SEQ ID NO: 1563215
gucacaaguguuuaguaag

SEQ ID NO: 1803648 - RNA, 19 nt, Artificial Sequence
  Description of Artificial Sequence: Synthetic oligonucleotide
  Antisense strand to SEQ ID NO: 1803647
cuuacuaaacacuugugac

SEQ ID NO: 1803649 - RNA, 19 nt, Artificial Sequence
  Description of Artificial Sequence: Synthetic oligonucleotide
  Sense strand starting at position 43 of SEQ ID NO: 1563215
uuuaguaagugcucacauc

SEQ ID NO: 1803650 - RNA, 19 nt, Artificial Sequence
  Description of Artificial Sequence: Synthetic oligonucleotide
  Antisense strand to SEQ ID NO: 1803649
gaugugagcacuuacuaaa

SEQ ID NO: 1803651 - RNA, 19 nt, Artificial Sequence
  Description of Artificial Sequence: Synthetic oligonucleotide
  Sense strand starting at position 65 of SEQ ID NO: 1563215
uuuauaagguggucacauu

SEQ ID NO: 1803652 - RNA, 19 nt, Artificial Sequence
  Description of Artificial Sequence: Synthetic oligonucleotide
  Antisense strand to SEQ ID NO: 1803651
aaugugaccaccuuauaaa

SEQ ID NO: 1803653 - RNA, 19 nt, Artificial Sequence
  Description of Artificial Sequence: Synthetic oligonucleotide
  Sense strand starting at position 91 of SEQ ID NO: 1563215
aucaguaauacguguucca

SEQ ID NO: 1803654 - RNA, 19 nt, Artificial Sequence
  Description of Artificial Sequence: Synthetic oligonucleotide
  Antisense strand to SEQ ID NO: 1803653
uggaacacguauuacugau

SEQ ID NO: 1803655 - RNA, 19 nt, Artificial Sequence
  Description of Artificial Sequence: Synthetic oligonucleotide
  Sense strand starting at position 94 of SEQ ID NO: 1563215
aguaauacguguuccauuu

SEQ ID NO: 1803656 - RNA, 19 nt, Artificial Sequence
  Description of Artificial Sequence: Synthetic oligonucleotide
  Antisense strand to SEQ ID NO: 1803655
aaauggaacacguauuacu

SEQ ID NO: 1803657 - RNA, 19 nt, Artificial Sequence
  Description of Artificial Sequence: Synthetic oligonucleotide
  Sense strand starting at position 119 of SEQ ID NO: 1563215
auaagaaauuauggguaag

SEQ ID NO: 1803658 - RNA, 19 nt, Artificial Sequence
  Description of Artificial Sequence: Synthetic oligonucleotide
  Antisense strand to SEQ ID NO: 1803657
cuuacccauaauuucuuau

SEQ ID NO: 1803659 - RNA, 19 nt, Artificial Sequence
  Description of Artificial Sequence: Synthetic oligonucleotide
  Sense strand starting at position 121 of SEQ ID NO: 1563215
aagaaauuauggguaagca

SEQ ID NO: 1803660 - RNA, 19 nt, Artificial Sequence
  Description of Artificial Sequence: Synthetic oligonucleotide
  Antisense strand to SEQ ID NO: 1803659
ugcuuacccauaauuucuu

SEQ ID NO: 1803661 - RNA, 19 nt, Artificial Sequence
  Description of Artificial Sequence: Synthetic oligonucleotide
  Sense strand starting at position 125 of SEQ ID NO: 1563215
aauuauggguaagcaagaa

SEQ ID NO: 1803662 - RNA, 19 nt, Artificial Sequence
  Description of Artificial Sequence: Synthetic oligonucleotide
  Antisense strand to SEQ ID NO: 1803661
uucuugcuuacccauaauu

SEQ ID NO: 1803663 - RNA, 19 nt, Artificial Sequence
  Description of Artificial Sequence: Synthetic oligonucleotide
  Sense strand starting at position 256 of SEQ ID NO: 1563215
uuaggugcauguuuaagau

SEQ ID NO: 1803664 - RNA, 19 nt, Artificial Sequence
  Description of Artificial Sequence: Synthetic oligonucleotide
  Antisense strand to SEQ ID NO: 1803663
aucuuaaacaugcaccuaa

SEQ ID NO: 1803665 - RNA, 19 nt, Artificial Sequence
  Description of Artificial Sequence: Synthetic oligonucleotide
  Sense strand starting at position 442 of SEQ ID NO: 1563215
agaaauagguaacaucaaa

SEQ ID NO: 1803666 - RNA, 19 nt, Artificial Sequence
  Description of Artificial Sequence: Synthetic oligonucleotide
  Antisense strand to SEQ ID NO: 1803665
uuugauguuaccuauuucu

SEQ ID NO: 1803667 - RNA, 19 nt, Artificial Sequence
  Description of Artificial Sequence: Synthetic oligonucleotide
  Sense strand starting at position 459 of SEQ ID NO: 1563215
aaacguuuacgacaaaggu

SEQ ID NO: 1803668 - RNA, 19 nt, Artificial Sequence
  Description of Artificial Sequence: Synthetic oligonucleotide
  Antisense strand to SEQ ID NO: 1803667
accuuugucguaaacguuu

SEQ ID NO: 1803669 - RNA, 19 nt, Artificial Sequence
  Description of Artificial Sequence: Synthetic oligonucleotide
  Sense strand starting at position 480 of SEQ ID NO: 1563215
accacaaauguguaaguuu

SEQ ID NO: 1803670 - RNA, 19 nt, Artificial Sequence
  Description of Artificial Sequence: Synthetic oligonucleotide
  Antisense strand to SEQ ID NO: 1803669
aaacuuacacauuuguggu

SEQ ID NO: 1803671 - RNA, 19 nt, Artificial Sequence
  Description of Artificial Sequence: Synthetic oligonucleotide
  Sense strand starting at position 888 of SEQ ID NO: 1563215
ccacgaugagauuguuuaa

SEQ ID NO: 1803672 - RNA, 19 nt, Artificial Sequence
  Description of Artificial Sequence: Synthetic oligonucleotide
  Antisense strand to SEQ ID NO: 1803671
uuaaacaaucucaucgugg

SEQ ID NO: 1803673 - RNA, 19 nt, Artificial Sequence
  Description of Artificial Sequence: Synthetic oligonucleotide
  Sense strand starting at position 957 of SEQ ID NO: 1563215
gacucaauucuuggugaac

SEQ ID NO: 1803674 - RNA, 19 nt, Artificial Sequence
  Description of Artificial Sequence: Synthetic oligonucleotide
  Antisense strand to SEQ ID NO: 1803673
guucaccaagaauugaguc

SEQ ID NO: 1803675 - RNA, 19 nt, Artificial Sequence
  Description of Artificial Sequence: Synthetic oligonucleotide
  Sense strand starting at position 958 of SEQ ID NO: 1563215
acucaauucuuggugaacu

SEQ ID NO: 1803676 - RNA, 19 nt, Artificial Sequence
  Description of Artificial Sequence: Synthetic oligonucleotide
  Antisense strand to SEQ ID NO: 1803675
aguucaccaagaauugagu

SEQ ID NO: 1803677 - RNA, 19 nt, Artificial Sequence
  Description of Artificial Sequence: Synthetic oligonucleotide
  Sense strand starting at position 1932 of SEQ ID NO: 1563215
cgagguaagacucaguguu

SEQ ID NO: 1803678 - RNA, 19 nt, Artificial Sequence
  Description of Artificial Sequence: Synthetic oligonucleotide
  Antisense strand to SEQ ID NO: 1803677
aacacugagucuuaccucg

SEQ ID NO: 1803679 - RNA, 19 nt, Artificial Sequence
  Description of Artificial Sequence: Synthetic oligonucleotide
  Sense strand starting at position 1966 of SEQ ID NO: 1563215
gcuguugucaucgccagag

SEQ ID NO: 1803680 - RNA, 19 nt, Artificial Sequence
  Description of Artificial Sequence: Synthetic oligonucleotide
  Antisense strand to SEQ ID NO: 1803679
cucuggcgaugacaacagc

SEQ ID NO: 1803681 - RNA, 19 nt, Artificial Sequence
  Description of Artificial Sequence: Synthetic oligonucleotide
  Sense strand starting at position 2107 of SEQ ID NO: 1563215
cucuguauauucuugagac

SEQ ID NO: 1803682 - RNA, 19 nt, Artificial Sequence
  Description of Artificial Sequence: Synthetic oligonucleotide
  Antisense strand to SEQ ID NO: 1803681
gucucaagaauauacagag

SEQ ID NO: 1803683 - RNA, 19 nt, Artificial Sequence
  Description of Artificial Sequence: Synthetic oligonucleotide
  Sense strand starting at position 2109 of SEQ ID NO: 1563215
cuguauauucuugagacuu

SEQ ID NO: 1803684 - RNA, 19 nt, Artificial Sequence
  Description of Artificial Sequence: Synthetic oligonucleotide
  Antisense strand to SEQ ID NO: 1803683
aagucucaagaauauacag

SEQ ID NO: 1803685 - RNA, 19 nt, Artificial Sequence
  Description of Artificial Sequence: Synthetic oligonucleotide
  Sense strand starting at position 2147 of SEQ ID NO: 1563215
gacggaagguaucuucuca

SEQ ID NO: 1803686 - RNA, 19 nt, Artificial Sequence
  Description of Artificial Sequence: Synthetic oligonucleotide
  Antisense strand to SEQ ID NO: 1803685
ugagaagauaccuuccguc

SEQ ID NO: 1803687 - RNA, 19 nt, Artificial Sequence
  Description of Artificial Sequence: Synthetic oligonucleotide
  Sense strand starting at position 2151 of SEQ ID NO: 1563215
gaagguaucuucucaggga

SEQ ID NO: 1803688 - RNA, 19 nt, Artificial Sequence
  Description of Artificial Sequence: Synthetic oligonucleotide
  Antisense strand to SEQ ID NO: 1803687
ucccugagaagauaccuuc

SEQ ID NO: 1803689 - RNA, 19 nt, Artificial Sequence
  Description of Artificial Sequence: Synthetic oligonucleotide
  Sense strand starting at position 2445 of SEQ ID NO: 1563215
cgggauuaaaguugggcaa

SEQ ID NO: 1803690 - RNA, 19 nt, Artificial Sequence
  Description of Artificial Sequence: Synthetic oligonucleotide
  Antisense strand to SEQ ID NO: 1803689
uugcccaacuuuaaucccg

SEQ ID NO: 1803691 - RNA, 19 nt, Artificial Sequence
  Description of Artificial Sequence: Synthetic oligonucleotide
  Sense strand starting at position 2446 of SEQ ID NO: 1563215
gggauuaaaguugggcaaa

SEQ ID NO: 1803692 - RNA, 19 nt, Artificial Sequence
  Description of Artificial Sequence: Synthetic oligonucleotide
  Antisense strand to SEQ ID NO: 1803691
uuugcccaacuuuaauccc

SEQ ID NO: 1803693 - RNA, 19 nt, Artificial Sequence
  Description of Artificial Sequence: Synthetic oligonucleotide
  Sense strand starting at position 2478 of SEQ ID NO: 1563215
cuguccuguuaagucauua

SEQ ID NO: 1803694 - RNA, 19 nt, Artificial Sequence
  Description of Artificial Sequence: Synthetic oligonucleotide
  Antisense strand to SEQ ID NO: 1803693
uaaugacuuaacaggacag

SEQ ID NO: 1803695 - RNA, 19 nt, Artificial Sequence
  Description of Artificial Sequence: Synthetic oligonucleotide
  Sense strand starting at position 2482 of SEQ ID NO: 1563215
ccuguuaagucauuauaua

SEQ ID NO: 1803696 - RNA, 19 nt, Artificial Sequence
  Description of Artificial Sequence: Synthetic oligonucleotide
  Antisense strand to SEQ ID NO: 1803695
uauauaaugacuuaacagg

SEQ ID NO: 1803697 - RNA, 19 nt, Artificial Sequence
  Description of Artificial Sequence: Synthetic oligonucleotide
  Sense strand starting at position 2696 of SEQ ID NO: 1563215
aaacgauaaguaugucuuu

SEQ ID NO: 1803698 - RNA, 19 nt, Artificial Sequence
  Description of Artificial Sequence: Synthetic oligonucleotide
  Antisense strand to SEQ ID NO: 1803697
aaagacauacuuaucguuu

SEQ ID NO: 1803699 - RNA, 19 nt, Artificial Sequence
  Description of Artificial Sequence: Synthetic oligonucleotide
  Sense strand starting at position 2697 of SEQ ID NO: 1563215
aacgauaaguaugucuuua

SEQ ID NO: 1803700 - RNA, 19 nt, Artificial Sequence
  Description of Artificial Sequence: Synthetic oligonucleotide
  Antisense strand to SEQ ID NO: 1803699
uaaagacauacuuaucguu

SEQ ID NO: 1803701 - RNA, 19 nt, Artificial Sequence
  Description of Artificial Sequence: Synthetic oligonucleotide
  Sense strand starting at position 2699 of SEQ ID NO: 1563215
cgauaaguaugucuuuauu

SEQ ID NO: 1803702 - RNA, 19 nt, Artificial Sequence
  Description of Artificial Sequence: Synthetic oligonucleotide
  Antisense strand to SEQ ID NO: 1803701
aauaaagacauacuuaucg

SEQ ID NO: 1803703 - RNA, 19 nt, Artificial Sequence
  Description of Artificial Sequence: Synthetic oligonucleotide
  Sense strand starting at position 2748 of SEQ ID NO: 1563215
uccagagacaucuacggua

SEQ ID NO: 1803704 - RNA, 19 nt, Artificial Sequence
  Description of Artificial Sequence: Synthetic oligonucleotide
  Antisense strand to SEQ ID NO: 1803703
uaccguagaugucucugga

SEQ ID NO: 1803705 - RNA, 19 nt, Artificial Sequence
  Description of Artificial Sequence: Synthetic oligonucleotide
  Sense strand starting at position 2750 of SEQ ID NO: 1563215
cagagacaucuacgguaaa

SEQ ID NO: 1803706 - RNA, 19 nt, Artificial Sequence
  Description of Artificial Sequence: Synthetic oligonucleotide
  Antisense strand to SEQ ID NO: 1803705
uuuaccguagaugucucug

SEQ ID NO: 1803707 - RNA, 19 nt, Artificial Sequence
  Description of Artificial Sequence: Synthetic oligonucleotide
  Sense strand starting at position 3013 of SEQ ID NO: 1563215
acccauacguauguuguua

SEQ ID NO: 1803708 - RNA, 19 nt, Artificial Sequence
  Description of Artificial Sequence: Synthetic oligonucleotide
  Antisense strand to SEQ ID NO: 1803707
uaacaacauacguaugggu

SEQ ID NO: 1803709 - RNA, 19 nt, Artificial Sequence
  Description of Artificial Sequence: Synthetic oligonucleotide
  Sense strand starting at position 3174 of SEQ ID NO: 1563215
ggauccuaggccuaaaugu

SEQ ID NO: 1803710 - RNA, 19 nt, Artificial Sequence
  Description of Artificial Sequence: Synthetic oligonucleotide
  Antisense strand to SEQ ID NO: 1803709
acauuuaggccuaggaucc

SEQ ID NO: 1803711 - RNA, 19 nt, Artificial Sequence
  Description of Artificial Sequence: Synthetic oligonucleotide
  Sense strand starting at position 3394 of SEQ ID NO: 1563215
guauuuguaucugacaaug

SEQ ID NO: 1803712 - RNA, 19 nt, Artificial Sequence
  Description of Artificial Sequence: Synthetic oligonucleotide
  Antisense strand to SEQ ID NO: 1803711
cauugucagauacaaauac

SEQ ID NO: 1803713 - RNA, 19 nt, Artificial Sequence
  Description of Artificial Sequence: Synthetic oligonucleotide
  Sense strand starting at position 3396 of SEQ ID NO: 1563215
auuuguaucugacaauggu

SEQ ID NO: 1803714 - RNA, 19 nt, Artificial Sequence
  Description of Artificial Sequence: Synthetic oligonucleotide
  Antisense strand to SEQ ID NO: 1803713
accauugucagauacaaau

SEQ ID NO: 1803715 - RNA, 19 nt, Artificial Sequence
  Description of Artificial Sequence: Synthetic oligonucleotide
  Sense strand starting at position 3560 of SEQ ID NO: 1563215
cucauuaacuaucagggaa

SEQ ID NO: 1803716 - RNA, 19 nt, Artificial Sequence
  Description of Artificial Sequence: Synthetic oligonucleotide
  Antisense strand to SEQ ID NO: 1803715
uucccugauaguuaaugag

SEQ ID NO: 1803717 - RNA, 19 nt, Artificial Sequence
  Description of Artificial Sequence: Synthetic oligonucleotide
  Sense strand starting at position 3630 of SEQ ID NO: 1563215
gaacuuaaagucugacagu

SEQ ID NO: 1803718 - RNA, 19 nt, Artificial Sequence
  Description of Artificial Sequence: Synthetic oligonucleotide
  Antisense strand to SEQ ID NO: 1803717
acugucagacuuuaaguuc

SEQ ID NO: 1803719 - RNA, 19 nt, Artificial Sequence
  Description of Artificial Sequence: Synthetic oligonucleotide
  Sense strand starting at position 3678 of SEQ ID NO: 1563215
agaaacucucacugauugu

SEQ ID NO: 1803720 - RNA, 19 nt, Artificial Sequence
  Description of Artificial Sequence: Synthetic oligonucleotide
  Antisense strand to SEQ ID NO: 1803719
acaaucagugagaguuucu

SEQ ID NO: 1803721 - RNA, 19 nt, Artificial Sequence
  Description of Artificial Sequence: Synthetic oligonucleotide
  Sense strand starting at position 3687 of SEQ ID NO: 1563215
cacugauuguuggugagaa

SEQ ID NO: 1803722 - RNA, 19 nt, Artificial Sequence
  Description of Artificial Sequence: Synthetic oligonucleotide
  Antisense strand to SEQ ID NO: 1803721
uucucaccaacaaucagug

SEQ ID NO: 1803723 - RNA, 19 nt, Artificial Sequence
  Description of Artificial Sequence: Synthetic oligonucleotide
  Sense strand starting at position 3689 of SEQ ID NO: 1563215
cugauuguuggugagaagu

SEQ ID NO: 1803724 - RNA, 19 nt, Artificial Sequence
  Description of Artificial Sequence: Synthetic oligonucleotide
  Antisense strand to SEQ ID NO: 1803723
acuucucaccaacaaucag

SEQ ID NO: 1803725 - RNA, 19 nt, Artificial Sequence
  Description of Artificial Sequence: Synthetic oligonucleotide
  Sense strand starting at position 934 of SEQ ID NO: 1563216
cuccauuacuccuaggaga

SEQ ID NO: 1803726 - RNA, 19 nt, Artificial Sequence
  Description of Artificial Sequence: Synthetic oligonucleotide
  Antisense strand to SEQ ID NO: 1803725
ucuccuaggaguaauggag

SEQ ID NO: 1803727 - RNA, 19 nt, Artificial Sequence
  Description of Artificial Sequence: Synthetic oligonucleotide
  Sense strand starting at position 936 of SEQ ID NO: 1563216
ccauuacuccuaggagaca

SEQ ID NO: 1803728 - RNA, 19 nt, Artificial Sequence
  Description of Artificial Sequence: Synthetic oligonucleotide
  Antisense strand to SEQ ID NO: 1803727
ugucuccuaggaguaaugg

SEQ ID NO: 1803729 - RNA, 19 nt, Artificial Sequence
  Description of Artificial Sequence: Synthetic oligonucleotide
  Sense strand starting at position 969 of SEQ ID NO: 1563216
ggcugaauucuugguggac

SEQ ID NO: 1803730 - RNA, 19 nt, Artificial Sequence
  Description of Artificial Sequence: Synthetic oligonucleotide
  Antisense strand to SEQ ID NO: 1803729
guccaccaagaauucagcc

SEQ ID NO: 1803731 - RNA, 19 nt, Artificial Sequence
  Description of Artificial Sequence: Synthetic oligonucleotide
  Sense strand starting at position 970 of SEQ ID NO: 1563216
gcugaauucuugguggacu

SEQ ID NO: 1803732 - RNA, 19 nt, Artificial Sequence
  Description of Artificial Sequence: Synthetic oligonucleotide
  Antisense strand to SEQ ID NO: 1803731
aguccaccaagaauucagc

SEQ ID NO: 1803733 - RNA, 19 nt, Artificial Sequence
  Description of Artificial Sequence: Synthetic oligonucleotide
  Sense strand starting at position 972 of SEQ ID NO: 1563216
ugaauucuugguggacuga

SEQ ID NO: 1803734 - RNA, 19 nt, Artificial Sequence
  Description of Artificial Sequence: Synthetic oligonucleotide
  Antisense strand to SEQ ID NO: 1803733
ucaguccaccaagaauuca

SEQ ID NO: 1803735 - RNA, 19 nt, Artificial Sequence
  Description of Artificial Sequence: Synthetic oligonucleotide
  Sense strand starting at position 1646 of SEQ ID NO: 1563216
guguuuccgaagggucgua

SEQ ID NO: 1803736 - RNA, 19 nt, Artificial Sequence
  Description of Artificial Sequence: Synthetic oligonucleotide
  Antisense strand to SEQ ID NO: 1803735
uacgacccuucggaaacac

SEQ ID NO: 1803737 - RNA, 19 nt, Artificial Sequence
  Description of Artificial Sequence: Synthetic oligonucleotide
  Sense strand starting at position 1756 of SEQ ID NO: 1563216
gaccgauugcuucuccgca

SEQ ID NO: 1803738 - RNA, 19 nt, Artificial Sequence
  Description of Artificial Sequence: Synthetic oligonucleotide
  Antisense strand to SEQ ID NO: 1803737
ugcggagaagcaaucgguc

SEQ ID NO: 1803739 - RNA, 19 nt, Artificial Sequence
  Description of Artificial Sequence: Synthetic oligonucleotide
  Sense strand starting at position 2142 of SEQ ID NO: 1563216
cucuccugucuuuguguau

SEQ ID NO: 1803740 - RNA, 19 nt, Artificial Sequence
  Description of Artificial Sequence: Synthetic oligonucleotide
  Antisense strand to SEQ ID NO: 1803739
auacacaaagacaggagag

SEQ ID NO: 1803741 - RNA, 19 nt, Artificial Sequence
  Description of Artificial Sequence: Synthetic oligonucleotide
  Sense strand starting at position 2143 of SEQ ID NO: 1563216
ucuccugucuuuguguauu

SEQ ID NO: 1803742 - RNA, 19 nt, Artificial Sequence
  Description of Artificial Sequence: Synthetic oligonucleotide
  Antisense strand to SEQ ID NO: 1803741
aauacacaaagacaggaga

SEQ ID NO: 1803743 - RNA, 19 nt, Artificial Sequence
  Description of Artificial Sequence: Synthetic oligonucleotide
  Sense strand starting at position 2146 of SEQ ID NO: 1563216
ccugucuuuguguauucuu

SEQ ID NO: 1803744 - RNA, 19 nt, Artificial Sequence
  Description of Artificial Sequence: Synthetic oligonucleotide
  Antisense strand to SEQ ID NO: 1803743
aagaauacacaaagacagg

SEQ ID NO: 1803745 - RNA, 19 nt, Artificial Sequence
  Description of Artificial Sequence: Synthetic oligonucleotide
  Sense strand starting at position 2187 of SEQ ID NO: 1563216
gagggaagcugucuucuca

SEQ ID NO: 1803746 - RNA, 19 nt, Artificial Sequence
  Description of Artificial Sequence: Synthetic oligonucleotide
  Antisense strand to SEQ ID NO: 1803745
ugagaagacagcuucccuc

SEQ ID NO: 1803747 - RNA, 19 nt, Artificial Sequence
  Description of Artificial Sequence: Synthetic oligonucleotide
  Sense strand starting at position 2191 of SEQ ID NO: 1563216
gaagcugucuucucaggga

SEQ ID NO: 1803748 - RNA, 19 nt, Artificial Sequence
  Description of Artificial Sequence: Synthetic oligonucleotide
  Antisense strand to SEQ ID NO: 1803747
ucccugagaagacagcuuc

SEQ ID NO: 1803749 - RNA, 19 nt, Artificial Sequence
  Description of Artificial Sequence: Synthetic oligonucleotide
  Sense strand starting at position 2394 of SEQ ID NO: 1563216
ugaugagcaagaugucaaa

SEQ ID NO: 1803750 - RNA, 19 nt, Artificial Sequence
  Description of Artificial Sequence: Synthetic oligonucleotide
  Antisense strand to SEQ ID NO: 1803749
uuugacaucuugcucauca

SEQ ID NO: 1803751 - RNA, 19 nt, Artificial Sequence
  Description of Artificial Sequence: Synthetic oligonucleotide
  Sense strand starting at position 2885 of SEQ ID NO: 1563216
agaaacagucuuuauaguu

SEQ ID NO: 1803752 - RNA, 19 nt, Artificial Sequence
  Description of Artificial Sequence: Synthetic oligonucleotide
  Antisense strand to SEQ ID NO: 1803751
aacuauaaagacuguuucu

SEQ ID NO: 1803753 - RNA, 19 nt, Artificial Sequence
  Description of Artificial Sequence: Synthetic oligonucleotide
  Sense strand starting at position 2951 of SEQ ID NO: 1563216
ggaauaguauaaugcaaac

SEQ ID NO: 1803754 - RNA, 19 nt, Artificial Sequence
  Description of Artificial Sequence: Synthetic oligonucleotide
  Antisense strand to SEQ ID NO: 1803753
guuugcauuauacuauucc

SEQ ID NO: 1803755 - RNA, 19 nt, Artificial Sequence
  Description of Artificial Sequence: Synthetic oligonucleotide
  Sense strand starting at position 2973 of SEQ ID NO: 1563216
auguacuaguccucacuca

SEQ ID NO: 1803756 - RNA, 19 nt, Artificial Sequence
  Description of Artificial Sequence: Synthetic oligonucleotide
  Antisense strand to SEQ ID NO: 1803755
ugagugaggacuaguacau

SEQ ID NO: 1803757 - RNA, 19 nt, Artificial Sequence
  Description of Artificial Sequence: Synthetic oligonucleotide
  Sense strand starting at position 3021 of SEQ ID NO: 1563216
cuuauuucgucuuuaucuu

SEQ ID NO: 1803758 - RNA, 19 nt, Artificial Sequence
  Description of Artificial Sequence: Synthetic oligonucleotide
  Antisense strand to SEQ ID NO: 1803757
aagauaaagacgaaauaag

SEQ ID NO: 1803759 - RNA, 19 nt, Artificial Sequence
  Description of Artificial Sequence: Synthetic oligonucleotide
  Sense strand starting at position 3162 of SEQ ID NO: 1563216
acaauacuguugucacauu

SEQ ID NO: 1803760 - RNA, 19 nt, Artificial Sequence
  Description of Artificial Sequence: Synthetic oligonucleotide
  Antisense strand to SEQ ID NO: 1803759
aaugugacaacaguauugu

SEQ ID NO: 1803761 - RNA, 19 nt, Artificial Sequence
  Description of Artificial Sequence: Synthetic oligonucleotide
  Sense strand starting at position 3298 of SEQ ID NO: 1563216
uuugauugguugccaaauu

SEQ ID NO: 1803762 - RNA, 19 nt, Artificial Sequence
  Description of Artificial Sequence: Synthetic oligonucleotide
  Antisense strand to SEQ ID NO: 1803761
aauuuggcaaccaaucaaa

SEQ ID NO: 1803763 - RNA, 19 nt, Artificial Sequence
  Description of Artificial Sequence: Synthetic oligonucleotide
  Sense strand starting at position 3299 of SEQ ID NO: 1563216
uugauugguugccaaauuu

SEQ ID NO: 1803764 - RNA, 19 nt, Artificial Sequence
  Description of Artificial Sequence: Synthetic oligonucleotide
  Antisense strand to SEQ ID NO: 1803763
aaauuuggcaaccaaucaa

SEQ ID NO: 1803765 - RNA, 19 nt, Artificial Sequence
  Description of Artificial Sequence: Synthetic oligonucleotide
  Sense strand starting at position 3379 of SEQ ID NO: 1563216
auagucauuuguucuguau

SEQ ID NO: 1803766 - RNA, 19 nt, Artificial Sequence
  Description of Artificial Sequence: Synthetic oligonucleotide
  Antisense strand to SEQ ID NO: 1803765
auacagaacaaaugacuau

SEQ ID NO: 1803767 - RNA, 19 nt, Artificial Sequence
  Description of Artificial Sequence: Synthetic oligonucleotide
  Sense strand starting at position 3381 of SEQ ID NO: 1563216
agucauuuguucuguauuu

SEQ ID NO: 1803768 - RNA, 19 nt, Artificial Sequence
  Description of Artificial Sequence: Synthetic oligonucleotide
  Antisense strand to SEQ ID NO: 1803767
aaauacagaacaaaugacu

SEQ ID NO: 1803769 - RNA, 19 nt, Artificial Sequence
  Description of Artificial Sequence: Synthetic oligonucleotide
  Sense strand starting at position 3420 of SEQ ID NO: 1563216
uggugucauuaacacauua

SEQ ID NO: 1803770 - RNA, 19 nt, Artificial Sequence
  Description of Artificial Sequence: Synthetic oligonucleotide
  Antisense strand to SEQ ID NO: 1803769
uaauguguuaaugacacca

SEQ ID NO: 1803771 - RNA, 19 nt, Artificial Sequence
  Description of Artificial Sequence: Synthetic oligonucleotide
  Sense strand starting at position 3455 of SEQ ID NO: 1563216
uuccuauaagaugguaacu

SEQ ID NO: 1803772 - RNA, 19 nt, Artificial Sequence
  Description of Artificial Sequence: Synthetic oligonucleotide
  Antisense strand to SEQ ID NO: 1803771
aguuaccaucuuauaggaa

SEQ ID NO: 1803773 - RNA, 19 nt, Artificial Sequence
  Description of Artificial Sequence: Synthetic oligonucleotide
  Sense strand starting at position 3457 of SEQ ID NO: 1563216
ccuauaagaugguaacuaa

SEQ ID NO: 1803774 - RNA, 19 nt, Artificial Sequence
  Description of Artificial Sequence: Synthetic oligonucleotide
  Antisense strand to SEQ ID NO: 1803773
uuaguuaccaucuuauagg

SEQ ID NO: 1803775 - RNA, 19 nt, Artificial Sequence
  Description of Artificial Sequence: Synthetic oligonucleotide
  Sense strand starting at position 3464 of SEQ ID NO: 1563216
gaugguaacuaauucuaga

SEQ ID NO: 1803776 - RNA, 19 nt, Artificial Sequence
  Description of Artificial Sequence: Synthetic oligonucleotide
  Antisense strand to SEQ ID NO: 1803775
ucuagaauuaguuaccauc

SEQ ID NO: 1803777 - RNA, 19 nt, Artificial Sequence
  Description of Artificial Sequence: Synthetic oligonucleotide
  Sense strand starting at position 3517 of SEQ ID NO: 1563216
aaguuuguccaagggaaag

SEQ ID NO: 1803778 - RNA, 19 nt, Artificial Sequence
  Description of Artificial Sequence: Synthetic oligonucleotide
  Antisense strand to SEQ ID NO: 1803777
cuuucccuuggacaaacuu

SEQ ID NO: 1803779 - RNA, 19 nt, Artificial Sequence
  Description of Artificial Sequence: Synthetic oligonucleotide
  Sense strand starting at position 3534 of SEQ ID NO: 1563216
agcaaagacucuuucuguu

SEQ ID NO: 1803780 - RNA, 19 nt, Artificial Sequence
  Description of Artificial Sequence: Synthetic oligonucleotide
  Antisense strand to SEQ ID NO: 1803779
aacagaaagagucuuugcu

SEQ ID NO: 1803781 - RNA, 19 nt, Artificial Sequence
  Description of Artificial Sequence: Synthetic oligonucleotide
  Sense strand starting at position 3640 of SEQ ID NO: 1563216
cagagauccuuaugaaugu

SEQ ID NO: 1803782 - RNA, 19 nt, Artificial Sequence
  Description of Artificial Sequence: Synthetic oligonucleotide
  Antisense strand to SEQ ID NO: 1803781
acauucauaaggaucucug

SEQ ID NO: 1803783 - RNA, 19 nt, Artificial Sequence
  Description of Artificial Sequence: Synthetic oligonucleotide
  Sense strand starting at position 3641 of SEQ ID NO: 1563216
agagauccuuaugaaugua

SEQ ID NO: 1803784 - RNA, 19 nt, Artificial Sequence
  Description of Artificial Sequence: Synthetic oligonucleotide
  Antisense strand to SEQ ID NO: 1803783
uacauucauaaggaucucu

SEQ ID NO: 1803785 - RNA, 19 nt, Artificial Sequence
  Description of Artificial Sequence: Synthetic oligonucleotide
  Sense strand starting at position 3644 of SEQ ID NO: 1563216
gauccuuaugaauguaguu

SEQ ID NO: 1803786 - RNA, 19 nt, Artificial Sequence
  Description of Artificial Sequence: Synthetic oligonucleotide
  Antisense strand to SEQ ID NO: 1803785
aacuacauucauaaggauc

SEQ ID NO: 1803787 - RNA, 19 nt, Artificial Sequence
  Description of Artificial Sequence: Synthetic oligonucleotide
  Sense strand starting at position 3653 of SEQ ID NO: 1563216
gaauguaguuucuuguaau

SEQ ID NO: 1803788 - RNA, 19 nt, Artificial Sequence
  Description of Artificial Sequence: Synthetic oligonucleotide
  Antisense strand to SEQ ID NO: 1803787
auuacaagaaacuacauuc

SEQ ID NO: 1803789 - RNA, 19 nt, Artificial Sequence
  Description of Artificial Sequence: Synthetic oligonucleotide
  Sense strand starting at position 3665 of SEQ ID NO: 1563216
uuguaaugcucucucaggu

SEQ ID NO: 1803790 - RNA, 19 nt, Artificial Sequence
  Description of Artificial Sequence: Synthetic oligonucleotide
  Antisense strand to SEQ ID NO: 1803789
accugagagagcauuacaa

SEQ ID NO: 1803791 - RNA, 19 nt, Artificial Sequence
  Description of Artificial Sequence: Synthetic oligonucleotide
  Sense strand starting at position 3747 of SEQ ID NO: 1563216
acuagagauuaaguuuagu

SEQ ID NO: 1803792 - RNA, 19 nt, Artificial Sequence
  Description of Artificial Sequence: Synthetic oligonucleotide
  Antisense strand to SEQ ID NO: 1803791
acuaaacuuaaucucuagu

SEQ ID NO: 1803793 - RNA, 19 nt, Artificial Sequence
  Description of Artificial Sequence: Synthetic oligonucleotide
  Sense strand starting at position 3805 of SEQ ID NO: 1563216
ccacguugacaguaaguca

SEQ ID NO: 1803794 - RNA, 19 nt, Artificial Sequence
  Description of Artificial Sequence: Synthetic oligonucleotide
  Antisense strand to SEQ ID NO: 1803793
ugacuuacugucaacgugg

SEQ ID NO: 1803795 - RNA, 19 nt, Artificial Sequence
  Description of Artificial Sequence: Synthetic oligonucleotide
  Sense strand starting at position 3813 of SEQ ID NO: 1563216
acaguaagucacuggcuuu

SEQ ID NO: 1803796 - RNA, 19 nt, Artificial Sequence
  Description of Artificial Sequence: Synthetic oligonucleotide
  Antisense strand to SEQ ID NO: 1803795
aaagccagugacuuacugu

SEQ ID NO: 1803797 - RNA, 19 nt, Artificial Sequence
  Description of Artificial Sequence: Synthetic oligonucleotide
  Sense strand starting at position 3842 of SEQ ID NO: 1563216
gcgucagucacagaucaaa

SEQ ID NO: 1803798 - RNA, 19 nt, Artificial Sequence
  Description of Artificial Sequence: Synthetic oligonucleotide
  Antisense strand to SEQ ID NO: 1803797
uuugaucugugacugacgc

SEQ ID NO: 1803799 - RNA, 19 nt, Artificial Sequence
  Description of Artificial Sequence: Synthetic oligonucleotide
  Sense strand starting at position 3877 of SEQ ID NO: 1563216
gagcauagucucuggagca

SEQ ID NO: 1803800 - RNA, 19 nt, Artificial Sequence
  Description of Artificial Sequence: Synthetic oligonucleotide
  Antisense strand to SEQ ID NO: 1803799
ugcuccagagacuaugcuc

SEQ ID NO: 1803801 - RNA, 19 nt, Artificial Sequence
  Description of Artificial Sequence: Synthetic oligonucleotide
  Sense strand starting at position 3901 of SEQ ID NO: 1563216
gcucccauuuggcagagaa

SEQ ID NO: 1803802 - RNA, 19 nt, Artificial Sequence
  Description of Artificial Sequence: Synthetic oligonucleotide
  Antisense strand to SEQ ID NO: 1803801
uucucugccaaaugggagc

SEQ ID NO: 1803803 - RNA, 19 nt, Artificial Sequence
  Description of Artificial Sequence: Synthetic oligonucleotide
  Sense strand starting at position 3943 of SEQ ID NO: 1563216
augugaguuguauggcuca

SEQ ID NO: 1803804 - RNA, 19 nt, Artificial Sequence
  Description of Artificial Sequence: Synthetic oligonucleotide
  Antisense strand to SEQ ID NO: 1803803
ugagccauacaacucacau

SEQ ID NO: 1803805 - RNA, 19 nt, Artificial Sequence
  Description of Artificial Sequence: Synthetic oligonucleotide
  Sense strand starting at position 73 of SEQ ID NO: 1563217
auaucaauguuaucgacaa

SEQ ID NO: 1803806 - RNA, 19 nt, Artificial Sequence
  Description of Artificial Sequence: Synthetic oligonucleotide
  Antisense strand to SEQ ID NO: 1803805
uugucgauaacauugauau

SEQ ID NO: 1803807 - RNA, 19 nt, Artificial Sequence
  Description of Artificial Sequence: Synthetic oligonucleotide
  Sense strand starting at position 77 of SEQ ID NO: 1563217
caauguuaucgacaagccu

SEQ ID NO: 1803808 - RNA, 19 nt, Artificial Sequence
  Description of Artificial Sequence: Synthetic oligonucleotide
  Antisense strand to SEQ ID NO: 1803807
aggcuugucgauaacauug

SEQ ID NO: 1803809 - RNA, 19 nt, Artificial Sequence
  Description of Artificial Sequence: Synthetic oligonucleotide
  Sense strand starting at position 209 of SEQ ID NO: 1563217
gggccuucuccacaacuuu

SEQ ID NO: 1803810 - RNA, 19 nt, Artificial Sequence
  Description of Artificial Sequence: Synthetic oligonucleotide
  Antisense strand to SEQ ID NO: 1803809
aaaguuguggagaaggccc

SEQ ID NO: 1803811 - RNA, 19 nt, Artificial Sequence
  Description of Artificial Sequence: Synthetic oligonucleotide
  Sense strand starting at position 335 of SEQ ID NO: 1563217
cagagcucuguuuggcaaa

SEQ ID NO: 1803812 - RNA, 19 nt, Artificial Sequence
  Description of Artificial Sequence: Synthetic oligonucleotide
  Antisense strand to SEQ ID NO: 1803811
uuugccaaacagagcucug

SEQ ID NO: 1803813 - RNA, 19 nt, Artificial Sequence
  Description of Artificial Sequence: Synthetic oligonucleotide
  Sense strand starting at position 591 of SEQ ID NO: 1563217
ucagauacaggcugucauu

SEQ ID NO: 1803814 - RNA, 19 nt, Artificial Sequence
  Description of Artificial Sequence: Synthetic oligonucleotide
  Antisense strand to SEQ ID NO: 1803813
aaugacagccuguaucuga

SEQ ID NO: 1803815 - RNA, 19 nt, Artificial Sequence
  Description of Artificial Sequence: Synthetic oligonucleotide
  Sense strand starting at position 658 of SEQ ID NO: 1563217
ggcugugagucacccagau

SEQ ID NO: 1803816 - RNA, 19 nt, Artificial Sequence
  Description of Artificial Sequence: Synthetic oligonucleotide
  Antisense strand to SEQ ID NO: 1803815
aucugggugacucacagcc

SEQ ID NO: 1803817 - RNA, 19 nt, Artificial Sequence
  Description of Artificial Sequence: Synthetic oligonucleotide
  Sense strand starting at position 670 of SEQ ID NO: 1563217
cccagauucugcucugauc

SEQ ID NO: 1803818 - RNA, 19 nt, Artificial Sequence
  Description of Artificial Sequence: Synthetic oligonucleotide
  Antisense strand to SEQ ID NO: 1803817
gaucagagcagaaucuggg

SEQ ID NO: 1803819 - RNA, 19 nt, Artificial Sequence
  Description of Artificial Sequence: Synthetic oligonucleotide
  Sense strand starting at position 764 of SEQ ID NO: 1563217
cuugaaaucggcugcacaa

SEQ ID NO: 1803820 - RNA, 19 nt, Artificial Sequence
  Description of Artificial Sequence: Synthetic oligonucleotide
  Antisense strand to SEQ ID NO: 1803819
uugugcagccgauuucaag

SEQ ID NO: 1803821 - RNA, 19 nt, Artificial Sequence
  Description of Artificial Sequence: Synthetic oligonucleotide
  Sense strand starting at position 834 of SEQ ID NO: 1563217
uaaucaaaggaccgguaau

SEQ ID NO: 1803822 - RNA, 19 nt, Artificial Sequence
  Description of Artificial Sequence: Synthetic oligonucleotide
  Antisense strand to SEQ ID NO: 1803821
auuaccgguccuuugauua

SEQ ID NO: 1803823 - RNA, 19 nt, Artificial Sequence
  Description of Artificial Sequence: Synthetic oligonucleotide
  Sense strand starting at position 1086 of SEQ ID NO: 1563217
guuagaagagcuugcugaa

SEQ ID NO: 1803824 - RNA, 19 nt, Artificial Sequence
  Description of Artificial Sequence: Synthetic oligonucleotide
  Antisense strand to SEQ ID NO: 1803823
uucagcaagcucuucuaac

SEQ ID NO: 1803825 - RNA, 19 nt, Artificial Sequence
  Description of Artificial Sequence: Synthetic oligonucleotide
  Sense strand starting at position 1093 of SEQ ID NO: 1563217
gagcuugcugaaugaauac

SEQ ID NO: 1803826 - RNA, 19 nt, Artificial Sequence
  Description of Artificial Sequence: Synthetic oligonucleotide
  Antisense strand to SEQ ID NO: 1803825
guauucauucagcaagcuc

SEQ ID NO: 1803827 - RNA, 19 nt, Artificial Sequence
  Description of Artificial Sequence: Synthetic oligonucleotide
  Sense strand starting at position 1217 of SEQ ID NO: 1563217
ugaagagguaugugggcau

SEQ ID NO: 1803828 - RNA, 19 nt, Artificial Sequence
  Description of Artificial Sequence: Synthetic oligonucleotide
  Antisense strand to SEQ ID NO: 1803827
augcccacauaccucuuca

SEQ ID NO: 1803829 - RNA, 19 nt, Artificial Sequence
  Description of Artificial Sequence: Synthetic oligonucleotide
  Sense strand starting at position 1220 of SEQ ID NO: 1563217
agagguaugugggcauuga

SEQ ID NO: 1803830 - RNA, 19 nt, Artificial Sequence
  Description of Artificial Sequence: Synthetic oligonucleotide
  Antisense strand to SEQ ID NO: 1803829
ucaaugcccacauaccucu

SEQ ID NO: 1803831 - RNA, 19 nt, Artificial Sequence
  Description of Artificial Sequence: Synthetic oligonucleotide
  Sense strand starting at position 1221 of SEQ ID NO: 1563217
gagguaugugggcauugaa

SEQ ID NO: 1803832 - RNA, 19 nt, Artificial Sequence
  Description of Artificial Sequence: Synthetic oligonucleotide
  Antisense strand to SEQ ID NO: 1803831
uucaaugcccacauaccuc

SEQ ID NO: 1803833 - RNA, 19 nt, Artificial Sequence
  Description of Artificial Sequence: Synthetic oligonucleotide
  Sense strand starting at position 1256 of SEQ ID NO: 1563217
ggucucugcgcuuugucau

SEQ ID NO: 1803834 - RNA, 19 nt, Artificial Sequence
  Description of Artificial Sequence: Synthetic oligonucleotide
  Antisense strand to SEQ ID NO: 1803833
augacaaagcgcagagacc

SEQ ID NO: 1803835 - RNA, 19 nt, Artificial Sequence
  Description of Artificial Sequence: Synthetic oligonucleotide
  Sense strand starting at position 1263 of SEQ ID NO: 1563217
gcgcuuugucauucucacu

SEQ ID NO: 1803836 - RNA, 19 nt, Artificial Sequence
  Description of Artificial Sequence: Synthetic oligonucleotide
  Antisense strand to SEQ ID NO: 1803835
agugagaaugacaaagcgc

SEQ ID NO: 1803837 - RNA, 19 nt, Artificial Sequence
  Description of Artificial Sequence: Synthetic oligonucleotide
  Sense strand starting at position 1634 of SEQ ID NO: 1563217
gcuggacuccaucagacau

SEQ ID NO: 1803838 - RNA, 19 nt, Artificial Sequence
  Description of Artificial Sequence: Synthetic oligonucleotide
  Antisense strand to SEQ ID NO: 1803837
augucugauggaguccagc

SEQ ID NO: 1803839 - RNA, 19 nt, Artificial Sequence
  Description of Artificial Sequence: Synthetic oligonucleotide
  Sense strand starting at position 1753 of SEQ ID NO: 1563217
acggguguguaucuggaaa

SEQ ID NO: 1803840 - RNA, 19 nt, Artificial Sequence
  Description of Artificial Sequence: Synthetic oligonucleotide
  Antisense strand to SEQ ID NO: 1803839
uuuccagauacacacccgu

SEQ ID NO: 1803841 - RNA, 19 nt, Artificial Sequence
  Description of Artificial Sequence: Synthetic oligonucleotide
  Sense strand starting at position 1757 of SEQ ID NO: 1563217
guguguaucuggaaagggu

SEQ ID NO: 1803842 - RNA, 19 nt, Artificial Sequence
  Description of Artificial Sequence: Synthetic oligonucleotide
  Antisense strand to SEQ ID NO: 1803841
acccuuuccagauacacac

SEQ ID NO: 1803843 - RNA, 19 nt, Artificial Sequence
  Description of Artificial Sequence: Synthetic oligonucleotide
  Sense strand starting at position 1971 of SEQ ID NO: 1563217
gggacuaauccacgcauug

SEQ ID NO: 1803844 - RNA, 19 nt, Artificial Sequence
  Description of Artificial Sequence: Synthetic oligonucleotide
  Antisense strand to SEQ ID NO: 1803843
caaugcguggauuaguccc

SEQ ID NO: 1803845 - RNA, 19 nt, Artificial Sequence
  Description of Artificial Sequence: Synthetic oligonucleotide
  Sense strand starting at position 2574 of SEQ ID NO: 1563217
guuucuccugcugaaucau

SEQ ID NO: 1803846 - RNA, 19 nt, Artificial Sequence
  Description of Artificial Sequence: Synthetic oligonucleotide
  Antisense strand to SEQ ID NO: 1803845
augauucagcaggagaaac

SEQ ID NO: 1803847 - RNA, 19 nt, Artificial Sequence
  Description of Artificial Sequence: Synthetic oligonucleotide
  Sense strand starting at position 3042 of SEQ ID NO: 1563217
cgugaaggaucucuacaug

SEQ ID NO: 1803848 - RNA, 19 nt, Artificial Sequence
  Description of Artificial Sequence: Synthetic oligonucleotide
  Antisense strand to SEQ ID NO: 1803847
cauguagagauccuucacg

SEQ ID NO: 1803849 - RNA, 19 nt, Artificial Sequence
  Description of Artificial Sequence: Synthetic oligonucleotide
  Sense strand starting at position 3056 of SEQ ID NO: 1563217
acauguccuuccgugaaau

SEQ ID NO: 1803850 - RNA, 19 nt, Artificial Sequence
  Description of Artificial Sequence: Synthetic oligonucleotide
  Antisense strand to SEQ ID NO: 1803849
auuucacggaaggacaugu

SEQ ID NO: 1803851 - RNA, 19 nt, Artificial Sequence
  Description of Artificial Sequence: Synthetic oligonucleotide
  Sense strand starting at position 3057 of SEQ ID NO: 1563217
cauguccuuccgugaaaug

SEQ ID NO: 1803852 - RNA, 19 nt, Artificial Sequence
  Description of Artificial Sequence: Synthetic oligonucleotide
  Antisense strand to SEQ ID NO: 1803851
cauuucacggaaggacaug

SEQ ID NO: 1803853 - RNA, 19 nt, Artificial Sequence
  Description of Artificial Sequence: Synthetic oligonucleotide
  Sense strand starting at position 3058 of SEQ ID NO: 1563217
auguccuuccgugaaauga

SEQ ID NO: 1803854 - RNA, 19 nt, Artificial Sequence
  Description of Artificial Sequence: Synthetic oligonucleotide
  Antisense strand to SEQ ID NO: 1803853
ucauuucacggaaggacau

SEQ ID NO: 1803855 - RNA, 19 nt, Artificial Sequence
  Description of Artificial Sequence: Synthetic oligonucleotide
  Sense strand starting at position 3067 of SEQ ID NO: 1563217
cgugaaaugaugcauugag

SEQ ID NO: 1803856 - RNA, 19 nt, Artificial Sequence
  Description of Artificial Sequence: Synthetic oligonucleotide
  Antisense strand to SEQ ID NO: 1803855
cucaaugcaucauuucacg

SEQ ID NO: 1803857 - RNA, 19 nt, Artificial Sequence
  Description of Artificial Sequence: Synthetic oligonucleotide
  Sense strand starting at position 3154 of SEQ ID NO: 1563217
auuguauuaguguaaccac

SEQ ID NO: 1803858 - RNA, 19 nt, Artificial Sequence
  Description of Artificial Sequence: Synthetic oligonucleotide
  Antisense strand to SEQ ID NO: 1803857
gugguuacacuaauacaau

SEQ ID NO: 1803859 - RNA, 19 nt, Artificial Sequence
  Description of Artificial Sequence: Synthetic oligonucleotide
  Sense strand starting at position 3157 of SEQ ID NO: 1563217
guauuaguguaaccacaau

SEQ ID NO: 1803860 - RNA, 19 nt, Artificial Sequence
  Description of Artificial Sequence: Synthetic oligonucleotide
  Antisense strand to SEQ ID NO: 1803859
auugugguuacacuaauac

SEQ ID NO: 1803861 - RNA, 19 nt, Artificial Sequence
  Description of Artificial Sequence: Synthetic oligonucleotide
  Sense strand starting at position 3184 of SEQ ID NO: 1563217
acaccuagcccugaugauu

SEQ ID NO: 1803862 - RNA, 19 nt, Artificial Sequence
  Description of Artificial Sequence: Synthetic oligonucleotide
  Antisense strand to SEQ ID NO: 1803861
aaucaucagggcuaggugu

SEQ ID NO: 1803863 - RNA, 19 nt, Artificial Sequence
  Description of Artificial Sequence: Synthetic oligonucleotide
  Sense strand starting at position 3242 of SEQ ID NO: 1563217
auguauugugauggacaca

SEQ ID NO: 1803864 - RNA, 19 nt, Artificial Sequence
  Description of Artificial Sequence: Synthetic oligonucleotide
  Antisense strand to SEQ ID NO: 1803863
uguguccaucacaauacau

SEQ ID NO: 1803865 - RNA, 19 nt, Artificial Sequence
  Description of Artificial Sequence: Synthetic oligonucleotide
  Sense strand starting at position 3243 of SEQ ID NO: 1563217
uguauugugauggacacau

SEQ ID NO: 1803866 - RNA, 19 nt, Artificial Sequence
  Description of Artificial Sequence: Synthetic oligonucleotide
  Antisense strand to SEQ ID NO: 1803865
auguguccaucacaauaca

SEQ ID NO: 1803867 - RNA, 19 nt, Artificial Sequence
  Description of Artificial Sequence: Synthetic oligonucleotide
  Sense strand starting at position 3314 of SEQ ID NO: 1563217
aggaucaguuuaccuauau

SEQ ID NO: 1803868 - RNA, 19 nt, Artificial Sequence
  Description of Artificial Sequence: Synthetic oligonucleotide
  Antisense strand to SEQ ID NO: 1803867
auauagguaaacugauccu

SEQ ID NO: 1803869 - RNA, 19 nt, Artificial Sequence
  Description of Artificial Sequence: Synthetic oligonucleotide
  Sense strand starting at position 3315 of SEQ ID NO: 1563217
ggaucaguuuaccuauaua

SEQ ID NO: 1803870 - RNA, 19 nt, Artificial Sequence
  Description of Artificial Sequence: Synthetic oligonucleotide
  Antisense strand to SEQ ID NO: 1803869
uauauagguaaacugaucc

SEQ ID NO: 1803871 - RNA, 19 nt, Artificial Sequence
  Description of Artificial Sequence: Synthetic oligonucleotide
  Sense strand starting at position 3385 of SEQ ID NO: 1563217
gugaaauuacaauguuaag

SEQ ID NO: 1803872 - RNA, 19 nt, Artificial Sequence
  Description of Artificial Sequence: Synthetic oligonucleotide
  Antisense strand to SEQ ID NO: 1803871
cuuaacauuguaauuucac

SEQ ID NO: 1803873 - RNA, 19 nt, Artificial Sequence
  Description of Artificial Sequence: Synthetic oligonucleotide
  Sense strand starting at position 3534 of SEQ ID NO: 1563217
agaaauuguaucgggauaa

SEQ ID NO: 1803874 - RNA, 19 nt, Artificial Sequence
  Description of Artificial Sequence: Synthetic oligonucleotide
  Antisense strand to SEQ ID NO: 1803873
uuaucccgauacaauuucu

SEQ ID NO: 1803875 - RNA, 19 nt, Artificial Sequence
  Description of Artificial Sequence: Synthetic oligonucleotide
  Sense strand starting at position 3573 of SEQ ID NO: 1563217
ugaagugccuuaucauucu

SEQ ID NO: 1803876 - RNA, 19 nt, Artificial Sequence
  Description of Artificial Sequence: Synthetic oligonucleotide
  Antisense strand to SEQ ID NO: 1803875
agaaugauaaggcacuuca

SEQ ID NO: 1803877 - RNA, 19 nt, Artificial Sequence
  Description of Artificial Sequence: Synthetic oligonucleotide
  Sense strand starting at position 3576 of SEQ ID NO: 1563217
agugccuuaucauucucau

SEQ ID NO: 1803878 - RNA, 19 nt, Artificial Sequence
  Description of Artificial Sequence: Synthetic oligonucleotide
  Antisense strand to SEQ ID NO: 1803877
augagaaugauaaggcacu

SEQ ID NO: 1803879 - RNA, 19 nt, Artificial Sequence
  Description of Artificial Sequence: Synthetic oligonucleotide
  Sense strand starting at position 3779 of SEQ ID NO: 1563217
uagagugcuccucagaauu

SEQ ID NO: 1803880 - RNA, 19 nt, Artificial Sequence
  Description of Artificial Sequence: Synthetic oligonucleotide
  Antisense strand to SEQ ID NO: 1803879
aauucugaggagcacucua

SEQ ID NO: 1803881 - RNA, 19 nt, Artificial Sequence
  Description of Artificial Sequence: Synthetic oligonucleotide
  Sense strand starting at position 3845 of SEQ ID NO: 1563217
ccucuauugguggauguca

SEQ ID NO: 1803882 - RNA, 19 nt, Artificial Sequence
  Description of Artificial Sequence: Synthetic oligonucleotide
  Antisense strand to SEQ ID NO: 1803881
ugacauccaccaauagagg

SEQ ID NO: 1803883 - RNA, 19 nt, Artificial Sequence
  Description of Artificial Sequence: Synthetic oligonucleotide
  Sense strand starting at position 3861 of SEQ ID NO: 1563217
ucacgcugaggauguuaaa

SEQ ID NO: 1803884 - RNA, 19 nt, Artificial Sequence
  Description of Artificial Sequence: Synthetic oligonucleotide
  Antisense strand to SEQ ID NO: 1803883
uuuaacauccucagcguga

SEQ ID NO: 1803885 - RNA, 19 nt, Artificial Sequence
  Description of Artificial Sequence: Synthetic oligonucleotide
  Sense strand starting at position 193 of SEQ ID NO: 1563218
uaagaaugcgcagacugua

SEQ ID NO: 1803886 - RNA, 19 nt, Artificial Sequence
  Description of Artificial Sequence: Synthetic oligonucleotide
  Antisense strand to SEQ ID NO: 1803885
uacagucugcgcauucuua

SEQ ID NO: 1803887 - RNA, 19 nt, Artificial Sequence
  Description of Artificial Sequence: Synthetic oligonucleotide
  Sense strand starting at position 297 of SEQ ID NO: 1563218
auaucaauguuaucgacaa

SEQ ID NO: 1803888 - RNA, 19 nt, Artificial Sequence
  Description of Artificial Sequence: Synthetic oligonucleotide
  Antisense strand to SEQ ID NO: 1803887
uugucgauaacauugauau

SEQ ID NO: 1803889 - RNA, 19 nt, Artificial Sequence
  Description of Artificial Sequence: Synthetic oligonucleotide
  Sense strand starting at position 301 of SEQ ID NO: 1563218
caauguuaucgacaagccu

SEQ ID NO: 1803890 - RNA, 19 nt, Artificial Sequence
  Description of Artificial Sequence: Synthetic oligonucleotide
  Antisense strand to SEQ ID NO: 1803889
aggcuugucgauaacauug

SEQ ID NO: 1803891 - RNA, 19 nt, Artificial Sequence
  Description of Artificial Sequence: Synthetic oligonucleotide
  Sense strand starting at position 433 of SEQ ID NO: 1563218
gggccuucuccacaacuuu

SEQ ID NO: 1803892 - RNA, 19 nt, Artificial Sequence
  Description of Artificial Sequence: Synthetic oligonucleotide
  Antisense strand to SEQ ID NO: 1803891
aaaguuguggagaaggccc

SEQ ID NO: 1803893 - RNA, 19 nt, Artificial Sequence
  Description of Artificial Sequence: Synthetic oligonucleotide
  Sense strand starting at position 559 of SEQ ID NO: 1563218
cagagcucuguuuggcaaa

SEQ ID NO: 1803894 - RNA, 19 nt, Artificial Sequence
  Description of Artificial Sequence: Synthetic oligonucleotide
  Antisense strand to SEQ ID NO: 1803893
uuugccaaacagagcucug

SEQ ID NO: 1803895 - RNA, 19 nt, Artificial Sequence
  Description of Artificial Sequence: Synthetic oligonucleotide
  Sense strand starting at position 815 of SEQ ID NO: 1563218
ucagauacaggcugucauu

SEQ ID NO: 1803896 - RNA, 19 nt, Artificial Sequence
  Description of Artificial Sequence: Synthetic oligonucleotide
  Antisense strand to SEQ ID NO: 1803895
aaugacagccuguaucuga

SEQ ID NO: 1803897 - RNA, 19 nt, Artificial Sequence
  Description of Artificial Sequence: Synthetic oligonucleotide
  Sense strand starting at position 882 of SEQ ID NO: 1563218
ggcugugagucacccagau

SEQ ID NO: 1803898 - RNA, 19 nt, Artificial Sequence
  Description of Artificial Sequence: Synthetic oligonucleotide
  Antisense strand to SEQ ID NO: 1803897
aucugggugacucacagcc

SEQ ID NO: 1803899 - RNA, 19 nt, Artificial Sequence
  Description of Artificial Sequence: Synthetic oligonucleotide
  Sense strand starting at position 894 of SEQ ID NO: 1563218
cccagauucugcucugauc

SEQ ID NO: 1803900 - RNA, 19 nt, Artificial Sequence
  Description of Artificial Sequence: Synthetic oligonucleotide
  Antisense strand to SEQ ID NO: 1803899
gaucagagcagaaucuggg

SEQ ID NO: 1803901 - RNA, 19 nt, Artificial Sequence
  Description of Artificial Sequence: Synthetic oligonucleotide
  Sense strand starting at position 988 of SEQ ID NO: 1563218
cuugaaaucggcugcacaa

SEQ ID NO: 1803902 - RNA, 19 nt, Artificial Sequence
  Description of Artificial Sequence: Synthetic oligonucleotide
  Antisense strand to SEQ ID NO: 1803901
uugugcagccgauuucaag

SEQ ID NO: 1803903 - RNA, 19 nt, Artificial Sequence
  Description of Artificial Sequence: Synthetic oligonucleotide
  Sense strand starting at position 1058 of SEQ ID NO: 1563218
uaaucaaaggaccgguaau

SEQ ID NO: 1803904 - RNA, 19 nt, Artificial Sequence
  Description of Artificial Sequence: Synthetic oligonucleotide
  Antisense strand to SEQ ID NO: 1803903
auuaccgguccuuugauua

SEQ ID NO: 1803905 - RNA, 19 nt, Artificial Sequence
  Description of Artificial Sequence: Synthetic oligonucleotide
  Sense strand starting at position 1253 of SEQ ID NO: 1563218
ucuuaccugucaucuaguu

SEQ ID NO: 1803906 - RNA, 19 nt, Artificial Sequence
  Description of Artificial Sequence: Synthetic oligonucleotide
  Antisense strand to SEQ ID NO: 1803905
aacuagaugacagguaaga

SEQ ID NO: 1803907 - RNA, 19 nt, Artificial Sequence
  Description of Artificial Sequence: Synthetic oligonucleotide
  Sense strand starting at position 1310 of SEQ ID NO: 1563218
guuagaagagcuugcugaa

SEQ ID NO: 1803908 - RNA, 19 nt, Artificial Sequence
  Description of Artificial Sequence: Synthetic oligonucleotide
  Antisense strand to SEQ ID NO: 1803907
uucagcaagcucuucuaac

SEQ ID NO: 1803909 - RNA, 19 nt, Artificial Sequence
  Description of Artificial Sequence: Synthetic oligonucleotide
  Sense strand starting at position 1317 of SEQ ID NO: 1563218
gagcuugcugaaugaauac

SEQ ID NO: 1803910 - RNA, 19 nt, Artificial Sequence
  Description of Artificial Sequence: Synthetic oligonucleotide
  Antisense strand to SEQ ID NO: 1803909
guauucauucagcaagcuc

SEQ ID NO: 1803911 - RNA, 19 nt, Artificial Sequence
  Description of Artificial Sequence: Synthetic oligonucleotide
  Sense strand starting at position 1323 of SEQ ID NO: 1563218
gcugaaugaauacguaguu

SEQ ID NO: 1803912 - RNA, 19 nt, Artificial Sequence
  Description of Artificial Sequence: Synthetic oligonucleotide
  Antisense strand to SEQ ID NO: 1803911
aacuacguauucauucagc

SEQ ID NO: 1803913 - RNA, 19 nt, Artificial Sequence
  Description of Artificial Sequence: Synthetic oligonucleotide
  Sense strand starting at position 1441 of SEQ ID NO: 1563218
ugaagagguaugugggcau

SEQ ID NO: 1803914 - RNA, 19 nt, Artificial Sequence
  Description of Artificial Sequence: Synthetic oligonucleotide
  Antisense strand to SEQ ID NO: 1803913
augcccacauaccucuuca

SEQ ID NO: 1803915 - RNA, 19 nt, Artificial Sequence
  Description of Artificial Sequence: Synthetic oligonucleotide
  Sense strand starting at position 1444 of SEQ ID NO: 1563218
agagguaugugggcauuga

SEQ ID NO: 1803916 - RNA, 19 nt, Artificial Sequence
  Description of Artificial Sequence: Synthetic oligonucleotide
  Antisense strand to SEQ ID NO: 1803915
ucaaugcccacauaccucu

SEQ ID NO: 1803917 - RNA, 19 nt, Artificial Sequence
  Description of Artificial Sequence: Synthetic oligonucleotide
  Sense strand starting at position 1445 of SEQ ID NO: 1563218
gagguaugugggcauugaa

SEQ ID NO: 1803918 - RNA, 19 nt, Artificial Sequence
  Description of Artificial Sequence: Synthetic oligonucleotide
  Antisense strand to SEQ ID NO: 1803917
uucaaugcccacauaccuc

SEQ ID NO: 1803919 - RNA, 19 nt, Artificial Sequence
  Description of Artificial Sequence: Synthetic oligonucleotide
  Sense strand starting at position 1480 of SEQ ID NO: 1563218
ggucucugcgcuuugucau

SEQ ID NO: 1803920 - RNA, 19 nt, Artificial Sequence
  Description of Artificial Sequence: Synthetic oligonucleotide
  Antisense strand to SEQ ID NO: 1803919
augacaaagcgcagagacc

SEQ ID NO: 1803921 - RNA, 19 nt, Artificial Sequence
  Description of Artificial Sequence: Synthetic oligonucleotide
  Sense strand starting at position 1487 of SEQ ID NO: 1563218
gcgcuuugucauucucacu

SEQ ID NO: 1803922 - RNA, 19 nt, Artificial Sequence
  Description of Artificial Sequence: Synthetic oligonucleotide
  Antisense strand to SEQ ID NO: 1803921
agugagaaugacaaagcgc

SEQ ID NO: 1803923 - RNA, 19 nt, Artificial Sequence
  Description of Artificial Sequence: Synthetic oligonucleotide
  Sense strand starting at position 1858 of SEQ ID NO: 1563218
gcuggacuccaucagacau

SEQ ID NO: 1803924 - RNA, 19 nt, Artificial Sequence
  Description of Artificial Sequence: Synthetic oligonucleotide
  Antisense strand to SEQ ID NO: 1803923
augucugauggaguccagc

SEQ ID NO: 1803925 - RNA, 19 nt, Artificial Sequence
  Description of Artificial Sequence: Synthetic oligonucleotide
  Sense strand starting at position 1977 of SEQ ID NO: 1563218
acggguguguaucuggaaa

SEQ ID NO: 1803926 - RNA, 19 nt, Artificial Sequence
  Description of Artificial Sequence: Synthetic oligonucleotide
  Antisense strand to SEQ ID NO: 1803925
uuuccagauacacacccgu

SEQ ID NO: 1803927 - RNA, 19 nt, Artificial Sequence
  Description of Artificial Sequence: Synthetic oligonucleotide
  Sense strand starting at position 1981 of SEQ ID NO: 1563218
guguguaucuggaaagggu

SEQ ID NO: 1803928 - RNA, 19 nt, Artificial Sequence
  Description of Artificial Sequence: Synthetic oligonucleotide
  Antisense strand to SEQ ID NO: 1803927
acccuuuccagauacacac

SEQ ID NO: 1803929 - RNA, 19 nt, Artificial Sequence
  Description of Artificial Sequence: Synthetic oligonucleotide
  Sense strand starting at position 2195 of SEQ ID NO: 1563218
gggacuaauccacgcauug

SEQ ID NO: 1803930 - RNA, 19 nt, Artificial Sequence
  Description of Artificial Sequence: Synthetic oligonucleotide
  Antisense strand to SEQ ID NO: 1803929
caaugcguggauuaguccc

SEQ ID NO: 1803931 - RNA, 19 nt, Artificial Sequence
  Description of Artificial Sequence: Synthetic oligonucleotide
  Sense strand starting at position 2798 of SEQ ID NO: 1563218
guuucuccugcugaaucau

SEQ ID NO: 1803932 - RNA, 19 nt, Artificial Sequence
  Description of Artificial Sequence: Synthetic oligonucleotide
  Antisense strand to SEQ ID NO: 1803931
augauucagcaggagaaac

SEQ ID NO: 1803933 - RNA, 19 nt, Artificial Sequence
  Description of Artificial Sequence: Synthetic oligonucleotide
  Sense strand starting at position 3266 of SEQ ID NO: 1563218
cgugaaggaucucuacaug

SEQ ID NO: 1803934 - RNA, 19 nt, Artificial Sequence
  Description of Artificial Sequence: Synthetic oligonucleotide
  Antisense strand to SEQ ID NO: 1803933
cauguagagauccuucacg

SEQ ID NO: 1803935 - RNA, 19 nt, Artificial Sequence
  Description of Artificial Sequence: Synthetic oligonucleotide
  Sense strand starting at position 3280 of SEQ ID NO: 1563218
acauguccuuccgugaaau

SEQ ID NO: 1803936 - RNA, 19 nt, Artificial Sequence
  Description of Artificial Sequence: Synthetic oligonucleotide
  Antisense strand to SEQ ID NO: 1803935
auuucacggaaggacaugu

SEQ ID NO: 1803937 - RNA, 19 nt, Artificial Sequence
  Description of Artificial Sequence: Synthetic oligonucleotide
  Sense strand starting at position 3281 of SEQ ID NO: 1563218
cauguccuuccgugaaaug

SEQ ID NO: 1803938 - RNA, 19 nt, Artificial Sequence
  Description of Artificial Sequence: Synthetic oligonucleotide
  Antisense strand to SEQ ID NO: 1803937
cauuucacggaaggacaug

SEQ ID NO: 1803939 - RNA, 19 nt, Artificial Sequence
  Description of Artificial Sequence: Synthetic oligonucleotide
  Sense strand starting at position 3282 of SEQ ID NO: 1563218
auguccuuccgugaaauga

SEQ ID NO: 1803940 - RNA, 19 nt, Artificial Sequence
  Description of Artificial Sequence: Synthetic oligonucleotide
  Antisense strand to SEQ ID NO: 1803939
ucauuucacggaaggacau

SEQ ID NO: 1803941 - RNA, 19 nt, Artificial Sequence
  Description of Artificial Sequence: Synthetic oligonucleotide
  Sense strand starting at position 3291 of SEQ ID NO: 1563218
cgugaaaugaugcauugag

SEQ ID NO: 1803942 - RNA, 19 nt, Artificial Sequence
  Description of Artificial Sequence: Synthetic oligonucleotide
  Antisense strand to SEQ ID NO: 1803941
cucaaugcaucauuucacg

SEQ ID NO: 1803943 - RNA, 19 nt, Artificial Sequence
  Description of Artificial Sequence: Synthetic oligonucleotide
  Sense strand starting at position 3378 of SEQ ID NO: 1563218
auuguauuaguguaaccac

SEQ ID NO: 1803944 - RNA, 19 nt, Artificial Sequence
  Description of Artificial Sequence: Synthetic oligonucleotide
  Antisense strand to SEQ ID NO: 1803943
gugguuacacuaauacaau

SEQ ID NO: 1803945 - RNA, 19 nt, Artificial Sequence
  Description of Artificial Sequence: Synthetic oligonucleotide
  Sense strand starting at position 3381 of SEQ ID NO: 1563218
guauuaguguaaccacaau

SEQ ID NO: 1803946 - RNA, 19 nt, Artificial Sequence
  Description of Artificial Sequence: Synthetic oligonucleotide
  Antisense strand to SEQ ID NO: 1803945
auugugguuacacuaauac

SEQ ID NO: 1803947 - RNA, 19 nt, Artificial Sequence
  Description of Artificial Sequence: Synthetic oligonucleotide
  Sense strand starting at position 3408 of SEQ ID NO: 1563218
acaccuagcccugaugauu

SEQ ID NO: 1803948 - RNA, 19 nt, Artificial Sequence
  Description of Artificial Sequence: Synthetic oligonucleotide
  Antisense strand to SEQ ID NO: 1803947
aaucaucagggcuaggugu

SEQ ID NO: 1803949 - RNA, 19 nt, Artificial Sequence
  Description of Artificial Sequence: Synthetic oligonucleotide
  Sense strand starting at position 3466 of SEQ ID NO: 1563218
auguauugugauggacaca

SEQ ID NO: 1803950 - RNA, 19 nt, Artificial Sequence
  Description of Artificial Sequence: Synthetic oligonucleotide
  Antisense strand to SEQ ID NO: 1803949
uguguccaucacaauacau

SEQ ID NO: 1803951 - RNA, 19 nt, Artificial Sequence
  Description of Artificial Sequence: Synthetic oligonucleotide
  Sense strand starting at position 3467 of SEQ ID NO: 1563218
uguauugugauggacacau

SEQ ID NO: 1803952 - RNA, 19 nt, Artificial Sequence
  Description of Artificial Sequence: Synthetic oligonucleotide
  Antisense strand to SEQ ID NO: 1803951
auguguccaucacaauaca

SEQ ID NO: 1803953 - RNA, 19 nt, Artificial Sequence
  Description of Artificial Sequence: Synthetic oligonucleotide
  Sense strand starting at position 3538 of SEQ ID NO: 1563218
aggaucaguuuaccuauau

SEQ ID NO: 1803954 - RNA, 19 nt, Artificial Sequence
  Description of Artificial Sequence: Synthetic oligonucleotide
  Antisense strand to SEQ ID NO: 1803953
auauagguaaacugauccu

SEQ ID NO: 1803955 - RNA, 19 nt, Artificial Sequence
  Description of Artificial Sequence: Synthetic oligonucleotide
  Sense strand starting at position 3539 of SEQ ID NO: 1563218
ggaucaguuuaccuauaua

SEQ ID NO: 1803956 - RNA, 19 nt, Artificial Sequence
  Description of Artificial Sequence: Synthetic oligonucleotide
  Antisense strand to SEQ ID NO: 1803955
uauauagguaaacugaucc

SEQ ID NO: 1803957 - RNA, 19 nt, Artificial Sequence
  Description of Artificial Sequence: Synthetic oligonucleotide
  Sense strand starting at position 3609 of SEQ ID NO: 1563218
gugaaauuacaauguuaag

SEQ ID NO: 1803958 - RNA, 19 nt, Artificial Sequence
  Description of Artificial Sequence: Synthetic oligonucleotide
  Antisense strand to SEQ ID NO: 1803957
cuuaacauuguaauuucac

SEQ ID NO: 1803959 - RNA, 19 nt, Artificial Sequence
  Description of Artificial Sequence: Synthetic oligonucleotide
  Sense strand starting at position 3758 of SEQ ID NO: 1563218
agaaauuguaucgggauaa

SEQ ID NO: 1803960 - RNA, 19 nt, Artificial Sequence
  Description of Artificial Sequence: Synthetic oligonucleotide
  Antisense strand to SEQ ID NO: 1803959
uuaucccgauacaauuucu

SEQ ID NO: 1803961 - RNA, 19 nt, Artificial Sequence
  Description of Artificial Sequence: Synthetic oligonucleotide
  Sense strand starting at position 3797 of SEQ ID NO: 1563218
ugaagugccuuaucauucu

SEQ ID NO: 1803962 - RNA, 19 nt, Artificial Sequence
  Description of Artificial Sequence: Synthetic oligonucleotide
  Antisense strand to SEQ ID NO: 1803961
agaaugauaaggcacuuca

SEQ ID NO: 1803963 - RNA, 19 nt, Artificial Sequence
  Description of Artificial Sequence: Synthetic oligonucleotide
  Sense strand starting at position 3800 of SEQ ID NO: 1563218
agugccuuaucauucucau

SEQ ID NO: 1803964 - RNA, 19 nt, Artificial Sequence
  Description of Artificial Sequence: Synthetic oligonucleotide
  Antisense strand to SEQ ID NO: 1803963
augagaaugauaaggcacu

SEQ ID NO: 1803965 - RNA, 19 nt, Artificial Sequence
  Description of Artificial Sequence: Synthetic oligonucleotide
  Sense strand starting at position 8 of SEQ ID NO: 1563219
cucagaagcccuugcugaa

SEQ ID NO: 1803966 - RNA, 19 nt, Artificial Sequence
  Description of Artificial Sequence: Synthetic oligonucleotide
  Antisense strand to SEQ ID NO: 1803965
uucagcaagggcuucugag

SEQ ID NO: 1803967 - RNA, 19 nt, Artificial Sequence
  Description of Artificial Sequence: Synthetic oligonucleotide
  Sense strand starting at position 31 of SEQ ID NO: 1563219
cugagugcuaacugucaag

SEQ ID NO: 1803968 - RNA, 19 nt, Artificial Sequence
  Description of Artificial Sequence: Synthetic oligonucleotide
  Antisense strand to SEQ ID NO: 1803967
cuugacaguuagcacucag

SEQ ID NO: 1803969 - RNA, 19 nt, Artificial Sequence
  Description of Artificial Sequence: Synthetic oligonucleotide
  Sense strand starting at position 49 of SEQ ID NO: 1563219
gugugaacucauuacaaac

SEQ ID NO: 1803970 - RNA, 19 nt, Artificial Sequence
  Description of Artificial Sequence: Synthetic oligonucleotide
  Antisense strand to SEQ ID NO: 1803969
guuuguaaugaguucacac

SEQ ID NO: 1803971 - RNA, 19 nt, Artificial Sequence
  Description of Artificial Sequence: Synthetic oligonucleotide
  Sense strand starting at position 78 of SEQ ID NO: 1563219
gggacuuggcgcugucacu

SEQ ID NO: 1803972 - RNA, 19 nt, Artificial Sequence
  Description of Artificial Sequence: Synthetic oligonucleotide
  Antisense strand to SEQ ID NO: 1803971
agugacagcgccaaguccc

SEQ ID NO: 1803973 - RNA, 19 nt, Artificial Sequence
  Description of Artificial Sequence: Synthetic oligonucleotide
  Sense strand starting at position 106 of SEQ ID NO: 1563219
acgcuauagcuuuguuuga

SEQ ID NO: 1803974 - RNA, 19 nt, Artificial Sequence
  Description of Artificial Sequence: Synthetic oligonucleotide
  Antisense strand to SEQ ID NO: 1803973
ucaaacaaagcuauagcgu

SEQ ID NO: 1803975 - RNA, 19 nt, Artificial Sequence
  Description of Artificial Sequence: Synthetic oligonucleotide
  Sense strand starting at position 108 of SEQ ID NO: 1563219
gcuauagcuuuguuugagu

SEQ ID NO: 1803976 - RNA, 19 nt, Artificial Sequence
  Description of Artificial Sequence: Synthetic oligonucleotide
  Antisense strand to SEQ ID NO: 1803975
acucaaacaaagcuauagc

SEQ ID NO: 1803977 - RNA, 19 nt, Artificial Sequence
  Description of Artificial Sequence: Synthetic oligonucleotide
  Sense strand starting at position 110 of SEQ ID NO: 1563219
uauagcuuuguuugaguga

SEQ ID NO: 1803978 - RNA, 19 nt, Artificial Sequence
  Description of Artificial Sequence: Synthetic oligonucleotide
  Antisense strand to SEQ ID NO: 1803977
ucacucaaacaaagcuaua

SEQ ID NO: 1803979 - RNA, 19 nt, Artificial Sequence
  Description of Artificial Sequence: Synthetic oligonucleotide
  Sense strand starting at position 130 of SEQ ID NO: 1563219
ucuggaauguugcuaaaga

SEQ ID NO: 1803980 - RNA, 19 nt, Artificial Sequence
  Description of Artificial Sequence: Synthetic oligonucleotide
  Antisense strand to SEQ ID NO: 1803979
ucuuuagcaacauuccaga

SEQ ID NO: 1803981 - RNA, 19 nt, Artificial Sequence
  Description of Artificial Sequence: Synthetic oligonucleotide
  Sense strand starting at position 131 of SEQ ID NO: 1563219
cuggaauguugcuaaagac

SEQ ID NO: 1803982 - RNA, 19 nt, Artificial Sequence
  Description of Artificial Sequence: Synthetic oligonucleotide
  Antisense strand to SEQ ID NO: 1803981
gucuuuagcaacauuccag

SEQ ID NO: 1803983 - RNA, 19 nt, Artificial Sequence
  Description of Artificial Sequence: Synthetic oligonucleotide
  Sense strand starting at position 155 of SEQ ID NO: 1563219
acucauucuugccuuggaa

SEQ ID NO: 1803984 - RNA, 19 nt, Artificial Sequence
  Description of Artificial Sequence: Synthetic oligonucleotide
  Antisense strand to SEQ ID NO: 1803983
uuccaaggcaagaaugagu

SEQ ID NO: 1803985 - RNA, 19 nt, Artificial Sequence
  Description of Artificial Sequence: Synthetic oligonucleotide
  Sense strand starting at position 157 of SEQ ID NO: 1563219
ucauucuugccuuggaaac

SEQ ID NO: 1803986 - RNA, 19 nt, Artificial Sequence
  Description of Artificial Sequence: Synthetic oligonucleotide
  Antisense strand to SEQ ID NO: 1803985
guuuccaaggcaagaauga

SEQ ID NO: 1803987 - RNA, 19 nt, Artificial Sequence
  Description of Artificial Sequence: Synthetic oligonucleotide
  Sense strand starting at position 1102 of SEQ ID NO: 1563219
ccagacuucucacagagga

SEQ ID NO: 1803988 - RNA, 19 nt, Artificial Sequence
  Description of Artificial Sequence: Synthetic oligonucleotide
  Antisense strand to SEQ ID NO: 1803987
uccucugugagaagucugg

SEQ ID NO: 1803989 - RNA, 19 nt, Artificial Sequence
  Description of Artificial Sequence: Synthetic oligonucleotide
  Sense strand starting at position 1182 of SEQ ID NO: 1563219
gggugugccugggaaacua

SEQ ID NO: 1803990 - RNA, 19 nt, Artificial Sequence
  Description of Artificial Sequence: Synthetic oligonucleotide
  Antisense strand to SEQ ID NO: 1803989
uaguuucccaggcacaccc

SEQ ID NO: 1803991 - RNA, 19 nt, Artificial Sequence
  Description of Artificial Sequence: Synthetic oligonucleotide
  Sense strand starting at position 1381 of SEQ ID NO: 1563219
ugggacuugcaaugaugaa

SEQ ID NO: 1803992 - RNA, 19 nt, Artificial Sequence
  Description of Artificial Sequence: Synthetic oligonucleotide
  Antisense strand to SEQ ID NO: 1803991
uucaucauugcaaguccca

SEQ ID NO: 1803993 - RNA, 19 nt, Artificial Sequence
  Description of Artificial Sequence: Synthetic oligonucleotide
  Sense strand starting at position 2347 of SEQ ID NO: 1563219
ggaauuugguccugagccu

SEQ ID NO: 1803994 - RNA, 19 nt, Artificial Sequence
  Description of Artificial Sequence: Synthetic oligonucleotide
  Antisense strand to SEQ ID NO: 1803993
aggcucaggaccaaauucc

SEQ ID NO: 1803995 - RNA, 19 nt, Artificial Sequence
  Description of Artificial Sequence: Synthetic oligonucleotide
  Sense strand starting at position 2393 of SEQ ID NO: 1563219
ggaggugguuucuccagga

SEQ ID NO: 1803996 - RNA, 19 nt, Artificial Sequence
  Description of Artificial Sequence: Synthetic oligonucleotide
  Antisense strand to SEQ ID NO: 1803995
uccuggagaaaccaccucc

SEQ ID NO: 1803997 - RNA, 19 nt, Artificial Sequence
  Description of Artificial Sequence: Synthetic oligonucleotide
  Sense strand starting at position 2397 of SEQ ID NO: 1563219
gugguuucuccaggaucag

SEQ ID NO: 1803998 - RNA, 19 nt, Artificial Sequence
  Description of Artificial Sequence: Synthetic oligonucleotide
  Antisense strand to SEQ ID NO: 1803997
cugauccuggagaaaccac

SEQ ID NO: 1803999 - RNA, 19 nt, Artificial Sequence
  Description of Artificial Sequence: Synthetic oligonucleotide
  Sense strand starting at position 2597 of SEQ ID NO: 1563219
gcgagucagucuucuugcu

SEQ ID NO: 1804000 - RNA, 19 nt, Artificial Sequence
  Description of Artificial Sequence: Synthetic oligonucleotide
  Antisense strand to SEQ ID NO: 1803999
agcaagaagacugacucgc

SEQ ID NO: 1804001 - RNA, 19 nt, Artificial Sequence
  Description of Artificial Sequence: Synthetic oligonucleotide
  Sense strand starting at position 2599 of SEQ ID NO: 1563219
gagucagucuucuugcuca

SEQ ID NO: 1804002 - RNA, 19 nt, Artificial Sequence
  Description of Artificial Sequence: Synthetic oligonucleotide
  Antisense strand to SEQ ID NO: 1804001
ugagcaagaagacugacuc

SEQ ID NO: 1804003 - RNA, 19 nt, Artificial Sequence
  Description of Artificial Sequence: Synthetic oligonucleotide
  Sense strand starting at position 2861 of SEQ ID NO: 1563219
ggguaagaguuuagaugga

SEQ ID NO: 1804004 - RNA, 19 nt, Artificial Sequence
  Description of Artificial Sequence: Synthetic oligonucleotide
  Antisense strand to SEQ ID NO: 1804003
uccaucuaaacucuuaccc

SEQ ID NO: 1804005 - RNA, 19 nt, Artificial Sequence
  Description of Artificial Sequence: Synthetic oligonucleotide
  Sense strand starting at position 2865 of SEQ ID NO: 1563219
aagaguuuagauggaguga

SEQ ID NO: 1804006 - RNA, 19 nt, Artificial Sequence
  Description of Artificial Sequence: Synthetic oligonucleotide
  Antisense strand to SEQ ID NO: 1804005
ucacuccaucuaaacucuu

SEQ ID NO: 1804007 - RNA, 19 nt, Artificial Sequence
  Description of Artificial Sequence: Synthetic oligonucleotide
  Sense strand starting at position 3001 of SEQ ID NO: 1563219
gcggcauccaauggagaga

SEQ ID NO: 1804008 - RNA, 19 nt, Artificial Sequence
  Description of Artificial Sequence: Synthetic oligonucleotide
  Antisense strand to SEQ ID NO: 1804007
ucucuccauuggaugccgc

SEQ ID NO: 1804009 - RNA, 19 nt, Artificial Sequence
  Description of Artificial Sequence: Synthetic oligonucleotide
  Sense strand starting at position 3226 of SEQ ID NO: 1563219
gugguaccugccugcaaga

SEQ ID NO: 1804010 - RNA, 19 nt, Artificial Sequence
  Description of Artificial Sequence: Synthetic oligonucleotide
  Antisense strand to SEQ ID NO: 1804009
ucuugcaggcagguaccac

SEQ ID NO: 1804011 - RNA, 19 nt, Artificial Sequence
  Description of Artificial Sequence: Synthetic oligonucleotide
  Sense strand starting at position 3239 of SEQ ID NO: 1563219
gcaagaagcuucuagacug

SEQ ID NO: 1804012 - RNA, 19 nt, Artificial Sequence
  Description of Artificial Sequence: Synthetic oligonucleotide
  Antisense strand to SEQ ID NO: 1804011
cagucuagaagcuucuugc

SEQ ID NO: 1804013 - RNA, 19 nt, Artificial Sequence
  Description of Artificial Sequence: Synthetic oligonucleotide
  Sense strand starting at position 3306 of SEQ ID NO: 1563219
cugguucucucuugauuuc

SEQ ID NO: 1804014 - RNA, 19 nt, Artificial Sequence
  Description of Artificial Sequence: Synthetic oligonucleotide
  Antisense strand to SEQ ID NO: 1804013
gaaaucaagagagaaccag

SEQ ID NO: 1804015 - RNA, 19 nt, Artificial Sequence
  Description of Artificial Sequence: Synthetic oligonucleotide
  Sense strand starting at position 3487 of SEQ ID NO: 1563219
gccaacucauucguggaga

SEQ ID NO: 1804016 - RNA, 19 nt, Artificial Sequence
  Description of Artificial Sequence: Synthetic oligonucleotide
  Antisense strand to SEQ ID NO: 1804015
ucuccacgaaugaguuggc

SEQ ID NO: 1804017 - RNA, 19 nt, Artificial Sequence
  Description of Artificial Sequence: Synthetic oligonucleotide
  Sense strand starting at position 3489 of SEQ ID NO: 1563219
caacucauucguggagaaa

SEQ ID NO: 1804018 - RNA, 19 nt, Artificial Sequence
  Description of Artificial Sequence: Synthetic oligonucleotide
  Antisense strand to SEQ ID NO: 1804017
uuucuccacgaaugaguug

SEQ ID NO: 1804019 - RNA, 19 nt, Artificial Sequence
  Description of Artificial Sequence: Synthetic oligonucleotide
  Sense strand starting at position 3492 of SEQ ID NO: 1563219
cucauucguggagaaauau

SEQ ID NO: 1804020 - RNA, 19 nt, Artificial Sequence
  Description of Artificial Sequence: Synthetic oligonucleotide
  Antisense strand to SEQ ID NO: 1804019
auauuucuccacgaaugag

SEQ ID NO: 1804021 - RNA, 19 nt, Artificial Sequence
  Description of Artificial Sequence: Synthetic oligonucleotide
  Sense strand starting at position 3501 of SEQ ID NO: 1563219
ggagaaauaugucgguaga

SEQ ID NO: 1804022 - RNA, 19 nt, Artificial Sequence
  Description of Artificial Sequence: Synthetic oligonucleotide
  Antisense strand to SEQ ID NO: 1804021
ucuaccgacauauuucucc

SEQ ID NO: 1804023 - RNA, 19 nt, Artificial Sequence
  Description of Artificial Sequence: Synthetic oligonucleotide
  Sense strand starting at position 3502 of SEQ ID NO: 1563219
gagaaauaugucgguagag

SEQ ID NO: 1804024 - RNA, 19 nt, Artificial Sequence
  Description of Artificial Sequence: Synthetic oligonucleotide
  Antisense strand to SEQ ID NO: 1804023
cucuaccgacauauuucuc

SEQ ID NO: 1804025 - RNA, 19 nt, Artificial Sequence
  Description of Artificial Sequence: Synthetic oligonucleotide
  Sense strand starting at position 3503 of SEQ ID NO: 1563219
agaaauaugucgguagaga

SEQ ID NO: 1804026 - RNA, 19 nt, Artificial Sequence
  Description of Artificial Sequence: Synthetic oligonucleotide
  Antisense strand to SEQ ID NO: 1804025
ucucuaccgacauauuucu

SEQ ID NO: 1804027 - RNA, 19 nt, Artificial Sequence
  Description of Artificial Sequence: Synthetic oligonucleotide
  Sense strand starting at position 3563 of SEQ ID NO: 1563219
agagaagcauuuggaaaca

SEQ ID NO: 1804028 - RNA, 19 nt, Artificial Sequence
  Description of Artificial Sequence: Synthetic oligonucleotide
  Antisense strand to SEQ ID NO: 1804027
uguuuccaaaugcuucucu

SEQ ID NO: 1804029 - RNA, 19 nt, Artificial Sequence
  Description of Artificial Sequence: Synthetic oligonucleotide
  Sense strand starting at position 3574 of SEQ ID NO: 1563219
uggaaacauuccgcucagu

SEQ ID NO: 1804030 - RNA, 19 nt, Artificial Sequence
  Description of Artificial Sequence: Synthetic oligonucleotide
  Antisense strand to SEQ ID NO: 1804029
acugagcggaauguuucca

SEQ ID NO: 1804031 - RNA, 19 nt, Artificial Sequence
  Description of Artificial Sequence: Synthetic oligonucleotide
  Sense strand starting at position 3755 of SEQ ID NO: 1563219
ucuacaaucgacugaguga

SEQ ID NO: 1804032 - RNA, 19 nt, Artificial Sequence
  Description of Artificial Sequence: Synthetic oligonucleotide
  Antisense strand to SEQ ID NO: 1804031
ucacucagucgauuguaga

SEQ ID NO: 1804033 - RNA, 19 nt, Artificial Sequence
  Description of Artificial Sequence: Synthetic oligonucleotide
  Sense strand starting at position 3756 of SEQ ID NO: 1563219
cuacaaucgacugagugau

SEQ ID NO: 1804034 - RNA, 19 nt, Artificial Sequence
  Description of Artificial Sequence: Synthetic oligonucleotide
  Antisense strand to SEQ ID NO: 1804033
aucacucagucgauuguag

SEQ ID NO: 1804035 - RNA, 19 nt, Artificial Sequence
  Description of Artificial Sequence: Synthetic oligonucleotide
  Sense strand starting at position 3760 of SEQ ID NO: 1563219
aaucgacugagugaugguu

SEQ ID NO: 1804036 - RNA, 19 nt, Artificial Sequence
  Description of Artificial Sequence: Synthetic oligonucleotide
  Antisense strand to SEQ ID NO: 1804035
aaccaucacucagucgauu

SEQ ID NO: 1804037 - RNA, 19 nt, Artificial Sequence
  Description of Artificial Sequence: Synthetic oligonucleotide
  Sense strand starting at position 3812 of SEQ ID NO: 1563219
uugccuuguacgugcucaa

SEQ ID NO: 1804038 - RNA, 19 nt, Artificial Sequence
  Description of Artificial Sequence: Synthetic oligonucleotide
  Antisense strand to SEQ ID NO: 1804037
uugagcacguacaaggcaa

SEQ ID NO: 1804039 - RNA, 19 nt, Artificial Sequence
  Description of Artificial Sequence: Synthetic oligonucleotide
  Sense strand starting at position 3813 of SEQ ID NO: 1563219
ugccuuguacgugcucaau

SEQ ID NO: 1804040 - RNA, 19 nt, Artificial Sequence
  Description of Artificial Sequence: Synthetic oligonucleotide
  Antisense strand to SEQ ID NO: 1804039
auugagcacguacaaggca

SEQ ID NO: 1804041 - RNA, 19 nt, Artificial Sequence
  Description of Artificial Sequence: Synthetic oligonucleotide
  Sense strand starting at position 3831 of SEQ ID NO: 1563219
ugcgcaaaucgugugguaa

SEQ ID NO: 1804042 - RNA, 19 nt, Artificial Sequence
  Description of Artificial Sequence: Synthetic oligonucleotide
  Antisense strand to SEQ ID NO: 1804041
uuaccacacgauuugcgca

SEQ ID NO: 1804043 - RNA, 19 nt, Artificial Sequence
  Description of Artificial Sequence: Synthetic oligonucleotide
  Sense strand starting at position 3832 of SEQ ID NO: 1563219
gcgcaaaucgugugguaag

SEQ ID NO: 1804044 - RNA, 19 nt, Artificial Sequence
  Description of Artificial Sequence: Synthetic oligonucleotide
  Antisense strand to SEQ ID NO: 1804043
cuuaccacacgauuugcgc

SEQ ID NO: 1804045 - RNA, 19 nt, Artificial Sequence
  Description of Artificial Sequence: Synthetic oligonucleotide
  Sense strand starting at position 33 of SEQ ID NO: 1563220
uggagugauaggugucuuu

SEQ ID NO: 1804046 - RNA, 19 nt, Artificial Sequence
  Description of Artificial Sequence: Synthetic oligonucleotide
  Antisense strand to SEQ ID NO: 1804045
aaagacaccuaucacucca

SEQ ID NO: 1804047 - RNA, 19 nt, Artificial Sequence
  Description of Artificial Sequence: Synthetic oligonucleotide
  Sense strand starting at position 222 of SEQ ID NO: 1563220
aucaaucacgccuauguaa

SEQ ID NO: 1804048 - RNA, 19 nt, Artificial Sequence
  Description of Artificial Sequence: Synthetic oligonucleotide
  Antisense strand to SEQ ID NO: 1804047
uuacauaggcgugauugau

SEQ ID NO: 1804049 - RNA, 19 nt, Artificial Sequence
  Description of Artificial Sequence: Synthetic oligonucleotide
  Sense strand starting at position 431 of SEQ ID NO: 1563220
gaaguaguguuucccugag

SEQ ID NO: 1804050 - RNA, 19 nt, Artificial Sequence
  Description of Artificial Sequence: Synthetic oligonucleotide
  Antisense strand to SEQ ID NO: 1804049
cucagggaaacacuacuuc

SEQ ID NO: 1804051 - RNA, 19 nt, Artificial Sequence
  Description of Artificial Sequence: Synthetic oligonucleotide
  Sense strand starting at position 610 of SEQ ID NO: 1563220
accagagaggucugcacua

SEQ ID NO: 1804052 - RNA, 19 nt, Artificial Sequence
  Description of Artificial Sequence: Synthetic oligonucleotide
  Antisense strand to SEQ ID NO: 1804051
uagugcagaccucucuggu

SEQ ID NO: 1804053 - RNA, 19 nt, Artificial Sequence
  Description of Artificial Sequence: Synthetic oligonucleotide
  Sense strand starting at position 612 of SEQ ID NO: 1563220
cagagaggucugcacuaac

SEQ ID NO: 1804054 - RNA, 19 nt, Artificial Sequence
  Description of Artificial Sequence: Synthetic oligonucleotide
  Antisense strand to SEQ ID NO: 1804053
guuagugcagaccucucug

SEQ ID NO: 1804055 - RNA, 19 nt, Artificial Sequence
  Description of Artificial Sequence: Synthetic oligonucleotide
  Sense strand starting at position 623 of SEQ ID NO: 1563220
gcacuaacucuggguagua

SEQ ID NO: 1804056 - RNA, 19 nt, Artificial Sequence
  Description of Artificial Sequence: Synthetic oligonucleotide
  Antisense strand to SEQ ID NO: 1804055
uacuacccagaguuagugc

SEQ ID NO: 1804057 - RNA, 19 nt, Artificial Sequence
  Description of Artificial Sequence: Synthetic oligonucleotide
  Sense strand starting at position 668 of SEQ ID NO: 1563220
ccuagcugauguccucaaa

SEQ ID NO: 1804058 - RNA, 19 nt, Artificial Sequence
  Description of Artificial Sequence: Synthetic oligonucleotide
  Antisense strand to SEQ ID NO: 1804057
uuugaggacaucagcuagg

SEQ ID NO: 1804059 - RNA, 19 nt, Artificial Sequence
  Description of Artificial Sequence: Synthetic oligonucleotide
  Sense strand starting at position 671 of SEQ ID NO: 1563220
agcugauguccucaaagaa

SEQ ID NO: 1804060 - RNA, 19 nt, Artificial Sequence
  Description of Artificial Sequence: Synthetic oligonucleotide
  Antisense strand to SEQ ID NO: 1804059
uucuuugaggacaucagcu

SEQ ID NO: 1804061 - RNA, 19 nt, Artificial Sequence
  Description of Artificial Sequence: Synthetic oligonucleotide
  Sense strand starting at position 681 of SEQ ID NO: 1563220
cucaaagaauaagagaauu

SEQ ID NO: 1804062 - RNA, 19 nt, Artificial Sequence
  Description of Artificial Sequence: Synthetic oligonucleotide
  Antisense strand to SEQ ID NO: 1804061
aauucucuuauucuuugag

SEQ ID NO: 1804063 - RNA, 19 nt, Artificial Sequence
  Description of Artificial Sequence: Synthetic oligonucleotide
  Sense strand starting at position 716 of SEQ ID NO: 1563220
ccacacauucugugccaga

SEQ ID NO: 1804064 - RNA, 19 nt, Artificial Sequence
  Description of Artificial Sequence: Synthetic oligonucleotide
  Antisense strand to SEQ ID NO: 1804063
ucuggcacagaaugugugg

SEQ ID NO: 1804065 - RNA, 19 nt, Artificial Sequence
  Description of Artificial Sequence: Synthetic oligonucleotide
  Sense strand starting at position 721 of SEQ ID NO: 1563220
cauucugugccagaaguau

SEQ ID NO: 1804066 - RNA, 19 nt, Artificial Sequence
  Description of Artificial Sequence: Synthetic oligonucleotide
  Antisense strand to SEQ ID NO: 1804065
auacuucuggcacagaaug

SEQ ID NO: 1804067 - RNA, 19 nt, Artificial Sequence
  Description of Artificial Sequence: Synthetic oligonucleotide
  Sense strand starting at position 803 of SEQ ID NO: 1563220
gaggauacucgaugugaaa

SEQ ID NO: 1804068 - RNA, 19 nt, Artificial Sequence
  Description of Artificial Sequence: Synthetic oligonucleotide
  Antisense strand to SEQ ID NO: 1804067
uuucacaucgaguauccuc

SEQ ID NO: 1804069 - RNA, 19 nt, Artificial Sequence
  Description of Artificial Sequence: Synthetic oligonucleotide
  Sense strand starting at position 805 of SEQ ID NO: 1563220
ggauacucgaugugaaaga

SEQ ID NO: 1804070 - RNA, 19 nt, Artificial Sequence
  Description of Artificial Sequence: Synthetic oligonucleotide
  Antisense strand to SEQ ID NO: 1804069
ucuuucacaucgaguaucc

SEQ ID NO: 1804071 - RNA, 19 nt, Artificial Sequence
  Description of Artificial Sequence: Synthetic oligonucleotide
  Sense strand starting at position 867 of SEQ ID NO: 1563220
agaaacacauccuaaggaa

SEQ ID NO: 1804072 - RNA, 19 nt, Artificial Sequence
  Description of Artificial Sequence: Synthetic oligonucleotide
  Antisense strand to SEQ ID NO: 1804071
uuccuuaggauguguuucu

SEQ ID NO: 1804073 - RNA, 19 nt, Artificial Sequence
  Description of Artificial Sequence: Synthetic oligonucleotide
  Sense strand starting at position 937 of SEQ ID NO: 1563220
ggagacuauccaugaagca

SEQ ID NO: 1804074 - RNA, 19 nt, Artificial Sequence
  Description of Artificial Sequence: Synthetic oligonucleotide
  Antisense strand to SEQ ID NO: 1804073
ugcuucauggauagucucc

SEQ ID NO: 1804075 - RNA, 19 nt, Artificial Sequence
  Description of Artificial Sequence: Synthetic oligonucleotide
  Sense strand starting at position 1440 of SEQ ID NO: 1563220
acagguguucacgaauugu

SEQ ID NO: 1804076 - RNA, 19 nt, Artificial Sequence
  Description of Artificial Sequence: Synthetic oligonucleotide
  Antisense strand to SEQ ID NO: 1804075
acaauucgugaacaccugu

SEQ ID NO: 1804077 - RNA, 19 nt, Artificial Sequence
  Description of Artificial Sequence: Synthetic oligonucleotide
  Sense strand starting at position 1800 of SEQ ID NO: 1563220
gacggauuguuuccuuuac

SEQ ID NO: 1804078 - RNA, 19 nt, Artificial Sequence
  Description of Artificial Sequence: Synthetic oligonucleotide
  Antisense strand to SEQ ID NO: 1804077
guaaaggaaacaauccguc

SEQ ID NO: 1804079 - RNA, 19 nt, Artificial Sequence
  Description of Artificial Sequence: Synthetic oligonucleotide
  Sense strand starting at position 1802 of SEQ ID NO: 1563220
cggauuguuuccuuuacca

SEQ ID NO: 1804080 - RNA, 19 nt, Artificial Sequence
  Description of Artificial Sequence: Synthetic oligonucleotide
  Antisense strand to SEQ ID NO: 1804079
ugguaaaggaaacaauccg

SEQ ID NO: 1804081 - RNA, 19 nt, Artificial Sequence
  Description of Artificial Sequence: Synthetic oligonucleotide
  Sense strand starting at position 2066 of SEQ ID NO: 1563220
aguccuguaccauggauga

SEQ ID NO: 1804082 - RNA, 19 nt, Artificial Sequence
  Description of Artificial Sequence: Synthetic oligonucleotide
  Antisense strand to SEQ ID NO: 1804081
ucauccaugguacaggacu

SEQ ID NO: 1804083 - RNA, 19 nt, Artificial Sequence
  Description of Artificial Sequence: Synthetic oligonucleotide
  Sense strand starting at position 2101 of SEQ ID NO: 1563220
gggugcuugcuagaagauc

SEQ ID NO: 1804084 - RNA, 19 nt, Artificial Sequence
  Description of Artificial Sequence: Synthetic oligonucleotide
  Antisense strand to SEQ ID NO: 1804083
gaucuucuagcaagcaccc

SEQ ID NO: 1804085 - RNA, 19 nt, Artificial Sequence
  Description of Artificial Sequence: Synthetic oligonucleotide
  Sense strand starting at position 2155 of SEQ ID NO: 1563220
uggccuuugcucuggagga

SEQ ID NO: 1804086 - RNA, 19 nt, Artificial Sequence
  Description of Artificial Sequence: Synthetic oligonucleotide
  Antisense strand to SEQ ID NO: 1804085
uccuccagagcaaaggcca

SEQ ID NO: 1804087 - RNA, 19 nt, Artificial Sequence
  Description of Artificial Sequence: Synthetic oligonucleotide
  Sense strand starting at position 2197 of SEQ ID NO: 1563220
cgaugaggauuugggaaau

SEQ ID NO: 1804088 - RNA, 19 nt, Artificial Sequence
  Description of Artificial Sequence: Synthetic oligonucleotide
  Antisense strand to SEQ ID NO: 1804087
auuucccaaauccucaucg

SEQ ID NO: 1804089 - RNA, 19 nt, Artificial Sequence
  Description of Artificial Sequence: Synthetic oligonucleotide
  Sense strand starting at position 2238 of SEQ ID NO: 1563220
auacgacucaagcgacaua

SEQ ID NO: 1804090 - RNA, 19 nt, Artificial Sequence
  Description of Artificial Sequence: Synthetic oligonucleotide
  Antisense strand to SEQ ID NO: 1804089
uaugucgcuugagucguau

SEQ ID NO: 1804091 - RNA, 19 nt, Artificial Sequence
  Description of Artificial Sequence: Synthetic oligonucleotide
  Sense strand starting at position 2241 of SEQ ID NO: 1563220
cgacucaagcgacauacua

SEQ ID NO: 1804092 - RNA, 19 nt, Artificial Sequence
  Description of Artificial Sequence: Synthetic oligonucleotide
  Antisense strand to SEQ ID NO: 1804091
uaguaugucgcuugagucg

SEQ ID NO: 1804093 - RNA, 19 nt, Artificial Sequence
  Description of Artificial Sequence: Synthetic oligonucleotide
  Sense strand starting at position 2329 of SEQ ID NO: 1563220
ccaggauaaucccuguuaa

SEQ ID NO: 1804094 - RNA, 19 nt, Artificial Sequence
  Description of Artificial Sequence: Synthetic oligonucleotide
  Antisense strand to SEQ ID NO: 1804093
uuaacagggauuauccugg

SEQ ID NO: 1804095 - RNA, 19 nt, Artificial Sequence
  Description of Artificial Sequence: Synthetic oligonucleotide
  Sense strand starting at position 2475 of SEQ ID NO: 1563220
ucaguuacuggaugucauu

SEQ ID NO: 1804096 - RNA, 19 nt, Artificial Sequence
  Description of Artificial Sequence: Synthetic oligonucleotide
  Antisense strand to SEQ ID NO: 1804095
aaugacauccaguaacuga

SEQ ID NO: 1804097 - RNA, 19 nt, Artificial Sequence
  Description of Artificial Sequence: Synthetic oligonucleotide
  Sense strand starting at position 2536 of SEQ ID NO: 1563220
cucuguagacacugauguu

SEQ ID NO: 1804098 - RNA, 19 nt, Artificial Sequence
  Description of Artificial Sequence: Synthetic oligonucleotide
  Antisense strand to SEQ ID NO: 1804097
aacaucagugucuacagag

SEQ ID NO: 1804099 - RNA, 19 nt, Artificial Sequence
  Description of Artificial Sequence: Synthetic oligonucleotide
  Sense strand starting at position 2591 of SEQ ID NO: 1563220
auuuauguccagugcaaua

SEQ ID NO: 1804100 - RNA, 19 nt, Artificial Sequence
  Description of Artificial Sequence: Synthetic oligonucleotide
  Antisense strand to SEQ ID NO: 1804099
uauugcacuggacauaaau

SEQ ID NO: 1804101 - RNA, 19 nt, Artificial Sequence
  Description of Artificial Sequence: Synthetic oligonucleotide
  Sense strand starting at position 2593 of SEQ ID NO: 1563220
uuauguccagugcaauaga

SEQ ID NO: 1804102 - RNA, 19 nt, Artificial Sequence
  Description of Artificial Sequence: Synthetic oligonucleotide
  Antisense strand to SEQ ID NO: 1804101
ucuauugcacuggacauaa

SEQ ID NO: 1804103 - RNA, 19 nt, Artificial Sequence
  Description of Artificial Sequence: Synthetic oligonucleotide
  Sense strand starting at position 2630 of SEQ ID NO: 1563220
uuuauugcccuguaagaua

SEQ ID NO: 1804104 - RNA, 19 nt, Artificial Sequence
  Description of Artificial Sequence: Synthetic oligonucleotide
  Antisense strand to SEQ ID NO: 1804103
uaucuuacagggcaauaaa

SEQ ID NO: 1804105 - RNA, 19 nt, Artificial Sequence
  Description of Artificial Sequence: Synthetic oligonucleotide
  Sense strand starting at position 2641 of SEQ ID NO: 1563220
guaagauauuaacccguuu

SEQ ID NO: 1804106 - RNA, 19 nt, Artificial Sequence
  Description of Artificial Sequence: Synthetic oligonucleotide
  Antisense strand to SEQ ID NO: 1804105
aaacggguuaauaucuuac

SEQ ID NO: 1804107 - RNA, 19 nt, Artificial Sequence
  Description of Artificial Sequence: Synthetic oligonucleotide
  Sense strand starting at position 2698 of SEQ ID NO: 1563220
uuuccuauguguuuaugaa

SEQ ID NO: 1804108 - RNA, 19 nt, Artificial Sequence
  Description of Artificial Sequence: Synthetic oligonucleotide
  Antisense strand to SEQ ID NO: 1804107
uucauaaacacauaggaaa

SEQ ID NO: 1804109 - RNA, 19 nt, Artificial Sequence
  Description of Artificial Sequence: Synthetic oligonucleotide
  Sense strand starting at position 2699 of SEQ ID NO: 1563220
uuccuauguguuuaugaaa

SEQ ID NO: 1804110 - RNA, 19 nt, Artificial Sequence
  Description of Artificial Sequence: Synthetic oligonucleotide
  Antisense strand to SEQ ID NO: 1804109
uuucauaaacacauaggaa

SEQ ID NO: 1804111 - RNA, 19 nt, Artificial Sequence
  Description of Artificial Sequence: Synthetic oligonucleotide
  Sense strand starting at position 2926 of SEQ ID NO: 1563220
auauuucucguacgucuga

SEQ ID NO: 1804112 - RNA, 19 nt, Artificial Sequence
  Description of Artificial Sequence: Synthetic oligonucleotide
  Antisense strand to SEQ ID NO: 1804111
ucagacguacgagaaauau

SEQ ID NO: 1804113 - RNA, 19 nt, Artificial Sequence
  Description of Artificial Sequence: Synthetic oligonucleotide
  Sense strand starting at position 2994 of SEQ ID NO: 1563220
gaagguauuguguggucau

SEQ ID NO: 1804114 - RNA, 19 nt, Artificial Sequence
  Description of Artificial Sequence: Synthetic oligonucleotide
  Antisense strand to SEQ ID NO: 1804113
augaccacacaauaccuuc

SEQ ID NO: 1804115 - RNA, 19 nt, Artificial Sequence
  Description of Artificial Sequence: Synthetic oligonucleotide
  Sense strand starting at position 3082 of SEQ ID NO: 1563220
cccaguacauuaucaaugu

SEQ ID NO: 1804116 - RNA, 19 nt, Artificial Sequence
  Description of Artificial Sequence: Synthetic oligonucleotide
  Antisense strand to SEQ ID NO: 1804115
acauugauaauguacuggg

SEQ ID NO: 1804117 - RNA, 19 nt, Artificial Sequence
  Description of Artificial Sequence: Synthetic oligonucleotide
  Sense strand starting at position 3086 of SEQ ID NO: 1563220
guacauuaucaauguugua

SEQ ID NO: 1804118 - RNA, 19 nt, Artificial Sequence
  Description of Artificial Sequence: Synthetic oligonucleotide
  Antisense strand to SEQ ID NO: 1804117
uacaacauugauaauguac

SEQ ID NO: 1804119 - RNA, 19 nt, Artificial Sequence
  Description of Artificial Sequence: Synthetic oligonucleotide
  Sense strand starting at position 3429 of SEQ ID NO: 1563220
gacagcauuucgcuauguu

SEQ ID NO: 1804120 - RNA, 19 nt, Artificial Sequence
  Description of Artificial Sequence: Synthetic oligonucleotide
  Antisense strand to SEQ ID NO: 1804119
aacauagcgaaaugcuguc

SEQ ID NO: 1804121 - RNA, 19 nt, Artificial Sequence
  Description of Artificial Sequence: Synthetic oligonucleotide
  Sense strand starting at position 3430 of SEQ ID NO: 1563220
acagcauuucgcuauguug

SEQ ID NO: 1804122 - RNA, 19 nt, Artificial Sequence
  Description of Artificial Sequence: Synthetic oligonucleotide
  Antisense strand to SEQ ID NO: 1804121
caacauagcgaaaugcugu

SEQ ID NO: 1804123 - RNA, 19 nt, Artificial Sequence
  Description of Artificial Sequence: Synthetic oligonucleotide
  Sense strand starting at position 3893 of SEQ ID NO: 1563220
aagcuagucuuucugauag

SEQ ID NO: 1804124 - RNA, 19 nt, Artificial Sequence
  Description of Artificial Sequence: Synthetic oligonucleotide
  Antisense strand to SEQ ID NO: 1804123
cuaucagaaagacuagcuu

SEQ ID NO: 1804125 - RNA, 19 nt, Artificial Sequence
  Description of Artificial Sequence: Synthetic oligonucleotide
  Sense strand starting at position 220 of SEQ ID NO: 1563221
ugccuauaacaaggauuau

SEQ ID NO: 1804126 - RNA, 19 nt, Artificial Sequence
  Description of Artificial Sequence: Synthetic oligonucleotide
  Antisense strand to SEQ ID NO: 1804125
auaauccuuguuauaggca

SEQ ID NO: 1804127 - RNA, 19 nt, Artificial Sequence
  Description of Artificial Sequence: Synthetic oligonucleotide
  Sense strand starting at position 439 of SEQ ID NO: 1563221
aggcaauuguacuuacaag

SEQ ID NO: 1804128 - RNA, 19 nt, Artificial Sequence
  Description of Artificial Sequence: Synthetic oligonucleotide
  Antisense strand to SEQ ID NO: 1804127
cuuguaaguacaauugccu

SEQ ID NO: 1804129 - RNA, 19 nt, Artificial Sequence
  Description of Artificial Sequence: Synthetic oligonucleotide
  Sense strand starting at position 470 of SEQ ID NO: 1563221
cauaauggagacuguuauu

SEQ ID NO: 1804130 - RNA, 19 nt, Artificial Sequence
  Description of Artificial Sequence: Synthetic oligonucleotide
  Antisense strand to SEQ ID NO: 1804129
aauaacagucuccauuaug

SEQ ID NO: 1804131 - RNA, 19 nt, Artificial Sequence
  Description of Artificial Sequence: Synthetic oligonucleotide
  Sense strand starting at position 579 of SEQ ID NO: 1563221
gaguucucaggagaugcua

SEQ ID NO: 1804132 - RNA, 19 nt, Artificial Sequence
  Description of Artificial Sequence: Synthetic oligonucleotide
  Antisense strand to SEQ ID NO: 1804131
uagcaucuccugagaacuc

SEQ ID NO: 1804133 - RNA, 19 nt, Artificial Sequence
  Description of Artificial Sequence: Synthetic oligonucleotide
  Sense strand starting at position 671 of SEQ ID NO: 1563221
cuauguuaacaaugguaga

SEQ ID NO: 1804134 - RNA, 19 nt, Artificial Sequence
  Description of Artificial Sequence: Synthetic oligonucleotide
  Antisense strand to SEQ ID NO: 1804133
ucuaccauuguuaacauag

SEQ ID NO: 1804135 - RNA, 19 nt, Artificial Sequence
  Description of Artificial Sequence: Synthetic oligonucleotide
  Sense strand starting at position 807 of SEQ ID NO: 1563221
ucagaaaugccaugaauuc

SEQ ID NO: 1804136 - RNA, 19 nt, Artificial Sequence
  Description of Artificial Sequence: Synthetic oligonucleotide
  Antisense strand to SEQ ID NO: 1804135
gaauucauggcauuucuga

SEQ ID NO: 1804137 - RNA, 19 nt, Artificial Sequence
  Description of Artificial Sequence: Synthetic oligonucleotide
  Sense strand starting at position 819 of SEQ ID NO: 1563221
ugaauucuucugugggacu

SEQ ID NO: 1804138 - RNA, 19 nt, Artificial Sequence
  Description of Artificial Sequence: Synthetic oligonucleotide
  Antisense strand to SEQ ID NO: 1804137
agucccacagaagaauuca

SEQ ID NO: 1804139 - RNA, 19 nt, Artificial Sequence
  Description of Artificial Sequence: Synthetic oligonucleotide
  Sense strand starting at position 821 of SEQ ID NO: 1563221
aauucuucugugggacuau

SEQ ID NO: 1804140 - RNA, 19 nt, Artificial Sequence
  Description of Artificial Sequence: Synthetic oligonucleotide
  Antisense strand to SEQ ID NO: 1804139
auagucccacagaagaauu

SEQ ID NO: 1804141 - RNA, 19 nt, Artificial Sequence
  Description of Artificial Sequence: Synthetic oligonucleotide
  Sense strand starting at position 1087 of SEQ ID NO: 1563221
uguugugaaauucgacuaa

SEQ ID NO: 1804142 - RNA, 19 nt, Artificial Sequence
  Description of Artificial Sequence: Synthetic oligonucleotide
  Antisense strand to SEQ ID NO: 1804141
uuagucgaauuucacaaca

SEQ ID NO: 1804143 - RNA, 19 nt, Artificial Sequence
  Description of Artificial Sequence: Synthetic oligonucleotide
  Sense strand starting at position 1091 of SEQ ID NO: 1563221
gugaaauucgacuaagucc

SEQ ID NO: 1804144 - RNA, 19 nt, Artificial Sequence
  Description of Artificial Sequence: Synthetic oligonucleotide
  Antisense strand to SEQ ID NO: 1804143
ggacuuagucgaauuucac

SEQ ID NO: 1804145 - RNA, 19 nt, Artificial Sequence
  Description of Artificial Sequence: Synthetic oligonucleotide
  Sense strand starting at position 2181 of SEQ ID NO: 1563221
cauuucuggcguugcuaua

SEQ ID NO: 1804146 - RNA, 19 nt, Artificial Sequence
  Description of Artificial Sequence: Synthetic oligonucleotide
  Antisense strand to SEQ ID NO: 1804145
uauagcaacgccagaaaug

SEQ ID NO: 1804147 - RNA, 19 nt, Artificial Sequence
  Description of Artificial Sequence: Synthetic oligonucleotide
  Sense strand starting at position 2538 of SEQ ID NO: 1563221
accugcucuuaagugaauu

SEQ ID NO: 1804148 - RNA, 19 nt, Artificial Sequence
  Description of Artificial Sequence: Synthetic oligonucleotide
  Antisense strand to SEQ ID NO: 1804147
aauucacuuaagagcaggu

SEQ ID NO: 1804149 - RNA, 19 nt, Artificial Sequence
  Description of Artificial Sequence: Synthetic oligonucleotide
  Sense strand starting at position 2642 of SEQ ID NO: 1563221
accacuggucuguaccaga

SEQ ID NO: 1804150 - RNA, 19 nt, Artificial Sequence
  Description of Artificial Sequence: Synthetic oligonucleotide
  Antisense strand to SEQ ID NO: 1804149
ucugguacagaccaguggu

SEQ ID NO: 1804151 - RNA, 19 nt, Artificial Sequence
  Description of Artificial Sequence: Synthetic oligonucleotide
  Sense strand starting at position 2647 of SEQ ID NO: 1563221
uggucuguaccagacucau

SEQ ID NO: 1804152 - RNA, 19 nt, Artificial Sequence
  Description of Artificial Sequence: Synthetic oligonucleotide
  Antisense strand to SEQ ID NO: 1804151
augagucugguacagacca

SEQ ID NO: 1804153 - RNA, 19 nt, Artificial Sequence
  Description of Artificial Sequence: Synthetic oligonucleotide
  Sense strand starting at position 3012 of SEQ ID NO: 1563221
gggaguuugacuuguuaga

SEQ ID NO: 1804154 - RNA, 19 nt, Artificial Sequence
  Description of Artificial Sequence: Synthetic oligonucleotide
  Antisense strand to SEQ ID NO: 1804153
ucuaacaagucaaacuccc

SEQ ID NO: 1804155 - RNA, 19 nt, Artificial Sequence
  Description of Artificial Sequence: Synthetic oligonucleotide
  Sense strand starting at position 3014 of SEQ ID NO: 1563221
gaguuugacuuguuagacu

SEQ ID NO: 1804156 - RNA, 19 nt, Artificial Sequence
  Description of Artificial Sequence: Synthetic oligonucleotide
  Antisense strand to SEQ ID NO: 1804155
agucuaacaagucaaacuc

SEQ ID NO: 1804157 - RNA, 19 nt, Artificial Sequence
  Description of Artificial Sequence: Synthetic oligonucleotide
  Sense strand starting at position 3021 of SEQ ID NO: 1563221
acuuguuagacuggaaguu

SEQ ID NO: 1804158 - RNA, 19 nt, Artificial Sequence
  Description of Artificial Sequence: Synthetic oligonucleotide
  Antisense strand to SEQ ID NO: 1804157
aacuuccagucuaacaagu

SEQ ID NO: 1804159 - RNA, 19 nt, Artificial Sequence
  Description of Artificial Sequence: Synthetic oligonucleotide
  Sense strand starting at position 3030 of SEQ ID NO: 1563221
acuggaaguuuccugaaug

SEQ ID NO: 1804160 - RNA, 19 nt, Artificial Sequence
  Description of Artificial Sequence: Synthetic oligonucleotide
  Antisense strand to SEQ ID NO: 1804159
cauucaggaaacuuccagu

SEQ ID NO: 1804161 - RNA, 19 nt, Artificial Sequence
  Description of Artificial Sequence: Synthetic oligonucleotide
  Sense strand starting at position 3035 of SEQ ID NO: 1563221
aaguuuccugaaugaaagu

SEQ ID NO: 1804162 - RNA, 19 nt, Artificial Sequence
  Description of Artificial Sequence: Synthetic oligonucleotide
  Antisense strand to SEQ ID NO: 1804161
acuuucauucaggaaacuu

SEQ ID NO: 1804163 - RNA, 19 nt, Artificial Sequence
  Description of Artificial Sequence: Synthetic oligonucleotide
  Sense strand starting at position 3075 of SEQ ID NO: 1563221
acuguauucucagcacauu

SEQ ID NO: 1804164 - RNA, 19 nt, Artificial Sequence
  Description of Artificial Sequence: Synthetic oligonucleotide
  Antisense strand to SEQ ID NO: 1804163
aaugugcugagaauacagu

SEQ ID NO: 1804165 - RNA, 19 nt, Artificial Sequence
  Description of Artificial Sequence: Synthetic oligonucleotide
  Sense strand starting at position 3078 of SEQ ID NO: 1563221
guauucucagcacauugua

SEQ ID NO: 1804166 - RNA, 19 nt, Artificial Sequence
  Description of Artificial Sequence: Synthetic oligonucleotide
  Antisense strand to SEQ ID NO: 1804165
uacaaugugcugagaauac

SEQ ID NO: 1804167 - RNA, 19 nt, Artificial Sequence
  Description of Artificial Sequence: Synthetic oligonucleotide
  Sense strand starting at position 3100 of SEQ ID NO: 1563221
gguauagucagucaagggu

SEQ ID NO: 1804168 - RNA, 19 nt, Artificial Sequence
  Description of Artificial Sequence: Synthetic oligonucleotide
  Antisense strand to SEQ ID NO: 1804167
acccuugacugacuauacc

SEQ ID NO: 1804169 - RNA, 19 nt, Artificial Sequence
  Description of Artificial Sequence: Synthetic oligonucleotide
  Sense strand starting at position 3104 of SEQ ID NO: 1563221
uagucagucaaggguugaa

SEQ ID NO: 1804170 - RNA, 19 nt, Artificial Sequence
  Description of Artificial Sequence: Synthetic oligonucleotide
  Antisense strand to SEQ ID NO: 1804169
uucaacccuugacugacua

SEQ ID NO: 1804171 - RNA, 19 nt, Artificial Sequence
  Description of Artificial Sequence: Synthetic oligonucleotide
  Sense strand starting at position 3172 of SEQ ID NO: 1563221
uuugcagaucaaugcuaau

SEQ ID NO: 1804172 - RNA, 19 nt, Artificial Sequence
  Description of Artificial Sequence: Synthetic oligonucleotide
  Antisense strand to SEQ ID NO: 1804171
auuagcauugaucugcaaa

SEQ ID NO: 1804173 - RNA, 19 nt, Artificial Sequence
  Description of Artificial Sequence: Synthetic oligonucleotide
  Sense strand starting at position 3199 of SEQ ID NO: 1563221
gugucuuugcugccuguaa

SEQ ID NO: 1804174 - RNA, 19 nt, Artificial Sequence
  Description of Artificial Sequence: Synthetic oligonucleotide
  Antisense strand to SEQ ID NO: 1804173
uuacaggcagcaaagacac

SEQ ID NO: 1804175 - RNA, 19 nt, Artificial Sequence
  Description of Artificial Sequence: Synthetic oligonucleotide
  Sense strand starting at position 3223 of SEQ ID NO: 1563221
gggcuuagcccagaguaug

SEQ ID NO: 1804176 - RNA, 19 nt, Artificial Sequence
  Description of Artificial Sequence: Synthetic oligonucleotide
  Antisense strand to SEQ ID NO: 1804175
cauacucugggcuaagccc

SEQ ID NO: 1804177 - RNA, 19 nt, Artificial Sequence
  Description of Artificial Sequence: Synthetic oligonucleotide
  Sense strand starting at position 3389 of SEQ ID NO: 1563221
ggucauuuguauucccuuu

SEQ ID NO: 1804178 - RNA, 19 nt, Artificial Sequence
  Description of Artificial Sequence: Synthetic oligonucleotide
  Antisense strand to SEQ ID NO: 1804177
aaagggaauacaaaugacc

SEQ ID NO: 1804179 - RNA, 19 nt, Artificial Sequence
  Description of Artificial Sequence: Synthetic oligonucleotide
  Sense strand starting at position 3446 of SEQ ID NO: 1563221
aggagauacuagucauacu

SEQ ID NO: 1804180 - RNA, 19 nt, Artificial Sequence
  Description of Artificial Sequence: Synthetic oligonucleotide
  Antisense strand to SEQ ID NO: 1804179
aguaugacuaguaucuccu

SEQ ID NO: 1804181 - RNA, 19 nt, Artificial Sequence
  Description of Artificial Sequence: Synthetic oligonucleotide
  Sense strand starting at position 3509 of SEQ ID NO: 1563221
gaaucacucuagguuauga

SEQ ID NO: 1804182 - RNA, 19 nt, Artificial Sequence
  Description of Artificial Sequence: Synthetic oligonucleotide
  Antisense strand to SEQ ID NO: 1804181
ucauaaccuagagugauuc

SEQ ID NO: 1804183 - RNA, 19 nt, Artificial Sequence
  Description of Artificial Sequence: Synthetic oligonucleotide
  Sense strand starting at position 3511 of SEQ ID NO: 1563221
aucacucuagguuaugauu

SEQ ID NO: 1804184 - RNA, 19 nt, Artificial Sequence
  Description of Artificial Sequence: Synthetic oligonucleotide
  Antisense strand to SEQ ID NO: 1804183
aaucauaaccuagagugau

SEQ ID NO: 1804185 - RNA, 19 nt, Artificial Sequence
  Description of Artificial Sequence: Synthetic oligonucleotide
  Sense strand starting at position 3519 of SEQ ID NO: 1563221
agguuaugauucuuaacau

SEQ ID NO: 1804186 - RNA, 19 nt, Artificial Sequence
  Description of Artificial Sequence: Synthetic oligonucleotide
  Antisense strand to SEQ ID NO: 1804185
auguuaagaaucauaaccu

SEQ ID NO: 1804187 - RNA, 19 nt, Artificial Sequence
  Description of Artificial Sequence: Synthetic oligonucleotide
  Sense strand starting at position 3531 of SEQ ID NO: 1563221
uuaacauuuguguguucuu

SEQ ID NO: 1804188 - RNA, 19 nt, Artificial Sequence
  Description of Artificial Sequence: Synthetic oligonucleotide
  Antisense strand to SEQ ID NO: 1804187
aagaacacacaaauguuaa

SEQ ID NO: 1804189 - RNA, 19 nt, Artificial Sequence
  Description of Artificial Sequence: Synthetic oligonucleotide
  Sense strand starting at position 3534 of SEQ ID NO: 1563221
acauuuguguguucuuauu

SEQ ID NO: 1804190 - RNA, 19 nt, Artificial Sequence
  Description of Artificial Sequence: Synthetic oligonucleotide
  Antisense strand to SEQ ID NO: 1804189
aauaagaacacacaaaugu

SEQ ID NO: 1804191 - RNA, 19 nt, Artificial Sequence
  Description of Artificial Sequence: Synthetic oligonucleotide
  Sense strand starting at position 3559 of SEQ ID NO: 1563221
guccuuuaagcuuaauagu

SEQ ID NO: 1804192 - RNA, 19 nt, Artificial Sequence
  Description of Artificial Sequence: Synthetic oligonucleotide
  Antisense strand to SEQ ID NO: 1804191
acuauuaagcuuaaaggac

SEQ ID NO: 1804193 - RNA, 19 nt, Artificial Sequence
  Description of Artificial Sequence: Synthetic oligonucleotide
  Sense strand starting at position 3595 of SEQ ID NO: 1563221
uugucuuaaauacgaagga

SEQ ID NO: 1804194 - RNA, 19 nt, Artificial Sequence
  Description of Artificial Sequence: Synthetic oligonucleotide
  Antisense strand to SEQ ID NO: 1804193
uccuucguauuuaagacaa

SEQ ID NO: 1804195 - RNA, 19 nt, Artificial Sequence
  Description of Artificial Sequence: Synthetic oligonucleotide
  Sense strand starting at position 3610 of SEQ ID NO: 1563221
aggacauaggccugcagau

SEQ ID NO: 1804196 - RNA, 19 nt, Artificial Sequence
  Description of Artificial Sequence: Synthetic oligonucleotide
  Antisense strand to SEQ ID NO: 1804195
aucugcaggccuauguccu

SEQ ID NO: 1804197 - RNA, 19 nt, Artificial Sequence
  Description of Artificial Sequence: Synthetic oligonucleotide
  Sense strand starting at position 3624 of SEQ ID NO: 1563221
cagauucugaugugagagu

SEQ ID NO: 1804198 - RNA, 19 nt, Artificial Sequence
  Description of Artificial Sequence: Synthetic oligonucleotide
  Antisense strand to SEQ ID NO: 1804197
acucucacaucagaaucug

SEQ ID NO: 1804199 - RNA, 19 nt, Artificial Sequence
  Description of Artificial Sequence: Synthetic oligonucleotide
  Sense strand starting at position 3787 of SEQ ID NO: 1563221
ggagaucugaucuggcuaa

SEQ ID NO: 1804200 - RNA, 19 nt, Artificial Sequence
  Description of Artificial Sequence: Synthetic oligonucleotide
  Antisense strand to SEQ ID NO: 1804199
uuagccagaucagaucucc

SEQ ID NO: 1804201 - RNA, 19 nt, Artificial Sequence
  Description of Artificial Sequence: Synthetic oligonucleotide
  Sense strand starting at position 3856 of SEQ ID NO: 1563221
auaagcuaacuuugggaga

SEQ ID NO: 1804202 - RNA, 19 nt, Artificial Sequence
  Description of Artificial Sequence: Synthetic oligonucleotide
  Antisense strand to SEQ ID NO: 1804201
ucucccaaaguuagcuuau

SEQ ID NO: 1804203 - RNA, 19 nt, Artificial Sequence
  Description of Artificial Sequence: Synthetic oligonucleotide
  Sense strand starting at position 3921 of SEQ ID NO: 1563221
accaaaugccuuuguaaag

SEQ ID NO: 1804204 - RNA, 19 nt, Artificial Sequence
  Description of Artificial Sequence: Synthetic oligonucleotide
  Antisense strand to SEQ ID NO: 1804203
cuuuacaaaggcauuuggu

SEQ ID NO: 1804205 - RNA, 19 nt, Artificial Sequence
  Description of Artificial Sequence: Synthetic oligonucleotide
  Sense strand starting at position 166 of SEQ ID NO: 1563222
aguacuaccuccuccauga

SEQ ID NO: 1804206 - RNA, 19 nt, Artificial Sequence
  Description of Artificial Sequence: Synthetic oligonucleotide
  Antisense strand to SEQ ID NO: 1804205
ucauggaggagguaguacu

SEQ ID NO: 1804207 - RNA, 19 nt, Artificial Sequence
  Description of Artificial Sequence: Synthetic oligonucleotide
  Sense strand starting at position 272 of SEQ ID NO: 1563222
cuuggcauacuguaacauu

SEQ ID NO: 1804208 - RNA, 19 nt, Artificial Sequence
  Description of Artificial Sequence: Synthetic oligonucleotide
  Antisense strand to SEQ ID NO: 1804207
aauguuacaguaugccaag

SEQ ID NO: 1804209 - RNA, 19 nt, Artificial Sequence
  Description of Artificial Sequence: Synthetic oligonucleotide
  Sense strand starting at position 312 of SEQ ID NO: 1563222
uccacuauacugggaacuu

SEQ ID NO: 1804210 - RNA, 19 nt, Artificial Sequence
  Description of Artificial Sequence: Synthetic oligonucleotide
  Antisense strand to SEQ ID NO: 1804209
aaguucccaguauagugga

SEQ ID NO: 1804211 - RNA, 19 nt, Artificial Sequence
  Description of Artificial Sequence: Synthetic oligonucleotide
  Sense strand starting at position 324 of SEQ ID NO: 1563222
ggaacuucuagaggucgga

SEQ ID NO: 1804212 - RNA, 19 nt, Artificial Sequence
  Description of Artificial Sequence: Synthetic oligonucleotide
  Antisense strand to SEQ ID NO: 1804211
uccgaccucuagaaguucc

SEQ ID NO: 1804213 - RNA, 19 nt, Artificial Sequence
  Description of Artificial Sequence: Synthetic oligonucleotide
  Sense strand starting at position 487 of SEQ ID NO: 1563222
gguuguaugacauggguaa

SEQ ID NO: 1804214 - RNA, 19 nt, Artificial Sequence
  Description of Artificial Sequence: Synthetic oligonucleotide
  Antisense strand to SEQ ID NO: 1804213
uuacccaugucauacaacc

SEQ ID NO: 1804215 - RNA, 19 nt, Artificial Sequence
  Description of Artificial Sequence: Synthetic oligonucleotide
  Sense strand starting at position 488 of SEQ ID NO: 1563222
guuguaugacauggguaag

SEQ ID NO: 1804216 - RNA, 19 nt, Artificial Sequence
  Description of Artificial Sequence: Synthetic oligonucleotide
  Antisense strand to SEQ ID NO: 1804215
cuuacccaugucauacaac

SEQ ID NO: 1804217 - RNA, 19 nt, Artificial Sequence
  Description of Artificial Sequence: Synthetic oligonucleotide
  Sense strand starting at position 491 of SEQ ID NO: 1563222
guaugacauggguaaguga

SEQ ID NO: 1804218 - RNA, 19 nt, Artificial Sequence
  Description of Artificial Sequence: Synthetic oligonucleotide
  Antisense strand to SEQ ID NO: 1804217
ucacuuacccaugucauac

SEQ ID NO: 1804219 - RNA, 19 nt, Artificial Sequence
  Description of Artificial Sequence: Synthetic oligonucleotide
  Sense strand starting at position 624 of SEQ ID NO: 1563222
guaaucucacaguaagggu

SEQ ID NO: 1804220 - RNA, 19 nt, Artificial Sequence
  Description of Artificial Sequence: Synthetic oligonucleotide
  Antisense strand to SEQ ID NO: 1804219
acccuuacugugagauuac

SEQ ID NO: 1804221 - RNA, 19 nt, Artificial Sequence
  Description of Artificial Sequence: Synthetic oligonucleotide
  Sense strand starting at position 637 of SEQ ID NO: 1563222
aaggguuagguacgagaau

SEQ ID NO: 1804222 - RNA, 19 nt, Artificial Sequence
  Description of Artificial Sequence: Synthetic oligonucleotide
  Antisense strand to SEQ ID NO: 1804221
auucucguaccuaacccuu

SEQ ID NO: 1804223 - RNA, 19 nt, Artificial Sequence
  Description of Artificial Sequence: Synthetic oligonucleotide
  Sense strand starting at position 718 of SEQ ID NO: 1563222
gcuacagauugaucucacu

SEQ ID NO: 1804224 - RNA, 19 nt, Artificial Sequence
  Description of Artificial Sequence: Synthetic oligonucleotide
  Antisense strand to SEQ ID NO: 1804223
agugagaucaaucuguagc

SEQ ID NO: 1804225 - RNA, 19 nt, Artificial Sequence
  Description of Artificial Sequence: Synthetic oligonucleotide
  Sense strand starting at position 724 of SEQ ID NO: 1563222
gauugaucucacuagguuc

SEQ ID NO: 1804226 - RNA, 19 nt, Artificial Sequence
  Description of Artificial Sequence: Synthetic oligonucleotide
  Antisense strand to SEQ ID NO: 1804225
gaaccuagugagaucaauc

SEQ ID NO: 1804227 - RNA, 19 nt, Artificial Sequence
  Description of Artificial Sequence: Synthetic oligonucleotide
  Sense strand starting at position 731 of SEQ ID NO: 1563222
cucacuagguucccaagaa

SEQ ID NO: 1804228 - RNA, 19 nt, Artificial Sequence
  Description of Artificial Sequence: Synthetic oligonucleotide
  Antisense strand to SEQ ID NO: 1804227
uucuugggaaccuagugag

SEQ ID NO: 1804229 - RNA, 19 nt, Artificial Sequence
  Description of Artificial Sequence: Synthetic oligonucleotide
  Sense strand starting at position 743 of SEQ ID NO: 1563222
ccaagaauuccuugaaguu

SEQ ID NO: 1804230 - RNA, 19 nt, Artificial Sequence
  Description of Artificial Sequence: Synthetic oligonucleotide
  Antisense strand to SEQ ID NO: 1804229
aacuucaaggaauucuugg

SEQ ID NO: 1804231 - RNA, 19 nt, Artificial Sequence
  Description of Artificial Sequence: Synthetic oligonucleotide
  Sense strand starting at position 769 of SEQ ID NO: 1563222
gucugcauucucuagagag

SEQ ID NO: 1804232 - RNA, 19 nt, Artificial Sequence
  Description of Artificial Sequence: Synthetic oligonucleotide
  Antisense strand to SEQ ID NO: 1804231
cucucuagagaaugcagac

SEQ ID NO: 1804233 - RNA, 19 nt, Artificial Sequence
  Description of Artificial Sequence: Synthetic oligonucleotide
  Sense strand starting at position 771 of SEQ ID NO: 1563222
cugcauucucuagagaguc

SEQ ID NO: 1804234 - RNA, 19 nt, Artificial Sequence
  Description of Artificial Sequence: Synthetic oligonucleotide
  Antisense strand to SEQ ID NO: 1804233
gacucucuagagaaugcag

SEQ ID NO: 1804235 - RNA, 19 nt, Artificial Sequence
  Description of Artificial Sequence: Synthetic oligonucleotide
  Sense strand starting at position 1041 of SEQ ID NO: 1563222
ccacuaucuguguaccauu

SEQ ID NO: 1804236 - RNA, 19 nt, Artificial Sequence
  Description of Artificial Sequence: Synthetic oligonucleotide
  Antisense strand to SEQ ID NO: 1804235
aaugguacacagauagugg

SEQ ID NO: 1804237 - RNA, 19 nt, Artificial Sequence
  Description of Artificial Sequence: Synthetic oligonucleotide
  Sense strand starting at position 1048 of SEQ ID NO: 1563222
cuguguaccauuugcaagu

SEQ ID NO: 1804238 - RNA, 19 nt, Artificial Sequence
  Description of Artificial Sequence: Synthetic oligonucleotide
  Antisense strand to SEQ ID NO: 1804237
acuugcaaaugguacacag

SEQ ID NO: 1804239 - RNA, 19 nt, Artificial Sequence
  Description of Artificial Sequence: Synthetic oligonucleotide
  Sense strand starting at position 1101 of SEQ ID NO: 1563222
ggcuaauugcaucaagaca

SEQ ID NO: 1804240 - RNA, 19 nt, Artificial Sequence
  Description of Artificial Sequence: Synthetic oligonucleotide
  Antisense strand to SEQ ID NO: 1804239
ugucuugaugcaauuagcc

SEQ ID NO: 1804241 - RNA, 19 nt, Artificial Sequence
  Description of Artificial Sequence: Synthetic oligonucleotide
  Sense strand starting at position 1189 of SEQ ID NO: 1563222
gauguaagcuuauuuaugu

SEQ ID NO: 1804242 - RNA, 19 nt, Artificial Sequence
  Description of Artificial Sequence: Synthetic oligonucleotide
  Antisense strand to SEQ ID NO: 1804241
acauaaauaagcuuacauc

SEQ ID NO: 1804243 - RNA, 19 nt, Artificial Sequence
  Description of Artificial Sequence: Synthetic oligonucleotide
  Sense strand starting at position 1298 of SEQ ID NO: 1563222
uggauaugucucuacaguu

SEQ ID NO: 1804244 - RNA, 19 nt, Artificial Sequence
  Description of Artificial Sequence: Synthetic oligonucleotide
  Antisense strand to SEQ ID NO: 1804243
aacuguagagacauaucca

SEQ ID NO: 1804245 - RNA, 19 nt, Artificial Sequence
  Description of Artificial Sequence: Synthetic oligonucleotide
  Sense strand starting at position 1342 of SEQ ID NO: 1563222
guuucugugaaagauaggu

SEQ ID NO: 1804246 - RNA, 19 nt, Artificial Sequence
  Description of Artificial Sequence: Synthetic oligonucleotide
  Antisense strand to SEQ ID NO: 1804245
accuaucuuucacagaaac

SEQ ID NO: 1804247 - RNA, 19 nt, Artificial Sequence
  Description of Artificial Sequence: Synthetic oligonucleotide
  Sense strand starting at position 1528 of SEQ ID NO: 1563222
gcaacaaagccugacagua

SEQ ID NO: 1804248 - RNA, 19 nt, Artificial Sequence
  Description of Artificial Sequence: Synthetic oligonucleotide
  Antisense strand to SEQ ID NO: 1804247
uacugucaggcuuuguugc

SEQ ID NO: 1804249 - RNA, 19 nt, Artificial Sequence
  Description of Artificial Sequence: Synthetic oligonucleotide
  Sense strand starting at position 2120 of SEQ ID NO: 1563222
ggaccaaaguugccucaua

SEQ ID NO: 1804250 - RNA, 19 nt, Artificial Sequence
  Description of Artificial Sequence: Synthetic oligonucleotide
  Antisense strand to SEQ ID NO: 1804249
uaugaggcaacuuuggucc

SEQ ID NO: 1804251 - RNA, 19 nt, Artificial Sequence
  Description of Artificial Sequence: Synthetic oligonucleotide
  Sense strand starting at position 2441 of SEQ ID NO: 1563222
gcuaauaaucugcagugaa

SEQ ID NO: 1804252 - RNA, 19 nt, Artificial Sequence
  Description of Artificial Sequence: Synthetic oligonucleotide
  Antisense strand to SEQ ID NO: 1804251
uucacugcagauuauuagc

SEQ ID NO: 1804253 - RNA, 19 nt, Artificial Sequence
  Description of Artificial Sequence: Synthetic oligonucleotide
  Sense strand starting at position 2485 of SEQ ID NO: 1563222
guagacuccugggucugaa

SEQ ID NO: 1804254 - RNA, 19 nt, Artificial Sequence
  Description of Artificial Sequence: Synthetic oligonucleotide
  Antisense strand to SEQ ID NO: 1804253
uucagacccaggagucuac

SEQ ID NO: 1804255 - RNA, 19 nt, Artificial Sequence
  Description of Artificial Sequence: Synthetic oligonucleotide
  Sense strand starting at position 2515 of SEQ ID NO: 1563222
ugggauggcguccagaaau

SEQ ID NO: 1804256 - RNA, 19 nt, Artificial Sequence
  Description of Artificial Sequence: Synthetic oligonucleotide
  Antisense strand to SEQ ID NO: 1804255
auuucuggacgccauccca

SEQ ID NO: 1804257 - RNA, 19 nt, Artificial Sequence
  Description of Artificial Sequence: Synthetic oligonucleotide
  Sense strand starting at position 2526 of SEQ ID NO: 1563222
ccagaaaucuggcucuuua

SEQ ID NO: 1804258 - RNA, 19 nt, Artificial Sequence
  Description of Artificial Sequence: Synthetic oligonucleotide
  Antisense strand to SEQ ID NO: 1804257
uaaagagccagauuucugg

SEQ ID NO: 1804259 - RNA, 19 nt, Artificial Sequence
  Description of Artificial Sequence: Synthetic oligonucleotide
  Sense strand starting at position 2542 of SEQ ID NO: 1563222
uuaccagugcuccaagaag

SEQ ID NO: 1804260 - RNA, 19 nt, Artificial Sequence
  Description of Artificial Sequence: Synthetic oligonucleotide
  Antisense strand to SEQ ID NO: 1804259
cuucuuggagcacugguaa

SEQ ID NO: 1804261 - RNA, 19 nt, Artificial Sequence
  Description of Artificial Sequence: Synthetic oligonucleotide
  Sense strand starting at position 2726 of SEQ ID NO: 1563222
uaacuagugcaucaggauu

SEQ ID NO: 1804262 - RNA, 19 nt, Artificial Sequence
  Description of Artificial Sequence: Synthetic oligonucleotide
  Antisense strand to SEQ ID NO: 1804261
aauccugaugcacuaguua

SEQ ID NO: 1804263 - RNA, 19 nt, Artificial Sequence
  Description of Artificial Sequence: Synthetic oligonucleotide
  Sense strand starting at position 2781 of SEQ ID NO: 1563222
guuuaaggacucugacuua

SEQ ID NO: 1804264 - RNA, 19 nt, Artificial Sequence
  Description of Artificial Sequence: Synthetic oligonucleotide
  Antisense strand to SEQ ID NO: 1804263
uaagucagaguccuuaaac

SEQ ID NO: 1804265 - RNA, 19 nt, Artificial Sequence
  Description of Artificial Sequence: Synthetic oligonucleotide
  Sense strand starting at position 2827 of SEQ ID NO: 1563222
uugagauccuuauugggcu

SEQ ID NO: 1804266 - RNA, 19 nt, Artificial Sequence
  Description of Artificial Sequence: Synthetic oligonucleotide
  Antisense strand to SEQ ID NO: 1804265
agcccaauaaggaucucaa

SEQ ID NO: 1804267 - RNA, 19 nt, Artificial Sequence
  Description of Artificial Sequence: Synthetic oligonucleotide
  Sense strand starting at position 2966 of SEQ ID NO: 1563222
gaaagauaguagguauagu

SEQ ID NO: 1804268 - RNA, 19 nt, Artificial Sequence
  Description of Artificial Sequence: Synthetic oligonucleotide
  Antisense strand to SEQ ID NO: 1804267
acuauaccuacuaucuuuc

SEQ ID NO: 1804269 - RNA, 19 nt, Artificial Sequence
  Description of Artificial Sequence: Synthetic oligonucleotide
  Sense strand starting at position 3083 of SEQ ID NO: 1563222
gugggaggccuuuaccuua

SEQ ID NO: 1804270 - RNA, 19 nt, Artificial Sequence
  Description of Artificial Sequence: Synthetic oligonucleotide
  Antisense strand to SEQ ID NO: 1804269
uaagguaaaggccucccac

SEQ ID NO: 1804271 - RNA, 19 nt, Artificial Sequence
  Description of Artificial Sequence: Synthetic oligonucleotide
  Sense strand starting at position 3121 of SEQ ID NO: 1563222
cagacauuacuguggaaca

SEQ ID NO: 1804272 - RNA, 19 nt, Artificial Sequence
  Description of Artificial Sequence: Synthetic oligonucleotide
  Antisense strand to SEQ ID NO: 1804271
uguuccacaguaaugucug

SEQ ID NO: 1804273 - RNA, 19 nt, Artificial Sequence
  Description of Artificial Sequence: Synthetic oligonucleotide
  Sense strand starting at position 3149 of SEQ ID NO: 1563222
uugguaaucaggcagaucu

SEQ ID NO: 1804274 - RNA, 19 nt, Artificial Sequence
  Description of Artificial Sequence: Synthetic oligonucleotide
  Antisense strand to SEQ ID NO: 1804273
agaucugccugauuaccaa

SEQ ID NO: 1804275 - RNA, 19 nt, Artificial Sequence
  Description of Artificial Sequence: Synthetic oligonucleotide
  Sense strand starting at position 3151 of SEQ ID NO: 1563222
gguaaucaggcagaucugu

SEQ ID NO: 1804276 - RNA, 19 nt, Artificial Sequence
  Description of Artificial Sequence: Synthetic oligonucleotide
  Antisense strand to SEQ ID NO: 1804275
acagaucugccugauuacc

SEQ ID NO: 1804277 - RNA, 19 nt, Artificial Sequence
  Description of Artificial Sequence: Synthetic oligonucleotide
  Sense strand starting at position 3216 of SEQ ID NO: 1563222
gcaaauuucuagcuguaau

SEQ ID NO: 1804278 - RNA, 19 nt, Artificial Sequence
  Description of Artificial Sequence: Synthetic oligonucleotide
  Antisense strand to SEQ ID NO: 1804277
auuacagcuagaaauuugc

SEQ ID NO: 1804279 - RNA, 19 nt, Artificial Sequence
  Description of Artificial Sequence: Synthetic oligonucleotide
  Sense strand starting at position 3536 of SEQ ID NO: 1563222
ggguuacuuuaagcaacau

SEQ ID NO: 1804280 - RNA, 19 nt, Artificial Sequence
  Description of Artificial Sequence: Synthetic oligonucleotide
  Antisense strand to SEQ ID NO: 1804279
auguugcuuaaaguaaccc

SEQ ID NO: 1804281 - RNA, 19 nt, Artificial Sequence
  Description of Artificial Sequence: Synthetic oligonucleotide
  Sense strand starting at position 3767 of SEQ ID NO: 1563222
gcacauuaaauggaucgau

SEQ ID NO: 1804282 - RNA, 19 nt, Artificial Sequence
  Description of Artificial Sequence: Synthetic oligonucleotide
  Antisense strand to SEQ ID NO: 1804281
aucgauccauuuaaugugc

SEQ ID NO: 1804283 - RNA, 19 nt, Artificial Sequence
  Description of Artificial Sequence: Synthetic oligonucleotide
  Sense strand starting at position 3968 of SEQ ID NO: 1563222
cucuguuaagguugaagau

SEQ ID NO: 1804284 - RNA, 19 nt, Artificial Sequence
  Description of Artificial Sequence: Synthetic oligonucleotide
  Antisense strand to SEQ ID NO: 1804283
aucuucaaccuuaacagag

SEQ ID NO: 1804285 - RNA, 19 nt, Artificial Sequence
  Description of Artificial Sequence: Synthetic oligonucleotide
  Sense strand starting at position 50 of SEQ ID NO: 1563223
ccaaguuaugccugagagg

SEQ ID NO: 1804286 - RNA, 19 nt, Artificial Sequence
  Description of Artificial Sequence: Synthetic oligonucleotide
  Antisense strand to SEQ ID NO: 1804285
ccucucaggcauaacuugg

SEQ ID NO: 1804287 - RNA, 19 nt, Artificial Sequence
  Description of Artificial Sequence: Synthetic oligonucleotide
  Sense strand starting at position 91 of SEQ ID NO: 1563223
aauggagagucacuuccua

SEQ ID NO: 1804288 - RNA, 19 nt, Artificial Sequence
  Description of Artificial Sequence: Synthetic oligonucleotide
  Antisense strand to SEQ ID NO: 1804287
uaggaagugacucuccauu

SEQ ID NO: 1804289 - RNA, 19 nt, Artificial Sequence
  Description of Artificial Sequence: Synthetic oligonucleotide
  Sense strand starting at position 176 of SEQ ID NO: 1563223
auauuccagugguuaauaa

SEQ ID NO: 1804290 - RNA, 19 nt, Artificial Sequence
  Description of Artificial Sequence: Synthetic oligonucleotide
  Antisense strand to SEQ ID NO: 1804289
uuauuaaccacuggaauau

SEQ ID NO: 1804291 - RNA, 19 nt, Artificial Sequence
  Description of Artificial Sequence: Synthetic oligonucleotide
  Sense strand starting at position 196 of SEQ ID NO: 1563223
cuuguuugauuaucuugaa

SEQ ID NO: 1804292 - RNA, 19 nt, Artificial Sequence
  Description of Artificial Sequence: Synthetic oligonucleotide
  Antisense strand to SEQ ID NO: 1804291
uucaagauaaucaaacaag

SEQ ID NO: 1804293 - RNA, 19 nt, Artificial Sequence
  Description of Artificial Sequence: Synthetic oligonucleotide
  Sense strand starting at position 231 of SEQ ID NO: 1563223
cuaccaugugguuaauaua

SEQ ID NO: 1804294 - RNA, 19 nt, Artificial Sequence
  Description of Artificial Sequence: Synthetic oligonucleotide
  Antisense strand to SEQ ID NO: 1804293
uauauuaaccacaugguag

SEQ ID NO: 1804295 - RNA, 19 nt, Artificial Sequence
  Description of Artificial Sequence: Synthetic oligonucleotide
  Sense strand starting at position 330 of SEQ ID NO: 1563223
auaguagaauucucaacug

SEQ ID NO: 1804296 - RNA, 19 nt, Artificial Sequence
  Description of Artificial Sequence: Synthetic oligonucleotide
  Antisense strand to SEQ ID NO: 1804295
caguugagaauucuacuau

SEQ ID NO: 1804297 - RNA, 19 nt, Artificial Sequence
  Description of Artificial Sequence: Synthetic oligonucleotide
  Sense strand starting at position 597 of SEQ ID NO: 1563223
aguuauaauuugccuuagu

SEQ ID NO: 1804298 - RNA, 19 nt, Artificial Sequence
  Description of Artificial Sequence: Synthetic oligonucleotide
  Antisense strand to SEQ ID NO: 1804297
acuaaggcaaauuauaacu

SEQ ID NO: 1804299 - RNA, 19 nt, Artificial Sequence
  Description of Artificial Sequence: Synthetic oligonucleotide
  Sense strand starting at position 598 of SEQ ID NO: 1563223
guuauaauuugccuuagua

SEQ ID NO: 1804300 - RNA, 19 nt, Artificial Sequence
  Description of Artificial Sequence: Synthetic oligonucleotide
  Antisense strand to SEQ ID NO: 1804299
uacuaaggcaaauuauaac

SEQ ID NO: 1804301 - RNA, 19 nt, Artificial Sequence
  Description of Artificial Sequence: Synthetic oligonucleotide
  Sense strand starting at position 1008 of SEQ ID NO: 1563223
guaaguucucuuuaaccuu

SEQ ID NO: 1804302 - RNA, 19 nt, Artificial Sequence
  Description of Artificial Sequence: Synthetic oligonucleotide
  Antisense strand to SEQ ID NO: 1804301
aagguuaaagagaacuuac

SEQ ID NO: 1804303 - RNA, 19 nt, Artificial Sequence
  Description of Artificial Sequence: Synthetic oligonucleotide
  Sense strand starting at position 1042 of SEQ ID NO: 1563223
acgauuuccuauuaaggga

SEQ ID NO: 1804304 - RNA, 19 nt, Artificial Sequence
  Description of Artificial Sequence: Synthetic oligonucleotide
  Antisense strand to SEQ ID NO: 1804303
ucccuuaauaggaaaucgu

SEQ ID NO: 1804305 - RNA, 19 nt, Artificial Sequence
  Description of Artificial Sequence: Synthetic oligonucleotide
  Sense strand starting at position 1045 of SEQ ID NO: 1563223
auuuccuauuaagggauaa

SEQ ID NO: 1804306 - RNA, 19 nt, Artificial Sequence
  Description of Artificial Sequence: Synthetic oligonucleotide
  Antisense strand to SEQ ID NO: 1804305
uuaucccuuaauaggaaau

SEQ ID NO: 1804307 - RNA, 19 nt, Artificial Sequence
  Description of Artificial Sequence: Synthetic oligonucleotide
  Sense strand starting at position 1297 of SEQ ID NO: 1563223
guugaauugaauuggauau

SEQ ID NO: 1804308 - RNA, 19 nt, Artificial Sequence
  Description of Artificial Sequence: Synthetic oligonucleotide
  Antisense strand to SEQ ID NO: 1804307
auauccaauucaauucaac

SEQ ID NO: 1804309 - RNA, 19 nt, Artificial Sequence
  Description of Artificial Sequence: Synthetic oligonucleotide
  Sense strand starting at position 1367 of SEQ ID NO: 1563223
cggccuguaauuugaccaa

SEQ ID NO: 1804310 - RNA, 19 nt, Artificial Sequence
  Description of Artificial Sequence: Synthetic oligonucleotide
  Antisense strand to SEQ ID NO: 1804309
uuggucaaauuacaggccg

SEQ ID NO: 1804311 - RNA, 19 nt, Artificial Sequence
  Description of Artificial Sequence: Synthetic oligonucleotide
  Sense strand starting at position 1441 of SEQ ID NO: 1563223
ugaucauggccagaucuuu

SEQ ID NO: 1804312 - RNA, 19 nt, Artificial Sequence
  Description of Artificial Sequence: Synthetic oligonucleotide
  Antisense strand to SEQ ID NO: 1804311
aaagaucuggccaugauca

SEQ ID NO: 1804313 - RNA, 19 nt, Artificial Sequence
  Description of Artificial Sequence: Synthetic oligonucleotide
  Sense strand starting at position 1446 of SEQ ID NO: 1563223
auggccagaucuuuaacau

SEQ ID NO: 1804314 - RNA, 19 nt, Artificial Sequence
  Description of Artificial Sequence: Synthetic oligonucleotide
  Antisense strand to SEQ ID NO: 1804313
auguuaaagaucuggccau

SEQ ID NO: 1804315 - RNA, 19 nt, Artificial Sequence
  Description of Artificial Sequence: Synthetic oligonucleotide
  Sense strand starting at position 1447 of SEQ ID NO: 1563223
uggccagaucuuuaacaua

SEQ ID NO: 1804316 - RNA, 19 nt, Artificial Sequence
  Description of Artificial Sequence: Synthetic oligonucleotide
  Antisense strand to SEQ ID NO: 1804315
uauguuaaagaucuggcca

SEQ ID NO: 1804317 - RNA, 19 nt, Artificial Sequence
  Description of Artificial Sequence: Synthetic oligonucleotide
  Sense strand starting at position 1822 of SEQ ID NO: 1563223
gaaauugcaucguuauuug

SEQ ID NO: 1804318 - RNA, 19 nt, Artificial Sequence
  Description of Artificial Sequence: Synthetic oligonucleotide
  Antisense strand to SEQ ID NO: 1804317
caaauaacgaugcaauuuc

SEQ ID NO: 1804319 - RNA, 19 nt, Artificial Sequence
  Description of Artificial Sequence: Synthetic oligonucleotide
  Sense strand starting at position 1825 of SEQ ID NO: 1563223
auugcaucguuauuugaau

SEQ ID NO: 1804320 - RNA, 19 nt, Artificial Sequence
  Description of Artificial Sequence: Synthetic oligonucleotide
  Antisense strand to SEQ ID NO: 1804319
auucaaauaacgaugcaau

SEQ ID NO: 1804321 - RNA, 19 nt, Artificial Sequence
  Description of Artificial Sequence: Synthetic oligonucleotide
  Sense strand starting at position 1826 of SEQ ID NO: 1563223
uugcaucguuauuugaauu

SEQ ID NO: 1804322 - RNA, 19 nt, Artificial Sequence
  Description of Artificial Sequence: Synthetic oligonucleotide
  Antisense strand to SEQ ID NO: 1804321
aauucaaauaacgaugcaa

SEQ ID NO: 1804323 - RNA, 19 nt, Artificial Sequence
  Description of Artificial Sequence: Synthetic oligonucleotide
  Sense strand starting at position 1876 of SEQ ID NO: 1563223
ugauaaucugaaggcuuua

SEQ ID NO: 1804324 - RNA, 19 nt, Artificial Sequence
  Description of Artificial Sequence: Synthetic oligonucleotide
  Antisense strand to SEQ ID NO: 1804323
uaaagccuucagauuauca

SEQ ID NO: 1804325 - RNA, 19 nt, Artificial Sequence
  Description of Artificial Sequence: Synthetic oligonucleotide
  Sense strand starting at position 1887 of SEQ ID NO: 1563223
aggcuuuacucaccuuaga

SEQ ID NO: 1804326 - RNA, 19 nt, Artificial Sequence
  Description of Artificial Sequence: Synthetic oligonucleotide
  Antisense strand to SEQ ID NO: 1804325
ucuaaggugaguaaagccu

SEQ ID NO: 1804327 - RNA, 19 nt, Artificial Sequence
  Description of Artificial Sequence: Synthetic oligonucleotide
  Sense strand starting at position 2031 of SEQ ID NO: 1563223
agaagauauuugcauccca

SEQ ID NO: 1804328 - RNA, 19 nt, Artificial Sequence
  Description of Artificial Sequence: Synthetic oligonucleotide
  Antisense strand to SEQ ID NO: 1804327
ugggaugcaaauaucuucu

SEQ ID NO: 1804329 - RNA, 19 nt, Artificial Sequence
  Description of Artificial Sequence: Synthetic oligonucleotide
  Sense strand starting at position 2082 of SEQ ID NO: 1563223
ggcauugcucugucugcau

SEQ ID NO: 1804330 - RNA, 19 nt, Artificial Sequence
  Description of Artificial Sequence: Synthetic oligonucleotide
  Antisense strand to SEQ ID NO: 1804329
augcagacagagcaaugcc

SEQ ID NO: 1804331 - RNA, 19 nt, Artificial Sequence
  Description of Artificial Sequence: Synthetic oligonucleotide
  Sense strand starting at position 2171 of SEQ ID NO: 1563223
cccacuauggcagaagagu

SEQ ID NO: 1804332 - RNA, 19 nt, Artificial Sequence
  Description of Artificial Sequence: Synthetic oligonucleotide
  Antisense strand to SEQ ID NO: 1804331
acucuucugccauaguggg

SEQ ID NO: 1804333 - RNA, 19 nt, Artificial Sequence
  Description of Artificial Sequence: Synthetic oligonucleotide
  Sense strand starting at position 2208 of SEQ ID NO: 1563223
agaaauacagccuggcauu

SEQ ID NO: 1804334 - RNA, 19 nt, Artificial Sequence
  Description of Artificial Sequence: Synthetic oligonucleotide
  Antisense strand to SEQ ID NO: 1804333
aaugccaggcuguauuucu

SEQ ID NO: 1804335 - RNA, 19 nt, Artificial Sequence
  Description of Artificial Sequence: Synthetic oligonucleotide
  Sense strand starting at position 2396 of SEQ ID NO: 1563223
guggaaaucuuauccauuc

SEQ ID NO: 1804336 - RNA, 19 nt, Artificial Sequence
  Description of Artificial Sequence: Synthetic oligonucleotide
  Antisense strand to SEQ ID NO: 1804335
gaauggauaagauuuccac

SEQ ID NO: 1804337 - RNA, 19 nt, Artificial Sequence
  Description of Artificial Sequence: Synthetic oligonucleotide
  Sense strand starting at position 2522 of SEQ ID NO: 1563223
acuauuugccauggucacu

SEQ ID NO: 1804338 - RNA, 19 nt, Artificial Sequence
  Description of Artificial Sequence: Synthetic oligonucleotide
  Antisense strand to SEQ ID NO: 1804337
agugaccauggcaaauagu

SEQ ID NO: 1804339 - RNA, 19 nt, Artificial Sequence
  Description of Artificial Sequence: Synthetic oligonucleotide
  Sense strand starting at position 2547 of SEQ ID NO: 1563223
uuugcccagugaucaaaga

SEQ ID NO: 1804340 - RNA, 19 nt, Artificial Sequence
  Description of Artificial Sequence: Synthetic oligonucleotide
  Antisense strand to SEQ ID NO: 1804339
ucuuugaucacugggcaaa

SEQ ID NO: 1804341 - RNA, 19 nt, Artificial Sequence
  Description of Artificial Sequence: Synthetic oligonucleotide
  Sense strand starting at position 2591 of SEQ ID NO: 1563223
agccuauggagguaagagu

SEQ ID NO: 1804342 - RNA, 19 nt, Artificial Sequence
  Description of Artificial Sequence: Synthetic oligonucleotide
  Antisense strand to SEQ ID NO: 1804341
acucuuaccuccauaggcu

SEQ ID NO: 1804343 - RNA, 19 nt, Artificial Sequence
  Description of Artificial Sequence: Synthetic oligonucleotide
  Sense strand starting at position 2691 of SEQ ID NO: 1563223
agucuguggccggaagaga

SEQ ID NO: 1804344 - RNA, 19 nt, Artificial Sequence
  Description of Artificial Sequence: Synthetic oligonucleotide
  Antisense strand to SEQ ID NO: 1804343
ucucuuccggccacagacu

SEQ ID NO: 1804345 - RNA, 19 nt, Artificial Sequence
  Description of Artificial Sequence: Synthetic oligonucleotide
  Sense strand starting at position 2777 of SEQ ID NO: 1563223
gcaauaucacauuggacau

SEQ ID NO: 1804346 - RNA, 19 nt, Artificial Sequence
  Description of Artificial Sequence: Synthetic oligonucleotide
  Antisense strand to SEQ ID NO: 1804345
auguccaaugugauauugc

SEQ ID NO: 1804347 - RNA, 19 nt, Artificial Sequence
  Description of Artificial Sequence: Synthetic oligonucleotide
  Sense strand starting at position 2930 of SEQ ID NO: 1563223
uagaucugauuaguugaau

SEQ ID NO: 1804348 - RNA, 19 nt, Artificial Sequence
  Description of Artificial Sequence: Synthetic oligonucleotide
  Antisense strand to SEQ ID NO: 1804347
auucaacuaaucagaucua

SEQ ID NO: 1804349 - RNA, 19 nt, Artificial Sequence
  Description of Artificial Sequence: Synthetic oligonucleotide
  Sense strand starting at position 2931 of SEQ ID NO: 1563223
agaucugauuaguugaaua

SEQ ID NO: 1804350 - RNA, 19 nt, Artificial Sequence
  Description of Artificial Sequence: Synthetic oligonucleotide
  Antisense strand to SEQ ID NO: 1804349
uauucaacuaaucagaucu

SEQ ID NO: 1804351 - RNA, 19 nt, Artificial Sequence
  Description of Artificial Sequence: Synthetic oligonucleotide
  Sense strand starting at position 2983 of SEQ ID NO: 1563223
auugauuugugacauuaac

SEQ ID NO: 1804352 - RNA, 19 nt, Artificial Sequence
  Description of Artificial Sequence: Synthetic oligonucleotide
  Antisense strand to SEQ ID NO: 1804351
guuaaugucacaaaucaau

SEQ ID NO: 1804353 - RNA, 19 nt, Artificial Sequence
  Description of Artificial Sequence: Synthetic oligonucleotide
  Sense strand starting at position 3049 of SEQ ID NO: 1563223
agucuuucccaguacuaug

SEQ ID NO: 1804354 - RNA, 19 nt, Artificial Sequence
  Description of Artificial Sequence: Synthetic oligonucleotide
  Antisense strand to SEQ ID NO: 1804353
cauaguacugggaaagacu

SEQ ID NO: 1804355 - RNA, 19 nt, Artificial Sequence
  Description of Artificial Sequence: Synthetic oligonucleotide
  Sense strand starting at position 3578 of SEQ ID NO: 1563223
guaaaccuccaaggguuua

SEQ ID NO: 1804356 - RNA, 19 nt, Artificial Sequence
  Description of Artificial Sequence: Synthetic oligonucleotide
  Antisense strand to SEQ ID NO: 1804355
uaaacccuuggagguuuac

SEQ ID NO: 1804357 - RNA, 19 nt, Artificial Sequence
  Description of Artificial Sequence: Synthetic oligonucleotide
  Sense strand starting at position 3599 of SEQ ID NO: 1563223
agcguuguugcaucugaug

SEQ ID NO: 1804358 - RNA, 19 nt, Artificial Sequence
  Description of Artificial Sequence: Synthetic oligonucleotide
  Antisense strand to SEQ ID NO: 1804357
caucagaugcaacaacgcu

SEQ ID NO: 1804359 - RNA, 19 nt, Artificial Sequence
  Description of Artificial Sequence: Synthetic oligonucleotide
  Sense strand starting at position 3605 of SEQ ID NO: 1563223
guugcaucugaugaaauau

SEQ ID NO: 1804360 - RNA, 19 nt, Artificial Sequence
  Description of Artificial Sequence: Synthetic oligonucleotide
  Antisense strand to SEQ ID NO: 1804359
auauuucaucagaugcaac

SEQ ID NO: 1804361 - RNA, 19 nt, Artificial Sequence
  Description of Artificial Sequence: Synthetic oligonucleotide
  Sense strand starting at position 3761 of SEQ ID NO: 1563223
agcacaucucuagauguuu

SEQ ID NO: 1804362 - RNA, 19 nt, Artificial Sequence
  Description of Artificial Sequence: Synthetic oligonucleotide
  Antisense strand to SEQ ID NO: 1804361
aaacaucuagagaugugcu

SEQ ID NO: 1804363 - RNA, 19 nt, Artificial Sequence
  Description of Artificial Sequence: Synthetic oligonucleotide
  Sense strand starting at position 3855 of SEQ ID NO: 1563223
uauguuguucucguguaac

SEQ ID NO: 1804364 - RNA, 19 nt, Artificial Sequence
  Description of Artificial Sequence: Synthetic oligonucleotide
  Antisense strand to SEQ ID NO: 1804363
guuacacgagaacaacaua

SEQ ID NO: 1804365 - RNA, 19 nt, Artificial Sequence
  Description of Artificial Sequence: Synthetic oligonucleotide
  Sense strand starting at position 50 of SEQ ID NO: 1563224
uuaggaugcuggccaaaga

SEQ ID NO: 1804366 - RNA, 19 nt, Artificial Sequence
  Description of Artificial Sequence: Synthetic oligonucleotide
  Antisense strand to SEQ ID NO: 1804365
ucuuuggccagcauccuaa

SEQ ID NO: 1804367 - RNA, 19 nt, Artificial Sequence
  Description of Artificial Sequence: Synthetic oligonucleotide
  Sense strand starting at position 137 of SEQ ID NO: 1563224
aaaguugaucuuggcauga

SEQ ID NO: 1804368 - RNA, 19 nt, Artificial Sequence
  Description of Artificial Sequence: Synthetic oligonucleotide
  Antisense strand to SEQ ID NO: 1804367
ucaugccaagaucaacuuu

SEQ ID NO: 1804369 - RNA, 19 nt, Artificial Sequence
  Description of Artificial Sequence: Synthetic oligonucleotide
  Sense strand starting at position 141 of SEQ ID NO: 1563224
uugaucuuggcaugauaug

SEQ ID NO: 1804370 - RNA, 19 nt, Artificial Sequence
  Description of Artificial Sequence: Synthetic oligonucleotide
  Antisense strand to SEQ ID NO: 1804369
cauaucaugccaagaucaa

SEQ ID NO: 1804371 - RNA, 19 nt, Artificial Sequence
  Description of Artificial Sequence: Synthetic oligonucleotide
  Sense strand starting at position 195 of SEQ ID NO: 1563224
agcaucuuggagcaucaua

SEQ ID NO: 1804372 - RNA, 19 nt, Artificial Sequence
  Description of Artificial Sequence: Synthetic oligonucleotide
  Antisense strand to SEQ ID NO: 1804371
uaugaugcuccaagaugcu

SEQ ID NO: 1804373 - RNA, 19 nt, Artificial Sequence
  Description of Artificial Sequence: Synthetic oligonucleotide
  Sense strand starting at position 203 of SEQ ID NO: 1563224
ggagcaucauaccuuaauu

SEQ ID NO: 1804374 - RNA, 19 nt, Artificial Sequence
  Description of Artificial Sequence: Synthetic oligonucleotide
  Antisense strand to SEQ ID NO: 1804373
aauuaagguaugaugcucc

SEQ ID NO: 1804375 - RNA, 19 nt, Artificial Sequence
  Description of Artificial Sequence: Synthetic oligonucleotide
  Sense strand starting at position 463 of SEQ ID NO: 1563224
guaauaaauccaugagcua

SEQ ID NO: 1804376 - RNA, 19 nt, Artificial Sequence
  Description of Artificial Sequence: Synthetic oligonucleotide
  Antisense strand to SEQ ID NO: 1804375
uagcucauggauuuauuac

SEQ ID NO: 1804377 - RNA, 19 nt, Artificial Sequence
  Description of Artificial Sequence: Synthetic oligonucleotide
  Sense strand starting at position 482 of SEQ ID NO: 1563224
gcaucucaugcugaauuaa

SEQ ID NO: 1804378 - RNA, 19 nt, Artificial Sequence
  Description of Artificial Sequence: Synthetic oligonucleotide
  Antisense strand to SEQ ID NO: 1804377
uuaauucagcaugagaugc

SEQ ID NO: 1804379 - RNA, 19 nt, Artificial Sequence
  Description of Artificial Sequence: Synthetic oligonucleotide
  Sense strand starting at position 566 of SEQ ID NO: 1563224
cugcucugucucuauggaa

SEQ ID NO: 1804380 - RNA, 19 nt, Artificial Sequence
  Description of Artificial Sequence: Synthetic oligonucleotide
  Antisense strand to SEQ ID NO: 1804379
uuccauagagacagagcag

SEQ ID NO: 1804381 - RNA, 19 nt, Artificial Sequence
  Description of Artificial Sequence: Synthetic oligonucleotide
  Sense strand starting at position 737 of SEQ ID NO: 1563224
cugaucacuccauaggcaa

SEQ ID NO: 1804382 - RNA, 19 nt, Artificial Sequence
  Description of Artificial Sequence: Synthetic oligonucleotide
  Antisense strand to SEQ ID NO: 1804381
uugccuauggagugaucag

SEQ ID NO: 1804383 - RNA, 19 nt, Artificial Sequence
  Description of Artificial Sequence: Synthetic oligonucleotide
  Sense strand starting at position 952 of SEQ ID NO: 1563224
uccauccugagacgaguua

SEQ ID NO: 1804384 - RNA, 19 nt, Artificial Sequence
  Description of Artificial Sequence: Synthetic oligonucleotide
  Antisense strand to SEQ ID NO: 1804383
uaacucgucucaggaugga

SEQ ID NO: 1804385 - RNA, 19 nt, Artificial Sequence
  Description of Artificial Sequence: Synthetic oligonucleotide
  Sense strand starting at position 959 of SEQ ID NO: 1563224
ugagacgaguuaccauaaa

SEQ ID NO: 1804386 - RNA, 19 nt, Artificial Sequence
  Description of Artificial Sequence: Synthetic oligonucleotide
  Antisense strand to SEQ ID NO: 1804385
uuuaugguaacucgucuca

SEQ ID NO: 1804387 - RNA, 19 nt, Artificial Sequence
  Description of Artificial Sequence: Synthetic oligonucleotide
  Sense strand starting at position 995 of SEQ ID NO: 1563224
ccuuauugacuguguauuu

SEQ ID NO: 1804388 - RNA, 19 nt, Artificial Sequence
  Description of Artificial Sequence: Synthetic oligonucleotide
  Antisense strand to SEQ ID NO: 1804387
aaauacacagucaauaagg

SEQ ID NO: 1804389 - RNA, 19 nt, Artificial Sequence
  Description of Artificial Sequence: Synthetic oligonucleotide
  Sense strand starting at position 1036 of SEQ ID NO: 1563224
uaaauacuuggaugugacu

SEQ ID NO: 1804390 - RNA, 19 nt, Artificial Sequence
  Description of Artificial Sequence: Synthetic oligonucleotide
  Antisense strand to SEQ ID NO: 1804389
agucacauccaaguauuua

SEQ ID NO: 1804391 - RNA, 19 nt, Artificial Sequence
  Description of Artificial Sequence: Synthetic oligonucleotide
  Sense strand starting at position 1083 of SEQ ID NO: 1563224
ccgggcgaucauuagacau

SEQ ID NO: 1804392 - RNA, 19 nt, Artificial Sequence
  Description of Artificial Sequence: Synthetic oligonucleotide
  Antisense strand to SEQ ID NO: 1804391
augucuaaugaucgcccgg

SEQ ID NO: 1804393 - RNA, 19 nt, Artificial Sequence
  Description of Artificial Sequence: Synthetic oligonucleotide
  Sense strand starting at position 1439 of SEQ ID NO: 1563224
uucuaugucucuuuggaag

SEQ ID NO: 1804394 - RNA, 19 nt, Artificial Sequence
  Description of Artificial Sequence: Synthetic oligonucleotide
  Antisense strand to SEQ ID NO: 1804393
cuuccaaagagacauagaa

SEQ ID NO: 1804395 - RNA, 19 nt, Artificial Sequence
  Description of Artificial Sequence: Synthetic oligonucleotide
  Sense strand starting at position 1458 of SEQ ID NO: 1563224
caguuaugaggccaauaug

SEQ ID NO: 1804396 - RNA, 19 nt, Artificial Sequence
  Description of Artificial Sequence: Synthetic oligonucleotide
  Antisense strand to SEQ ID NO: 1804395
cauauuggccucauaacug

SEQ ID NO: 1804397 - RNA, 19 nt, Artificial Sequence
  Description of Artificial Sequence: Synthetic oligonucleotide
  Sense strand starting at position 1546 of SEQ ID NO: 1563224
gguagaacugguggugaua

SEQ ID NO: 1804398 - RNA, 19 nt, Artificial Sequence
  Description of Artificial Sequence: Synthetic oligonucleotide
  Antisense strand to SEQ ID NO: 1804397
uaucaccaccaguucuacc

SEQ ID NO: 1804399 - RNA, 19 nt, Artificial Sequence
  Description of Artificial Sequence: Synthetic oligonucleotide
  Sense strand starting at position 1575 of SEQ ID NO: 1563224
cugagagcuucccuaacug

SEQ ID NO: 1804400 - RNA, 19 nt, Artificial Sequence
  Description of Artificial Sequence: Synthetic oligonucleotide
  Antisense strand to SEQ ID NO: 1804399
caguuagggaagcucucag

SEQ ID NO: 1804401 - RNA, 19 nt, Artificial Sequence
  Description of Artificial Sequence: Synthetic oligonucleotide
  Sense strand starting at position 1680 of SEQ ID NO: 1563224
cagagaaagcccuggcaau

SEQ ID NO: 1804402 - RNA, 19 nt, Artificial Sequence
  Description of Artificial Sequence: Synthetic oligonucleotide
  Antisense strand to SEQ ID NO: 1804401
auugccagggcuuucucug

SEQ ID NO: 1804403 - RNA, 19 nt, Artificial Sequence
  Description of Artificial Sequence: Synthetic oligonucleotide
  Sense strand starting at position 1681 of SEQ ID NO: 1563224
agagaaagcccuggcaauu

SEQ ID NO: 1804404 - RNA, 19 nt, Artificial Sequence
  Description of Artificial Sequence: Synthetic oligonucleotide
  Antisense strand to SEQ ID NO: 1804403
aauugccagggcuuucucu

SEQ ID NO: 1804405 - RNA, 19 nt, Artificial Sequence
  Description of Artificial Sequence: Synthetic oligonucleotide
  Sense strand starting at position 2193 of SEQ ID NO: 1563224
agcucuaugcuggaaagga

SEQ ID NO: 1804406 - RNA, 19 nt, Artificial Sequence
  Description of Artificial Sequence: Synthetic oligonucleotide
  Antisense strand to SEQ ID NO: 1804405
uccuuuccagcauagagcu

SEQ ID NO: 1804407 - RNA, 19 nt, Artificial Sequence
  Description of Artificial Sequence: Synthetic oligonucleotide
  Sense strand starting at position 2344 of SEQ ID NO: 1563224
gccagagaauauguaagaa

SEQ ID NO: 1804408 - RNA, 19 nt, Artificial Sequence
  Description of Artificial Sequence: Synthetic oligonucleotide
  Antisense strand to SEQ ID NO: 1804407
uucuuacauauucucuggc

SEQ ID NO: 1804409 - RNA, 19 nt, Artificial Sequence
  Description of Artificial Sequence: Synthetic oligonucleotide
  Sense strand starting at position 2482 of SEQ ID NO: 1563224
gucacuugacaucauuaug

SEQ ID NO: 1804410 - RNA, 19 nt, Artificial Sequence
  Description of Artificial Sequence: Synthetic oligonucleotide
  Antisense strand to SEQ ID NO: 1804409
cauaaugaugucaagugac

SEQ ID NO: 1804411 - RNA, 19 nt, Artificial Sequence
  Description of Artificial Sequence: Synthetic oligonucleotide
  Sense strand starting at position 2556 of SEQ ID NO: 1563224
gcuggccaucuguaauaaa

SEQ ID NO: 1804412 - RNA, 19 nt, Artificial Sequence
  Description of Artificial Sequence: Synthetic oligonucleotide
  Antisense strand to SEQ ID NO: 1804411
uuuauuacagauggccagc

SEQ ID NO: 1804413 - RNA, 19 nt, Artificial Sequence
  Description of Artificial Sequence: Synthetic oligonucleotide
  Sense strand starting at position 2597 of SEQ ID NO: 1563224
ugcuauggauagccaagaa

SEQ ID NO: 1804414 - RNA, 19 nt, Artificial Sequence
  Description of Artificial Sequence: Synthetic oligonucleotide
  Antisense strand to SEQ ID NO: 1804413
uucuuggcuauccauagca

SEQ ID NO: 1804415 - RNA, 19 nt, Artificial Sequence
  Description of Artificial Sequence: Synthetic oligonucleotide
  Sense strand starting at position 2692 of SEQ ID NO: 1563224
guaucuaugaugugaagaa

SEQ ID NO: 1804416 - RNA, 19 nt, Artificial Sequence
  Description of Artificial Sequence: Synthetic oligonucleotide
  Antisense strand to SEQ ID NO: 1804415
uucuucacaucauagauac

SEQ ID NO: 1804417 - RNA, 19 nt, Artificial Sequence
  Description of Artificial Sequence: Synthetic oligonucleotide
  Sense strand starting at position 2764 of SEQ ID NO: 1563224
uugaguguacauggaauua

SEQ ID NO: 1804418 - RNA, 19 nt, Artificial Sequence
  Description of Artificial Sequence: Synthetic oligonucleotide
  Antisense strand to SEQ ID NO: 1804417
uaauuccauguacacucaa

SEQ ID NO: 1804419 - RNA, 19 nt, Artificial Sequence
  Description of Artificial Sequence: Synthetic oligonucleotide
  Sense strand starting at position 2811 of SEQ ID NO: 1563224
agucuuauuugagaaccug

SEQ ID NO: 1804420 - RNA, 19 nt, Artificial Sequence
  Description of Artificial Sequence: Synthetic oligonucleotide
  Antisense strand to SEQ ID NO: 1804419
cagguucucaaauaagacu

SEQ ID NO: 1804421 - RNA, 19 nt, Artificial Sequence
  Description of Artificial Sequence: Synthetic oligonucleotide
  Sense strand starting at position 2833 of SEQ ID NO: 1563224
ugugcugagcauuccguua

SEQ ID NO: 1804422 - RNA, 19 nt, Artificial Sequence
  Description of Artificial Sequence: Synthetic oligonucleotide
  Antisense strand to SEQ ID NO: 1804421
uaacggaaugcucagcaca

SEQ ID NO: 1804423 - RNA, 19 nt, Artificial Sequence
  Description of Artificial Sequence: Synthetic oligonucleotide
  Sense strand starting at position 2947 of SEQ ID NO: 1563224
guuuaauuacaguagagua

SEQ ID NO: 1804424 - RNA, 19 nt, Artificial Sequence
  Description of Artificial Sequence: Synthetic oligonucleotide
  Antisense strand to SEQ ID NO: 1804423
uacucuacuguaauuaaac

SEQ ID NO: 1804425 - RNA, 19 nt, Artificial Sequence
  Description of Artificial Sequence: Synthetic oligonucleotide
  Sense strand starting at position 3112 of SEQ ID NO: 1563224
gcucuccauucuuuaggaa

SEQ ID NO: 1804426 - RNA, 19 nt, Artificial Sequence
  Description of Artificial Sequence: Synthetic oligonucleotide
  Antisense strand to SEQ ID NO: 1804425
uuccuaaagaauggagagc

SEQ ID NO: 1804427 - RNA, 19 nt, Artificial Sequence
  Description of Artificial Sequence: Synthetic oligonucleotide
  Sense strand starting at position 3127 of SEQ ID NO: 1563224
ggaauauaguagguaguca

SEQ ID NO: 1804428 - RNA, 19 nt, Artificial Sequence
  Description of Artificial Sequence: Synthetic oligonucleotide
  Antisense strand to SEQ ID NO: 1804427
ugacuaccuacuauauucc

SEQ ID NO: 1804429 - RNA, 19 nt, Artificial Sequence
  Description of Artificial Sequence: Synthetic oligonucleotide
  Sense strand starting at position 3468 of SEQ ID NO: 1563224
uccucaugacagugaauaa

SEQ ID NO: 1804430 - RNA, 19 nt, Artificial Sequence
  Description of Artificial Sequence: Synthetic oligonucleotide
  Antisense strand to SEQ ID NO: 1804429
uuauucacugucaugagga

SEQ ID NO: 1804431 - RNA, 19 nt, Artificial Sequence
  Description of Artificial Sequence: Synthetic oligonucleotide
  Sense strand starting at position 3697 of SEQ ID NO: 1563224
acuaauacagucgguauaa

SEQ ID NO: 1804432 - RNA, 19 nt, Artificial Sequence
  Description of Artificial Sequence: Synthetic oligonucleotide
  Antisense strand to SEQ ID NO: 1804431
uuauaccgacuguauuagu

SEQ ID NO: 1804433 - RNA, 19 nt, Artificial Sequence
  Description of Artificial Sequence: Synthetic oligonucleotide
  Sense strand starting at position 3698 of SEQ ID NO: 1563224
cuaauacagucgguauaac

SEQ ID NO: 1804434 - RNA, 19 nt, Artificial Sequence
  Description of Artificial Sequence: Synthetic oligonucleotide
  Antisense strand to SEQ ID NO: 1804433
guuauaccgacuguauuag

SEQ ID NO: 1804435 - RNA, 19 nt, Artificial Sequence
  Description of Artificial Sequence: Synthetic oligonucleotide
  Sense strand starting at position 3699 of SEQ ID NO: 1563224
uaauacagucgguauaacu

SEQ ID NO: 1804436 - RNA, 19 nt, Artificial Sequence
  Description of Artificial Sequence: Synthetic oligonucleotide
  Antisense strand to SEQ ID NO: 1804435
aguuauaccgacuguauua

SEQ ID NO: 1804437 - RNA, 19 nt, Artificial Sequence
  Description of Artificial Sequence: Synthetic oligonucleotide
  Sense strand starting at position 3707 of SEQ ID NO: 1563224
ucgguauaacuguggaaac

SEQ ID NO: 1804438 - RNA, 19 nt, Artificial Sequence
  Description of Artificial Sequence: Synthetic oligonucleotide
  Antisense strand to SEQ ID NO: 1804437
guuuccacaguuauaccga

SEQ ID NO: 1804439 - RNA, 19 nt, Artificial Sequence
  Description of Artificial Sequence: Synthetic oligonucleotide
  Sense strand starting at position 3793 of SEQ ID NO: 1563224
aggagugguuuccucuaag

SEQ ID NO: 1804440 - RNA, 19 nt, Artificial Sequence
  Description of Artificial Sequence: Synthetic oligonucleotide
  Antisense strand to SEQ ID NO: 1804439
cuuagaggaaaccacuccu

SEQ ID NO: 1804441 - RNA, 19 nt, Artificial Sequence
  Description of Artificial Sequence: Synthetic oligonucleotide
  Sense strand starting at position 3874 of SEQ ID NO: 1563224
uuucuuuggcucuguauuu

SEQ ID NO: 1804442 - RNA, 19 nt, Artificial Sequence
  Description of Artificial Sequence: Synthetic oligonucleotide
  Antisense strand to SEQ ID NO: 1804441
aaauacagagccaaagaaa

SEQ ID NO: 1804443 - RNA, 19 nt, Artificial Sequence
  Description of Artificial Sequence: Synthetic oligonucleotide
  Sense strand starting at position 3928 of SEQ ID NO: 1563224
cugcuauuacgauaauaug

SEQ ID NO: 1804444 - RNA, 19 nt, Artificial Sequence
  Description of Artificial Sequence: Synthetic oligonucleotide
  Antisense strand to SEQ ID NO: 1804443
cauauuaucguaauagcag

SEQ ID NO: 1804445 - RNA, 19 nt, Artificial Sequence
  Description of Artificial Sequence: Synthetic oligonucleotide
  Sense strand starting at position 233 of SEQ ID NO: 1563225
guggcugaguguauaaagu

SEQ ID NO: 1804446 - RNA, 19 nt, Artificial Sequence
  Description of Artificial Sequence: Synthetic oligonucleotide
  Antisense strand to SEQ ID NO: 1804445
acuuuauacacucagccac

SEQ ID NO: 1804447 - RNA, 19 nt, Artificial Sequence
  Description of Artificial Sequence: Synthetic oligonucleotide
  Sense strand starting at position 265 of SEQ ID NO: 1563225
gcuaaauuccuggaauccu

SEQ ID NO: 1804448 - RNA, 19 nt, Artificial Sequence
  Description of Artificial Sequence: Synthetic oligonucleotide
  Antisense strand to SEQ ID NO: 1804447
aggauuccaggaauuuagc

SEQ ID NO: 1804449 - RNA, 19 nt, Artificial Sequence
  Description of Artificial Sequence: Synthetic oligonucleotide
  Sense strand starting at position 293 of SEQ ID NO: 1563225
ggaggugggcuugagaagu

SEQ ID NO: 1804450 - RNA, 19 nt, Artificial Sequence
  Description of Artificial Sequence: Synthetic oligonucleotide
  Antisense strand to SEQ ID NO: 1804449
acuucucaagcccaccucc

SEQ ID NO: 1804451 - RNA, 19 nt, Artificial Sequence
  Description of Artificial Sequence: Synthetic oligonucleotide
  Sense strand starting at position 301 of SEQ ID NO: 1563225
gcuugagaaguauacuaug

SEQ ID NO: 1804452 - RNA, 19 nt, Artificial Sequence
  Description of Artificial Sequence: Synthetic oligonucleotide
  Antisense strand to SEQ ID NO: 1804451
cauaguauacuucucaagc

SEQ ID NO: 1804453 - RNA, 19 nt, Artificial Sequence
  Description of Artificial Sequence: Synthetic oligonucleotide
  Sense strand starting at position 306 of SEQ ID NO: 1563225
agaaguauacuaugguaug

SEQ ID NO: 1804454 - RNA, 19 nt, Artificial Sequence
  Description of Artificial Sequence: Synthetic oligonucleotide
  Antisense strand to SEQ ID NO: 1804453
cauaccauaguauacuucu

SEQ ID NO: 1804455 - RNA, 19 nt, Artificial Sequence
  Description of Artificial Sequence: Synthetic oligonucleotide
  Sense strand starting at position 312 of SEQ ID NO: 1563225
auacuaugguaugauuuga

SEQ ID NO: 1804456 - RNA, 19 nt, Artificial Sequence
  Description of Artificial Sequence: Synthetic oligonucleotide
  Antisense strand to SEQ ID NO: 1804455
ucaaaucauaccauaguau

SEQ ID NO: 1804457 - RNA, 19 nt, Artificial Sequence
  Description of Artificial Sequence: Synthetic oligonucleotide
  Sense strand starting at position 365 of SEQ ID NO: 1563225
acgucaaguauugaagcua

SEQ ID NO: 1804458 - RNA, 19 nt, Artificial Sequence
  Description of Artificial Sequence: Synthetic oligonucleotide
  Antisense strand to SEQ ID NO: 1804457
uagcuucaauacuugacgu

SEQ ID NO: 1804459 - RNA, 19 nt, Artificial Sequence
  Description of Artificial Sequence: Synthetic oligonucleotide
  Sense strand starting at position 465 of SEQ ID NO: 1563225
gggaaaugccucuaaacgu

SEQ ID NO: 1804460 - RNA, 19 nt, Artificial Sequence
  Description of Artificial Sequence: Synthetic oligonucleotide
  Antisense strand to SEQ ID NO: 1804459
acguuuagaggcauuuccc

SEQ ID NO: 1804461 - RNA, 19 nt, Artificial Sequence
  Description of Artificial Sequence: Synthetic oligonucleotide
  Sense strand starting at position 488 of SEQ ID NO: 1563225
gcucucugucacuaagaaa

SEQ ID NO: 1804462 - RNA, 19 nt, Artificial Sequence
  Description of Artificial Sequence: Synthetic oligonucleotide
  Antisense strand to SEQ ID NO: 1804461
uuucuuagugacagagagc

SEQ ID NO: 1804463 - RNA, 19 nt, Artificial Sequence
  Description of Artificial Sequence: Synthetic oligonucleotide
  Sense strand starting at position 510 of SEQ ID NO: 1563225
acugauaucucacuggcau

SEQ ID NO: 1804464 - RNA, 19 nt, Artificial Sequence
  Description of Artificial Sequence: Synthetic oligonucleotide
  Antisense strand to SEQ ID NO: 1804463
augccagugagauaucagu

SEQ ID NO: 1804465 - RNA, 19 nt, Artificial Sequence
  Description of Artificial Sequence: Synthetic oligonucleotide
  Sense strand starting at position 737 of SEQ ID NO: 1563225
gagucugaaguaugagaau

SEQ ID NO: 1804466 - RNA, 19 nt, Artificial Sequence
  Description of Artificial Sequence: Synthetic oligonucleotide
  Antisense strand to SEQ ID NO: 1804465
auucucauacuucagacuc

SEQ ID NO: 1804467 - RNA, 19 nt, Artificial Sequence
  Description of Artificial Sequence: Synthetic oligonucleotide
  Sense strand starting at position 956 of SEQ ID NO: 1563225
cggagugauaaugguaauu

SEQ ID NO: 1804468 - RNA, 19 nt, Artificial Sequence
  Description of Artificial Sequence: Synthetic oligonucleotide
  Antisense strand to SEQ ID NO: 1804467
aauuaccauuaucacuccg

SEQ ID NO: 1804469 - RNA, 19 nt, Artificial Sequence
  Description of Artificial Sequence: Synthetic oligonucleotide
  Sense strand starting at position 1022 of SEQ ID NO: 1563225
uuagguuaacaaugacuua

SEQ ID NO: 1804470 - RNA, 19 nt, Artificial Sequence
  Description of Artificial Sequence: Synthetic oligonucleotide
  Antisense strand to SEQ ID NO: 1804469
uaagucauuguuaaccuaa

SEQ ID NO: 1804471 - RNA, 19 nt, Artificial Sequence
  Description of Artificial Sequence: Synthetic oligonucleotide
  Sense strand starting at position 1089 of SEQ ID NO: 1563225
guucaacuagagugggaaa

SEQ ID NO: 1804472 - RNA, 19 nt, Artificial Sequence
  Description of Artificial Sequence: Synthetic oligonucleotide
  Antisense strand to SEQ ID NO: 1804471
uuucccacucuaguugaac

SEQ ID NO: 1804473 - RNA, 19 nt, Artificial Sequence
  Description of Artificial Sequence: Synthetic oligonucleotide
  Sense strand starting at position 1136 of SEQ ID NO: 1563225
guuuguuugacauauaugg

SEQ ID NO: 1804474 - RNA, 19 nt, Artificial Sequence
  Description of Artificial Sequence: Synthetic oligonucleotide
  Antisense strand to SEQ ID NO: 1804473
ccauauaugucaaacaaac

SEQ ID NO: 1804475 - RNA, 19 nt, Artificial Sequence
  Description of Artificial Sequence: Synthetic oligonucleotide
  Sense strand starting at position 1144 of SEQ ID NO: 1563225
gacauauauggaugcagau

SEQ ID NO: 1804476 - RNA, 19 nt, Artificial Sequence
  Description of Artificial Sequence: Synthetic oligonucleotide
  Antisense strand to SEQ ID NO: 1804475
aucugcauccauauauguc

SEQ ID NO: 1804477 - RNA, 19 nt, Artificial Sequence
  Description of Artificial Sequence: Synthetic oligonucleotide
  Sense strand starting at position 1167 of SEQ ID NO: 1563225
ugacaauuaggucaugugu

SEQ ID NO: 1804478 - RNA, 19 nt, Artificial Sequence
  Description of Artificial Sequence: Synthetic oligonucleotide
  Antisense strand to SEQ ID NO: 1804477
acacaugaccuaauuguca

SEQ ID NO: 1804479 - RNA, 19 nt, Artificial Sequence
  Description of Artificial Sequence: Synthetic oligonucleotide
  Sense strand starting at position 1188 of SEQ ID NO: 1563225
acgcacaugguaugaaaga

SEQ ID NO: 1804480 - RNA, 19 nt, Artificial Sequence
  Description of Artificial Sequence: Synthetic oligonucleotide
  Antisense strand to SEQ ID NO: 1804479
ucuuucauaccaugugcgu

SEQ ID NO: 1804481 - RNA, 19 nt, Artificial Sequence
  Description of Artificial Sequence: Synthetic oligonucleotide
  Sense strand starting at position 1340 of SEQ ID NO: 1563225
ucaaaugcuuugguugaua

SEQ ID NO: 1804482 - RNA, 19 nt, Artificial Sequence
  Description of Artificial Sequence: Synthetic oligonucleotide
  Antisense strand to SEQ ID NO: 1804481
uaucaaccaaagcauuuga

SEQ ID NO: 1804483 - RNA, 19 nt, Artificial Sequence
  Description of Artificial Sequence: Synthetic oligonucleotide
  Sense strand starting at position 1432 of SEQ ID NO: 1563225
cccggacauccucauuaua

SEQ ID NO: 1804484 - RNA, 19 nt, Artificial Sequence
  Description of Artificial Sequence: Synthetic oligonucleotide
  Antisense strand to SEQ ID NO: 1804483
uauaaugaggauguccggg

SEQ ID NO: 1804485 - RNA, 19 nt, Artificial Sequence
  Description of Artificial Sequence: Synthetic oligonucleotide
  Sense strand starting at position 1434 of SEQ ID NO: 1563225
cggacauccucauuauacu

SEQ ID NO: 1804486 - RNA, 19 nt, Artificial Sequence
  Description of Artificial Sequence: Synthetic oligonucleotide
  Antisense strand to SEQ ID NO: 1804485
aguauaaugaggauguccg

SEQ ID NO: 1804487 - RNA, 19 nt, Artificial Sequence
  Description of Artificial Sequence: Synthetic oligonucleotide
  Sense strand starting at position 1636 of SEQ ID NO: 1563225
cuauguaaaggguguccaa

SEQ ID NO: 1804488 - RNA, 19 nt, Artificial Sequence
  Description of Artificial Sequence: Synthetic oligonucleotide
  Antisense strand to SEQ ID NO: 1804487
uuggacacccuuuacauag

SEQ ID NO: 1804489 - RNA, 19 nt, Artificial Sequence
  Description of Artificial Sequence: Synthetic oligonucleotide
  Sense strand starting at position 2685 of SEQ ID NO: 1563225
guucucaaggcggauuaau

SEQ ID NO: 1804490 - RNA, 19 nt, Artificial Sequence
  Description of Artificial Sequence: Synthetic oligonucleotide
  Antisense strand to SEQ ID NO: 1804489
auuaauccgccuugagaac

SEQ ID NO: 1804491 - RNA, 19 nt, Artificial Sequence
  Description of Artificial Sequence: Synthetic oligonucleotide
  Sense strand starting at position 2695 of SEQ ID NO: 1563225
cggauuaauuagcccaaga

SEQ ID NO: 1804492 - RNA, 19 nt, Artificial Sequence
  Description of Artificial Sequence: Synthetic oligonucleotide
  Antisense strand to SEQ ID NO: 1804491
ucuugggcuaauuaauccg

SEQ ID NO: 1804493 - RNA, 19 nt, Artificial Sequence
  Description of Artificial Sequence: Synthetic oligonucleotide
  Sense strand starting at position 2882 of SEQ ID NO: 1563225
gauguaucacauuagguau

SEQ ID NO: 1804494 - RNA, 19 nt, Artificial Sequence
  Description of Artificial Sequence: Synthetic oligonucleotide
  Antisense strand to SEQ ID NO: 1804493
auaccuaaugugauacauc

SEQ ID NO: 1804495 - RNA, 19 nt, Artificial Sequence
  Description of Artificial Sequence: Synthetic oligonucleotide
  Sense strand starting at position 2923 of SEQ ID NO: 1563225
ucuccuugucucgaugaua

SEQ ID NO: 1804496 - RNA, 19 nt, Artificial Sequence
  Description of Artificial Sequence: Synthetic oligonucleotide
  Antisense strand to SEQ ID NO: 1804495
uaucaucgagacaaggaga

SEQ ID NO: 1804497 - RNA, 19 nt, Artificial Sequence
  Description of Artificial Sequence: Synthetic oligonucleotide
  Sense strand starting at position 2926 of SEQ ID NO: 1563225
ccuugucucgaugauauca

SEQ ID NO: 1804498 - RNA, 19 nt, Artificial Sequence
  Description of Artificial Sequence: Synthetic oligonucleotide
  Antisense strand to SEQ ID NO: 1804497
ugauaucaucgagacaagg

SEQ ID NO: 1804499 - RNA, 19 nt, Artificial Sequence
  Description of Artificial Sequence: Synthetic oligonucleotide
  Sense strand starting at position 3025 of SEQ ID NO: 1563225
cucacaagucuaggaauca

SEQ ID NO: 1804500 - RNA, 19 nt, Artificial Sequence
  Description of Artificial Sequence: Synthetic oligonucleotide
  Antisense strand to SEQ ID NO: 1804499
ugauuccuagacuugugag

SEQ ID NO: 1804501 - RNA, 19 nt, Artificial Sequence
  Description of Artificial Sequence: Synthetic oligonucleotide
  Sense strand starting at position 3034 of SEQ ID NO: 1563225
cuaggaaucacacguggau

SEQ ID NO: 1804502 - RNA, 19 nt, Artificial Sequence
  Description of Artificial Sequence: Synthetic oligonucleotide
  Antisense strand to SEQ ID NO: 1804501
auccacgugugauuccuag

SEQ ID NO: 1804503 - RNA, 19 nt, Artificial Sequence
  Description of Artificial Sequence: Synthetic oligonucleotide
  Sense strand starting at position 3111 of SEQ ID NO: 1563225
cguguucgugucuuugauu

SEQ ID NO: 1804504 - RNA, 19 nt, Artificial Sequence
  Description of Artificial Sequence: Synthetic oligonucleotide
  Antisense strand to SEQ ID NO: 1804503
aaucaaagacacgaacacg

SEQ ID NO: 1804505 - RNA, 19 nt, Artificial Sequence
  Description of Artificial Sequence: Synthetic oligonucleotide
  Sense strand starting at position 3116 of SEQ ID NO: 1563225
ucgugucuuugauuugguu

SEQ ID NO: 1804506 - RNA, 19 nt, Artificial Sequence
  Description of Artificial Sequence: Synthetic oligonucleotide
  Antisense strand to SEQ ID NO: 1804505
aaccaaaucaaagacacga

SEQ ID NO: 1804507 - RNA, 19 nt, Artificial Sequence
  Description of Artificial Sequence: Synthetic oligonucleotide
  Sense strand starting at position 3186 of SEQ ID NO: 1563225
gaacauucccaaggugcua

SEQ ID NO: 1804508 - RNA, 19 nt, Artificial Sequence
  Description of Artificial Sequence: Synthetic oligonucleotide
  Antisense strand to SEQ ID NO: 1804507
uagcaccuugggaauguuc

SEQ ID NO: 1804509 - RNA, 19 nt, Artificial Sequence
  Description of Artificial Sequence: Synthetic oligonucleotide
  Sense strand starting at position 3204 of SEQ ID NO: 1563225
acuugaaguguugaugcuu

SEQ ID NO: 1804510 - RNA, 19 nt, Artificial Sequence
  Description of Artificial Sequence: Synthetic oligonucleotide
  Antisense strand to SEQ ID NO: 1804509
aagcaucaacacuucaagu

SEQ ID NO: 1804511 - RNA, 19 nt, Artificial Sequence
  Description of Artificial Sequence: Synthetic oligonucleotide
  Sense strand starting at position 3326 of SEQ ID NO: 1563225
ccuaacgaucuguaaggau

SEQ ID NO: 1804512 - RNA, 19 nt, Artificial Sequence
  Description of Artificial Sequence: Synthetic oligonucleotide
  Antisense strand to SEQ ID NO: 1804511
auccuuacagaucguuagg

SEQ ID NO: 1804513 - RNA, 19 nt, Artificial Sequence
  Description of Artificial Sequence: Synthetic oligonucleotide
  Sense strand starting at position 3397 of SEQ ID NO: 1563225
uuucgugugcaguuacauu

SEQ ID NO: 1804514 - RNA, 19 nt, Artificial Sequence
  Description of Artificial Sequence: Synthetic oligonucleotide
  Antisense strand to SEQ ID NO: 1804513
aauguaacugcacacgaaa

SEQ ID NO: 1804515 - RNA, 19 nt, Artificial Sequence
  Description of Artificial Sequence: Synthetic oligonucleotide
  Sense strand starting at position 3597 of SEQ ID NO: 1563225
uuguuaucggcgguaguca

SEQ ID NO: 1804516 - RNA, 19 nt, Artificial Sequence
  Description of Artificial Sequence: Synthetic oligonucleotide
  Antisense strand to SEQ ID NO: 1804515
ugacuaccgccgauaacaa

SEQ ID NO: 1804517 - RNA, 19 nt, Artificial Sequence
  Description of Artificial Sequence: Synthetic oligonucleotide
  Sense strand starting at position 3599 of SEQ ID NO: 1563225
guuaucggcgguagucaau

SEQ ID NO: 1804518 - RNA, 19 nt, Artificial Sequence
  Description of Artificial Sequence: Synthetic oligonucleotide
  Antisense strand to SEQ ID NO: 1804517
auugacuaccgccgauaac

SEQ ID NO: 1804519 - RNA, 19 nt, Artificial Sequence
  Description of Artificial Sequence: Synthetic oligonucleotide
  Sense strand starting at position 3620 of SEQ ID NO: 1563225
cauauuccagaaugagguu

SEQ ID NO: 1804520 - RNA, 19 nt, Artificial Sequence
  Description of Artificial Sequence: Synthetic oligonucleotide
  Antisense strand to SEQ ID NO: 1804519
aaccucauucuggaauaug

SEQ ID NO: 1804521 - RNA, 19 nt, Artificial Sequence
  Description of Artificial Sequence: Synthetic oligonucleotide
  Sense strand starting at position 3718 of SEQ ID NO: 1563225
auggcaagcuuauuauaug

SEQ ID NO: 1804522 - RNA, 19 nt, Artificial Sequence
  Description of Artificial Sequence: Synthetic oligonucleotide
  Antisense strand to SEQ ID NO: 1804521
cauauaauaagcuugccau

SEQ ID NO: 1804523 - RNA, 19 nt, Artificial Sequence
  Description of Artificial Sequence: Synthetic oligonucleotide
  Sense strand starting at position 3904 of SEQ ID NO: 1563225
cccuaugaagauugugaaa

SEQ ID NO: 1804524 - RNA, 19 nt, Artificial Sequence
  Description of Artificial Sequence: Synthetic oligonucleotide
  Antisense strand to SEQ ID NO: 1804523
uuucacaaucuucauaggg

SEQ ID NO: 1804525 - RNA, 19 nt, Artificial Sequence
  Description of Artificial Sequence: Synthetic oligonucleotide
  Sense strand starting at position 130 of SEQ ID NO: 1563226
ugacuuuaugugugacuga

SEQ ID NO: 1804526 - RNA, 19 nt, Artificial Sequence
  Description of Artificial Sequence: Synthetic oligonucleotide
  Antisense strand to SEQ ID NO: 1804525
ucagucacacauaaaguca

SEQ ID NO: 1804527 - RNA, 19 nt, Artificial Sequence
  Description of Artificial Sequence: Synthetic oligonucleotide
  Sense strand starting at position 135 of SEQ ID NO: 1563226
uuaugugugacugagagua

SEQ ID NO: 1804528 - RNA, 19 nt, Artificial Sequence
  Description of Artificial Sequence: Synthetic oligonucleotide
  Antisense strand to SEQ ID NO: 1804527
uacucucagucacacauaa

SEQ ID NO: 1804529 - RNA, 19 nt, Artificial Sequence
  Description of Artificial Sequence: Synthetic oligonucleotide
  Sense strand starting at position 170 of SEQ ID NO: 1563226
uuaccuuaaguguaauaca

SEQ ID NO: 1804530 - RNA, 19 nt, Artificial Sequence
  Description of Artificial Sequence: Synthetic oligonucleotide
  Antisense strand to SEQ ID NO: 1804529
uguauuacacuuaagguaa

SEQ ID NO: 1804531 - RNA, 19 nt, Artificial Sequence
  Description of Artificial Sequence: Synthetic oligonucleotide
  Sense strand starting at position 213 of SEQ ID NO: 1563226
uuguauaagugacugaugu

SEQ ID NO: 1804532 - RNA, 19 nt, Artificial Sequence
  Description of Artificial Sequence: Synthetic oligonucleotide
  Antisense strand to SEQ ID NO: 1804531
acaucagucacuuauacaa

SEQ ID NO: 1804533 - RNA, 19 nt, Artificial Sequence
  Description of Artificial Sequence: Synthetic oligonucleotide
  Sense strand starting at position 215 of SEQ ID NO: 1563226
guauaagugacugauguua

SEQ ID NO: 1804534 - RNA, 19 nt, Artificial Sequence
  Description of Artificial Sequence: Synthetic oligonucleotide
  Antisense strand to SEQ ID NO: 1804533
uaacaucagucacuuauac

SEQ ID NO: 1804535 - RNA, 19 nt, Artificial Sequence
  Description of Artificial Sequence: Synthetic oligonucleotide
  Sense strand starting at position 261 of SEQ ID NO: 1563226
agugaacaguuaucaaccu

SEQ ID NO: 1804536 - RNA, 19 nt, Artificial Sequence
  Description of Artificial Sequence: Synthetic oligonucleotide
  Antisense strand to SEQ ID NO: 1804535
agguugauaacuguucacu

SEQ ID NO: 1804537 - RNA, 19 nt, Artificial Sequence
  Description of Artificial Sequence: Synthetic oligonucleotide
  Sense strand starting at position 572 of SEQ ID NO: 1563226
ugaagaaguuauuccuucu

SEQ ID NO: 1804538 - RNA, 19 nt, Artificial Sequence
  Description of Artificial Sequence: Synthetic oligonucleotide
  Antisense strand to SEQ ID NO: 1804537
agaaggaauaacuucuuca

SEQ ID NO: 1804539 - RNA, 19 nt, Artificial Sequence
  Description of Artificial Sequence: Synthetic oligonucleotide
  Sense strand starting at position 575 of SEQ ID NO: 1563226
agaaguuauuccuucuggu

SEQ ID NO: 1804540 - RNA, 19 nt, Artificial Sequence
  Description of Artificial Sequence: Synthetic oligonucleotide
  Antisense strand to SEQ ID NO: 1804539
accagaaggaauaacuucu

SEQ ID NO: 1804541 - RNA, 19 nt, Artificial Sequence
  Description of Artificial Sequence: Synthetic oligonucleotide
  Sense strand starting at position 837 of SEQ ID NO: 1563226
ugauaaugucacugaaugc

SEQ ID NO: 1804542 - RNA, 19 nt, Artificial Sequence
  Description of Artificial Sequence: Synthetic oligonucleotide
  Antisense strand to SEQ ID NO: 1804541
gcauucagugacauuauca

SEQ ID NO: 1804543 - RNA, 19 nt, Artificial Sequence
  Description of Artificial Sequence: Synthetic oligonucleotide
  Sense strand starting at position 870 of SEQ ID NO: 1563226
aguagaauuacgugaugac

SEQ ID NO: 1804544 - RNA, 19 nt, Artificial Sequence
  Description of Artificial Sequence: Synthetic oligonucleotide
  Antisense strand to SEQ ID NO: 1804543
gucaucacguaauucuacu

SEQ ID NO: 1804545 - RNA, 19 nt, Artificial Sequence
  Description of Artificial Sequence: Synthetic oligonucleotide
  Sense strand starting at position 871 of SEQ ID NO: 1563226
guagaauuacgugaugaca

SEQ ID NO: 1804546 - RNA, 19 nt, Artificial Sequence
  Description of Artificial Sequence: Synthetic oligonucleotide
  Antisense strand to SEQ ID NO: 1804545
ugucaucacguaauucuac

SEQ ID NO: 1804547 - RNA, 19 nt, Artificial Sequence
  Description of Artificial Sequence: Synthetic oligonucleotide
  Sense strand starting at position 879 of SEQ ID NO: 1563226
acgugaugacauuacacua

SEQ ID NO: 1804548 - RNA, 19 nt, Artificial Sequence
  Description of Artificial Sequence: Synthetic oligonucleotide
  Antisense strand to SEQ ID NO: 1804547
uaguguaaugucaucacgu

SEQ ID NO: 1804549 - RNA, 19 nt, Artificial Sequence
  Description of Artificial Sequence: Synthetic oligonucleotide
  Sense strand starting at position 1004 of SEQ ID NO: 1563226
guuauacauauguggucaa

SEQ ID NO: 1804550 - RNA, 19 nt, Artificial Sequence
  Description of Artificial Sequence: Synthetic oligonucleotide
  Antisense strand to SEQ ID NO: 1804549
uugaccacauauguauaac

SEQ ID NO: 1804551 - RNA, 19 nt, Artificial Sequence
  Description of Artificial Sequence: Synthetic oligonucleotide
  Sense strand starting at position 1043 of SEQ ID NO: 1563226
ucauguugacuauauugca

SEQ ID NO: 1804552 - RNA, 19 nt, Artificial Sequence
  Description of Artificial Sequence: Synthetic oligonucleotide
  Antisense strand to SEQ ID NO: 1804551
ugcaauauagucaacauga

SEQ ID NO: 1804553 - RNA, 19 nt, Artificial Sequence
  Description of Artificial Sequence: Synthetic oligonucleotide
  Sense strand starting at position 1071 of SEQ ID NO: 1563226
ugcacuaauguauaaagca

SEQ ID NO: 1804554 - RNA, 19 nt, Artificial Sequence
  Description of Artificial Sequence: Synthetic oligonucleotide
  Antisense strand to SEQ ID NO: 1804553
ugcuuuauacauuagugca

SEQ ID NO: 1804555 - RNA, 19 nt, Artificial Sequence
  Description of Artificial Sequence: Synthetic oligonucleotide
  Sense strand starting at position 1305 of SEQ ID NO: 1563226
cguuacagagugugagaaa

SEQ ID NO: 1804556 - RNA, 19 nt, Artificial Sequence
  Description of Artificial Sequence: Synthetic oligonucleotide
  Antisense strand to SEQ ID NO: 1804555
uuucucacacucuguaacg

SEQ ID NO: 1804557 - RNA, 19 nt, Artificial Sequence
  Description of Artificial Sequence: Synthetic oligonucleotide
  Sense strand starting at position 2051 of SEQ ID NO: 1563226
ccaucuggcacugaagagu

SEQ ID NO: 1804558 - RNA, 19 nt, Artificial Sequence
  Description of Artificial Sequence: Synthetic oligonucleotide
  Antisense strand to SEQ ID NO: 1804557
acucuucagugccagaugg

SEQ ID NO: 1804559 - RNA, 19 nt, Artificial Sequence
  Description of Artificial Sequence: Synthetic oligonucleotide
  Sense strand starting at position 2229 of SEQ ID NO: 1563226
uacccaggauggucuauau

SEQ ID NO: 1804560 - RNA, 19 nt, Artificial Sequence
  Description of Artificial Sequence: Synthetic oligonucleotide
  Antisense strand to SEQ ID NO: 1804559
auauagaccauccugggua

SEQ ID NO: 1804561 - RNA, 19 nt, Artificial Sequence
  Description of Artificial Sequence: Synthetic oligonucleotide
  Sense strand starting at position 2233 of SEQ ID NO: 1563226
caggauggucuauauaggu

SEQ ID NO: 1804562 - RNA, 19 nt, Artificial Sequence
  Description of Artificial Sequence: Synthetic oligonucleotide
  Antisense strand to SEQ ID NO: 1804561
accuauauagaccauccug

SEQ ID NO: 1804563 - RNA, 19 nt, Artificial Sequence
  Description of Artificial Sequence: Synthetic oligonucleotide
  Sense strand starting at position 2327 of SEQ ID NO: 1563226
augauaaauaaguguaggu

SEQ ID NO: 1804564 - RNA, 19 nt, Artificial Sequence
  Description of Artificial Sequence: Synthetic oligonucleotide
  Antisense strand to SEQ ID NO: 1804563
accuacacuuauuuaucau

SEQ ID NO: 1804565 - RNA, 19 nt, Artificial Sequence
  Description of Artificial Sequence: Synthetic oligonucleotide
  Sense strand starting at position 2329 of SEQ ID NO: 1563226
gauaaauaaguguaggugu

SEQ ID NO: 1804566 - RNA, 19 nt, Artificial Sequence
  Description of Artificial Sequence: Synthetic oligonucleotide
  Antisense strand to SEQ ID NO: 1804565
acaccuacacuuauuuauc

SEQ ID NO: 1804567 - RNA, 19 nt, Artificial Sequence
  Description of Artificial Sequence: Synthetic oligonucleotide
  Sense strand starting at position 2420 of SEQ ID NO: 1563226
acacuucgacaggguuuau

SEQ ID NO: 1804568 - RNA, 19 nt, Artificial Sequence
  Description of Artificial Sequence: Synthetic oligonucleotide
  Antisense strand to SEQ ID NO: 1804567
auaaacccugucgaagugu

SEQ ID NO: 1804569 - RNA, 19 nt, Artificial Sequence
  Description of Artificial Sequence: Synthetic oligonucleotide
  Sense strand starting at position 2431 of SEQ ID NO: 1563226
ggguuuaugucaccuccaa

SEQ ID NO: 1804570 - RNA, 19 nt, Artificial Sequence
  Description of Artificial Sequence: Synthetic oligonucleotide
  Antisense strand to SEQ ID NO: 1804569
uuggaggugacauaaaccc

SEQ ID NO: 1804571 - RNA, 19 nt, Artificial Sequence
  Description of Artificial Sequence: Synthetic oligonucleotide
  Sense strand starting at position 2462 of SEQ ID NO: 1563226
caggucacuugggcuuaau

SEQ ID NO: 1804572 - RNA, 19 nt, Artificial Sequence
  Description of Artificial Sequence: Synthetic oligonucleotide
  Antisense strand to SEQ ID NO: 1804571
auuaagcccaagugaccug

SEQ ID NO: 1804573 - RNA, 19 nt, Artificial Sequence
  Description of Artificial Sequence: Synthetic oligonucleotide
  Sense strand starting at position 2528 of SEQ ID NO: 1563226
ugugcuguacacuaucaaa

SEQ ID NO: 1804574 - RNA, 19 nt, Artificial Sequence
  Description of Artificial Sequence: Synthetic oligonucleotide
  Antisense strand to SEQ ID NO: 1804573
uuugauaguguacagcaca

SEQ ID NO: 1804575 - RNA, 19 nt, Artificial Sequence
  Description of Artificial Sequence: Synthetic oligonucleotide
  Sense strand starting at position 2908 of SEQ ID NO: 1563226
gucucuaaauguccuaaua

SEQ ID NO: 1804576 - RNA, 19 nt, Artificial Sequence
  Description of Artificial Sequence: Synthetic oligonucleotide
  Antisense strand to SEQ ID NO: 1804575
uauuaggacauuuagagac

SEQ ID NO: 1804577 - RNA, 19 nt, Artificial Sequence
  Description of Artificial Sequence: Synthetic oligonucleotide
  Sense strand starting at position 3134 of SEQ ID NO: 1563226
aggugacuccagggaugau

SEQ ID NO: 1804578 - RNA, 19 nt, Artificial Sequence
  Description of Artificial Sequence: Synthetic oligonucleotide
  Antisense strand to SEQ ID NO: 1804577
aucaucccuggagucaccu

SEQ ID NO: 1804579 - RNA, 19 nt, Artificial Sequence
  Description of Artificial Sequence: Synthetic oligonucleotide
  Sense strand starting at position 3146 of SEQ ID NO: 1563226
ggaugaugggcauguagau

SEQ ID NO: 1804580 - RNA, 19 nt, Artificial Sequence
  Description of Artificial Sequence: Synthetic oligonucleotide
  Antisense strand to SEQ ID NO: 1804579
aucuacaugcccaucaucc

SEQ ID NO: 1804581 - RNA, 19 nt, Artificial Sequence
  Description of Artificial Sequence: Synthetic oligonucleotide
  Sense strand starting at position 3158 of SEQ ID NO: 1563226
uguagaugauguuuacauc

SEQ ID NO: 1804582 - RNA, 19 nt, Artificial Sequence
  Description of Artificial Sequence: Synthetic oligonucleotide
  Antisense strand to SEQ ID NO: 1804581
gauguaaacaucaucuaca

SEQ ID NO: 1804583 - RNA, 19 nt, Artificial Sequence
  Description of Artificial Sequence: Synthetic oligonucleotide
  Sense strand starting at position 3159 of SEQ ID NO: 1563226
guagaugauguuuacauca

SEQ ID NO: 1804584 - RNA, 19 nt, Artificial Sequence
  Description of Artificial Sequence: Synthetic oligonucleotide
  Antisense strand to SEQ ID NO: 1804583
ugauguaaacaucaucuac

SEQ ID NO: 1804585 - RNA, 19 nt, Artificial Sequence
  Description of Artificial Sequence: Synthetic oligonucleotide
  Sense strand starting at position 3463 of SEQ ID NO: 1563226
caaaguauuuggcuagcua

SEQ ID NO: 1804586 - RNA, 19 nt, Artificial Sequence
  Description of Artificial Sequence: Synthetic oligonucleotide
  Antisense strand to SEQ ID NO: 1804585
uagcuagccaaauacuuug

SEQ ID NO: 1804587 - RNA, 19 nt, Artificial Sequence
  Description of Artificial Sequence: Synthetic oligonucleotide
  Sense strand starting at position 3467 of SEQ ID NO: 1563226
guauuuggcuagcuaauga

SEQ ID NO: 1804588 - RNA, 19 nt, Artificial Sequence
  Description of Artificial Sequence: Synthetic oligonucleotide
  Antisense strand to SEQ ID NO: 1804587
ucauuagcuagccaaauac

SEQ ID NO: 1804589 - RNA, 19 nt, Artificial Sequence
  Description of Artificial Sequence: Synthetic oligonucleotide
  Sense strand starting at position 3594 of SEQ ID NO: 1563226
guggaagacagaugugguu

SEQ ID NO: 1804590 - RNA, 19 nt, Artificial Sequence
  Description of Artificial Sequence: Synthetic oligonucleotide
  Antisense strand to SEQ ID NO: 1804589
aaccacaucugucuuccac

SEQ ID NO: 1804591 - RNA, 19 nt, Artificial Sequence
  Description of Artificial Sequence: Synthetic oligonucleotide
  Sense strand starting at position 3596 of SEQ ID NO: 1563226
ggaagacagaugugguuua

SEQ ID NO: 1804592 - RNA, 19 nt, Artificial Sequence
  Description of Artificial Sequence: Synthetic oligonucleotide
  Antisense strand to SEQ ID NO: 1804591
uaaaccacaucugucuucc

SEQ ID NO: 1804593 - RNA, 19 nt, Artificial Sequence
  Description of Artificial Sequence: Synthetic oligonucleotide
  Sense strand starting at position 3779 of SEQ ID NO: 1563226
cugggcugguucuuuaaga

SEQ ID NO: 1804594 - RNA, 19 nt, Artificial Sequence
  Description of Artificial Sequence: Synthetic oligonucleotide
  Antisense strand to SEQ ID NO: 1804593
ucuuaaagaaccagcccag

SEQ ID NO: 1804595 - RNA, 19 nt, Artificial Sequence
  Description of Artificial Sequence: Synthetic oligonucleotide
  Sense strand starting at position 3780 of SEQ ID NO: 1563226
ugggcugguucuuuaagau

SEQ ID NO: 1804596 - RNA, 19 nt, Artificial Sequence
  Description of Artificial Sequence: Synthetic oligonucleotide
  Antisense strand to SEQ ID NO: 1804595
aucuuaaagaaccagccca

SEQ ID NO: 1804597 - RNA, 19 nt, Artificial Sequence
  Description of Artificial Sequence: Synthetic oligonucleotide
  Sense strand starting at position 3792 of SEQ ID NO: 1563226
uuaagauugucucuacaga

SEQ ID NO: 1804598 - RNA, 19 nt, Artificial Sequence
  Description of Artificial Sequence: Synthetic oligonucleotide
  Antisense strand to SEQ ID NO: 1804597
ucuguagagacaaucuuaa

SEQ ID NO: 1804599 - RNA, 19 nt, Artificial Sequence
  Description of Artificial Sequence: Synthetic oligonucleotide
  Sense strand starting at position 3869 of SEQ ID NO: 1563226
ugggacuccuguguaucau

SEQ ID NO: 1804600 - RNA, 19 nt, Artificial Sequence
  Description of Artificial Sequence: Synthetic oligonucleotide
  Antisense strand to SEQ ID NO: 1804599
augauacacaggaguccca

SEQ ID NO: 1804601 - RNA, 19 nt, Artificial Sequence
  Description of Artificial Sequence: Synthetic oligonucleotide
  Sense strand starting at position 3870 of SEQ ID NO: 1563226
gggacuccuguguaucauu

SEQ ID NO: 1804602 - RNA, 19 nt, Artificial Sequence
  Description of Artificial Sequence: Synthetic oligonucleotide
  Antisense strand to SEQ ID NO: 1804601
aaugauacacaggaguccc

SEQ ID NO: 1804603 - RNA, 19 nt, Artificial Sequence
  Description of Artificial Sequence: Synthetic oligonucleotide
  Sense strand starting at position 3966 of SEQ ID NO: 1563226
gcuugcaugugauuucuga

SEQ ID NO: 1804604 - RNA, 19 nt, Artificial Sequence
  Description of Artificial Sequence: Synthetic oligonucleotide
  Antisense strand to SEQ ID NO: 1804603
ucagaaaucacaugcaagc

SEQ ID NO: 1804605 - RNA, 19 nt, Artificial Sequence
  Description of Artificial Sequence: Synthetic oligonucleotide
  Sense strand starting at position 86 of SEQ ID NO: 1563227
agugauaacucaguuucua

SEQ ID NO: 1804606 - RNA, 19 nt, Artificial Sequence
  Description of Artificial Sequence: Synthetic oligonucleotide
  Antisense strand to SEQ ID NO: 1804605
uagaaacugaguuaucacu

SEQ ID NO: 1804607 - RNA, 19 nt, Artificial Sequence
  Description of Artificial Sequence: Synthetic oligonucleotide
  Sense strand starting at position 140 of SEQ ID NO: 1563227
cugauaauugaaugagcuu

SEQ ID NO: 1804608 - RNA, 19 nt, Artificial Sequence
  Description of Artificial Sequence: Synthetic oligonucleotide
  Antisense strand to SEQ ID NO: 1804607
aagcucauucaauuaucag

SEQ ID NO: 1804609 - RNA, 19 nt, Artificial Sequence
  Description of Artificial Sequence: Synthetic oligonucleotide
  Sense strand starting at position 164 of SEQ ID NO: 1563227
aucggagauacguaacgau

SEQ ID NO: 1804610 - RNA, 19 nt, Artificial Sequence
  Description of Artificial Sequence: Synthetic oligonucleotide
  Antisense strand to SEQ ID NO: 1804609
aucguuacguaucuccgau

SEQ ID NO: 1804611 - RNA, 19 nt, Artificial Sequence
  Description of Artificial Sequence: Synthetic oligonucleotide
  Sense strand starting at position 168 of SEQ ID NO: 1563227
gagauacguaacgauuaug

SEQ ID NO: 1804612 - RNA, 19 nt, Artificial Sequence
  Description of Artificial Sequence: Synthetic oligonucleotide
  Antisense strand to SEQ ID NO: 1804611
cauaaucguuacguaucuc

SEQ ID NO: 1804613 - RNA, 19 nt, Artificial Sequence
  Description of Artificial Sequence: Synthetic oligonucleotide
  Sense strand starting at position 233 of SEQ ID NO: 1563227
cuugacgcuccuuauuauu

SEQ ID NO: 1804614 - RNA, 19 nt, Artificial Sequence
  Description of Artificial Sequence: Synthetic oligonucleotide
  Antisense strand to SEQ ID NO: 1804613
aauaauaaggagcgucaag

SEQ ID NO: 1804615 - RNA, 19 nt, Artificial Sequence
  Description of Artificial Sequence: Synthetic oligonucleotide
  Sense strand starting at position 458 of SEQ ID NO: 1563227
gcgucagaccuuaguacgu

SEQ ID NO: 1804616 - RNA, 19 nt, Artificial Sequence
  Description of Artificial Sequence: Synthetic oligonucleotide
  Antisense strand to SEQ ID NO: 1804615
acguacuaaggucugacgc

SEQ ID NO: 1804617 - RNA, 19 nt, Artificial Sequence
  Description of Artificial Sequence: Synthetic oligonucleotide
  Sense strand starting at position 762 of SEQ ID NO: 1563227
uggugaaagaguuagguua

SEQ ID NO: 1804618 - RNA, 19 nt, Artificial Sequence
  Description of Artificial Sequence: Synthetic oligonucleotide
  Antisense strand to SEQ ID NO: 1804617
uaaccuaacucuuucacca

SEQ ID NO: 1804619 - RNA, 19 nt, Artificial Sequence
  Description of Artificial Sequence: Synthetic oligonucleotide
  Sense strand starting at position 770 of SEQ ID NO: 1563227
gaguuagguuaaguugaaa

SEQ ID NO: 1804620 - RNA, 19 nt, Artificial Sequence
  Description of Artificial Sequence: Synthetic oligonucleotide
  Antisense strand to SEQ ID NO: 1804619
uuucaacuuaaccuaacuc

SEQ ID NO: 1804621 - RNA, 19 nt, Artificial Sequence
  Description of Artificial Sequence: Synthetic oligonucleotide
  Sense strand starting at position 977 of SEQ ID NO: 1563227
uuuauuucucucggccuga

SEQ ID NO: 1804622 - RNA, 19 nt, Artificial Sequence
  Description of Artificial Sequence: Synthetic oligonucleotide
  Antisense strand to SEQ ID NO: 1804621
ucaggccgagagaaauaaa

SEQ ID NO: 1804623 - RNA, 19 nt, Artificial Sequence
  Description of Artificial Sequence: Synthetic oligonucleotide
  Sense strand starting at position 978 of SEQ ID NO: 1563227
uuauuucucucggccugau

SEQ ID NO: 1804624 - RNA, 19 nt, Artificial Sequence
  Description of Artificial Sequence: Synthetic oligonucleotide
  Antisense strand to SEQ ID NO: 1804623
aucaggccgagagaaauaa

SEQ ID NO: 1804625 - RNA, 19 nt, Artificial Sequence
  Description of Artificial Sequence: Synthetic oligonucleotide
  Sense strand starting at position 1004 of SEQ ID NO: 1563227
ggcucagagcuagacaagu

SEQ ID NO: 1804626 - RNA, 19 nt, Artificial Sequence
  Description of Artificial Sequence: Synthetic oligonucleotide
  Antisense strand to SEQ ID NO: 1804625
acuugucuagcucugagcc

SEQ ID NO: 1804627 - RNA, 19 nt, Artificial Sequence
  Description of Artificial Sequence: Synthetic oligonucleotide
  Sense strand starting at position 1385 of SEQ ID NO: 1563227
gccgcugaccguuugacua

SEQ ID NO: 1804628 - RNA, 19 nt, Artificial Sequence
  Description of Artificial Sequence: Synthetic oligonucleotide
  Antisense strand to SEQ ID NO: 1804627
uagucaaacggucagcggc

SEQ ID NO: 1804629 - RNA, 19 nt, Artificial Sequence
  Description of Artificial Sequence: Synthetic oligonucleotide
  Sense strand starting at position 1518 of SEQ ID NO: 1563227
ggauuuguugcagggucca

SEQ ID NO: 1804630 - RNA, 19 nt, Artificial Sequence
  Description of Artificial Sequence: Synthetic oligonucleotide
  Antisense strand to SEQ ID NO: 1804629
uggacccugcaacaaaucc

SEQ ID NO: 1804631 - RNA, 19 nt, Artificial Sequence
  Description of Artificial Sequence: Synthetic oligonucleotide
  Sense strand starting at position 1545 of SEQ ID NO: 1563227
gaaccuagcgaucagguaa

SEQ ID NO: 1804632 - RNA, 19 nt, Artificial Sequence
  Description of Artificial Sequence: Synthetic oligonucleotide
  Antisense strand to SEQ ID NO: 1804631
uuaccugaucgcuagguuc

SEQ ID NO: 1804633 - RNA, 19 nt, Artificial Sequence
  Description of Artificial Sequence: Synthetic oligonucleotide
  Sense strand starting at position 1897 of SEQ ID NO: 1563227
cguuucgacccauagauau

SEQ ID NO: 1804634 - RNA, 19 nt, Artificial Sequence
  Description of Artificial Sequence: Synthetic oligonucleotide
  Antisense strand to SEQ ID NO: 1804633
auaucuaugggucgaaacg

SEQ ID NO: 1804635 - RNA, 19 nt, Artificial Sequence
  Description of Artificial Sequence: Synthetic oligonucleotide
  Sense strand starting at position 2461 of SEQ ID NO: 1563227
gaacuuaagagacgguguu

SEQ ID NO: 1804636 - RNA, 19 nt, Artificial Sequence
  Description of Artificial Sequence: Synthetic oligonucleotide
  Antisense strand to SEQ ID NO: 1804635
aacaccgucucuuaaguuc

SEQ ID NO: 1804637 - RNA, 19 nt, Artificial Sequence
  Description of Artificial Sequence: Synthetic oligonucleotide
  Sense strand starting at position 2605 of SEQ ID NO: 1563227
cuauuuggucgugacuugu

SEQ ID NO: 1804638 - RNA, 19 nt, Artificial Sequence
  Description of Artificial Sequence: Synthetic oligonucleotide
  Antisense strand to SEQ ID NO: 1804637
acaagucacgaccaaauag

SEQ ID NO: 1804639 - RNA, 19 nt, Artificial Sequence
  Description of Artificial Sequence: Synthetic oligonucleotide
  Sense strand starting at position 2613 of SEQ ID NO: 1563227
ucgugacuuguuucuguuu

SEQ ID NO: 1804640 - RNA, 19 nt, Artificial Sequence
  Description of Artificial Sequence: Synthetic oligonucleotide
  Antisense strand to SEQ ID NO: 1804639
aaacagaaacaagucacga

SEQ ID NO: 1804641 - RNA, 19 nt, Artificial Sequence
  Description of Artificial Sequence: Synthetic oligonucleotide
  Sense strand starting at position 2616 of SEQ ID NO: 1563227
ugacuuguuucuguuuaaa

SEQ ID NO: 1804642 - RNA, 19 nt, Artificial Sequence
  Description of Artificial Sequence: Synthetic oligonucleotide
  Antisense strand to SEQ ID NO: 1804641
uuuaaacagaaacaaguca

SEQ ID NO: 1804643 - RNA, 19 nt, Artificial Sequence
  Description of Artificial Sequence: Synthetic oligonucleotide
  Sense strand starting at position 2686 of SEQ ID NO: 1563227
gggcuuauauuguuagaag

SEQ ID NO: 1804644 - RNA, 19 nt, Artificial Sequence
  Description of Artificial Sequence: Synthetic oligonucleotide
  Antisense strand to SEQ ID NO: 1804643
cuucuaacaauauaagccc

SEQ ID NO: 1804645 - RNA, 19 nt, Artificial Sequence
  Description of Artificial Sequence: Synthetic oligonucleotide
  Sense strand starting at position 2742 of SEQ ID NO: 1563227
augagaaauuugcaaucag

SEQ ID NO: 1804646 - RNA, 19 nt, Artificial Sequence
  Description of Artificial Sequence: Synthetic oligonucleotide
  Antisense strand to SEQ ID NO: 1804645
cugauugcaaauuucucau

SEQ ID NO: 1804647 - RNA, 19 nt, Artificial Sequence
  Description of Artificial Sequence: Synthetic oligonucleotide
  Sense strand starting at position 2826 of SEQ ID NO: 1563227
aucccauuccuacagggua

SEQ ID NO: 1804648 - RNA, 19 nt, Artificial Sequence
  Description of Artificial Sequence: Synthetic oligonucleotide
  Antisense strand to SEQ ID NO: 1804647
uacccuguaggaaugggau

SEQ ID NO: 1804649 - RNA, 19 nt, Artificial Sequence
  Description of Artificial Sequence: Synthetic oligonucleotide
  Sense strand starting at position 2829 of SEQ ID NO: 1563227
ccauuccuacaggguaauu

SEQ ID NO: 1804650 - RNA, 19 nt, Artificial Sequence
  Description of Artificial Sequence: Synthetic oligonucleotide
  Antisense strand to SEQ ID NO: 1804649
aauuacccuguaggaaugg

SEQ ID NO: 1804651 - RNA, 19 nt, Artificial Sequence
  Description of Artificial Sequence: Synthetic oligonucleotide
  Sense strand starting at position 2908 of SEQ ID NO: 1563227
uguauuauugccuaucucu

SEQ ID NO: 1804652 - RNA, 19 nt, Artificial Sequence
  Description of Artificial Sequence: Synthetic oligonucleotide
  Antisense strand to SEQ ID NO: 1804651
agagauaggcaauaauaca

SEQ ID NO: 1804653 - RNA, 19 nt, Artificial Sequence
  Description of Artificial Sequence: Synthetic oligonucleotide
  Sense strand starting at position 2921 of SEQ ID NO: 1563227
aucucuaugcaagguauca

SEQ ID NO: 1804654 - RNA, 19 nt, Artificial Sequence
  Description of Artificial Sequence: Synthetic oligonucleotide
  Antisense strand to SEQ ID NO: 1804653
ugauaccuugcauagagau

SEQ ID NO: 1804655 - RNA, 19 nt, Artificial Sequence
  Description of Artificial Sequence: Synthetic oligonucleotide
  Sense strand starting at position 2956 of SEQ ID NO: 1563227
ucgggacuacacuguuuaa

SEQ ID NO: 1804656 - RNA, 19 nt, Artificial Sequence
  Description of Artificial Sequence: Synthetic oligonucleotide
  Antisense strand to SEQ ID NO: 1804655
uuaaacaguguagucccga

SEQ ID NO: 1804657 - RNA, 19 nt, Artificial Sequence
  Description of Artificial Sequence: Synthetic oligonucleotide
  Sense strand starting at position 2959 of SEQ ID NO: 1563227
ggacuacacuguuuaauau

SEQ ID NO: 1804658 - RNA, 19 nt, Artificial Sequence
  Description of Artificial Sequence: Synthetic oligonucleotide
  Antisense strand to SEQ ID NO: 1804657
auauuaaacaguguagucc

SEQ ID NO: 1804659 - RNA, 19 nt, Artificial Sequence
  Description of Artificial Sequence: Synthetic oligonucleotide
  Sense strand starting at position 3009 of SEQ ID NO: 1563227
ucaguauuugguugcugaa

SEQ ID NO: 1804660 - RNA, 19 nt, Artificial Sequence
  Description of Artificial Sequence: Synthetic oligonucleotide
  Antisense strand to SEQ ID NO: 1804659
uucagcaaccaaauacuga

SEQ ID NO: 1804661 - RNA, 19 nt, Artificial Sequence
  Description of Artificial Sequence: Synthetic oligonucleotide
  Sense strand starting at position 3224 of SEQ ID NO: 1563227
ggcuauauucuugggaauu

SEQ ID NO: 1804662 - RNA, 19 nt, Artificial Sequence
  Description of Artificial Sequence: Synthetic oligonucleotide
  Antisense strand to SEQ ID NO: 1804661
aauucccaagaauauagcc

SEQ ID NO: 1804663 - RNA, 19 nt, Artificial Sequence
  Description of Artificial Sequence: Synthetic oligonucleotide
  Sense strand starting at position 3237 of SEQ ID NO: 1563227
ggaauuggguuuccucacu

SEQ ID NO: 1804664 - RNA, 19 nt, Artificial Sequence
  Description of Artificial Sequence: Synthetic oligonucleotide
  Antisense strand to SEQ ID NO: 1804663
agugaggaaacccaauucc

SEQ ID NO: 1804665 - RNA, 19 nt, Artificial Sequence
  Description of Artificial Sequence: Synthetic oligonucleotide
  Sense strand starting at position 3303 of SEQ ID NO: 1563227
aaacuuagccuagguugau

SEQ ID NO: 1804666 - RNA, 19 nt, Artificial Sequence
  Description of Artificial Sequence: Synthetic oligonucleotide
  Antisense strand to SEQ ID NO: 1804665
aucaaccuaggcuaaguuu

SEQ ID NO: 1804667 - RNA, 19 nt, Artificial Sequence
  Description of Artificial Sequence: Synthetic oligonucleotide
  Sense strand starting at position 3304 of SEQ ID NO: 1563227
aacuuagccuagguugauu

SEQ ID NO: 1804668 - RNA, 19 nt, Artificial Sequence
  Description of Artificial Sequence: Synthetic oligonucleotide
  Antisense strand to SEQ ID NO: 1804667
aaucaaccuaggcuaaguu

SEQ ID NO: 1804669 - RNA, 19 nt, Artificial Sequence
  Description of Artificial Sequence: Synthetic oligonucleotide
  Sense strand starting at position 3374 of SEQ ID NO: 1563227
guaauugugaagugauagg

SEQ ID NO: 1804670 - RNA, 19 nt, Artificial Sequence
  Description of Artificial Sequence: Synthetic oligonucleotide
  Antisense strand to SEQ ID NO: 1804669
ccuaucacuucacaauuac

SEQ ID NO: 1804671 - RNA, 19 nt, Artificial Sequence
  Description of Artificial Sequence: Synthetic oligonucleotide
  Sense strand starting at position 3379 of SEQ ID NO: 1563227
ugugaagugauaggcuuau

SEQ ID NO: 1804672 - RNA, 19 nt, Artificial Sequence
  Description of Artificial Sequence: Synthetic oligonucleotide
  Antisense strand to SEQ ID NO: 1804671
auaagccuaucacuucaca

SEQ ID NO: 1804673 - RNA, 19 nt, Artificial Sequence
  Description of Artificial Sequence: Synthetic oligonucleotide
  Sense strand starting at position 3383 of SEQ ID NO: 1563227
aagugauaggcuuaucuuu

SEQ ID NO: 1804674 - RNA, 19 nt, Artificial Sequence
  Description of Artificial Sequence: Synthetic oligonucleotide
  Antisense strand to SEQ ID NO: 1804673
aaagauaagccuaucacuu

SEQ ID NO: 1804675 - RNA, 19 nt, Artificial Sequence
  Description of Artificial Sequence: Synthetic oligonucleotide
  Sense strand starting at position 3493 of SEQ ID NO: 1563227
uugcaaguaguuuagcaaa

SEQ ID NO: 1804676 - RNA, 19 nt, Artificial Sequence
  Description of Artificial Sequence: Synthetic oligonucleotide
  Antisense strand to SEQ ID NO: 1804675
uuugcuaaacuacuugcaa

SEQ ID NO: 1804677 - RNA, 19 nt, Artificial Sequence
  Description of Artificial Sequence: Synthetic oligonucleotide
  Sense strand starting at position 3886 of SEQ ID NO: 1563227
uuagauuagggauguuuga

SEQ ID NO: 1804678 - RNA, 19 nt, Artificial Sequence
  Description of Artificial Sequence: Synthetic oligonucleotide
  Antisense strand to SEQ ID NO: 1804677
ucaaacaucccuaaucuaa

SEQ ID NO: 1804679 - RNA, 19 nt, Artificial Sequence
  Description of Artificial Sequence: Synthetic oligonucleotide
  Sense strand starting at position 3893 of SEQ ID NO: 1563227
agggauguuugaccuguau

SEQ ID NO: 1804680 - RNA, 19 nt, Artificial Sequence
  Description of Artificial Sequence: Synthetic oligonucleotide
  Antisense strand to SEQ ID NO: 1804679
auacaggucaaacaucccu

SEQ ID NO: 1804681 - RNA, 19 nt, Artificial Sequence
  Description of Artificial Sequence: Synthetic oligonucleotide
  Sense strand starting at position 3897 of SEQ ID NO: 1563227
auguuugaccuguauguaa

SEQ ID NO: 1804682 - RNA, 19 nt, Artificial Sequence
  Description of Artificial Sequence: Synthetic oligonucleotide
  Antisense strand to SEQ ID NO: 1804681
uuacauacaggucaaacau

SEQ ID NO: 1804683 - RNA, 19 nt, Artificial Sequence
  Description of Artificial Sequence: Synthetic oligonucleotide
  Sense strand starting at position 3937 of SEQ ID NO: 1563227
uuaucauguccucagcacu

SEQ ID NO: 1804684 - RNA, 19 nt, Artificial Sequence
  Description of Artificial Sequence: Synthetic oligonucleotide
  Antisense strand to SEQ ID NO: 1804683
agugcugaggacaugauaa

SEQ ID NO: 1804685 - RNA, 19 nt, Artificial Sequence
  Description of Artificial Sequence: Synthetic oligonucleotide
  Sense strand starting at position 81 of SEQ ID NO: 1563228
aaagaauuccagggugggu

SEQ ID NO: 1804686 - RNA, 19 nt, Artificial Sequence
  Description of Artificial Sequence: Synthetic oligonucleotide
  Antisense strand to SEQ ID NO: 1804685
acccacccuggaauucuuu

SEQ ID NO: 1804687 - RNA, 19 nt, Artificial Sequence
  Description of Artificial Sequence: Synthetic oligonucleotide
  Sense strand starting at position 516 of SEQ ID NO: 1563228
gacacuguuuggguauaau

SEQ ID NO: 1804688 - RNA, 19 nt, Artificial Sequence
  Description of Artificial Sequence: Synthetic oligonucleotide
  Antisense strand to SEQ ID NO: 1804687
auuauacccaaacaguguc

SEQ ID NO: 1804689 - RNA, 19 nt, Artificial Sequence
  Description of Artificial Sequence: Synthetic oligonucleotide
  Sense strand starting at position 527 of SEQ ID NO: 1563228
gguauaaugcuuuagguug

SEQ ID NO: 1804690 - RNA, 19 nt, Artificial Sequence
  Description of Artificial Sequence: Synthetic oligonucleotide
  Antisense strand to SEQ ID NO: 1804689
caaccuaaagcauuauacc

SEQ ID NO: 1804691 - RNA, 19 nt, Artificial Sequence
  Description of Artificial Sequence: Synthetic oligonucleotide
  Sense strand starting at position 538 of SEQ ID NO: 1563228
uuagguugccaugaguauu

SEQ ID NO: 1804692 - RNA, 19 nt, Artificial Sequence
  Description of Artificial Sequence: Synthetic oligonucleotide
  Antisense strand to SEQ ID NO: 1804691
aauacucauggcaaccuaa

SEQ ID NO: 1804693 - RNA, 19 nt, Artificial Sequence
  Description of Artificial Sequence: Synthetic oligonucleotide
  Sense strand starting at position 544 of SEQ ID NO: 1563228
ugccaugaguauuugcauu

SEQ ID NO: 1804694 - RNA, 19 nt, Artificial Sequence
  Description of Artificial Sequence: Synthetic oligonucleotide
  Antisense strand to SEQ ID NO: 1804693
aaugcaaauacucauggca

SEQ ID NO: 1804695 - RNA, 19 nt, Artificial Sequence
  Description of Artificial Sequence: Synthetic oligonucleotide
  Sense strand starting at position 638 of SEQ ID NO: 1563228
auccaaggaugucuugauu

SEQ ID NO: 1804696 - RNA, 19 nt, Artificial Sequence
  Description of Artificial Sequence: Synthetic oligonucleotide
  Antisense strand to SEQ ID NO: 1804695
aaucaagacauccuuggau

SEQ ID NO: 1804697 - RNA, 19 nt, Artificial Sequence
  Description of Artificial Sequence: Synthetic oligonucleotide
  Sense strand starting at position 717 of SEQ ID NO: 1563228
gggacauuggcaggucuga

SEQ ID NO: 1804698 - RNA, 19 nt, Artificial Sequence
  Description of Artificial Sequence: Synthetic oligonucleotide
  Antisense strand to SEQ ID NO: 1804697
ucagaccugccaauguccc

SEQ ID NO: 1804699 - RNA, 19 nt, Artificial Sequence
  Description of Artificial Sequence: Synthetic oligonucleotide
  Sense strand starting at position 726 of SEQ ID NO: 1563228
gcaggucugaggcagagua

SEQ ID NO: 1804700 - RNA, 19 nt, Artificial Sequence
  Description of Artificial Sequence: Synthetic oligonucleotide
  Antisense strand to SEQ ID NO: 1804699
uacucugccucagaccugc

SEQ ID NO: 1804701 - RNA, 19 nt, Artificial Sequence
  Description of Artificial Sequence: Synthetic oligonucleotide
  Sense strand starting at position 728 of SEQ ID NO: 1563228
aggucugaggcagaguaaa

SEQ ID NO: 1804702 - RNA, 19 nt, Artificial Sequence
  Description of Artificial Sequence: Synthetic oligonucleotide
  Antisense strand to SEQ ID NO: 1804701
uuuacucugccucagaccu

SEQ ID NO: 1804703 - RNA, 19 nt, Artificial Sequence
  Description of Artificial Sequence: Synthetic oligonucleotide
  Sense strand starting at position 941 of SEQ ID NO: 1563228
uucggcaauuauuuguuaa

SEQ ID NO: 1804704 - RNA, 19 nt, Artificial Sequence
  Description of Artificial Sequence: Synthetic oligonucleotide
  Antisense strand to SEQ ID NO: 1804703
uuaacaaauaauugccgaa

SEQ ID NO: 1804705 - RNA, 19 nt, Artificial Sequence
  Description of Artificial Sequence: Synthetic oligonucleotide
  Sense strand starting at position 942 of SEQ ID NO: 1563228
ucggcaauuauuuguuaag

SEQ ID NO: 1804706 - RNA, 19 nt, Artificial Sequence
  Description of Artificial Sequence: Synthetic oligonucleotide
  Antisense strand to SEQ ID NO: 1804705
cuuaacaaauaauugccga

SEQ ID NO: 1804707 - RNA, 19 nt, Artificial Sequence
  Description of Artificial Sequence: Synthetic oligonucleotide
  Sense strand starting at position 943 of SEQ ID NO: 1563228
cggcaauuauuuguuaagu

SEQ ID NO: 1804708 - RNA, 19 nt, Artificial Sequence
  Description of Artificial Sequence: Synthetic oligonucleotide
  Antisense strand to SEQ ID NO: 1804707
acuuaacaaauaauugccg

SEQ ID NO: 1804709 - RNA, 19 nt, Artificial Sequence
  Description of Artificial Sequence: Synthetic oligonucleotide
  Sense strand starting at position 1140 of SEQ ID NO: 1563228
aggagaaaccuuugccaca

SEQ ID NO: 1804710 - RNA, 19 nt, Artificial Sequence
  Description of Artificial Sequence: Synthetic oligonucleotide
  Antisense strand to SEQ ID NO: 1804709
uguggcaaagguuucuccu

SEQ ID NO: 1804711 - RNA, 19 nt, Artificial Sequence
  Description of Artificial Sequence: Synthetic oligonucleotide
  Sense strand starting at position 1141 of SEQ ID NO: 1563228
ggagaaaccuuugccacaa

SEQ ID NO: 1804712 - RNA, 19 nt, Artificial Sequence
  Description of Artificial Sequence: Synthetic oligonucleotide
  Antisense strand to SEQ ID NO: 1804711
uuguggcaaagguuucucc

SEQ ID NO: 1804713 - RNA, 19 nt, Artificial Sequence
  Description of Artificial Sequence: Synthetic oligonucleotide
  Sense strand starting at position 1289 of SEQ ID NO: 1563228
ggcgacauuuggccuggua

SEQ ID NO: 1804714 - RNA, 19 nt, Artificial Sequence
  Description of Artificial Sequence: Synthetic oligonucleotide
  Antisense strand to SEQ ID NO: 1804713
uaccaggccaaaugucgcc

SEQ ID NO: 1804715 - RNA, 19 nt, Artificial Sequence
  Description of Artificial Sequence: Synthetic oligonucleotide
  Sense strand starting at position 1291 of SEQ ID NO: 1563228
cgacauuuggccugguaca

SEQ ID NO: 1804716 - RNA, 19 nt, Artificial Sequence
  Description of Artificial Sequence: Synthetic oligonucleotide
  Antisense strand to SEQ ID NO: 1804715
uguaccaggccaaaugucg

SEQ ID NO: 1804717 - RNA, 19 nt, Artificial Sequence
  Description of Artificial Sequence: Synthetic oligonucleotide
  Sense strand starting at position 1395 of SEQ ID NO: 1563228
uuuaccauguucucagaga

SEQ ID NO: 1804718 - RNA, 19 nt, Artificial Sequence
  Description of Artificial Sequence: Synthetic oligonucleotide
  Antisense strand to SEQ ID NO: 1804717
ucucugagaacaugguaaa

SEQ ID NO: 1804719 - RNA, 19 nt, Artificial Sequence
  Description of Artificial Sequence: Synthetic oligonucleotide
  Sense strand starting at position 1453 of SEQ ID NO: 1563228
acccauguaucccuauuga

SEQ ID NO: 1804720 - RNA, 19 nt, Artificial Sequence
  Description of Artificial Sequence: Synthetic oligonucleotide
  Antisense strand to SEQ ID NO: 1804719
ucaauagggauacaugggu

SEQ ID NO: 1804721 - RNA, 19 nt, Artificial Sequence
  Description of Artificial Sequence: Synthetic oligonucleotide
  Sense strand starting at position 1540 of SEQ ID NO: 1563228
cuaaguuugccagagguac

SEQ ID NO: 1804722 - RNA, 19 nt, Artificial Sequence
  Description of Artificial Sequence: Synthetic oligonucleotide
  Antisense strand to SEQ ID NO: 1804721
guaccucuggcaaacuuag

SEQ ID NO: 1804723 - RNA, 19 nt, Artificial Sequence
  Description of Artificial Sequence: Synthetic oligonucleotide
  Sense strand starting at position 1929 of SEQ ID NO: 1563228
ggagacauauucuuacagu

SEQ ID NO: 1804724 - RNA, 19 nt, Artificial Sequence
  Description of Artificial Sequence: Synthetic oligonucleotide
  Antisense strand to SEQ ID NO: 1804723
acuguaagaauaugucucc

SEQ ID NO: 1804725 - RNA, 19 nt, Artificial Sequence
  Description of Artificial Sequence: Synthetic oligonucleotide
  Sense strand starting at position 2128 of SEQ ID NO: 1563228
ugacacuacuaucuugagu

SEQ ID NO: 1804726 - RNA, 19 nt, Artificial Sequence
  Description of Artificial Sequence: Synthetic oligonucleotide
  Antisense strand to SEQ ID NO: 1804725
acucaagauaguaguguca

SEQ ID NO: 1804727 - RNA, 19 nt, Artificial Sequence
  Description of Artificial Sequence: Synthetic oligonucleotide
  Sense strand starting at position 2133 of SEQ ID NO: 1563228
cuacuaucuugagucuauc

SEQ ID NO: 1804728 - RNA, 19 nt, Artificial Sequence
  Description of Artificial Sequence: Synthetic oligonucleotide
  Antisense strand to SEQ ID NO: 1804727
gauagacucaagauaguag

SEQ ID NO: 1804729 - RNA, 19 nt, Artificial Sequence
  Description of Artificial Sequence: Synthetic oligonucleotide
  Sense strand starting at position 2136 of SEQ ID NO: 1563228
cuaucuugagucuaucuuu

SEQ ID NO: 1804730 - RNA, 19 nt, Artificial Sequence
  Description of Artificial Sequence: Synthetic oligonucleotide
  Antisense strand to SEQ ID NO: 1804729
aaagauagacucaagauag

SEQ ID NO: 1804731 - RNA, 19 nt, Artificial Sequence
  Description of Artificial Sequence: Synthetic oligonucleotide
  Sense strand starting at position 2139 of SEQ ID NO: 1563228
ucuugagucuaucuuugaa

SEQ ID NO: 1804732 - RNA, 19 nt, Artificial Sequence
  Description of Artificial Sequence: Synthetic oligonucleotide
  Antisense strand to SEQ ID NO: 1804731
uucaaagauagacucaaga

SEQ ID NO: 1804733 - RNA, 19 nt, Artificial Sequence
  Description of Artificial Sequence: Synthetic oligonucleotide
  Sense strand starting at position 2141 of SEQ ID NO: 1563228
uugagucuaucuuugaaag

SEQ ID NO: 1804734 - RNA, 19 nt, Artificial Sequence
  Description of Artificial Sequence: Synthetic oligonucleotide
  Antisense strand to SEQ ID NO: 1804733
cuuucaaagauagacucaa

SEQ ID NO: 1804735 - RNA, 19 nt, Artificial Sequence
  Description of Artificial Sequence: Synthetic oligonucleotide
  Sense strand starting at position 2142 of SEQ ID NO: 1563228
ugagucuaucuuugaaaga

SEQ ID NO: 1804736 - RNA, 19 nt, Artificial Sequence
  Description of Artificial Sequence: Synthetic oligonucleotide
  Antisense strand to SEQ ID NO: 1804735
ucuuucaaagauagacuca

SEQ ID NO: 1804737 - RNA, 19 nt, Artificial Sequence
  Description of Artificial Sequence: Synthetic oligonucleotide
  Sense strand starting at position 2214 of SEQ ID NO: 1563228
cagacaggucaucaagcua

SEQ ID NO: 1804738 - RNA, 19 nt, Artificial Sequence
  Description of Artificial Sequence: Synthetic oligonucleotide
  Antisense strand to SEQ ID NO: 1804737
uagcuugaugaccugucug

SEQ ID NO: 1804739 - RNA, 19 nt, Artificial Sequence
  Description of Artificial Sequence: Synthetic oligonucleotide
  Sense strand starting at position 2229 of SEQ ID NO: 1563228
gcuauccucccagagguaa

SEQ ID NO: 1804740 - RNA, 19 nt, Artificial Sequence
  Description of Artificial Sequence: Synthetic oligonucleotide
  Antisense strand to SEQ ID NO: 1804739
uuaccucugggaggauagc

SEQ ID NO: 1804741 - RNA, 19 nt, Artificial Sequence
  Description of Artificial Sequence: Synthetic oligonucleotide
  Sense strand starting at position 2649 of SEQ ID NO: 1563228
ccuguaaaccgguaaagca

SEQ ID NO: 1804742 - RNA, 19 nt, Artificial Sequence
  Description of Artificial Sequence: Synthetic oligonucleotide
  Antisense strand to SEQ ID NO: 1804741
ugcuuuaccgguuuacagg

SEQ ID NO: 1804743 - RNA, 19 nt, Artificial Sequence
  Description of Artificial Sequence: Synthetic oligonucleotide
  Sense strand starting at position 2659 of SEQ ID NO: 1563228
gguaaagcagacuagguau

SEQ ID NO: 1804744 - RNA, 19 nt, Artificial Sequence
  Description of Artificial Sequence: Synthetic oligonucleotide
  Antisense strand to SEQ ID NO: 1804743
auaccuagucugcuuuacc

SEQ ID NO: 1804745 - RNA, 19 nt, Artificial Sequence
  Description of Artificial Sequence: Synthetic oligonucleotide
  Sense strand starting at position 2670 of SEQ ID NO: 1563228
cuagguaugucacuugaag

SEQ ID NO: 1804746 - RNA, 19 nt, Artificial Sequence
  Description of Artificial Sequence: Synthetic oligonucleotide
  Antisense strand to SEQ ID NO: 1804745
cuucaagugacauaccuag

SEQ ID NO: 1804747 - RNA, 19 nt, Artificial Sequence
  Description of Artificial Sequence: Synthetic oligonucleotide
  Sense strand starting at position 2681 of SEQ ID NO: 1563228
acuugaagccuggagguuu

SEQ ID NO: 1804748 - RNA, 19 nt, Artificial Sequence
  Description of Artificial Sequence: Synthetic oligonucleotide
  Antisense strand to SEQ ID NO: 1804747
aaaccuccaggcuucaagu

SEQ ID NO: 1804749 - RNA, 19 nt, Artificial Sequence
  Description of Artificial Sequence: Synthetic oligonucleotide
  Sense strand starting at position 2757 of SEQ ID NO: 1563228
aggaaaugcagccaguauu

SEQ ID NO: 1804750 - RNA, 19 nt, Artificial Sequence
  Description of Artificial Sequence: Synthetic oligonucleotide
  Antisense strand to SEQ ID NO: 1804749
aauacuggcugcauuuccu

SEQ ID NO: 1804751 - RNA, 19 nt, Artificial Sequence
  Description of Artificial Sequence: Synthetic oligonucleotide
  Sense strand starting at position 2760 of SEQ ID NO: 1563228
aaaugcagccaguauugaa

SEQ ID NO: 1804752 - RNA, 19 nt, Artificial Sequence
  Description of Artificial Sequence: Synthetic oligonucleotide
  Antisense strand to SEQ ID NO: 1804751
uucaauacuggcugcauuu

SEQ ID NO: 1804753 - RNA, 19 nt, Artificial Sequence
  Description of Artificial Sequence: Synthetic oligonucleotide
  Sense strand starting at position 3471 of SEQ ID NO: 1563228
ugaugauagagugguugau

SEQ ID NO: 1804754 - RNA, 19 nt, Artificial Sequence
  Description of Artificial Sequence: Synthetic oligonucleotide
  Antisense strand to SEQ ID NO: 1804753
aucaaccacucuaucauca

SEQ ID NO: 1804755 - RNA, 19 nt, Artificial Sequence
  Description of Artificial Sequence: Synthetic oligonucleotide
  Sense strand starting at position 3473 of SEQ ID NO: 1563228
augauagagugguugauac

SEQ ID NO: 1804756 - RNA, 19 nt, Artificial Sequence
  Description of Artificial Sequence: Synthetic oligonucleotide
  Antisense strand to SEQ ID NO: 1804755
guaucaaccacucuaucau

SEQ ID NO: 1804757 - RNA, 19 nt, Artificial Sequence
  Description of Artificial Sequence: Synthetic oligonucleotide
  Sense strand starting at position 3475 of SEQ ID NO: 1563228
gauagagugguugauacuc

SEQ ID NO: 1804758 - RNA, 19 nt, Artificial Sequence
  Description of Artificial Sequence: Synthetic oligonucleotide
  Antisense strand to SEQ ID NO: 1804757
gaguaucaaccacucuauc

SEQ ID NO: 1804759 - RNA, 19 nt, Artificial Sequence
  Description of Artificial Sequence: Synthetic oligonucleotide
  Sense strand starting at position 3480 of SEQ ID NO: 1563228
agugguugauacucacauu

SEQ ID NO: 1804760 - RNA, 19 nt, Artificial Sequence
  Description of Artificial Sequence: Synthetic oligonucleotide
  Antisense strand to SEQ ID NO: 1804759
aaugugaguaucaaccacu

SEQ ID NO: 1804761 - RNA, 19 nt, Artificial Sequence
  Description of Artificial Sequence: Synthetic oligonucleotide
  Sense strand starting at position 3527 of SEQ ID NO: 1563228
guaugauugccuuacuuua

SEQ ID NO: 1804762 - RNA, 19 nt, Artificial Sequence
  Description of Artificial Sequence: Synthetic oligonucleotide
  Antisense strand to SEQ ID NO: 1804761
uaaaguaaggcaaucauac

SEQ ID NO: 1804763 - RNA, 19 nt, Artificial Sequence
  Description of Artificial Sequence: Synthetic oligonucleotide
  Sense strand starting at position 3953 of SEQ ID NO: 1563228
gucuuaugccacuuguugu

SEQ ID NO: 1804764 - RNA, 19 nt, Artificial Sequence
  Description of Artificial Sequence: Synthetic oligonucleotide
  Antisense strand to SEQ ID NO: 1804763
acaacaaguggcauaagac

SEQ ID NO: 1804765 - RNA, 19 nt, Artificial Sequence
  Description of Artificial Sequence: Synthetic oligonucleotide
  Sense strand starting at position 18 of SEQ ID NO: 1563229
ggcuuccuuauggaaguaa

SEQ ID NO: 1804766 - RNA, 19 nt, Artificial Sequence
  Description of Artificial Sequence: Synthetic oligonucleotide
  Antisense strand to SEQ ID NO: 1804765
uuacuuccauaaggaagcc

SEQ ID NO: 1804767 - RNA, 19 nt, Artificial Sequence
  Description of Artificial Sequence: Synthetic oligonucleotide
  Sense strand starting at position 134 of SEQ ID NO: 1563229
aauuaaugagcaggagcau

SEQ ID NO: 1804768 - RNA, 19 nt, Artificial Sequence
  Description of Artificial Sequence: Synthetic oligonucleotide
  Antisense strand to SEQ ID NO: 1804767
augcuccugcucauuaauu

SEQ ID NO: 1804769 - RNA, 19 nt, Artificial Sequence
  Description of Artificial Sequence: Synthetic oligonucleotide
  Sense strand starting at position 196 of SEQ ID NO: 1563229
ucagcauugguguacaaac

SEQ ID NO: 1804770 - RNA, 19 nt, Artificial Sequence
  Description of Artificial Sequence: Synthetic oligonucleotide
  Antisense strand to SEQ ID NO: 1804769
guuuguacaccaaugcuga

SEQ ID NO: 1804771 - RNA, 19 nt, Artificial Sequence
  Description of Artificial Sequence: Synthetic oligonucleotide
  Sense strand starting at position 198 of SEQ ID NO: 1563229
agcauugguguacaaacuu

SEQ ID NO: 1804772 - RNA, 19 nt, Artificial Sequence
  Description of Artificial Sequence: Synthetic oligonucleotide
  Antisense strand to SEQ ID NO: 1804771
aaguuuguacaccaaugcu

SEQ ID NO: 1804773 - RNA, 19 nt, Artificial Sequence
  Description of Artificial Sequence: Synthetic oligonucleotide
  Sense strand starting at position 217 of SEQ ID NO: 1563229
ucacuuauaggauguauaa

SEQ ID NO: 1804774 - RNA, 19 nt, Artificial Sequence
  Description of Artificial Sequence: Synthetic oligonucleotide
  Antisense strand to SEQ ID NO: 1804773
uuauacauccuauaaguga

SEQ ID NO: 1804775 - RNA, 19 nt, Artificial Sequence
  Description of Artificial Sequence: Synthetic oligonucleotide
  Sense strand starting at position 242 of SEQ ID NO: 1563229
gggaucuaaugugcaauau

SEQ ID NO: 1804776 - RNA, 19 nt, Artificial Sequence
  Description of Artificial Sequence: Synthetic oligonucleotide
  Antisense strand to SEQ ID NO: 1804775
auauugcacauuagauccc

SEQ ID NO: 1804777 - RNA, 19 nt, Artificial Sequence
  Description of Artificial Sequence: Synthetic oligonucleotide
  Sense strand starting at position 243 of SEQ ID NO: 1563229
ggaucuaaugugcaauaua

SEQ ID NO: 1804778 - RNA, 19 nt, Artificial Sequence
  Description of Artificial Sequence: Synthetic oligonucleotide
  Antisense strand to SEQ ID NO: 1804777
uauauugcacauuagaucc

SEQ ID NO: 1804779 - RNA, 19 nt, Artificial Sequence
  Description of Artificial Sequence: Synthetic oligonucleotide
  Sense strand starting at position 254 of SEQ ID NO: 1563229
gcaauauagugaccauagu

SEQ ID NO: 1804780 - RNA, 19 nt, Artificial Sequence
  Description of Artificial Sequence: Synthetic oligonucleotide
  Antisense strand to SEQ ID NO: 1804779
acuauggucacuauauugc

SEQ ID NO: 1804781 - RNA, 19 nt, Artificial Sequence
  Description of Artificial Sequence: Synthetic oligonucleotide
  Sense strand starting at position 354 of SEQ ID NO: 1563229
auggaugauagauguguua

SEQ ID NO: 1804782 - RNA, 19 nt, Artificial Sequence
  Description of Artificial Sequence: Synthetic oligonucleotide
  Antisense strand to SEQ ID NO: 1804781
uaacacaucuaucauccau

SEQ ID NO: 1804783 - RNA, 19 nt, Artificial Sequence
  Description of Artificial Sequence: Synthetic oligonucleotide
  Sense strand starting at position 356 of SEQ ID NO: 1563229
ggaugauagauguguuaau

SEQ ID NO: 1804784 - RNA, 19 nt, Artificial Sequence
  Description of Artificial Sequence: Synthetic oligonucleotide
  Antisense strand to SEQ ID NO: 1804783
auuaacacaucuaucaucc

SEQ ID NO: 1804785 - RNA, 19 nt, Artificial Sequence
  Description of Artificial Sequence: Synthetic oligonucleotide
  Sense strand starting at position 603 of SEQ ID NO: 1563229
ccuaaaggccagugagauu

SEQ ID NO: 1804786 - RNA, 19 nt, Artificial Sequence
  Description of Artificial Sequence: Synthetic oligonucleotide
  Antisense strand to SEQ ID NO: 1804785
aaucucacuggccuuuagg

SEQ ID NO: 1804787 - RNA, 19 nt, Artificial Sequence
  Description of Artificial Sequence: Synthetic oligonucleotide
  Sense strand starting at position 612 of SEQ ID NO: 1563229
cagugagauugcuuaagaa

SEQ ID NO: 1804788 - RNA, 19 nt, Artificial Sequence
  Description of Artificial Sequence: Synthetic oligonucleotide
  Antisense strand to SEQ ID NO: 1804787
uucuuaagcaaucucacug

SEQ ID NO: 1804789 - RNA, 19 nt, Artificial Sequence
  Description of Artificial Sequence: Synthetic oligonucleotide
  Sense strand starting at position 651 of SEQ ID NO: 1563229
gcuggaaguuuggcaaaga

SEQ ID NO: 1804790 - RNA, 19 nt, Artificial Sequence
  Description of Artificial Sequence: Synthetic oligonucleotide
  Antisense strand to SEQ ID NO: 1804789
ucuuugccaaacuuccagc

SEQ ID NO: 1804791 - RNA, 19 nt, Artificial Sequence
  Description of Artificial Sequence: Synthetic oligonucleotide
  Sense strand starting at position 949 of SEQ ID NO: 1563229
guguuagacuaccuaggau

SEQ ID NO: 1804792 - RNA, 19 nt, Artificial Sequence
  Description of Artificial Sequence: Synthetic oligonucleotide
  Antisense strand to SEQ ID NO: 1804791
auccuagguagucuaacac

SEQ ID NO: 1804793 - RNA, 19 nt, Artificial Sequence
  Description of Artificial Sequence: Synthetic oligonucleotide
  Sense strand starting at position 990 of SEQ ID NO: 1563229
auaacaaccugugugacuu

SEQ ID NO: 1804794 - RNA, 19 nt, Artificial Sequence
  Description of Artificial Sequence: Synthetic oligonucleotide
  Antisense strand to SEQ ID NO: 1804793
aagucacacagguuguuau

SEQ ID NO: 1804795 - RNA, 19 nt, Artificial Sequence
  Description of Artificial Sequence: Synthetic oligonucleotide
  Sense strand starting at position 1131 of SEQ ID NO: 1563229
gaaugccuggcauauagua

SEQ ID NO: 1804796 - RNA, 19 nt, Artificial Sequence
  Description of Artificial Sequence: Synthetic oligonucleotide
  Antisense strand to SEQ ID NO: 1804795
uacuauaugccaggcauuc

SEQ ID NO: 1804797 - RNA, 19 nt, Artificial Sequence
  Description of Artificial Sequence: Synthetic oligonucleotide
  Sense strand starting at position 1224 of SEQ ID NO: 1563229
gggcucuagagucagucua

SEQ ID NO: 1804798 - RNA, 19 nt, Artificial Sequence
  Description of Artificial Sequence: Synthetic oligonucleotide
  Antisense strand to SEQ ID NO: 1804797
uagacugacucuagagccc

SEQ ID NO: 1804799 - RNA, 19 nt, Artificial Sequence
  Description of Artificial Sequence: Synthetic oligonucleotide
  Sense strand starting at position 1244 of SEQ ID NO: 1563229
uuggguuuguauccuagau

SEQ ID NO: 1804800 - RNA, 19 nt, Artificial Sequence
  Description of Artificial Sequence: Synthetic oligonucleotide
  Antisense strand to SEQ ID NO: 1804799
aucuaggauacaaacccaa

SEQ ID NO: 1804801 - RNA, 19 nt, Artificial Sequence
  Description of Artificial Sequence: Synthetic oligonucleotide
  Sense strand starting at position 1265 of SEQ ID NO: 1563229
acuaaauaccguugacauu

SEQ ID NO: 1804802 - RNA, 19 nt, Artificial Sequence
  Description of Artificial Sequence: Synthetic oligonucleotide
  Antisense strand to SEQ ID NO: 1804801
aaugucaacgguauuuagu

SEQ ID NO: 1804803 - RNA, 19 nt, Artificial Sequence
  Description of Artificial Sequence: Synthetic oligonucleotide
  Sense strand starting at position 1272 of SEQ ID NO: 1563229
accguugacauugggcaaa

SEQ ID NO: 1804804 - RNA, 19 nt, Artificial Sequence
  Description of Artificial Sequence: Synthetic oligonucleotide
  Antisense strand to SEQ ID NO: 1804803
uuugcccaaugucaacggu

SEQ ID NO: 1804805 - RNA, 19 nt, Artificial Sequence
  Description of Artificial Sequence: Synthetic oligonucleotide
  Sense strand starting at position 1282 of SEQ ID NO: 1563229
uugggcaaaucguuuaaca

SEQ ID NO: 1804806 - RNA, 19 nt, Artificial Sequence
  Description of Artificial Sequence: Synthetic oligonucleotide
  Antisense strand to SEQ ID NO: 1804805
uguuaaacgauuugcccaa

SEQ ID NO: 1804807 - RNA, 19 nt, Artificial Sequence
  Description of Artificial Sequence: Synthetic oligonucleotide
  Sense strand starting at position 1284 of SEQ ID NO: 1563229
gggcaaaucguuuaacauc

SEQ ID NO: 1804808 - RNA, 19 nt, Artificial Sequence
  Description of Artificial Sequence: Synthetic oligonucleotide
  Antisense strand to SEQ ID NO: 1804807
gauguuaaacgauuugccc

SEQ ID NO: 1804809 - RNA, 19 nt, Artificial Sequence
  Description of Artificial Sequence: Synthetic oligonucleotide
  Sense strand starting at position 1368 of SEQ ID NO: 1563229
gugagaauuguaugacaca

SEQ ID NO: 1804810 - RNA, 19 nt, Artificial Sequence
  Description of Artificial Sequence: Synthetic oligonucleotide
  Antisense strand to SEQ ID NO: 1804809
ugugucauacaauucucac

SEQ ID NO: 1804811 - RNA, 19 nt, Artificial Sequence
  Description of Artificial Sequence: Synthetic oligonucleotide
  Sense strand starting at position 1412 of SEQ ID NO: 1563229
gaagucuuucuaugcugga

SEQ ID NO: 1804812 - RNA, 19 nt, Artificial Sequence
  Description of Artificial Sequence: Synthetic oligonucleotide
  Antisense strand to SEQ ID NO: 1804811
uccagcauagaaagacuuc

SEQ ID NO: 1804813 - RNA, 19 nt, Artificial Sequence
  Description of Artificial Sequence: Synthetic oligonucleotide
  Sense strand starting at position 1499 of SEQ ID NO: 1563229
uacuucuaggcuugaugau

SEQ ID NO: 1804814 - RNA, 19 nt, Artificial Sequence
  Description of Artificial Sequence: Synthetic oligonucleotide
  Antisense strand to SEQ ID NO: 1804813
aucaucaagccuagaagua

SEQ ID NO: 1804815 - RNA, 19 nt, Artificial Sequence
  Description of Artificial Sequence: Synthetic oligonucleotide
  Sense strand starting at position 1500 of SEQ ID NO: 1563229
acuucuaggcuugaugauu

SEQ ID NO: 1804816 - RNA, 19 nt, Artificial Sequence
  Description of Artificial Sequence: Synthetic oligonucleotide
  Antisense strand to SEQ ID NO: 1804815
aaucaucaagccuagaagu

SEQ ID NO: 1804817 - RNA, 19 nt, Artificial Sequence
  Description of Artificial Sequence: Synthetic oligonucleotide
  Sense strand starting at position 1662 of SEQ ID NO: 1563229
agccuauuagauuacugua

SEQ ID NO: 1804818 - RNA, 19 nt, Artificial Sequence
  Description of Artificial Sequence: Synthetic oligonucleotide
  Antisense strand to SEQ ID NO: 1804817
uacaguaaucuaauaggcu

SEQ ID NO: 1804819 - RNA, 19 nt, Artificial Sequence
  Description of Artificial Sequence: Synthetic oligonucleotide
  Sense strand starting at position 1667 of SEQ ID NO: 1563229
auuagauuacuguaccucu

SEQ ID NO: 1804820 - RNA, 19 nt, Artificial Sequence
  Description of Artificial Sequence: Synthetic oligonucleotide
  Antisense strand to SEQ ID NO: 1804819
agagguacaguaaucuaau

SEQ ID NO: 1804821 - RNA, 19 nt, Artificial Sequence
  Description of Artificial Sequence: Synthetic oligonucleotide
  Sense strand starting at position 1741 of SEQ ID NO: 1563229
accaacuggccaugugaua

SEQ ID NO: 1804822 - RNA, 19 nt, Artificial Sequence
  Description of Artificial Sequence: Synthetic oligonucleotide
  Antisense strand to SEQ ID NO: 1804821
uaucacauggccaguuggu

SEQ ID NO: 1804823 - RNA, 19 nt, Artificial Sequence
  Description of Artificial Sequence: Synthetic oligonucleotide
  Sense strand starting at position 1994 of SEQ ID NO: 1563229
ugacgaaacguugaaagcu

SEQ ID NO: 1804824 - RNA, 19 nt, Artificial Sequence
  Description of Artificial Sequence: Synthetic oligonucleotide
  Antisense strand to SEQ ID NO: 1804823
agcuuucaacguuucguca

SEQ ID NO: 1804825 - RNA, 19 nt, Artificial Sequence
  Description of Artificial Sequence: Synthetic oligonucleotide
  Sense strand starting at position 2340 of SEQ ID NO: 1563229
cuguguggacucgauauau

SEQ ID NO: 1804826 - RNA, 19 nt, Artificial Sequence
  Description of Artificial Sequence: Synthetic oligonucleotide
  Antisense strand to SEQ ID NO: 1804825
auauaucgaguccacacag

SEQ ID NO: 1804827 - RNA, 19 nt, Artificial Sequence
  Description of Artificial Sequence: Synthetic oligonucleotide
  Sense strand starting at position 2368 of SEQ ID NO: 1563229
ccaaucuugccgggaucaa

SEQ ID NO: 1804828 - RNA, 19 nt, Artificial Sequence
  Description of Artificial Sequence: Synthetic oligonucleotide
  Antisense strand to SEQ ID NO: 1804827
uugaucccggcaagauugg

SEQ ID NO: 1804829 - RNA, 19 nt, Artificial Sequence
  Description of Artificial Sequence: Synthetic oligonucleotide
  Sense strand starting at position 2369 of SEQ ID NO: 1563229
caaucuugccgggaucaac

SEQ ID NO: 1804830 - RNA, 19 nt, Artificial Sequence
  Description of Artificial Sequence: Synthetic oligonucleotide
  Antisense strand to SEQ ID NO: 1804829
guugaucccggcaagauug

SEQ ID NO: 1804831 - RNA, 19 nt, Artificial Sequence
  Description of Artificial Sequence: Synthetic oligonucleotide
  Sense strand starting at position 2499 of SEQ ID NO: 1563229
ggaggaagcucugcuugaa

SEQ ID NO: 1804832 - RNA, 19 nt, Artificial Sequence
  Description of Artificial Sequence: Synthetic oligonucleotide
  Antisense strand to SEQ ID NO: 1804831
uucaagcagagcuuccucc

SEQ ID NO: 1804833 - RNA, 19 nt, Artificial Sequence
  Description of Artificial Sequence: Synthetic oligonucleotide
  Sense strand starting at position 2644 of SEQ ID NO: 1563229
ugaacuguuucuuuacuag

SEQ ID NO: 1804834 - RNA, 19 nt, Artificial Sequence
  Description of Artificial Sequence: Synthetic oligonucleotide
  Antisense strand to SEQ ID NO: 1804833
cuaguaaagaaacaguuca

SEQ ID NO: 1804835 - RNA, 19 nt, Artificial Sequence
  Description of Artificial Sequence: Synthetic oligonucleotide
  Sense strand starting at position 2781 of SEQ ID NO: 1563229
ccgcauaauuugguguuaa

SEQ ID NO: 1804836 - RNA, 19 nt, Artificial Sequence
  Description of Artificial Sequence: Synthetic oligonucleotide
  Antisense strand to SEQ ID NO: 1804835
uuaacaccaaauuaugcgg

SEQ ID NO: 1804837 - RNA, 19 nt, Artificial Sequence
  Description of Artificial Sequence: Synthetic oligonucleotide
  Sense strand starting at position 2809 of SEQ ID NO: 1563229
uguguuguagaauaacaua

SEQ ID NO: 1804838 - RNA, 19 nt, Artificial Sequence
  Description of Artificial Sequence: Synthetic oligonucleotide
  Antisense strand to SEQ ID NO: 1804837
uauguuauucuacaacaca

SEQ ID NO: 1804839 - RNA, 19 nt, Artificial Sequence
  Description of Artificial Sequence: Synthetic oligonucleotide
  Sense strand starting at position 2814 of SEQ ID NO: 1563229
uguagaauaacauacgagu

SEQ ID NO: 1804840 - RNA, 19 nt, Artificial Sequence
  Description of Artificial Sequence: Synthetic oligonucleotide
  Antisense strand to SEQ ID NO: 1804839
acucguauguuauucuaca

SEQ ID NO: 1804841 - RNA, 19 nt, Artificial Sequence
  Description of Artificial Sequence: Synthetic oligonucleotide
  Sense strand starting at position 2866 of SEQ ID NO: 1563229
guuaauauuucugcugcga

SEQ ID NO: 1804842 - RNA, 19 nt, Artificial Sequence
  Description of Artificial Sequence: Synthetic oligonucleotide
  Antisense strand to SEQ ID NO: 1804841
ucgcagcagaaauauuaac

SEQ ID NO: 1804843 - RNA, 19 nt, Artificial Sequence
  Description of Artificial Sequence: Synthetic oligonucleotide
  Sense strand starting at position 2870 of SEQ ID NO: 1563229
auauuucugcugcgaaauu

SEQ ID NO: 1804844 - RNA, 19 nt, Artificial Sequence
  Description of Artificial Sequence: Synthetic oligonucleotide
  Antisense strand to SEQ ID NO: 1804843
aauuucgcagcagaaauau

SEQ ID NO: 1804845 - RNA, 19 nt, Artificial Sequence
  Description of Artificial Sequence: Synthetic oligonucleotide
  Sense strand starting at position 218 of SEQ ID NO: 1563230
gcaaucuauugagcuacuu

SEQ ID NO: 1804846 - RNA, 19 nt, Artificial Sequence
  Description of Artificial Sequence: Synthetic oligonucleotide
  Antisense strand to SEQ ID NO: 1804845
aaguagcucaauagauugc

SEQ ID NO: 1804847 - RNA, 19 nt, Artificial Sequence
  Description of Artificial Sequence: Synthetic oligonucleotide
  Sense strand starting at position 249 of SEQ ID NO: 1563230
uuucucuuaugguugaaag

SEQ ID NO: 1804848 - RNA, 19 nt, Artificial Sequence
  Description of Artificial Sequence: Synthetic oligonucleotide
  Antisense strand to SEQ ID NO: 1804847
cuuucaaccauaagagaaa

SEQ ID NO: 1804849 - RNA, 19 nt, Artificial Sequence
  Description of Artificial Sequence: Synthetic oligonucleotide
  Sense strand starting at position 290 of SEQ ID NO: 1563230
gucagucacuucucucauu

SEQ ID NO: 1804850 - RNA, 19 nt, Artificial Sequence
  Description of Artificial Sequence: Synthetic oligonucleotide
  Antisense strand to SEQ ID NO: 1804849
aaugagagaagugacugac

SEQ ID NO: 1804851 - RNA, 19 nt, Artificial Sequence
  Description of Artificial Sequence: Synthetic oligonucleotide
  Sense strand starting at position 360 of SEQ ID NO: 1563230
acaguuagacagugguaua

SEQ ID NO: 1804852 - RNA, 19 nt, Artificial Sequence
  Description of Artificial Sequence: Synthetic oligonucleotide
  Antisense strand to SEQ ID NO: 1804851
uauaccacugucuaacugu

SEQ ID NO: 1804853 - RNA, 19 nt, Artificial Sequence
  Description of Artificial Sequence: Synthetic oligonucleotide
  Sense strand starting at position 371 of SEQ ID NO: 1563230
gugguauaaguggacuaga

SEQ ID NO: 1804854 - RNA, 19 nt, Artificial Sequence
  Description of Artificial Sequence: Synthetic oligonucleotide
  Antisense strand to SEQ ID NO: 1804853
ucuaguccacuuauaccac

SEQ ID NO: 1804855 - RNA, 19 nt, Artificial Sequence
  Description of Artificial Sequence: Synthetic oligonucleotide
  Sense strand starting at position 401 of SEQ ID NO: 1563230
ucaauaucaguuuaauggu

SEQ ID NO: 1804856 - RNA, 19 nt, Artificial Sequence
  Description of Artificial Sequence: Synthetic oligonucleotide
  Antisense strand to SEQ ID NO: 1804855
accauuaaacugauauuga

SEQ ID NO: 1804857 - RNA, 19 nt, Artificial Sequence
  Description of Artificial Sequence: Synthetic oligonucleotide
  Sense strand starting at position 437 of SEQ ID NO: 1563230
gaauaauugccauagugcu

SEQ ID NO: 1804858 - RNA, 19 nt, Artificial Sequence
  Description of Artificial Sequence: Synthetic oligonucleotide
  Antisense strand to SEQ ID NO: 1804857
agcacuauggcaauuauuc

SEQ ID NO: 1804859 - RNA, 19 nt, Artificial Sequence
  Description of Artificial Sequence: Synthetic oligonucleotide
  Sense strand starting at position 451 of SEQ ID NO: 1563230
gugcuucuaccacauuaga

SEQ ID NO: 1804860 - RNA, 19 nt, Artificial Sequence
  Description of Artificial Sequence: Synthetic oligonucleotide
  Antisense strand to SEQ ID NO: 1804859
ucuaaugugguagaagcac

SEQ ID NO: 1804861 - RNA, 19 nt, Artificial Sequence
  Description of Artificial Sequence: Synthetic oligonucleotide
  Sense strand starting at position 454 of SEQ ID NO: 1563230
cuucuaccacauuagaguu

SEQ ID NO: 1804862 - RNA, 19 nt, Artificial Sequence
  Description of Artificial Sequence: Synthetic oligonucleotide
  Antisense strand to SEQ ID NO: 1804861
aacucuaaugugguagaag

SEQ ID NO: 1804863 - RNA, 19 nt, Artificial Sequence
  Description of Artificial Sequence: Synthetic oligonucleotide
  Sense strand starting at position 522 of SEQ ID NO: 1563230
gugggaucuguugaccaua

SEQ ID NO: 1804864 - RNA, 19 nt, Artificial Sequence
  Description of Artificial Sequence: Synthetic oligonucleotide
  Antisense strand to SEQ ID NO: 1804863
uauggucaacagaucccac

SEQ ID NO: 1804865 - RNA, 19 nt, Artificial Sequence
  Description of Artificial Sequence: Synthetic oligonucleotide
  Sense strand starting at position 524 of SEQ ID NO: 1563230
gggaucuguugaccauaac

SEQ ID NO: 1804866 - RNA, 19 nt, Artificial Sequence
  Description of Artificial Sequence: Synthetic oligonucleotide
  Antisense strand to SEQ ID NO: 1804865
guuauggucaacagauccc

SEQ ID NO: 1804867 - RNA, 19 nt, Artificial Sequence
  Description of Artificial Sequence: Synthetic oligonucleotide
  Sense strand starting at position 530 of SEQ ID NO: 1563230
uguugaccauaacugauau

SEQ ID NO: 1804868 - RNA, 19 nt, Artificial Sequence
  Description of Artificial Sequence: Synthetic oligonucleotide
  Antisense strand to SEQ ID NO: 1804867
auaucaguuauggucaaca

SEQ ID NO: 1804869 - RNA, 19 nt, Artificial Sequence
  Description of Artificial Sequence: Synthetic oligonucleotide
  Sense strand starting at position 644 of SEQ ID NO: 1563230
uguggaauagcuuggcaga

SEQ ID NO: 1804870 - RNA, 19 nt, Artificial Sequence
  Description of Artificial Sequence: Synthetic oligonucleotide
  Antisense strand to SEQ ID NO: 1804869
ucugccaagcuauuccaca

SEQ ID NO: 1804871 - RNA, 19 nt, Artificial Sequence
  Description of Artificial Sequence: Synthetic oligonucleotide
  Sense strand starting at position 645 of SEQ ID NO: 1563230
guggaauagcuuggcagau

SEQ ID NO: 1804872 - RNA, 19 nt, Artificial Sequence
  Description of Artificial Sequence: Synthetic oligonucleotide
  Antisense strand to SEQ ID NO: 1804871
aucugccaagcuauuccac

SEQ ID NO: 1804873 - RNA, 19 nt, Artificial Sequence
  Description of Artificial Sequence: Synthetic oligonucleotide
  Sense strand starting at position 649 of SEQ ID NO: 1563230
aauagcuuggcagauguaa

SEQ ID NO: 1804874 - RNA, 19 nt, Artificial Sequence
  Description of Artificial Sequence: Synthetic oligonucleotide
  Antisense strand to SEQ ID NO: 1804873
uuacaucugccaagcuauu

SEQ ID NO: 1804875 - RNA, 19 nt, Artificial Sequence
  Description of Artificial Sequence: Synthetic oligonucleotide
  Sense strand starting at position 716 of SEQ ID NO: 1563230
cucacagaacuuggucaau

SEQ ID NO: 1804876 - RNA, 19 nt, Artificial Sequence
  Description of Artificial Sequence: Synthetic oligonucleotide
  Antisense strand to SEQ ID NO: 1804875
auugaccaaguucugugag

SEQ ID NO: 1804877 - RNA, 19 nt, Artificial Sequence
  Description of Artificial Sequence: Synthetic oligonucleotide
  Sense strand starting at position 767 of SEQ ID NO: 1563230
acaagcucggcauaauauu

SEQ ID NO: 1804878 - RNA, 19 nt, Artificial Sequence
  Description of Artificial Sequence: Synthetic oligonucleotide
  Antisense strand to SEQ ID NO: 1804877
aauauuaugccgagcuugu

SEQ ID NO: 1804879 - RNA, 19 nt, Artificial Sequence
  Description of Artificial Sequence: Synthetic oligonucleotide
  Sense strand starting at position 1118 of SEQ ID NO: 1563230
agaauugucaggugcacuc

SEQ ID NO: 1804880 - RNA, 19 nt, Artificial Sequence
  Description of Artificial Sequence: Synthetic oligonucleotide
  Antisense strand to SEQ ID NO: 1804879
gagugcaccugacaauucu

SEQ ID NO: 1804881 - RNA, 19 nt, Artificial Sequence
  Description of Artificial Sequence: Synthetic oligonucleotide
  Sense strand starting at position 1125 of SEQ ID NO: 1563230
ucaggugcacucuaagauu

SEQ ID NO: 1804882 - RNA, 19 nt, Artificial Sequence
  Description of Artificial Sequence: Synthetic oligonucleotide
  Antisense strand to SEQ ID NO: 1804881
aaucuuagagugcaccuga

SEQ ID NO: 1804883 - RNA, 19 nt, Artificial Sequence
  Description of Artificial Sequence: Synthetic oligonucleotide
  Sense strand starting at position 1224 of SEQ ID NO: 1563230
ucaauuauggcauaugugu

SEQ ID NO: 1804884 - RNA, 19 nt, Artificial Sequence
  Description of Artificial Sequence: Synthetic oligonucleotide
  Antisense strand to SEQ ID NO: 1804883
acacauaugccauaauuga

SEQ ID NO: 1804885 - RNA, 19 nt, Artificial Sequence
  Description of Artificial Sequence: Synthetic oligonucleotide
  Sense strand starting at position 1229 of SEQ ID NO: 1563230
uauggcauaugugucagaa

SEQ ID NO: 1804886 - RNA, 19 nt, Artificial Sequence
  Description of Artificial Sequence: Synthetic oligonucleotide
  Antisense strand to SEQ ID NO: 1804885
uucugacacauaugccaua

SEQ ID NO: 1804887 - RNA, 19 nt, Artificial Sequence
  Description of Artificial Sequence: Synthetic oligonucleotide
  Sense strand starting at position 1239 of SEQ ID NO: 1563230
gugucagaauucuuccuga

SEQ ID NO: 1804888 - RNA, 19 nt, Artificial Sequence
  Description of Artificial Sequence: Synthetic oligonucleotide
  Antisense strand to SEQ ID NO: 1804887
ucaggaagaauucugacac

SEQ ID NO: 1804889 - RNA, 19 nt, Artificial Sequence
  Description of Artificial Sequence: Synthetic oligonucleotide
  Sense strand starting at position 1402 of SEQ ID NO: 1563230
auaggauacuuugugcaga

SEQ ID NO: 1804890 - RNA, 19 nt, Artificial Sequence
  Description of Artificial Sequence: Synthetic oligonucleotide
  Antisense strand to SEQ ID NO: 1804889
ucugcacaaaguauccuau

SEQ ID NO: 1804891 - RNA, 19 nt, Artificial Sequence
  Description of Artificial Sequence: Synthetic oligonucleotide
  Sense strand starting at position 1404 of SEQ ID NO: 1563230
aggauacuuugugcagaag

SEQ ID NO: 1804892 - RNA, 19 nt, Artificial Sequence
  Description of Artificial Sequence: Synthetic oligonucleotide
  Antisense strand to SEQ ID NO: 1804891
cuucugcacaaaguauccu

SEQ ID NO: 1804893 - RNA, 19 nt, Artificial Sequence
  Description of Artificial Sequence: Synthetic oligonucleotide
  Sense strand starting at position 1569 of SEQ ID NO: 1563230
ucgauaucccucugaggga

SEQ ID NO: 1804894 - RNA, 19 nt, Artificial Sequence
  Description of Artificial Sequence: Synthetic oligonucleotide
  Antisense strand to SEQ ID NO: 1804893
ucccucagagggauaucga

SEQ ID NO: 1804895 - RNA, 19 nt, Artificial Sequence
  Description of Artificial Sequence: Synthetic oligonucleotide
  Sense strand starting at position 1887 of SEQ ID NO: 1563230
guuggucucgcuaaaggug

SEQ ID NO: 1804896 - RNA, 19 nt, Artificial Sequence
  Description of Artificial Sequence: Synthetic oligonucleotide
  Antisense strand to SEQ ID NO: 1804895
caccuuuagcgagaccaac

SEQ ID NO: 1804897 - RNA, 19 nt, Artificial Sequence
  Description of Artificial Sequence: Synthetic oligonucleotide
  Sense strand starting at position 2174 of SEQ ID NO: 1563230
accuuccuggcauggaaau

SEQ ID NO: 1804898 - RNA, 19 nt, Artificial Sequence
  Description of Artificial Sequence: Synthetic oligonucleotide
  Antisense strand to SEQ ID NO: 1804897
auuuccaugccaggaaggu

SEQ ID NO: 1804899 - RNA, 19 nt, Artificial Sequence
  Description of Artificial Sequence: Synthetic oligonucleotide
  Sense strand starting at position 2175 of SEQ ID NO: 1563230
ccuuccuggcauggaaauu

SEQ ID NO: 1804900 - RNA, 19 nt, Artificial Sequence
  Description of Artificial Sequence: Synthetic oligonucleotide
  Antisense strand to SEQ ID NO: 1804899
aauuuccaugccaggaagg

SEQ ID NO: 1804901 - RNA, 19 nt, Artificial Sequence
  Description of Artificial Sequence: Synthetic oligonucleotide
  Sense strand starting at position 2194 of SEQ ID NO: 1563230
gcgagagcgagagauucuu

SEQ ID NO: 1804902 - RNA, 19 nt, Artificial Sequence
  Description of Artificial Sequence: Synthetic oligonucleotide
  Antisense strand to SEQ ID NO: 1804901
aagaaucucucgcucucgc

SEQ ID NO: 1804903 - RNA, 19 nt, Artificial Sequence
  Description of Artificial Sequence: Synthetic oligonucleotide
  Sense strand starting at position 2232 of SEQ ID NO: 1563230
aucagaccucuugaugguu

SEQ ID NO: 1804904 - RNA, 19 nt, Artificial Sequence
  Description of Artificial Sequence: Synthetic oligonucleotide
  Antisense strand to SEQ ID NO: 1804903
aaccaucaagaggucugau

SEQ ID NO: 1804905 - RNA, 19 nt, Artificial Sequence
  Description of Artificial Sequence: Synthetic oligonucleotide
  Sense strand starting at position 2240 of SEQ ID NO: 1563230
ucuugaugguuucucugau

SEQ ID NO: 1804906 - RNA, 19 nt, Artificial Sequence
  Description of Artificial Sequence: Synthetic oligonucleotide
  Antisense strand to SEQ ID NO: 1804905
aucagagaaaccaucaaga

SEQ ID NO: 1804907 - RNA, 19 nt, Artificial Sequence
  Description of Artificial Sequence: Synthetic oligonucleotide
  Sense strand starting at position 2299 of SEQ ID NO: 1563230
caguacuccugggcugaga

SEQ ID NO: 1804908 - RNA, 19 nt, Artificial Sequence
  Description of Artificial Sequence: Synthetic oligonucleotide
  Antisense strand to SEQ ID NO: 1804907
ucucagcccaggaguacug

SEQ ID NO: 1804909 - RNA, 19 nt, Artificial Sequence
  Description of Artificial Sequence: Synthetic oligonucleotide
  Sense strand starting at position 2435 of SEQ ID NO: 1563230
uuugauaucccaggaaagu

SEQ ID NO: 1804910 - RNA, 19 nt, Artificial Sequence
  Description of Artificial Sequence: Synthetic oligonucleotide
  Antisense strand to SEQ ID NO: 1804909
acuuuccugggauaucaaa

SEQ ID NO: 1804911 - RNA, 19 nt, Artificial Sequence
  Description of Artificial Sequence: Synthetic oligonucleotide
  Sense strand starting at position 2537 of SEQ ID NO: 1563230
ugagauagugcauaugacu

SEQ ID NO: 1804912 - RNA, 19 nt, Artificial Sequence
  Description of Artificial Sequence: Synthetic oligonucleotide
  Antisense strand to SEQ ID NO: 1804911
agucauaugcacuaucuca

SEQ ID NO: 1804913 - RNA, 19 nt, Artificial Sequence
  Description of Artificial Sequence: Synthetic oligonucleotide
  Sense strand starting at position 2546 of SEQ ID NO: 1563230
gcauaugacucccuuagca

SEQ ID NO: 1804914 - RNA, 19 nt, Artificial Sequence
  Description of Artificial Sequence: Synthetic oligonucleotide
  Antisense strand to SEQ ID NO: 1804913
ugcuaagggagucauaugc

SEQ ID NO: 1804915 - RNA, 19 nt, Artificial Sequence
  Description of Artificial Sequence: Synthetic oligonucleotide
  Sense strand starting at position 2655 of SEQ ID NO: 1563230
cgcaguggacaguaaauau

SEQ ID NO: 1804916 - RNA, 19 nt, Artificial Sequence
  Description of Artificial Sequence: Synthetic oligonucleotide
  Antisense strand to SEQ ID NO: 1804915
auauuuacuguccacugcg

SEQ ID NO: 1804917 - RNA, 19 nt, Artificial Sequence
  Description of Artificial Sequence: Synthetic oligonucleotide
  Sense strand starting at position 2664 of SEQ ID NO: 1563230
caguaaauauuaguggaau

SEQ ID NO: 1804918 - RNA, 19 nt, Artificial Sequence
  Description of Artificial Sequence: Synthetic oligonucleotide
  Antisense strand to SEQ ID NO: 1804917
auuccacuaauauuuacug

SEQ ID NO: 1804919 - RNA, 19 nt, Artificial Sequence
  Description of Artificial Sequence: Synthetic oligonucleotide
  Sense strand starting at position 3083 of SEQ ID NO: 1563230
caggucuucuaauuaagag

SEQ ID NO: 1804920 - RNA, 19 nt, Artificial Sequence
  Description of Artificial Sequence: Synthetic oligonucleotide
  Antisense strand to SEQ ID NO: 1804919
cucuuaauuagaagaccug

SEQ ID NO: 1804921 - RNA, 19 nt, Artificial Sequence
  Description of Artificial Sequence: Synthetic oligonucleotide
  Sense strand starting at position 3105 of SEQ ID NO: 1563230
agagcucucuuuccacgaa

SEQ ID NO: 1804922 - RNA, 19 nt, Artificial Sequence
  Description of Artificial Sequence: Synthetic oligonucleotide
  Antisense strand to SEQ ID NO: 1804921
uucguggaaagagagcucu

SEQ ID NO: 1804923 - RNA, 19 nt, Artificial Sequence
  Description of Artificial Sequence: Synthetic oligonucleotide
  Sense strand starting at position 3108 of SEQ ID NO: 1563230
gcucucuuuccacgaaaua

SEQ ID NO: 1804924 - RNA, 19 nt, Artificial Sequence
  Description of Artificial Sequence: Synthetic oligonucleotide
  Antisense strand to SEQ ID NO: 1804923
uauuucguggaaagagagc

SEQ ID NO: 1804925 - RNA, 19 nt, Artificial Sequence
  Description of Artificial Sequence: Synthetic oligonucleotide
  Sense strand starting at position 24 of SEQ ID NO: 1563231
agaaucuguccguacauaa

SEQ ID NO: 1804926 - RNA, 19 nt, Artificial Sequence
  Description of Artificial Sequence: Synthetic oligonucleotide
  Antisense strand to SEQ ID NO: 1804925
uuauguacggacagauucu

SEQ ID NO: 1804927 - RNA, 19 nt, Artificial Sequence
  Description of Artificial Sequence: Synthetic oligonucleotide
  Sense strand starting at position 37 of SEQ ID NO: 1563231
acauaaguuuguccauaaa

SEQ ID NO: 1804928 - RNA, 19 nt, Artificial Sequence
  Description of Artificial Sequence: Synthetic oligonucleotide
  Antisense strand to SEQ ID NO: 1804927
uuuauggacaaacuuaugu

SEQ ID NO: 1804929 - RNA, 19 nt, Artificial Sequence
  Description of Artificial Sequence: Synthetic oligonucleotide
  Sense strand starting at position 127 of SEQ ID NO: 1563231
uuauguauauccuuggauu

SEQ ID NO: 1804930 - RNA, 19 nt, Artificial Sequence
  Description of Artificial Sequence: Synthetic oligonucleotide
  Antisense strand to SEQ ID NO: 1804929
aauccaaggauauacauaa

SEQ ID NO: 1804931 - RNA, 19 nt, Artificial Sequence
  Description of Artificial Sequence: Synthetic oligonucleotide
  Sense strand starting at position 175 of SEQ ID NO: 1563231
gacuuagaaaugcguggaa

SEQ ID NO: 1804932 - RNA, 19 nt, Artificial Sequence
  Description of Artificial Sequence: Synthetic oligonucleotide
  Antisense strand to SEQ ID NO: 1804931
uuccacgcauuucuaaguc

SEQ ID NO: 1804933 - RNA, 19 nt, Artificial Sequence
  Description of Artificial Sequence: Synthetic oligonucleotide
  Sense strand starting at position 177 of SEQ ID NO: 1563231
cuuagaaaugcguggaaac

SEQ ID NO: 1804934 - RNA, 19 nt, Artificial Sequence
  Description of Artificial Sequence: Synthetic oligonucleotide
  Antisense strand to SEQ ID NO: 1804933
guuuccacgcauuucuaag

SEQ ID NO: 1804935 - RNA, 19 nt, Artificial Sequence
  Description of Artificial Sequence: Synthetic oligonucleotide
  Sense strand starting at position 178 of SEQ ID NO: 1563231
uuagaaaugcguggaaaca

SEQ ID NO: 1804936 - RNA, 19 nt, Artificial Sequence
  Description of Artificial Sequence: Synthetic oligonucleotide
  Antisense strand to SEQ ID NO: 1804935
uguuuccacgcauuucuaa

SEQ ID NO: 1804937 - RNA, 19 nt, Artificial Sequence
  Description of Artificial Sequence: Synthetic oligonucleotide
  Sense strand starting at position 205 of SEQ ID NO: 1563231
gaaagcccucaaugaguca

SEQ ID NO: 1804938 - RNA, 19 nt, Artificial Sequence
  Description of Artificial Sequence: Synthetic oligonucleotide
  Antisense strand to SEQ ID NO: 1804937
ugacucauugagggcuuuc

SEQ ID NO: 1804939 - RNA, 19 nt, Artificial Sequence
  Description of Artificial Sequence: Synthetic oligonucleotide
  Sense strand starting at position 373 of SEQ ID NO: 1563231
gauggacccuuccuuugau

SEQ ID NO: 1804940 - RNA, 19 nt, Artificial Sequence
  Description of Artificial Sequence: Synthetic oligonucleotide
  Antisense strand to SEQ ID NO: 1804939
aucaaaggaaggguccauc

SEQ ID NO: 1804941 - RNA, 19 nt, Artificial Sequence
  Description of Artificial Sequence: Synthetic oligonucleotide
  Sense strand starting at position 458 of SEQ ID NO: 1563231
cugcgauaucuugacugag

SEQ ID NO: 1804942 - RNA, 19 nt, Artificial Sequence
  Description of Artificial Sequence: Synthetic oligonucleotide
  Antisense strand to SEQ ID NO: 1804941
cucagucaagauaucgcag

SEQ ID NO: 1804943 - RNA, 19 nt, Artificial Sequence
  Description of Artificial Sequence: Synthetic oligonucleotide
  Sense strand starting at position 460 of SEQ ID NO: 1563231
gcgauaucuugacugagaa

SEQ ID NO: 1804944 - RNA, 19 nt, Artificial Sequence
  Description of Artificial Sequence: Synthetic oligonucleotide
  Antisense strand to SEQ ID NO: 1804943
uucucagucaagauaucgc

SEQ ID NO: 1804945 - RNA, 19 nt, Artificial Sequence
  Description of Artificial Sequence: Synthetic oligonucleotide
  Sense strand starting at position 461 of SEQ ID NO: 1563231
cgauaucuugacugagaaa

SEQ ID NO: 1804946 - RNA, 19 nt, Artificial Sequence
  Description of Artificial Sequence: Synthetic oligonucleotide
  Antisense strand to SEQ ID NO: 1804945
uuucucagucaagauaucg

SEQ ID NO: 1804947 - RNA, 19 nt, Artificial Sequence
  Description of Artificial Sequence: Synthetic oligonucleotide
  Sense strand starting at position 511 of SEQ ID NO: 1563231
cugggagcaugaucccaau

SEQ ID NO: 1804948 - RNA, 19 nt, Artificial Sequence
  Description of Artificial Sequence: Synthetic oligonucleotide
  Antisense strand to SEQ ID NO: 1804947
auugggaucaugcucccag

SEQ ID NO: 1804949 - RNA, 19 nt, Artificial Sequence
  Description of Artificial Sequence: Synthetic oligonucleotide
  Sense strand starting at position 570 of SEQ ID NO: 1563231
gcucuuugugcugcaauua

SEQ ID NO: 1804950 - RNA, 19 nt, Artificial Sequence
  Description of Artificial Sequence: Synthetic oligonucleotide
  Antisense strand to SEQ ID NO: 1804949
uaauugcagcacaaagagc

SEQ ID NO: 1804951 - RNA, 19 nt, Artificial Sequence
  Description of Artificial Sequence: Synthetic oligonucleotide
  Sense strand starting at position 807 of SEQ ID NO: 1563231
aacccugaugcugagguua

SEQ ID NO: 1804952 - RNA, 19 nt, Artificial Sequence
  Description of Artificial Sequence: Synthetic oligonucleotide
  Antisense strand to SEQ ID NO: 1804951
uaaccucagcaucaggguu

SEQ ID NO: 1804953 - RNA, 19 nt, Artificial Sequence
  Description of Artificial Sequence: Synthetic oligonucleotide
  Sense strand starting at position 857 of SEQ ID NO: 1563231
ccuagaaagcuuuacgguu

SEQ ID NO: 1804954 - RNA, 19 nt, Artificial Sequence
  Description of Artificial Sequence: Synthetic oligonucleotide
  Antisense strand to SEQ ID NO: 1804953
aaccguaaagcuuucuagg

SEQ ID NO: 1804955 - RNA, 19 nt, Artificial Sequence
  Description of Artificial Sequence: Synthetic oligonucleotide
  Sense strand starting at position 902 of SEQ ID NO: 1563231
guggccacuccugagagau

SEQ ID NO: 1804956 - RNA, 19 nt, Artificial Sequence
  Description of Artificial Sequence: Synthetic oligonucleotide
  Antisense strand to SEQ ID NO: 1804955
aucucucaggaguggccac

SEQ ID NO: 1804957 - RNA, 19 nt, Artificial Sequence
  Description of Artificial Sequence: Synthetic oligonucleotide
  Sense strand starting at position 914 of SEQ ID NO: 1563231
gagagaugugcagggacaa

SEQ ID NO: 1804958 - RNA, 19 nt, Artificial Sequence
  Description of Artificial Sequence: Synthetic oligonucleotide
  Antisense strand to SEQ ID NO: 1804957
uugucccugcacaucucuc

SEQ ID NO: 1804959 - RNA, 19 nt, Artificial Sequence
  Description of Artificial Sequence: Synthetic oligonucleotide
  Sense strand starting at position 915 of SEQ ID NO: 1563231
agagaugugcagggacaau

SEQ ID NO: 1804960 - RNA, 19 nt, Artificial Sequence
  Description of Artificial Sequence: Synthetic oligonucleotide
  Antisense strand to SEQ ID NO: 1804959
auugucccugcacaucucu

SEQ ID NO: 1804961 - RNA, 19 nt, Artificial Sequence
  Description of Artificial Sequence: Synthetic oligonucleotide
  Sense strand starting at position 1018 of SEQ ID NO: 1563231
gagugauggccagauuauc

SEQ ID NO: 1804962 - RNA, 19 nt, Artificial Sequence
  Description of Artificial Sequence: Synthetic oligonucleotide
  Antisense strand to SEQ ID NO: 1804961
gauaaucuggccaucacuc

SEQ ID NO: 1804963 - RNA, 19 nt, Artificial Sequence
  Description of Artificial Sequence: Synthetic oligonucleotide
  Sense strand starting at position 1023 of SEQ ID NO: 1563231
auggccagauuaucaguaa

SEQ ID NO: 1804964 - RNA, 19 nt, Artificial Sequence
  Description of Artificial Sequence: Synthetic oligonucleotide
  Antisense strand to SEQ ID NO: 1804963
uuacugauaaucuggccau

SEQ ID NO: 1804965 - RNA, 19 nt, Artificial Sequence
  Description of Artificial Sequence: Synthetic oligonucleotide
  Sense strand starting at position 1026 of SEQ ID NO: 1563231
gccagauuaucaguaaagg

SEQ ID NO: 1804966 - RNA, 19 nt, Artificial Sequence
  Description of Artificial Sequence: Synthetic oligonucleotide
  Antisense strand to SEQ ID NO: 1804965
ccuuuacugauaaucuggc

SEQ ID NO: 1804967 - RNA, 19 nt, Artificial Sequence
  Description of Artificial Sequence: Synthetic oligonucleotide
  Sense strand starting at position 1217 of SEQ ID NO: 1563231
agaagcauuuaacauugaa

SEQ ID NO: 1804968 - RNA, 19 nt, Artificial Sequence
  Description of Artificial Sequence: Synthetic oligonucleotide
  Antisense strand to SEQ ID NO: 1804967
uucaauguuaaaugcuucu

SEQ ID NO: 1804969 - RNA, 19 nt, Artificial Sequence
  Description of Artificial Sequence: Synthetic oligonucleotide
  Sense strand starting at position 1353 of SEQ ID NO: 1563231
cagauuugcccgcauggca

SEQ ID NO: 1804970 - RNA, 19 nt, Artificial Sequence
  Description of Artificial Sequence: Synthetic oligonucleotide
  Antisense strand to SEQ ID NO: 1804969
ugccaugcgggcaaaucug

SEQ ID NO: 1804971 - RNA, 19 nt, Artificial Sequence
  Description of Artificial Sequence: Synthetic oligonucleotide
  Sense strand starting at position 1512 of SEQ ID NO: 1563231
ucagauuugucgcccuuac

SEQ ID NO: 1804972 - RNA, 19 nt, Artificial Sequence
  Description of Artificial Sequence: Synthetic oligonucleotide
  Antisense strand to SEQ ID NO: 1804971
guaagggcgacaaaucuga

SEQ ID NO: 1804973 - RNA, 19 nt, Artificial Sequence
  Description of Artificial Sequence: Synthetic oligonucleotide
  Sense strand starting at position 1558 of SEQ ID NO: 1563231
cuggacuuucuggaguuau

SEQ ID NO: 1804974 - RNA, 19 nt, Artificial Sequence
  Description of Artificial Sequence: Synthetic oligonucleotide
  Antisense strand to SEQ ID NO: 1804973
auaacuccagaaaguccag

SEQ ID NO: 1804975 - RNA, 19 nt, Artificial Sequence
  Description of Artificial Sequence: Synthetic oligonucleotide
  Sense strand starting at position 1702 of SEQ ID NO: 1563231
ugguaacucccauagugga

SEQ ID NO: 1804976 - RNA, 19 nt, Artificial Sequence
  Description of Artificial Sequence: Synthetic oligonucleotide
  Antisense strand to SEQ ID NO: 1804975
uccacuaugggaguuacca

SEQ ID NO: 1804977 - RNA, 19 nt, Artificial Sequence
  Description of Artificial Sequence: Synthetic oligonucleotide
  Sense strand starting at position 1799 of SEQ ID NO: 1563231
acaauacucgcaggaucaa

SEQ ID NO: 1804978 - RNA, 19 nt, Artificial Sequence
  Description of Artificial Sequence: Synthetic oligonucleotide
  Antisense strand to SEQ ID NO: 1804977
uugauccugcgaguauugu

SEQ ID NO: 1804979 - RNA, 19 nt, Artificial Sequence
  Description of Artificial Sequence: Synthetic oligonucleotide
  Sense strand starting at position 1853 of SEQ ID NO: 1563231
cggagagucgugggaagaa

SEQ ID NO: 1804980 - RNA, 19 nt, Artificial Sequence
  Description of Artificial Sequence: Synthetic oligonucleotide
  Antisense strand to SEQ ID NO: 1804979
uucuucccacgacucuccg

SEQ ID NO: 1804981 - RNA, 19 nt, Artificial Sequence
  Description of Artificial Sequence: Synthetic oligonucleotide
  Sense strand starting at position 2361 of SEQ ID NO: 1563231
gcauuaguggauugaaacu

SEQ ID NO: 1804982 - RNA, 19 nt, Artificial Sequence
  Description of Artificial Sequence: Synthetic oligonucleotide
  Antisense strand to SEQ ID NO: 1804981
aguuucaauccacuaaugc

SEQ ID NO: 1804983 - RNA, 19 nt, Artificial Sequence
  Description of Artificial Sequence: Synthetic oligonucleotide
  Sense strand starting at position 2499 of SEQ ID NO: 1563231
guguccuuucccgcuaguu

SEQ ID NO: 1804984 - RNA, 19 nt, Artificial Sequence
  Description of Artificial Sequence: Synthetic oligonucleotide
  Antisense strand to SEQ ID NO: 1804983
aacuagcgggaaaggacac

SEQ ID NO: 1804985 - RNA, 19 nt, Artificial Sequence
  Description of Artificial Sequence: Synthetic oligonucleotide
  Sense strand starting at position 2500 of SEQ ID NO: 1563231
uguccuuucccgcuaguuu

SEQ ID NO: 1804986 - RNA, 19 nt, Artificial Sequence
  Description of Artificial Sequence: Synthetic oligonucleotide
  Antisense strand to SEQ ID NO: 1804985
aaacuagcgggaaaggaca

SEQ ID NO: 1804987 - RNA, 19 nt, Artificial Sequence
  Description of Artificial Sequence: Synthetic oligonucleotide
  Sense strand starting at position 2522 of SEQ ID NO: 1563231
uguccaauuuacccgaguu

SEQ ID NO: 1804988 - RNA, 19 nt, Artificial Sequence
  Description of Artificial Sequence: Synthetic oligonucleotide
  Antisense strand to SEQ ID NO: 1804987
aacucggguaaauuggaca

SEQ ID NO: 1804989 - RNA, 19 nt, Artificial Sequence
  Description of Artificial Sequence: Synthetic oligonucleotide
  Sense strand starting at position 2660 of SEQ ID NO: 1563231
ccuuaaauacuaggcagau

SEQ ID NO: 1804990 - RNA, 19 nt, Artificial Sequence
  Description of Artificial Sequence: Synthetic oligonucleotide
  Antisense strand to SEQ ID NO: 1804989
aucugccuaguauuuaagg

SEQ ID NO: 1804991 - RNA, 19 nt, Artificial Sequence
  Description of Artificial Sequence: Synthetic oligonucleotide
  Sense strand starting at position 3058 of SEQ ID NO: 1563231
guaaucucaggucauuagu

SEQ ID NO: 1804992 - RNA, 19 nt, Artificial Sequence
  Description of Artificial Sequence: Synthetic oligonucleotide
  Antisense strand to SEQ ID NO: 1804991
acuaaugaccugagauuac

SEQ ID NO: 1804993 - RNA, 19 nt, Artificial Sequence
  Description of Artificial Sequence: Synthetic oligonucleotide
  Sense strand starting at position 3066 of SEQ ID NO: 1563231
aggucauuaguaggaauau

SEQ ID NO: 1804994 - RNA, 19 nt, Artificial Sequence
  Description of Artificial Sequence: Synthetic oligonucleotide
  Antisense strand to SEQ ID NO: 1804993
auauuccuacuaaugaccu

SEQ ID NO: 1804995 - RNA, 19 nt, Artificial Sequence
  Description of Artificial Sequence: Synthetic oligonucleotide
  Sense strand starting at position 3301 of SEQ ID NO: 1563231
uugcauuucuggcuugaag

SEQ ID NO: 1804996 - RNA, 19 nt, Artificial Sequence
  Description of Artificial Sequence: Synthetic oligonucleotide
  Antisense strand to SEQ ID NO: 1804995
cuucaagccagaaaugcaa

SEQ ID NO: 1804997 - RNA, 19 nt, Artificial Sequence
  Description of Artificial Sequence: Synthetic oligonucleotide
  Sense strand starting at position 3312 of SEQ ID NO: 1563231
gcuugaagacagugagaau

SEQ ID NO: 1804998 - RNA, 19 nt, Artificial Sequence
  Description of Artificial Sequence: Synthetic oligonucleotide
  Antisense strand to SEQ ID NO: 1804997
auucucacugucuucaagc

SEQ ID NO: 1804999 - RNA, 19 nt, Artificial Sequence
  Description of Artificial Sequence: Synthetic oligonucleotide
  Sense strand starting at position 3643 of SEQ ID NO: 1563231
aggagaaugauguggccaa

SEQ ID NO: 1805000 - RNA, 19 nt, Artificial Sequence
  Description of Artificial Sequence: Synthetic oligonucleotide
  Antisense strand to SEQ ID NO: 1804999
uuggccacaucauucuccu

SEQ ID NO: 1805001 - RNA, 19 nt, Artificial Sequence
  Description of Artificial Sequence: Synthetic oligonucleotide
  Sense strand starting at position 3650 of SEQ ID NO: 1563231
ugauguggccaaugauaag

SEQ ID NO: 1805002 - RNA, 19 nt, Artificial Sequence
  Description of Artificial Sequence: Synthetic oligonucleotide
  Antisense strand to SEQ ID NO: 1805001
cuuaucauuggccacauca

SEQ ID NO: 1805003 - RNA, 19 nt, Artificial Sequence
  Description of Artificial Sequence: Synthetic oligonucleotide
  Sense strand starting at position 3699 of SEQ ID NO: 1563231
ccagaacaguugucagaag

SEQ ID NO: 1805004 - RNA, 19 nt, Artificial Sequence
  Description of Artificial Sequence: Synthetic oligonucleotide
  Antisense strand to SEQ ID NO: 1805003
cuucugacaacuguucugg

SEQ ID NO: 1805005 - RNA, 19 nt, Artificial Sequence
  Description of Artificial Sequence: Synthetic oligonucleotide
  Sense strand starting at position 65 of SEQ ID NO: 1563232
cugacaaggccuugacuuu

SEQ ID NO: 1805006 - RNA, 19 nt, Artificial Sequence
  Description of Artificial Sequence: Synthetic oligonucleotide
  Antisense strand to SEQ ID NO: 1805005
aaagucaaggccuugucag

SEQ ID NO: 1805007 - RNA, 19 nt, Artificial Sequence
  Description of Artificial Sequence: Synthetic oligonucleotide
  Sense strand starting at position 183 of SEQ ID NO: 1563232
cccaguucuugacucuuga

SEQ ID NO: 1805008 - RNA, 19 nt, Artificial Sequence
  Description of Artificial Sequence: Synthetic oligonucleotide
  Antisense strand to SEQ ID NO: 1805007
ucaagagucaagaacuggg

SEQ ID NO: 1805009 - RNA, 19 nt, Artificial Sequence
  Description of Artificial Sequence: Synthetic oligonucleotide
  Sense strand starting at position 193 of SEQ ID NO: 1563232
gacucuugaccuugaugau

SEQ ID NO: 1805010 - RNA, 19 nt, Artificial Sequence
  Description of Artificial Sequence: Synthetic oligonucleotide
  Antisense strand to SEQ ID NO: 1805009
aucaucaaggucaagaguc

SEQ ID NO: 1805011 - RNA, 19 nt, Artificial Sequence
  Description of Artificial Sequence: Synthetic oligonucleotide
  Sense strand starting at position 688 of SEQ ID NO: 1563232
ggguuaaggacugggaagu

SEQ ID NO: 1805012 - RNA, 19 nt, Artificial Sequence
  Description of Artificial Sequence: Synthetic oligonucleotide
  Antisense strand to SEQ ID NO: 1805011
acuucccaguccuuaaccc

SEQ ID NO: 1805013 - RNA, 19 nt, Artificial Sequence
  Description of Artificial Sequence: Synthetic oligonucleotide
  Sense strand starting at position 689 of SEQ ID NO: 1563232
gguuaaggacugggaagua

SEQ ID NO: 1805014 - RNA, 19 nt, Artificial Sequence
  Description of Artificial Sequence: Synthetic oligonucleotide
  Antisense strand to SEQ ID NO: 1805013
uacuucccaguccuuaacc

SEQ ID NO: 1805015 - RNA, 19 nt, Artificial Sequence
  Description of Artificial Sequence: Synthetic oligonucleotide
  Sense strand starting at position 700 of SEQ ID NO: 1563232
gggaaguaagaguguucga

SEQ ID NO: 1805016 - RNA, 19 nt, Artificial Sequence
  Description of Artificial Sequence: Synthetic oligonucleotide
  Antisense strand to SEQ ID NO: 1805015
ucgaacacucuuacuuccc

SEQ ID NO: 1805017 - RNA, 19 nt, Artificial Sequence
  Description of Artificial Sequence: Synthetic oligonucleotide
  Sense strand starting at position 720 of SEQ ID NO: 1563232
uuaagauuagagugagagu

SEQ ID NO: 1805018 - RNA, 19 nt, Artificial Sequence
  Description of Artificial Sequence: Synthetic oligonucleotide
  Antisense strand to SEQ ID NO: 1805017
acucucacucuaaucuuaa

SEQ ID NO: 1805019 - RNA, 19 nt, Artificial Sequence
  Description of Artificial Sequence: Synthetic oligonucleotide
  Sense strand starting at position 758 of SEQ ID NO: 1563232
agauuacauuuccaaguga

SEQ ID NO: 1805020 - RNA, 19 nt, Artificial Sequence
  Description of Artificial Sequence: Synthetic oligonucleotide
  Antisense strand to SEQ ID NO: 1805019
ucacuuggaaauguaaucu

SEQ ID NO: 1805021 - RNA, 19 nt, Artificial Sequence
  Description of Artificial Sequence: Synthetic oligonucleotide
  Sense strand starting at position 880 of SEQ ID NO: 1563232
gguuuagacauagguagga

SEQ ID NO: 1805022 - RNA, 19 nt, Artificial Sequence
  Description of Artificial Sequence: Synthetic oligonucleotide
  Antisense strand to SEQ ID NO: 1805021
uccuaccuaugucuaaacc

SEQ ID NO: 1805023 - RNA, 19 nt, Artificial Sequence
  Description of Artificial Sequence: Synthetic oligonucleotide
  Sense strand starting at position 1087 of SEQ ID NO: 1563232
cccagcuuuggaugaaaca

SEQ ID NO: 1805024 - RNA, 19 nt, Artificial Sequence
  Description of Artificial Sequence: Synthetic oligonucleotide
  Antisense strand to SEQ ID NO: 1805023
uguuucauccaaagcuggg

SEQ ID NO: 1805025 - RNA, 19 nt, Artificial Sequence
  Description of Artificial Sequence: Synthetic oligonucleotide
  Sense strand starting at position 1239 of SEQ ID NO: 1563232
cgguguuaugaggauuaaa

SEQ ID NO: 1805026 - RNA, 19 nt, Artificial Sequence
  Description of Artificial Sequence: Synthetic oligonucleotide
  Antisense strand to SEQ ID NO: 1805025
uuuaauccucauaacaccg

SEQ ID NO: 1805027 - RNA, 19 nt, Artificial Sequence
  Description of Artificial Sequence: Synthetic oligonucleotide
  Sense strand starting at position 1362 of SEQ ID NO: 1563232
gggagucacacucagucua

SEQ ID NO: 1805028 - RNA, 19 nt, Artificial Sequence
  Description of Artificial Sequence: Synthetic oligonucleotide
  Antisense strand to SEQ ID NO: 1805027
uagacugagugugacuccc

SEQ ID NO: 1805029 - RNA, 19 nt, Artificial Sequence
  Description of Artificial Sequence: Synthetic oligonucleotide
  Sense strand starting at position 1644 of SEQ ID NO: 1563232
gggucagagccaggauuga

SEQ ID NO: 1805030 - RNA, 19 nt, Artificial Sequence
  Description of Artificial Sequence: Synthetic oligonucleotide
  Antisense strand to SEQ ID NO: 1805029
ucaauccuggcucugaccc

SEQ ID NO: 1805031 - RNA, 19 nt, Artificial Sequence
  Description of Artificial Sequence: Synthetic oligonucleotide
  Sense strand starting at position 1665 of SEQ ID NO: 1563232
uuggguuuccuuugggaac

SEQ ID NO: 1805032 - RNA, 19 nt, Artificial Sequence
  Description of Artificial Sequence: Synthetic oligonucleotide
  Antisense strand to SEQ ID NO: 1805031
guucccaaaggaaacccaa

SEQ ID NO: 1805033 - RNA, 19 nt, Artificial Sequence
  Description of Artificial Sequence: Synthetic oligonucleotide
  Sense strand starting at position 1680 of SEQ ID NO: 1563232
gaacuaaggcuguggauga

SEQ ID NO: 1805034 - RNA, 19 nt, Artificial Sequence
  Description of Artificial Sequence: Synthetic oligonucleotide
  Antisense strand to SEQ ID NO: 1805033
ucauccacagccuuaguuc

SEQ ID NO: 1805035 - RNA, 19 nt, Artificial Sequence
  Description of Artificial Sequence: Synthetic oligonucleotide
  Sense strand starting at position 1938 of SEQ ID NO: 1563232
ucuuucuuucgagauugaa

SEQ ID NO: 1805036 - RNA, 19 nt, Artificial Sequence
  Description of Artificial Sequence: Synthetic oligonucleotide
  Antisense strand to SEQ ID NO: 1805035
uucaaucucgaaagaaaga

SEQ ID NO: 1805037 - RNA, 19 nt, Artificial Sequence
  Description of Artificial Sequence: Synthetic oligonucleotide
  Sense strand starting at position 1988 of SEQ ID NO: 1563232
cccagcuuuggagggauua

SEQ ID NO: 1805038 - RNA, 19 nt, Artificial Sequence
  Description of Artificial Sequence: Synthetic oligonucleotide
  Antisense strand to SEQ ID NO: 1805037
uaaucccuccaaagcuggg

SEQ ID NO: 1805039 - RNA, 19 nt, Artificial Sequence
  Description of Artificial Sequence: Synthetic oligonucleotide
  Sense strand starting at position 1989 of SEQ ID NO: 1563232
ccagcuuuggagggauuaa

SEQ ID NO: 1805040 - RNA, 19 nt, Artificial Sequence
  Description of Artificial Sequence: Synthetic oligonucleotide
  Antisense strand to SEQ ID NO: 1805039
uuaaucccuccaaagcugg

SEQ ID NO: 1805041 - RNA, 19 nt, Artificial Sequence
  Description of Artificial Sequence: Synthetic oligonucleotide
  Sense strand starting at position 2163 of SEQ ID NO: 1563232
uuuccaguaguauauggaa

SEQ ID NO: 1805042 - RNA, 19 nt, Artificial Sequence
  Description of Artificial Sequence: Synthetic oligonucleotide
  Antisense strand to SEQ ID NO: 1805041
uuccauauacuacuggaaa

SEQ ID NO: 1805043 - RNA, 19 nt, Artificial Sequence
  Description of Artificial Sequence: Synthetic oligonucleotide
  Sense strand starting at position 2172 of SEQ ID NO: 1563232
guauauggaauucgaagua

SEQ ID NO: 1805044 - RNA, 19 nt, Artificial Sequence
  Description of Artificial Sequence: Synthetic oligonucleotide
  Antisense strand to SEQ ID NO: 1805043
uacuucgaauuccauauac

SEQ ID NO: 1805045 - RNA, 19 nt, Artificial Sequence
  Description of Artificial Sequence: Synthetic oligonucleotide
  Sense strand starting at position 2177 of SEQ ID NO: 1563232
uggaauucgaaguauguag

SEQ ID NO: 1805046 - RNA, 19 nt, Artificial Sequence
  Description of Artificial Sequence: Synthetic oligonucleotide
  Antisense strand to SEQ ID NO: 1805045
cuacauacuucgaauucca

SEQ ID NO: 1805047 - RNA, 19 nt, Artificial Sequence
  Description of Artificial Sequence: Synthetic oligonucleotide
  Sense strand starting at position 2211 of SEQ ID NO: 1563232
ugugcaauaucucuaugga

SEQ ID NO: 1805048 - RNA, 19 nt, Artificial Sequence
  Description of Artificial Sequence: Synthetic oligonucleotide
  Antisense strand to SEQ ID NO: 1805047
uccauagagauauugcaca

SEQ ID NO: 1805049 - RNA, 19 nt, Artificial Sequence
  Description of Artificial Sequence: Synthetic oligonucleotide
  Sense strand starting at position 2212 of SEQ ID NO: 1563232
gugcaauaucucuauggaa

SEQ ID NO: 1805050 - RNA, 19 nt, Artificial Sequence
  Description of Artificial Sequence: Synthetic oligonucleotide
  Antisense strand to SEQ ID NO: 1805049
uuccauagagauauugcac

SEQ ID NO: 1805051 - RNA, 19 nt, Artificial Sequence
  Description of Artificial Sequence: Synthetic oligonucleotide
  Sense strand starting at position 2437 of SEQ ID NO: 1563232
cgaacuuuauuugagaaca

SEQ ID NO: 1805052 - RNA, 19 nt, Artificial Sequence
  Description of Artificial Sequence: Synthetic oligonucleotide
  Antisense strand to SEQ ID NO: 1805051
uguucucaaauaaaguucg

SEQ ID NO: 1805053 - RNA, 19 nt, Artificial Sequence
  Description of Artificial Sequence: Synthetic oligonucleotide
  Sense strand starting at position 2723 of SEQ ID NO: 1563232
cguguauuuccgggugaag

SEQ ID NO: 1805054 - RNA, 19 nt, Artificial Sequence
  Description of Artificial Sequence: Synthetic oligonucleotide
  Antisense strand to SEQ ID NO: 1805053
cuucacccggaaauacacg

SEQ ID NO: 1805055 - RNA, 19 nt, Artificial Sequence
  Description of Artificial Sequence: Synthetic oligonucleotide
  Sense strand starting at position 2725 of SEQ ID NO: 1563232
uguauuuccgggugaagca

SEQ ID NO: 1805056 - RNA, 19 nt, Artificial Sequence
  Description of Artificial Sequence: Synthetic oligonucleotide
  Antisense strand to SEQ ID NO: 1805055
ugcuucacccggaaauaca

SEQ ID NO: 1805057 - RNA, 19 nt, Artificial Sequence
  Description of Artificial Sequence: Synthetic oligonucleotide
  Sense strand starting at position 2734 of SEQ ID NO: 1563232
gggugaagcaucgggagau

SEQ ID NO: 1805058 - RNA, 19 nt, Artificial Sequence
  Description of Artificial Sequence: Synthetic oligonucleotide
  Antisense strand to SEQ ID NO: 1805057
aucucccgaugcuucaccc

SEQ ID NO: 1805059 - RNA, 19 nt, Artificial Sequence
  Description of Artificial Sequence: Synthetic oligonucleotide
  Sense strand starting at position 2842 of SEQ ID NO: 1563232
aguaguugauguccaggga

SEQ ID NO: 1805060 - RNA, 19 nt, Artificial Sequence
  Description of Artificial Sequence: Synthetic oligonucleotide
  Antisense strand to SEQ ID NO: 1805059
ucccuggacaucaacuacu

SEQ ID NO: 1805061 - RNA, 19 nt, Artificial Sequence
  Description of Artificial Sequence: Synthetic oligonucleotide
  Sense strand starting at position 2843 of SEQ ID NO: 1563232
guaguugauguccagggau

SEQ ID NO: 1805062 - RNA, 19 nt, Artificial Sequence
  Description of Artificial Sequence: Synthetic oligonucleotide
  Antisense strand to SEQ ID NO: 1805061
aucccuggacaucaacuac

SEQ ID NO: 1805063 - RNA, 19 nt, Artificial Sequence
  Description of Artificial Sequence: Synthetic oligonucleotide
  Sense strand starting at position 2845 of SEQ ID NO: 1563232
aguugauguccagggauac

SEQ ID NO: 1805064 - RNA, 19 nt, Artificial Sequence
  Description of Artificial Sequence: Synthetic oligonucleotide
  Antisense strand to SEQ ID NO: 1805063
guaucccuggacaucaacu

SEQ ID NO: 1805065 - RNA, 19 nt, Artificial Sequence
  Description of Artificial Sequence: Synthetic oligonucleotide
  Sense strand starting at position 3637 of SEQ ID NO: 1563232
agauauuugcuguguaauu

SEQ ID NO: 1805066 - RNA, 19 nt, Artificial Sequence
  Description of Artificial Sequence: Synthetic oligonucleotide
  Antisense strand to SEQ ID NO: 1805065
aauuacacagcaaauaucu

SEQ ID NO: 1805067 - RNA, 19 nt, Artificial Sequence
  Description of Artificial Sequence: Synthetic oligonucleotide
  Sense strand starting at position 3638 of SEQ ID NO: 1563232
gauauuugcuguguaauua

SEQ ID NO: 1805068 - RNA, 19 nt, Artificial Sequence
  Description of Artificial Sequence: Synthetic oligonucleotide
  Antisense strand to SEQ ID NO: 1805067
uaauuacacagcaaauauc

SEQ ID NO: 1805069 - RNA, 19 nt, Artificial Sequence
  Description of Artificial Sequence: Synthetic oligonucleotide
  Sense strand starting at position 3648 of SEQ ID NO: 1563232
guguaauuauucuuuggag

SEQ ID NO: 1805070 - RNA, 19 nt, Artificial Sequence
  Description of Artificial Sequence: Synthetic oligonucleotide
  Antisense strand to SEQ ID NO: 1805069
cuccaaagaauaauuacac

SEQ ID NO: 1805071 - RNA, 19 nt, Artificial Sequence
  Description of Artificial Sequence: Synthetic oligonucleotide
  Sense strand starting at position 3649 of SEQ ID NO: 1563232
uguaauuauucuuuggagu

SEQ ID NO: 1805072 - RNA, 19 nt, Artificial Sequence
  Description of Artificial Sequence: Synthetic oligonucleotide
  Antisense strand to SEQ ID NO: 1805071
acuccaaagaauaauuaca

SEQ ID NO: 1805073 - RNA, 19 nt, Artificial Sequence
  Description of Artificial Sequence: Synthetic oligonucleotide
  Sense strand starting at position 3650 of SEQ ID NO: 1563232
guaauuauucuuuggagug

SEQ ID NO: 1805074 - RNA, 19 nt, Artificial Sequence
  Description of Artificial Sequence: Synthetic oligonucleotide
  Antisense strand to SEQ ID NO: 1805073
cacuccaaagaauaauuac

SEQ ID NO: 1805075 - RNA, 19 nt, Artificial Sequence
  Description of Artificial Sequence: Synthetic oligonucleotide
  Sense strand starting at position 3655 of SEQ ID NO: 1563232
uauucuuuggaguguacaa

SEQ ID NO: 1805076 - RNA, 19 nt, Artificial Sequence
  Description of Artificial Sequence: Synthetic oligonucleotide
  Antisense strand to SEQ ID NO: 1805075
uuguacacuccaaagaaua

SEQ ID NO: 1805077 - RNA, 19 nt, Artificial Sequence
  Description of Artificial Sequence: Synthetic oligonucleotide
  Sense strand starting at position 3657 of SEQ ID NO: 1563232
uucuuuggaguguacaaau

SEQ ID NO: 1805078 - RNA, 19 nt, Artificial Sequence
  Description of Artificial Sequence: Synthetic oligonucleotide
  Antisense strand to SEQ ID NO: 1805077
auuuguacacuccaaagaa

SEQ ID NO: 1805079 - RNA, 19 nt, Artificial Sequence
  Description of Artificial Sequence: Synthetic oligonucleotide
  Sense strand starting at position 3667 of SEQ ID NO: 1563232
uguacaaauguguaucaua

SEQ ID NO: 1805080 - RNA, 19 nt, Artificial Sequence
  Description of Artificial Sequence: Synthetic oligonucleotide
  Antisense strand to SEQ ID NO: 1805079
uaugauacacauuuguaca

SEQ ID NO: 1805081 - RNA, 19 nt, Artificial Sequence
  Description of Artificial Sequence: Synthetic oligonucleotide
  Sense strand starting at position 3860 of SEQ ID NO: 1563232
ggaaguagucgcuuugugu

SEQ ID NO: 1805082 - RNA, 19 nt, Artificial Sequence
  Description of Artificial Sequence: Synthetic oligonucleotide
  Antisense strand to SEQ ID NO: 1805081
acacaaagcgacuacuucc

SEQ ID NO: 1805083 - RNA, 19 nt, Artificial Sequence
  Description of Artificial Sequence: Synthetic oligonucleotide
  Sense strand starting at position 3861 of SEQ ID NO: 1563232
gaaguagucgcuuuguguu

SEQ ID NO: 1805084 - RNA, 19 nt, Artificial Sequence
  Description of Artificial Sequence: Synthetic oligonucleotide
  Antisense strand to SEQ ID NO: 1805083
aacacaaagcgacuacuuc

SEQ ID NO: 1805085 - RNA, 19 nt, Artificial Sequence
  Description of Artificial Sequence: Synthetic oligonucleotide
  Sense strand starting at position 210 of SEQ ID NO: 1563233
auagaauguuauguuggaa

SEQ ID NO: 1805086 - RNA, 19 nt, Artificial Sequence
  Description of Artificial Sequence: Synthetic oligonucleotide
  Antisense strand to SEQ ID NO: 1805085
uuccaacauaacauucuau

SEQ ID NO: 1805087 - RNA, 19 nt, Artificial Sequence
  Description of Artificial Sequence: Synthetic oligonucleotide
  Sense strand starting at position 213 of SEQ ID NO: 1563233
gaauguuauguuggaaagu

SEQ ID NO: 1805088 - RNA, 19 nt, Artificial Sequence
  Description of Artificial Sequence: Synthetic oligonucleotide
  Antisense strand to SEQ ID NO: 1805087
acuuuccaacauaacauuc

SEQ ID NO: 1805089 - RNA, 19 nt, Artificial Sequence
  Description of Artificial Sequence: Synthetic oligonucleotide
  Sense strand starting at position 222 of SEQ ID NO: 1563233
guuggaaagucuguuagaa

SEQ ID NO: 1805090 - RNA, 19 nt, Artificial Sequence
  Description of Artificial Sequence: Synthetic oligonucleotide
  Antisense strand to SEQ ID NO: 1805089
uucuaacagacuuuccaac

SEQ ID NO: 1805091 - RNA, 19 nt, Artificial Sequence
  Description of Artificial Sequence: Synthetic oligonucleotide
  Sense strand starting at position 619 of SEQ ID NO: 1563233
accuauuccugaccaugua

SEQ ID NO: 1805092 - RNA, 19 nt, Artificial Sequence
  Description of Artificial Sequence: Synthetic oligonucleotide
  Antisense strand to SEQ ID NO: 1805091
uacauggucaggaauaggu

SEQ ID NO: 1805093 - RNA, 19 nt, Artificial Sequence
  Description of Artificial Sequence: Synthetic oligonucleotide
  Sense strand starting at position 632 of SEQ ID NO: 1563233
cauguaaguguuuagacuu

SEQ ID NO: 1805094 - RNA, 19 nt, Artificial Sequence
  Description of Artificial Sequence: Synthetic oligonucleotide
  Antisense strand to SEQ ID NO: 1805093
aagucuaaacacuuacaug

SEQ ID NO: 1805095 - RNA, 19 nt, Artificial Sequence
  Description of Artificial Sequence: Synthetic oligonucleotide
  Sense strand starting at position 940 of SEQ ID NO: 1563233
uuguuaggacagcagaauu

SEQ ID NO: 1805096 - RNA, 19 nt, Artificial Sequence
  Description of Artificial Sequence: Synthetic oligonucleotide
  Antisense strand to SEQ ID NO: 1805095
aauucugcuguccuaacaa

SEQ ID NO: 1805097 - RNA, 19 nt, Artificial Sequence
  Description of Artificial Sequence: Synthetic oligonucleotide
  Sense strand starting at position 1074 of SEQ ID NO: 1563233
gaucaagugguccagugaa

SEQ ID NO: 1805098 - RNA, 19 nt, Artificial Sequence
  Description of Artificial Sequence: Synthetic oligonucleotide
  Antisense strand to SEQ ID NO: 1805097
uucacuggaccacuugauc

SEQ ID NO: 1805099 - RNA, 19 nt, Artificial Sequence
  Description of Artificial Sequence: Synthetic oligonucleotide
  Sense strand starting at position 1094 of SEQ ID NO: 1563233
acccuagaacaguguacuu

SEQ ID NO: 1805100 - RNA, 19 nt, Artificial Sequence
  Description of Artificial Sequence: Synthetic oligonucleotide
  Antisense strand to SEQ ID NO: 1805099
aaguacacuguucuagggu

SEQ ID NO: 1805101 - RNA, 19 nt, Artificial Sequence
  Description of Artificial Sequence: Synthetic oligonucleotide
  Sense strand starting at position 1669 of SEQ ID NO: 1563233
gcuauuaacgggcacauau

SEQ ID NO: 1805102 - RNA, 19 nt, Artificial Sequence
  Description of Artificial Sequence: Synthetic oligonucleotide
  Antisense strand to SEQ ID NO: 1805101
auaugugcccguuaauagc

SEQ ID NO: 1805103 - RNA, 19 nt, Artificial Sequence
  Description of Artificial Sequence: Synthetic oligonucleotide
  Sense strand starting at position 1720 of SEQ ID NO: 1563233
gaguuugguuaacuacaaa

SEQ ID NO: 1805104 - RNA, 19 nt, Artificial Sequence
  Description of Artificial Sequence: Synthetic oligonucleotide
  Antisense strand to SEQ ID NO: 1805103
uuuguaguuaaccaaacuc

SEQ ID NO: 1805105 - RNA, 19 nt, Artificial Sequence
  Description of Artificial Sequence: Synthetic oligonucleotide
  Sense strand starting at position 1723 of SEQ ID NO: 1563233
uuugguuaacuacaaaguu

SEQ ID NO: 1805106 - RNA, 19 nt, Artificial Sequence
  Description of Artificial Sequence: Synthetic oligonucleotide
  Antisense strand to SEQ ID NO: 1805105
aacuuuguaguuaaccaaa

SEQ ID NO: 1805107 - RNA, 19 nt, Artificial Sequence
  Description of Artificial Sequence: Synthetic oligonucleotide
  Sense strand starting at position 1765 of SEQ ID NO: 1563233
cgcuaaguuauccaggaaa

SEQ ID NO: 1805108 - RNA, 19 nt, Artificial Sequence
  Description of Artificial Sequence: Synthetic oligonucleotide
  Antisense strand to SEQ ID NO: 1805107
uuuccuggauaacuuagcg

SEQ ID NO: 1805109 - RNA, 19 nt, Artificial Sequence
  Description of Artificial Sequence: Synthetic oligonucleotide
  Sense strand starting at position 1815 of SEQ ID NO: 1563233
cucuacucaccugaguuau

SEQ ID NO: 1805110 - RNA, 19 nt, Artificial Sequence
  Description of Artificial Sequence: Synthetic oligonucleotide
  Antisense strand to SEQ ID NO: 1805109
auaacucaggugaguagag

SEQ ID NO: 1805111 - RNA, 19 nt, Artificial Sequence
  Description of Artificial Sequence: Synthetic oligonucleotide
  Sense strand starting at position 1827 of SEQ ID NO: 1563233
gaguuaucccaggagcccu

SEQ ID NO: 1805112 - RNA, 19 nt, Artificial Sequence
  Description of Artificial Sequence: Synthetic oligonucleotide
  Antisense strand to SEQ ID NO: 1805111
agggcuccugggauaacuc

SEQ ID NO: 1805113 - RNA, 19 nt, Artificial Sequence
  Description of Artificial Sequence: Synthetic oligonucleotide
  Sense strand starting at position 1954 of SEQ ID NO: 1563233
uggcuuucuuaaccugaaa

SEQ ID NO: 1805114 - RNA, 19 nt, Artificial Sequence
  Description of Artificial Sequence: Synthetic oligonucleotide
  Antisense strand to SEQ ID NO: 1805113
uuucagguuaagaaagcca

SEQ ID NO: 1805115 - RNA, 19 nt, Artificial Sequence
  Description of Artificial Sequence: Synthetic oligonucleotide
  Sense strand starting at position 2058 of SEQ ID NO: 1563233
aacugauccugagucauga

SEQ ID NO: 1805116 - RNA, 19 nt, Artificial Sequence
  Description of Artificial Sequence: Synthetic oligonucleotide
  Antisense strand to SEQ ID NO: 1805115
ucaugacucaggaucaguu

SEQ ID NO: 1805117 - RNA, 19 nt, Artificial Sequence
  Description of Artificial Sequence: Synthetic oligonucleotide
  Sense strand starting at position 2211 of SEQ ID NO: 1563233
cgaggauucugauagauuu

SEQ ID NO: 1805118 - RNA, 19 nt, Artificial Sequence
  Description of Artificial Sequence: Synthetic oligonucleotide
  Antisense strand to SEQ ID NO: 1805117
aaaucuaucagaauccucg

SEQ ID NO: 1805119 - RNA, 19 nt, Artificial Sequence
  Description of Artificial Sequence: Synthetic oligonucleotide
  Sense strand starting at position 2338 of SEQ ID NO: 1563233
agacauggcccuggucaga

SEQ ID NO: 1805120 - RNA, 19 nt, Artificial Sequence
  Description of Artificial Sequence: Synthetic oligonucleotide
  Antisense strand to SEQ ID NO: 1805119
ucugaccagggccaugucu

SEQ ID NO: 1805121 - RNA, 19 nt, Artificial Sequence
  Description of Artificial Sequence: Synthetic oligonucleotide
  Sense strand starting at position 2446 of SEQ ID NO: 1563233
aaaggucacuucgugaaac

SEQ ID NO: 1805122 - RNA, 19 nt, Artificial Sequence
  Description of Artificial Sequence: Synthetic oligonucleotide
  Antisense strand to SEQ ID NO: 1805121
guuucacgaagugaccuuu

SEQ ID NO: 1805123 - RNA, 19 nt, Artificial Sequence
  Description of Artificial Sequence: Synthetic oligonucleotide
  Sense strand starting at position 2448 of SEQ ID NO: 1563233
aggucacuucgugaaacaa

SEQ ID NO: 1805124 - RNA, 19 nt, Artificial Sequence
  Description of Artificial Sequence: Synthetic oligonucleotide
  Antisense strand to SEQ ID NO: 1805123
uuguuucacgaagugaccu

SEQ ID NO: 1805125 - RNA, 19 nt, Artificial Sequence
  Description of Artificial Sequence: Synthetic oligonucleotide
  Sense strand starting at position 2515 of SEQ ID NO: 1563233
gugaauggaguuuauucca

SEQ ID NO: 1805126 - RNA, 19 nt, Artificial Sequence
  Description of Artificial Sequence: Synthetic oligonucleotide
  Antisense strand to SEQ ID NO: 1805125
uggaauaaacuccauucac

SEQ ID NO: 1805127 - RNA, 19 nt, Artificial Sequence
  Description of Artificial Sequence: Synthetic oligonucleotide
  Sense strand starting at position 2561 of SEQ ID NO: 1563233
gcaaccaggcuaugaagau

SEQ ID NO: 1805128 - RNA, 19 nt, Artificial Sequence
  Description of Artificial Sequence: Synthetic oligonucleotide
  Antisense strand to SEQ ID NO: 1805127
aucuucauagccugguugc

SEQ ID NO: 1805129 - RNA, 19 nt, Artificial Sequence
  Description of Artificial Sequence: Synthetic oligonucleotide
  Sense strand starting at position 2724 of SEQ ID NO: 1563233
ggaacaugauucucaaguu

SEQ ID NO: 1805130 - RNA, 19 nt, Artificial Sequence
  Description of Artificial Sequence: Synthetic oligonucleotide
  Antisense strand to SEQ ID NO: 1805129
aacuugagaaucauguucc

SEQ ID NO: 1805131 - RNA, 19 nt, Artificial Sequence
  Description of Artificial Sequence: Synthetic oligonucleotide
  Sense strand starting at position 2769 of SEQ ID NO: 1563233
uguaaagaugcucaucauc

SEQ ID NO: 1805132 - RNA, 19 nt, Artificial Sequence
  Description of Artificial Sequence: Synthetic oligonucleotide
  Antisense strand to SEQ ID NO: 1805131
gaugaugagcaucuuuaca

SEQ ID NO: 1805133 - RNA, 19 nt, Artificial Sequence
  Description of Artificial Sequence: Synthetic oligonucleotide
  Sense strand starting at position 2878 of SEQ ID NO: 1563233
uggcuaguugaagauguaa

SEQ ID NO: 1805134 - RNA, 19 nt, Artificial Sequence
  Description of Artificial Sequence: Synthetic oligonucleotide
  Antisense strand to SEQ ID NO: 1805133
uuacaucuucaacuagcca

SEQ ID NO: 1805135 - RNA, 19 nt, Artificial Sequence
  Description of Artificial Sequence: Synthetic oligonucleotide
  Sense strand starting at position 2880 of SEQ ID NO: 1563233
gcuaguugaagauguaaga

SEQ ID NO: 1805136 - RNA, 19 nt, Artificial Sequence
  Description of Artificial Sequence: Synthetic oligonucleotide
  Antisense strand to SEQ ID NO: 1805135
ucuuacaucuucaacuagc

SEQ ID NO: 1805137 - RNA, 19 nt, Artificial Sequence
  Description of Artificial Sequence: Synthetic oligonucleotide
  Sense strand starting at position 3018 of SEQ ID NO: 1563233
cuauaacucuggucucuga

SEQ ID NO: 1805138 - RNA, 19 nt, Artificial Sequence
  Description of Artificial Sequence: Synthetic oligonucleotide
  Antisense strand to SEQ ID NO: 1805137
ucagagaccagaguuauag

SEQ ID NO: 1805139 - RNA, 19 nt, Artificial Sequence
  Description of Artificial Sequence: Synthetic oligonucleotide
  Sense strand starting at position 3021 of SEQ ID NO: 1563233
uaacucuggucucugagau

SEQ ID NO: 1805140 - RNA, 19 nt, Artificial Sequence
  Description of Artificial Sequence: Synthetic oligonucleotide
  Antisense strand to SEQ ID NO: 1805139
aucucagagaccagaguua

SEQ ID NO: 1805141 - RNA, 19 nt, Artificial Sequence
  Description of Artificial Sequence: Synthetic oligonucleotide
  Sense strand starting at position 3022 of SEQ ID NO: 1563233
aacucuggucucugagauc

SEQ ID NO: 1805142 - RNA, 19 nt, Artificial Sequence
  Description of Artificial Sequence: Synthetic oligonucleotide
  Antisense strand to SEQ ID NO: 1805141
gaucucagagaccagaguu

SEQ ID NO: 1805143 - RNA, 19 nt, Artificial Sequence
  Description of Artificial Sequence: Synthetic oligonucleotide
  Sense strand starting at position 3165 of SEQ ID NO: 1563233
ucagcuagacagugagaua

SEQ ID NO: 1805144 - RNA, 19 nt, Artificial Sequence
  Description of Artificial Sequence: Synthetic oligonucleotide
  Antisense strand to SEQ ID NO: 1805143
uaucucacugucuagcuga

SEQ ID NO: 1805145 - RNA, 19 nt, Artificial Sequence
  Description of Artificial Sequence: Synthetic oligonucleotide
  Sense strand starting at position 3177 of SEQ ID NO: 1563233
ugagauaguccucaagcaa

SEQ ID NO: 1805146 - RNA, 19 nt, Artificial Sequence
  Description of Artificial Sequence: Synthetic oligonucleotide
  Antisense strand to SEQ ID NO: 1805145
uugcuugaggacuaucuca

SEQ ID NO: 1805147 - RNA, 19 nt, Artificial Sequence
  Description of Artificial Sequence: Synthetic oligonucleotide
  Sense strand starting at position 3191 of SEQ ID NO: 1563233
agcaaauaucccugguaug

SEQ ID NO: 1805148 - RNA, 19 nt, Artificial Sequence
  Description of Artificial Sequence: Synthetic oligonucleotide
  Antisense strand to SEQ ID NO: 1805147
cauaccagggauauuugcu

SEQ ID NO: 1805149 - RNA, 19 nt, Artificial Sequence
  Description of Artificial Sequence: Synthetic oligonucleotide
  Sense strand starting at position 3288 of SEQ ID NO: 1563233
guaaaucuagcagggaauc

SEQ ID NO: 1805150 - RNA, 19 nt, Artificial Sequence
  Description of Artificial Sequence: Synthetic oligonucleotide
  Antisense strand to SEQ ID NO: 1805149
gauucccugcuagauuuac

SEQ ID NO: 1805151 - RNA, 19 nt, Artificial Sequence
  Description of Artificial Sequence: Synthetic oligonucleotide
  Sense strand starting at position 3354 of SEQ ID NO: 1563233
uugcucagugcagaaauau

SEQ ID NO: 1805152 - RNA, 19 nt, Artificial Sequence
  Description of Artificial Sequence: Synthetic oligonucleotide
  Antisense strand to SEQ ID NO: 1805151
auauuucugcacugagcaa

SEQ ID NO: 1805153 - RNA, 19 nt, Artificial Sequence
  Description of Artificial Sequence: Synthetic oligonucleotide
  Sense strand starting at position 3452 of SEQ ID NO: 1563233
ucuuccuuagguugaggaa

SEQ ID NO: 1805154 - RNA, 19 nt, Artificial Sequence
  Description of Artificial Sequence: Synthetic oligonucleotide
  Antisense strand to SEQ ID NO: 1805153
uuccucaaccuaaggaaga

SEQ ID NO: 1805155 - RNA, 19 nt, Artificial Sequence
  Description of Artificial Sequence: Synthetic oligonucleotide
  Sense strand starting at position 3723 of SEQ ID NO: 1563233
ugauucuagguuuguacaa

SEQ ID NO: 1805156 - RNA, 19 nt, Artificial Sequence
  Description of Artificial Sequence: Synthetic oligonucleotide
  Antisense strand to SEQ ID NO: 1805155
uuguacaaaccuagaauca

SEQ ID NO: 1805157 - RNA, 19 nt, Artificial Sequence
  Description of Artificial Sequence: Synthetic oligonucleotide
  Sense strand starting at position 3724 of SEQ ID NO: 1563233
gauucuagguuuguacaau

SEQ ID NO: 1805158 - RNA, 19 nt, Artificial Sequence
  Description of Artificial Sequence: Synthetic oligonucleotide
  Antisense strand to SEQ ID NO: 1805157
auuguacaaaccuagaauc

SEQ ID NO: 1805159 - RNA, 19 nt, Artificial Sequence
  Description of Artificial Sequence: Synthetic oligonucleotide
  Sense strand starting at position 3791 of SEQ ID NO: 1563233
accauugccuuguuuauuu

SEQ ID NO: 1805160 - RNA, 19 nt, Artificial Sequence
  Description of Artificial Sequence: Synthetic oligonucleotide
  Antisense strand to SEQ ID NO: 1805159
aaauaaacaaggcaauggu

SEQ ID NO: 1805161 - RNA, 19 nt, Artificial Sequence
  Description of Artificial Sequence: Synthetic oligonucleotide
  Sense strand starting at position 3870 of SEQ ID NO: 1563233
auaguaauguuucucaauc

SEQ ID NO: 1805162 - RNA, 19 nt, Artificial Sequence
  Description of Artificial Sequence: Synthetic oligonucleotide
  Antisense strand to SEQ ID NO: 1805161
gauugagaaacauuacuau

SEQ ID NO: 1805163 - RNA, 19 nt, Artificial Sequence
  Description of Artificial Sequence: Synthetic oligonucleotide
  Sense strand starting at position 3982 of SEQ ID NO: 1563233
ucuguuuauuugcugucua

SEQ ID NO: 1805164 - RNA, 19 nt, Artificial Sequence
  Description of Artificial Sequence: Synthetic oligonucleotide
  Antisense strand to SEQ ID NO: 1805163
uagacagcaaauaaacaga

SEQ ID NO: 1805165 - RNA, 19 nt, Artificial Sequence
  Description of Artificial Sequence: Synthetic oligonucleotide
  Sense strand starting at position 169 of SEQ ID NO: 1563234
uggguaugugaauauacuu

SEQ ID NO: 1805166 - RNA, 19 nt, Artificial Sequence
  Description of Artificial Sequence: Synthetic oligonucleotide
  Antisense strand to SEQ ID NO: 1805165
aaguauauucacauaccca

SEQ ID NO: 1805167 - RNA, 19 nt, Artificial Sequence
  Description of Artificial Sequence: Synthetic oligonucleotide
  Sense strand starting at position 257 of SEQ ID NO: 1563234
uagugucagaauugagaug

SEQ ID NO: 1805168 - RNA, 19 nt, Artificial Sequence
  Description of Artificial Sequence: Synthetic oligonucleotide
  Antisense strand to SEQ ID NO: 1805167
caucucaauucugacacua

SEQ ID NO: 1805169 - RNA, 19 nt, Artificial Sequence
  Description of Artificial Sequence: Synthetic oligonucleotide
  Sense strand starting at position 264 of SEQ ID NO: 1563234
agaauugagaugugcuauu

SEQ ID NO: 1805170 - RNA, 19 nt, Artificial Sequence
  Description of Artificial Sequence: Synthetic oligonucleotide
  Antisense strand to SEQ ID NO: 1805169
aauagcacaucucaauucu

SEQ ID NO: 1805171 - RNA, 19 nt, Artificial Sequence
  Description of Artificial Sequence: Synthetic oligonucleotide
  Sense strand starting at position 368 of SEQ ID NO: 1563234
uugaaauguuaaguuugga

SEQ ID NO: 1805172 - RNA, 19 nt, Artificial Sequence
  Description of Artificial Sequence: Synthetic oligonucleotide
  Antisense strand to SEQ ID NO: 1805171
uccaaacuuaacauuucaa

SEQ ID NO: 1805173 - RNA, 19 nt, Artificial Sequence
  Description of Artificial Sequence: Synthetic oligonucleotide
  Sense strand starting at position 371 of SEQ ID NO: 1563234
aaauguuaaguuuggaucu

SEQ ID NO: 1805174 - RNA, 19 nt, Artificial Sequence
  Description of Artificial Sequence: Synthetic oligonucleotide
  Antisense strand to SEQ ID NO: 1805173
agauccaaacuuaacauuu

SEQ ID NO: 1805175 - RNA, 19 nt, Artificial Sequence
  Description of Artificial Sequence: Synthetic oligonucleotide
  Sense strand starting at position 381 of SEQ ID NO: 1563234
uuuggaucuacaggguuaa

SEQ ID NO: 1805176 - RNA, 19 nt, Artificial Sequence
  Description of Artificial Sequence: Synthetic oligonucleotide
  Antisense strand to SEQ ID NO: 1805175
uuaacccuguagauccaaa

SEQ ID NO: 1805177 - RNA, 19 nt, Artificial Sequence
  Description of Artificial Sequence: Synthetic oligonucleotide
  Sense strand starting at position 382 of SEQ ID NO: 1563234
uuggaucuacaggguuaaa

SEQ ID NO: 1805178 - RNA, 19 nt, Artificial Sequence
  Description of Artificial Sequence: Synthetic oligonucleotide
  Antisense strand to SEQ ID NO: 1805177
uuuaacccuguagauccaa

SEQ ID NO: 1805179 - RNA, 19 nt, Artificial Sequence
  Description of Artificial Sequence: Synthetic oligonucleotide
  Sense strand starting at position 470 of SEQ ID NO: 1563234
uuacaaauguggcucauaa

SEQ ID NO: 1805180 - RNA, 19 nt, Artificial Sequence
  Description of Artificial Sequence: Synthetic oligonucleotide
  Antisense strand to SEQ ID NO: 1805179
uuaugagccacauuuguaa

SEQ ID NO: 1805181 - RNA, 19 nt, Artificial Sequence
  Description of Artificial Sequence: Synthetic oligonucleotide
  Sense strand starting at position 472 of SEQ ID NO: 1563234
acaaauguggcucauaaua

SEQ ID NO: 1805182 - RNA, 19 nt, Artificial Sequence
  Description of Artificial Sequence: Synthetic oligonucleotide
  Antisense strand to SEQ ID NO: 1805181
uauuaugagccacauuugu

SEQ ID NO: 1805183 - RNA, 19 nt, Artificial Sequence
  Description of Artificial Sequence: Synthetic oligonucleotide
  Sense strand starting at position 596 of SEQ ID NO: 1563234
ggaguaacauguccucaca

SEQ ID NO: 1805184 - RNA, 19 nt, Artificial Sequence
  Description of Artificial Sequence: Synthetic oligonucleotide
  Antisense strand to SEQ ID NO: 1805183
ugugaggacauguuacucc

SEQ ID NO: 1805185 - RNA, 19 nt, Artificial Sequence
  Description of Artificial Sequence: Synthetic oligonucleotide
  Sense strand starting at position 599 of SEQ ID NO: 1563234
guaacauguccucacauca

SEQ ID NO: 1805186 - RNA, 19 nt, Artificial Sequence
  Description of Artificial Sequence: Synthetic oligonucleotide
  Antisense strand to SEQ ID NO: 1805185
ugaugugaggacauguuac

SEQ ID NO: 1805187 - RNA, 19 nt, Artificial Sequence
  Description of Artificial Sequence: Synthetic oligonucleotide
  Sense strand starting at position 614 of SEQ ID NO: 1563234
aucaauugggucugaguaa

SEQ ID NO: 1805188 - RNA, 19 nt, Artificial Sequence
  Description of Artificial Sequence: Synthetic oligonucleotide
  Antisense strand to SEQ ID NO: 1805187
uuacucagacccaauugau

SEQ ID NO: 1805189 - RNA, 19 nt, Artificial Sequence
  Description of Artificial Sequence: Synthetic oligonucleotide
  Sense strand starting at position 725 of SEQ ID NO: 1563234
auugaaauugaguacugca

SEQ ID NO: 1805190 - RNA, 19 nt, Artificial Sequence
  Description of Artificial Sequence: Synthetic oligonucleotide
  Antisense strand to SEQ ID NO: 1805189
ugcaguacucaauuucaau

SEQ ID NO: 1805191 - RNA, 19 nt, Artificial Sequence
  Description of Artificial Sequence: Synthetic oligonucleotide
  Sense strand starting at position 732 of SEQ ID NO: 1563234
uugaguacugcagacaacu

SEQ ID NO: 1805192 - RNA, 19 nt, Artificial Sequence
  Description of Artificial Sequence: Synthetic oligonucleotide
  Antisense strand to SEQ ID NO: 1805191
aguugucugcaguacucaa

SEQ ID NO: 1805193 - RNA, 19 nt, Artificial Sequence
  Description of Artificial Sequence: Synthetic oligonucleotide
  Sense strand starting at position 883 of SEQ ID NO: 1563234
ucuagcgauccuuauuaag

SEQ ID NO: 1805194 - RNA, 19 nt, Artificial Sequence
  Description of Artificial Sequence: Synthetic oligonucleotide
  Antisense strand to SEQ ID NO: 1805193
cuuaauaaggaucgcuaga

SEQ ID NO: 1805195 - RNA, 19 nt, Artificial Sequence
  Description of Artificial Sequence: Synthetic oligonucleotide
  Sense strand starting at position 934 of SEQ ID NO: 1563234
cuucuaaagccgcagaaua

SEQ ID NO: 1805196 - RNA, 19 nt, Artificial Sequence
  Description of Artificial Sequence: Synthetic oligonucleotide
  Antisense strand to SEQ ID NO: 1805195
uauucugcggcuuuagaag

SEQ ID NO: 1805197 - RNA, 19 nt, Artificial Sequence
  Description of Artificial Sequence: Synthetic oligonucleotide
  Sense strand starting at position 1025 of SEQ ID NO: 1563234
uggaguacuguuugacaag

SEQ ID NO: 1805198 - RNA, 19 nt, Artificial Sequence
  Description of Artificial Sequence: Synthetic oligonucleotide
  Antisense strand to SEQ ID NO: 1805197
cuugucaaacaguacucca

SEQ ID NO: 1805199 - RNA, 19 nt, Artificial Sequence
  Description of Artificial Sequence: Synthetic oligonucleotide
  Sense strand starting at position 1127 of SEQ ID NO: 1563234
ugauuaaucugauucccug

SEQ ID NO: 1805200 - RNA, 19 nt, Artificial Sequence
  Description of Artificial Sequence: Synthetic oligonucleotide
  Antisense strand to SEQ ID NO: 1805199
cagggaaucagauuaauca

SEQ ID NO: 1805201 - RNA, 19 nt, Artificial Sequence
  Description of Artificial Sequence: Synthetic oligonucleotide
  Sense strand starting at position 1196 of SEQ ID NO: 1563234
cugucaguucuauauucua

SEQ ID NO: 1805202 - RNA, 19 nt, Artificial Sequence
  Description of Artificial Sequence: Synthetic oligonucleotide
  Antisense strand to SEQ ID NO: 1805201
uagaauauagaacugacag

SEQ ID NO: 1805203 - RNA, 19 nt, Artificial Sequence
  Description of Artificial Sequence: Synthetic oligonucleotide
  Sense strand starting at position 1280 of SEQ ID NO: 1563234
gggagucucgagcacugau

SEQ ID NO: 1805204 - RNA, 19 nt, Artificial Sequence
  Description of Artificial Sequence: Synthetic oligonucleotide
  Antisense strand to SEQ ID NO: 1805203
aucagugcucgagacuccc

SEQ ID NO: 1805205 - RNA, 19 nt, Artificial Sequence
  Description of Artificial Sequence: Synthetic oligonucleotide
  Sense strand starting at position 1297 of SEQ ID NO: 1563234
auugaacagucauugcaua

SEQ ID NO: 1805206 - RNA, 19 nt, Artificial Sequence
  Description of Artificial Sequence: Synthetic oligonucleotide
  Antisense strand to SEQ ID NO: 1805205
uaugcaaugacuguucaau

SEQ ID NO: 1805207 - RNA, 19 nt, Artificial Sequence
  Description of Artificial Sequence: Synthetic oligonucleotide
  Sense strand starting at position 1298 of SEQ ID NO: 1563234
uugaacagucauugcauaa

SEQ ID NO: 1805208 - RNA, 19 nt, Artificial Sequence
  Description of Artificial Sequence: Synthetic oligonucleotide
  Antisense strand to SEQ ID NO: 1805207
uuaugcaaugacuguucaa

SEQ ID NO: 1805209 - RNA, 19 nt, Artificial Sequence
  Description of Artificial Sequence: Synthetic oligonucleotide
  Sense strand starting at position 1302 of SEQ ID NO: 1563234
acagucauugcauaacaag

SEQ ID NO: 1805210 - RNA, 19 nt, Artificial Sequence
  Description of Artificial Sequence: Synthetic oligonucleotide
  Antisense strand to SEQ ID NO: 1805209
cuuguuaugcaaugacugu

SEQ ID NO: 1805211 - RNA, 19 nt, Artificial Sequence
  Description of Artificial Sequence: Synthetic oligonucleotide
  Sense strand starting at position 1740 of SEQ ID NO: 1563234
cagguacacgucuauaaau

SEQ ID NO: 1805212 - RNA, 19 nt, Artificial Sequence
  Description of Artificial Sequence: Synthetic oligonucleotide
  Antisense strand to SEQ ID NO: 1805211
auuuauagacguguaccug

SEQ ID NO: 1805213 - RNA, 19 nt, Artificial Sequence
  Description of Artificial Sequence: Synthetic oligonucleotide
  Sense strand starting at position 1742 of SEQ ID NO: 1563234
gguacacgucuauaaauac

SEQ ID NO: 1805214 - RNA, 19 nt, Artificial Sequence
  Description of Artificial Sequence: Synthetic oligonucleotide
  Antisense strand to SEQ ID NO: 1805213
guauuuauagacguguacc

SEQ ID NO: 1805215 - RNA, 19 nt, Artificial Sequence
  Description of Artificial Sequence: Synthetic oligonucleotide
  Sense strand starting at position 1749 of SEQ ID NO: 1563234
gucuauaaauacuccagga

SEQ ID NO: 1805216 - RNA, 19 nt, Artificial Sequence
  Description of Artificial Sequence: Synthetic oligonucleotide
  Antisense strand to SEQ ID NO: 1805215
uccuggaguauuuauagac

SEQ ID NO: 1805217 - RNA, 19 nt, Artificial Sequence
  Description of Artificial Sequence: Synthetic oligonucleotide
  Sense strand starting at position 2936 of SEQ ID NO: 1563234
gcucguuguccggcaagag

SEQ ID NO: 1805218 - RNA, 19 nt, Artificial Sequence
  Description of Artificial Sequence: Synthetic oligonucleotide
  Antisense strand to SEQ ID NO: 1805217
cucuugccggacaacgagc

SEQ ID NO: 1805219 - RNA, 19 nt, Artificial Sequence
  Description of Artificial Sequence: Synthetic oligonucleotide
  Sense strand starting at position 3043 of SEQ ID NO: 1563234
ggugcuaaugaaugagaaa

SEQ ID NO: 1805220 - RNA, 19 nt, Artificial Sequence
  Description of Artificial Sequence: Synthetic oligonucleotide
  Antisense strand to SEQ ID NO: 1805219
uuucucauucauuagcacc

SEQ ID NO: 1805221 - RNA, 19 nt, Artificial Sequence
  Description of Artificial Sequence: Synthetic oligonucleotide
  Sense strand starting at position 3219 of SEQ ID NO: 1563234
acagcaaacggucaucuau

SEQ ID NO: 1805222 - RNA, 19 nt, Artificial Sequence
  Description of Artificial Sequence: Synthetic oligonucleotide
  Antisense strand to SEQ ID NO: 1805221
auagaugaccguuugcugu

SEQ ID NO: 1805223 - RNA, 19 nt, Artificial Sequence
  Description of Artificial Sequence: Synthetic oligonucleotide
  Sense strand starting at position 3334 of SEQ ID NO: 1563234
agggacaaaccgugacuuu

SEQ ID NO: 1805224 - RNA, 19 nt, Artificial Sequence
  Description of Artificial Sequence: Synthetic oligonucleotide
  Antisense strand to SEQ ID NO: 1805223
aaagucacgguuugucccu

SEQ ID NO: 1805225 - RNA, 19 nt, Artificial Sequence
  Description of Artificial Sequence: Synthetic oligonucleotide
  Sense strand starting at position 3337 of SEQ ID NO: 1563234
gacaaaccgugacuuuaag

SEQ ID NO: 1805226 - RNA, 19 nt, Artificial Sequence
  Description of Artificial Sequence: Synthetic oligonucleotide
  Antisense strand to SEQ ID NO: 1805225
cuuaaagucacgguuuguc

SEQ ID NO: 1805227 - RNA, 19 nt, Artificial Sequence
  Description of Artificial Sequence: Synthetic oligonucleotide
  Sense strand starting at position 3363 of SEQ ID NO: 1563234
guauauuguccucaaacuc

SEQ ID NO: 1805228 - RNA, 19 nt, Artificial Sequence
  Description of Artificial Sequence: Synthetic oligonucleotide
  Antisense strand to SEQ ID NO: 1805227
gaguuugaggacaauauac

SEQ ID NO: 1805229 - RNA, 19 nt, Artificial Sequence
  Description of Artificial Sequence: Synthetic oligonucleotide
  Sense strand starting at position 3416 of SEQ ID NO: 1563234
auguuagacuugucaggaa

SEQ ID NO: 1805230 - RNA, 19 nt, Artificial Sequence
  Description of Artificial Sequence: Synthetic oligonucleotide
  Antisense strand to SEQ ID NO: 1805229
uuccugacaagucuaacau

SEQ ID NO: 1805231 - RNA, 19 nt, Artificial Sequence
  Description of Artificial Sequence: Synthetic oligonucleotide
  Sense strand starting at position 3582 of SEQ ID NO: 1563234
gccucaguugaagaccaau

SEQ ID NO: 1805232 - RNA, 19 nt, Artificial Sequence
  Description of Artificial Sequence: Synthetic oligonucleotide
  Antisense strand to SEQ ID NO: 1805231
auuggucuucaacugaggc

SEQ ID NO: 1805233 - RNA, 19 nt, Artificial Sequence
  Description of Artificial Sequence: Synthetic oligonucleotide
  Sense strand starting at position 3604 of SEQ ID NO: 1563234
gucuuuguuccuccgcaca

SEQ ID NO: 1805234 - RNA, 19 nt, Artificial Sequence
  Description of Artificial Sequence: Synthetic oligonucleotide
  Antisense strand to SEQ ID NO: 1805233
ugugcggaggaacaaagac

SEQ ID NO: 1805235 - RNA, 19 nt, Artificial Sequence
  Description of Artificial Sequence: Synthetic oligonucleotide
  Sense strand starting at position 3644 of SEQ ID NO: 1563234
auaagucaguuuccagaaa

SEQ ID NO: 1805236 - RNA, 19 nt, Artificial Sequence
  Description of Artificial Sequence: Synthetic oligonucleotide
  Antisense strand to SEQ ID NO: 1805235
uuucuggaaacugacuuau

SEQ ID NO: 1805237 - RNA, 19 nt, Artificial Sequence
  Description of Artificial Sequence: Synthetic oligonucleotide
  Sense strand starting at position 3670 of SEQ ID NO: 1563234
guaaauuucucagugcagu

SEQ ID NO: 1805238 - RNA, 19 nt, Artificial Sequence
  Description of Artificial Sequence: Synthetic oligonucleotide
  Antisense strand to SEQ ID NO: 1805237
acugcacugagaaauuuac

SEQ ID NO: 1805239 - RNA, 19 nt, Artificial Sequence
  Description of Artificial Sequence: Synthetic oligonucleotide
  Sense strand starting at position 3826 of SEQ ID NO: 1563234
ggauuuggguacuaaaccu

SEQ ID NO: 1805240 - RNA, 19 nt, Artificial Sequence
  Description of Artificial Sequence: Synthetic oligonucleotide
  Antisense strand to SEQ ID NO: 1805239
agguuuaguacccaaaucc

SEQ ID NO: 1805241 - RNA, 19 nt, Artificial Sequence
  Description of Artificial Sequence: Synthetic oligonucleotide
  Sense strand starting at position 3950 of SEQ ID NO: 1563234
ugagaaacauugccuccuu

SEQ ID NO: 1805242 - RNA, 19 nt, Artificial Sequence
  Description of Artificial Sequence: Synthetic oligonucleotide
  Antisense strand to SEQ ID NO: 1805241
aaggaggcaauguuucuca

SEQ ID NO: 1805243 - RNA, 19 nt, Artificial Sequence
  Description of Artificial Sequence: Synthetic oligonucleotide
  Sense strand starting at position 3965 of SEQ ID NO: 1563234
ccuuuaaggguccaagagu

SEQ ID NO: 1805244 - RNA, 19 nt, Artificial Sequence
  Description of Artificial Sequence: Synthetic oligonucleotide
  Antisense strand to SEQ ID NO: 1805243
acucuuggacccuuaaagg

SEQ ID NO: 1805245 - RNA, 19 nt, Artificial Sequence
  Description of Artificial Sequence: Synthetic oligonucleotide
  Sense strand starting at position 2 of SEQ ID NO: 1563235
gccacagagcuccauuauc

SEQ ID NO: 1805246 - RNA, 19 nt, Artificial Sequence
  Description of Artificial Sequence: Synthetic oligonucleotide
  Antisense strand to SEQ ID NO: 1805245
gauaauggagcucuguggc

SEQ ID NO: 1805247 - RNA, 19 nt, Artificial Sequence
  Description of Artificial Sequence: Synthetic oligonucleotide
  Sense strand starting at position 37 of SEQ ID NO: 1563235
gcagcuugucaugacaugu

SEQ ID NO: 1805248 - RNA, 19 nt, Artificial Sequence
  Description of Artificial Sequence: Synthetic oligonucleotide
  Antisense strand to SEQ ID NO: 1805247
acaugucaugacaagcugc

SEQ ID NO: 1805249 - RNA, 19 nt, Artificial Sequence
  Description of Artificial Sequence: Synthetic oligonucleotide
  Sense strand starting at position 50 of SEQ ID NO: 1563235
acauguuagccugguguga

SEQ ID NO: 1805250 - RNA, 19 nt, Artificial Sequence
  Description of Artificial Sequence: Synthetic oligonucleotide
  Antisense strand to SEQ ID NO: 1805249
ucacaccaggcuaacaugu

SEQ ID NO: 1805251 - RNA, 19 nt, Artificial Sequence
  Description of Artificial Sequence: Synthetic oligonucleotide
  Sense strand starting at position 153 of SEQ ID NO: 1563235
gugucauguuucucugcag

SEQ ID NO: 1805252 - RNA, 19 nt, Artificial Sequence
  Description of Artificial Sequence: Synthetic oligonucleotide
  Antisense strand to SEQ ID NO: 1805251
cugcagagaaacaugacac

SEQ ID NO: 1805253 - RNA, 19 nt, Artificial Sequence
  Description of Artificial Sequence: Synthetic oligonucleotide
  Sense strand starting at position 154 of SEQ ID NO: 1563235
ugucauguuucucugcagu

SEQ ID NO: 1805254 - RNA, 19 nt, Artificial Sequence
  Description of Artificial Sequence: Synthetic oligonucleotide
  Antisense strand to SEQ ID NO: 1805253
acugcagagaaacaugaca

SEQ ID NO: 1805255 - RNA, 19 nt, Artificial Sequence
  Description of Artificial Sequence: Synthetic oligonucleotide
  Sense strand starting at position 294 of SEQ ID NO: 1563235
ucaucuaaggucugacacu

SEQ ID NO: 1805256 - RNA, 19 nt, Artificial Sequence
  Description of Artificial Sequence: Synthetic oligonucleotide
  Antisense strand to SEQ ID NO: 1805255
agugucagaccuuagauga

SEQ ID NO: 1805257 - RNA, 19 nt, Artificial Sequence
  Description of Artificial Sequence: Synthetic oligonucleotide
  Sense strand starting at position 918 of SEQ ID NO: 1563235
gggacauaguuagaguaug

SEQ ID NO: 1805258 - RNA, 19 nt, Artificial Sequence
  Description of Artificial Sequence: Synthetic oligonucleotide
  Antisense strand to SEQ ID NO: 1805257
cauacucuaacuauguccc

SEQ ID NO: 1805259 - RNA, 19 nt, Artificial Sequence
  Description of Artificial Sequence: Synthetic oligonucleotide
  Sense strand starting at position 923 of SEQ ID NO: 1563235
auaguuagaguaugaguca

SEQ ID NO: 1805260 - RNA, 19 nt, Artificial Sequence
  Description of Artificial Sequence: Synthetic oligonucleotide
  Antisense strand to SEQ ID NO: 1805259
ugacucauacucuaacuau

SEQ ID NO: 1805261 - RNA, 19 nt, Artificial Sequence
  Description of Artificial Sequence: Synthetic oligonucleotide
  Sense strand starting at position 1271 of SEQ ID NO: 1563235
aaagaaauuccuggcugua

SEQ ID NO: 1805262 - RNA, 19 nt, Artificial Sequence
  Description of Artificial Sequence: Synthetic oligonucleotide
  Antisense strand to SEQ ID NO: 1805261
uacagccaggaauuucuuu

SEQ ID NO: 1805263 - RNA, 19 nt, Artificial Sequence
  Description of Artificial Sequence: Synthetic oligonucleotide
  Sense strand starting at position 1273 of SEQ ID NO: 1563235
agaaauuccuggcuguaau

SEQ ID NO: 1805264 - RNA, 19 nt, Artificial Sequence
  Description of Artificial Sequence: Synthetic oligonucleotide
  Antisense strand to SEQ ID NO: 1805263
auuacagccaggaauuucu

SEQ ID NO: 1805265 - RNA, 19 nt, Artificial Sequence
  Description of Artificial Sequence: Synthetic oligonucleotide
  Sense strand starting at position 1274 of SEQ ID NO: 1563235
gaaauuccuggcuguaaua

SEQ ID NO: 1805266 - RNA, 19 nt, Artificial Sequence
  Description of Artificial Sequence: Synthetic oligonucleotide
  Antisense strand to SEQ ID NO: 1805265
uauuacagccaggaauuuc

SEQ ID NO: 1805267 - RNA, 19 nt, Artificial Sequence
  Description of Artificial Sequence: Synthetic oligonucleotide
  Sense strand starting at position 1384 of SEQ ID NO: 1563235
ucucaaugucugggccauu

SEQ ID NO: 1805268 - RNA, 19 nt, Artificial Sequence
  Description of Artificial Sequence: Synthetic oligonucleotide
  Antisense strand to SEQ ID NO: 1805267
aauggcccagacauugaga

SEQ ID NO: 1805269 - RNA, 19 nt, Artificial Sequence
  Description of Artificial Sequence: Synthetic oligonucleotide
  Sense strand starting at position 1385 of SEQ ID NO: 1563235
cucaaugucugggccauua

SEQ ID NO: 1805270 - RNA, 19 nt, Artificial Sequence
  Description of Artificial Sequence: Synthetic oligonucleotide
  Antisense strand to SEQ ID NO: 1805269
uaauggcccagacauugag

SEQ ID NO: 1805271 - RNA, 19 nt, Artificial Sequence
  Description of Artificial Sequence: Synthetic oligonucleotide
  Sense strand starting at position 1456 of SEQ ID NO: 1563235
caggcaggugccugaguaa

SEQ ID NO: 1805272 - RNA, 19 nt, Artificial Sequence
  Description of Artificial Sequence: Synthetic oligonucleotide
  Antisense strand to SEQ ID NO: 1805271
uuacucaggcaccugccug

SEQ ID NO: 1805273 - RNA, 19 nt, Artificial Sequence
  Description of Artificial Sequence: Synthetic oligonucleotide
  Sense strand starting at position 1469 of SEQ ID NO: 1563235
gaguaaugguuucuuagua

SEQ ID NO: 1805274 - RNA, 19 nt, Artificial Sequence
  Description of Artificial Sequence: Synthetic oligonucleotide
  Antisense strand to SEQ ID NO: 1805273
uacuaagaaaccauuacuc

SEQ ID NO: 1805275 - RNA, 19 nt, Artificial Sequence
  Description of Artificial Sequence: Synthetic oligonucleotide
  Sense strand starting at position 1470 of SEQ ID NO: 1563235
aguaaugguuucuuaguag

SEQ ID NO: 1805276 - RNA, 19 nt, Artificial Sequence
  Description of Artificial Sequence: Synthetic oligonucleotide
  Antisense strand to SEQ ID NO: 1805275
cuacuaagaaaccauuacu

SEQ ID NO: 1805277 - RNA, 19 nt, Artificial Sequence
  Description of Artificial Sequence: Synthetic oligonucleotide
  Sense strand starting at position 1625 of SEQ ID NO: 1563235
uccauuuccggccgggaau

SEQ ID NO: 1805278 - RNA, 19 nt, Artificial Sequence
  Description of Artificial Sequence: Synthetic oligonucleotide
  Antisense strand to SEQ ID NO: 1805277
auucccggccggaaaugga

SEQ ID NO: 1805279 - RNA, 19 nt, Artificial Sequence
  Description of Artificial Sequence: Synthetic oligonucleotide
  Sense strand starting at position 2114 of SEQ ID NO: 1563235
gggugcucagcaugucuaa

SEQ ID NO: 1805280 - RNA, 19 nt, Artificial Sequence
  Description of Artificial Sequence: Synthetic oligonucleotide
  Antisense strand to SEQ ID NO: 1805279
uuagacaugcugagcaccc

SEQ ID NO: 1805281 - RNA, 19 nt, Artificial Sequence
  Description of Artificial Sequence: Synthetic oligonucleotide
  Sense strand starting at position 2117 of SEQ ID NO: 1563235
ugcucagcaugucuaagaa

SEQ ID NO: 1805282 - RNA, 19 nt, Artificial Sequence
  Description of Artificial Sequence: Synthetic oligonucleotide
  Antisense strand to SEQ ID NO: 1805281
uucuuagacaugcugagca

SEQ ID NO: 1805283 - RNA, 19 nt, Artificial Sequence
  Description of Artificial Sequence: Synthetic oligonucleotide
  Sense strand starting at position 2121 of SEQ ID NO: 1563235
cagcaugucuaagaagaca

SEQ ID NO: 1805284 - RNA, 19 nt, Artificial Sequence
  Description of Artificial Sequence: Synthetic oligonucleotide
  Antisense strand to SEQ ID NO: 1805283
ugucuucuuagacaugcug

SEQ ID NO: 1805285 - RNA, 19 nt, Artificial Sequence
  Description of Artificial Sequence: Synthetic oligonucleotide
  Sense strand starting at position 2314 of SEQ ID NO: 1563235
cccguacacuuagcagaaa

SEQ ID NO: 1805286 - RNA, 19 nt, Artificial Sequence
  Description of Artificial Sequence: Synthetic oligonucleotide
  Antisense strand to SEQ ID NO: 1805285
uuucugcuaaguguacggg

SEQ ID NO: 1805287 - RNA, 19 nt, Artificial Sequence
  Description of Artificial Sequence: Synthetic oligonucleotide
  Sense strand starting at position 2471 of SEQ ID NO: 1563235
ggaggcuucggguguaaac

SEQ ID NO: 1805288 - RNA, 19 nt, Artificial Sequence
  Description of Artificial Sequence: Synthetic oligonucleotide
  Antisense strand to SEQ ID NO: 1805287
guuuacacccgaagccucc

SEQ ID NO: 1805289 - RNA, 19 nt, Artificial Sequence
  Description of Artificial Sequence: Synthetic oligonucleotide
  Sense strand starting at position 2499 of SEQ ID NO: 1563235
gugucuuggcacuaagcau

SEQ ID NO: 1805290 - RNA, 19 nt, Artificial Sequence
  Description of Artificial Sequence: Synthetic oligonucleotide
  Antisense strand to SEQ ID NO: 1805289
augcuuagugccaagacac

SEQ ID NO: 1805291 - RNA, 19 nt, Artificial Sequence
  Description of Artificial Sequence: Synthetic oligonucleotide
  Sense strand starting at position 2600 of SEQ ID NO: 1563235
auaauaguuucccaaguug

SEQ ID NO: 1805292 - RNA, 19 nt, Artificial Sequence
  Description of Artificial Sequence: Synthetic oligonucleotide
  Antisense strand to SEQ ID NO: 1805291
caacuugggaaacuauuau

SEQ ID NO: 1805293 - RNA, 19 nt, Artificial Sequence
  Description of Artificial Sequence: Synthetic oligonucleotide
  Sense strand starting at position 2648 of SEQ ID NO: 1563235
gaggucaggucucaagauc

SEQ ID NO: 1805294 - RNA, 19 nt, Artificial Sequence
  Description of Artificial Sequence: Synthetic oligonucleotide
  Antisense strand to SEQ ID NO: 1805293
gaucuugagaccugaccuc

SEQ ID NO: 1805295 - RNA, 19 nt, Artificial Sequence
  Description of Artificial Sequence: Synthetic oligonucleotide
  Sense strand starting at position 2832 of SEQ ID NO: 1563235
ggugaagaggccugauuca

SEQ ID NO: 1805296 - RNA, 19 nt, Artificial Sequence
  Description of Artificial Sequence: Synthetic oligonucleotide
  Antisense strand to SEQ ID NO: 1805295
ugaaucaggccucuucacc

SEQ ID NO: 1805297 - RNA, 19 nt, Artificial Sequence
  Description of Artificial Sequence: Synthetic oligonucleotide
  Sense strand starting at position 3036 of SEQ ID NO: 1563235
agcuuugaguccuuacgac

SEQ ID NO: 1805298 - RNA, 19 nt, Artificial Sequence
  Description of Artificial Sequence: Synthetic oligonucleotide
  Antisense strand to SEQ ID NO: 1805297
gucguaaggacucaaagcu

SEQ ID NO: 1805299 - RNA, 19 nt, Artificial Sequence
  Description of Artificial Sequence: Synthetic oligonucleotide
  Sense strand starting at position 3353 of SEQ ID NO: 1563235
ucuuccugggugugagauu

SEQ ID NO: 1805300 - RNA, 19 nt, Artificial Sequence
  Description of Artificial Sequence: Synthetic oligonucleotide
  Antisense strand to SEQ ID NO: 1805299
aaucucacacccaggaaga

SEQ ID NO: 1805301 - RNA, 19 nt, Artificial Sequence
  Description of Artificial Sequence: Synthetic oligonucleotide
  Sense strand starting at position 3354 of SEQ ID NO: 1563235
cuuccugggugugagauuu

SEQ ID NO: 1805302 - RNA, 19 nt, Artificial Sequence
  Description of Artificial Sequence: Synthetic oligonucleotide
  Antisense strand to SEQ ID NO: 1805301
aaaucucacacccaggaag

SEQ ID NO: 1805303 - RNA, 19 nt, Artificial Sequence
  Description of Artificial Sequence: Synthetic oligonucleotide
  Sense strand starting at position 3362 of SEQ ID NO: 1563235
gugugagauuuccagcaug

SEQ ID NO: 1805304 - RNA, 19 nt, Artificial Sequence
  Description of Artificial Sequence: Synthetic oligonucleotide
  Antisense strand to SEQ ID NO: 1805303
caugcuggaaaucucacac

SEQ ID NO: 1805305 - RNA, 19 nt, Artificial Sequence
  Description of Artificial Sequence: Synthetic oligonucleotide
  Sense strand starting at position 3483 of SEQ ID NO: 1563235
ccucuuaugggccaccaaa

SEQ ID NO: 1805306 - RNA, 19 nt, Artificial Sequence
  Description of Artificial Sequence: Synthetic oligonucleotide
  Antisense strand to SEQ ID NO: 1805305
uuugguggcccauaagagg

SEQ ID NO: 1805307 - RNA, 19 nt, Artificial Sequence
  Description of Artificial Sequence: Synthetic oligonucleotide
  Sense strand starting at position 3498 of SEQ ID NO: 1563235
caaagauguugggaaguga

SEQ ID NO: 1805308 - RNA, 19 nt, Artificial Sequence
  Description of Artificial Sequence: Synthetic oligonucleotide
  Antisense strand to SEQ ID NO: 1805307
ucacuucccaacaucuuug

SEQ ID NO: 1805309 - RNA, 19 nt, Artificial Sequence
  Description of Artificial Sequence: Synthetic oligonucleotide
  Sense strand starting at position 3545 of SEQ ID NO: 1563235
augagaaucuggcuggcaa

SEQ ID NO: 1805310 - RNA, 19 nt, Artificial Sequence
  Description of Artificial Sequence: Synthetic oligonucleotide
  Antisense strand to SEQ ID NO: 1805309
uugccagccagauucucau

SEQ ID NO: 1805311 - RNA, 19 nt, Artificial Sequence
  Description of Artificial Sequence: Synthetic oligonucleotide
  Sense strand starting at position 3546 of SEQ ID NO: 1563235
ugagaaucuggcuggcaau

SEQ ID NO: 1805312 - RNA, 19 nt, Artificial Sequence
  Description of Artificial Sequence: Synthetic oligonucleotide
  Antisense strand to SEQ ID NO: 1805311
auugccagccagauucuca

SEQ ID NO: 1805313 - RNA, 19 nt, Artificial Sequence
  Description of Artificial Sequence: Synthetic oligonucleotide
  Sense strand starting at position 3562 of SEQ ID NO: 1563235
aauguagauugagucucaa

SEQ ID NO: 1805314 - RNA, 19 nt, Artificial Sequence
  Description of Artificial Sequence: Synthetic oligonucleotide
  Antisense strand to SEQ ID NO: 1805313
uugagacucaaucuacauu

SEQ ID NO: 1805315 - RNA, 19 nt, Artificial Sequence
  Description of Artificial Sequence: Synthetic oligonucleotide
  Sense strand starting at position 3566 of SEQ ID NO: 1563235
uagauugagucucaaagcu

SEQ ID NO: 1805316 - RNA, 19 nt, Artificial Sequence
  Description of Artificial Sequence: Synthetic oligonucleotide
  Antisense strand to SEQ ID NO: 1805315
agcuuugagacucaaucua

SEQ ID NO: 1805317 - RNA, 19 nt, Artificial Sequence
  Description of Artificial Sequence: Synthetic oligonucleotide
  Sense strand starting at position 3673 of SEQ ID NO: 1563235
ggaaacacaccaugucauu

SEQ ID NO: 1805318 - RNA, 19 nt, Artificial Sequence
  Description of Artificial Sequence: Synthetic oligonucleotide
  Antisense strand to SEQ ID NO: 1805317
aaugacaugguguguuucc

SEQ ID NO: 1805319 - RNA, 19 nt, Artificial Sequence
  Description of Artificial Sequence: Synthetic oligonucleotide
  Sense strand starting at position 3905 of SEQ ID NO: 1563235
cccugcugucacuaguaaa

SEQ ID NO: 1805320 - RNA, 19 nt, Artificial Sequence
  Description of Artificial Sequence: Synthetic oligonucleotide
  Antisense strand to SEQ ID NO: 1805319
uuuacuagugacagcaggg

SEQ ID NO: 1805321 - RNA, 19 nt, Artificial Sequence
  Description of Artificial Sequence: Synthetic oligonucleotide
  Sense strand starting at position 3964 of SEQ ID NO: 1563235
cugugugacugcuugaaca

SEQ ID NO: 1805322 - RNA, 19 nt, Artificial Sequence
  Description of Artificial Sequence: Synthetic oligonucleotide
  Antisense strand to SEQ ID NO: 1805321
uguucaagcagucacacag

SEQ ID NO: 1805323 - RNA, 19 nt, Artificial Sequence
  Description of Artificial Sequence: Synthetic oligonucleotide
  Sense strand starting at position 3966 of SEQ ID NO: 1563235
gugugacugcuugaacaag

SEQ ID NO: 1805324 - RNA, 19 nt, Artificial Sequence
  Description of Artificial Sequence: Synthetic oligonucleotide
  Antisense strand to SEQ ID NO: 1805323
cuuguucaagcagucacac

SEQ ID NO: 1805325 - RNA, 19 nt, Artificial Sequence
  Description of Artificial Sequence: Synthetic oligonucleotide
  Sense strand starting at position 1 of SEQ ID NO: 1563236
gaagccuuggccuagaaua

SEQ ID NO: 1805326 - RNA, 19 nt, Artificial Sequence
  Description of Artificial Sequence: Synthetic oligonucleotide
  Antisense strand to SEQ ID NO: 1805325
uauucuaggccaaggcuuc

SEQ ID NO: 1805327 - RNA, 19 nt, Artificial Sequence
  Description of Artificial Sequence: Synthetic oligonucleotide
  Sense strand starting at position 3 of SEQ ID NO: 1563236
agccuuggccuagaauaga

SEQ ID NO: 1805328 - RNA, 19 nt, Artificial Sequence
  Description of Artificial Sequence: Synthetic oligonucleotide
  Antisense strand to SEQ ID NO: 1805327
ucuauucuaggccaaggcu

SEQ ID NO: 1805329 - RNA, 19 nt, Artificial Sequence
  Description of Artificial Sequence: Synthetic oligonucleotide
  Sense strand starting at position 199 of SEQ ID NO: 1563236
cccagagagucacugaaua

SEQ ID NO: 1805330 - RNA, 19 nt, Artificial Sequence
  Description of Artificial Sequence: Synthetic oligonucleotide
  Antisense strand to SEQ ID NO: 1805329
uauucagugacucucuggg

SEQ ID NO: 1805331 - RNA, 19 nt, Artificial Sequence
  Description of Artificial Sequence: Synthetic oligonucleotide
  Sense strand starting at position 211 of SEQ ID NO: 1563236
cugaauaauuuaggguauu

SEQ ID NO: 1805332 - RNA, 19 nt, Artificial Sequence
  Description of Artificial Sequence: Synthetic oligonucleotide
  Antisense strand to SEQ ID NO: 1805331
aauacccuaaauuauucag

SEQ ID NO: 1805333 - RNA, 19 nt, Artificial Sequence
  Description of Artificial Sequence: Synthetic oligonucleotide
  Sense strand starting at position 289 of SEQ ID NO: 1563236
agagaaauguaagcucuau

SEQ ID NO: 1805334 - RNA, 19 nt, Artificial Sequence
  Description of Artificial Sequence: Synthetic oligonucleotide
  Antisense strand to SEQ ID NO: 1805333
auagagcuuacauuucucu

SEQ ID NO: 1805335 - RNA, 19 nt, Artificial Sequence
  Description of Artificial Sequence: Synthetic oligonucleotide
  Sense strand starting at position 295 of SEQ ID NO: 1563236
auguaagcucuauguaaga

SEQ ID NO: 1805336 - RNA, 19 nt, Artificial Sequence
  Description of Artificial Sequence: Synthetic oligonucleotide
  Antisense strand to SEQ ID NO: 1805335
ucuuacauagagcuuacau

SEQ ID NO: 1805337 - RNA, 19 nt, Artificial Sequence
  Description of Artificial Sequence: Synthetic oligonucleotide
  Sense strand starting at position 300 of SEQ ID NO: 1563236
agcucuauguaagaucacu

SEQ ID NO: 1805338 - RNA, 19 nt, Artificial Sequence
  Description of Artificial Sequence: Synthetic oligonucleotide
  Antisense strand to SEQ ID NO: 1805337
agugaucuuacauagagcu

SEQ ID NO: 1805339 - RNA, 19 nt, Artificial Sequence
  Description of Artificial Sequence: Synthetic oligonucleotide
  Sense strand starting at position 305 of SEQ ID NO: 1563236
uauguaagaucacuagggu

SEQ ID NO: 1805340 - RNA, 19 nt, Artificial Sequence
  Description of Artificial Sequence: Synthetic oligonucleotide
  Antisense strand to SEQ ID NO: 1805339
acccuagugaucuuacaua

SEQ ID NO: 1805341 - RNA, 19 nt, Artificial Sequence
  Description of Artificial Sequence: Synthetic oligonucleotide
  Sense strand starting at position 378 of SEQ ID NO: 1563236
ggcugcuugcucuugcuaa

SEQ ID NO: 1805342 - RNA, 19 nt, Artificial Sequence
  Description of Artificial Sequence: Synthetic oligonucleotide
  Antisense strand to SEQ ID NO: 1805341
uuagcaagagcaagcagcc

SEQ ID NO: 1805343 - RNA, 19 nt, Artificial Sequence
  Description of Artificial Sequence: Synthetic oligonucleotide
  Sense strand starting at position 379 of SEQ ID NO: 1563236
gcugcuugcucuugcuaag

SEQ ID NO: 1805344 - RNA, 19 nt, Artificial Sequence
  Description of Artificial Sequence: Synthetic oligonucleotide
  Antisense strand to SEQ ID NO: 1805343
cuuagcaagagcaagcagc

SEQ ID NO: 1805345 - RNA, 19 nt, Artificial Sequence
  Description of Artificial Sequence: Synthetic oligonucleotide
  Sense strand starting at position 382 of SEQ ID NO: 1563236
gcuugcucuugcuaagaga

SEQ ID NO: 1805346 - RNA, 19 nt, Artificial Sequence
  Description of Artificial Sequence: Synthetic oligonucleotide
  Antisense strand to SEQ ID NO: 1805345
ucucuuagcaagagcaagc

SEQ ID NO: 1805347 - RNA, 19 nt, Artificial Sequence
  Description of Artificial Sequence: Synthetic oligonucleotide
  Sense strand starting at position 803 of SEQ ID NO: 1563236
aggcuaagccaguggucaa

SEQ ID NO: 1805348 - RNA, 19 nt, Artificial Sequence
  Description of Artificial Sequence: Synthetic oligonucleotide
  Antisense strand to SEQ ID NO: 1805347
uugaccacuggcuuagccu

SEQ ID NO: 1805349 - RNA, 19 nt, Artificial Sequence
  Description of Artificial Sequence: Synthetic oligonucleotide
  Sense strand starting at position 804 of SEQ ID NO: 1563236
ggcuaagccaguggucaaa

SEQ ID NO: 1805350 - RNA, 19 nt, Artificial Sequence
  Description of Artificial Sequence: Synthetic oligonucleotide
  Antisense strand to SEQ ID NO: 1805349
uuugaccacuggcuuagcc

SEQ ID NO: 1805351 - RNA, 19 nt, Artificial Sequence
  Description of Artificial Sequence: Synthetic oligonucleotide
  Sense strand starting at position 894 of SEQ ID NO: 1563236
uaggaaugaguauggugau

SEQ ID NO: 1805352 - RNA, 19 nt, Artificial Sequence
  Description of Artificial Sequence: Synthetic oligonucleotide
  Antisense strand to SEQ ID NO: 1805351
aucaccauacucauuccua

SEQ ID NO: 1805353 - RNA, 19 nt, Artificial Sequence
  Description of Artificial Sequence: Synthetic oligonucleotide
  Sense strand starting at position 900 of SEQ ID NO: 1563236
ugaguauggugaugggaca

SEQ ID NO: 1805354 - RNA, 19 nt, Artificial Sequence
  Description of Artificial Sequence: Synthetic oligonucleotide
  Antisense strand to SEQ ID NO: 1805353
ugucccaucaccauacuca

SEQ ID NO: 1805355 - RNA, 19 nt, Artificial Sequence
  Description of Artificial Sequence: Synthetic oligonucleotide
  Sense strand starting at position 901 of SEQ ID NO: 1563236
gaguauggugaugggacaa

SEQ ID NO: 1805356 - RNA, 19 nt, Artificial Sequence
  Description of Artificial Sequence: Synthetic oligonucleotide
  Antisense strand to SEQ ID NO: 1805355
uugucccaucaccauacuc

SEQ ID NO: 1805357 - RNA, 19 nt, Artificial Sequence
  Description of Artificial Sequence: Synthetic oligonucleotide
  Sense strand starting at position 986 of SEQ ID NO: 1563236
ggaugcagaucacgaguau

SEQ ID NO: 1805358 - RNA, 19 nt, Artificial Sequence
  Description of Artificial Sequence: Synthetic oligonucleotide
  Antisense strand to SEQ ID NO: 1805357
auacucgugaucugcaucc

SEQ ID NO: 1805359 - RNA, 19 nt, Artificial Sequence
  Description of Artificial Sequence: Synthetic oligonucleotide
  Sense strand starting at position 987 of SEQ ID NO: 1563236
gaugcagaucacgaguaua

SEQ ID NO: 1805360 - RNA, 19 nt, Artificial Sequence
  Description of Artificial Sequence: Synthetic oligonucleotide
  Antisense strand to SEQ ID NO: 1805359
uauacucgugaucugcauc

SEQ ID NO: 1805361 - RNA, 19 nt, Artificial Sequence
  Description of Artificial Sequence: Synthetic oligonucleotide
  Sense strand starting at position 990 of SEQ ID NO: 1563236
gcagaucacgaguauauag

SEQ ID NO: 1805362 - RNA, 19 nt, Artificial Sequence
  Description of Artificial Sequence: Synthetic oligonucleotide
  Antisense strand to SEQ ID NO: 1805361
cuauauacucgugaucugc

SEQ ID NO: 1805363 - RNA, 19 nt, Artificial Sequence
  Description of Artificial Sequence: Synthetic oligonucleotide
  Sense strand starting at position 1121 of SEQ ID NO: 1563236
gagacuggauaagaguuua

SEQ ID NO: 1805364 - RNA, 19 nt, Artificial Sequence
  Description of Artificial Sequence: Synthetic oligonucleotide
  Antisense strand to SEQ ID NO: 1805363
uaaacucuuauccagucuc

SEQ ID NO: 1805365 - RNA, 19 nt, Artificial Sequence
  Description of Artificial Sequence: Synthetic oligonucleotide
  Sense strand starting at position 1175 of SEQ ID NO: 1563236
gggucaguguugggcauua

SEQ ID NO: 1805366 - RNA, 19 nt, Artificial Sequence
  Description of Artificial Sequence: Synthetic oligonucleotide
  Antisense strand to SEQ ID NO: 1805365
uaaugcccaacacugaccc

SEQ ID NO: 1805367 - RNA, 19 nt, Artificial Sequence
  Description of Artificial Sequence: Synthetic oligonucleotide
  Sense strand starting at position 1180 of SEQ ID NO: 1563236
aguguugggcauuaggaua

SEQ ID NO: 1805368 - RNA, 19 nt, Artificial Sequence
  Description of Artificial Sequence: Synthetic oligonucleotide
  Antisense strand to SEQ ID NO: 1805367
uauccuaaugcccaacacu

SEQ ID NO: 1805369 - RNA, 19 nt, Artificial Sequence
  Description of Artificial Sequence: Synthetic oligonucleotide
  Sense strand starting at position 1336 of SEQ ID NO: 1563236
gccagaauaugguuagguc

SEQ ID NO: 1805370 - RNA, 19 nt, Artificial Sequence
  Description of Artificial Sequence: Synthetic oligonucleotide
  Antisense strand to SEQ ID NO: 1805369
gaccuaaccauauucuggc

SEQ ID NO: 1805371 - RNA, 19 nt, Artificial Sequence
  Description of Artificial Sequence: Synthetic oligonucleotide
  Sense strand starting at position 2152 of SEQ ID NO: 1563236
cccuguuguuccucaaaug

SEQ ID NO: 1805372 - RNA, 19 nt, Artificial Sequence
  Description of Artificial Sequence: Synthetic oligonucleotide
  Antisense strand to SEQ ID NO: 1805371
cauuugaggaacaacaggg

SEQ ID NO: 1805373 - RNA, 19 nt, Artificial Sequence
  Description of Artificial Sequence: Synthetic oligonucleotide
  Sense strand starting at position 2324 of SEQ ID NO: 1563236
gcaaucagcccugaaacca

SEQ ID NO: 1805374 - RNA, 19 nt, Artificial Sequence
  Description of Artificial Sequence: Synthetic oligonucleotide
  Antisense strand to SEQ ID NO: 1805373
ugguuucagggcugauugc

SEQ ID NO: 1805375 - RNA, 19 nt, Artificial Sequence
  Description of Artificial Sequence: Synthetic oligonucleotide
  Sense strand starting at position 2655 of SEQ ID NO: 1563236
cccuaucacugugccauau

SEQ ID NO: 1805376 - RNA, 19 nt, Artificial Sequence
  Description of Artificial Sequence: Synthetic oligonucleotide
  Antisense strand to SEQ ID NO: 1805375
auauggcacagugauaggg

SEQ ID NO: 1805377 - RNA, 19 nt, Artificial Sequence
  Description of Artificial Sequence: Synthetic oligonucleotide
  Sense strand starting at position 2904 of SEQ ID NO: 1563236
acuugcacccuggaucaua

SEQ ID NO: 1805378 - RNA, 19 nt, Artificial Sequence
  Description of Artificial Sequence: Synthetic oligonucleotide
  Antisense strand to SEQ ID NO: 1805377
uaugauccagggugcaagu

SEQ ID NO: 1805379 - RNA, 19 nt, Artificial Sequence
  Description of Artificial Sequence: Synthetic oligonucleotide
  Sense strand starting at position 2983 of SEQ ID NO: 1563236
ggauauaauuuacguacca

SEQ ID NO: 1805380 - RNA, 19 nt, Artificial Sequence
  Description of Artificial Sequence: Synthetic oligonucleotide
  Antisense strand to SEQ ID NO: 1805379
ugguacguaaauuauaucc

SEQ ID NO: 1805381 - RNA, 19 nt, Artificial Sequence
  Description of Artificial Sequence: Synthetic oligonucleotide
  Sense strand starting at position 3324 of SEQ ID NO: 1563236
cacgauuaagugugcaaug

SEQ ID NO: 1805382 - RNA, 19 nt, Artificial Sequence
  Description of Artificial Sequence: Synthetic oligonucleotide
  Antisense strand to SEQ ID NO: 1805381
cauugcacacuuaaucgug

SEQ ID NO: 1805383 - RNA, 19 nt, Artificial Sequence
  Description of Artificial Sequence: Synthetic oligonucleotide
  Sense strand starting at position 3326 of SEQ ID NO: 1563236
cgauuaagugugcaaugca

SEQ ID NO: 1805384 - RNA, 19 nt, Artificial Sequence
  Description of Artificial Sequence: Synthetic oligonucleotide
  Antisense strand to SEQ ID NO: 1805383
ugcauugcacacuuaaucg

SEQ ID NO: 1805385 - RNA, 19 nt, Artificial Sequence
  Description of Artificial Sequence: Synthetic oligonucleotide
  Sense strand starting at position 3699 of SEQ ID NO: 1563236
gugugcaacaaucgcuaua

SEQ ID NO: 1805386 - RNA, 19 nt, Artificial Sequence
  Description of Artificial Sequence: Synthetic oligonucleotide
  Antisense strand to SEQ ID NO: 1805385
uauagcgauuguugcacac

SEQ ID NO: 1805387 - RNA, 19 nt, Artificial Sequence
  Description of Artificial Sequence: Synthetic oligonucleotide
  Sense strand starting at position 3825 of SEQ ID NO: 1563236
uuugccuuucuuggacauu

SEQ ID NO: 1805388 - RNA, 19 nt, Artificial Sequence
  Description of Artificial Sequence: Synthetic oligonucleotide
  Antisense strand to SEQ ID NO: 1805387
aauguccaagaaaggcaaa

SEQ ID NO: 1805389 - RNA, 19 nt, Artificial Sequence
  Description of Artificial Sequence: Synthetic oligonucleotide
  Sense strand starting at position 3925 of SEQ ID NO: 1563236
gcauguaacagugguuugu

SEQ ID NO: 1805390 - RNA, 19 nt, Artificial Sequence
  Description of Artificial Sequence: Synthetic oligonucleotide
  Antisense strand to SEQ ID NO: 1805389
acaaaccacuguuacaugc

SEQ ID NO: 1805391 - RNA, 19 nt, Artificial Sequence
  Description of Artificial Sequence: Synthetic oligonucleotide
  Sense strand starting at position 3956 of SEQ ID NO: 1563236
ugaacaguagucuauccaa

SEQ ID NO: 1805392 - RNA, 19 nt, Artificial Sequence
  Description of Artificial Sequence: Synthetic oligonucleotide
  Antisense strand to SEQ ID NO: 1805391
uuggauagacuacuguuca

SEQ ID NO: 1805393 - RNA, 19 nt, Artificial Sequence
  Description of Artificial Sequence: Synthetic oligonucleotide
  Sense strand starting at position 3959 of SEQ ID NO: 1563236
acaguagucuauccaauga

SEQ ID NO: 1805394 - RNA, 19 nt, Artificial Sequence
  Description of Artificial Sequence: Synthetic oligonucleotide
  Antisense strand to SEQ ID NO: 1805393
ucauuggauagacuacugu

SEQ ID NO: 1805395 - RNA, 19 nt, Artificial Sequence
  Description of Artificial Sequence: Synthetic oligonucleotide
  Sense strand starting at position 217 of SEQ ID NO: 1563237
gguccaagaucuucugucu

SEQ ID NO: 1805396 - RNA, 19 nt, Artificial Sequence
  Description of Artificial Sequence: Synthetic oligonucleotide
  Antisense strand to SEQ ID NO: 1805395
agacagaagaucuuggacc

SEQ ID NO: 1805397 - RNA, 19 nt, Artificial Sequence
  Description of Artificial Sequence: Synthetic oligonucleotide
  Sense strand starting at position 223 of SEQ ID NO: 1563237
agaucuucugucuacugga

SEQ ID NO: 1805398 - RNA, 19 nt, Artificial Sequence
  Description of Artificial Sequence: Synthetic oligonucleotide
  Antisense strand to SEQ ID NO: 1805397
uccaguagacagaagaucu

SEQ ID NO: 1805399 - RNA, 19 nt, Artificial Sequence
  Description of Artificial Sequence: Synthetic oligonucleotide
  Sense strand starting at position 338 of SEQ ID NO: 1563237
cguguuuauaucugagaug

SEQ ID NO: 1805400 - RNA, 19 nt, Artificial Sequence
  Description of Artificial Sequence: Synthetic oligonucleotide
  Antisense strand to SEQ ID NO: 1805399
caucucagauauaaacacg

SEQ ID NO: 1805401 - RNA, 19 nt, Artificial Sequence
  Description of Artificial Sequence: Synthetic oligonucleotide
  Sense strand starting at position 686 of SEQ ID NO: 1563237
gugauauauuuagaauguc

SEQ ID NO: 1805402 - RNA, 19 nt, Artificial Sequence
  Description of Artificial Sequence: Synthetic oligonucleotide
  Antisense strand to SEQ ID NO: 1805401
gacauucuaaauauaucac

SEQ ID NO: 1805403 - RNA, 19 nt, Artificial Sequence
  Description of Artificial Sequence: Synthetic oligonucleotide
  Sense strand starting at position 825 of SEQ ID NO: 1563237
ggacaagaaucaugaggaa

SEQ ID NO: 1805404 - RNA, 19 nt, Artificial Sequence
  Description of Artificial Sequence: Synthetic oligonucleotide
  Antisense strand to SEQ ID NO: 1805403
uuccucaugauucuugucc

SEQ ID NO: 1805405 - RNA, 19 nt, Artificial Sequence
  Description of Artificial Sequence: Synthetic oligonucleotide
  Sense strand starting at position 876 of SEQ ID NO: 1563237
gcaccuauugagcaaagga

SEQ ID NO: 1805406 - RNA, 19 nt, Artificial Sequence
  Description of Artificial Sequence: Synthetic oligonucleotide
  Antisense strand to SEQ ID NO: 1805405
uccuuugcucaauaggugc

SEQ ID NO: 1805407 - RNA, 19 nt, Artificial Sequence
  Description of Artificial Sequence: Synthetic oligonucleotide
  Sense strand starting at position 970 of SEQ ID NO: 1563237
ucccucagaguguaguuaa

SEQ ID NO: 1805408 - RNA, 19 nt, Artificial Sequence
  Description of Artificial Sequence: Synthetic oligonucleotide
  Antisense strand to SEQ ID NO: 1805407
uuaacuacacucugaggga

SEQ ID NO: 1805409 - RNA, 19 nt, Artificial Sequence
  Description of Artificial Sequence: Synthetic oligonucleotide
  Sense strand starting at position 1079 of SEQ ID NO: 1563237
guccacuucccgggacaaa

SEQ ID NO: 1805410 - RNA, 19 nt, Artificial Sequence
  Description of Artificial Sequence: Synthetic oligonucleotide
  Antisense strand to SEQ ID NO: 1805409
uuugucccgggaaguggac

SEQ ID NO: 1805411 - RNA, 19 nt, Artificial Sequence
  Description of Artificial Sequence: Synthetic oligonucleotide
  Sense strand starting at position 1080 of SEQ ID NO: 1563237
uccacuucccgggacaaau

SEQ ID NO: 1805412 - RNA, 19 nt, Artificial Sequence
  Description of Artificial Sequence: Synthetic oligonucleotide
  Antisense strand to SEQ ID NO: 1805411
auuugucccgggaagugga

SEQ ID NO: 1805413 - RNA, 19 nt, Artificial Sequence
  Description of Artificial Sequence: Synthetic oligonucleotide
  Sense strand starting at position 1090 of SEQ ID NO: 1563237
gggacaaauugucuucucu

SEQ ID NO: 1805414 - RNA, 19 nt, Artificial Sequence
  Description of Artificial Sequence: Synthetic oligonucleotide
  Antisense strand to SEQ ID NO: 1805413
agagaagacaauuuguccc

SEQ ID NO: 1805415 - RNA, 19 nt, Artificial Sequence
  Description of Artificial Sequence: Synthetic oligonucleotide
  Sense strand starting at position 1179 of SEQ ID NO: 1563237
cccaguucuuuguuauuag

SEQ ID NO: 1805416 - RNA, 19 nt, Artificial Sequence
  Description of Artificial Sequence: Synthetic oligonucleotide
  Antisense strand to SEQ ID NO: 1805415
cuaauaacaaagaacuggg

SEQ ID NO: 1805417 - RNA, 19 nt, Artificial Sequence
  Description of Artificial Sequence: Synthetic oligonucleotide
  Sense strand starting at position 1200 of SEQ ID NO: 1563237
ugaaguuauuccuucuaga

SEQ ID NO: 1805418 - RNA, 19 nt, Artificial Sequence
  Description of Artificial Sequence: Synthetic oligonucleotide
  Antisense strand to SEQ ID NO: 1805417
ucuagaaggaauaacuuca

SEQ ID NO: 1805419 - RNA, 19 nt, Artificial Sequence
  Description of Artificial Sequence: Synthetic oligonucleotide
  Sense strand starting at position 1233 of SEQ ID NO: 1563237
gagucaccuuaauuccgaa

SEQ ID NO: 1805420 - RNA, 19 nt, Artificial Sequence
  Description of Artificial Sequence: Synthetic oligonucleotide
  Antisense strand to SEQ ID NO: 1805419
uucggaauuaaggugacuc

SEQ ID NO: 1805421 - RNA, 19 nt, Artificial Sequence
  Description of Artificial Sequence: Synthetic oligonucleotide
  Sense strand starting at position 1259 of SEQ ID NO: 1563237
acuuuauuaguaugagagu

SEQ ID NO: 1805422 - RNA, 19 nt, Artificial Sequence
  Description of Artificial Sequence: Synthetic oligonucleotide
  Antisense strand to SEQ ID NO: 1805421
acucucauacuaauaaagu

SEQ ID NO: 1805423 - RNA, 19 nt, Artificial Sequence
  Description of Artificial Sequence: Synthetic oligonucleotide
  Sense strand starting at position 1287 of SEQ ID NO: 1563237
gcuacaaagcuguaucuuu

SEQ ID NO: 1805424 - RNA, 19 nt, Artificial Sequence
  Description of Artificial Sequence: Synthetic oligonucleotide
  Antisense strand to SEQ ID NO: 1805423
aaagauacagcuuuguagc

SEQ ID NO: 1805425 - RNA, 19 nt, Artificial Sequence
  Description of Artificial Sequence: Synthetic oligonucleotide
  Sense strand starting at position 1332 of SEQ ID NO: 1563237
guaaauuguuaacugaaac

SEQ ID NO: 1805426 - RNA, 19 nt, Artificial Sequence
  Description of Artificial Sequence: Synthetic oligonucleotide
  Antisense strand to SEQ ID NO: 1805425
guuucaguuaacaauuuac

SEQ ID NO: 1805427 - RNA, 19 nt, Artificial Sequence
  Description of Artificial Sequence: Synthetic oligonucleotide
  Sense strand starting at position 1640 of SEQ ID NO: 1563237
cccuguguccgggaagaag

SEQ ID NO: 1805428 - RNA, 19 nt, Artificial Sequence
  Description of Artificial Sequence: Synthetic oligonucleotide
  Antisense strand to SEQ ID NO: 1805427
cuucuucccggacacaggg

SEQ ID NO: 1805429 - RNA, 19 nt, Artificial Sequence
  Description of Artificial Sequence: Synthetic oligonucleotide
  Sense strand starting at position 1681 of SEQ ID NO: 1563237
gggcuuucccguccgcaga

SEQ ID NO: 1805430 - RNA, 19 nt, Artificial Sequence
  Description of Artificial Sequence: Synthetic oligonucleotide
  Antisense strand to SEQ ID NO: 1805429
ucugcggacgggaaagccc

SEQ ID NO: 1805431 - RNA, 19 nt, Artificial Sequence
  Description of Artificial Sequence: Synthetic oligonucleotide
  Sense strand starting at position 2013 of SEQ ID NO: 1563237
gaaauaggagcucguggaa

SEQ ID NO: 1805432 - RNA, 19 nt, Artificial Sequence
  Description of Artificial Sequence: Synthetic oligonucleotide
  Antisense strand to SEQ ID NO: 1805431
uuccacgagcuccuauuuc

SEQ ID NO: 1805433 - RNA, 19 nt, Artificial Sequence
  Description of Artificial Sequence: Synthetic oligonucleotide
  Sense strand starting at position 2090 of SEQ ID NO: 1563237
gggauuauuucggaggguc

SEQ ID NO: 1805434 - RNA, 19 nt, Artificial Sequence
  Description of Artificial Sequence: Synthetic oligonucleotide
  Antisense strand to SEQ ID NO: 1805433
gacccuccgaaauaauccc

SEQ ID NO: 1805435 - RNA, 19 nt, Artificial Sequence
  Description of Artificial Sequence: Synthetic oligonucleotide
  Sense strand starting at position 2190 of SEQ ID NO: 1563237
cuguuauuagcaugacaug

SEQ ID NO: 1805436 - RNA, 19 nt, Artificial Sequence
  Description of Artificial Sequence: Synthetic oligonucleotide
  Antisense strand to SEQ ID NO: 1805435
caugucaugcuaauaacag

SEQ ID NO: 1805437 - RNA, 19 nt, Artificial Sequence
  Description of Artificial Sequence: Synthetic oligonucleotide
  Sense strand starting at position 2212 of SEQ ID NO: 1563237
gaggguuugcucuggaagg

SEQ ID NO: 1805438 - RNA, 19 nt, Artificial Sequence
  Description of Artificial Sequence: Synthetic oligonucleotide
  Antisense strand to SEQ ID NO: 1805437
ccuuccagagcaaacccuc

SEQ ID NO: 1805439 - RNA, 19 nt, Artificial Sequence
  Description of Artificial Sequence: Synthetic oligonucleotide
  Sense strand starting at position 2214 of SEQ ID NO: 1563237
ggguuugcucuggaagguu

SEQ ID NO: 1805440 - RNA, 19 nt, Artificial Sequence
  Description of Artificial Sequence: Synthetic oligonucleotide
  Antisense strand to SEQ ID NO: 1805439
aaccuuccagagcaaaccc

SEQ ID NO: 1805441 - RNA, 19 nt, Artificial Sequence
  Description of Artificial Sequence: Synthetic oligonucleotide
  Sense strand starting at position 2322 of SEQ ID NO: 1563237
cugacuucugaccaagguu

SEQ ID NO: 1805442 - RNA, 19 nt, Artificial Sequence
  Description of Artificial Sequence: Synthetic oligonucleotide
  Antisense strand to SEQ ID NO: 1805441
aaccuuggucagaagucag

SEQ ID NO: 1805443 - RNA, 19 nt, Artificial Sequence
  Description of Artificial Sequence: Synthetic oligonucleotide
  Sense strand starting at position 2361 of SEQ ID NO: 1563237
gagcauugugccguggcua

SEQ ID NO: 1805444 - RNA, 19 nt, Artificial Sequence
  Description of Artificial Sequence: Synthetic oligonucleotide
  Antisense strand to SEQ ID NO: 1805443
uagccacggcacaaugcuc

SEQ ID NO: 1805445 - RNA, 19 nt, Artificial Sequence
  Description of Artificial Sequence: Synthetic oligonucleotide
  Sense strand starting at position 2387 of SEQ ID NO: 1563237
acggaagacugggcuugua

SEQ ID NO: 1805446 - RNA, 19 nt, Artificial Sequence
  Description of Artificial Sequence: Synthetic oligonucleotide
  Antisense strand to SEQ ID NO: 1805445
uacaagcccagucuuccgu

SEQ ID NO: 1805447 - RNA, 19 nt, Artificial Sequence
  Description of Artificial Sequence: Synthetic oligonucleotide
  Sense strand starting at position 2390 of SEQ ID NO: 1563237
gaagacugggcuuguaucu

SEQ ID NO: 1805448 - RNA, 19 nt, Artificial Sequence
  Description of Artificial Sequence: Synthetic oligonucleotide
  Antisense strand to SEQ ID NO: 1805447
agauacaagcccagucuuc

SEQ ID NO: 1805449 - RNA, 19 nt, Artificial Sequence
  Description of Artificial Sequence: Synthetic oligonucleotide
  Sense strand starting at position 2508 of SEQ ID NO: 1563237
cacuacugacagugugaaa

SEQ ID NO: 1805450 - RNA, 19 nt, Artificial Sequence
  Description of Artificial Sequence: Synthetic oligonucleotide
  Antisense strand to SEQ ID NO: 1805449
uuucacacugucaguagug

SEQ ID NO: 1805451 - RNA, 19 nt, Artificial Sequence
  Description of Artificial Sequence: Synthetic oligonucleotide
  Sense strand starting at position 3300 of SEQ ID NO: 1563237
cugguugcccaguacuaau

SEQ ID NO: 1805452 - RNA, 19 nt, Artificial Sequence
  Description of Artificial Sequence: Synthetic oligonucleotide
  Antisense strand to SEQ ID NO: 1805451
auuaguacugggcaaccag

SEQ ID NO: 1805453 - RNA, 19 nt, Artificial Sequence
  Description of Artificial Sequence: Synthetic oligonucleotide
  Sense strand starting at position 3376 of SEQ ID NO: 1563237
gggugucugaaauaguaac

SEQ ID NO: 1805454 - RNA, 19 nt, Artificial Sequence
  Description of Artificial Sequence: Synthetic oligonucleotide
  Antisense strand to SEQ ID NO: 1805453
guuacuauuucagacaccc

SEQ ID NO: 1805455 - RNA, 19 nt, Artificial Sequence
  Description of Artificial Sequence: Synthetic oligonucleotide
  Sense strand starting at position 3388 of SEQ ID NO: 1563237
uaguaacaagagugauucu

SEQ ID NO: 1805456 - RNA, 19 nt, Artificial Sequence
  Description of Artificial Sequence: Synthetic oligonucleotide
  Antisense strand to SEQ ID NO: 1805455
agaaucacucuuguuacua

SEQ ID NO: 1805457 - RNA, 19 nt, Artificial Sequence
  Description of Artificial Sequence: Synthetic oligonucleotide
  Sense strand starting at position 3391 of SEQ ID NO: 1563237
uaacaagagugauucuuag

SEQ ID NO: 1805458 - RNA, 19 nt, Artificial Sequence
  Description of Artificial Sequence: Synthetic oligonucleotide
  Antisense strand to SEQ ID NO: 1805457
cuaagaaucacucuuguua

SEQ ID NO: 1805459 - RNA, 19 nt, Artificial Sequence
  Description of Artificial Sequence: Synthetic oligonucleotide
  Sense strand starting at position 3500 of SEQ ID NO: 1563237
gugccagucuaauuuauca

SEQ ID NO: 1805460 - RNA, 19 nt, Artificial Sequence
  Description of Artificial Sequence: Synthetic oligonucleotide
  Antisense strand to SEQ ID NO: 1805459
ugauaaauuagacuggcac

SEQ ID NO: 1805461 - RNA, 19 nt, Artificial Sequence
  Description of Artificial Sequence: Synthetic oligonucleotide
  Sense strand starting at position 3582 of SEQ ID NO: 1563237
uugggaaccggauguaaca

SEQ ID NO: 1805462 - RNA, 19 nt, Artificial Sequence
  Description of Artificial Sequence: Synthetic oligonucleotide
  Antisense strand to SEQ ID NO: 1805461
uguuacauccgguucccaa

SEQ ID NO: 1805463 - RNA, 19 nt, Artificial Sequence
  Description of Artificial Sequence: Synthetic oligonucleotide
  Sense strand starting at position 3591 of SEQ ID NO: 1563237
ggauguaacagguguuuga

SEQ ID NO: 1805464 - RNA, 19 nt, Artificial Sequence
  Description of Artificial Sequence: Synthetic oligonucleotide
  Antisense strand to SEQ ID NO: 1805463
ucaaacaccuguuacaucc

SEQ ID NO: 1805465 - RNA, 19 nt, Artificial Sequence
  Description of Artificial Sequence: Synthetic oligonucleotide
  Sense strand starting at position 3639 of SEQ ID NO: 1563237
gaggccuaguucucaauca

SEQ ID NO: 1805466 - RNA, 19 nt, Artificial Sequence
  Description of Artificial Sequence: Synthetic oligonucleotide
  Antisense strand to SEQ ID NO: 1805465
ugauugagaacuaggccuc

SEQ ID NO: 1805467 - RNA, 19 nt, Artificial Sequence
  Description of Artificial Sequence: Synthetic oligonucleotide
  Sense strand starting at position 3751 of SEQ ID NO: 1563237
agaauuaauuugugggauu

SEQ ID NO: 1805468 - RNA, 19 nt, Artificial Sequence
  Description of Artificial Sequence: Synthetic oligonucleotide
  Antisense strand to SEQ ID NO: 1805467
aaucccacaaauuaauucu

SEQ ID NO: 1805469 - RNA, 19 nt, Artificial Sequence
  Description of Artificial Sequence: Synthetic oligonucleotide
  Sense strand starting at position 3752 of SEQ ID NO: 1563237
gaauuaauuugugggauuc

SEQ ID NO: 1805470 - RNA, 19 nt, Artificial Sequence
  Description of Artificial Sequence: Synthetic oligonucleotide
  Antisense strand to SEQ ID NO: 1805469
gaaucccacaaauuaauuc

SEQ ID NO: 1805471 - RNA, 19 nt, Artificial Sequence
  Description of Artificial Sequence: Synthetic oligonucleotide
  Sense strand starting at position 3790 of SEQ ID NO: 1563237
gacguugagucuccaaauu

SEQ ID NO: 1805472 - RNA, 19 nt, Artificial Sequence
  Description of Artificial Sequence: Synthetic oligonucleotide
  Antisense strand to SEQ ID NO: 1805471
aauuuggagacucaacguc

SEQ ID NO: 1805473 - RNA, 19 nt, Artificial Sequence
  Description of Artificial Sequence: Synthetic oligonucleotide
  Sense strand starting at position 3812 of SEQ ID NO: 1563237
gugcaucuuccauguauuu

SEQ ID NO: 1805474 - RNA, 19 nt, Artificial Sequence
  Description of Artificial Sequence: Synthetic oligonucleotide
  Antisense strand to SEQ ID NO: 1805473
aaauacauggaagaugcac

SEQ ID NO: 1805475 - RNA, 19 nt, Artificial Sequence
  Description of Artificial Sequence: Synthetic oligonucleotide
  Sense strand starting at position 137 of SEQ ID NO: 1563238
aaaggaacuugguuacuuu

SEQ ID NO: 1805476 - RNA, 19 nt, Artificial Sequence
  Description of Artificial Sequence: Synthetic oligonucleotide
  Antisense strand to SEQ ID NO: 1805475
aaaguaaccaaguuccuuu

SEQ ID NO: 1805477 - RNA, 19 nt, Artificial Sequence
  Description of Artificial Sequence: Synthetic oligonucleotide
  Sense strand starting at position 141 of SEQ ID NO: 1563238
gaacuugguuacuuuguaa

SEQ ID NO: 1805478 - RNA, 19 nt, Artificial Sequence
  Description of Artificial Sequence: Synthetic oligonucleotide
  Antisense strand to SEQ ID NO: 1805477
uuacaaaguaaccaaguuc

SEQ ID NO: 1805479 - RNA, 19 nt, Artificial Sequence
  Description of Artificial Sequence: Synthetic oligonucleotide
  Sense strand starting at position 168 of SEQ ID NO: 1563238
gaaagaggaugugugcauu

SEQ ID NO: 1805480 - RNA, 19 nt, Artificial Sequence
  Description of Artificial Sequence: Synthetic oligonucleotide
  Antisense strand to SEQ ID NO: 1805479
aaugcacacauccucuuuc

SEQ ID NO: 1805481 - RNA, 19 nt, Artificial Sequence
  Description of Artificial Sequence: Synthetic oligonucleotide
  Sense strand starting at position 399 of SEQ ID NO: 1563238
gcuugaucgcaggaauagu

SEQ ID NO: 1805482 - RNA, 19 nt, Artificial Sequence
  Description of Artificial Sequence: Synthetic oligonucleotide
  Antisense strand to SEQ ID NO: 1805481
acuauuccugcgaucaagc

SEQ ID NO: 1805483 - RNA, 19 nt, Artificial Sequence
  Description of Artificial Sequence: Synthetic oligonucleotide
  Sense strand starting at position 483 of SEQ ID NO: 1563238
ggaggaugccuacaguuca

SEQ ID NO: 1805484 - RNA, 19 nt, Artificial Sequence
  Description of Artificial Sequence: Synthetic oligonucleotide
  Antisense strand to SEQ ID NO: 1805483
ugaacuguaggcauccucc

SEQ ID NO: 1805485 - RNA, 19 nt, Artificial Sequence
  Description of Artificial Sequence: Synthetic oligonucleotide
  Sense strand starting at position 500 of SEQ ID NO: 1563238
cagacagauccuggauguu

SEQ ID NO: 1805486 - RNA, 19 nt, Artificial Sequence
  Description of Artificial Sequence: Synthetic oligonucleotide
  Antisense strand to SEQ ID NO: 1805485
aacauccaggaucugucug

SEQ ID NO: 1805487 - RNA, 19 nt, Artificial Sequence
  Description of Artificial Sequence: Synthetic oligonucleotide
  Sense strand starting at position 518 of SEQ ID NO: 1563238
uggugacugugacuuccau

SEQ ID NO: 1805488 - RNA, 19 nt, Artificial Sequence
  Description of Artificial Sequence: Synthetic oligonucleotide
  Antisense strand to SEQ ID NO: 1805487
auggaagucacagucacca

SEQ ID NO: 1805489 - RNA, 19 nt, Artificial Sequence
  Description of Artificial Sequence: Synthetic oligonucleotide
  Sense strand starting at position 569 of SEQ ID NO: 1563238
uccuaagaucuuggaguag

SEQ ID NO: 1805490 - RNA, 19 nt, Artificial Sequence
  Description of Artificial Sequence: Synthetic oligonucleotide
  Antisense strand to SEQ ID NO: 1805489
cuacuccaagaucuuagga

SEQ ID NO: 1805491 - RNA, 19 nt, Artificial Sequence
  Description of Artificial Sequence: Synthetic oligonucleotide
  Sense strand starting at position 667 of SEQ ID NO: 1563238
gcacaaucucuggguuucu

SEQ ID NO: 1805492 - RNA, 19 nt, Artificial Sequence
  Description of Artificial Sequence: Synthetic oligonucleotide
  Antisense strand to SEQ ID NO: 1805491
agaaacccagagauugugc

SEQ ID NO: 1805493 - RNA, 19 nt, Artificial Sequence
  Description of Artificial Sequence: Synthetic oligonucleotide
  Sense strand starting at position 680 of SEQ ID NO: 1563238
guuucuugguucccagaua

SEQ ID NO: 1805494 - RNA, 19 nt, Artificial Sequence
  Description of Artificial Sequence: Synthetic oligonucleotide
  Antisense strand to SEQ ID NO: 1805493
uaucugggaaccaagaaac

SEQ ID NO: 1805495 - RNA, 19 nt, Artificial Sequence
  Description of Artificial Sequence: Synthetic oligonucleotide
  Sense strand starting at position 685 of SEQ ID NO: 1563238
uugguucccagauaguaug

SEQ ID NO: 1805496 - RNA, 19 nt, Artificial Sequence
  Description of Artificial Sequence: Synthetic oligonucleotide
  Antisense strand to SEQ ID NO: 1805495
cauacuaucugggaaccaa

SEQ ID NO: 1805497 - RNA, 19 nt, Artificial Sequence
  Description of Artificial Sequence: Synthetic oligonucleotide
  Sense strand starting at position 695 of SEQ ID NO: 1563238
gauaguauguucuuugcau

SEQ ID NO: 1805498 - RNA, 19 nt, Artificial Sequence
  Description of Artificial Sequence: Synthetic oligonucleotide
  Antisense strand to SEQ ID NO: 1805497
augcaaagaacauacuauc

SEQ ID NO: 1805499 - RNA, 19 nt, Artificial Sequence
  Description of Artificial Sequence: Synthetic oligonucleotide
  Sense strand starting at position 696 of SEQ ID NO: 1563238
auaguauguucuuugcaua

SEQ ID NO: 1805500 - RNA, 19 nt, Artificial Sequence
  Description of Artificial Sequence: Synthetic oligonucleotide
  Antisense strand to SEQ ID NO: 1805499
uaugcaaagaacauacuau

SEQ ID NO: 1805501 - RNA, 19 nt, Artificial Sequence
  Description of Artificial Sequence: Synthetic oligonucleotide
  Sense strand starting at position 701 of SEQ ID NO: 1563238
auguucuuugcauacauau

SEQ ID NO: 1805502 - RNA, 19 nt, Artificial Sequence
  Description of Artificial Sequence: Synthetic oligonucleotide
  Antisense strand to SEQ ID NO: 1805501
auauguaugcaaagaacau

SEQ ID NO: 1805503 - RNA, 19 nt, Artificial Sequence
  Description of Artificial Sequence: Synthetic oligonucleotide
  Sense strand starting at position 797 of SEQ ID NO: 1563238
guaucaagaucccugaaua

SEQ ID NO: 1805504 - RNA, 19 nt, Artificial Sequence
  Description of Artificial Sequence: Synthetic oligonucleotide
  Antisense strand to SEQ ID NO: 1805503
uauucagggaucuugauac

SEQ ID NO: 1805505 - RNA, 19 nt, Artificial Sequence
  Description of Artificial Sequence: Synthetic oligonucleotide
  Sense strand starting at position 918 of SEQ ID NO: 1563238
ugaccaaaugcugauguca

SEQ ID NO: 1805506 - RNA, 19 nt, Artificial Sequence
  Description of Artificial Sequence: Synthetic oligonucleotide
  Antisense strand to SEQ ID NO: 1805505
ugacaucagcauuugguca

SEQ ID NO: 1805507 - RNA, 19 nt, Artificial Sequence
  Description of Artificial Sequence: Synthetic oligonucleotide
  Sense strand starting at position 923 of SEQ ID NO: 1563238
aaaugcugaugucagauuu

SEQ ID NO: 1805508 - RNA, 19 nt, Artificial Sequence
  Description of Artificial Sequence: Synthetic oligonucleotide
  Antisense strand to SEQ ID NO: 1805507
aaaucugacaucagcauuu

SEQ ID NO: 1805509 - RNA, 19 nt, Artificial Sequence
  Description of Artificial Sequence: Synthetic oligonucleotide
  Sense strand starting at position 1309 of SEQ ID NO: 1563238
uuugaaggaucccaaguau

SEQ ID NO: 1805510 - RNA, 19 nt, Artificial Sequence
  Description of Artificial Sequence: Synthetic oligonucleotide
  Antisense strand to SEQ ID NO: 1805509
auacuugggauccuucaaa

SEQ ID NO: 1805511 - RNA, 19 nt, Artificial Sequence
  Description of Artificial Sequence: Synthetic oligonucleotide
  Sense strand starting at position 1322 of SEQ ID NO: 1563238
aaguaucugguccagggau

SEQ ID NO: 1805512 - RNA, 19 nt, Artificial Sequence
  Description of Artificial Sequence: Synthetic oligonucleotide
  Antisense strand to SEQ ID NO: 1805511
aucccuggaccagauacuu

SEQ ID NO: 1805513 - RNA, 19 nt, Artificial Sequence
  Description of Artificial Sequence: Synthetic oligonucleotide
  Sense strand starting at position 1405 of SEQ ID NO: 1563238
gucuuagggucuccagaua

SEQ ID NO: 1805514 - RNA, 19 nt, Artificial Sequence
  Description of Artificial Sequence: Synthetic oligonucleotide
  Antisense strand to SEQ ID NO: 1805513
uaucuggagacccuaagac

SEQ ID NO: 1805515 - RNA, 19 nt, Artificial Sequence
  Description of Artificial Sequence: Synthetic oligonucleotide
  Sense strand starting at position 1429 of SEQ ID NO: 1563238
gucucagggaacugauguu

SEQ ID NO: 1805516 - RNA, 19 nt, Artificial Sequence
  Description of Artificial Sequence: Synthetic oligonucleotide
  Antisense strand to SEQ ID NO: 1805515
aacaucaguucccugagac

SEQ ID NO: 1805517 - RNA, 19 nt, Artificial Sequence
  Description of Artificial Sequence: Synthetic oligonucleotide
  Sense strand starting at position 1435 of SEQ ID NO: 1563238
gggaacugauguuaagauu

SEQ ID NO: 1805518 - RNA, 19 nt, Artificial Sequence
  Description of Artificial Sequence: Synthetic oligonucleotide
  Antisense strand to SEQ ID NO: 1805517
aaucuuaacaucaguuccc

SEQ ID NO: 1805519 - RNA, 19 nt, Artificial Sequence
  Description of Artificial Sequence: Synthetic oligonucleotide
  Sense strand starting at position 1519 of SEQ ID NO: 1563238
cagagcuuuggguguacca

SEQ ID NO: 1805520 - RNA, 19 nt, Artificial Sequence
  Description of Artificial Sequence: Synthetic oligonucleotide
  Antisense strand to SEQ ID NO: 1805519
ugguacacccaaagcucug

SEQ ID NO: 1805521 - RNA, 19 nt, Artificial Sequence
  Description of Artificial Sequence: Synthetic oligonucleotide
  Sense strand starting at position 1521 of SEQ ID NO: 1563238
gagcuuuggguguaccaaa

SEQ ID NO: 1805522 - RNA, 19 nt, Artificial Sequence
  Description of Artificial Sequence: Synthetic oligonucleotide
  Antisense strand to SEQ ID NO: 1805521
uuugguacacccaaagcuc

SEQ ID NO: 1805523 - RNA, 19 nt, Artificial Sequence
  Description of Artificial Sequence: Synthetic oligonucleotide
  Sense strand starting at position 2021 of SEQ ID NO: 1563238
ggagguugagcuugcaaua

SEQ ID NO: 1805524 - RNA, 19 nt, Artificial Sequence
  Description of Artificial Sequence: Synthetic oligonucleotide
  Antisense strand to SEQ ID NO: 1805523
uauugcaagcucaaccucc

SEQ ID NO: 1805525 - RNA, 19 nt, Artificial Sequence
  Description of Artificial Sequence: Synthetic oligonucleotide
  Sense strand starting at position 2144 of SEQ ID NO: 1563238
cuuccugacucauucguuu

SEQ ID NO: 1805526 - RNA, 19 nt, Artificial Sequence
  Description of Artificial Sequence: Synthetic oligonucleotide
  Antisense strand to SEQ ID NO: 1805525
aaacgaaugagucaggaag

SEQ ID NO: 1805527 - RNA, 19 nt, Artificial Sequence
  Description of Artificial Sequence: Synthetic oligonucleotide
  Sense strand starting at position 2158 of SEQ ID NO: 1563238
cguuuaaggcggcauucau

SEQ ID NO: 1805528 - RNA, 19 nt, Artificial Sequence
  Description of Artificial Sequence: Synthetic oligonucleotide
  Antisense strand to SEQ ID NO: 1805527
augaaugccgccuuaaacg

SEQ ID NO: 1805529 - RNA, 19 nt, Artificial Sequence
  Description of Artificial Sequence: Synthetic oligonucleotide
  Sense strand starting at position 2227 of SEQ ID NO: 1563238
cgacuacuucccugugucu

SEQ ID NO: 1805530 - RNA, 19 nt, Artificial Sequence
  Description of Artificial Sequence: Synthetic oligonucleotide
  Antisense strand to SEQ ID NO: 1805529
agacacagggaaguagucg

SEQ ID NO: 1805531 - RNA, 19 nt, Artificial Sequence
  Description of Artificial Sequence: Synthetic oligonucleotide
  Sense strand starting at position 2229 of SEQ ID NO: 1563238
acuacuucccugugucuua

SEQ ID NO: 1805532 - RNA, 19 nt, Artificial Sequence
  Description of Artificial Sequence: Synthetic oligonucleotide
  Antisense strand to SEQ ID NO: 1805531
uaagacacagggaaguagu

SEQ ID NO: 1805533 - RNA, 19 nt, Artificial Sequence
  Description of Artificial Sequence: Synthetic oligonucleotide
  Sense strand starting at position 2354 of SEQ ID NO: 1563238
aagaaagcacuauguaagu

SEQ ID NO: 1805534 - RNA, 19 nt, Artificial Sequence
  Description of Artificial Sequence: Synthetic oligonucleotide
  Antisense strand to SEQ ID NO: 1805533
acuuacauagugcuuucuu

SEQ ID NO: 1805535 - RNA, 19 nt, Artificial Sequence
  Description of Artificial Sequence: Synthetic oligonucleotide
  Sense strand starting at position 2367 of SEQ ID NO: 1563238
guaaguuauaguuacuagu

SEQ ID NO: 1805536 - RNA, 19 nt, Artificial Sequence
  Description of Artificial Sequence: Synthetic oligonucleotide
  Antisense strand to SEQ ID NO: 1805535
acuaguaacuauaacuuac

SEQ ID NO: 1805537 - RNA, 19 nt, Artificial Sequence
  Description of Artificial Sequence: Synthetic oligonucleotide
  Sense strand starting at position 2369 of SEQ ID NO: 1563238
aaguuauaguuacuagugu

SEQ ID NO: 1805538 - RNA, 19 nt, Artificial Sequence
  Description of Artificial Sequence: Synthetic oligonucleotide
  Antisense strand to SEQ ID NO: 1805537
acacuaguaacuauaacuu

SEQ ID NO: 1805539 - RNA, 19 nt, Artificial Sequence
  Description of Artificial Sequence: Synthetic oligonucleotide
  Sense strand starting at position 2377 of SEQ ID NO: 1563238
guuacuaguguccaugcau

SEQ ID NO: 1805540 - RNA, 19 nt, Artificial Sequence
  Description of Artificial Sequence: Synthetic oligonucleotide
  Antisense strand to SEQ ID NO: 1805539
augcauggacacuaguaac

SEQ ID NO: 1805541 - RNA, 19 nt, Artificial Sequence
  Description of Artificial Sequence: Synthetic oligonucleotide
  Sense strand starting at position 3231 of SEQ ID NO: 1563238
cgcguaucccuggacauca

SEQ ID NO: 1805542 - RNA, 19 nt, Artificial Sequence
  Description of Artificial Sequence: Synthetic oligonucleotide
  Antisense strand to SEQ ID NO: 1805541
ugauguccagggauacgcg

SEQ ID NO: 1805543 - RNA, 19 nt, Artificial Sequence
  Description of Artificial Sequence: Synthetic oligonucleotide
  Sense strand starting at position 3340 of SEQ ID NO: 1563238
gcuacaucucccgaugcuu

SEQ ID NO: 1805544 - RNA, 19 nt, Artificial Sequence
  Description of Artificial Sequence: Synthetic oligonucleotide
  Antisense strand to SEQ ID NO: 1805543
aagcaucgggagauguagc

SEQ ID NO: 1805545 - RNA, 19 nt, Artificial Sequence
  Description of Artificial Sequence: Synthetic oligonucleotide
  Sense strand starting at position 3475 of SEQ ID NO: 1563238
acgagaucaccuuggaguc

SEQ ID NO: 1805546 - RNA, 19 nt, Artificial Sequence
  Description of Artificial Sequence: Synthetic oligonucleotide
  Antisense strand to SEQ ID NO: 1805545
gacuccaaggugaucucgu

SEQ ID NO: 1805547 - RNA, 19 nt, Artificial Sequence
  Description of Artificial Sequence: Synthetic oligonucleotide
  Sense strand starting at position 3476 of SEQ ID NO: 1563238
cgagaucaccuuggaguca

SEQ ID NO: 1805548 - RNA, 19 nt, Artificial Sequence
  Description of Artificial Sequence: Synthetic oligonucleotide
  Antisense strand to SEQ ID NO: 1805547
ugacuccaaggugaucucg

SEQ ID NO: 1805549 - RNA, 19 nt, Artificial Sequence
  Description of Artificial Sequence: Synthetic oligonucleotide
  Sense strand starting at position 3633 of SEQ ID NO: 1563238
aucuucuguuguucucaaa

SEQ ID NO: 1805550 - RNA, 19 nt, Artificial Sequence
  Description of Artificial Sequence: Synthetic oligonucleotide
  Antisense strand to SEQ ID NO: 1805549
uuugagaacaacagaagau

SEQ ID NO: 1805551 - RNA, 19 nt, Artificial Sequence
  Description of Artificial Sequence: Synthetic oligonucleotide
  Sense strand starting at position 3962 of SEQ ID NO: 1563238
gacuguuugcugcagguau

SEQ ID NO: 1805552 - RNA, 19 nt, Artificial Sequence
  Description of Artificial Sequence: Synthetic oligonucleotide
  Antisense strand to SEQ ID NO: 1805551
auaccugcagcaaacaguc

SEQ ID NO: 1805553 - RNA, 19 nt, Artificial Sequence
  Description of Artificial Sequence: Synthetic oligonucleotide
  Sense strand starting at position 3966 of SEQ ID NO: 1563238
guuugcugcagguauauau

SEQ ID NO: 1805554 - RNA, 19 nt, Artificial Sequence
  Description of Artificial Sequence: Synthetic oligonucleotide
  Antisense strand to SEQ ID NO: 1805553
auauauaccugcagcaaac

SEQ ID NO: 1805555 - RNA, 19 nt, Artificial Sequence
  Description of Artificial Sequence: Synthetic oligonucleotide
  Sense strand starting at position 233 of SEQ ID NO: 1563239
agaacaagcugagaagaau

SEQ ID NO: 1805556 - RNA, 19 nt, Artificial Sequence
  Description of Artificial Sequence: Synthetic oligonucleotide
  Antisense strand to SEQ ID NO: 1805555
auucuucucagcuuguucu

SEQ ID NO: 1805557 - RNA, 19 nt, Artificial Sequence
  Description of Artificial Sequence: Synthetic oligonucleotide
  Sense strand starting at position 264 of SEQ ID NO: 1563239
cuaauugauuaagccaaga

SEQ ID NO: 1805558 - RNA, 19 nt, Artificial Sequence
  Description of Artificial Sequence: Synthetic oligonucleotide
  Antisense strand to SEQ ID NO: 1805557
ucuuggcuuaaucaauuag

SEQ ID NO: 1805559 - RNA, 19 nt, Artificial Sequence
  Description of Artificial Sequence: Synthetic oligonucleotide
  Sense strand starting at position 280 of SEQ ID NO: 1563239
agacauaaguaagcuauua

SEQ ID NO: 1805560 - RNA, 19 nt, Artificial Sequence
  Description of Artificial Sequence: Synthetic oligonucleotide
  Antisense strand to SEQ ID NO: 1805559
uaauagcuuacuuaugucu

SEQ ID NO: 1805561 - RNA, 19 nt, Artificial Sequence
  Description of Artificial Sequence: Synthetic oligonucleotide
  Sense strand starting at position 543 of SEQ ID NO: 1563239
gcagaacacuaauccgaaa

SEQ ID NO: 1805562 - RNA, 19 nt, Artificial Sequence
  Description of Artificial Sequence: Synthetic oligonucleotide
  Antisense strand to SEQ ID NO: 1805561
uuucggauuaguguucugc

SEQ ID NO: 1805563 - RNA, 19 nt, Artificial Sequence
  Description of Artificial Sequence: Synthetic oligonucleotide
  Sense strand starting at position 679 of SEQ ID NO: 1563239
guuuaucugugcucagaga

SEQ ID NO: 1805564 - RNA, 19 nt, Artificial Sequence
  Description of Artificial Sequence: Synthetic oligonucleotide
  Antisense strand to SEQ ID NO: 1805563
ucucugagcacagauaaac

SEQ ID NO: 1805565 - RNA, 19 nt, Artificial Sequence
  Description of Artificial Sequence: Synthetic oligonucleotide
  Sense strand starting at position 680 of SEQ ID NO: 1563239
uuuaucugugcucagagaa

SEQ ID NO: 1805566 - RNA, 19 nt, Artificial Sequence
  Description of Artificial Sequence: Synthetic oligonucleotide
  Antisense strand to SEQ ID NO: 1805565
uucucugagcacagauaaa

SEQ ID NO: 1805567 - RNA, 19 nt, Artificial Sequence
  Description of Artificial Sequence: Synthetic oligonucleotide
  Sense strand starting at position 772 of SEQ ID NO: 1563239
gugcuaguauaauucugau

SEQ ID NO: 1805568 - RNA, 19 nt, Artificial Sequence
  Description of Artificial Sequence: Synthetic oligonucleotide
  Antisense strand to SEQ ID NO: 1805567
aucagaauuauacuagcac

SEQ ID NO: 1805569 - RNA, 19 nt, Artificial Sequence
  Description of Artificial Sequence: Synthetic oligonucleotide
  Sense strand starting at position 1079 of SEQ ID NO: 1563239
cugcauuuaugggaaugaa

SEQ ID NO: 1805570 - RNA, 19 nt, Artificial Sequence
  Description of Artificial Sequence: Synthetic oligonucleotide
  Antisense strand to SEQ ID NO: 1805569
uucauucccauaaaugcag

SEQ ID NO: 1805571 - RNA, 19 nt, Artificial Sequence
  Description of Artificial Sequence: Synthetic oligonucleotide
  Sense strand starting at position 1129 of SEQ ID NO: 1563239
gcuggcauucuccaauaca

SEQ ID NO: 1805572 - RNA, 19 nt, Artificial Sequence
  Description of Artificial Sequence: Synthetic oligonucleotide
  Antisense strand to SEQ ID NO: 1805571
uguauuggagaaugccagc

SEQ ID NO: 1805573 - RNA, 19 nt, Artificial Sequence
  Description of Artificial Sequence: Synthetic oligonucleotide
  Sense strand starting at position 1235 of SEQ ID NO: 1563239
ggaagagacuaccaaagau

SEQ ID NO: 1805574 - RNA, 19 nt, Artificial Sequence
  Description of Artificial Sequence: Synthetic oligonucleotide
  Antisense strand to SEQ ID NO: 1805573
aucuuugguagucucuucc

SEQ ID NO: 1805575 - RNA, 19 nt, Artificial Sequence
  Description of Artificial Sequence: Synthetic oligonucleotide
  Sense strand starting at position 1500 of SEQ ID NO: 1563239
auagcaucccuaggagaaa

SEQ ID NO: 1805576 - RNA, 19 nt, Artificial Sequence
  Description of Artificial Sequence: Synthetic oligonucleotide
  Antisense strand to SEQ ID NO: 1805575
uuucuccuagggaugcuau

SEQ ID NO: 1805577 - RNA, 19 nt, Artificial Sequence
  Description of Artificial Sequence: Synthetic oligonucleotide
  Sense strand starting at position 1577 of SEQ ID NO: 1563239
caggcaagugacugacuua

SEQ ID NO: 1805578 - RNA, 19 nt, Artificial Sequence
  Description of Artificial Sequence: Synthetic oligonucleotide
  Antisense strand to SEQ ID NO: 1805577
uaagucagucacuugccug

SEQ ID NO: 1805579 - RNA, 19 nt, Artificial Sequence
  Description of Artificial Sequence: Synthetic oligonucleotide
  Sense strand starting at position 2074 of SEQ ID NO: 1563239
agaacuugaucuuggauuu

SEQ ID NO: 1805580 - RNA, 19 nt, Artificial Sequence
  Description of Artificial Sequence: Synthetic oligonucleotide
  Antisense strand to SEQ ID NO: 1805579
aaauccaagaucaaguucu

SEQ ID NO: 1805581 - RNA, 19 nt, Artificial Sequence
  Description of Artificial Sequence: Synthetic oligonucleotide
  Sense strand starting at position 2223 of SEQ ID NO: 1563239
uuuacauaguuucuaggga

SEQ ID NO: 1805582 - RNA, 19 nt, Artificial Sequence
  Description of Artificial Sequence: Synthetic oligonucleotide
  Antisense strand to SEQ ID NO: 1805581
ucccuagaaacuauguaaa

SEQ ID NO: 1805583 - RNA, 19 nt, Artificial Sequence
  Description of Artificial Sequence: Synthetic oligonucleotide
  Sense strand starting at position 2273 of SEQ ID NO: 1563239
accaauuaugcagauguga

SEQ ID NO: 1805584 - RNA, 19 nt, Artificial Sequence
  Description of Artificial Sequence: Synthetic oligonucleotide
  Antisense strand to SEQ ID NO: 1805583
ucacaucugcauaauuggu

SEQ ID NO: 1805585 - RNA, 19 nt, Artificial Sequence
  Description of Artificial Sequence: Synthetic oligonucleotide
  Sense strand starting at position 2392 of SEQ ID NO: 1563239
uaagcaguugagcaaagaa

SEQ ID NO: 1805586 - RNA, 19 nt, Artificial Sequence
  Description of Artificial Sequence: Synthetic oligonucleotide
  Antisense strand to SEQ ID NO: 1805585
uucuuugcucaacugcuua

SEQ ID NO: 1805587 - RNA, 19 nt, Artificial Sequence
  Description of Artificial Sequence: Synthetic oligonucleotide
  Sense strand starting at position 2426 of SEQ ID NO: 1563239
ggcuaaaucuaaguaaagg

SEQ ID NO: 1805588 - RNA, 19 nt, Artificial Sequence
  Description of Artificial Sequence: Synthetic oligonucleotide
  Antisense strand to SEQ ID NO: 1805587
ccuuuacuuagauuuagcc

SEQ ID NO: 1805589 - RNA, 19 nt, Artificial Sequence
  Description of Artificial Sequence: Synthetic oligonucleotide
  Sense strand starting at position 2434 of SEQ ID NO: 1563239
cuaaguaaagguugauaau

SEQ ID NO: 1805590 - RNA, 19 nt, Artificial Sequence
  Description of Artificial Sequence: Synthetic oligonucleotide
  Antisense strand to SEQ ID NO: 1805589
auuaucaaccuuuacuuag

SEQ ID NO: 1805591 - RNA, 19 nt, Artificial Sequence
  Description of Artificial Sequence: Synthetic oligonucleotide
  Sense strand starting at position 2445 of SEQ ID NO: 1563239
uugauaaugugucugugau

SEQ ID NO: 1805592 - RNA, 19 nt, Artificial Sequence
  Description of Artificial Sequence: Synthetic oligonucleotide
  Antisense strand to SEQ ID NO: 1805591
aucacagacacauuaucaa

SEQ ID NO: 1805593 - RNA, 19 nt, Artificial Sequence
  Description of Artificial Sequence: Synthetic oligonucleotide
  Sense strand starting at position 2446 of SEQ ID NO: 1563239
ugauaaugugucugugaug

SEQ ID NO: 1805594 - RNA, 19 nt, Artificial Sequence
  Description of Artificial Sequence: Synthetic oligonucleotide
  Antisense strand to SEQ ID NO: 1805593
caucacagacacauuauca

SEQ ID NO: 1805595 - RNA, 19 nt, Artificial Sequence
  Description of Artificial Sequence: Synthetic oligonucleotide
  Sense strand starting at position 2455 of SEQ ID NO: 1563239
gucugugaugcuuaauaug

SEQ ID NO: 1805596 - RNA, 19 nt, Artificial Sequence
  Description of Artificial Sequence: Synthetic oligonucleotide
  Antisense strand to SEQ ID NO: 1805595
cauauuaagcaucacagac

SEQ ID NO: 1805597 - RNA, 19 nt, Artificial Sequence
  Description of Artificial Sequence: Synthetic oligonucleotide
  Sense strand starting at position 2463 of SEQ ID NO: 1563239
ugcuuaauaugacugcuaa

SEQ ID NO: 1805598 - RNA, 19 nt, Artificial Sequence
  Description of Artificial Sequence: Synthetic oligonucleotide
  Antisense strand to SEQ ID NO: 1805597
uuagcagucauauuaagca

SEQ ID NO: 1805599 - RNA, 19 nt, Artificial Sequence
  Description of Artificial Sequence: Synthetic oligonucleotide
  Sense strand starting at position 2464 of SEQ ID NO: 1563239
gcuuaauaugacugcuaaa

SEQ ID NO: 1805600 - RNA, 19 nt, Artificial Sequence
  Description of Artificial Sequence: Synthetic oligonucleotide
  Antisense strand to SEQ ID NO: 1805599
uuuagcagucauauuaagc

SEQ ID NO: 1805601 - RNA, 19 nt, Artificial Sequence
  Description of Artificial Sequence: Synthetic oligonucleotide
  Sense strand starting at position 2618 of SEQ ID NO: 1563239
auuuauaugugucugucau

SEQ ID NO: 1805602 - RNA, 19 nt, Artificial Sequence
  Description of Artificial Sequence: Synthetic oligonucleotide
  Antisense strand to SEQ ID NO: 1805601
augacagacacauauaaau

SEQ ID NO: 1805603 - RNA, 19 nt, Artificial Sequence
  Description of Artificial Sequence: Synthetic oligonucleotide
  Sense strand starting at position 2677 of SEQ ID NO: 1563239
auggaaagccaguaaucuu

SEQ ID NO: 1805604 - RNA, 19 nt, Artificial Sequence
  Description of Artificial Sequence: Synthetic oligonucleotide
  Antisense strand to SEQ ID NO: 1805603
aagauuacuggcuuuccau

SEQ ID NO: 1805605 - RNA, 19 nt, Artificial Sequence
  Description of Artificial Sequence: Synthetic oligonucleotide
  Sense strand starting at position 2680 of SEQ ID NO: 1563239
gaaagccaguaaucuuguu

SEQ ID NO: 1805606 - RNA, 19 nt, Artificial Sequence
  Description of Artificial Sequence: Synthetic oligonucleotide
  Antisense strand to SEQ ID NO: 1805605
aacaagauuacuggcuuuc

SEQ ID NO: 1805607 - RNA, 19 nt, Artificial Sequence
  Description of Artificial Sequence: Synthetic oligonucleotide
  Sense strand starting at position 2730 of SEQ ID NO: 1563239
ggaaguaacaugugaucag

SEQ ID NO: 1805608 - RNA, 19 nt, Artificial Sequence
  Description of Artificial Sequence: Synthetic oligonucleotide
  Antisense strand to SEQ ID NO: 1805607
cugaucacauguuacuucc

SEQ ID NO: 1805609 - RNA, 19 nt, Artificial Sequence
  Description of Artificial Sequence: Synthetic oligonucleotide
  Sense strand starting at position 2968 of SEQ ID NO: 1563239
gggaaaguuuaagaaagga

SEQ ID NO: 1805610 - RNA, 19 nt, Artificial Sequence
  Description of Artificial Sequence: Synthetic oligonucleotide
  Antisense strand to SEQ ID NO: 1805609
uccuuucuuaaacuuuccc

SEQ ID NO: 1805611 - RNA, 19 nt, Artificial Sequence
  Description of Artificial Sequence: Synthetic oligonucleotide
  Sense strand starting at position 3003 of SEQ ID NO: 1563239
uuucgcuuuggauggagaa

SEQ ID NO: 1805612 - RNA, 19 nt, Artificial Sequence
  Description of Artificial Sequence: Synthetic oligonucleotide
  Antisense strand to SEQ ID NO: 1805611
uucuccauccaaagcgaaa

SEQ ID NO: 1805613 - RNA, 19 nt, Artificial Sequence
  Description of Artificial Sequence: Synthetic oligonucleotide
  Sense strand starting at position 3051 of SEQ ID NO: 1563239
ccaguauaaguauaugcau

SEQ ID NO: 1805614 - RNA, 19 nt, Artificial Sequence
  Description of Artificial Sequence: Synthetic oligonucleotide
  Antisense strand to SEQ ID NO: 1805613
augcauauacuuauacugg

SEQ ID NO: 1805615 - RNA, 19 nt, Artificial Sequence
  Description of Artificial Sequence: Synthetic oligonucleotide
  Sense strand starting at position 3151 of SEQ ID NO: 1563239
ugaguuaaguaacuuacua

SEQ ID NO: 1805616 - RNA, 19 nt, Artificial Sequence
  Description of Artificial Sequence: Synthetic oligonucleotide
  Antisense strand to SEQ ID NO: 1805615
uaguaaguuacuuaacuca

SEQ ID NO: 1805617 - RNA, 19 nt, Artificial Sequence
  Description of Artificial Sequence: Synthetic oligonucleotide
  Sense strand starting at position 3233 of SEQ ID NO: 1563239
caugaagucucuucgauca

SEQ ID NO: 1805618 - RNA, 19 nt, Artificial Sequence
  Description of Artificial Sequence: Synthetic oligonucleotide
  Antisense strand to SEQ ID NO: 1805617
ugaucgaagagacuucaug

SEQ ID NO: 1805619 - RNA, 19 nt, Artificial Sequence
  Description of Artificial Sequence: Synthetic oligonucleotide
  Sense strand starting at position 3273 of SEQ ID NO: 1563239
agugaaaggccauaguaug

SEQ ID NO: 1805620 - RNA, 19 nt, Artificial Sequence
  Description of Artificial Sequence: Synthetic oligonucleotide
  Antisense strand to SEQ ID NO: 1805619
cauacuauggccuuucacu

SEQ ID NO: 1805621 - RNA, 19 nt, Artificial Sequence
  Description of Artificial Sequence: Synthetic oligonucleotide
  Sense strand starting at position 3305 of SEQ ID NO: 1563239
agcacaggucuuggaguuu

SEQ ID NO: 1805622 - RNA, 19 nt, Artificial Sequence
  Description of Artificial Sequence: Synthetic oligonucleotide
  Antisense strand to SEQ ID NO: 1805621
aaacuccaagaccugugcu

SEQ ID NO: 1805623 - RNA, 19 nt, Artificial Sequence
  Description of Artificial Sequence: Synthetic oligonucleotide
  Sense strand starting at position 3311 of SEQ ID NO: 1563239
ggucuuggaguuugaauaa

SEQ ID NO: 1805624 - RNA, 19 nt, Artificial Sequence
  Description of Artificial Sequence: Synthetic oligonucleotide
  Antisense strand to SEQ ID NO: 1805623
uuauucaaacuccaagacc

SEQ ID NO: 1805625 - RNA, 19 nt, Artificial Sequence
  Description of Artificial Sequence: Synthetic oligonucleotide
  Sense strand starting at position 3412 of SEQ ID NO: 1563239
agaggacuuguguggcuca

SEQ ID NO: 1805626 - RNA, 19 nt, Artificial Sequence
  Description of Artificial Sequence: Synthetic oligonucleotide
  Antisense strand to SEQ ID NO: 1805625
ugagccacacaaguccucu

SEQ ID NO: 1805627 - RNA, 19 nt, Artificial Sequence
  Description of Artificial Sequence: Synthetic oligonucleotide
  Sense strand starting at position 3415 of SEQ ID NO: 1563239
ggacuuguguggcucagau

SEQ ID NO: 1805628 - RNA, 19 nt, Artificial Sequence
  Description of Artificial Sequence: Synthetic oligonucleotide
  Antisense strand to SEQ ID NO: 1805627
aucugagccacacaagucc

SEQ ID NO: 1805629 - RNA, 19 nt, Artificial Sequence
  Description of Artificial Sequence: Synthetic oligonucleotide
  Sense strand starting at position 3584 of SEQ ID NO: 1563239
uguuaacugcacuguauga

SEQ ID NO: 1805630 - RNA, 19 nt, Artificial Sequence
  Description of Artificial Sequence: Synthetic oligonucleotide
  Antisense strand to SEQ ID NO: 1805629
ucauacagugcaguuaaca

SEQ ID NO: 1805631 - RNA, 19 nt, Artificial Sequence
  Description of Artificial Sequence: Synthetic oligonucleotide
  Sense strand starting at position 3586 of SEQ ID NO: 1563239
uuaacugcacuguaugaaa

SEQ ID NO: 1805632 - RNA, 19 nt, Artificial Sequence
  Description of Artificial Sequence: Synthetic oligonucleotide
  Antisense strand to SEQ ID NO: 1805631
uuucauacagugcaguuaa

SEQ ID NO: 1805633 - RNA, 19 nt, Artificial Sequence
  Description of Artificial Sequence: Synthetic oligonucleotide
  Sense strand starting at position 3976 of SEQ ID NO: 1563239
cugagccuugggcaagaaa

SEQ ID NO: 1805634 - RNA, 19 nt, Artificial Sequence
  Description of Artificial Sequence: Synthetic oligonucleotide
  Antisense strand to SEQ ID NO: 1805633
uuucuugcccaaggcucag

SEQ ID NO: 1805635 - RNA, 19 nt, Artificial Sequence
  Description of Artificial Sequence: Synthetic oligonucleotide
  Sense strand starting at position 109 of SEQ ID NO: 1563240
gaugucauguuaucagaaa

SEQ ID NO: 1805636 - RNA, 19 nt, Artificial Sequence
  Description of Artificial Sequence: Synthetic oligonucleotide
  Antisense strand to SEQ ID NO: 1805635
uuucugauaacaugacauc

SEQ ID NO: 1805637 - RNA, 19 nt, Artificial Sequence
  Description of Artificial Sequence: Synthetic oligonucleotide
  Sense strand starting at position 200 of SEQ ID NO: 1563240
agcaauauucuguaauugu

SEQ ID NO: 1805638 - RNA, 19 nt, Artificial Sequence
  Description of Artificial Sequence: Synthetic oligonucleotide
  Antisense strand to SEQ ID NO: 1805637
acaauuacagaauauugcu

SEQ ID NO: 1805639 - RNA, 19 nt, Artificial Sequence
  Description of Artificial Sequence: Synthetic oligonucleotide
  Sense strand starting at position 236 of SEQ ID NO: 1563240
caguaaugauuggucauua

SEQ ID NO: 1805640 - RNA, 19 nt, Artificial Sequence
  Description of Artificial Sequence: Synthetic oligonucleotide
  Antisense strand to SEQ ID NO: 1805639
uaaugaccaaucauuacug

SEQ ID NO: 1805641 - RNA, 19 nt, Artificial Sequence
  Description of Artificial Sequence: Synthetic oligonucleotide
  Sense strand starting at position 237 of SEQ ID NO: 1563240
aguaaugauuggucauuau

SEQ ID NO: 1805642 - RNA, 19 nt, Artificial Sequence
  Description of Artificial Sequence: Synthetic oligonucleotide
  Antisense strand to SEQ ID NO: 1805641
auaaugaccaaucauuacu

SEQ ID NO: 1805643 - RNA, 19 nt, Artificial Sequence
  Description of Artificial Sequence: Synthetic oligonucleotide
  Sense strand starting at position 313 of SEQ ID NO: 1563240
guuugugaugcagugcuuu

SEQ ID NO: 1805644 - RNA, 19 nt, Artificial Sequence
  Description of Artificial Sequence: Synthetic oligonucleotide
  Antisense strand to SEQ ID NO: 1805643
aaagcacugcaucacaaac

SEQ ID NO: 1805645 - RNA, 19 nt, Artificial Sequence
  Description of Artificial Sequence: Synthetic oligonucleotide
  Sense strand starting at position 342 of SEQ ID NO: 1563240
guuaauuugcaauguguca

SEQ ID NO: 1805646 - RNA, 19 nt, Artificial Sequence
  Description of Artificial Sequence: Synthetic oligonucleotide
  Antisense strand to SEQ ID NO: 1805645
ugacacauugcaaauuaac

SEQ ID NO: 1805647 - RNA, 19 nt, Artificial Sequence
  Description of Artificial Sequence: Synthetic oligonucleotide
  Sense strand starting at position 351 of SEQ ID NO: 1563240
caaugugucaguuaacgag

SEQ ID NO: 1805648 - RNA, 19 nt, Artificial Sequence
  Description of Artificial Sequence: Synthetic oligonucleotide
  Antisense strand to SEQ ID NO: 1805647
cucguuaacugacacauug

SEQ ID NO: 1805649 - RNA, 19 nt, Artificial Sequence
  Description of Artificial Sequence: Synthetic oligonucleotide
  Sense strand starting at position 616 of SEQ ID NO: 1563240
auguaaauaguacgguaaa

SEQ ID NO: 1805650 - RNA, 19 nt, Artificial Sequence
  Description of Artificial Sequence: Synthetic oligonucleotide
  Antisense strand to SEQ ID NO: 1805649
uuuaccguacuauuuacau

SEQ ID NO: 1805651 - RNA, 19 nt, Artificial Sequence
  Description of Artificial Sequence: Synthetic oligonucleotide
  Sense strand starting at position 688 of SEQ ID NO: 1563240
acauuugauugacagagca

SEQ ID NO: 1805652 - RNA, 19 nt, Artificial Sequence
  Description of Artificial Sequence: Synthetic oligonucleotide
  Antisense strand to SEQ ID NO: 1805651
ugcucugucaaucaaaugu

SEQ ID NO: 1805653 - RNA, 19 nt, Artificial Sequence
  Description of Artificial Sequence: Synthetic oligonucleotide
  Sense strand starting at position 887 of SEQ ID NO: 1563240
ccugauaaagugcaaucau

SEQ ID NO: 1805654 - RNA, 19 nt, Artificial Sequence
  Description of Artificial Sequence: Synthetic oligonucleotide
  Antisense strand to SEQ ID NO: 1805653
augauugcacuuuaucagg

SEQ ID NO: 1805655 - RNA, 19 nt, Artificial Sequence
  Description of Artificial Sequence: Synthetic oligonucleotide
  Sense strand starting at position 897 of SEQ ID NO: 1563240
ugcaaucauccagaugcuu

SEQ ID NO: 1805656 - RNA, 19 nt, Artificial Sequence
  Description of Artificial Sequence: Synthetic oligonucleotide
  Antisense strand to SEQ ID NO: 1805655
aagcaucuggaugauugca

SEQ ID NO: 1805657 - RNA, 19 nt, Artificial Sequence
  Description of Artificial Sequence: Synthetic oligonucleotide
  Sense strand starting at position 979 of SEQ ID NO: 1563240
uuacaucuaugauugguau

SEQ ID NO: 1805658 - RNA, 19 nt, Artificial Sequence
  Description of Artificial Sequence: Synthetic oligonucleotide
  Antisense strand to SEQ ID NO: 1805657
auaccaaucauagauguaa

SEQ ID NO: 1805659 - RNA, 19 nt, Artificial Sequence
  Description of Artificial Sequence: Synthetic oligonucleotide
  Sense strand starting at position 1017 of SEQ ID NO: 1563240
uauacuccucaguggaagu

SEQ ID NO: 1805660 - RNA, 19 nt, Artificial Sequence
  Description of Artificial Sequence: Synthetic oligonucleotide
  Antisense strand to SEQ ID NO: 1805659
acuuccacugaggaguaua

SEQ ID NO: 1805661 - RNA, 19 nt, Artificial Sequence
  Description of Artificial Sequence: Synthetic oligonucleotide
  Sense strand starting at position 1240 of SEQ ID NO: 1563240
cugcaaauucugggacuua

SEQ ID NO: 1805662 - RNA, 19 nt, Artificial Sequence
  Description of Artificial Sequence: Synthetic oligonucleotide
  Antisense strand to SEQ ID NO: 1805661
uaagucccagaauuugcag

SEQ ID NO: 1805663 - RNA, 19 nt, Artificial Sequence
  Description of Artificial Sequence: Synthetic oligonucleotide
  Sense strand starting at position 1251 of SEQ ID NO: 1563240
gggacuuauccaugucuau

SEQ ID NO: 1805664 - RNA, 19 nt, Artificial Sequence
  Description of Artificial Sequence: Synthetic oligonucleotide
  Antisense strand to SEQ ID NO: 1805663
auagacauggauaaguccc

SEQ ID NO: 1805665 - RNA, 19 nt, Artificial Sequence
  Description of Artificial Sequence: Synthetic oligonucleotide
  Sense strand starting at position 1255 of SEQ ID NO: 1563240
cuuauccaugucuauguua

SEQ ID NO: 1805666 - RNA, 19 nt, Artificial Sequence
  Description of Artificial Sequence: Synthetic oligonucleotide
  Antisense strand to SEQ ID NO: 1805665
uaacauagacauggauaag

SEQ ID NO: 1805667 - RNA, 19 nt, Artificial Sequence
  Description of Artificial Sequence: Synthetic oligonucleotide
  Sense strand starting at position 1263 of SEQ ID NO: 1563240
ugucuauguuaaucugaag

SEQ ID NO: 1805668 - RNA, 19 nt, Artificial Sequence
  Description of Artificial Sequence: Synthetic oligonucleotide
  Antisense strand to SEQ ID NO: 1805667
cuucagauuaacauagaca

SEQ ID NO: 1805669 - RNA, 19 nt, Artificial Sequence
  Description of Artificial Sequence: Synthetic oligonucleotide
  Sense strand starting at position 1408 of SEQ ID NO: 1563240
gcguacauagugcuuacua

SEQ ID NO: 1805670 - RNA, 19 nt, Artificial Sequence
  Description of Artificial Sequence: Synthetic oligonucleotide
  Antisense strand to SEQ ID NO: 1805669
uaguaagcacuauguacgc

SEQ ID NO: 1805671 - RNA, 19 nt, Artificial Sequence
  Description of Artificial Sequence: Synthetic oligonucleotide
  Sense strand starting at position 1681 of SEQ ID NO: 1563240
gguuucuaccaucauccau

SEQ ID NO: 1805672 - RNA, 19 nt, Artificial Sequence
  Description of Artificial Sequence: Synthetic oligonucleotide
  Antisense strand to SEQ ID NO: 1805671
auggaugaugguagaaacc

SEQ ID NO: 1805673 - RNA, 19 nt, Artificial Sequence
  Description of Artificial Sequence: Synthetic oligonucleotide
  Sense strand starting at position 2010 of SEQ ID NO: 1563240
uacucaggauuaguuaaga

SEQ ID NO: 1805674 - RNA, 19 nt, Artificial Sequence
  Description of Artificial Sequence: Synthetic oligonucleotide
  Antisense strand to SEQ ID NO: 1805673
ucuuaacuaauccugagua

SEQ ID NO: 1805675 - RNA, 19 nt, Artificial Sequence
  Description of Artificial Sequence: Synthetic oligonucleotide
  Sense strand starting at position 2226 of SEQ ID NO: 1563240
gucauagacuucuuaacag

SEQ ID NO: 1805676 - RNA, 19 nt, Artificial Sequence
  Description of Artificial Sequence: Synthetic oligonucleotide
  Antisense strand to SEQ ID NO: 1805675
cuguuaagaagucuaugac

SEQ ID NO: 1805677 - RNA, 19 nt, Artificial Sequence
  Description of Artificial Sequence: Synthetic oligonucleotide
  Sense strand starting at position 2506 of SEQ ID NO: 1563240
ucaagucuacauggcauaa

SEQ ID NO: 1805678 - RNA, 19 nt, Artificial Sequence
  Description of Artificial Sequence: Synthetic oligonucleotide
  Antisense strand to SEQ ID NO: 1805677
uuaugccauguagacuuga

SEQ ID NO: 1805679 - RNA, 19 nt, Artificial Sequence
  Description of Artificial Sequence: Synthetic oligonucleotide
  Sense strand starting at position 2536 of SEQ ID NO: 1563240
caugcugaugguuauuaaa

SEQ ID NO: 1805680 - RNA, 19 nt, Artificial Sequence
  Description of Artificial Sequence: Synthetic oligonucleotide
  Antisense strand to SEQ ID NO: 1805679
uuuaauaaccaucagcaug

SEQ ID NO: 1805681 - RNA, 19 nt, Artificial Sequence
  Description of Artificial Sequence: Synthetic oligonucleotide
  Sense strand starting at position 2613 of SEQ ID NO: 1563240
uagggucuugagggaaauc

SEQ ID NO: 1805682 - RNA, 19 nt, Artificial Sequence
  Description of Artificial Sequence: Synthetic oligonucleotide
  Antisense strand to SEQ ID NO: 1805681
gauuucccucaagacccua

SEQ ID NO: 1805683 - RNA, 19 nt, Artificial Sequence
  Description of Artificial Sequence: Synthetic oligonucleotide
  Sense strand starting at position 2632 of SEQ ID NO: 1563240
aggccaagacucuggaauu

SEQ ID NO: 1805684 - RNA, 19 nt, Artificial Sequence
  Description of Artificial Sequence: Synthetic oligonucleotide
  Antisense strand to SEQ ID NO: 1805683
aauuccagagucuuggccu

SEQ ID NO: 1805685 - RNA, 19 nt, Artificial Sequence
  Description of Artificial Sequence: Synthetic oligonucleotide
  Sense strand starting at position 2638 of SEQ ID NO: 1563240
agacucuggaauugaaguu

SEQ ID NO: 1805686 - RNA, 19 nt, Artificial Sequence
  Description of Artificial Sequence: Synthetic oligonucleotide
  Antisense strand to SEQ ID NO: 1805685
aacuucaauuccagagucu

SEQ ID NO: 1805687 - RNA, 19 nt, Artificial Sequence
  Description of Artificial Sequence: Synthetic oligonucleotide
  Sense strand starting at position 2710 of SEQ ID NO: 1563240
uccauuagauaauuguuga

SEQ ID NO: 1805688 - RNA, 19 nt, Artificial Sequence
  Description of Artificial Sequence: Synthetic oligonucleotide
  Antisense strand to SEQ ID NO: 1805687
ucaacaauuaucuaaugga

SEQ ID NO: 1805689 - RNA, 19 nt, Artificial Sequence
  Description of Artificial Sequence: Synthetic oligonucleotide
  Sense strand starting at position 2721 of SEQ ID NO: 1563240
auuguugaugcugauguaa

SEQ ID NO: 1805690 - RNA, 19 nt, Artificial Sequence
  Description of Artificial Sequence: Synthetic oligonucleotide
  Antisense strand to SEQ ID NO: 1805689
uuacaucagcaucaacaau

SEQ ID NO: 1805691 - RNA, 19 nt, Artificial Sequence
  Description of Artificial Sequence: Synthetic oligonucleotide
  Sense strand starting at position 2844 of SEQ ID NO: 1563240
agaccucaguuuccucaua

SEQ ID NO: 1805692 - RNA, 19 nt, Artificial Sequence
  Description of Artificial Sequence: Synthetic oligonucleotide
  Antisense strand to SEQ ID NO: 1805691
uaugaggaaacugaggucu

SEQ ID NO: 1805693 - RNA, 19 nt, Artificial Sequence
  Description of Artificial Sequence: Synthetic oligonucleotide
  Sense strand starting at position 2902 of SEQ ID NO: 1563240
gguugcugugaagaucuaa

SEQ ID NO: 1805694 - RNA, 19 nt, Artificial Sequence
  Description of Artificial Sequence: Synthetic oligonucleotide
  Antisense strand to SEQ ID NO: 1805693
uuagaucuucacagcaacc

SEQ ID NO: 1805695 - RNA, 19 nt, Artificial Sequence
  Description of Artificial Sequence: Synthetic oligonucleotide
  Sense strand starting at position 2921 of SEQ ID NO: 1563240
uaaagaugugcauggaaga

SEQ ID NO: 1805696 - RNA, 19 nt, Artificial Sequence
  Description of Artificial Sequence: Synthetic oligonucleotide
  Antisense strand to SEQ ID NO: 1805695
ucuuccaugcacaucuuua

SEQ ID NO: 1805697 - RNA, 19 nt, Artificial Sequence
  Description of Artificial Sequence: Synthetic oligonucleotide
  Sense strand starting at position 2998 of SEQ ID NO: 1563240
agccuaagacaugaguuua

SEQ ID NO: 1805698 - RNA, 19 nt, Artificial Sequence
  Description of Artificial Sequence: Synthetic oligonucleotide
  Antisense strand to SEQ ID NO: 1805697
uaaacucaugucuuaggcu

SEQ ID NO: 1805699 - RNA, 19 nt, Artificial Sequence
  Description of Artificial Sequence: Synthetic oligonucleotide
  Sense strand starting at position 3098 of SEQ ID NO: 1563240
ugaauugaaucacugaagu

SEQ ID NO: 1805700 - RNA, 19 nt, Artificial Sequence
  Description of Artificial Sequence: Synthetic oligonucleotide
  Antisense strand to SEQ ID NO: 1805699
acuucagugauucaauuca

SEQ ID NO: 1805701 - RNA, 19 nt, Artificial Sequence
  Description of Artificial Sequence: Synthetic oligonucleotide
  Sense strand starting at position 3108 of SEQ ID NO: 1563240
cacugaaguguguaggauu

SEQ ID NO: 1805702 - RNA, 19 nt, Artificial Sequence
  Description of Artificial Sequence: Synthetic oligonucleotide
  Antisense strand to SEQ ID NO: 1805701
aauccuacacacuucagug

SEQ ID NO: 1805703 - RNA, 19 nt, Artificial Sequence
  Description of Artificial Sequence: Synthetic oligonucleotide
  Sense strand starting at position 3186 of SEQ ID NO: 1563240
uguggaaaucccuaccuca

SEQ ID NO: 1805704 - RNA, 19 nt, Artificial Sequence
  Description of Artificial Sequence: Synthetic oligonucleotide
  Antisense strand to SEQ ID NO: 1805703
ugagguagggauuuccaca

SEQ ID NO: 1805705 - RNA, 19 nt, Artificial Sequence
  Description of Artificial Sequence: Synthetic oligonucleotide
  Sense strand starting at position 3206 of SEQ ID NO: 1563240
auccaaaccuggucuagaa

SEQ ID NO: 1805706 - RNA, 19 nt, Artificial Sequence
  Description of Artificial Sequence: Synthetic oligonucleotide
  Antisense strand to SEQ ID NO: 1805705
uucuagaccagguuuggau

SEQ ID NO: 1805707 - RNA, 19 nt, Artificial Sequence
  Description of Artificial Sequence: Synthetic oligonucleotide
  Sense strand starting at position 3422 of SEQ ID NO: 1563240
cgugaugaacuuugaucag

SEQ ID NO: 1805708 - RNA, 19 nt, Artificial Sequence
  Description of Artificial Sequence: Synthetic oligonucleotide
  Antisense strand to SEQ ID NO: 1805707
cugaucaaaguucaucacg

SEQ ID NO: 1805709 - RNA, 19 nt, Artificial Sequence
  Description of Artificial Sequence: Synthetic oligonucleotide
  Sense strand starting at position 3425 of SEQ ID NO: 1563240
gaugaacuuugaucaguca

SEQ ID NO: 1805710 - RNA, 19 nt, Artificial Sequence
  Description of Artificial Sequence: Synthetic oligonucleotide
  Antisense strand to SEQ ID NO: 1805709
ugacugaucaaaguucauc

SEQ ID NO: 1805711 - RNA, 19 nt, Artificial Sequence
  Description of Artificial Sequence: Synthetic oligonucleotide
  Sense strand starting at position 3428 of SEQ ID NO: 1563240
gaacuuugaucagucaagu

SEQ ID NO: 1805712 - RNA, 19 nt, Artificial Sequence
  Description of Artificial Sequence: Synthetic oligonucleotide
  Antisense strand to SEQ ID NO: 1805711
acuugacugaucaaaguuc

SEQ ID NO: 1805713 - RNA, 19 nt, Artificial Sequence
  Description of Artificial Sequence: Synthetic oligonucleotide
  Sense strand starting at position 3621 of SEQ ID NO: 1563240
gucacagauuuguucacgu

SEQ ID NO: 1805714 - RNA, 19 nt, Artificial Sequence
  Description of Artificial Sequence: Synthetic oligonucleotide
  Antisense strand to SEQ ID NO: 1805713
acgugaacaaaucugugac

SEQ ID NO: 1805715 - RNA, 19 nt, Artificial Sequence
  Description of Artificial Sequence: Synthetic oligonucleotide
  Sense strand starting at position 127 of SEQ ID NO: 1563242
aauuguaacgugcaaaucu

SEQ ID NO: 1805716 - RNA, 19 nt, Artificial Sequence
  Description of Artificial Sequence: Synthetic oligonucleotide
  Antisense strand to SEQ ID NO: 1805715
agauuugcacguuacaauu

SEQ ID NO: 1805717 - RNA, 19 nt, Artificial Sequence
  Description of Artificial Sequence: Synthetic oligonucleotide
  Sense strand starting at position 210 of SEQ ID NO: 1563242
acagcuuugaagggaguau

SEQ ID NO: 1805718 - RNA, 19 nt, Artificial Sequence
  Description of Artificial Sequence: Synthetic oligonucleotide
  Antisense strand to SEQ ID NO: 1805717
auacucccuucaaagcugu

SEQ ID NO: 1805719 - RNA, 19 nt, Artificial Sequence
  Description of Artificial Sequence: Synthetic oligonucleotide
  Sense strand starting at position 263 of SEQ ID NO: 1563242
agauuuccaugucauuaga

SEQ ID NO: 1805720 - RNA, 19 nt, Artificial Sequence
  Description of Artificial Sequence: Synthetic oligonucleotide
  Antisense strand to SEQ ID NO: 1805719
ucuaaugacauggaaaucu

SEQ ID NO: 1805721 - RNA, 19 nt, Artificial Sequence
  Description of Artificial Sequence: Synthetic oligonucleotide
  Sense strand starting at position 543 of SEQ ID NO: 1563242
accucugcagaauguuaaa

SEQ ID NO: 1805722 - RNA, 19 nt, Artificial Sequence
  Description of Artificial Sequence: Synthetic oligonucleotide
  Antisense strand to SEQ ID NO: 1805721
uuuaacauucugcagaggu

SEQ ID NO: 1805723 - RNA, 19 nt, Artificial Sequence
  Description of Artificial Sequence: Synthetic oligonucleotide
  Sense strand starting at position 561 of SEQ ID NO: 1563242
auggcucuucgugaaucaa

SEQ ID NO: 1805724 - RNA, 19 nt, Artificial Sequence
  Description of Artificial Sequence: Synthetic oligonucleotide
  Antisense strand to SEQ ID NO: 1805723
uugauucacgaagagccau

SEQ ID NO: 1805725 - RNA, 19 nt, Artificial Sequence
  Description of Artificial Sequence: Synthetic oligonucleotide
  Sense strand starting at position 586 of SEQ ID NO: 1563242
guggguugcccacaugaaa

SEQ ID NO: 1805726 - RNA, 19 nt, Artificial Sequence
  Description of Artificial Sequence: Synthetic oligonucleotide
  Antisense strand to SEQ ID NO: 1805725
uuucaugugggcaacccac

SEQ ID NO: 1805727 - RNA, 19 nt, Artificial Sequence
  Description of Artificial Sequence: Synthetic oligonucleotide
  Sense strand starting at position 739 of SEQ ID NO: 1563242
guuuccugagcucacauau

SEQ ID NO: 1805728 - RNA, 19 nt, Artificial Sequence
  Description of Artificial Sequence: Synthetic oligonucleotide
  Antisense strand to SEQ ID NO: 1805727
auaugugagcucaggaaac

SEQ ID NO: 1805729 - RNA, 19 nt, Artificial Sequence
  Description of Artificial Sequence: Synthetic oligonucleotide
  Sense strand starting at position 778 of SEQ ID NO: 1563242
uucuauugucaggaagcuu

SEQ ID NO: 1805730 - RNA, 19 nt, Artificial Sequence
  Description of Artificial Sequence: Synthetic oligonucleotide
  Antisense strand to SEQ ID NO: 1805729
aagcuuccugacaauagaa

SEQ ID NO: 1805731 - RNA, 19 nt, Artificial Sequence
  Description of Artificial Sequence: Synthetic oligonucleotide
  Sense strand starting at position 789 of SEQ ID NO: 1563242
ggaagcuuggagcauaauu

SEQ ID NO: 1805732 - RNA, 19 nt, Artificial Sequence
  Description of Artificial Sequence: Synthetic oligonucleotide
  Antisense strand to SEQ ID NO: 1805731
aauuaugcuccaagcuucc

SEQ ID NO: 1805733 - RNA, 19 nt, Artificial Sequence
  Description of Artificial Sequence: Synthetic oligonucleotide
  Sense strand starting at position 873 of SEQ ID NO: 1563242
uaagaagauucuguuggua

SEQ ID NO: 1805734 - RNA, 19 nt, Artificial Sequence
  Description of Artificial Sequence: Synthetic oligonucleotide
  Antisense strand to SEQ ID NO: 1805733
uaccaacagaaucuucuua

SEQ ID NO: 1805735 - RNA, 19 nt, Artificial Sequence
  Description of Artificial Sequence: Synthetic oligonucleotide
  Sense strand starting at position 876 of SEQ ID NO: 1563242
gaagauucuguugguacau

SEQ ID NO: 1805736 - RNA, 19 nt, Artificial Sequence
  Description of Artificial Sequence: Synthetic oligonucleotide
  Antisense strand to SEQ ID NO: 1805735
auguaccaacagaaucuuc

SEQ ID NO: 1805737 - RNA, 19 nt, Artificial Sequence
  Description of Artificial Sequence: Synthetic oligonucleotide
  Sense strand starting at position 954 of SEQ ID NO: 1563242
uugaaugugccagagaauc

SEQ ID NO: 1805738 - RNA, 19 nt, Artificial Sequence
  Description of Artificial Sequence: Synthetic oligonucleotide
  Antisense strand to SEQ ID NO: 1805737
gauucucuggcacauucaa

SEQ ID NO: 1805739 - RNA, 19 nt, Artificial Sequence
  Description of Artificial Sequence: Synthetic oligonucleotide
  Sense strand starting at position 1271 of SEQ ID NO: 1563242
cugugaucccgaugaaagg

SEQ ID NO: 1805740 - RNA, 19 nt, Artificial Sequence
  Description of Artificial Sequence: Synthetic oligonucleotide
  Antisense strand to SEQ ID NO: 1805739
ccuuucaucgggaucacag

SEQ ID NO: 1805741 - RNA, 19 nt, Artificial Sequence
  Description of Artificial Sequence: Synthetic oligonucleotide
  Sense strand starting at position 2582 of SEQ ID NO: 1563242
gaugaaugcgcugaaagug

SEQ ID NO: 1805742 - RNA, 19 nt, Artificial Sequence
  Description of Artificial Sequence: Synthetic oligonucleotide
  Antisense strand to SEQ ID NO: 1805741
cacuuucagcgcauucauc

SEQ ID NO: 1805743 - RNA, 19 nt, Artificial Sequence
  Description of Artificial Sequence: Synthetic oligonucleotide
  Sense strand starting at position 2714 of SEQ ID NO: 1563242
aucagauuccgauacgaua

SEQ ID NO: 1805744 - RNA, 19 nt, Artificial Sequence
  Description of Artificial Sequence: Synthetic oligonucleotide
  Antisense strand to SEQ ID NO: 1805743
uaucguaucggaaucugau

SEQ ID NO: 1805745 - RNA, 19 nt, Artificial Sequence
  Description of Artificial Sequence: Synthetic oligonucleotide
  Sense strand starting at position 3091 of SEQ ID NO: 1563242
gaaucuuagggcugcagaa

SEQ ID NO: 1805746 - RNA, 19 nt, Artificial Sequence
  Description of Artificial Sequence: Synthetic oligonucleotide
  Antisense strand to SEQ ID NO: 1805745
uucugcagcccuaagauuc

SEQ ID NO: 1805747 - RNA, 19 nt, Artificial Sequence
  Description of Artificial Sequence: Synthetic oligonucleotide
  Sense strand starting at position 3139 of SEQ ID NO: 1563242
ccaggcucagggcauuaau

SEQ ID NO: 1805748 - RNA, 19 nt, Artificial Sequence
  Description of Artificial Sequence: Synthetic oligonucleotide
  Antisense strand to SEQ ID NO: 1805747
auuaaugcccugagccugg

SEQ ID NO: 1805749 - RNA, 19 nt, Artificial Sequence
  Description of Artificial Sequence: Synthetic oligonucleotide
  Sense strand starting at position 3149 of SEQ ID NO: 1563242
ggcauuaauuacucuauga

SEQ ID NO: 1805750 - RNA, 19 nt, Artificial Sequence
  Description of Artificial Sequence: Synthetic oligonucleotide
  Antisense strand to SEQ ID NO: 1805749
ucauagaguaauuaaugcc

SEQ ID NO: 1805751 - RNA, 19 nt, Artificial Sequence
  Description of Artificial Sequence: Synthetic oligonucleotide
  Sense strand starting at position 3181 of SEQ ID NO: 1563242
ccauucuagcuguagaauu

SEQ ID NO: 1805752 - RNA, 19 nt, Artificial Sequence
  Description of Artificial Sequence: Synthetic oligonucleotide
  Antisense strand to SEQ ID NO: 1805751
aauucuacagcuagaaugg

SEQ ID NO: 1805753 - RNA, 19 nt, Artificial Sequence
  Description of Artificial Sequence: Synthetic oligonucleotide
  Sense strand starting at position 3201 of SEQ ID NO: 1563242
acagaaauagcugguaguu

SEQ ID NO: 1805754 - RNA, 19 nt, Artificial Sequence
  Description of Artificial Sequence: Synthetic oligonucleotide
  Antisense strand to SEQ ID NO: 1805753
aacuaccagcuauuucugu

SEQ ID NO: 1805755 - RNA, 19 nt, Artificial Sequence
  Description of Artificial Sequence: Synthetic oligonucleotide
  Sense strand starting at position 3207 of SEQ ID NO: 1563242
auagcugguaguuauugaa

SEQ ID NO: 1805756 - RNA, 19 nt, Artificial Sequence
  Description of Artificial Sequence: Synthetic oligonucleotide
  Antisense strand to SEQ ID NO: 1805755
uucaauaacuaccagcuau

SEQ ID NO: 1805757 - RNA, 19 nt, Artificial Sequence
  Description of Artificial Sequence: Synthetic oligonucleotide
  Sense strand starting at position 3241 of SEQ ID NO: 1563242
uggcauauuccaggcauuu

SEQ ID NO: 1805758 - RNA, 19 nt, Artificial Sequence
  Description of Artificial Sequence: Synthetic oligonucleotide
  Antisense strand to SEQ ID NO: 1805757
aaaugccuggaauaugcca

SEQ ID NO: 1805759 - RNA, 19 nt, Artificial Sequence
  Description of Artificial Sequence: Synthetic oligonucleotide
  Sense strand starting at position 3407 of SEQ ID NO: 1563242
gcuggugaauggcuaagaa

SEQ ID NO: 1805760 - RNA, 19 nt, Artificial Sequence
  Description of Artificial Sequence: Synthetic oligonucleotide
  Antisense strand to SEQ ID NO: 1805759
uucuuagccauucaccagc

SEQ ID NO: 1805761 - RNA, 19 nt, Artificial Sequence
  Description of Artificial Sequence: Synthetic oligonucleotide
  Sense strand starting at position 3448 of SEQ ID NO: 1563242
gguacaaauccuggcuaaa

SEQ ID NO: 1805762 - RNA, 19 nt, Artificial Sequence
  Description of Artificial Sequence: Synthetic oligonucleotide
  Antisense strand to SEQ ID NO: 1805761
uuuagccaggauuuguacc

SEQ ID NO: 1805763 - RNA, 19 nt, Artificial Sequence
  Description of Artificial Sequence: Synthetic oligonucleotide
  Sense strand starting at position 3475 of SEQ ID NO: 1563242
gguugugcuaaggauuaaa

SEQ ID NO: 1805764 - RNA, 19 nt, Artificial Sequence
  Description of Artificial Sequence: Synthetic oligonucleotide
  Antisense strand to SEQ ID NO: 1805763
uuuaauccuuagcacaacc

SEQ ID NO: 1805765 - RNA, 19 nt, Artificial Sequence
  Description of Artificial Sequence: Synthetic oligonucleotide
  Sense strand starting at position 3487 of SEQ ID NO: 1563242
gauuaaaugagguggugaa

SEQ ID NO: 1805766 - RNA, 19 nt, Artificial Sequence
  Description of Artificial Sequence: Synthetic oligonucleotide
  Antisense strand to SEQ ID NO: 1805765
uucaccaccucauuuaauc

SEQ ID NO: 1805767 - RNA, 19 nt, Artificial Sequence
  Description of Artificial Sequence: Synthetic oligonucleotide
  Sense strand starting at position 3539 of SEQ ID NO: 1563242
gggaccauuacugguuaau

SEQ ID NO: 1805768 - RNA, 19 nt, Artificial Sequence
  Description of Artificial Sequence: Synthetic oligonucleotide
  Antisense strand to SEQ ID NO: 1805767
auuaaccaguaaugguccc

SEQ ID NO: 1805769 - RNA, 19 nt, Artificial Sequence
  Description of Artificial Sequence: Synthetic oligonucleotide
  Sense strand starting at position 3545 of SEQ ID NO: 1563242
auuacugguuaaucuagua

SEQ ID NO: 1805770 - RNA, 19 nt, Artificial Sequence
  Description of Artificial Sequence: Synthetic oligonucleotide
  Antisense strand to SEQ ID NO: 1805769
uacuagauuaaccaguaau

SEQ ID NO: 1805771 - RNA, 19 nt, Artificial Sequence
  Description of Artificial Sequence: Synthetic oligonucleotide
  Sense strand starting at position 3557 of SEQ ID NO: 1563242
ucuaguaacggcuaaggaa

SEQ ID NO: 1805772 - RNA, 19 nt, Artificial Sequence
  Description of Artificial Sequence: Synthetic oligonucleotide
  Antisense strand to SEQ ID NO: 1805771
uuccuuagccguuacuaga

SEQ ID NO: 1805773 - RNA, 19 nt, Artificial Sequence
  Description of Artificial Sequence: Synthetic oligonucleotide
  Sense strand starting at position 3586 of SEQ ID NO: 1563242
cugugaggucaggagguua

SEQ ID NO: 1805774 - RNA, 19 nt, Artificial Sequence
  Description of Artificial Sequence: Synthetic oligonucleotide
  Antisense strand to SEQ ID NO: 1805773
uaaccuccugaccucacag

SEQ ID NO: 1805775 - RNA, 19 nt, Artificial Sequence
  Description of Artificial Sequence: Synthetic oligonucleotide
  Sense strand starting at position 3598 of SEQ ID NO: 1563242
gagguuacugucuauucca

SEQ ID NO: 1805776 - RNA, 19 nt, Artificial Sequence
  Description of Artificial Sequence: Synthetic oligonucleotide
  Antisense strand to SEQ ID NO: 1805775
uggaauagacaguaaccuc

SEQ ID NO: 1805777 - RNA, 19 nt, Artificial Sequence
  Description of Artificial Sequence: Synthetic oligonucleotide
  Sense strand starting at position 3720 of SEQ ID NO: 1563242
aggagucuuccaggaucug

SEQ ID NO: 1805778 - RNA, 19 nt, Artificial Sequence
  Description of Artificial Sequence: Synthetic oligonucleotide
  Antisense strand to SEQ ID NO: 1805777
cagauccuggaagacuccu

SEQ ID NO: 1805779 - RNA, 19 nt, Artificial Sequence
  Description of Artificial Sequence: Synthetic oligonucleotide
  Sense strand starting at position 3739 of SEQ ID NO: 1563242
auggguaaacccugaugca

SEQ ID NO: 1805780 - RNA, 19 nt, Artificial Sequence
  Description of Artificial Sequence: Synthetic oligonucleotide
  Antisense strand to SEQ ID NO: 1805779
ugcaucaggguuuacccau

SEQ ID NO: 1805781 - RNA, 19 nt, Artificial Sequence
  Description of Artificial Sequence: Synthetic oligonucleotide
  Sense strand starting at position 3740 of SEQ ID NO: 1563242
uggguaaacccugaugcau

SEQ ID NO: 1805782 - RNA, 19 nt, Artificial Sequence
  Description of Artificial Sequence: Synthetic oligonucleotide
  Antisense strand to SEQ ID NO: 1805781
augcaucaggguuuaccca

SEQ ID NO: 1805783 - RNA, 19 nt, Artificial Sequence
  Description of Artificial Sequence: Synthetic oligonucleotide
  Sense strand starting at position 3785 of SEQ ID NO: 1563242
agaagcauguaaccucuua

SEQ ID NO: 1805784 - RNA, 19 nt, Artificial Sequence
  Description of Artificial Sequence: Synthetic oligonucleotide
  Antisense strand to SEQ ID NO: 1805783
uaagagguuacaugcuucu

SEQ ID NO: 1805785 - RNA, 19 nt, Artificial Sequence
  Description of Artificial Sequence: Synthetic oligonucleotide
  Sense strand starting at position 3873 of SEQ ID NO: 1563242
gcuacaaugccauaugcaa

SEQ ID NO: 1805786 - RNA, 19 nt, Artificial Sequence
  Description of Artificial Sequence: Synthetic oligonucleotide
  Antisense strand to SEQ ID NO: 1805785
uugcauauggcauuguagc

SEQ ID NO: 1805787 - RNA, 19 nt, Artificial Sequence
  Description of Artificial Sequence: Synthetic oligonucleotide
  Sense strand starting at position 3880 of SEQ ID NO: 1563242
ugccauaugcaauaagacu

SEQ ID NO: 1805788 - RNA, 19 nt, Artificial Sequence
  Description of Artificial Sequence: Synthetic oligonucleotide
  Antisense strand to SEQ ID NO: 1805787
agucuuauugcauauggca

SEQ ID NO: 1805789 - RNA, 19 nt, Artificial Sequence
  Description of Artificial Sequence: Synthetic oligonucleotide
  Sense strand starting at position 3898 of SEQ ID NO: 1563242
ugucuucuagcucaagaau

SEQ ID NO: 1805790 - RNA, 19 nt, Artificial Sequence
  Description of Artificial Sequence: Synthetic oligonucleotide
  Antisense strand to SEQ ID NO: 1805789
auucuugagcuagaagaca

SEQ ID NO: 1805791 - RNA, 19 nt, Artificial Sequence
  Description of Artificial Sequence: Synthetic oligonucleotide
  Sense strand starting at position 3901 of SEQ ID NO: 1563242
cuucuagcucaagaauagu

SEQ ID NO: 1805792 - RNA, 19 nt, Artificial Sequence
  Description of Artificial Sequence: Synthetic oligonucleotide
  Antisense strand to SEQ ID NO: 1805791
acuauucuugagcuagaag

SEQ ID NO: 1805793 - RNA, 19 nt, Artificial Sequence
  Description of Artificial Sequence: Synthetic oligonucleotide
  Sense strand starting at position 3907 of SEQ ID NO: 1563242
gcucaagaauaguucucaa

SEQ ID NO: 1805794 - RNA, 19 nt, Artificial Sequence
  Description of Artificial Sequence: Synthetic oligonucleotide
  Antisense strand to SEQ ID NO: 1805793
uugagaacuauucuugagc

SEQ ID NO: 1805795 - RNA, 19 nt, Artificial Sequence
  Description of Artificial Sequence: Synthetic oligonucleotide
  Sense strand starting at position 76 of SEQ ID NO: 1563243
aggaguucccacugaccuu

SEQ ID NO: 1805796 - RNA, 19 nt, Artificial Sequence
  Description of Artificial Sequence: Synthetic oligonucleotide
  Antisense strand to SEQ ID NO: 1805795
aaggucagugggaacuccu

SEQ ID NO: 1805797 - RNA, 19 nt, Artificial Sequence
  Description of Artificial Sequence: Synthetic oligonucleotide
  Sense strand starting at position 180 of SEQ ID NO: 1563243
cucagacugugggacaaau

SEQ ID NO: 1805798 - RNA, 19 nt, Artificial Sequence
  Description of Artificial Sequence: Synthetic oligonucleotide
  Antisense strand to SEQ ID NO: 1805797
auuugucccacagucugag

SEQ ID NO: 1805799 - RNA, 19 nt, Artificial Sequence
  Description of Artificial Sequence: Synthetic oligonucleotide
  Sense strand starting at position 193 of SEQ ID NO: 1563243
acaaaugaggcagguuaaa

SEQ ID NO: 1805800 - RNA, 19 nt, Artificial Sequence
  Description of Artificial Sequence: Synthetic oligonucleotide
  Antisense strand to SEQ ID NO: 1805799
uuuaaccugccucauuugu

SEQ ID NO: 1805801 - RNA, 19 nt, Artificial Sequence
  Description of Artificial Sequence: Synthetic oligonucleotide
  Sense strand starting at position 267 of SEQ ID NO: 1563243
ggugcuuacuaggcugaca

SEQ ID NO: 1805802 - RNA, 19 nt, Artificial Sequence
  Description of Artificial Sequence: Synthetic oligonucleotide
  Antisense strand to SEQ ID NO: 1805801
ugucagccuaguaagcacc

SEQ ID NO: 1805803 - RNA, 19 nt, Artificial Sequence
  Description of Artificial Sequence: Synthetic oligonucleotide
  Sense strand starting at position 389 of SEQ ID NO: 1563243
gcuuguugauguccuagca

SEQ ID NO: 1805804 - RNA, 19 nt, Artificial Sequence
  Description of Artificial Sequence: Synthetic oligonucleotide
  Antisense strand to SEQ ID NO: 1805803
ugcuaggacaucaacaagc

SEQ ID NO: 1805805 - RNA, 19 nt, Artificial Sequence
  Description of Artificial Sequence: Synthetic oligonucleotide
  Sense strand starting at position 1099 of SEQ ID NO: 1563243
agacgguguugagagaaga

SEQ ID NO: 1805806 - RNA, 19 nt, Artificial Sequence
  Description of Artificial Sequence: Synthetic oligonucleotide
  Antisense strand to SEQ ID NO: 1805805
ucuucucucaacaccgucu

SEQ ID NO: 1805807 - RNA, 19 nt, Artificial Sequence
  Description of Artificial Sequence: Synthetic oligonucleotide
  Sense strand starting at position 1487 of SEQ ID NO: 1563243
ggaaaugggucucuuauua

SEQ ID NO: 1805808 - RNA, 19 nt, Artificial Sequence
  Description of Artificial Sequence: Synthetic oligonucleotide
  Antisense strand to SEQ ID NO: 1805807
uaauaagagacccauuucc

SEQ ID NO: 1805809 - RNA, 19 nt, Artificial Sequence
  Description of Artificial Sequence: Synthetic oligonucleotide
  Sense strand starting at position 1491 of SEQ ID NO: 1563243
augggucucuuauuagcau

SEQ ID NO: 1805810 - RNA, 19 nt, Artificial Sequence
  Description of Artificial Sequence: Synthetic oligonucleotide
  Antisense strand to SEQ ID NO: 1805809
augcuaauaagagacccau

SEQ ID NO: 1805811 - RNA, 19 nt, Artificial Sequence
  Description of Artificial Sequence: Synthetic oligonucleotide
  Sense strand starting at position 1500 of SEQ ID NO: 1563243
uuauuagcauuugcuugau

SEQ ID NO: 1805812 - RNA, 19 nt, Artificial Sequence
  Description of Artificial Sequence: Synthetic oligonucleotide
  Antisense strand to SEQ ID NO: 1805811
aucaagcaaaugcuaauaa

SEQ ID NO: 1805813 - RNA, 19 nt, Artificial Sequence
  Description of Artificial Sequence: Synthetic oligonucleotide
  Sense strand starting at position 1503 of SEQ ID NO: 1563243
uuagcauuugcuugaucac

SEQ ID NO: 1805814 - RNA, 19 nt, Artificial Sequence
  Description of Artificial Sequence: Synthetic oligonucleotide
  Antisense strand to SEQ ID NO: 1805813
gugaucaagcaaaugcuaa

SEQ ID NO: 1805815 - RNA, 19 nt, Artificial Sequence
  Description of Artificial Sequence: Synthetic oligonucleotide
  Sense strand starting at position 1506 of SEQ ID NO: 1563243
gcauuugcuugaucaccau

SEQ ID NO: 1805816 - RNA, 19 nt, Artificial Sequence
  Description of Artificial Sequence: Synthetic oligonucleotide
  Antisense strand to SEQ ID NO: 1805815
auggugaucaagcaaaugc

SEQ ID NO: 1805817 - RNA, 19 nt, Artificial Sequence
  Description of Artificial Sequence: Synthetic oligonucleotide
  Sense strand starting at position 1512 of SEQ ID NO: 1563243
gcuugaucaccauggguuc

SEQ ID NO: 1805818 - RNA, 19 nt, Artificial Sequence
  Description of Artificial Sequence: Synthetic oligonucleotide
  Antisense strand to SEQ ID NO: 1805817
gaacccauggugaucaagc

SEQ ID NO: 1805819 - RNA, 19 nt, Artificial Sequence
  Description of Artificial Sequence: Synthetic oligonucleotide
  Sense strand starting at position 1564 of SEQ ID NO: 1563243
augaacuugucagugcuca

SEQ ID NO: 1805820 - RNA, 19 nt, Artificial Sequence
  Description of Artificial Sequence: Synthetic oligonucleotide
  Antisense strand to SEQ ID NO: 1805819
ugagcacugacaaguucau

SEQ ID NO: 1805821 - RNA, 19 nt, Artificial Sequence
  Description of Artificial Sequence: Synthetic oligonucleotide
  Sense strand starting at position 1568 of SEQ ID NO: 1563243
acuugucagugcucacuca

SEQ ID NO: 1805822 - RNA, 19 nt, Artificial Sequence
  Description of Artificial Sequence: Synthetic oligonucleotide
  Antisense strand to SEQ ID NO: 1805821
ugagugagcacugacaagu

SEQ ID NO: 1805823 - RNA, 19 nt, Artificial Sequence
  Description of Artificial Sequence: Synthetic oligonucleotide
  Sense strand starting at position 1569 of SEQ ID NO: 1563243
cuugucagugcucacucaa

SEQ ID NO: 1805824 - RNA, 19 nt, Artificial Sequence
  Description of Artificial Sequence: Synthetic oligonucleotide
  Antisense strand to SEQ ID NO: 1805823
uugagugagcacugacaag

SEQ ID NO: 1805825 - RNA, 19 nt, Artificial Sequence
  Description of Artificial Sequence: Synthetic oligonucleotide
  Sense strand starting at position 1704 of SEQ ID NO: 1563243
ccaccugaguucucagauu

SEQ ID NO: 1805826 - RNA, 19 nt, Artificial Sequence
  Description of Artificial Sequence: Synthetic oligonucleotide
  Antisense strand to SEQ ID NO: 1805825
aaucugagaacucaggugg

SEQ ID NO: 1805827 - RNA, 19 nt, Artificial Sequence
  Description of Artificial Sequence: Synthetic oligonucleotide
  Sense strand starting at position 2001 of SEQ ID NO: 1563243
agcacucaucgucaugaca

SEQ ID NO: 1805828 - RNA, 19 nt, Artificial Sequence
  Description of Artificial Sequence: Synthetic oligonucleotide
  Antisense strand to SEQ ID NO: 1805827
ugucaugacgaugagugcu

SEQ ID NO: 1805829 - RNA, 19 nt, Artificial Sequence
  Description of Artificial Sequence: Synthetic oligonucleotide
  Sense strand starting at position 2162 of SEQ ID NO: 1563243
gccagaacgguuugaucag

SEQ ID NO: 1805830 - RNA, 19 nt, Artificial Sequence
  Description of Artificial Sequence: Synthetic oligonucleotide
  Antisense strand to SEQ ID NO: 1805829
cugaucaaaccguucuggc

SEQ ID NO: 1805831 - RNA, 19 nt, Artificial Sequence
  Description of Artificial Sequence: Synthetic oligonucleotide
  Sense strand starting at position 2293 of SEQ ID NO: 1563243
gcccacagguguuucuuua

SEQ ID NO: 1805832 - RNA, 19 nt, Artificial Sequence
  Description of Artificial Sequence: Synthetic oligonucleotide
  Antisense strand to SEQ ID NO: 1805831
uaaagaaacaccugugggc

SEQ ID NO: 1805833 - RNA, 19 nt, Artificial Sequence
  Description of Artificial Sequence: Synthetic oligonucleotide
  Sense strand starting at position 2300 of SEQ ID NO: 1563243
gguguuucuuuaccucauu

SEQ ID NO: 1805834 - RNA, 19 nt, Artificial Sequence
  Description of Artificial Sequence: Synthetic oligonucleotide
  Antisense strand to SEQ ID NO: 1805833
aaugagguaaagaaacacc

SEQ ID NO: 1805835 - RNA, 19 nt, Artificial Sequence
  Description of Artificial Sequence: Synthetic oligonucleotide
  Sense strand starting at position 2301 of SEQ ID NO: 1563243
guguuucuuuaccucauuu

SEQ ID NO: 1805836 - RNA, 19 nt, Artificial Sequence
  Description of Artificial Sequence: Synthetic oligonucleotide
  Antisense strand to SEQ ID NO: 1805835
aaaugagguaaagaaacac

SEQ ID NO: 1805837 - RNA, 19 nt, Artificial Sequence
  Description of Artificial Sequence: Synthetic oligonucleotide
  Sense strand starting at position 2378 of SEQ ID NO: 1563243
ccuaguugcuguucugcaa

SEQ ID NO: 1805838 - RNA, 19 nt, Artificial Sequence
  Description of Artificial Sequence: Synthetic oligonucleotide
  Antisense strand to SEQ ID NO: 1805837
uugcagaacagcaacuagg

SEQ ID NO: 1805839 - RNA, 19 nt, Artificial Sequence
  Description of Artificial Sequence: Synthetic oligonucleotide
  Sense strand starting at position 2527 of SEQ ID NO: 1563243
ucaugaggccucugugaau

SEQ ID NO: 1805840 - RNA, 19 nt, Artificial Sequence
  Description of Artificial Sequence: Synthetic oligonucleotide
  Antisense strand to SEQ ID NO: 1805839
auucacagaggccucauga

SEQ ID NO: 1805841 - RNA, 19 nt, Artificial Sequence
  Description of Artificial Sequence: Synthetic oligonucleotide
  Sense strand starting at position 2637 of SEQ ID NO: 1563243
acuuauugguuucuuuagu

SEQ ID NO: 1805842 - RNA, 19 nt, Artificial Sequence
  Description of Artificial Sequence: Synthetic oligonucleotide
  Antisense strand to SEQ ID NO: 1805841
acuaaagaaaccaauaagu

SEQ ID NO: 1805843 - RNA, 19 nt, Artificial Sequence
  Description of Artificial Sequence: Synthetic oligonucleotide
  Sense strand starting at position 2642 of SEQ ID NO: 1563243
uugguuucuuuagucuuua

SEQ ID NO: 1805844 - RNA, 19 nt, Artificial Sequence
  Description of Artificial Sequence: Synthetic oligonucleotide
  Antisense strand to SEQ ID NO: 1805843
uaaagacuaaagaaaccaa

SEQ ID NO: 1805845 - RNA, 19 nt, Artificial Sequence
  Description of Artificial Sequence: Synthetic oligonucleotide
  Sense strand starting at position 2703 of SEQ ID NO: 1563243
caggguagauuucuguguu

SEQ ID NO: 1805846 - RNA, 19 nt, Artificial Sequence
  Description of Artificial Sequence: Synthetic oligonucleotide
  Antisense strand to SEQ ID NO: 1805845
aacacagaaaucuacccug

SEQ ID NO: 1805847 - RNA, 19 nt, Artificial Sequence
  Description of Artificial Sequence: Synthetic oligonucleotide
  Sense strand starting at position 2706 of SEQ ID NO: 1563243
gguagauuucuguguuuag

SEQ ID NO: 1805848 - RNA, 19 nt, Artificial Sequence
  Description of Artificial Sequence: Synthetic oligonucleotide
  Antisense strand to SEQ ID NO: 1805847
cuaaacacagaaaucuacc

SEQ ID NO: 1805849 - RNA, 19 nt, Artificial Sequence
  Description of Artificial Sequence: Synthetic oligonucleotide
  Sense strand starting at position 2707 of SEQ ID NO: 1563243
guagauuucuguguuuagg

SEQ ID NO: 1805850 - RNA, 19 nt, Artificial Sequence
  Description of Artificial Sequence: Synthetic oligonucleotide
  Antisense strand to SEQ ID NO: 1805849
ccuaaacacagaaaucuac

SEQ ID NO: 1805851 - RNA, 19 nt, Artificial Sequence
  Description of Artificial Sequence: Synthetic oligonucleotide
  Sense strand starting at position 2709 of SEQ ID NO: 1563243
agauuucuguguuuagguc

SEQ ID NO: 1805852 - RNA, 19 nt, Artificial Sequence
  Description of Artificial Sequence: Synthetic oligonucleotide
  Antisense strand to SEQ ID NO: 1805851
gaccuaaacacagaaaucu

SEQ ID NO: 1805853 - RNA, 19 nt, Artificial Sequence
  Description of Artificial Sequence: Synthetic oligonucleotide
  Sense strand starting at position 2718 of SEQ ID NO: 1563243
uguuuaggucacggcuaua

SEQ ID NO: 1805854 - RNA, 19 nt, Artificial Sequence
  Description of Artificial Sequence: Synthetic oligonucleotide
  Antisense strand to SEQ ID NO: 1805853
uauagccgugaccuaaaca

SEQ ID NO: 1805855 - RNA, 19 nt, Artificial Sequence
  Description of Artificial Sequence: Synthetic oligonucleotide
  Sense strand starting at position 2784 of SEQ ID NO: 1563243
gugcuuauggcagaaauaa

SEQ ID NO: 1805856 - RNA, 19 nt, Artificial Sequence
  Description of Artificial Sequence: Synthetic oligonucleotide
  Antisense strand to SEQ ID NO: 1805855
uuauuucugccauaagcac

SEQ ID NO: 1805857 - RNA, 19 nt, Artificial Sequence
  Description of Artificial Sequence: Synthetic oligonucleotide
  Sense strand starting at position 2792 of SEQ ID NO: 1563243
ggcagaaauaagugaauca

SEQ ID NO: 1805858 - RNA, 19 nt, Artificial Sequence
  Description of Artificial Sequence: Synthetic oligonucleotide
  Antisense strand to SEQ ID NO: 1805857
ugauucacuuauuucugcc

SEQ ID NO: 1805859 - RNA, 19 nt, Artificial Sequence
  Description of Artificial Sequence: Synthetic oligonucleotide
  Sense strand starting at position 2844 of SEQ ID NO: 1563243
ggugaugagucccugcuau

SEQ ID NO: 1805860 - RNA, 19 nt, Artificial Sequence
  Description of Artificial Sequence: Synthetic oligonucleotide
  Antisense strand to SEQ ID NO: 1805859
auagcagggacucaucacc

SEQ ID NO: 1805861 - RNA, 19 nt, Artificial Sequence
  Description of Artificial Sequence: Synthetic oligonucleotide
  Sense strand starting at position 2899 of SEQ ID NO: 1563243
cuggcaucgacaggaagau

SEQ ID NO: 1805862 - RNA, 19 nt, Artificial Sequence
  Description of Artificial Sequence: Synthetic oligonucleotide
  Antisense strand to SEQ ID NO: 1805861
aucuuccugucgaugccag

SEQ ID NO: 1805863 - RNA, 19 nt, Artificial Sequence
  Description of Artificial Sequence: Synthetic oligonucleotide
  Sense strand starting at position 3129 of SEQ ID NO: 1563243
agaaaugggucaucugcua

SEQ ID NO: 1805864 - RNA, 19 nt, Artificial Sequence
  Description of Artificial Sequence: Synthetic oligonucleotide
  Antisense strand to SEQ ID NO: 1805863
uagcagaugacccauuucu

SEQ ID NO: 1805865 - RNA, 19 nt, Artificial Sequence
  Description of Artificial Sequence: Synthetic oligonucleotide
  Sense strand starting at position 3137 of SEQ ID NO: 1563243
gucaucugcuaccuugaaa

SEQ ID NO: 1805866 - RNA, 19 nt, Artificial Sequence
  Description of Artificial Sequence: Synthetic oligonucleotide
  Antisense strand to SEQ ID NO: 1805865
uuucaagguagcagaugac

SEQ ID NO: 1805867 - RNA, 19 nt, Artificial Sequence
  Description of Artificial Sequence: Synthetic oligonucleotide
  Sense strand starting at position 3308 of SEQ ID NO: 1563243
ggcugaauacugggccuaa

SEQ ID NO: 1805868 - RNA, 19 nt, Artificial Sequence
  Description of Artificial Sequence: Synthetic oligonucleotide
  Antisense strand to SEQ ID NO: 1805867
uuaggcccaguauucagcc

SEQ ID NO: 1805869 - RNA, 19 nt, Artificial Sequence
  Description of Artificial Sequence: Synthetic oligonucleotide
  Sense strand starting at position 3309 of SEQ ID NO: 1563243
gcugaauacugggccuaag

SEQ ID NO: 1805870 - RNA, 19 nt, Artificial Sequence
  Description of Artificial Sequence: Synthetic oligonucleotide
  Antisense strand to SEQ ID NO: 1805869
cuuaggcccaguauucagc

SEQ ID NO: 1805871 - RNA, 19 nt, Artificial Sequence
  Description of Artificial Sequence: Synthetic oligonucleotide
  Sense strand starting at position 3404 of SEQ ID NO: 1563243
cauguugugacagggagua

SEQ ID NO: 1805872 - RNA, 19 nt, Artificial Sequence
  Description of Artificial Sequence: Synthetic oligonucleotide
  Antisense strand to SEQ ID NO: 1805871
uacucccugucacaacaug

SEQ ID NO: 1805873 - RNA, 19 nt, Artificial Sequence
  Description of Artificial Sequence: Synthetic oligonucleotide
  Sense strand starting at position 3526 of SEQ ID NO: 1563243
ggacaugcucuggaguuca

SEQ ID NO: 1805874 - RNA, 19 nt, Artificial Sequence
  Description of Artificial Sequence: Synthetic oligonucleotide
  Antisense strand to SEQ ID NO: 1805873
ugaacuccagagcaugucc

SEQ ID NO: 1805875 - RNA, 19 nt, Artificial Sequence
  Description of Artificial Sequence: Synthetic oligonucleotide
  Sense strand starting at position 142 of SEQ ID NO: 1563244
uggccugacccucauuagu

SEQ ID NO: 1805876 - RNA, 19 nt, Artificial Sequence
  Description of Artificial Sequence: Synthetic oligonucleotide
  Antisense strand to SEQ ID NO: 1805875
acuaaugagggucaggcca

SEQ ID NO: 1805877 - RNA, 19 nt, Artificial Sequence
  Description of Artificial Sequence: Synthetic oligonucleotide
  Sense strand starting at position 266 of SEQ ID NO: 1563244
auugcucucugcucagaga

SEQ ID NO: 1805878 - RNA, 19 nt, Artificial Sequence
  Description of Artificial Sequence: Synthetic oligonucleotide
  Antisense strand to SEQ ID NO: 1805877
ucucugagcagagagcaau

SEQ ID NO: 1805879 - RNA, 19 nt, Artificial Sequence
  Description of Artificial Sequence: Synthetic oligonucleotide
  Sense strand starting at position 267 of SEQ ID NO: 1563244
uugcucucugcucagagau

SEQ ID NO: 1805880 - RNA, 19 nt, Artificial Sequence
  Description of Artificial Sequence: Synthetic oligonucleotide
  Antisense strand to SEQ ID NO: 1805879
aucucugagcagagagcaa

SEQ ID NO: 1805881 - RNA, 19 nt, Artificial Sequence
  Description of Artificial Sequence: Synthetic oligonucleotide
  Sense strand starting at position 294 of SEQ ID NO: 1563244
agauauaauccuuguuggu

SEQ ID NO: 1805882 - RNA, 19 nt, Artificial Sequence
  Description of Artificial Sequence: Synthetic oligonucleotide
  Antisense strand to SEQ ID NO: 1805881
accaacaaggauuauaucu

SEQ ID NO: 1805883 - RNA, 19 nt, Artificial Sequence
  Description of Artificial Sequence: Synthetic oligonucleotide
  Sense strand starting at position 456 of SEQ ID NO: 1563244
uucugaugcuuauuagcau

SEQ ID NO: 1805884 - RNA, 19 nt, Artificial Sequence
  Description of Artificial Sequence: Synthetic oligonucleotide
  Antisense strand to SEQ ID NO: 1805883
augcuaauaagcaucagaa

SEQ ID NO: 1805885 - RNA, 19 nt, Artificial Sequence
  Description of Artificial Sequence: Synthetic oligonucleotide
  Sense strand starting at position 459 of SEQ ID NO: 1563244
ugaugcuuauuagcauauu

SEQ ID NO: 1805886 - RNA, 19 nt, Artificial Sequence
  Description of Artificial Sequence: Synthetic oligonucleotide
  Antisense strand to SEQ ID NO: 1805885
aauaugcuaauaagcauca

SEQ ID NO: 1805887 - RNA, 19 nt, Artificial Sequence
  Description of Artificial Sequence: Synthetic oligonucleotide
  Sense strand starting at position 520 of SEQ ID NO: 1563244
gugccucuaugucucuaaa

SEQ ID NO: 1805888 - RNA, 19 nt, Artificial Sequence
  Description of Artificial Sequence: Synthetic oligonucleotide
  Antisense strand to SEQ ID NO: 1805887
uuuagagacauagaggcac

SEQ ID NO: 1805889 - RNA, 19 nt, Artificial Sequence
  Description of Artificial Sequence: Synthetic oligonucleotide
  Sense strand starting at position 600 of SEQ ID NO: 1563244
ucacauucccuguguccau

SEQ ID NO: 1805890 - RNA, 19 nt, Artificial Sequence
  Description of Artificial Sequence: Synthetic oligonucleotide
  Antisense strand to SEQ ID NO: 1805889
auggacacagggaauguga

SEQ ID NO: 1805891 - RNA, 19 nt, Artificial Sequence
  Description of Artificial Sequence: Synthetic oligonucleotide
  Sense strand starting at position 656 of SEQ ID NO: 1563244
ccacuaagccucugacagu

SEQ ID NO: 1805892 - RNA, 19 nt, Artificial Sequence
  Description of Artificial Sequence: Synthetic oligonucleotide
  Antisense strand to SEQ ID NO: 1805891
acugucagaggcuuagugg

SEQ ID NO: 1805893 - RNA, 19 nt, Artificial Sequence
  Description of Artificial Sequence: Synthetic oligonucleotide
  Sense strand starting at position 759 of SEQ ID NO: 1563244
caguccuuccuccguuaga

SEQ ID NO: 1805894 - RNA, 19 nt, Artificial Sequence
  Description of Artificial Sequence: Synthetic oligonucleotide
  Antisense strand to SEQ ID NO: 1805893
ucuaacggaggaaggacug

SEQ ID NO: 1805895 - RNA, 19 nt, Artificial Sequence
  Description of Artificial Sequence: Synthetic oligonucleotide
  Sense strand starting at position 760 of SEQ ID NO: 1563244
aguccuuccuccguuagau

SEQ ID NO: 1805896 - RNA, 19 nt, Artificial Sequence
  Description of Artificial Sequence: Synthetic oligonucleotide
  Antisense strand to SEQ ID NO: 1805895
aucuaacggaggaaggacu

SEQ ID NO: 1805897 - RNA, 19 nt, Artificial Sequence
  Description of Artificial Sequence: Synthetic oligonucleotide
  Sense strand starting at position 967 of SEQ ID NO: 1563244
cggacagacacgcaguauu

SEQ ID NO: 1805898 - RNA, 19 nt, Artificial Sequence
  Description of Artificial Sequence: Synthetic oligonucleotide
  Antisense strand to SEQ ID NO: 1805897
aauacugcgugucuguccg

SEQ ID NO: 1805899 - RNA, 19 nt, Artificial Sequence
  Description of Artificial Sequence: Synthetic oligonucleotide
  Sense strand starting at position 1091 of SEQ ID NO: 1563244
ggccucucugcggacauaa

SEQ ID NO: 1805900 - RNA, 19 nt, Artificial Sequence
  Description of Artificial Sequence: Synthetic oligonucleotide
  Antisense strand to SEQ ID NO: 1805899
uuauguccgcagagaggcc

SEQ ID NO: 1805901 - RNA, 19 nt, Artificial Sequence
  Description of Artificial Sequence: Synthetic oligonucleotide
  Sense strand starting at position 1110 of SEQ ID NO: 1563244
ucccuaugagcaugucuua

SEQ ID NO: 1805902 - RNA, 19 nt, Artificial Sequence
  Description of Artificial Sequence: Synthetic oligonucleotide
  Antisense strand to SEQ ID NO: 1805901
uaagacaugcucauaggga

SEQ ID NO: 1805903 - RNA, 19 nt, Artificial Sequence
  Description of Artificial Sequence: Synthetic oligonucleotide
  Sense strand starting at position 1113 of SEQ ID NO: 1563244
cuaugagcaugucuuagaa

SEQ ID NO: 1805904 - RNA, 19 nt, Artificial Sequence
  Description of Artificial Sequence: Synthetic oligonucleotide
  Antisense strand to SEQ ID NO: 1805903
uucuaagacaugcucauag

SEQ ID NO: 1805905 - RNA, 19 nt, Artificial Sequence
  Description of Artificial Sequence: Synthetic oligonucleotide
  Sense strand starting at position 2672 of SEQ ID NO: 1563244
ucgcuauaggccgaauauu

SEQ ID NO: 1805906 - RNA, 19 nt, Artificial Sequence
  Description of Artificial Sequence: Synthetic oligonucleotide
  Antisense strand to SEQ ID NO: 1805905
aauauucggccuauagcga

SEQ ID NO: 1805907 - RNA, 19 nt, Artificial Sequence
  Description of Artificial Sequence: Synthetic oligonucleotide
  Sense strand starting at position 2682 of SEQ ID NO: 1563244
ccgaauauuccgcaaggug

SEQ ID NO: 1805908 - RNA, 19 nt, Artificial Sequence
  Description of Artificial Sequence: Synthetic oligonucleotide
  Antisense strand to SEQ ID NO: 1805907
caccuugcggaauauucgg

SEQ ID NO: 1805909 - RNA, 19 nt, Artificial Sequence
  Description of Artificial Sequence: Synthetic oligonucleotide
  Sense strand starting at position 2685 of SEQ ID NO: 1563244
aauauuccgcaaggugauu

SEQ ID NO: 1805910 - RNA, 19 nt, Artificial Sequence
  Description of Artificial Sequence: Synthetic oligonucleotide
  Antisense strand to SEQ ID NO: 1805909
aaucaccuugcggaauauu

SEQ ID NO: 1805911 - RNA, 19 nt, Artificial Sequence
  Description of Artificial Sequence: Synthetic oligonucleotide
  Sense strand starting at position 2691 of SEQ ID NO: 1563244
ccgcaaggugauuggucau

SEQ ID NO: 1805912 - RNA, 19 nt, Artificial Sequence
  Description of Artificial Sequence: Synthetic oligonucleotide
  Antisense strand to SEQ ID NO: 1805911
augaccaaucaccuugcgg

SEQ ID NO: 1805913 - RNA, 19 nt, Artificial Sequence
  Description of Artificial Sequence: Synthetic oligonucleotide
  Sense strand starting at position 2694 of SEQ ID NO: 1563244
caaggugauuggucauaau

SEQ ID NO: 1805914 - RNA, 19 nt, Artificial Sequence
  Description of Artificial Sequence: Synthetic oligonucleotide
  Antisense strand to SEQ ID NO: 1805913
auuaugaccaaucaccuug

SEQ ID NO: 1805915 - RNA, 19 nt, Artificial Sequence
  Description of Artificial Sequence: Synthetic oligonucleotide
  Sense strand starting at position 2707 of SEQ ID NO: 1563244
cauaauugcgcucaaucga

SEQ ID NO: 1805916 - RNA, 19 nt, Artificial Sequence
  Description of Artificial Sequence: Synthetic oligonucleotide
  Antisense strand to SEQ ID NO: 1805915
ucgauugagcgcaauuaug

SEQ ID NO: 1805917 - RNA, 19 nt, Artificial Sequence
  Description of Artificial Sequence: Synthetic oligonucleotide
  Sense strand starting at position 2995 of SEQ ID NO: 1563244
gaugucagucaacacaagu

SEQ ID NO: 1805918 - RNA, 19 nt, Artificial Sequence
  Description of Artificial Sequence: Synthetic oligonucleotide
  Antisense strand to SEQ ID NO: 1805917
acuuguguugacugacauc

SEQ ID NO: 1805919 - RNA, 19 nt, Artificial Sequence
  Description of Artificial Sequence: Synthetic oligonucleotide
  Sense strand starting at position 3054 of SEQ ID NO: 1563244
gcauguugugugccaagua

SEQ ID NO: 1805920 - RNA, 19 nt, Artificial Sequence
  Description of Artificial Sequence: Synthetic oligonucleotide
  Antisense strand to SEQ ID NO: 1805919
uacuuggcacacaacaugc

SEQ ID NO: 1805921 - RNA, 19 nt, Artificial Sequence
  Description of Artificial Sequence: Synthetic oligonucleotide
  Sense strand starting at position 3267 of SEQ ID NO: 1563244
agguuuacauuagugagau

SEQ ID NO: 1805922 - RNA, 19 nt, Artificial Sequence
  Description of Artificial Sequence: Synthetic oligonucleotide
  Antisense strand to SEQ ID NO: 1805921
aucucacuaauguaaaccu

SEQ ID NO: 1805923 - RNA, 19 nt, Artificial Sequence
  Description of Artificial Sequence: Synthetic oligonucleotide
  Sense strand starting at position 3279 of SEQ ID NO: 1563244
gugagauuucccgggccau

SEQ ID NO: 1805924 - RNA, 19 nt, Artificial Sequence
  Description of Artificial Sequence: Synthetic oligonucleotide
  Antisense strand to SEQ ID NO: 1805923
auggcccgggaaaucucac

SEQ ID NO: 1805925 - RNA, 19 nt, Artificial Sequence
  Description of Artificial Sequence: Synthetic oligonucleotide
  Sense strand starting at position 3305 of SEQ ID NO: 1563244
guggaaauauuugacaaag

SEQ ID NO: 1805926 - RNA, 19 nt, Artificial Sequence
  Description of Artificial Sequence: Synthetic oligonucleotide
  Antisense strand to SEQ ID NO: 1805925
cuuugucaaauauuuccac

SEQ ID NO: 1805927 - RNA, 19 nt, Artificial Sequence
  Description of Artificial Sequence: Synthetic oligonucleotide
  Sense strand starting at position 3421 of SEQ ID NO: 1563244
uuucuagcuguuugaguga

SEQ ID NO: 1805928 - RNA, 19 nt, Artificial Sequence
  Description of Artificial Sequence: Synthetic oligonucleotide
  Antisense strand to SEQ ID NO: 1805927
ucacucaaacagcuagaaa

SEQ ID NO: 1805929 - RNA, 19 nt, Artificial Sequence
  Description of Artificial Sequence: Synthetic oligonucleotide
  Sense strand starting at position 3424 of SEQ ID NO: 1563244
cuagcuguuugagugaaac

SEQ ID NO: 1805930 - RNA, 19 nt, Artificial Sequence
  Description of Artificial Sequence: Synthetic oligonucleotide
  Antisense strand to SEQ ID NO: 1805929
guuucacucaaacagcuag

SEQ ID NO: 1805931 - RNA, 19 nt, Artificial Sequence
  Description of Artificial Sequence: Synthetic oligonucleotide
  Sense strand starting at position 3568 of SEQ ID NO: 1563244
ugaagccuuuccgauuuaa

SEQ ID NO: 1805932 - RNA, 19 nt, Artificial Sequence
  Description of Artificial Sequence: Synthetic oligonucleotide
  Antisense strand to SEQ ID NO: 1805931
uuaaaucggaaaggcuuca

SEQ ID NO: 1805933 - RNA, 19 nt, Artificial Sequence
  Description of Artificial Sequence: Synthetic oligonucleotide
  Sense strand starting at position 3646 of SEQ ID NO: 1563244
uuugaagagcacugaucaa

SEQ ID NO: 1805934 - RNA, 19 nt, Artificial Sequence
  Description of Artificial Sequence: Synthetic oligonucleotide
  Antisense strand to SEQ ID NO: 1805933
uugaucagugcucuucaaa

SEQ ID NO: 1805935 - RNA, 19 nt, Artificial Sequence
  Description of Artificial Sequence: Synthetic oligonucleotide
  Sense strand starting at position 3672 of SEQ ID NO: 1563244
gguacaauuugcuuacugu

SEQ ID NO: 1805936 - RNA, 19 nt, Artificial Sequence
  Description of Artificial Sequence: Synthetic oligonucleotide
  Antisense strand to SEQ ID NO: 1805935
acaguaagcaaauuguacc

SEQ ID NO: 1805937 - RNA, 19 nt, Artificial Sequence
  Description of Artificial Sequence: Synthetic oligonucleotide
  Sense strand starting at position 3678 of SEQ ID NO: 1563244
auuugcuuacuguguuuau

SEQ ID NO: 1805938 - RNA, 19 nt, Artificial Sequence
  Description of Artificial Sequence: Synthetic oligonucleotide
  Antisense strand to SEQ ID NO: 1805937
auaaacacaguaagcaaau

SEQ ID NO: 1805939 - RNA, 19 nt, Artificial Sequence
  Description of Artificial Sequence: Synthetic oligonucleotide
  Sense strand starting at position 3681 of SEQ ID NO: 1563244
ugcuuacuguguuuauaau

SEQ ID NO: 1805940 - RNA, 19 nt, Artificial Sequence
  Description of Artificial Sequence: Synthetic oligonucleotide
  Antisense strand to SEQ ID NO: 1805939
auuauaaacacaguaagca

SEQ ID NO: 1805941 - RNA, 19 nt, Artificial Sequence
  Description of Artificial Sequence: Synthetic oligonucleotide
  Sense strand starting at position 3682 of SEQ ID NO: 1563244
gcuuacuguguuuauaauc

SEQ ID NO: 1805942 - RNA, 19 nt, Artificial Sequence
  Description of Artificial Sequence: Synthetic oligonucleotide
  Antisense strand to SEQ ID NO: 1805941
gauuauaaacacaguaagc

SEQ ID NO: 1805943 - RNA, 19 nt, Artificial Sequence
  Description of Artificial Sequence: Synthetic oligonucleotide
  Sense strand starting at position 3687 of SEQ ID NO: 1563244
cuguguuuauaaucuauuc

SEQ ID NO: 1805944 - RNA, 19 nt, Artificial Sequence
  Description of Artificial Sequence: Synthetic oligonucleotide
  Antisense strand to SEQ ID NO: 1805943
gaauagauuauaaacacag

SEQ ID NO: 1805945 - RNA, 19 nt, Artificial Sequence
  Description of Artificial Sequence: Synthetic oligonucleotide
  Sense strand starting at position 3692 of SEQ ID NO: 1563244
uuuauaaucuauucugggu

SEQ ID NO: 1805946 - RNA, 19 nt, Artificial Sequence
  Description of Artificial Sequence: Synthetic oligonucleotide
  Antisense strand to SEQ ID NO: 1805945
acccagaauagauuauaaa

SEQ ID NO: 1805947 - RNA, 19 nt, Artificial Sequence
  Description of Artificial Sequence: Synthetic oligonucleotide
  Sense strand starting at position 3696 of SEQ ID NO: 1563244
uaaucuauucuggguguca

SEQ ID NO: 1805948 - RNA, 19 nt, Artificial Sequence
  Description of Artificial Sequence: Synthetic oligonucleotide
  Antisense strand to SEQ ID NO: 1805947
ugacacccagaauagauua

SEQ ID NO: 1805949 - RNA, 19 nt, Artificial Sequence
  Description of Artificial Sequence: Synthetic oligonucleotide
  Sense strand starting at position 3697 of SEQ ID NO: 1563244
aaucuauucugggugucaa

SEQ ID NO: 1805950 - RNA, 19 nt, Artificial Sequence
  Description of Artificial Sequence: Synthetic oligonucleotide
  Antisense strand to SEQ ID NO: 1805949
uugacacccagaauagauu

SEQ ID NO: 1805951 - RNA, 19 nt, Artificial Sequence
  Description of Artificial Sequence: Synthetic oligonucleotide
  Sense strand starting at position 3698 of SEQ ID NO: 1563244
aucuauucugggugucaac

SEQ ID NO: 1805952 - RNA, 19 nt, Artificial Sequence
  Description of Artificial Sequence: Synthetic oligonucleotide
  Antisense strand to SEQ ID NO: 1805951
guugacacccagaauagau

SEQ ID NO: 1805953 - RNA, 19 nt, Artificial Sequence
  Description of Artificial Sequence: Synthetic oligonucleotide
  Sense strand starting at position 3769 of SEQ ID NO: 1563244
ugucucacgugccuagaaa

SEQ ID NO: 1805954 - RNA, 19 nt, Artificial Sequence
  Description of Artificial Sequence: Synthetic oligonucleotide
  Antisense strand to SEQ ID NO: 1805953
uuucuaggcacgugagaca

SEQ ID NO: 1805955 - RNA, 19 nt, Artificial Sequence
  Description of Artificial Sequence: Synthetic oligonucleotide
  Sense strand starting at position 52 of SEQ ID NO: 1563245
ucacauucccuguguccau

SEQ ID NO: 1805956 - RNA, 19 nt, Artificial Sequence
  Description of Artificial Sequence: Synthetic oligonucleotide
  Antisense strand to SEQ ID NO: 1805955
auggacacagggaauguga

SEQ ID NO: 1805957 - RNA, 19 nt, Artificial Sequence
  Description of Artificial Sequence: Synthetic oligonucleotide
  Sense strand starting at position 108 of SEQ ID NO: 1563245
ccacuaagccucugacagu

SEQ ID NO: 1805958 - RNA, 19 nt, Artificial Sequence
  Description of Artificial Sequence: Synthetic oligonucleotide
  Antisense strand to SEQ ID NO: 1805957
acugucagaggcuuagugg

SEQ ID NO: 1805959 - RNA, 19 nt, Artificial Sequence
  Description of Artificial Sequence: Synthetic oligonucleotide
  Sense strand starting at position 419 of SEQ ID NO: 1563245
cggacagacacgcaguauu

SEQ ID NO: 1805960 - RNA, 19 nt, Artificial Sequence
  Description of Artificial Sequence: Synthetic oligonucleotide
  Antisense strand to SEQ ID NO: 1805959
aauacugcgugucuguccg

SEQ ID NO: 1805961 - RNA, 19 nt, Artificial Sequence
  Description of Artificial Sequence: Synthetic oligonucleotide
  Sense strand starting at position 543 of SEQ ID NO: 1563245
ggccucucugcggacauaa

SEQ ID NO: 1805962 - RNA, 19 nt, Artificial Sequence
  Description of Artificial Sequence: Synthetic oligonucleotide
  Antisense strand to SEQ ID NO: 1805961
uuauguccgcagagaggcc

SEQ ID NO: 1805963 - RNA, 19 nt, Artificial Sequence
  Description of Artificial Sequence: Synthetic oligonucleotide
  Sense strand starting at position 562 of SEQ ID NO: 1563245
ucccuaugagcaugucuua

SEQ ID NO: 1805964 - RNA, 19 nt, Artificial Sequence
  Description of Artificial Sequence: Synthetic oligonucleotide
  Antisense strand to SEQ ID NO: 1805963
uaagacaugcucauaggga

SEQ ID NO: 1805965 - RNA, 19 nt, Artificial Sequence
  Description of Artificial Sequence: Synthetic oligonucleotide
  Sense strand starting at position 565 of SEQ ID NO: 1563245
cuaugagcaugucuuagaa

SEQ ID NO: 1805966 - RNA, 19 nt, Artificial Sequence
  Description of Artificial Sequence: Synthetic oligonucleotide
  Antisense strand to SEQ ID NO: 1805965
uucuaagacaugcucauag

SEQ ID NO: 1805967 - RNA, 19 nt, Artificial Sequence
  Description of Artificial Sequence: Synthetic oligonucleotide
  Sense strand starting at position 2124 of SEQ ID NO: 1563245
ucgcuauaggccgaauauu

SEQ ID NO: 1805968 - RNA, 19 nt, Artificial Sequence
  Description of Artificial Sequence: Synthetic oligonucleotide
  Antisense strand to SEQ ID NO: 1805967
aauauucggccuauagcga

SEQ ID NO: 1805969 - RNA, 19 nt, Artificial Sequence
  Description of Artificial Sequence: Synthetic oligonucleotide
  Sense strand starting at position 2134 of SEQ ID NO: 1563245
ccgaauauuccgcaaggug

SEQ ID NO: 1805970 - RNA, 19 nt, Artificial Sequence
  Description of Artificial Sequence: Synthetic oligonucleotide
  Antisense strand to SEQ ID NO: 1805969
caccuugcggaauauucgg

SEQ ID NO: 1805971 - RNA, 19 nt, Artificial Sequence
  Description of Artificial Sequence: Synthetic oligonucleotide
  Sense strand starting at position 2137 of SEQ ID NO: 1563245
aauauuccgcaaggugauu

SEQ ID NO: 1805972 - RNA, 19 nt, Artificial Sequence
  Description of Artificial Sequence: Synthetic oligonucleotide
  Antisense strand to SEQ ID NO: 1805971
aaucaccuugcggaauauu

SEQ ID NO: 1805973 - RNA, 19 nt, Artificial Sequence
  Description of Artificial Sequence: Synthetic oligonucleotide
  Sense strand starting at position 2146 of SEQ ID NO: 1563245
caaggugauuggucauaau

SEQ ID NO: 1805974 - RNA, 19 nt, Artificial Sequence
  Description of Artificial Sequence: Synthetic oligonucleotide
  Antisense strand to SEQ ID NO: 1805973
auuaugaccaaucaccuug

SEQ ID NO: 1805975 - RNA, 19 nt, Artificial Sequence
  Description of Artificial Sequence: Synthetic oligonucleotide
  Sense strand starting at position 2159 of SEQ ID NO: 1563245
cauaauugcgcucaaucga

SEQ ID NO: 1805976 - RNA, 19 nt, Artificial Sequence
  Description of Artificial Sequence: Synthetic oligonucleotide
  Antisense strand to SEQ ID NO: 1805975
ucgauugagcgcaauuaug

SEQ ID NO: 1805977 - RNA, 19 nt, Artificial Sequence
  Description of Artificial Sequence: Synthetic oligonucleotide
  Sense strand starting at position 2447 of SEQ ID NO: 1563245
gaugucagucaacacaagu

SEQ ID NO: 1805978 - RNA, 19 nt, Artificial Sequence
  Description of Artificial Sequence: Synthetic oligonucleotide
  Antisense strand to SEQ ID NO: 1805977
acuuguguugacugacauc

SEQ ID NO: 1805979 - RNA, 19 nt, Artificial Sequence
  Description of Artificial Sequence: Synthetic oligonucleotide
  Sense strand starting at position 2506 of SEQ ID NO: 1563245
gcauguugugugccaagua

SEQ ID NO: 1805980 - RNA, 19 nt, Artificial Sequence
  Description of Artificial Sequence: Synthetic oligonucleotide
  Antisense strand to SEQ ID NO: 1805979
uacuuggcacacaacaugc

SEQ ID NO: 1805981 - RNA, 19 nt, Artificial Sequence
  Description of Artificial Sequence: Synthetic oligonucleotide
  Sense strand starting at position 2719 of SEQ ID NO: 1563245
agguuuacauuagugagau

SEQ ID NO: 1805982 - RNA, 19 nt, Artificial Sequence
  Description of Artificial Sequence: Synthetic oligonucleotide
  Antisense strand to SEQ ID NO: 1805981
aucucacuaauguaaaccu

SEQ ID NO: 1805983 - RNA, 19 nt, Artificial Sequence
  Description of Artificial Sequence: Synthetic oligonucleotide
  Sense strand starting at position 2731 of SEQ ID NO: 1563245
gugagauuucccgggccau

SEQ ID NO: 1805984 - RNA, 19 nt, Artificial Sequence
  Description of Artificial Sequence: Synthetic oligonucleotide
  Antisense strand to SEQ ID NO: 1805983
auggcccgggaaaucucac

SEQ ID NO: 1805985 - RNA, 19 nt, Artificial Sequence
  Description of Artificial Sequence: Synthetic oligonucleotide
  Sense strand starting at position 2757 of SEQ ID NO: 1563245
guggaaauauuugacaaag

SEQ ID NO: 1805986 - RNA, 19 nt, Artificial Sequence
  Description of Artificial Sequence: Synthetic oligonucleotide
  Antisense strand to SEQ ID NO: 1805985
cuuugucaaauauuuccac

SEQ ID NO: 1805987 - RNA, 19 nt, Artificial Sequence
  Description of Artificial Sequence: Synthetic oligonucleotide
  Sense strand starting at position 2873 of SEQ ID NO: 1563245
uuucuagcuguuugaguga

SEQ ID NO: 1805988 - RNA, 19 nt, Artificial Sequence
  Description of Artificial Sequence: Synthetic oligonucleotide
  Antisense strand to SEQ ID NO: 1805987
ucacucaaacagcuagaaa

SEQ ID NO: 1805989 - RNA, 19 nt, Artificial Sequence
  Description of Artificial Sequence: Synthetic oligonucleotide
  Sense strand starting at position 2876 of SEQ ID NO: 1563245
cuagcuguuugagugaaac

SEQ ID NO: 1805990 - RNA, 19 nt, Artificial Sequence
  Description of Artificial Sequence: Synthetic oligonucleotide
  Antisense strand to SEQ ID NO: 1805989
guuucacucaaacagcuag

SEQ ID NO: 1805991 - RNA, 19 nt, Artificial Sequence
  Description of Artificial Sequence: Synthetic oligonucleotide
  Sense strand starting at position 3020 of SEQ ID NO: 1563245
ugaagccuuuccgauuuaa

SEQ ID NO: 1805992 - RNA, 19 nt, Artificial Sequence
  Description of Artificial Sequence: Synthetic oligonucleotide
  Antisense strand to SEQ ID NO: 1805991
uuaaaucggaaaggcuuca

SEQ ID NO: 1805993 - RNA, 19 nt, Artificial Sequence
  Description of Artificial Sequence: Synthetic oligonucleotide
  Sense strand starting at position 3098 of SEQ ID NO: 1563245
uuugaagagcacugaucaa

SEQ ID NO: 1805994 - RNA, 19 nt, Artificial Sequence
  Description of Artificial Sequence: Synthetic oligonucleotide
  Antisense strand to SEQ ID NO: 1805993
uugaucagugcucuucaaa

SEQ ID NO: 1805995 - RNA, 19 nt, Artificial Sequence
  Description of Artificial Sequence: Synthetic oligonucleotide
  Sense strand starting at position 3124 of SEQ ID NO: 1563245
gguacaauuugcuuacugu

SEQ ID NO: 1805996 - RNA, 19 nt, Artificial Sequence
  Description of Artificial Sequence: Synthetic oligonucleotide
  Antisense strand to SEQ ID NO: 1805995
acaguaagcaaauuguacc

SEQ ID NO: 1805997 - RNA, 19 nt, Artificial Sequence
  Description of Artificial Sequence: Synthetic oligonucleotide
  Sense strand starting at position 3130 of SEQ ID NO: 1563245
auuugcuuacuguguuuau

SEQ ID NO: 1805998 - RNA, 19 nt, Artificial Sequence
  Description of Artificial Sequence: Synthetic oligonucleotide
  Antisense strand to SEQ ID NO: 1805997
auaaacacaguaagcaaau

SEQ ID NO: 1805999 - RNA, 19 nt, Artificial Sequence
  Description of Artificial Sequence: Synthetic oligonucleotide
  Sense strand starting at position 3133 of SEQ ID NO: 1563245
ugcuuacuguguuuauaau

SEQ ID NO: 1806000 - RNA, 19 nt, Artificial Sequence
  Description of Artificial Sequence: Synthetic oligonucleotide
  Antisense strand to SEQ ID NO: 1805999
auuauaaacacaguaagca

SEQ ID NO: 1806001 - RNA, 19 nt, Artificial Sequence
  Description of Artificial Sequence: Synthetic oligonucleotide
  Sense strand starting at position 3134 of SEQ ID NO: 1563245
gcuuacuguguuuauaauc

SEQ ID NO: 1806002 - RNA, 19 nt, Artificial Sequence
  Description of Artificial Sequence: Synthetic oligonucleotide
  Antisense strand to SEQ ID NO: 1806001
gauuauaaacacaguaagc

SEQ ID NO: 1806003 - RNA, 19 nt, Artificial Sequence
  Description of Artificial Sequence: Synthetic oligonucleotide
  Sense strand starting at position 3139 of SEQ ID NO: 1563245
cuguguuuauaaucuauuc

SEQ ID NO: 1806004 - RNA, 19 nt, Artificial Sequence
  Description of Artificial Sequence: Synthetic oligonucleotide
  Antisense strand to SEQ ID NO: 1806003
gaauagauuauaaacacag

SEQ ID NO: 1806005 - RNA, 19 nt, Artificial Sequence
  Description of Artificial Sequence: Synthetic oligonucleotide
  Sense strand starting at position 3144 of SEQ ID NO: 1563245
uuuauaaucuauucugggu

SEQ ID NO: 1806006 - RNA, 19 nt, Artificial Sequence
  Description of Artificial Sequence: Synthetic oligonucleotide
  Antisense strand to SEQ ID NO: 1806005
acccagaauagauuauaaa

SEQ ID NO: 1806007 - RNA, 19 nt, Artificial Sequence
  Description of Artificial Sequence: Synthetic oligonucleotide
  Sense strand starting at position 3148 of SEQ ID NO: 1563245
uaaucuauucuggguguca

SEQ ID NO: 1806008 - RNA, 19 nt, Artificial Sequence
  Description of Artificial Sequence: Synthetic oligonucleotide
  Antisense strand to SEQ ID NO: 1806007
ugacacccagaauagauua

SEQ ID NO: 1806009 - RNA, 19 nt, Artificial Sequence
  Description of Artificial Sequence: Synthetic oligonucleotide
  Sense strand starting at position 3149 of SEQ ID NO: 1563245
aaucuauucugggugucaa

SEQ ID NO: 1806010 - RNA, 19 nt, Artificial Sequence
  Description of Artificial Sequence: Synthetic oligonucleotide
  Antisense strand to SEQ ID NO: 1806009
uugacacccagaauagauu

SEQ ID NO: 1806011 - RNA, 19 nt, Artificial Sequence
  Description of Artificial Sequence: Synthetic oligonucleotide
  Sense strand starting at position 3150 of SEQ ID NO: 1563245
aucuauucugggugucaac

SEQ ID NO: 1806012 - RNA, 19 nt, Artificial Sequence
  Description of Artificial Sequence: Synthetic oligonucleotide
  Antisense strand to SEQ ID NO: 1806011
guugacacccagaauagau

SEQ ID NO: 1806013 - RNA, 19 nt, Artificial Sequence
  Description of Artificial Sequence: Synthetic oligonucleotide
  Sense strand starting at position 3449 of SEQ ID NO: 1563245
ugguguuaacaaugguaga

SEQ ID NO: 1806014 - RNA, 19 nt, Artificial Sequence
  Description of Artificial Sequence: Synthetic oligonucleotide
  Antisense strand to SEQ ID NO: 1806013
ucuaccauuguuaacacca

SEQ ID NO: 1806015 - RNA, 19 nt, Artificial Sequence
  Description of Artificial Sequence: Synthetic oligonucleotide
  Sense strand starting at position 3450 of SEQ ID NO: 1563245
gguguuaacaaugguagac

SEQ ID NO: 1806016 - RNA, 19 nt, Artificial Sequence
  Description of Artificial Sequence: Synthetic oligonucleotide
  Antisense strand to SEQ ID NO: 1806015
gucuaccauuguuaacacc

SEQ ID NO: 1806017 - RNA, 19 nt, Artificial Sequence
  Description of Artificial Sequence: Synthetic oligonucleotide
  Sense strand starting at position 3569 of SEQ ID NO: 1563245
aagggugucaggcacgaau

SEQ ID NO: 1806018 - RNA, 19 nt, Artificial Sequence
  Description of Artificial Sequence: Synthetic oligonucleotide
  Antisense strand to SEQ ID NO: 1806017
auucgugccugacacccuu

SEQ ID NO: 1806019 - RNA, 19 nt, Artificial Sequence
  Description of Artificial Sequence: Synthetic oligonucleotide
  Sense strand starting at position 3571 of SEQ ID NO: 1563245
gggugucaggcacgaauaa

SEQ ID NO: 1806020 - RNA, 19 nt, Artificial Sequence
  Description of Artificial Sequence: Synthetic oligonucleotide
  Antisense strand to SEQ ID NO: 1806019
uuauucgugccugacaccc

SEQ ID NO: 1806021 - RNA, 19 nt, Artificial Sequence
  Description of Artificial Sequence: Synthetic oligonucleotide
  Sense strand starting at position 3580 of SEQ ID NO: 1563245
gcacgaauaaggugucaag

SEQ ID NO: 1806022 - RNA, 19 nt, Artificial Sequence
  Description of Artificial Sequence: Synthetic oligonucleotide
  Antisense strand to SEQ ID NO: 1806021
cuugacaccuuauucgugc

SEQ ID NO: 1806023 - RNA, 19 nt, Artificial Sequence
  Description of Artificial Sequence: Synthetic oligonucleotide
  Sense strand starting at position 3653 of SEQ ID NO: 1563245
ugaacaaggugucuauaga

SEQ ID NO: 1806024 - RNA, 19 nt, Artificial Sequence
  Description of Artificial Sequence: Synthetic oligonucleotide
  Antisense strand to SEQ ID NO: 1806023
ucuauagacaccuuguuca

SEQ ID NO: 1806025 - RNA, 19 nt, Artificial Sequence
  Description of Artificial Sequence: Synthetic oligonucleotide
  Sense strand starting at position 3664 of SEQ ID NO: 1563245
ucuauagaguauccgcaaa

SEQ ID NO: 1806026 - RNA, 19 nt, Artificial Sequence
  Description of Artificial Sequence: Synthetic oligonucleotide
  Antisense strand to SEQ ID NO: 1806025
uuugcggauacucuauaga

SEQ ID NO: 1806027 - RNA, 19 nt, Artificial Sequence
  Description of Artificial Sequence: Synthetic oligonucleotide
  Sense strand starting at position 3762 of SEQ ID NO: 1563245
guguggagugucuagggua

SEQ ID NO: 1806028 - RNA, 19 nt, Artificial Sequence
  Description of Artificial Sequence: Synthetic oligonucleotide
  Antisense strand to SEQ ID NO: 1806027
uacccuagacacuccacac

SEQ ID NO: 1806029 - RNA, 19 nt, Artificial Sequence
  Description of Artificial Sequence: Synthetic oligonucleotide
  Sense strand starting at position 3767 of SEQ ID NO: 1563245
gagugucuaggguacucua

SEQ ID NO: 1806030 - RNA, 19 nt, Artificial Sequence
  Description of Artificial Sequence: Synthetic oligonucleotide
  Antisense strand to SEQ ID NO: 1806029
uagaguacccuagacacuc

SEQ ID NO: 1806031 - RNA, 19 nt, Artificial Sequence
  Description of Artificial Sequence: Synthetic oligonucleotide
  Sense strand starting at position 3774 of SEQ ID NO: 1563245
uaggguacucuagagcaau

SEQ ID NO: 1806032 - RNA, 19 nt, Artificial Sequence
  Description of Artificial Sequence: Synthetic oligonucleotide
  Antisense strand to SEQ ID NO: 1806031
auugcucuagaguacccua

SEQ ID NO: 1806033 - RNA, 19 nt, Artificial Sequence
  Description of Artificial Sequence: Synthetic oligonucleotide
  Sense strand starting at position 3777 of SEQ ID NO: 1563245
gguacucuagagcaauaau

SEQ ID NO: 1806034 - RNA, 19 nt, Artificial Sequence
  Description of Artificial Sequence: Synthetic oligonucleotide
  Antisense strand to SEQ ID NO: 1806033
auuauugcucuagaguacc

SEQ ID NO: 1806035 - RNA, 19 nt, Artificial Sequence
  Description of Artificial Sequence: Synthetic oligonucleotide
  Sense strand starting at position 64 of SEQ ID NO: 1563246
uccucagacuaauggaaua

SEQ ID NO: 1806036 - RNA, 19 nt, Artificial Sequence
  Description of Artificial Sequence: Synthetic oligonucleotide
  Antisense strand to SEQ ID NO: 1806035
uauuccauuagucugagga

SEQ ID NO: 1806037 - RNA, 19 nt, Artificial Sequence
  Description of Artificial Sequence: Synthetic oligonucleotide
  Sense strand starting at position 294 of SEQ ID NO: 1563246
guugacuugucauuagcaa

SEQ ID NO: 1806038 - RNA, 19 nt, Artificial Sequence
  Description of Artificial Sequence: Synthetic oligonucleotide
  Antisense strand to SEQ ID NO: 1806037
uugcuaaugacaagucaac

SEQ ID NO: 1806039 - RNA, 19 nt, Artificial Sequence
  Description of Artificial Sequence: Synthetic oligonucleotide
  Sense strand starting at position 295 of SEQ ID NO: 1563246
uugacuugucauuagcaaa

SEQ ID NO: 1806040 - RNA, 19 nt, Artificial Sequence
  Description of Artificial Sequence: Synthetic oligonucleotide
  Antisense strand to SEQ ID NO: 1806039
uuugcuaaugacaagucaa

SEQ ID NO: 1806041 - RNA, 19 nt, Artificial Sequence
  Description of Artificial Sequence: Synthetic oligonucleotide
  Sense strand starting at position 766 of SEQ ID NO: 1563246
gggcuuauuaccuggauga

SEQ ID NO: 1806042 - RNA, 19 nt, Artificial Sequence
  Description of Artificial Sequence: Synthetic oligonucleotide
  Antisense strand to SEQ ID NO: 1806041
ucauccagguaauaagccc

SEQ ID NO: 1806043 - RNA, 19 nt, Artificial Sequence
  Description of Artificial Sequence: Synthetic oligonucleotide
  Sense strand starting at position 767 of SEQ ID NO: 1563246
ggcuuauuaccuggaugau

SEQ ID NO: 1806044 - RNA, 19 nt, Artificial Sequence
  Description of Artificial Sequence: Synthetic oligonucleotide
  Antisense strand to SEQ ID NO: 1806043
aucauccagguaauaagcc

SEQ ID NO: 1806045 - RNA, 19 nt, Artificial Sequence
  Description of Artificial Sequence: Synthetic oligonucleotide
  Sense strand starting at position 1166 of SEQ ID NO: 1563246
gguguaagguggcuuaaau

SEQ ID NO: 1806046 - RNA, 19 nt, Artificial Sequence
  Description of Artificial Sequence: Synthetic oligonucleotide
  Antisense strand to SEQ ID NO: 1806045
auuuaagccaccuuacacc

SEQ ID NO: 1806047 - RNA, 19 nt, Artificial Sequence
  Description of Artificial Sequence: Synthetic oligonucleotide
  Sense strand starting at position 1347 of SEQ ID NO: 1563246
uggcuuaaacccuggaaua

SEQ ID NO: 1806048 - RNA, 19 nt, Artificial Sequence
  Description of Artificial Sequence: Synthetic oligonucleotide
  Antisense strand to SEQ ID NO: 1806047
uauuccaggguuuaagcca

SEQ ID NO: 1806049 - RNA, 19 nt, Artificial Sequence
  Description of Artificial Sequence: Synthetic oligonucleotide
  Sense strand starting at position 1348 of SEQ ID NO: 1563246
ggcuuaaacccuggaauaa

SEQ ID NO: 1806050 - RNA, 19 nt, Artificial Sequence
  Description of Artificial Sequence: Synthetic oligonucleotide
  Antisense strand to SEQ ID NO: 1806049
uuauuccaggguuuaagcc

SEQ ID NO: 1806051 - RNA, 19 nt, Artificial Sequence
  Description of Artificial Sequence: Synthetic oligonucleotide
  Sense strand starting at position 1871 of SEQ ID NO: 1563246
guagaagagucaguaaaug

SEQ ID NO: 1806052 - RNA, 19 nt, Artificial Sequence
  Description of Artificial Sequence: Synthetic oligonucleotide
  Antisense strand to SEQ ID NO: 1806051
cauuuacugacucuucuac

SEQ ID NO: 1806053 - RNA, 19 nt, Artificial Sequence
  Description of Artificial Sequence: Synthetic oligonucleotide
  Sense strand starting at position 1879 of SEQ ID NO: 1563246
gucaguaaaugcgugaaau

SEQ ID NO: 1806054 - RNA, 19 nt, Artificial Sequence
  Description of Artificial Sequence: Synthetic oligonucleotide
  Antisense strand to SEQ ID NO: 1806053
auuucacgcauuuacugac

SEQ ID NO: 1806055 - RNA, 19 nt, Artificial Sequence
  Description of Artificial Sequence: Synthetic oligonucleotide
  Sense strand starting at position 1880 of SEQ ID NO: 1563246
ucaguaaaugcgugaaauc

SEQ ID NO: 1806056 - RNA, 19 nt, Artificial Sequence
  Description of Artificial Sequence: Synthetic oligonucleotide
  Antisense strand to SEQ ID NO: 1806055
gauuucacgcauuuacuga

SEQ ID NO: 1806057 - RNA, 19 nt, Artificial Sequence
  Description of Artificial Sequence: Synthetic oligonucleotide
  Sense strand starting at position 1890 of SEQ ID NO: 1563246
cgugaaauccaauguggcu

SEQ ID NO: 1806058 - RNA, 19 nt, Artificial Sequence
  Description of Artificial Sequence: Synthetic oligonucleotide
  Antisense strand to SEQ ID NO: 1806057
agccacauuggauuucacg

SEQ ID NO: 1806059 - RNA, 19 nt, Artificial Sequence
  Description of Artificial Sequence: Synthetic oligonucleotide
  Sense strand starting at position 1897 of SEQ ID NO: 1563246
uccaauguggcuugcugaa

SEQ ID NO: 1806060 - RNA, 19 nt, Artificial Sequence
  Description of Artificial Sequence: Synthetic oligonucleotide
  Antisense strand to SEQ ID NO: 1806059
uucagcaagccacauugga

SEQ ID NO: 1806061 - RNA, 19 nt, Artificial Sequence
  Description of Artificial Sequence: Synthetic oligonucleotide
  Sense strand starting at position 1941 of SEQ ID NO: 1563246
cacagaaauugaggauaug

SEQ ID NO: 1806062 - RNA, 19 nt, Artificial Sequence
  Description of Artificial Sequence: Synthetic oligonucleotide
  Antisense strand to SEQ ID NO: 1806061
cauauccucaauuucugug

SEQ ID NO: 1806063 - RNA, 19 nt, Artificial Sequence
  Description of Artificial Sequence: Synthetic oligonucleotide
  Sense strand starting at position 2033 of SEQ ID NO: 1563246
gagguaggcucauugugau

SEQ ID NO: 1806064 - RNA, 19 nt, Artificial Sequence
  Description of Artificial Sequence: Synthetic oligonucleotide
  Antisense strand to SEQ ID NO: 1806063
aucacaaugagccuaccuc

SEQ ID NO: 1806065 - RNA, 19 nt, Artificial Sequence
  Description of Artificial Sequence: Synthetic oligonucleotide
  Sense strand starting at position 2165 of SEQ ID NO: 1563246
gguuacuucuacccuuaag

SEQ ID NO: 1806066 - RNA, 19 nt, Artificial Sequence
  Description of Artificial Sequence: Synthetic oligonucleotide
  Antisense strand to SEQ ID NO: 1806065
cuuaaggguagaaguaacc

SEQ ID NO: 1806067 - RNA, 19 nt, Artificial Sequence
  Description of Artificial Sequence: Synthetic oligonucleotide
  Sense strand starting at position 2285 of SEQ ID NO: 1563246
gggcaagauccugagaguc

SEQ ID NO: 1806068 - RNA, 19 nt, Artificial Sequence
  Description of Artificial Sequence: Synthetic oligonucleotide
  Antisense strand to SEQ ID NO: 1806067
gacucucaggaucuugccc

SEQ ID NO: 1806069 - RNA, 19 nt, Artificial Sequence
  Description of Artificial Sequence: Synthetic oligonucleotide
  Sense strand starting at position 2297 of SEQ ID NO: 1563246
gagagucaggccugaaacu

SEQ ID NO: 1806070 - RNA, 19 nt, Artificial Sequence
  Description of Artificial Sequence: Synthetic oligonucleotide
  Antisense strand to SEQ ID NO: 1806069
aguuucaggccugacucuc

SEQ ID NO: 1806071 - RNA, 19 nt, Artificial Sequence
  Description of Artificial Sequence: Synthetic oligonucleotide
  Sense strand starting at position 2476 of SEQ ID NO: 1563246
accugaaauuuagacugga

SEQ ID NO: 1806072 - RNA, 19 nt, Artificial Sequence
  Description of Artificial Sequence: Synthetic oligonucleotide
  Antisense strand to SEQ ID NO: 1806071
uccagucuaaauuucaggu

SEQ ID NO: 1806073 - RNA, 19 nt, Artificial Sequence
  Description of Artificial Sequence: Synthetic oligonucleotide
  Sense strand starting at position 2494 of SEQ ID NO: 1563246
aacagacacuguucuggua

SEQ ID NO: 1806074 - RNA, 19 nt, Artificial Sequence
  Description of Artificial Sequence: Synthetic oligonucleotide
  Antisense strand to SEQ ID NO: 1806073
uaccagaacagugucuguu

SEQ ID NO: 1806075 - RNA, 19 nt, Artificial Sequence
  Description of Artificial Sequence: Synthetic oligonucleotide
  Sense strand starting at position 2690 of SEQ ID NO: 1563246
ccaucuaacuaugggagaa

SEQ ID NO: 1806076 - RNA, 19 nt, Artificial Sequence
  Description of Artificial Sequence: Synthetic oligonucleotide
  Antisense strand to SEQ ID NO: 1806075
uucucccauaguuagaugg

SEQ ID NO: 1806077 - RNA, 19 nt, Artificial Sequence
  Description of Artificial Sequence: Synthetic oligonucleotide
  Sense strand starting at position 2727 of SEQ ID NO: 1563246
agcaaauagucccuucuga

SEQ ID NO: 1806078 - RNA, 19 nt, Artificial Sequence
  Description of Artificial Sequence: Synthetic oligonucleotide
  Antisense strand to SEQ ID NO: 1806077
ucagaagggacuauuugcu

SEQ ID NO: 1806079 - RNA, 19 nt, Artificial Sequence
  Description of Artificial Sequence: Synthetic oligonucleotide
  Sense strand starting at position 2779 of SEQ ID NO: 1563246
aaguaacaacguuguuaau

SEQ ID NO: 1806080 - RNA, 19 nt, Artificial Sequence
  Description of Artificial Sequence: Synthetic oligonucleotide
  Antisense strand to SEQ ID NO: 1806079
auuaacaacguuguuacuu

SEQ ID NO: 1806081 - RNA, 19 nt, Artificial Sequence
  Description of Artificial Sequence: Synthetic oligonucleotide
  Sense strand starting at position 2781 of SEQ ID NO: 1563246
guaacaacguuguuaauga

SEQ ID NO: 1806082 - RNA, 19 nt, Artificial Sequence
  Description of Artificial Sequence: Synthetic oligonucleotide
  Antisense strand to SEQ ID NO: 1806081
ucauuaacaacguuguuac

SEQ ID NO: 1806083 - RNA, 19 nt, Artificial Sequence
  Description of Artificial Sequence: Synthetic oligonucleotide
  Sense strand starting at position 3100 of SEQ ID NO: 1563246
gauuuauaguauugugacc

SEQ ID NO: 1806084 - RNA, 19 nt, Artificial Sequence
  Description of Artificial Sequence: Synthetic oligonucleotide
  Antisense strand to SEQ ID NO: 1806083
ggucacaauacuauaaauc

SEQ ID NO: 1806085 - RNA, 19 nt, Artificial Sequence
  Description of Artificial Sequence: Synthetic oligonucleotide
  Sense strand starting at position 3167 of SEQ ID NO: 1563246
ccuagaugucuguggucau

SEQ ID NO: 1806086 - RNA, 19 nt, Artificial Sequence
  Description of Artificial Sequence: Synthetic oligonucleotide
  Antisense strand to SEQ ID NO: 1806085
augaccacagacaucuagg

SEQ ID NO: 1806087 - RNA, 19 nt, Artificial Sequence
  Description of Artificial Sequence: Synthetic oligonucleotide
  Sense strand starting at position 3170 of SEQ ID NO: 1563246
agaugucuguggucaucau

SEQ ID NO: 1806088 - RNA, 19 nt, Artificial Sequence
  Description of Artificial Sequence: Synthetic oligonucleotide
  Antisense strand to SEQ ID NO: 1806087
augaugaccacagacaucu

SEQ ID NO: 1806089 - RNA, 19 nt, Artificial Sequence
  Description of Artificial Sequence: Synthetic oligonucleotide
  Sense strand starting at position 3171 of SEQ ID NO: 1563246
gaugucuguggucaucaua

SEQ ID NO: 1806090 - RNA, 19 nt, Artificial Sequence
  Description of Artificial Sequence: Synthetic oligonucleotide
  Antisense strand to SEQ ID NO: 1806089
uaugaugaccacagacauc

SEQ ID NO: 1806091 - RNA, 19 nt, Artificial Sequence
  Description of Artificial Sequence: Synthetic oligonucleotide
  Sense strand starting at position 3259 of SEQ ID NO: 1563246
uuaagaugguucuuucgga

SEQ ID NO: 1806092 - RNA, 19 nt, Artificial Sequence
  Description of Artificial Sequence: Synthetic oligonucleotide
  Antisense strand to SEQ ID NO: 1806091
uccgaaagaaccaucuuaa

SEQ ID NO: 1806093 - RNA, 19 nt, Artificial Sequence
  Description of Artificial Sequence: Synthetic oligonucleotide
  Sense strand starting at position 3266 of SEQ ID NO: 1563246
gguucuuucggacauuacu

SEQ ID NO: 1806094 - RNA, 19 nt, Artificial Sequence
  Description of Artificial Sequence: Synthetic oligonucleotide
  Antisense strand to SEQ ID NO: 1806093
aguaauguccgaaagaacc

SEQ ID NO: 1806095 - RNA, 19 nt, Artificial Sequence
  Description of Artificial Sequence: Synthetic oligonucleotide
  Sense strand starting at position 3275 of SEQ ID NO: 1563246
ggacauuacuaguccacca

SEQ ID NO: 1806096 - RNA, 19 nt, Artificial Sequence
  Description of Artificial Sequence: Synthetic oligonucleotide
  Antisense strand to SEQ ID NO: 1806095
ugguggacuaguaaugucc

SEQ ID NO: 1806097 - RNA, 19 nt, Artificial Sequence
  Description of Artificial Sequence: Synthetic oligonucleotide
  Sense strand starting at position 3303 of SEQ ID NO: 1563246
guugcuggcucuccaaaua

SEQ ID NO: 1806098 - RNA, 19 nt, Artificial Sequence
  Description of Artificial Sequence: Synthetic oligonucleotide
  Antisense strand to SEQ ID NO: 1806097
uauuuggagagccagcaac

SEQ ID NO: 1806099 - RNA, 19 nt, Artificial Sequence
  Description of Artificial Sequence: Synthetic oligonucleotide
  Sense strand starting at position 3354 of SEQ ID NO: 1563246
uuaacuuauuggcugucau

SEQ ID NO: 1806100 - RNA, 19 nt, Artificial Sequence
  Description of Artificial Sequence: Synthetic oligonucleotide
  Antisense strand to SEQ ID NO: 1806099
augacagccaauaaguuaa

SEQ ID NO: 1806101 - RNA, 19 nt, Artificial Sequence
  Description of Artificial Sequence: Synthetic oligonucleotide
  Sense strand starting at position 3368 of SEQ ID NO: 1563246
gucauuuggugaguaguac

SEQ ID NO: 1806102 - RNA, 19 nt, Artificial Sequence
  Description of Artificial Sequence: Synthetic oligonucleotide
  Antisense strand to SEQ ID NO: 1806101
guacuacucaccaaaugac

SEQ ID NO: 1806103 - RNA, 19 nt, Artificial Sequence
  Description of Artificial Sequence: Synthetic oligonucleotide
  Sense strand starting at position 3374 of SEQ ID NO: 1563246
uggugaguaguacaaccuu

SEQ ID NO: 1806104 - RNA, 19 nt, Artificial Sequence
  Description of Artificial Sequence: Synthetic oligonucleotide
  Antisense strand to SEQ ID NO: 1806103
aagguuguacuacucacca

SEQ ID NO: 1806105 - RNA, 19 nt, Artificial Sequence
  Description of Artificial Sequence: Synthetic oligonucleotide
  Sense strand starting at position 3380 of SEQ ID NO: 1563246
guaguacaaccuuggacuu

SEQ ID NO: 1806106 - RNA, 19 nt, Artificial Sequence
  Description of Artificial Sequence: Synthetic oligonucleotide
  Antisense strand to SEQ ID NO: 1806105
aaguccaagguuguacuac

SEQ ID NO: 1806107 - RNA, 19 nt, Artificial Sequence
  Description of Artificial Sequence: Synthetic oligonucleotide
  Sense strand starting at position 3819 of SEQ ID NO: 1563246
gcaagaggagccugaagau

SEQ ID NO: 1806108 - RNA, 19 nt, Artificial Sequence
  Description of Artificial Sequence: Synthetic oligonucleotide
  Antisense strand to SEQ ID NO: 1806107
aucuucaggcuccucuugc

SEQ ID NO: 1806109 - RNA, 19 nt, Artificial Sequence
  Description of Artificial Sequence: Synthetic oligonucleotide
  Sense strand starting at position 3883 of SEQ ID NO: 1563246
ggaguugcugcuuauggaa

SEQ ID NO: 1806110 - RNA, 19 nt, Artificial Sequence
  Description of Artificial Sequence: Synthetic oligonucleotide
  Antisense strand to SEQ ID NO: 1806109
uuccauaagcagcaacucc

SEQ ID NO: 1806111 - RNA, 19 nt, Artificial Sequence
  Description of Artificial Sequence: Synthetic oligonucleotide
  Sense strand starting at position 3928 of SEQ ID NO: 1563246
gaaaucuacugguaaagau

SEQ ID NO: 1806112 - RNA, 19 nt, Artificial Sequence
  Description of Artificial Sequence: Synthetic oligonucleotide
  Antisense strand to SEQ ID NO: 1806111
aucuuuaccaguagauuuc

SEQ ID NO: 1806113 - RNA, 19 nt, Artificial Sequence
  Description of Artificial Sequence: Synthetic oligonucleotide
  Sense strand starting at position 3937 of SEQ ID NO: 1563246
ugguaaagaugccuuaaac

SEQ ID NO: 1806114 - RNA, 19 nt, Artificial Sequence
  Description of Artificial Sequence: Synthetic oligonucleotide
  Antisense strand to SEQ ID NO: 1806113
guuuaaggcaucuuuacca

SEQ ID NO: 1806115 - RNA, 19 nt, Artificial Sequence
  Description of Artificial Sequence: Synthetic oligonucleotide
  Sense strand starting at position 78 of SEQ ID NO: 1563247
ggcagauaauaucuaacac

SEQ ID NO: 1806116 - RNA, 19 nt, Artificial Sequence
  Description of Artificial Sequence: Synthetic oligonucleotide
  Antisense strand to SEQ ID NO: 1806115
guguuagauauuaucugcc

SEQ ID NO: 1806117 - RNA, 19 nt, Artificial Sequence
  Description of Artificial Sequence: Synthetic oligonucleotide
  Sense strand starting at position 93 of SEQ ID NO: 1563247
acacucuuggaaugguuaa

SEQ ID NO: 1806118 - RNA, 19 nt, Artificial Sequence
  Description of Artificial Sequence: Synthetic oligonucleotide
  Antisense strand to SEQ ID NO: 1806117
uuaaccauuccaagagugu

SEQ ID NO: 1806119 - RNA, 19 nt, Artificial Sequence
  Description of Artificial Sequence: Synthetic oligonucleotide
  Sense strand starting at position 100 of SEQ ID NO: 1563247
uggaaugguuaacuuuauu

SEQ ID NO: 1806120 - RNA, 19 nt, Artificial Sequence
  Description of Artificial Sequence: Synthetic oligonucleotide
  Antisense strand to SEQ ID NO: 1806119
aauaaaguuaaccauucca

SEQ ID NO: 1806121 - RNA, 19 nt, Artificial Sequence
  Description of Artificial Sequence: Synthetic oligonucleotide
  Sense strand starting at position 193 of SEQ ID NO: 1563247
uugugaaaugcucagcaua

SEQ ID NO: 1806122 - RNA, 19 nt, Artificial Sequence
  Description of Artificial Sequence: Synthetic oligonucleotide
  Antisense strand to SEQ ID NO: 1806121
uaugcugagcauuucacaa

SEQ ID NO: 1806123 - RNA, 19 nt, Artificial Sequence
  Description of Artificial Sequence: Synthetic oligonucleotide
  Sense strand starting at position 535 of SEQ ID NO: 1563247
cccuaauuggauuguuaau

SEQ ID NO: 1806124 - RNA, 19 nt, Artificial Sequence
  Description of Artificial Sequence: Synthetic oligonucleotide
  Antisense strand to SEQ ID NO: 1806123
auuaacaauccaauuaggg

SEQ ID NO: 1806125 - RNA, 19 nt, Artificial Sequence
  Description of Artificial Sequence: Synthetic oligonucleotide
  Sense strand starting at position 537 of SEQ ID NO: 1563247
cuaauuggauuguuaauca

SEQ ID NO: 1806126 - RNA, 19 nt, Artificial Sequence
  Description of Artificial Sequence: Synthetic oligonucleotide
  Antisense strand to SEQ ID NO: 1806125
ugauuaacaauccaauuag

SEQ ID NO: 1806127 - RNA, 19 nt, Artificial Sequence
  Description of Artificial Sequence: Synthetic oligonucleotide
  Sense strand starting at position 541 of SEQ ID NO: 1563247
uuggauuguuaaucauaag

SEQ ID NO: 1806128 - RNA, 19 nt, Artificial Sequence
  Description of Artificial Sequence: Synthetic oligonucleotide
  Antisense strand to SEQ ID NO: 1806127
cuuaugauuaacaauccaa

SEQ ID NO: 1806129 - RNA, 19 nt, Artificial Sequence
  Description of Artificial Sequence: Synthetic oligonucleotide
  Sense strand starting at position 670 of SEQ ID NO: 1563247
aucuaagugucacucacau

SEQ ID NO: 1806130 - RNA, 19 nt, Artificial Sequence
  Description of Artificial Sequence: Synthetic oligonucleotide
  Antisense strand to SEQ ID NO: 1806129
augugagugacacuuagau

SEQ ID NO: 1806131 - RNA, 19 nt, Artificial Sequence
  Description of Artificial Sequence: Synthetic oligonucleotide
  Sense strand starting at position 757 of SEQ ID NO: 1563247
aauguuccagcagauguua

SEQ ID NO: 1806132 - RNA, 19 nt, Artificial Sequence
  Description of Artificial Sequence: Synthetic oligonucleotide
  Antisense strand to SEQ ID NO: 1806131
uaacaucugcuggaacauu

SEQ ID NO: 1806133 - RNA, 19 nt, Artificial Sequence
  Description of Artificial Sequence: Synthetic oligonucleotide
  Sense strand starting at position 783 of SEQ ID NO: 1563247
cgauaauccuguucuauac

SEQ ID NO: 1806134 - RNA, 19 nt, Artificial Sequence
  Description of Artificial Sequence: Synthetic oligonucleotide
  Antisense strand to SEQ ID NO: 1806133
guauagaacaggauuaucg

SEQ ID NO: 1806135 - RNA, 19 nt, Artificial Sequence
  Description of Artificial Sequence: Synthetic oligonucleotide
  Sense strand starting at position 915 of SEQ ID NO: 1563247
agaaaucauucggugucaa

SEQ ID NO: 1806136 - RNA, 19 nt, Artificial Sequence
  Description of Artificial Sequence: Synthetic oligonucleotide
  Antisense strand to SEQ ID NO: 1806135
uugacaccgaaugauuucu

SEQ ID NO: 1806137 - RNA, 19 nt, Artificial Sequence
  Description of Artificial Sequence: Synthetic oligonucleotide
  Sense strand starting at position 916 of SEQ ID NO: 1563247
gaaaucauucggugucaac

SEQ ID NO: 1806138 - RNA, 19 nt, Artificial Sequence
  Description of Artificial Sequence: Synthetic oligonucleotide
  Antisense strand to SEQ ID NO: 1806137
guugacaccgaaugauuuc

SEQ ID NO: 1806139 - RNA, 19 nt, Artificial Sequence
  Description of Artificial Sequence: Synthetic oligonucleotide
  Sense strand starting at position 981 of SEQ ID NO: 1563247
gugcuaacagaauacugau

SEQ ID NO: 1806140 - RNA, 19 nt, Artificial Sequence
  Description of Artificial Sequence: Synthetic oligonucleotide
  Antisense strand to SEQ ID NO: 1806139
aucaguauucuguuagcac

SEQ ID NO: 1806141 - RNA, 19 nt, Artificial Sequence
  Description of Artificial Sequence: Synthetic oligonucleotide
  Sense strand starting at position 987 of SEQ ID NO: 1563247
acagaauacugaucugcaa

SEQ ID NO: 1806142 - RNA, 19 nt, Artificial Sequence
  Description of Artificial Sequence: Synthetic oligonucleotide
  Antisense strand to SEQ ID NO: 1806141
uugcagaucaguauucugu

SEQ ID NO: 1806143 - RNA, 19 nt, Artificial Sequence
  Description of Artificial Sequence: Synthetic oligonucleotide
  Sense strand starting at position 1028 of SEQ ID NO: 1563247
gucuaaucucacuguagag

SEQ ID NO: 1806144 - RNA, 19 nt, Artificial Sequence
  Description of Artificial Sequence: Synthetic oligonucleotide
  Antisense strand to SEQ ID NO: 1806143
cucuacagugagauuagac

SEQ ID NO: 1806145 - RNA, 19 nt, Artificial Sequence
  Description of Artificial Sequence: Synthetic oligonucleotide
  Sense strand starting at position 1207 of SEQ ID NO: 1563247
guucguucugggagacggu

SEQ ID NO: 1806146 - RNA, 19 nt, Artificial Sequence
  Description of Artificial Sequence: Synthetic oligonucleotide
  Antisense strand to SEQ ID NO: 1806145
accgucucccagaacgaac

SEQ ID NO: 1806147 - RNA, 19 nt, Artificial Sequence
  Description of Artificial Sequence: Synthetic oligonucleotide
  Sense strand starting at position 1300 of SEQ ID NO: 1563247
cgcacuaugccagucguga

SEQ ID NO: 1806148 - RNA, 19 nt, Artificial Sequence
  Description of Artificial Sequence: Synthetic oligonucleotide
  Antisense strand to SEQ ID NO: 1806147
ucacgacuggcauagugcg

SEQ ID NO: 1806149 - RNA, 19 nt, Artificial Sequence
  Description of Artificial Sequence: Synthetic oligonucleotide
  Sense strand starting at position 1324 of SEQ ID NO: 1563247
acagcaucgccugaaacuu

SEQ ID NO: 1806150 - RNA, 19 nt, Artificial Sequence
  Description of Artificial Sequence: Synthetic oligonucleotide
  Antisense strand to SEQ ID NO: 1806149
aaguuucaggcgaugcugu

SEQ ID NO: 1806151 - RNA, 19 nt, Artificial Sequence
  Description of Artificial Sequence: Synthetic oligonucleotide
  Sense strand starting at position 1857 of SEQ ID NO: 1563247
ggccgauguaaggguaaga

SEQ ID NO: 1806152 - RNA, 19 nt, Artificial Sequence
  Description of Artificial Sequence: Synthetic oligonucleotide
  Antisense strand to SEQ ID NO: 1806151
ucuuacccuuacaucggcc

SEQ ID NO: 1806153 - RNA, 19 nt, Artificial Sequence
  Description of Artificial Sequence: Synthetic oligonucleotide
  Sense strand starting at position 2090 of SEQ ID NO: 1563247
gggaaagcaccucagguuu

SEQ ID NO: 1806154 - RNA, 19 nt, Artificial Sequence
  Description of Artificial Sequence: Synthetic oligonucleotide
  Antisense strand to SEQ ID NO: 1806153
aaaccugaggugcuuuccc

SEQ ID NO: 1806155 - RNA, 19 nt, Artificial Sequence
  Description of Artificial Sequence: Synthetic oligonucleotide
  Sense strand starting at position 2412 of SEQ ID NO: 1563247
gggagaucgugacugagaa

SEQ ID NO: 1806156 - RNA, 19 nt, Artificial Sequence
  Description of Artificial Sequence: Synthetic oligonucleotide
  Antisense strand to SEQ ID NO: 1806155
uucucagucacgaucuccc

SEQ ID NO: 1806157 - RNA, 19 nt, Artificial Sequence
  Description of Artificial Sequence: Synthetic oligonucleotide
  Sense strand starting at position 2413 of SEQ ID NO: 1563247
ggagaucgugacugagaaa

SEQ ID NO: 1806158 - RNA, 19 nt, Artificial Sequence
  Description of Artificial Sequence: Synthetic oligonucleotide
  Antisense strand to SEQ ID NO: 1806157
uuucucagucacgaucucc

SEQ ID NO: 1806159 - RNA, 19 nt, Artificial Sequence
  Description of Artificial Sequence: Synthetic oligonucleotide
  Sense strand starting at position 2475 of SEQ ID NO: 1563247
ccgccugucacugcggaaa

SEQ ID NO: 1806160 - RNA, 19 nt, Artificial Sequence
  Description of Artificial Sequence: Synthetic oligonucleotide
  Antisense strand to SEQ ID NO: 1806159
uuuccgcagugacaggcgg

SEQ ID NO: 1806161 - RNA, 19 nt, Artificial Sequence
  Description of Artificial Sequence: Synthetic oligonucleotide
  Sense strand starting at position 2809 of SEQ ID NO: 1563247
gccugaggauuccuuacac

SEQ ID NO: 1806162 - RNA, 19 nt, Artificial Sequence
  Description of Artificial Sequence: Synthetic oligonucleotide
  Antisense strand to SEQ ID NO: 1806161
guguaaggaauccucaggc

SEQ ID NO: 1806163 - RNA, 19 nt, Artificial Sequence
  Description of Artificial Sequence: Synthetic oligonucleotide
  Sense strand starting at position 2938 of SEQ ID NO: 1563247
gcuugaaagcaaugaaguc

SEQ ID NO: 1806164 - RNA, 19 nt, Artificial Sequence
  Description of Artificial Sequence: Synthetic oligonucleotide
  Antisense strand to SEQ ID NO: 1806163
gacuucauugcuuucaagc

SEQ ID NO: 1806165 - RNA, 19 nt, Artificial Sequence
  Description of Artificial Sequence: Synthetic oligonucleotide
  Sense strand starting at position 3003 of SEQ ID NO: 1563247
ucggguuuccaaggaggau

SEQ ID NO: 1806166 - RNA, 19 nt, Artificial Sequence
  Description of Artificial Sequence: Synthetic oligonucleotide
  Antisense strand to SEQ ID NO: 1806165
auccuccuuggaaacccga

SEQ ID NO: 1806167 - RNA, 19 nt, Artificial Sequence
  Description of Artificial Sequence: Synthetic oligonucleotide
  Sense strand starting at position 3119 of SEQ ID NO: 1563247
uggaaagcugcauaauuau

SEQ ID NO: 1806168 - RNA, 19 nt, Artificial Sequence
  Description of Artificial Sequence: Synthetic oligonucleotide
  Antisense strand to SEQ ID NO: 1806167
auaauuaugcagcuuucca

SEQ ID NO: 1806169 - RNA, 19 nt, Artificial Sequence
  Description of Artificial Sequence: Synthetic oligonucleotide
  Sense strand starting at position 3169 of SEQ ID NO: 1563247
ggucucuucugguuaggaa

SEQ ID NO: 1806170 - RNA, 19 nt, Artificial Sequence
  Description of Artificial Sequence: Synthetic oligonucleotide
  Antisense strand to SEQ ID NO: 1806169
uuccuaaccagaagagacc

SEQ ID NO: 1806171 - RNA, 19 nt, Artificial Sequence
  Description of Artificial Sequence: Synthetic oligonucleotide
  Sense strand starting at position 3170 of SEQ ID NO: 1563247
gucucuucugguuaggaaa

SEQ ID NO: 1806172 - RNA, 19 nt, Artificial Sequence
  Description of Artificial Sequence: Synthetic oligonucleotide
  Antisense strand to SEQ ID NO: 1806171
uuuccuaaccagaagagac

SEQ ID NO: 1806173 - RNA, 19 nt, Artificial Sequence
  Description of Artificial Sequence: Synthetic oligonucleotide
  Sense strand starting at position 3205 of SEQ ID NO: 1563247
aguguaugaggucauagcu

SEQ ID NO: 1806174 - RNA, 19 nt, Artificial Sequence
  Description of Artificial Sequence: Synthetic oligonucleotide
  Antisense strand to SEQ ID NO: 1806173
agcuaugaccucauacacu

SEQ ID NO: 1806175 - RNA, 19 nt, Artificial Sequence
  Description of Artificial Sequence: Synthetic oligonucleotide
  Sense strand starting at position 3382 of SEQ ID NO: 1563247
gugaauauuugaugaggaa

SEQ ID NO: 1806176 - RNA, 19 nt, Artificial Sequence
  Description of Artificial Sequence: Synthetic oligonucleotide
  Antisense strand to SEQ ID NO: 1806175
uuccucaucaaauauucac

SEQ ID NO: 1806177 - RNA, 19 nt, Artificial Sequence
  Description of Artificial Sequence: Synthetic oligonucleotide
  Sense strand starting at position 3385 of SEQ ID NO: 1563247
aauauuugaugaggaaaug

SEQ ID NO: 1806178 - RNA, 19 nt, Artificial Sequence
  Description of Artificial Sequence: Synthetic oligonucleotide
  Antisense strand to SEQ ID NO: 1806177
cauuuccucaucaaauauu

SEQ ID NO: 1806179 - RNA, 19 nt, Artificial Sequence
  Description of Artificial Sequence: Synthetic oligonucleotide
  Sense strand starting at position 3439 of SEQ ID NO: 1563247
agcaaugaauuagcaaaga

SEQ ID NO: 1806180 - RNA, 19 nt, Artificial Sequence
  Description of Artificial Sequence: Synthetic oligonucleotide
  Antisense strand to SEQ ID NO: 1806179
ucuuugcuaauucauugcu

SEQ ID NO: 1806181 - RNA, 19 nt, Artificial Sequence
  Description of Artificial Sequence: Synthetic oligonucleotide
  Sense strand starting at position 3680 of SEQ ID NO: 1563247
ccuggugaaccggaaguaa

SEQ ID NO: 1806182 - RNA, 19 nt, Artificial Sequence
  Description of Artificial Sequence: Synthetic oligonucleotide
  Antisense strand to SEQ ID NO: 1806181
uuacuuccgguucaccagg

SEQ ID NO: 1806183 - RNA, 19 nt, Artificial Sequence
  Description of Artificial Sequence: Synthetic oligonucleotide
  Sense strand starting at position 3704 of SEQ ID NO: 1563247
uaauuauccguauagauug

SEQ ID NO: 1806184 - RNA, 19 nt, Artificial Sequence
  Description of Artificial Sequence: Synthetic oligonucleotide
  Antisense strand to SEQ ID NO: 1806183
caaucuauacggauaauua

SEQ ID NO: 1806185 - RNA, 19 nt, Artificial Sequence
  Description of Artificial Sequence: Synthetic oligonucleotide
  Sense strand starting at position 3709 of SEQ ID NO: 1563247
auccguauagauugagaag

SEQ ID NO: 1806186 - RNA, 19 nt, Artificial Sequence
  Description of Artificial Sequence: Synthetic oligonucleotide
  Antisense strand to SEQ ID NO: 1806185
cuucucaaucuauacggau

SEQ ID NO: 1806187 - RNA, 19 nt, Artificial Sequence
  Description of Artificial Sequence: Synthetic oligonucleotide
  Sense strand starting at position 3754 of SEQ ID NO: 1563247
cuguuaauauagguccaau

SEQ ID NO: 1806188 - RNA, 19 nt, Artificial Sequence
  Description of Artificial Sequence: Synthetic oligonucleotide
  Antisense strand to SEQ ID NO: 1806187
auuggaccuauauuaacag

SEQ ID NO: 1806189 - RNA, 19 nt, Artificial Sequence
  Description of Artificial Sequence: Synthetic oligonucleotide
  Sense strand starting at position 3765 of SEQ ID NO: 1563247
gguccaauuuaguauuaag

SEQ ID NO: 1806190 - RNA, 19 nt, Artificial Sequence
  Description of Artificial Sequence: Synthetic oligonucleotide
  Antisense strand to SEQ ID NO: 1806189
cuuaauacuaaauuggacc

SEQ ID NO: 1806191 - RNA, 19 nt, Artificial Sequence
  Description of Artificial Sequence: Synthetic oligonucleotide
  Sense strand starting at position 3768 of SEQ ID NO: 1563247
ccaauuuaguauuaaguag

SEQ ID NO: 1806192 - RNA, 19 nt, Artificial Sequence
  Description of Artificial Sequence: Synthetic oligonucleotide
  Antisense strand to SEQ ID NO: 1806191
cuacuuaauacuaaauugg

SEQ ID NO: 1806193 - RNA, 19 nt, Artificial Sequence
  Description of Artificial Sequence: Synthetic oligonucleotide
  Sense strand starting at position 3896 of SEQ ID NO: 1563247
ucacuugcaguuuaguuaa

SEQ ID NO: 1806194 - RNA, 19 nt, Artificial Sequence
  Description of Artificial Sequence: Synthetic oligonucleotide
  Antisense strand to SEQ ID NO: 1806193
uuaacuaaacugcaaguga

SEQ ID NO: 1806195 - RNA, 19 nt, Artificial Sequence
  Description of Artificial Sequence: Synthetic oligonucleotide
  Sense strand starting at position 10 of SEQ ID NO: 1563248
acaggucuucuagaggcua

SEQ ID NO: 1806196 - RNA, 19 nt, Artificial Sequence
  Description of Artificial Sequence: Synthetic oligonucleotide
  Antisense strand to SEQ ID NO: 1806195
uagccucuagaagaccugu

SEQ ID NO: 1806197 - RNA, 19 nt, Artificial Sequence
  Description of Artificial Sequence: Synthetic oligonucleotide
  Sense strand starting at position 15 of SEQ ID NO: 1563248
ucuucuagaggcuauguau

SEQ ID NO: 1806198 - RNA, 19 nt, Artificial Sequence
  Description of Artificial Sequence: Synthetic oligonucleotide
  Antisense strand to SEQ ID NO: 1806197
auacauagccucuagaaga

SEQ ID NO: 1806199 - RNA, 19 nt, Artificial Sequence
  Description of Artificial Sequence: Synthetic oligonucleotide
  Sense strand starting at position 39 of SEQ ID NO: 1563248
aguguuuaagucuagauuc

SEQ ID NO: 1806200 - RNA, 19 nt, Artificial Sequence
  Description of Artificial Sequence: Synthetic oligonucleotide
  Antisense strand to SEQ ID NO: 1806199
gaaucuagacuuaaacacu

SEQ ID NO: 1806201 - RNA, 19 nt, Artificial Sequence
  Description of Artificial Sequence: Synthetic oligonucleotide
  Sense strand starting at position 41 of SEQ ID NO: 1563248
uguuuaagucuagauucuu

SEQ ID NO: 1806202 - RNA, 19 nt, Artificial Sequence
  Description of Artificial Sequence: Synthetic oligonucleotide
  Antisense strand to SEQ ID NO: 1806201
aagaaucuagacuuaaaca

SEQ ID NO: 1806203 - RNA, 19 nt, Artificial Sequence
  Description of Artificial Sequence: Synthetic oligonucleotide
  Sense strand starting at position 689 of SEQ ID NO: 1563248
aucucaaggucuuccagau

SEQ ID NO: 1806204 - RNA, 19 nt, Artificial Sequence
  Description of Artificial Sequence: Synthetic oligonucleotide
  Antisense strand to SEQ ID NO: 1806203
aucuggaagaccuugagau

SEQ ID NO: 1806205 - RNA, 19 nt, Artificial Sequence
  Description of Artificial Sequence: Synthetic oligonucleotide
  Sense strand starting at position 702 of SEQ ID NO: 1563248
ccagauaauccugagcuuc

SEQ ID NO: 1806206 - RNA, 19 nt, Artificial Sequence
  Description of Artificial Sequence: Synthetic oligonucleotide
  Antisense strand to SEQ ID NO: 1806205
gaagcucaggauuaucugg

SEQ ID NO: 1806207 - RNA, 19 nt, Artificial Sequence
  Description of Artificial Sequence: Synthetic oligonucleotide
  Sense strand starting at position 704 of SEQ ID NO: 1563248
agauaauccugagcuucca

SEQ ID NO: 1806208 - RNA, 19 nt, Artificial Sequence
  Description of Artificial Sequence: Synthetic oligonucleotide
  Antisense strand to SEQ ID NO: 1806207
uggaagcucaggauuaucu

SEQ ID NO: 1806209 - RNA, 19 nt, Artificial Sequence
  Description of Artificial Sequence: Synthetic oligonucleotide
  Sense strand starting at position 747 of SEQ ID NO: 1563248
ccaugucuuccggacaauc

SEQ ID NO: 1806210 - RNA, 19 nt, Artificial Sequence
  Description of Artificial Sequence: Synthetic oligonucleotide
  Antisense strand to SEQ ID NO: 1806209
gauuguccggaagacaugg

SEQ ID NO: 1806211 - RNA, 19 nt, Artificial Sequence
  Description of Artificial Sequence: Synthetic oligonucleotide
  Sense strand starting at position 749 of SEQ ID NO: 1563248
augucuuccggacaaucca

SEQ ID NO: 1806212 - RNA, 19 nt, Artificial Sequence
  Description of Artificial Sequence: Synthetic oligonucleotide
  Antisense strand to SEQ ID NO: 1806211
uggauuguccggaagacau

SEQ ID NO: 1806213 - RNA, 19 nt, Artificial Sequence
  Description of Artificial Sequence: Synthetic oligonucleotide
  Sense strand starting at position 882 of SEQ ID NO: 1563248
ccaggaaauccaugucuuc

SEQ ID NO: 1806214 - RNA, 19 nt, Artificial Sequence
  Description of Artificial Sequence: Synthetic oligonucleotide
  Antisense strand to SEQ ID NO: 1806213
gaagacauggauuuccugg

SEQ ID NO: 1806215 - RNA, 19 nt, Artificial Sequence
  Description of Artificial Sequence: Synthetic oligonucleotide
  Sense strand starting at position 885 of SEQ ID NO: 1563248
ggaaauccaugucuuccaa

SEQ ID NO: 1806216 - RNA, 19 nt, Artificial Sequence
  Description of Artificial Sequence: Synthetic oligonucleotide
  Antisense strand to SEQ ID NO: 1806215
uuggaagacauggauuucc

SEQ ID NO: 1806217 - RNA, 19 nt, Artificial Sequence
  Description of Artificial Sequence: Synthetic oligonucleotide
  Sense strand starting at position 1089 of SEQ ID NO: 1563248
gaaagaaauccaggucuuc

SEQ ID NO: 1806218 - RNA, 19 nt, Artificial Sequence
  Description of Artificial Sequence: Synthetic oligonucleotide
  Antisense strand to SEQ ID NO: 1806217
gaagaccuggauuucuuuc

SEQ ID NO: 1806219 - RNA, 19 nt, Artificial Sequence
  Description of Artificial Sequence: Synthetic oligonucleotide
  Sense strand starting at position 1207 of SEQ ID NO: 1563248
auauaugucuuccugaaga

SEQ ID NO: 1806220 - RNA, 19 nt, Artificial Sequence
  Description of Artificial Sequence: Synthetic oligonucleotide
  Antisense strand to SEQ ID NO: 1806219
ucuucaggaagacauauau

SEQ ID NO: 1806221 - RNA, 19 nt, Artificial Sequence
  Description of Artificial Sequence: Synthetic oligonucleotide
  Sense strand starting at position 1209 of SEQ ID NO: 1563248
auaugucuuccugaagauc

SEQ ID NO: 1806222 - RNA, 19 nt, Artificial Sequence
  Description of Artificial Sequence: Synthetic oligonucleotide
  Antisense strand to SEQ ID NO: 1806221
gaucuucaggaagacauau

SEQ ID NO: 1806223 - RNA, 19 nt, Artificial Sequence
  Description of Artificial Sequence: Synthetic oligonucleotide
  Sense strand starting at position 1223 of SEQ ID NO: 1563248
agauccacgucuuccagaa

SEQ ID NO: 1806224 - RNA, 19 nt, Artificial Sequence
  Description of Artificial Sequence: Synthetic oligonucleotide
  Antisense strand to SEQ ID NO: 1806223
uucuggaagacguggaucu

SEQ ID NO: 1806225 - RNA, 19 nt, Artificial Sequence
  Description of Artificial Sequence: Synthetic oligonucleotide
  Sense strand starting at position 1318 of SEQ ID NO: 1563248
ccaagucuuccggauaauu

SEQ ID NO: 1806226 - RNA, 19 nt, Artificial Sequence
  Description of Artificial Sequence: Synthetic oligonucleotide
  Antisense strand to SEQ ID NO: 1806225
aauuauccggaagacuugg

SEQ ID NO: 1806227 - RNA, 19 nt, Artificial Sequence
  Description of Artificial Sequence: Synthetic oligonucleotide
  Sense strand starting at position 1409 of SEQ ID NO: 1563248
ccaggucuuccagacuauc

SEQ ID NO: 1806228 - RNA, 19 nt, Artificial Sequence
  Description of Artificial Sequence: Synthetic oligonucleotide
  Antisense strand to SEQ ID NO: 1806227
gauagucuggaagaccugg

SEQ ID NO: 1806229 - RNA, 19 nt, Artificial Sequence
  Description of Artificial Sequence: Synthetic oligonucleotide
  Sense strand starting at position 1412 of SEQ ID NO: 1563248
ggucuuccagacuauccau

SEQ ID NO: 1806230 - RNA, 19 nt, Artificial Sequence
  Description of Artificial Sequence: Synthetic oligonucleotide
  Antisense strand to SEQ ID NO: 1806229
auggauagucuggaagacc

SEQ ID NO: 1806231 - RNA, 19 nt, Artificial Sequence
  Description of Artificial Sequence: Synthetic oligonucleotide
  Sense strand starting at position 1535 of SEQ ID NO: 1563248
ccaugucuuccagacuauc

SEQ ID NO: 1806232 - RNA, 19 nt, Artificial Sequence
  Description of Artificial Sequence: Synthetic oligonucleotide
  Antisense strand to SEQ ID NO: 1806231
gauagucuggaagacaugg

SEQ ID NO: 1806233 - RNA, 19 nt, Artificial Sequence
  Description of Artificial Sequence: Synthetic oligonucleotide
  Sense strand starting at position 1538 of SEQ ID NO: 1563248
ugucuuccagacuauccau

SEQ ID NO: 1806234 - RNA, 19 nt, Artificial Sequence
  Description of Artificial Sequence: Synthetic oligonucleotide
  Antisense strand to SEQ ID NO: 1806233
auggauagucuggaagaca

SEQ ID NO: 1806235 - RNA, 19 nt, Artificial Sequence
  Description of Artificial Sequence: Synthetic oligonucleotide
  Sense strand starting at position 1607 of SEQ ID NO: 1563248
ccaggucuuccaggaaauc

SEQ ID NO: 1806236 - RNA, 19 nt, Artificial Sequence
  Description of Artificial Sequence: Synthetic oligonucleotide
  Antisense strand to SEQ ID NO: 1806235
gauuuccuggaagaccugg

SEQ ID NO: 1806237 - RNA, 19 nt, Artificial Sequence
  Description of Artificial Sequence: Synthetic oligonucleotide
  Sense strand starting at position 1698 of SEQ ID NO: 1563248
ugugucuuccaacaaaggu

SEQ ID NO: 1806238 - RNA, 19 nt, Artificial Sequence
  Description of Artificial Sequence: Synthetic oligonucleotide
  Antisense strand to SEQ ID NO: 1806237
accuuuguuggaagacaca

SEQ ID NO: 1806239 - RNA, 19 nt, Artificial Sequence
  Description of Artificial Sequence: Synthetic oligonucleotide
  Sense strand starting at position 1765 of SEQ ID NO: 1563248
aaagguacgucuuccagaa

SEQ ID NO: 1806240 - RNA, 19 nt, Artificial Sequence
  Description of Artificial Sequence: Synthetic oligonucleotide
  Antisense strand to SEQ ID NO: 1806239
uucuggaagacguaccuuu

SEQ ID NO: 1806241 - RNA, 19 nt, Artificial Sequence
  Description of Artificial Sequence: Synthetic oligonucleotide
  Sense strand starting at position 1925 of SEQ ID NO: 1563248
gcaucugcucgucuuccaa

SEQ ID NO: 1806242 - RNA, 19 nt, Artificial Sequence
  Description of Artificial Sequence: Synthetic oligonucleotide
  Antisense strand to SEQ ID NO: 1806241
uuggaagacgagcagaugc

SEQ ID NO: 1806243 - RNA, 19 nt, Artificial Sequence
  Description of Artificial Sequence: Synthetic oligonucleotide
  Sense strand starting at position 2113 of SEQ ID NO: 1563248
uguucuauaguccagaucu

SEQ ID NO: 1806244 - RNA, 19 nt, Artificial Sequence
  Description of Artificial Sequence: Synthetic oligonucleotide
  Antisense strand to SEQ ID NO: 1806243
agaucuggacuauagaaca

SEQ ID NO: 1806245 - RNA, 19 nt, Artificial Sequence
  Description of Artificial Sequence: Synthetic oligonucleotide
  Sense strand starting at position 2271 of SEQ ID NO: 1563248
augggacauuccuccuuau

SEQ ID NO: 1806246 - RNA, 19 nt, Artificial Sequence
  Description of Artificial Sequence: Synthetic oligonucleotide
  Antisense strand to SEQ ID NO: 1806245
auaaggaggaaugucccau

SEQ ID NO: 1806247 - RNA, 19 nt, Artificial Sequence
  Description of Artificial Sequence: Synthetic oligonucleotide
  Sense strand starting at position 2274 of SEQ ID NO: 1563248
ggacauuccuccuuauaga

SEQ ID NO: 1806248 - RNA, 19 nt, Artificial Sequence
  Description of Artificial Sequence: Synthetic oligonucleotide
  Antisense strand to SEQ ID NO: 1806247
ucuauaaggaggaaugucc

SEQ ID NO: 1806249 - RNA, 19 nt, Artificial Sequence
  Description of Artificial Sequence: Synthetic oligonucleotide
  Sense strand starting at position 2349 of SEQ ID NO: 1563248
guguuuaaucccuacaacu

SEQ ID NO: 1806250 - RNA, 19 nt, Artificial Sequence
  Description of Artificial Sequence: Synthetic oligonucleotide
  Antisense strand to SEQ ID NO: 1806249
aguuguagggauuaaacac

SEQ ID NO: 1806251 - RNA, 19 nt, Artificial Sequence
  Description of Artificial Sequence: Synthetic oligonucleotide
  Sense strand starting at position 2411 of SEQ ID NO: 1563248
auaggacugcugcaauaaa

SEQ ID NO: 1806252 - RNA, 19 nt, Artificial Sequence
  Description of Artificial Sequence: Synthetic oligonucleotide
  Antisense strand to SEQ ID NO: 1806251
uuuauugcagcaguccuau

SEQ ID NO: 1806253 - RNA, 19 nt, Artificial Sequence
  Description of Artificial Sequence: Synthetic oligonucleotide
  Sense strand starting at position 2472 of SEQ ID NO: 1563248
uauguuuaggucuaaguga

SEQ ID NO: 1806254 - RNA, 19 nt, Artificial Sequence
  Description of Artificial Sequence: Synthetic oligonucleotide
  Antisense strand to SEQ ID NO: 1806253
ucacuuagaccuaaacaua

SEQ ID NO: 1806255 - RNA, 19 nt, Artificial Sequence
  Description of Artificial Sequence: Synthetic oligonucleotide
  Sense strand starting at position 2542 of SEQ ID NO: 1563248
aguuaacauguagaguauu

SEQ ID NO: 1806256 - RNA, 19 nt, Artificial Sequence
  Description of Artificial Sequence: Synthetic oligonucleotide
  Antisense strand to SEQ ID NO: 1806255
aauacucuacauguuaacu

SEQ ID NO: 1806257 - RNA, 19 nt, Artificial Sequence
  Description of Artificial Sequence: Synthetic oligonucleotide
  Sense strand starting at position 2597 of SEQ ID NO: 1563248
ggucuuacaugaccaaaga

SEQ ID NO: 1806258 - RNA, 19 nt, Artificial Sequence
  Description of Artificial Sequence: Synthetic oligonucleotide
  Antisense strand to SEQ ID NO: 1806257
ucuuuggucauguaagacc

SEQ ID NO: 1806259 - RNA, 19 nt, Artificial Sequence
  Description of Artificial Sequence: Synthetic oligonucleotide
  Sense strand starting at position 2694 of SEQ ID NO: 1563248
guucucagauccuuacaug

SEQ ID NO: 1806260 - RNA, 19 nt, Artificial Sequence
  Description of Artificial Sequence: Synthetic oligonucleotide
  Antisense strand to SEQ ID NO: 1806259
cauguaaggaucugagaac

SEQ ID NO: 1806261 - RNA, 19 nt, Artificial Sequence
  Description of Artificial Sequence: Synthetic oligonucleotide
  Sense strand starting at position 2882 of SEQ ID NO: 1563248
gugagaguccaugauugua

SEQ ID NO: 1806262 - RNA, 19 nt, Artificial Sequence
  Description of Artificial Sequence: Synthetic oligonucleotide
  Antisense strand to SEQ ID NO: 1806261
uacaaucauggacucucac

SEQ ID NO: 1806263 - RNA, 19 nt, Artificial Sequence
  Description of Artificial Sequence: Synthetic oligonucleotide
  Sense strand starting at position 2884 of SEQ ID NO: 1563248
gagaguccaugauuguaac

SEQ ID NO: 1806264 - RNA, 19 nt, Artificial Sequence
  Description of Artificial Sequence: Synthetic oligonucleotide
  Antisense strand to SEQ ID NO: 1806263
guuacaaucauggacucuc

SEQ ID NO: 1806265 - RNA, 19 nt, Artificial Sequence
  Description of Artificial Sequence: Synthetic oligonucleotide
  Sense strand starting at position 2945 of SEQ ID NO: 1563248
augugauccaaagguugau

SEQ ID NO: 1806266 - RNA, 19 nt, Artificial Sequence
  Description of Artificial Sequence: Synthetic oligonucleotide
  Antisense strand to SEQ ID NO: 1806265
aucaaccuuuggaucacau

SEQ ID NO: 1806267 - RNA, 19 nt, Artificial Sequence
  Description of Artificial Sequence: Synthetic oligonucleotide
  Sense strand starting at position 3639 of SEQ ID NO: 1563248
ccuucugaaugucuaauga

SEQ ID NO: 1806268 - RNA, 19 nt, Artificial Sequence
  Description of Artificial Sequence: Synthetic oligonucleotide
  Antisense strand to SEQ ID NO: 1806267
ucauuagacauucagaagg

SEQ ID NO: 1806269 - RNA, 19 nt, Artificial Sequence
  Description of Artificial Sequence: Synthetic oligonucleotide
  Sense strand starting at position 3699 of SEQ ID NO: 1563248
auauuuauugagcgcuaac

SEQ ID NO: 1806270 - RNA, 19 nt, Artificial Sequence
  Description of Artificial Sequence: Synthetic oligonucleotide
  Antisense strand to SEQ ID NO: 1806269
guuagcgcucaauaaauau

SEQ ID NO: 1806271 - RNA, 19 nt, Artificial Sequence
  Description of Artificial Sequence: Synthetic oligonucleotide
  Sense strand starting at position 3798 of SEQ ID NO: 1563248
uuguuaaggccaugaagaa

SEQ ID NO: 1806272 - RNA, 19 nt, Artificial Sequence
  Description of Artificial Sequence: Synthetic oligonucleotide
  Antisense strand to SEQ ID NO: 1806271
uucuucauggccuuaacaa

SEQ ID NO: 1806273 - RNA, 19 nt, Artificial Sequence
  Description of Artificial Sequence: Synthetic oligonucleotide
  Sense strand starting at position 3889 of SEQ ID NO: 1563248
ucuauauugucauuugguu

SEQ ID NO: 1806274 - RNA, 19 nt, Artificial Sequence
  Description of Artificial Sequence: Synthetic oligonucleotide
  Antisense strand to SEQ ID NO: 1806273
aaccaaaugacaauauaga

SEQ ID NO: 1806275 - RNA, 19 nt, Artificial Sequence
  Description of Artificial Sequence: Synthetic oligonucleotide
  Sense strand starting at position 67 of SEQ ID NO: 1563249
aguggauguuaauuacaac

SEQ ID NO: 1806276 - RNA, 19 nt, Artificial Sequence
  Description of Artificial Sequence: Synthetic oligonucleotide
  Antisense strand to SEQ ID NO: 1806275
guuguaauuaacauccacu

SEQ ID NO: 1806277 - RNA, 19 nt, Artificial Sequence
  Description of Artificial Sequence: Synthetic oligonucleotide
  Sense strand starting at position 153 of SEQ ID NO: 1563249
ucgacagacucacucauau

SEQ ID NO: 1806278 - RNA, 19 nt, Artificial Sequence
  Description of Artificial Sequence: Synthetic oligonucleotide
  Antisense strand to SEQ ID NO: 1806277
auaugagugagucugucga

SEQ ID NO: 1806279 - RNA, 19 nt, Artificial Sequence
  Description of Artificial Sequence: Synthetic oligonucleotide
  Sense strand starting at position 378 of SEQ ID NO: 1563249
ggagcauaaucauugcgga

SEQ ID NO: 1806280 - RNA, 19 nt, Artificial Sequence
  Description of Artificial Sequence: Synthetic oligonucleotide
  Antisense strand to SEQ ID NO: 1806279
uccgcaaugauuaugcucc

SEQ ID NO: 1806281 - RNA, 19 nt, Artificial Sequence
  Description of Artificial Sequence: Synthetic oligonucleotide
  Sense strand starting at position 383 of SEQ ID NO: 1563249
auaaucauugcggacaaau

SEQ ID NO: 1806282 - RNA, 19 nt, Artificial Sequence
  Description of Artificial Sequence: Synthetic oligonucleotide
  Antisense strand to SEQ ID NO: 1806281
auuuguccgcaaugauuau

SEQ ID NO: 1806283 - RNA, 19 nt, Artificial Sequence
  Description of Artificial Sequence: Synthetic oligonucleotide
  Sense strand starting at position 478 of SEQ ID NO: 1563249
gggagcgaggguuggaaua

SEQ ID NO: 1806284 - RNA, 19 nt, Artificial Sequence
  Description of Artificial Sequence: Synthetic oligonucleotide
  Antisense strand to SEQ ID NO: 1806283
uauuccaacccucgcuccc

SEQ ID NO: 1806285 - RNA, 19 nt, Artificial Sequence
  Description of Artificial Sequence: Synthetic oligonucleotide
  Sense strand starting at position 479 of SEQ ID NO: 1563249
ggagcgaggguuggaauaa

SEQ ID NO: 1806286 - RNA, 19 nt, Artificial Sequence
  Description of Artificial Sequence: Synthetic oligonucleotide
  Antisense strand to SEQ ID NO: 1806285
uuauuccaacccucgcucc

SEQ ID NO: 1806287 - RNA, 19 nt, Artificial Sequence
  Description of Artificial Sequence: Synthetic oligonucleotide
  Sense strand starting at position 626 of SEQ ID NO: 1563249
cugugaucgcgaucgcuuu

SEQ ID NO: 1806288 - RNA, 19 nt, Artificial Sequence
  Description of Artificial Sequence: Synthetic oligonucleotide
  Antisense strand to SEQ ID NO: 1806287
aaagcgaucgcgaucacag

SEQ ID NO: 1806289 - RNA, 19 nt, Artificial Sequence
  Description of Artificial Sequence: Synthetic oligonucleotide
  Sense strand starting at position 630 of SEQ ID NO: 1563249
gaucgcgaucgcuuugacu

SEQ ID NO: 1806290 - RNA, 19 nt, Artificial Sequence
  Description of Artificial Sequence: Synthetic oligonucleotide
  Antisense strand to SEQ ID NO: 1806289
agucaaagcgaucgcgauc

SEQ ID NO: 1806291 - RNA, 19 nt, Artificial Sequence
  Description of Artificial Sequence: Synthetic oligonucleotide
  Sense strand starting at position 706 of SEQ ID NO: 1563249
gauaguuaugagggcuuua

SEQ ID NO: 1806292 - RNA, 19 nt, Artificial Sequence
  Description of Artificial Sequence: Synthetic oligonucleotide
  Antisense strand to SEQ ID NO: 1806291
uaaagcccucauaacuauc

SEQ ID NO: 1806293 - RNA, 19 nt, Artificial Sequence
  Description of Artificial Sequence: Synthetic oligonucleotide
  Sense strand starting at position 711 of SEQ ID NO: 1563249
uuaugagggcuuuagccau

SEQ ID NO: 1806294 - RNA, 19 nt, Artificial Sequence
  Description of Artificial Sequence: Synthetic oligonucleotide
  Antisense strand to SEQ ID NO: 1806293
auggcuaaagcccucauaa

SEQ ID NO: 1806295 - RNA, 19 nt, Artificial Sequence
  Description of Artificial Sequence: Synthetic oligonucleotide
  Sense strand starting at position 730 of SEQ ID NO: 1563249
uuauuagugcuggagcuga

SEQ ID NO: 1806296 - RNA, 19 nt, Artificial Sequence
  Description of Artificial Sequence: Synthetic oligonucleotide
  Antisense strand to SEQ ID NO: 1806295
ucagcuccagcacuaauaa

SEQ ID NO: 1806297 - RNA, 19 nt, Artificial Sequence
  Description of Artificial Sequence: Synthetic oligonucleotide
  Sense strand starting at position 827 of SEQ ID NO: 1563249
cucaacacuuggguuagaa

SEQ ID NO: 1806298 - RNA, 19 nt, Artificial Sequence
  Description of Artificial Sequence: Synthetic oligonucleotide
  Antisense strand to SEQ ID NO: 1806297
uucuaacccaaguguugag

SEQ ID NO: 1806299 - RNA, 19 nt, Artificial Sequence
  Description of Artificial Sequence: Synthetic oligonucleotide
  Sense strand starting at position 844 of SEQ ID NO: 1563249
aagaaaggacguuguaaga

SEQ ID NO: 1806300 - RNA, 19 nt, Artificial Sequence
  Description of Artificial Sequence: Synthetic oligonucleotide
  Antisense strand to SEQ ID NO: 1806299
ucuuacaacguccuuucuu

SEQ ID NO: 1806301 - RNA, 19 nt, Artificial Sequence
  Description of Artificial Sequence: Synthetic oligonucleotide
  Sense strand starting at position 960 of SEQ ID NO: 1563249
gggacuuaguggcuaaacu

SEQ ID NO: 1806302 - RNA, 19 nt, Artificial Sequence
  Description of Artificial Sequence: Synthetic oligonucleotide
  Antisense strand to SEQ ID NO: 1806301
aguuuagccacuaaguccc

SEQ ID NO: 1806303 - RNA, 19 nt, Artificial Sequence
  Description of Artificial Sequence: Synthetic oligonucleotide
  Sense strand starting at position 1067 of SEQ ID NO: 1563249
uggguaaggguuuggaaau

SEQ ID NO: 1806304 - RNA, 19 nt, Artificial Sequence
  Description of Artificial Sequence: Synthetic oligonucleotide
  Antisense strand to SEQ ID NO: 1806303
auuuccaaacccuuaccca

SEQ ID NO: 1806305 - RNA, 19 nt, Artificial Sequence
  Description of Artificial Sequence: Synthetic oligonucleotide
  Sense strand starting at position 1477 of SEQ ID NO: 1563249
gggcauuggaauugauuac

SEQ ID NO: 1806306 - RNA, 19 nt, Artificial Sequence
  Description of Artificial Sequence: Synthetic oligonucleotide
  Antisense strand to SEQ ID NO: 1806305
guaaucaauuccaaugccc

SEQ ID NO: 1806307 - RNA, 19 nt, Artificial Sequence
  Description of Artificial Sequence: Synthetic oligonucleotide
  Sense strand starting at position 2055 of SEQ ID NO: 1563249
ccaacucgacuuugagaag

SEQ ID NO: 1806308 - RNA, 19 nt, Artificial Sequence
  Description of Artificial Sequence: Synthetic oligonucleotide
  Antisense strand to SEQ ID NO: 1806307
cuucucaaagucgaguugg

SEQ ID NO: 1806309 - RNA, 19 nt, Artificial Sequence
  Description of Artificial Sequence: Synthetic oligonucleotide
  Sense strand starting at position 2083 of SEQ ID NO: 1563249
auaaacuuaucaguacgua

SEQ ID NO: 1806310 - RNA, 19 nt, Artificial Sequence
  Description of Artificial Sequence: Synthetic oligonucleotide
  Antisense strand to SEQ ID NO: 1806309
uacguacugauaaguuuau

SEQ ID NO: 1806311 - RNA, 19 nt, Artificial Sequence
  Description of Artificial Sequence: Synthetic oligonucleotide
  Sense strand starting at position 2173 of SEQ ID NO: 1563249
cuagcagcccuguauagau

SEQ ID NO: 1806312 - RNA, 19 nt, Artificial Sequence
  Description of Artificial Sequence: Synthetic oligonucleotide
  Antisense strand to SEQ ID NO: 1806311
aucuauacagggcugcuag

SEQ ID NO: 1806313 - RNA, 19 nt, Artificial Sequence
  Description of Artificial Sequence: Synthetic oligonucleotide
  Sense strand starting at position 2436 of SEQ ID NO: 1563249
gcagaaaccgggcaaaguu

SEQ ID NO: 1806314 - RNA, 19 nt, Artificial Sequence
  Description of Artificial Sequence: Synthetic oligonucleotide
  Antisense strand to SEQ ID NO: 1806313
aacuuugcccgguuucugc

SEQ ID NO: 1806315 - RNA, 19 nt, Artificial Sequence
  Description of Artificial Sequence: Synthetic oligonucleotide
  Sense strand starting at position 2642 of SEQ ID NO: 1563249
cuuuguuuccaagggcaaa

SEQ ID NO: 1806316 - RNA, 19 nt, Artificial Sequence
  Description of Artificial Sequence: Synthetic oligonucleotide
  Antisense strand to SEQ ID NO: 1806315
uuugcccuuggaaacaaag

SEQ ID NO: 1806317 - RNA, 19 nt, Artificial Sequence
  Description of Artificial Sequence: Synthetic oligonucleotide
  Sense strand starting at position 2765 of SEQ ID NO: 1563249
cuaagauuacacuguagug

SEQ ID NO: 1806318 - RNA, 19 nt, Artificial Sequence
  Description of Artificial Sequence: Synthetic oligonucleotide
  Antisense strand to SEQ ID NO: 1806317
cacuacaguguaaucuuag

SEQ ID NO: 1806319 - RNA, 19 nt, Artificial Sequence
  Description of Artificial Sequence: Synthetic oligonucleotide
  Sense strand starting at position 2792 of SEQ ID NO: 1563249
gcugaauuaauagaacguu

SEQ ID NO: 1806320 - RNA, 19 nt, Artificial Sequence
  Description of Artificial Sequence: Synthetic oligonucleotide
  Antisense strand to SEQ ID NO: 1806319
aacguucuauuaauucagc

SEQ ID NO: 1806321 - RNA, 19 nt, Artificial Sequence
  Description of Artificial Sequence: Synthetic oligonucleotide
  Sense strand starting at position 2795 of SEQ ID NO: 1563249
gaauuaauagaacguuguu

SEQ ID NO: 1806322 - RNA, 19 nt, Artificial Sequence
  Description of Artificial Sequence: Synthetic oligonucleotide
  Antisense strand to SEQ ID NO: 1806321
aacaacguucuauuaauuc

SEQ ID NO: 1806323 - RNA, 19 nt, Artificial Sequence
  Description of Artificial Sequence: Synthetic oligonucleotide
  Sense strand starting at position 2800 of SEQ ID NO: 1563249
aauagaacguuguuuacaa

SEQ ID NO: 1806324 - RNA, 19 nt, Artificial Sequence
  Description of Artificial Sequence: Synthetic oligonucleotide
  Antisense strand to SEQ ID NO: 1806323
uuguaaacaacguucuauu

SEQ ID NO: 1806325 - RNA, 19 nt, Artificial Sequence
  Description of Artificial Sequence: Synthetic oligonucleotide
  Sense strand starting at position 2801 of SEQ ID NO: 1563249
auagaacguuguuuacaaa

SEQ ID NO: 1806326 - RNA, 19 nt, Artificial Sequence
  Description of Artificial Sequence: Synthetic oligonucleotide
  Antisense strand to SEQ ID NO: 1806325
uuuguaaacaacguucuau

SEQ ID NO: 1806327 - RNA, 19 nt, Artificial Sequence
  Description of Artificial Sequence: Synthetic oligonucleotide
  Sense strand starting at position 2802 of SEQ ID NO: 1563249
uagaacguuguuuacaaau

SEQ ID NO: 1806328 - RNA, 19 nt, Artificial Sequence
  Description of Artificial Sequence: Synthetic oligonucleotide
  Antisense strand to SEQ ID NO: 1806327
auuuguaaacaacguucua

SEQ ID NO: 1806329 - RNA, 19 nt, Artificial Sequence
  Description of Artificial Sequence: Synthetic oligonucleotide
  Sense strand starting at position 2838 of SEQ ID NO: 1563249
agaugaguaacguagguua

SEQ ID NO: 1806330 - RNA, 19 nt, Artificial Sequence
  Description of Artificial Sequence: Synthetic oligonucleotide
  Antisense strand to SEQ ID NO: 1806329
uaaccuacguuacucaucu

SEQ ID NO: 1806331 - RNA, 19 nt, Artificial Sequence
  Description of Artificial Sequence: Synthetic oligonucleotide
  Sense strand starting at position 3068 of SEQ ID NO: 1563249
gacauagacuugcuaguag

SEQ ID NO: 1806332 - RNA, 19 nt, Artificial Sequence
  Description of Artificial Sequence: Synthetic oligonucleotide
  Antisense strand to SEQ ID NO: 1806331
cuacuagcaagucuauguc

SEQ ID NO: 1806333 - RNA, 19 nt, Artificial Sequence
  Description of Artificial Sequence: Synthetic oligonucleotide
  Sense strand starting at position 3082 of SEQ ID NO: 1563249
aguagaugccaaugaaauc

SEQ ID NO: 1806334 - RNA, 19 nt, Artificial Sequence
  Description of Artificial Sequence: Synthetic oligonucleotide
  Antisense strand to SEQ ID NO: 1806333
gauuucauuggcaucuacu

SEQ ID NO: 1806335 - RNA, 19 nt, Artificial Sequence
  Description of Artificial Sequence: Synthetic oligonucleotide
  Sense strand starting at position 3101 of SEQ ID NO: 1563249
aguaucuugccucaagaaa

SEQ ID NO: 1806336 - RNA, 19 nt, Artificial Sequence
  Description of Artificial Sequence: Synthetic oligonucleotide
  Antisense strand to SEQ ID NO: 1806335
uuucuugaggcaagauacu

SEQ ID NO: 1806337 - RNA, 19 nt, Artificial Sequence
  Description of Artificial Sequence: Synthetic oligonucleotide
  Sense strand starting at position 3192 of SEQ ID NO: 1563249
cuuccuacucaggaaaugu

SEQ ID NO: 1806338 - RNA, 19 nt, Artificial Sequence
  Description of Artificial Sequence: Synthetic oligonucleotide
  Antisense strand to SEQ ID NO: 1806337
acauuuccugaguaggaag

SEQ ID NO: 1806339 - RNA, 19 nt, Artificial Sequence
  Description of Artificial Sequence: Synthetic oligonucleotide
  Sense strand starting at position 3201 of SEQ ID NO: 1563249
caggaaaugugcuccuaca

SEQ ID NO: 1806340 - RNA, 19 nt, Artificial Sequence
  Description of Artificial Sequence: Synthetic oligonucleotide
  Antisense strand to SEQ ID NO: 1806339
uguaggagcacauuuccug

SEQ ID NO: 1806341 - RNA, 19 nt, Artificial Sequence
  Description of Artificial Sequence: Synthetic oligonucleotide
  Sense strand starting at position 3265 of SEQ ID NO: 1563249
caucuauggcuuugggaaa

SEQ ID NO: 1806342 - RNA, 19 nt, Artificial Sequence
  Description of Artificial Sequence: Synthetic oligonucleotide
  Antisense strand to SEQ ID NO: 1806341
uuucccaaagccauagaug

SEQ ID NO: 1806343 - RNA, 19 nt, Artificial Sequence
  Description of Artificial Sequence: Synthetic oligonucleotide
  Sense strand starting at position 3359 of SEQ ID NO: 1563249
aggauuuccucagauaaug

SEQ ID NO: 1806344 - RNA, 19 nt, Artificial Sequence
  Description of Artificial Sequence: Synthetic oligonucleotide
  Antisense strand to SEQ ID NO: 1806343
cauuaucugaggaaauccu

SEQ ID NO: 1806345 - RNA, 19 nt, Artificial Sequence
  Description of Artificial Sequence: Synthetic oligonucleotide
  Sense strand starting at position 3463 of SEQ ID NO: 1563249
guucuauguauggagacau

SEQ ID NO: 1806346 - RNA, 19 nt, Artificial Sequence
  Description of Artificial Sequence: Synthetic oligonucleotide
  Antisense strand to SEQ ID NO: 1806345
augucuccauacauagaac

SEQ ID NO: 1806347 - RNA, 19 nt, Artificial Sequence
  Description of Artificial Sequence: Synthetic oligonucleotide
  Sense strand starting at position 3480 of SEQ ID NO: 1563249
aucaguggugagcagauaa

SEQ ID NO: 1806348 - RNA, 19 nt, Artificial Sequence
  Description of Artificial Sequence: Synthetic oligonucleotide
  Antisense strand to SEQ ID NO: 1806347
uuaucugcucaccacugau

SEQ ID NO: 1806349 - RNA, 19 nt, Artificial Sequence
  Description of Artificial Sequence: Synthetic oligonucleotide
  Sense strand starting at position 3631 of SEQ ID NO: 1563249
ggagguggacgucacaauu

SEQ ID NO: 1806350 - RNA, 19 nt, Artificial Sequence
  Description of Artificial Sequence: Synthetic oligonucleotide
  Antisense strand to SEQ ID NO: 1806349
aauugugacguccaccucc

SEQ ID NO: 1806351 - RNA, 19 nt, Artificial Sequence
  Description of Artificial Sequence: Synthetic oligonucleotide
  Sense strand starting at position 3709 of SEQ ID NO: 1563249
gaguuaauggagugaggua

SEQ ID NO: 1806352 - RNA, 19 nt, Artificial Sequence
  Description of Artificial Sequence: Synthetic oligonucleotide
  Antisense strand to SEQ ID NO: 1806351
uaccucacuccauuaacuc

SEQ ID NO: 1806353 - RNA, 19 nt, Artificial Sequence
  Description of Artificial Sequence: Synthetic oligonucleotide
  Sense strand starting at position 3917 of SEQ ID NO: 1563249
gugacaugauuugaguuaa

SEQ ID NO: 1806354 - RNA, 19 nt, Artificial Sequence
  Description of Artificial Sequence: Synthetic oligonucleotide
  Antisense strand to SEQ ID NO: 1806353
uuaacucaaaucaugucac

SEQ ID NO: 1806355 - RNA, 19 nt, Artificial Sequence
  Description of Artificial Sequence: Synthetic oligonucleotide
  Sense strand starting at position 20 of SEQ ID NO: 1563250
uggauuaugcccugacauu

SEQ ID NO: 1806356 - RNA, 19 nt, Artificial Sequence
  Description of Artificial Sequence: Synthetic oligonucleotide
  Antisense strand to SEQ ID NO: 1806355
aaugucagggcauaaucca

SEQ ID NO: 1806357 - RNA, 19 nt, Artificial Sequence
  Description of Artificial Sequence: Synthetic oligonucleotide
  Sense strand starting at position 21 of SEQ ID NO: 1563250
ggauuaugcccugacauuc

SEQ ID NO: 1806358 - RNA, 19 nt, Artificial Sequence
  Description of Artificial Sequence: Synthetic oligonucleotide
  Antisense strand to SEQ ID NO: 1806357
gaaugucagggcauaaucc

SEQ ID NO: 1806359 - RNA, 19 nt, Artificial Sequence
  Description of Artificial Sequence: Synthetic oligonucleotide
  Sense strand starting at position 196 of SEQ ID NO: 1563250
aagaguagaugccugacau

SEQ ID NO: 1806360 - RNA, 19 nt, Artificial Sequence
  Description of Artificial Sequence: Synthetic oligonucleotide
  Antisense strand to SEQ ID NO: 1806359
augucaggcaucuacucuu

SEQ ID NO: 1806361 - RNA, 19 nt, Artificial Sequence
  Description of Artificial Sequence: Synthetic oligonucleotide
  Sense strand starting at position 197 of SEQ ID NO: 1563250
agaguagaugccugacauc

SEQ ID NO: 1806362 - RNA, 19 nt, Artificial Sequence
  Description of Artificial Sequence: Synthetic oligonucleotide
  Antisense strand to SEQ ID NO: 1806361
gaugucaggcaucuacucu

SEQ ID NO: 1806363 - RNA, 19 nt, Artificial Sequence
  Description of Artificial Sequence: Synthetic oligonucleotide
  Sense strand starting at position 283 of SEQ ID NO: 1563250
guucucaagugaucccaau

SEQ ID NO: 1806364 - RNA, 19 nt, Artificial Sequence
  Description of Artificial Sequence: Synthetic oligonucleotide
  Antisense strand to SEQ ID NO: 1806363
auugggaucacuugagaac

SEQ ID NO: 1806365 - RNA, 19 nt, Artificial Sequence
  Description of Artificial Sequence: Synthetic oligonucleotide
  Sense strand starting at position 314 of SEQ ID NO: 1563250
gggaaccacucugcuagua

SEQ ID NO: 1806366 - RNA, 19 nt, Artificial Sequence
  Description of Artificial Sequence: Synthetic oligonucleotide
  Antisense strand to SEQ ID NO: 1806365
uacuagcagagugguuccc

SEQ ID NO: 1806367 - RNA, 19 nt, Artificial Sequence
  Description of Artificial Sequence: Synthetic oligonucleotide
  Sense strand starting at position 373 of SEQ ID NO: 1563250
auaguaauugcucaauguc

SEQ ID NO: 1806368 - RNA, 19 nt, Artificial Sequence
  Description of Artificial Sequence: Synthetic oligonucleotide
  Antisense strand to SEQ ID NO: 1806367
gacauugagcaauuacuau

SEQ ID NO: 1806369 - RNA, 19 nt, Artificial Sequence
  Description of Artificial Sequence: Synthetic oligonucleotide
  Sense strand starting at position 744 of SEQ ID NO: 1563250
gcauauguucuacacagaa

SEQ ID NO: 1806370 - RNA, 19 nt, Artificial Sequence
  Description of Artificial Sequence: Synthetic oligonucleotide
  Antisense strand to SEQ ID NO: 1806369
uucuguguagaacauaugc

SEQ ID NO: 1806371 - RNA, 19 nt, Artificial Sequence
  Description of Artificial Sequence: Synthetic oligonucleotide
  Sense strand starting at position 821 of SEQ ID NO: 1563250
guguguuuccaguauuuag

SEQ ID NO: 1806372 - RNA, 19 nt, Artificial Sequence
  Description of Artificial Sequence: Synthetic oligonucleotide
  Antisense strand to SEQ ID NO: 1806371
cuaaauacuggaaacacac

SEQ ID NO: 1806373 - RNA, 19 nt, Artificial Sequence
  Description of Artificial Sequence: Synthetic oligonucleotide
  Sense strand starting at position 908 of SEQ ID NO: 1563250
gagguugacuuucucagaa

SEQ ID NO: 1806374 - RNA, 19 nt, Artificial Sequence
  Description of Artificial Sequence: Synthetic oligonucleotide
  Antisense strand to SEQ ID NO: 1806373
uucugagaaagucaaccuc

SEQ ID NO: 1806375 - RNA, 19 nt, Artificial Sequence
  Description of Artificial Sequence: Synthetic oligonucleotide
  Sense strand starting at position 1036 of SEQ ID NO: 1563250
ucucucuuagaauggcuau

SEQ ID NO: 1806376 - RNA, 19 nt, Artificial Sequence
  Description of Artificial Sequence: Synthetic oligonucleotide
  Antisense strand to SEQ ID NO: 1806375
auagccauucuaagagaga

SEQ ID NO: 1806377 - RNA, 19 nt, Artificial Sequence
  Description of Artificial Sequence: Synthetic oligonucleotide
  Sense strand starting at position 1042 of SEQ ID NO: 1563250
uuagaauggcuaugucaua

SEQ ID NO: 1806378 - RNA, 19 nt, Artificial Sequence
  Description of Artificial Sequence: Synthetic oligonucleotide
  Antisense strand to SEQ ID NO: 1806377
uaugacauagccauucuaa

SEQ ID NO: 1806379 - RNA, 19 nt, Artificial Sequence
  Description of Artificial Sequence: Synthetic oligonucleotide
  Sense strand starting at position 1043 of SEQ ID NO: 1563250
uagaauggcuaugucauau

SEQ ID NO: 1806380 - RNA, 19 nt, Artificial Sequence
  Description of Artificial Sequence: Synthetic oligonucleotide
  Antisense strand to SEQ ID NO: 1806379
auaugacauagccauucua

SEQ ID NO: 1806381 - RNA, 19 nt, Artificial Sequence
  Description of Artificial Sequence: Synthetic oligonucleotide
  Sense strand starting at position 1055 of SEQ ID NO: 1563250
gucauauaaguggguccaa

SEQ ID NO: 1806382 - RNA, 19 nt, Artificial Sequence
  Description of Artificial Sequence: Synthetic oligonucleotide
  Antisense strand to SEQ ID NO: 1806381
uuggacccacuuauaugac

SEQ ID NO: 1806383 - RNA, 19 nt, Artificial Sequence
  Description of Artificial Sequence: Synthetic oligonucleotide
  Sense strand starting at position 1056 of SEQ ID NO: 1563250
ucauauaaguggguccaaa

SEQ ID NO: 1806384 - RNA, 19 nt, Artificial Sequence
  Description of Artificial Sequence: Synthetic oligonucleotide
  Antisense strand to SEQ ID NO: 1806383
uuuggacccacuuauauga

SEQ ID NO: 1806385 - RNA, 19 nt, Artificial Sequence
  Description of Artificial Sequence: Synthetic oligonucleotide
  Sense strand starting at position 1598 of SEQ ID NO: 1563250
gucaucuauuugccaagca

SEQ ID NO: 1806386 - RNA, 19 nt, Artificial Sequence
  Description of Artificial Sequence: Synthetic oligonucleotide
  Antisense strand to SEQ ID NO: 1806385
ugcuuggcaaauagaugac

SEQ ID NO: 1806387 - RNA, 19 nt, Artificial Sequence
  Description of Artificial Sequence: Synthetic oligonucleotide
  Sense strand starting at position 1614 of SEQ ID NO: 1563250
gcacaagucuaguuaccag

SEQ ID NO: 1806388 - RNA, 19 nt, Artificial Sequence
  Description of Artificial Sequence: Synthetic oligonucleotide
  Antisense strand to SEQ ID NO: 1806387
cugguaacuagacuugugc

SEQ ID NO: 1806389 - RNA, 19 nt, Artificial Sequence
  Description of Artificial Sequence: Synthetic oligonucleotide
  Sense strand starting at position 1621 of SEQ ID NO: 1563250
ucuaguuaccagggauaaa

SEQ ID NO: 1806390 - RNA, 19 nt, Artificial Sequence
  Description of Artificial Sequence: Synthetic oligonucleotide
  Antisense strand to SEQ ID NO: 1806389
uuuaucccugguaacuaga

SEQ ID NO: 1806391 - RNA, 19 nt, Artificial Sequence
  Description of Artificial Sequence: Synthetic oligonucleotide
  Sense strand starting at position 2142 of SEQ ID NO: 1563250
ccuuuaaacugagauuuga

SEQ ID NO: 1806392 - RNA, 19 nt, Artificial Sequence
  Description of Artificial Sequence: Synthetic oligonucleotide
  Antisense strand to SEQ ID NO: 1806391
ucaaaucucaguuuaaagg

SEQ ID NO: 1806393 - RNA, 19 nt, Artificial Sequence
  Description of Artificial Sequence: Synthetic oligonucleotide
  Sense strand starting at position 2153 of SEQ ID NO: 1563250
agauuugaaugccaagaag

SEQ ID NO: 1806394 - RNA, 19 nt, Artificial Sequence
  Description of Artificial Sequence: Synthetic oligonucleotide
  Antisense strand to SEQ ID NO: 1806393
cuucuuggcauucaaaucu

SEQ ID NO: 1806395 - RNA, 19 nt, Artificial Sequence
  Description of Artificial Sequence: Synthetic oligonucleotide
  Sense strand starting at position 2172 of SEQ ID NO: 1563250
gaaccagcccugugaagau

SEQ ID NO: 1806396 - RNA, 19 nt, Artificial Sequence
  Description of Artificial Sequence: Synthetic oligonucleotide
  Antisense strand to SEQ ID NO: 1806395
aucuucacagggcugguuc

SEQ ID NO: 1806397 - RNA, 19 nt, Artificial Sequence
  Description of Artificial Sequence: Synthetic oligonucleotide
  Sense strand starting at position 2196 of SEQ ID NO: 1563250
ggaagaguauuucauggag

SEQ ID NO: 1806398 - RNA, 19 nt, Artificial Sequence
  Description of Artificial Sequence: Synthetic oligonucleotide
  Antisense strand to SEQ ID NO: 1806397
cuccaugaaauacucuucc

SEQ ID NO: 1806399 - RNA, 19 nt, Artificial Sequence
  Description of Artificial Sequence: Synthetic oligonucleotide
  Sense strand starting at position 2258 of SEQ ID NO: 1563250
agagcuuuauguguuaaag

SEQ ID NO: 1806400 - RNA, 19 nt, Artificial Sequence
  Description of Artificial Sequence: Synthetic oligonucleotide
  Antisense strand to SEQ ID NO: 1806399
cuuuaacacauaaagcucu

SEQ ID NO: 1806401 - RNA, 19 nt, Artificial Sequence
  Description of Artificial Sequence: Synthetic oligonucleotide
  Sense strand starting at position 2783 of SEQ ID NO: 1563250
guaguaacaucagucugga

SEQ ID NO: 1806402 - RNA, 19 nt, Artificial Sequence
  Description of Artificial Sequence: Synthetic oligonucleotide
  Antisense strand to SEQ ID NO: 1806401
uccagacugauguuacuac

SEQ ID NO: 1806403 - RNA, 19 nt, Artificial Sequence
  Description of Artificial Sequence: Synthetic oligonucleotide
  Sense strand starting at position 2823 of SEQ ID NO: 1563250
aaagguaaugagcgaugaa

SEQ ID NO: 1806404 - RNA, 19 nt, Artificial Sequence
  Description of Artificial Sequence: Synthetic oligonucleotide
  Antisense strand to SEQ ID NO: 1806403
uucaucgcucauuaccuuu

SEQ ID NO: 1806405 - RNA, 19 nt, Artificial Sequence
  Description of Artificial Sequence: Synthetic oligonucleotide
  Sense strand starting at position 2966 of SEQ ID NO: 1563250
ccugauuuguguuugacga

SEQ ID NO: 1806406 - RNA, 19 nt, Artificial Sequence
  Description of Artificial Sequence: Synthetic oligonucleotide
  Antisense strand to SEQ ID NO: 1806405
ucgucaaacacaaaucagg

SEQ ID NO: 1806407 - RNA, 19 nt, Artificial Sequence
  Description of Artificial Sequence: Synthetic oligonucleotide
  Sense strand starting at position 2967 of SEQ ID NO: 1563250
cugauuuguguuugacgau

SEQ ID NO: 1806408 - RNA, 19 nt, Artificial Sequence
  Description of Artificial Sequence: Synthetic oligonucleotide
  Antisense strand to SEQ ID NO: 1806407
aucgucaaacacaaaucag

SEQ ID NO: 1806409 - RNA, 19 nt, Artificial Sequence
  Description of Artificial Sequence: Synthetic oligonucleotide
  Sense strand starting at position 2974 of SEQ ID NO: 1563250
guguuugacgaucauguua

SEQ ID NO: 1806410 - RNA, 19 nt, Artificial Sequence
  Description of Artificial Sequence: Synthetic oligonucleotide
  Antisense strand to SEQ ID NO: 1806409
uaacaugaucgucaaacac

SEQ ID NO: 1806411 - RNA, 19 nt, Artificial Sequence
  Description of Artificial Sequence: Synthetic oligonucleotide
  Sense strand starting at position 3009 of SEQ ID NO: 1563250
gagaauguuagaggucaag

SEQ ID NO: 1806412 - RNA, 19 nt, Artificial Sequence
  Description of Artificial Sequence: Synthetic oligonucleotide
  Antisense strand to SEQ ID NO: 1806411
cuugaccucuaacauucuc

SEQ ID NO: 1806413 - RNA, 19 nt, Artificial Sequence
  Description of Artificial Sequence: Synthetic oligonucleotide
  Sense strand starting at position 3066 of SEQ ID NO: 1563250
ccagaagagguuugacugu

SEQ ID NO: 1806414 - RNA, 19 nt, Artificial Sequence
  Description of Artificial Sequence: Synthetic oligonucleotide
  Antisense strand to SEQ ID NO: 1806413
acagucaaaccucuucugg

SEQ ID NO: 1806415 - RNA, 19 nt, Artificial Sequence
  Description of Artificial Sequence: Synthetic oligonucleotide
  Sense strand starting at position 3150 of SEQ ID NO: 1563250
gacaaaguaggccgugaua

SEQ ID NO: 1806416 - RNA, 19 nt, Artificial Sequence
  Description of Artificial Sequence: Synthetic oligonucleotide
  Antisense strand to SEQ ID NO: 1806415
uaucacggccuacuuuguc

SEQ ID NO: 1806417 - RNA, 19 nt, Artificial Sequence
  Description of Artificial Sequence: Synthetic oligonucleotide
  Sense strand starting at position 3152 of SEQ ID NO: 1563250
caaaguaggccgugauaaa

SEQ ID NO: 1806418 - RNA, 19 nt, Artificial Sequence
  Description of Artificial Sequence: Synthetic oligonucleotide
  Antisense strand to SEQ ID NO: 1806417
uuuaucacggccuacuuug

SEQ ID NO: 1806419 - RNA, 19 nt, Artificial Sequence
  Description of Artificial Sequence: Synthetic oligonucleotide
  Sense strand starting at position 3343 of SEQ ID NO: 1563250
gguuccgaguuauuuccua

SEQ ID NO: 1806420 - RNA, 19 nt, Artificial Sequence
  Description of Artificial Sequence: Synthetic oligonucleotide
  Antisense strand to SEQ ID NO: 1806419
uaggaaauaacucggaacc

SEQ ID NO: 1806421 - RNA, 19 nt, Artificial Sequence
  Description of Artificial Sequence: Synthetic oligonucleotide
  Sense strand starting at position 3347 of SEQ ID NO: 1563250
ccgaguuauuuccuagguu

SEQ ID NO: 1806422 - RNA, 19 nt, Artificial Sequence
  Description of Artificial Sequence: Synthetic oligonucleotide
  Antisense strand to SEQ ID NO: 1806421
aaccuaggaaauaacucgg

SEQ ID NO: 1806423 - RNA, 19 nt, Artificial Sequence
  Description of Artificial Sequence: Synthetic oligonucleotide
  Sense strand starting at position 3350 of SEQ ID NO: 1563250
aguuauuuccuagguuccu

SEQ ID NO: 1806424 - RNA, 19 nt, Artificial Sequence
  Description of Artificial Sequence: Synthetic oligonucleotide
  Antisense strand to SEQ ID NO: 1806423
aggaaccuaggaaauaacu

SEQ ID NO: 1806425 - RNA, 19 nt, Artificial Sequence
  Description of Artificial Sequence: Synthetic oligonucleotide
  Sense strand starting at position 3351 of SEQ ID NO: 1563250
guuauuuccuagguuccua

SEQ ID NO: 1806426 - RNA, 19 nt, Artificial Sequence
  Description of Artificial Sequence: Synthetic oligonucleotide
  Antisense strand to SEQ ID NO: 1806425
uaggaaccuaggaaauaac

SEQ ID NO: 1806427 - RNA, 19 nt, Artificial Sequence
  Description of Artificial Sequence: Synthetic oligonucleotide
  Sense strand starting at position 3863 of SEQ ID NO: 1563250
ggcguucccacugugcuaa

SEQ ID NO: 1806428 - RNA, 19 nt, Artificial Sequence
  Description of Artificial Sequence: Synthetic oligonucleotide
  Antisense strand to SEQ ID NO: 1806427
uuagcacagugggaacgcc

SEQ ID NO: 1806429 - RNA, 19 nt, Artificial Sequence
  Description of Artificial Sequence: Synthetic oligonucleotide
  Sense strand starting at position 3911 of SEQ ID NO: 1563250
ugcguauaacgggacaauu

SEQ ID NO: 1806430 - RNA, 19 nt, Artificial Sequence
  Description of Artificial Sequence: Synthetic oligonucleotide
  Antisense strand to SEQ ID NO: 1806429
aauugucccguuauacgca

SEQ ID NO: 1806431 - RNA, 19 nt, Artificial Sequence
  Description of Artificial Sequence: Synthetic oligonucleotide
  Sense strand starting at position 3929 of SEQ ID NO: 1563250
ucgugucucgguucuugaa

SEQ ID NO: 1806432 - RNA, 19 nt, Artificial Sequence
  Description of Artificial Sequence: Synthetic oligonucleotide
  Antisense strand to SEQ ID NO: 1806431
uucaagaaccgagacacga

SEQ ID NO: 1806433 - RNA, 19 nt, Artificial Sequence
  Description of Artificial Sequence: Synthetic oligonucleotide
  Sense strand starting at position 3930 of SEQ ID NO: 1563250
cgugucucgguucuugaau

SEQ ID NO: 1806434 - RNA, 19 nt, Artificial Sequence
  Description of Artificial Sequence: Synthetic oligonucleotide
  Antisense strand to SEQ ID NO: 1806433
auucaagaaccgagacacg

SEQ ID NO: 1806435 - RNA, 19 nt, Artificial Sequence
  Description of Artificial Sequence: Synthetic oligonucleotide
  Sense strand starting at position 27 of SEQ ID NO: 1563251
guaacucgagucuagacuu

SEQ ID NO: 1806436 - RNA, 19 nt, Artificial Sequence
  Description of Artificial Sequence: Synthetic oligonucleotide
  Antisense strand to SEQ ID NO: 1806435
aagucuagacucgaguuac

SEQ ID NO: 1806437 - RNA, 19 nt, Artificial Sequence
  Description of Artificial Sequence: Synthetic oligonucleotide
  Sense strand starting at position 119 of SEQ ID NO: 1563251
guuugcuaccuaucgcuau

SEQ ID NO: 1806438 - RNA, 19 nt, Artificial Sequence
  Description of Artificial Sequence: Synthetic oligonucleotide
  Antisense strand to SEQ ID NO: 1806437
auagcgauagguagcaaac

SEQ ID NO: 1806439 - RNA, 19 nt, Artificial Sequence
  Description of Artificial Sequence: Synthetic oligonucleotide
  Sense strand starting at position 172 of SEQ ID NO: 1563251
uuuggaauucugugggaag

SEQ ID NO: 1806440 - RNA, 19 nt, Artificial Sequence
  Description of Artificial Sequence: Synthetic oligonucleotide
  Antisense strand to SEQ ID NO: 1806439
cuucccacagaauuccaaa

SEQ ID NO: 1806441 - RNA, 19 nt, Artificial Sequence
  Description of Artificial Sequence: Synthetic oligonucleotide
  Sense strand starting at position 189 of SEQ ID NO: 1563251
agagguaucugcuuggaag

SEQ ID NO: 1806442 - RNA, 19 nt, Artificial Sequence
  Description of Artificial Sequence: Synthetic oligonucleotide
  Antisense strand to SEQ ID NO: 1806441
cuuccaagcagauaccucu

SEQ ID NO: 1806443 - RNA, 19 nt, Artificial Sequence
  Description of Artificial Sequence: Synthetic oligonucleotide
  Sense strand starting at position 190 of SEQ ID NO: 1563251
gagguaucugcuuggaagu

SEQ ID NO: 1806444 - RNA, 19 nt, Artificial Sequence
  Description of Artificial Sequence: Synthetic oligonucleotide
  Antisense strand to SEQ ID NO: 1806443
acuuccaagcagauaccuc

SEQ ID NO: 1806445 - RNA, 19 nt, Artificial Sequence
  Description of Artificial Sequence: Synthetic oligonucleotide
  Sense strand starting at position 357 of SEQ ID NO: 1563251
ggcuccauaccaugauaau

SEQ ID NO: 1806446 - RNA, 19 nt, Artificial Sequence
  Description of Artificial Sequence: Synthetic oligonucleotide
  Antisense strand to SEQ ID NO: 1806445
auuaucaugguauggagcc

SEQ ID NO: 1806447 - RNA, 19 nt, Artificial Sequence
  Description of Artificial Sequence: Synthetic oligonucleotide
  Sense strand starting at position 366 of SEQ ID NO: 1563251
ccaugauaauugucuuagc

SEQ ID NO: 1806448 - RNA, 19 nt, Artificial Sequence
  Description of Artificial Sequence: Synthetic oligonucleotide
  Antisense strand to SEQ ID NO: 1806447
gcuaagacaauuaucaugg

SEQ ID NO: 1806449 - RNA, 19 nt, Artificial Sequence
  Description of Artificial Sequence: Synthetic oligonucleotide
  Sense strand starting at position 580 of SEQ ID NO: 1563251
caguguugagagcauuaag

SEQ ID NO: 1806450 - RNA, 19 nt, Artificial Sequence
  Description of Artificial Sequence: Synthetic oligonucleotide
  Antisense strand to SEQ ID NO: 1806449
cuuaaugcucucaacacug

SEQ ID NO: 1806451 - RNA, 19 nt, Artificial Sequence
  Description of Artificial Sequence: Synthetic oligonucleotide
  Sense strand starting at position 583 of SEQ ID NO: 1563251
uguugagagcauuaagcca

SEQ ID NO: 1806452 - RNA, 19 nt, Artificial Sequence
  Description of Artificial Sequence: Synthetic oligonucleotide
  Antisense strand to SEQ ID NO: 1806451
uggcuuaaugcucucaaca

SEQ ID NO: 1806453 - RNA, 19 nt, Artificial Sequence
  Description of Artificial Sequence: Synthetic oligonucleotide
  Sense strand starting at position 591 of SEQ ID NO: 1563251
gcauuaagccagcaucuga

SEQ ID NO: 1806454 - RNA, 19 nt, Artificial Sequence
  Description of Artificial Sequence: Synthetic oligonucleotide
  Antisense strand to SEQ ID NO: 1806453
ucagaugcuggcuuaaugc

SEQ ID NO: 1806455 - RNA, 19 nt, Artificial Sequence
  Description of Artificial Sequence: Synthetic oligonucleotide
  Sense strand starting at position 604 of SEQ ID NO: 1563251
aucugauguggucauguua

SEQ ID NO: 1806456 - RNA, 19 nt, Artificial Sequence
  Description of Artificial Sequence: Synthetic oligonucleotide
  Antisense strand to SEQ ID NO: 1806455
uaacaugaccacaucagau

SEQ ID NO: 1806457 - RNA, 19 nt, Artificial Sequence
  Description of Artificial Sequence: Synthetic oligonucleotide
  Sense strand starting at position 735 of SEQ ID NO: 1563251
uuacuuacugcagggagaa

SEQ ID NO: 1806458 - RNA, 19 nt, Artificial Sequence
  Description of Artificial Sequence: Synthetic oligonucleotide
  Antisense strand to SEQ ID NO: 1806457
uucucccugcaguaaguaa

SEQ ID NO: 1806459 - RNA, 19 nt, Artificial Sequence
  Description of Artificial Sequence: Synthetic oligonucleotide
  Sense strand starting at position 867 of SEQ ID NO: 1563251
gugccaguuccauccgcau

SEQ ID NO: 1806460 - RNA, 19 nt, Artificial Sequence
  Description of Artificial Sequence: Synthetic oligonucleotide
  Antisense strand to SEQ ID NO: 1806459
augcggauggaacuggcac

SEQ ID NO: 1806461 - RNA, 19 nt, Artificial Sequence
  Description of Artificial Sequence: Synthetic oligonucleotide
  Sense strand starting at position 995 of SEQ ID NO: 1563251
guuggaggccuuuauaugu

SEQ ID NO: 1806462 - RNA, 19 nt, Artificial Sequence
  Description of Artificial Sequence: Synthetic oligonucleotide
  Antisense strand to SEQ ID NO: 1806461
acauauaaaggccuccaac

SEQ ID NO: 1806463 - RNA, 19 nt, Artificial Sequence
  Description of Artificial Sequence: Synthetic oligonucleotide
  Sense strand starting at position 1147 of SEQ ID NO: 1563251
guuuacuggcaagaacaau

SEQ ID NO: 1806464 - RNA, 19 nt, Artificial Sequence
  Description of Artificial Sequence: Synthetic oligonucleotide
  Antisense strand to SEQ ID NO: 1806463
auuguucuugccaguaaac

SEQ ID NO: 1806465 - RNA, 19 nt, Artificial Sequence
  Description of Artificial Sequence: Synthetic oligonucleotide
  Sense strand starting at position 1199 of SEQ ID NO: 1563251
cuuuacuguuguuucuaga

SEQ ID NO: 1806466 - RNA, 19 nt, Artificial Sequence
  Description of Artificial Sequence: Synthetic oligonucleotide
  Antisense strand to SEQ ID NO: 1806465
ucuagaaacaacaguaaag

SEQ ID NO: 1806467 - RNA, 19 nt, Artificial Sequence
  Description of Artificial Sequence: Synthetic oligonucleotide
  Sense strand starting at position 1310 of SEQ ID NO: 1563251
auaaucagcucuucccgaa

SEQ ID NO: 1806468 - RNA, 19 nt, Artificial Sequence
  Description of Artificial Sequence: Synthetic oligonucleotide
  Antisense strand to SEQ ID NO: 1806467
uucgggaagagcugauuau

SEQ ID NO: 1806469 - RNA, 19 nt, Artificial Sequence
  Description of Artificial Sequence: Synthetic oligonucleotide
  Sense strand starting at position 1425 of SEQ ID NO: 1563251
ggccaaauauuaguaaguu

SEQ ID NO: 1806470 - RNA, 19 nt, Artificial Sequence
  Description of Artificial Sequence: Synthetic oligonucleotide
  Antisense strand to SEQ ID NO: 1806469
aacuuacuaauauuuggcc

SEQ ID NO: 1806471 - RNA, 19 nt, Artificial Sequence
  Description of Artificial Sequence: Synthetic oligonucleotide
  Sense strand starting at position 1441 of SEQ ID NO: 1563251
guuguuaagauguauauug

SEQ ID NO: 1806472 - RNA, 19 nt, Artificial Sequence
  Description of Artificial Sequence: Synthetic oligonucleotide
  Antisense strand to SEQ ID NO: 1806471
caauauacaucuuaacaac

SEQ ID NO: 1806473 - RNA, 19 nt, Artificial Sequence
  Description of Artificial Sequence: Synthetic oligonucleotide
  Sense strand starting at position 1458 of SEQ ID NO: 1563251
ugugucaguaccgaguaau

SEQ ID NO: 1806474 - RNA, 19 nt, Artificial Sequence
  Description of Artificial Sequence: Synthetic oligonucleotide
  Antisense strand to SEQ ID NO: 1806473
auuacucgguacugacaca

SEQ ID NO: 1806475 - RNA, 19 nt, Artificial Sequence
  Description of Artificial Sequence: Synthetic oligonucleotide
  Sense strand starting at position 1461 of SEQ ID NO: 1563251
gucaguaccgaguaauaaa

SEQ ID NO: 1806476 - RNA, 19 nt, Artificial Sequence
  Description of Artificial Sequence: Synthetic oligonucleotide
  Antisense strand to SEQ ID NO: 1806475
uuuauuacucgguacugac

SEQ ID NO: 1806477 - RNA, 19 nt, Artificial Sequence
  Description of Artificial Sequence: Synthetic oligonucleotide
  Sense strand starting at position 1503 of SEQ ID NO: 1563251
ugccuucuccaagaagcua

SEQ ID NO: 1806478 - RNA, 19 nt, Artificial Sequence
  Description of Artificial Sequence: Synthetic oligonucleotide
  Antisense strand to SEQ ID NO: 1806477
uagcuucuuggagaaggca

SEQ ID NO: 1806479 - RNA, 19 nt, Artificial Sequence
  Description of Artificial Sequence: Synthetic oligonucleotide
  Sense strand starting at position 1810 of SEQ ID NO: 1563251
ccuacucucccgggaaaga

SEQ ID NO: 1806480 - RNA, 19 nt, Artificial Sequence
  Description of Artificial Sequence: Synthetic oligonucleotide
  Antisense strand to SEQ ID NO: 1806479
ucuuucccgggagaguagg

SEQ ID NO: 1806481 - RNA, 19 nt, Artificial Sequence
  Description of Artificial Sequence: Synthetic oligonucleotide
  Sense strand starting at position 1837 of SEQ ID NO: 1563251
gaaagacuggugcgcuaaa

SEQ ID NO: 1806482 - RNA, 19 nt, Artificial Sequence
  Description of Artificial Sequence: Synthetic oligonucleotide
  Antisense strand to SEQ ID NO: 1806481
uuuagcgcaccagucuuuc

SEQ ID NO: 1806483 - RNA, 19 nt, Artificial Sequence
  Description of Artificial Sequence: Synthetic oligonucleotide
  Sense strand starting at position 2099 of SEQ ID NO: 1563251
gugggacuaaccuggcaaa

SEQ ID NO: 1806484 - RNA, 19 nt, Artificial Sequence
  Description of Artificial Sequence: Synthetic oligonucleotide
  Antisense strand to SEQ ID NO: 1806483
uuugccagguuagucccac

SEQ ID NO: 1806485 - RNA, 19 nt, Artificial Sequence
  Description of Artificial Sequence: Synthetic oligonucleotide
  Sense strand starting at position 2162 of SEQ ID NO: 1563251
gucuuuauugggcaagauc

SEQ ID NO: 1806486 - RNA, 19 nt, Artificial Sequence
  Description of Artificial Sequence: Synthetic oligonucleotide
  Antisense strand to SEQ ID NO: 1806485
gaucuugcccaauaaagac

SEQ ID NO: 1806487 - RNA, 19 nt, Artificial Sequence
  Description of Artificial Sequence: Synthetic oligonucleotide
  Sense strand starting at position 2465 of SEQ ID NO: 1563251
ugaccuaaggcugaguuua

SEQ ID NO: 1806488 - RNA, 19 nt, Artificial Sequence
  Description of Artificial Sequence: Synthetic oligonucleotide
  Antisense strand to SEQ ID NO: 1806487
uaaacucagccuuagguca

SEQ ID NO: 1806489 - RNA, 19 nt, Artificial Sequence
  Description of Artificial Sequence: Synthetic oligonucleotide
  Sense strand starting at position 2587 of SEQ ID NO: 1563251
gaguguugucgcagagguc

SEQ ID NO: 1806490 - RNA, 19 nt, Artificial Sequence
  Description of Artificial Sequence: Synthetic oligonucleotide
  Antisense strand to SEQ ID NO: 1806489
gaccucugcgacaacacuc

SEQ ID NO: 1806491 - RNA, 19 nt, Artificial Sequence
  Description of Artificial Sequence: Synthetic oligonucleotide
  Sense strand starting at position 2728 of SEQ ID NO: 1563251
uuuagaucuuaccuggcua

SEQ ID NO: 1806492 - RNA, 19 nt, Artificial Sequence
  Description of Artificial Sequence: Synthetic oligonucleotide
  Antisense strand to SEQ ID NO: 1806491
uagccagguaagaucuaaa

SEQ ID NO: 1806493 - RNA, 19 nt, Artificial Sequence
  Description of Artificial Sequence: Synthetic oligonucleotide
  Sense strand starting at position 2784 of SEQ ID NO: 1563251
cggacuuugaaaggaguga

SEQ ID NO: 1806494 - RNA, 19 nt, Artificial Sequence
  Description of Artificial Sequence: Synthetic oligonucleotide
  Antisense strand to SEQ ID NO: 1806493
ucacuccuuucaaaguccg

SEQ ID NO: 1806495 - RNA, 19 nt, Artificial Sequence
  Description of Artificial Sequence: Synthetic oligonucleotide
  Sense strand starting at position 2933 of SEQ ID NO: 1563251
ggaagugagagguaugcuu

SEQ ID NO: 1806496 - RNA, 19 nt, Artificial Sequence
  Description of Artificial Sequence: Synthetic oligonucleotide
  Antisense strand to SEQ ID NO: 1806495
aagcauaccucucacuucc

SEQ ID NO: 1806497 - RNA, 19 nt, Artificial Sequence
  Description of Artificial Sequence: Synthetic oligonucleotide
  Sense strand starting at position 2940 of SEQ ID NO: 1563251
agagguaugcuuggagaau

SEQ ID NO: 1806498 - RNA, 19 nt, Artificial Sequence
  Description of Artificial Sequence: Synthetic oligonucleotide
  Antisense strand to SEQ ID NO: 1806497
auucuccaagcauaccucu

SEQ ID NO: 1806499 - RNA, 19 nt, Artificial Sequence
  Description of Artificial Sequence: Synthetic oligonucleotide
  Sense strand starting at position 2977 of SEQ ID NO: 1563251
agggcuguggacugacaua

SEQ ID NO: 1806500 - RNA, 19 nt, Artificial Sequence
  Description of Artificial Sequence: Synthetic oligonucleotide
  Antisense strand to SEQ ID NO: 1806499
uaugucaguccacagcccu

SEQ ID NO: 1806501 - RNA, 19 nt, Artificial Sequence
  Description of Artificial Sequence: Synthetic oligonucleotide
  Sense strand starting at position 3087 of SEQ ID NO: 1563251
ggcaguaaucuagggagac

SEQ ID NO: 1806502 - RNA, 19 nt, Artificial Sequence
  Description of Artificial Sequence: Synthetic oligonucleotide
  Antisense strand to SEQ ID NO: 1806501
gucucccuagauuacugcc

SEQ ID NO: 1806503 - RNA, 19 nt, Artificial Sequence
  Description of Artificial Sequence: Synthetic oligonucleotide
  Sense strand starting at position 3114 of SEQ ID NO: 1563251
gagaguaaguuucucagac

SEQ ID NO: 1806504 - RNA, 19 nt, Artificial Sequence
  Description of Artificial Sequence: Synthetic oligonucleotide
  Antisense strand to SEQ ID NO: 1806503
gucugagaaacuuacucuc

SEQ ID NO: 1806505 - RNA, 19 nt, Artificial Sequence
  Description of Artificial Sequence: Synthetic oligonucleotide
  Sense strand starting at position 3115 of SEQ ID NO: 1563251
agaguaaguuucucagaca

SEQ ID NO: 1806506 - RNA, 19 nt, Artificial Sequence
  Description of Artificial Sequence: Synthetic oligonucleotide
  Antisense strand to SEQ ID NO: 1806505
ugucugagaaacuuacucu

SEQ ID NO: 1806507 - RNA, 19 nt, Artificial Sequence
  Description of Artificial Sequence: Synthetic oligonucleotide
  Sense strand starting at position 3205 of SEQ ID NO: 1563251
gugaacagauuccugacuu

SEQ ID NO: 1806508 - RNA, 19 nt, Artificial Sequence
  Description of Artificial Sequence: Synthetic oligonucleotide
  Antisense strand to SEQ ID NO: 1806507
aagucaggaaucuguucac

SEQ ID NO: 1806509 - RNA, 19 nt, Artificial Sequence
  Description of Artificial Sequence: Synthetic oligonucleotide
  Sense strand starting at position 3258 of SEQ ID NO: 1563251
cagaguucucacugugauc

SEQ ID NO: 1806510 - RNA, 19 nt, Artificial Sequence
  Description of Artificial Sequence: Synthetic oligonucleotide
  Antisense strand to SEQ ID NO: 1806509
gaucacagugagaacucug

SEQ ID NO: 1806511 - RNA, 19 nt, Artificial Sequence
  Description of Artificial Sequence: Synthetic oligonucleotide
  Sense strand starting at position 3260 of SEQ ID NO: 1563251
gaguucucacugugaucuc

SEQ ID NO: 1806512 - RNA, 19 nt, Artificial Sequence
  Description of Artificial Sequence: Synthetic oligonucleotide
  Antisense strand to SEQ ID NO: 1806511
gagaucacagugagaacuc

SEQ ID NO: 1806513 - RNA, 19 nt, Artificial Sequence
  Description of Artificial Sequence: Synthetic oligonucleotide
  Sense strand starting at position 3720 of SEQ ID NO: 1563251
gcucuaccagguuaaucuu

SEQ ID NO: 1806514 - RNA, 19 nt, Artificial Sequence
  Description of Artificial Sequence: Synthetic oligonucleotide
  Antisense strand to SEQ ID NO: 1806513
aagauuaaccugguagagc

SEQ ID NO: 1806515 - RNA, 19 nt, Artificial Sequence
  Description of Artificial Sequence: Synthetic oligonucleotide
  Sense strand starting at position 55 of SEQ ID NO: 1563252
ugaggaccucuguaccgau

SEQ ID NO: 1806516 - RNA, 19 nt, Artificial Sequence
  Description of Artificial Sequence: Synthetic oligonucleotide
  Antisense strand to SEQ ID NO: 1806515
aucgguacagagguccuca

SEQ ID NO: 1806517 - RNA, 19 nt, Artificial Sequence
  Description of Artificial Sequence: Synthetic oligonucleotide
  Sense strand starting at position 349 of SEQ ID NO: 1563252
acaagaauggcauguggga

SEQ ID NO: 1806518 - RNA, 19 nt, Artificial Sequence
  Description of Artificial Sequence: Synthetic oligonucleotide
  Antisense strand to SEQ ID NO: 1806517
ucccacaugccauucuugu

SEQ ID NO: 1806519 - RNA, 19 nt, Artificial Sequence
  Description of Artificial Sequence: Synthetic oligonucleotide
  Sense strand starting at position 412 of SEQ ID NO: 1563252
gugcgauggauugauaagu

SEQ ID NO: 1806520 - RNA, 19 nt, Artificial Sequence
  Description of Artificial Sequence: Synthetic oligonucleotide
  Antisense strand to SEQ ID NO: 1806519
acuuaucaauccaucgcac

SEQ ID NO: 1806521 - RNA, 19 nt, Artificial Sequence
  Description of Artificial Sequence: Synthetic oligonucleotide
  Sense strand starting at position 417 of SEQ ID NO: 1563252
auggauugauaaguccuua

SEQ ID NO: 1806522 - RNA, 19 nt, Artificial Sequence
  Description of Artificial Sequence: Synthetic oligonucleotide
  Antisense strand to SEQ ID NO: 1806521
uaaggacuuaucaauccau

SEQ ID NO: 1806523 - RNA, 19 nt, Artificial Sequence
  Description of Artificial Sequence: Synthetic oligonucleotide
  Sense strand starting at position 460 of SEQ ID NO: 1563252
augggaagcaguggauaua

SEQ ID NO: 1806524 - RNA, 19 nt, Artificial Sequence
  Description of Artificial Sequence: Synthetic oligonucleotide
  Antisense strand to SEQ ID NO: 1806523
uauauccacugcuucccau

SEQ ID NO: 1806525 - RNA, 19 nt, Artificial Sequence
  Description of Artificial Sequence: Synthetic oligonucleotide
  Sense strand starting at position 478 of SEQ ID NO: 1563252
acaauaagugcuugauaau

SEQ ID NO: 1806526 - RNA, 19 nt, Artificial Sequence
  Description of Artificial Sequence: Synthetic oligonucleotide
  Antisense strand to SEQ ID NO: 1806525
auuaucaagcacuuauugu

SEQ ID NO: 1806527 - RNA, 19 nt, Artificial Sequence
  Description of Artificial Sequence: Synthetic oligonucleotide
  Sense strand starting at position 517 of SEQ ID NO: 1563252
ggcaucuggaguuaccauu

SEQ ID NO: 1806528 - RNA, 19 nt, Artificial Sequence
  Description of Artificial Sequence: Synthetic oligonucleotide
  Antisense strand to SEQ ID NO: 1806527
aaugguaacuccagaugcc

SEQ ID NO: 1806529 - RNA, 19 nt, Artificial Sequence
  Description of Artificial Sequence: Synthetic oligonucleotide
  Sense strand starting at position 523 of SEQ ID NO: 1563252
uggaguuaccauuggaagg

SEQ ID NO: 1806530 - RNA, 19 nt, Artificial Sequence
  Description of Artificial Sequence: Synthetic oligonucleotide
  Antisense strand to SEQ ID NO: 1806529
ccuuccaaugguaacucca

SEQ ID NO: 1806531 - RNA, 19 nt, Artificial Sequence
  Description of Artificial Sequence: Synthetic oligonucleotide
  Sense strand starting at position 731 of SEQ ID NO: 1563252
acugcauagcccuagguau

SEQ ID NO: 1806532 - RNA, 19 nt, Artificial Sequence
  Description of Artificial Sequence: Synthetic oligonucleotide
  Antisense strand to SEQ ID NO: 1806531
auaccuagggcuaugcagu

SEQ ID NO: 1806533 - RNA, 19 nt, Artificial Sequence
  Description of Artificial Sequence: Synthetic oligonucleotide
  Sense strand starting at position 757 of SEQ ID NO: 1563252
augccaaauagaugugaug

SEQ ID NO: 1806534 - RNA, 19 nt, Artificial Sequence
  Description of Artificial Sequence: Synthetic oligonucleotide
  Antisense strand to SEQ ID NO: 1806533
caucacaucuauuuggcau

SEQ ID NO: 1806535 - RNA, 19 nt, Artificial Sequence
  Description of Artificial Sequence: Synthetic oligonucleotide
  Sense strand starting at position 759 of SEQ ID NO: 1563252
gccaaauagaugugaugaa

SEQ ID NO: 1806536 - RNA, 19 nt, Artificial Sequence
  Description of Artificial Sequence: Synthetic oligonucleotide
  Antisense strand to SEQ ID NO: 1806535
uucaucacaucuauuuggc

SEQ ID NO: 1806537 - RNA, 19 nt, Artificial Sequence
  Description of Artificial Sequence: Synthetic oligonucleotide
  Sense strand starting at position 840 of SEQ ID NO: 1563252
guguaucugggauauauag

SEQ ID NO: 1806538 - RNA, 19 nt, Artificial Sequence
  Description of Artificial Sequence: Synthetic oligonucleotide
  Antisense strand to SEQ ID NO: 1806537
cuauauaucccagauacac

SEQ ID NO: 1806539 - RNA, 19 nt, Artificial Sequence
  Description of Artificial Sequence: Synthetic oligonucleotide
  Sense strand starting at position 847 of SEQ ID NO: 1563252
ugggauauauaguaaacaa

SEQ ID NO: 1806540 - RNA, 19 nt, Artificial Sequence
  Description of Artificial Sequence: Synthetic oligonucleotide
  Antisense strand to SEQ ID NO: 1806539
uuguuuacuauauauccca

SEQ ID NO: 1806541 - RNA, 19 nt, Artificial Sequence
  Description of Artificial Sequence: Synthetic oligonucleotide
  Sense strand starting at position 994 of SEQ ID NO: 1563252
gggagugcucaaugaaugu

SEQ ID NO: 1806542 - RNA, 19 nt, Artificial Sequence
  Description of Artificial Sequence: Synthetic oligonucleotide
  Antisense strand to SEQ ID NO: 1806541
acauucauugagcacuccc

SEQ ID NO: 1806543 - RNA, 19 nt, Artificial Sequence
  Description of Artificial Sequence: Synthetic oligonucleotide
  Sense strand starting at position 1000 of SEQ ID NO: 1563252
gcucaaugaaugugaagug

SEQ ID NO: 1806544 - RNA, 19 nt, Artificial Sequence
  Description of Artificial Sequence: Synthetic oligonucleotide
  Antisense strand to SEQ ID NO: 1806543
cacuucacauucauugagc

SEQ ID NO: 1806545 - RNA, 19 nt, Artificial Sequence
  Description of Artificial Sequence: Synthetic oligonucleotide
  Sense strand starting at position 1010 of SEQ ID NO: 1563252
ugugaagugucaucauaau

SEQ ID NO: 1806546 - RNA, 19 nt, Artificial Sequence
  Description of Artificial Sequence: Synthetic oligonucleotide
  Antisense strand to SEQ ID NO: 1806545
auuaugaugacacuucaca

SEQ ID NO: 1806547 - RNA, 19 nt, Artificial Sequence
  Description of Artificial Sequence: Synthetic oligonucleotide
  Sense strand starting at position 1038 of SEQ ID NO: 1563252
agagcugcccuuugaauuc

SEQ ID NO: 1806548 - RNA, 19 nt, Artificial Sequence
  Description of Artificial Sequence: Synthetic oligonucleotide
  Antisense strand to SEQ ID NO: 1806547
gaauucaaagggcagcucu

SEQ ID NO: 1806549 - RNA, 19 nt, Artificial Sequence
  Description of Artificial Sequence: Synthetic oligonucleotide
  Sense strand starting at position 1073 of SEQ ID NO: 1563252
cccacaguguguccauaua

SEQ ID NO: 1806550 - RNA, 19 nt, Artificial Sequence
  Description of Artificial Sequence: Synthetic oligonucleotide
  Antisense strand to SEQ ID NO: 1806549
uauauggacacacuguggg

SEQ ID NO: 1806551 - RNA, 19 nt, Artificial Sequence
  Description of Artificial Sequence: Synthetic oligonucleotide
  Sense strand starting at position 1173 of SEQ ID NO: 1563252
gcaggaggugcucaauaug

SEQ ID NO: 1806552 - RNA, 19 nt, Artificial Sequence
  Description of Artificial Sequence: Synthetic oligonucleotide
  Antisense strand to SEQ ID NO: 1806551
cauauugagcaccuccugc

SEQ ID NO: 1806553 - RNA, 19 nt, Artificial Sequence
  Description of Artificial Sequence: Synthetic oligonucleotide
  Sense strand starting at position 1187 of SEQ ID NO: 1563252
auaugugugagcuauguca

SEQ ID NO: 1806554 - RNA, 19 nt, Artificial Sequence
  Description of Artificial Sequence: Synthetic oligonucleotide
  Antisense strand to SEQ ID NO: 1806553
ugacauagcucacacauau

SEQ ID NO: 1806555 - RNA, 19 nt, Artificial Sequence
  Description of Artificial Sequence: Synthetic oligonucleotide
  Sense strand starting at position 1193 of SEQ ID NO: 1563252
gugagcuaugucagugguu

SEQ ID NO: 1806556 - RNA, 19 nt, Artificial Sequence
  Description of Artificial Sequence: Synthetic oligonucleotide
  Antisense strand to SEQ ID NO: 1806555
aaccacugacauagcucac

SEQ ID NO: 1806557 - RNA, 19 nt, Artificial Sequence
  Description of Artificial Sequence: Synthetic oligonucleotide
  Sense strand starting at position 1260 of SEQ ID NO: 1563252
cugacauguuugguuguca

SEQ ID NO: 1806558 - RNA, 19 nt, Artificial Sequence
  Description of Artificial Sequence: Synthetic oligonucleotide
  Antisense strand to SEQ ID NO: 1806557
ugacaaccaaacaugucag

SEQ ID NO: 1806559 - RNA, 19 nt, Artificial Sequence
  Description of Artificial Sequence: Synthetic oligonucleotide
  Sense strand starting at position 1473 of SEQ ID NO: 1563252
gaaagaaagugcccaguuu

SEQ ID NO: 1806560 - RNA, 19 nt, Artificial Sequence
  Description of Artificial Sequence: Synthetic oligonucleotide
  Antisense strand to SEQ ID NO: 1806559
aaacugggcacuuucuuuc

SEQ ID NO: 1806561 - RNA, 19 nt, Artificial Sequence
  Description of Artificial Sequence: Synthetic oligonucleotide
  Sense strand starting at position 1650 of SEQ ID NO: 1563252
uugcacuugccggaggauu

SEQ ID NO: 1806562 - RNA, 19 nt, Artificial Sequence
  Description of Artificial Sequence: Synthetic oligonucleotide
  Antisense strand to SEQ ID NO: 1806561
aauccuccggcaagugcaa

SEQ ID NO: 1806563 - RNA, 19 nt, Artificial Sequence
  Description of Artificial Sequence: Synthetic oligonucleotide
  Sense strand starting at position 1859 of SEQ ID NO: 1563252
cucccucugugaucauguu

SEQ ID NO: 1806564 - RNA, 19 nt, Artificial Sequence
  Description of Artificial Sequence: Synthetic oligonucleotide
  Antisense strand to SEQ ID NO: 1806563
aacaugaucacagagggag

SEQ ID NO: 1806565 - RNA, 19 nt, Artificial Sequence
  Description of Artificial Sequence: Synthetic oligonucleotide
  Sense strand starting at position 2210 of SEQ ID NO: 1563252
uugggugagucacuuaaca

SEQ ID NO: 1806566 - RNA, 19 nt, Artificial Sequence
  Description of Artificial Sequence: Synthetic oligonucleotide
  Antisense strand to SEQ ID NO: 1806565
uguuaagugacucacccaa

SEQ ID NO: 1806567 - RNA, 19 nt, Artificial Sequence
  Description of Artificial Sequence: Synthetic oligonucleotide
  Sense strand starting at position 2212 of SEQ ID NO: 1563252
gggugagucacuuaacacc

SEQ ID NO: 1806568 - RNA, 19 nt, Artificial Sequence
  Description of Artificial Sequence: Synthetic oligonucleotide
  Antisense strand to SEQ ID NO: 1806567
gguguuaagugacucaccc

SEQ ID NO: 1806569 - RNA, 19 nt, Artificial Sequence
  Description of Artificial Sequence: Synthetic oligonucleotide
  Sense strand starting at position 2240 of SEQ ID NO: 1563252
caguuucccuauguggaaa

SEQ ID NO: 1806570 - RNA, 19 nt, Artificial Sequence
  Description of Artificial Sequence: Synthetic oligonucleotide
  Antisense strand to SEQ ID NO: 1806569
uuuccacauagggaaacug

SEQ ID NO: 1806571 - RNA, 19 nt, Artificial Sequence
  Description of Artificial Sequence: Synthetic oligonucleotide
  Sense strand starting at position 2300 of SEQ ID NO: 1563252
gguguugaaccagggugaa

SEQ ID NO: 1806572 - RNA, 19 nt, Artificial Sequence
  Description of Artificial Sequence: Synthetic oligonucleotide
  Antisense strand to SEQ ID NO: 1806571
uucacccugguucaacacc

SEQ ID NO: 1806573 - RNA, 19 nt, Artificial Sequence
  Description of Artificial Sequence: Synthetic oligonucleotide
  Sense strand starting at position 2522 of SEQ ID NO: 1563252
gggucuauccauuguucca

SEQ ID NO: 1806574 - RNA, 19 nt, Artificial Sequence
  Description of Artificial Sequence: Synthetic oligonucleotide
  Antisense strand to SEQ ID NO: 1806573
uggaacaauggauagaccc

SEQ ID NO: 1806575 - RNA, 19 nt, Artificial Sequence
  Description of Artificial Sequence: Synthetic oligonucleotide
  Sense strand starting at position 2584 of SEQ ID NO: 1563252
gggaauaagcugggccaua

SEQ ID NO: 1806576 - RNA, 19 nt, Artificial Sequence
  Description of Artificial Sequence: Synthetic oligonucleotide
  Antisense strand to SEQ ID NO: 1806575
uauggcccagcuuauuccc

SEQ ID NO: 1806577 - RNA, 19 nt, Artificial Sequence
  Description of Artificial Sequence: Synthetic oligonucleotide
  Sense strand starting at position 2585 of SEQ ID NO: 1563252
ggaauaagcugggccauau

SEQ ID NO: 1806578 - RNA, 19 nt, Artificial Sequence
  Description of Artificial Sequence: Synthetic oligonucleotide
  Antisense strand to SEQ ID NO: 1806577
auauggcccagcuuauucc

SEQ ID NO: 1806579 - RNA, 19 nt, Artificial Sequence
  Description of Artificial Sequence: Synthetic oligonucleotide
  Sense strand starting at position 3136 of SEQ ID NO: 1563252
gguucuuagcauuagagca

SEQ ID NO: 1806580 - RNA, 19 nt, Artificial Sequence
  Description of Artificial Sequence: Synthetic oligonucleotide
  Antisense strand to SEQ ID NO: 1806579
ugcucuaaugcuaagaacc

SEQ ID NO: 1806581 - RNA, 19 nt, Artificial Sequence
  Description of Artificial Sequence: Synthetic oligonucleotide
  Sense strand starting at position 3763 of SEQ ID NO: 1563252
uguaauaauuuggucagcu

SEQ ID NO: 1806582 - RNA, 19 nt, Artificial Sequence
  Description of Artificial Sequence: Synthetic oligonucleotide
  Antisense strand to SEQ ID NO: 1806581
agcugaccaaauuauuaca

SEQ ID NO: 1806583 - RNA, 19 nt, Artificial Sequence
  Description of Artificial Sequence: Synthetic oligonucleotide
  Sense strand starting at position 3767 of SEQ ID NO: 1563252
auaauuuggucagcuguua

SEQ ID NO: 1806584 - RNA, 19 nt, Artificial Sequence
  Description of Artificial Sequence: Synthetic oligonucleotide
  Antisense strand to SEQ ID NO: 1806583
uaacagcugaccaaauuau

SEQ ID NO: 1806585 - RNA, 19 nt, Artificial Sequence
  Description of Artificial Sequence: Synthetic oligonucleotide
  Sense strand starting at position 3830 of SEQ ID NO: 1563252
auguguuaauaucuguauc

SEQ ID NO: 1806586 - RNA, 19 nt, Artificial Sequence
  Description of Artificial Sequence: Synthetic oligonucleotide
  Antisense strand to SEQ ID NO: 1806585
gauacagauauuaacacau

SEQ ID NO: 1806587 - RNA, 19 nt, Artificial Sequence
  Description of Artificial Sequence: Synthetic oligonucleotide
  Sense strand starting at position 3832 of SEQ ID NO: 1563252
guguuaauaucuguaucca

SEQ ID NO: 1806588 - RNA, 19 nt, Artificial Sequence
  Description of Artificial Sequence: Synthetic oligonucleotide
  Antisense strand to SEQ ID NO: 1806587
uggauacagauauuaacac

SEQ ID NO: 1806589 - RNA, 19 nt, Artificial Sequence
  Description of Artificial Sequence: Synthetic oligonucleotide
  Sense strand starting at position 3833 of SEQ ID NO: 1563252
uguuaauaucuguauccau

SEQ ID NO: 1806590 - RNA, 19 nt, Artificial Sequence
  Description of Artificial Sequence: Synthetic oligonucleotide
  Antisense strand to SEQ ID NO: 1806589
auggauacagauauuaaca

SEQ ID NO: 1806591 - RNA, 19 nt, Artificial Sequence
  Description of Artificial Sequence: Synthetic oligonucleotide
  Sense strand starting at position 3877 of SEQ ID NO: 1563252
acauaaggcuauccuugaa

SEQ ID NO: 1806592 - RNA, 19 nt, Artificial Sequence
  Description of Artificial Sequence: Synthetic oligonucleotide
  Antisense strand to SEQ ID NO: 1806591
uucaaggauagccuuaugu

SEQ ID NO: 1806593 - RNA, 19 nt, Artificial Sequence
  Description of Artificial Sequence: Synthetic oligonucleotide
  Sense strand starting at position 3941 of SEQ ID NO: 1563252
agacaaucauugcuguguu

SEQ ID NO: 1806594 - RNA, 19 nt, Artificial Sequence
  Description of Artificial Sequence: Synthetic oligonucleotide
  Antisense strand to SEQ ID NO: 1806593
aacacagcaaugauugucu

SEQ ID NO: 1806595 - RNA, 19 nt, Artificial Sequence
  Description of Artificial Sequence: Synthetic oligonucleotide
  Sense strand starting at position 14 of SEQ ID NO: 1563253
acaagaauggcauguggga

SEQ ID NO: 1806596 - RNA, 19 nt, Artificial Sequence
  Description of Artificial Sequence: Synthetic oligonucleotide
  Antisense strand to SEQ ID NO: 1806595
ucccacaugccauucuugu

SEQ ID NO: 1806597 - RNA, 19 nt, Artificial Sequence
  Description of Artificial Sequence: Synthetic oligonucleotide
  Sense strand starting at position 77 of SEQ ID NO: 1563253
gugcgauggauugauaagu

SEQ ID NO: 1806598 - RNA, 19 nt, Artificial Sequence
  Description of Artificial Sequence: Synthetic oligonucleotide
  Antisense strand to SEQ ID NO: 1806597
acuuaucaauccaucgcac

SEQ ID NO: 1806599 - RNA, 19 nt, Artificial Sequence
  Description of Artificial Sequence: Synthetic oligonucleotide
  Sense strand starting at position 82 of SEQ ID NO: 1563253
auggauugauaaguccuua

SEQ ID NO: 1806600 - RNA, 19 nt, Artificial Sequence
  Description of Artificial Sequence: Synthetic oligonucleotide
  Antisense strand to SEQ ID NO: 1806599
uaaggacuuaucaauccau

SEQ ID NO: 1806601 - RNA, 19 nt, Artificial Sequence
  Description of Artificial Sequence: Synthetic oligonucleotide
  Sense strand starting at position 125 of SEQ ID NO: 1563253
augggaagcaguggauaua

SEQ ID NO: 1806602 - RNA, 19 nt, Artificial Sequence
  Description of Artificial Sequence: Synthetic oligonucleotide
  Antisense strand to SEQ ID NO: 1806601
uauauccacugcuucccau

SEQ ID NO: 1806603 - RNA, 19 nt, Artificial Sequence
  Description of Artificial Sequence: Synthetic oligonucleotide
  Sense strand starting at position 143 of SEQ ID NO: 1563253
acaauaagugcuugauaau

SEQ ID NO: 1806604 - RNA, 19 nt, Artificial Sequence
  Description of Artificial Sequence: Synthetic oligonucleotide
  Antisense strand to SEQ ID NO: 1806603
auuaucaagcacuuauugu

SEQ ID NO: 1806605 - RNA, 19 nt, Artificial Sequence
  Description of Artificial Sequence: Synthetic oligonucleotide
  Sense strand starting at position 182 of SEQ ID NO: 1563253
ggcaucuggaguuaccauu

SEQ ID NO: 1806606 - RNA, 19 nt, Artificial Sequence
  Description of Artificial Sequence: Synthetic oligonucleotide
  Antisense strand to SEQ ID NO: 1806605
aaugguaacuccagaugcc

SEQ ID NO: 1806607 - RNA, 19 nt, Artificial Sequence
  Description of Artificial Sequence: Synthetic oligonucleotide
  Sense strand starting at position 188 of SEQ ID NO: 1563253
uggaguuaccauuggaagg

SEQ ID NO: 1806608 - RNA, 19 nt, Artificial Sequence
  Description of Artificial Sequence: Synthetic oligonucleotide
  Antisense strand to SEQ ID NO: 1806607
ccuuccaaugguaacucca

SEQ ID NO: 1806609 - RNA, 19 nt, Artificial Sequence
  Description of Artificial Sequence: Synthetic oligonucleotide
  Sense strand starting at position 396 of SEQ ID NO: 1563253
acugcauagcccuagguau

SEQ ID NO: 1806610 - RNA, 19 nt, Artificial Sequence
  Description of Artificial Sequence: Synthetic oligonucleotide
  Antisense strand to SEQ ID NO: 1806609
auaccuagggcuaugcagu

SEQ ID NO: 1806611 - RNA, 19 nt, Artificial Sequence
  Description of Artificial Sequence: Synthetic oligonucleotide
  Sense strand starting at position 422 of SEQ ID NO: 1563253
augccaaauagaugugaug

SEQ ID NO: 1806612 - RNA, 19 nt, Artificial Sequence
  Description of Artificial Sequence: Synthetic oligonucleotide
  Antisense strand to SEQ ID NO: 1806611
caucacaucuauuuggcau

SEQ ID NO: 1806613 - RNA, 19 nt, Artificial Sequence
  Description of Artificial Sequence: Synthetic oligonucleotide
  Sense strand starting at position 424 of SEQ ID NO: 1563253
gccaaauagaugugaugaa

SEQ ID NO: 1806614 - RNA, 19 nt, Artificial Sequence
  Description of Artificial Sequence: Synthetic oligonucleotide
  Antisense strand to SEQ ID NO: 1806613
uucaucacaucuauuuggc

SEQ ID NO: 1806615 - RNA, 19 nt, Artificial Sequence
  Description of Artificial Sequence: Synthetic oligonucleotide
  Sense strand starting at position 505 of SEQ ID NO: 1563253
guguaucugggauauauag

SEQ ID NO: 1806616 - RNA, 19 nt, Artificial Sequence
  Description of Artificial Sequence: Synthetic oligonucleotide
  Antisense strand to SEQ ID NO: 1806615
cuauauaucccagauacac

SEQ ID NO: 1806617 - RNA, 19 nt, Artificial Sequence
  Description of Artificial Sequence: Synthetic oligonucleotide
  Sense strand starting at position 512 of SEQ ID NO: 1563253
ugggauauauaguaaacaa

SEQ ID NO: 1806618 - RNA, 19 nt, Artificial Sequence
  Description of Artificial Sequence: Synthetic oligonucleotide
  Antisense strand to SEQ ID NO: 1806617
uuguuuacuauauauccca

SEQ ID NO: 1806619 - RNA, 19 nt, Artificial Sequence
  Description of Artificial Sequence: Synthetic oligonucleotide
  Sense strand starting at position 659 of SEQ ID NO: 1563253
gggagugcucaaugaaugu

SEQ ID NO: 1806620 - RNA, 19 nt, Artificial Sequence
  Description of Artificial Sequence: Synthetic oligonucleotide
  Antisense strand to SEQ ID NO: 1806619
acauucauugagcacuccc

SEQ ID NO: 1806621 - RNA, 19 nt, Artificial Sequence
  Description of Artificial Sequence: Synthetic oligonucleotide
  Sense strand starting at position 665 of SEQ ID NO: 1563253
gcucaaugaaugugaagug

SEQ ID NO: 1806622 - RNA, 19 nt, Artificial Sequence
  Description of Artificial Sequence: Synthetic oligonucleotide
  Antisense strand to SEQ ID NO: 1806621
cacuucacauucauugagc

SEQ ID NO: 1806623 - RNA, 19 nt, Artificial Sequence
  Description of Artificial Sequence: Synthetic oligonucleotide
  Sense strand starting at position 675 of SEQ ID NO: 1563253
ugugaagugucaucauaau

SEQ ID NO: 1806624 - RNA, 19 nt, Artificial Sequence
  Description of Artificial Sequence: Synthetic oligonucleotide
  Antisense strand to SEQ ID NO: 1806623
auuaugaugacacuucaca

SEQ ID NO: 1806625 - RNA, 19 nt, Artificial Sequence
  Description of Artificial Sequence: Synthetic oligonucleotide
  Sense strand starting at position 703 of SEQ ID NO: 1563253
agagcugcccuuugaauuc

SEQ ID NO: 1806626 - RNA, 19 nt, Artificial Sequence
  Description of Artificial Sequence: Synthetic oligonucleotide
  Antisense strand to SEQ ID NO: 1806625
gaauucaaagggcagcucu

SEQ ID NO: 1806627 - RNA, 19 nt, Artificial Sequence
  Description of Artificial Sequence: Synthetic oligonucleotide
  Sense strand starting at position 738 of SEQ ID NO: 1563253
cccacaguguguccauaua

SEQ ID NO: 1806628 - RNA, 19 nt, Artificial Sequence
  Description of Artificial Sequence: Synthetic oligonucleotide
  Antisense strand to SEQ ID NO: 1806627
uauauggacacacuguggg

SEQ ID NO: 1806629 - RNA, 19 nt, Artificial Sequence
  Description of Artificial Sequence: Synthetic oligonucleotide
  Sense strand starting at position 838 of SEQ ID NO: 1563253
gcaggaggugcucaauaug

SEQ ID NO: 1806630 - RNA, 19 nt, Artificial Sequence
  Description of Artificial Sequence: Synthetic oligonucleotide
  Antisense strand to SEQ ID NO: 1806629
cauauugagcaccuccugc

SEQ ID NO: 1806631 - RNA, 19 nt, Artificial Sequence
  Description of Artificial Sequence: Synthetic oligonucleotide
  Sense strand starting at position 852 of SEQ ID NO: 1563253
auaugugugagcuauguca

SEQ ID NO: 1806632 - RNA, 19 nt, Artificial Sequence
  Description of Artificial Sequence: Synthetic oligonucleotide
  Antisense strand to SEQ ID NO: 1806631
ugacauagcucacacauau

SEQ ID NO: 1806633 - RNA, 19 nt, Artificial Sequence
  Description of Artificial Sequence: Synthetic oligonucleotide
  Sense strand starting at position 858 of SEQ ID NO: 1563253
gugagcuaugucagugguu

SEQ ID NO: 1806634 - RNA, 19 nt, Artificial Sequence
  Description of Artificial Sequence: Synthetic oligonucleotide
  Antisense strand to SEQ ID NO: 1806633
aaccacugacauagcucac

SEQ ID NO: 1806635 - RNA, 19 nt, Artificial Sequence
  Description of Artificial Sequence: Synthetic oligonucleotide
  Sense strand starting at position 925 of SEQ ID NO: 1563253
cugacauguuugguuguca

SEQ ID NO: 1806636 - RNA, 19 nt, Artificial Sequence
  Description of Artificial Sequence: Synthetic oligonucleotide
  Antisense strand to SEQ ID NO: 1806635
ugacaaccaaacaugucag

SEQ ID NO: 1806637 - RNA, 19 nt, Artificial Sequence
  Description of Artificial Sequence: Synthetic oligonucleotide
  Sense strand starting at position 1138 of SEQ ID NO: 1563253
gaaagaaagugcccaguuu

SEQ ID NO: 1806638 - RNA, 19 nt, Artificial Sequence
  Description of Artificial Sequence: Synthetic oligonucleotide
  Antisense strand to SEQ ID NO: 1806637
aaacugggcacuuucuuuc

SEQ ID NO: 1806639 - RNA, 19 nt, Artificial Sequence
  Description of Artificial Sequence: Synthetic oligonucleotide
  Sense strand starting at position 1315 of SEQ ID NO: 1563253
uugcacuugccggaggauu

SEQ ID NO: 1806640 - RNA, 19 nt, Artificial Sequence
  Description of Artificial Sequence: Synthetic oligonucleotide
  Antisense strand to SEQ ID NO: 1806639
aauccuccggcaagugcaa

SEQ ID NO: 1806641 - RNA, 19 nt, Artificial Sequence
  Description of Artificial Sequence: Synthetic oligonucleotide
  Sense strand starting at position 1524 of SEQ ID NO: 1563253
cucccucugugaucauguu

SEQ ID NO: 1806642 - RNA, 19 nt, Artificial Sequence
  Description of Artificial Sequence: Synthetic oligonucleotide
  Antisense strand to SEQ ID NO: 1806641
aacaugaucacagagggag

SEQ ID NO: 1806643 - RNA, 19 nt, Artificial Sequence
  Description of Artificial Sequence: Synthetic oligonucleotide
  Sense strand starting at position 1875 of SEQ ID NO: 1563253
uugggugagucacuuaaca

SEQ ID NO: 1806644 - RNA, 19 nt, Artificial Sequence
  Description of Artificial Sequence: Synthetic oligonucleotide
  Antisense strand to SEQ ID NO: 1806643
uguuaagugacucacccaa

SEQ ID NO: 1806645 - RNA, 19 nt, Artificial Sequence
  Description of Artificial Sequence: Synthetic oligonucleotide
  Sense strand starting at position 1877 of SEQ ID NO: 1563253
gggugagucacuuaacacc

SEQ ID NO: 1806646 - RNA, 19 nt, Artificial Sequence
  Description of Artificial Sequence: Synthetic oligonucleotide
  Antisense strand to SEQ ID NO: 1806645
gguguuaagugacucaccc

SEQ ID NO: 1806647 - RNA, 19 nt, Artificial Sequence
  Description of Artificial Sequence: Synthetic oligonucleotide
  Sense strand starting at position 1905 of SEQ ID NO: 1563253
caguuucccuauguggaaa

SEQ ID NO: 1806648 - RNA, 19 nt, Artificial Sequence
  Description of Artificial Sequence: Synthetic oligonucleotide
  Antisense strand to SEQ ID NO: 1806647
uuuccacauagggaaacug

SEQ ID NO: 1806649 - RNA, 19 nt, Artificial Sequence
  Description of Artificial Sequence: Synthetic oligonucleotide
  Sense strand starting at position 1965 of SEQ ID NO: 1563253
gguguugaaccagggugaa

SEQ ID NO: 1806650 - RNA, 19 nt, Artificial Sequence
  Description of Artificial Sequence: Synthetic oligonucleotide
  Antisense strand to SEQ ID NO: 1806649
uucacccugguucaacacc

SEQ ID NO: 1806651 - RNA, 19 nt, Artificial Sequence
  Description of Artificial Sequence: Synthetic oligonucleotide
  Sense strand starting at position 2187 of SEQ ID NO: 1563253
gggucuauccauuguucca

SEQ ID NO: 1806652 - RNA, 19 nt, Artificial Sequence
  Description of Artificial Sequence: Synthetic oligonucleotide
  Antisense strand to SEQ ID NO: 1806651
uggaacaauggauagaccc

SEQ ID NO: 1806653 - RNA, 19 nt, Artificial Sequence
  Description of Artificial Sequence: Synthetic oligonucleotide
  Sense strand starting at position 2249 of SEQ ID NO: 1563253
gggaauaagcugggccaua

SEQ ID NO: 1806654 - RNA, 19 nt, Artificial Sequence
  Description of Artificial Sequence: Synthetic oligonucleotide
  Antisense strand to SEQ ID NO: 1806653
uauggcccagcuuauuccc

SEQ ID NO: 1806655 - RNA, 19 nt, Artificial Sequence
  Description of Artificial Sequence: Synthetic oligonucleotide
  Sense strand starting at position 2250 of SEQ ID NO: 1563253
ggaauaagcugggccauau

SEQ ID NO: 1806656 - RNA, 19 nt, Artificial Sequence
  Description of Artificial Sequence: Synthetic oligonucleotide
  Antisense strand to SEQ ID NO: 1806655
auauggcccagcuuauucc

SEQ ID NO: 1806657 - RNA, 19 nt, Artificial Sequence
  Description of Artificial Sequence: Synthetic oligonucleotide
  Sense strand starting at position 2801 of SEQ ID NO: 1563253
gguucuuagcauuagagca

SEQ ID NO: 1806658 - RNA, 19 nt, Artificial Sequence
  Description of Artificial Sequence: Synthetic oligonucleotide
  Antisense strand to SEQ ID NO: 1806657
ugcucuaaugcuaagaacc

SEQ ID NO: 1806659 - RNA, 19 nt, Artificial Sequence
  Description of Artificial Sequence: Synthetic oligonucleotide
  Sense strand starting at position 3428 of SEQ ID NO: 1563253
uguaauaauuuggucagcu

SEQ ID NO: 1806660 - RNA, 19 nt, Artificial Sequence
  Description of Artificial Sequence: Synthetic oligonucleotide
  Antisense strand to SEQ ID NO: 1806659
agcugaccaaauuauuaca

SEQ ID NO: 1806661 - RNA, 19 nt, Artificial Sequence
  Description of Artificial Sequence: Synthetic oligonucleotide
  Sense strand starting at position 3432 of SEQ ID NO: 1563253
auaauuuggucagcuguua

SEQ ID NO: 1806662 - RNA, 19 nt, Artificial Sequence
  Description of Artificial Sequence: Synthetic oligonucleotide
  Antisense strand to SEQ ID NO: 1806661
uaacagcugaccaaauuau

SEQ ID NO: 1806663 - RNA, 19 nt, Artificial Sequence
  Description of Artificial Sequence: Synthetic oligonucleotide
  Sense strand starting at position 3495 of SEQ ID NO: 1563253
auguguuaauaucuguauc

SEQ ID NO: 1806664 - RNA, 19 nt, Artificial Sequence
  Description of Artificial Sequence: Synthetic oligonucleotide
  Antisense strand to SEQ ID NO: 1806663
gauacagauauuaacacau

SEQ ID NO: 1806665 - RNA, 19 nt, Artificial Sequence
  Description of Artificial Sequence: Synthetic oligonucleotide
  Sense strand starting at position 3497 of SEQ ID NO: 1563253
guguuaauaucuguaucca

SEQ ID NO: 1806666 - RNA, 19 nt, Artificial Sequence
  Description of Artificial Sequence: Synthetic oligonucleotide
  Antisense strand to SEQ ID NO: 1806665
uggauacagauauuaacac

SEQ ID NO: 1806667 - RNA, 19 nt, Artificial Sequence
  Description of Artificial Sequence: Synthetic oligonucleotide
  Sense strand starting at position 3498 of SEQ ID NO: 1563253
uguuaauaucuguauccau

SEQ ID NO: 1806668 - RNA, 19 nt, Artificial Sequence
  Description of Artificial Sequence: Synthetic oligonucleotide
  Antisense strand to SEQ ID NO: 1806667
auggauacagauauuaaca

SEQ ID NO: 1806669 - RNA, 19 nt, Artificial Sequence
  Description of Artificial Sequence: Synthetic oligonucleotide
  Sense strand starting at position 3542 of SEQ ID NO: 1563253
acauaaggcuauccuugaa

SEQ ID NO: 1806670 - RNA, 19 nt, Artificial Sequence
  Description of Artificial Sequence: Synthetic oligonucleotide
  Antisense strand to SEQ ID NO: 1806669
uucaaggauagccuuaugu

SEQ ID NO: 1806671 - RNA, 19 nt, Artificial Sequence
  Description of Artificial Sequence: Synthetic oligonucleotide
  Sense strand starting at position 3606 of SEQ ID NO: 1563253
agacaaucauugcuguguu

SEQ ID NO: 1806672 - RNA, 19 nt, Artificial Sequence
  Description of Artificial Sequence: Synthetic oligonucleotide
  Antisense strand to SEQ ID NO: 1806671
aacacagcaaugauugucu

SEQ ID NO: 1806673 - RNA, 19 nt, Artificial Sequence
  Description of Artificial Sequence: Synthetic oligonucleotide
  Sense strand starting at position 3972 of SEQ ID NO: 1563253
cugaaauucuggcuggcuu

SEQ ID NO: 1806674 - RNA, 19 nt, Artificial Sequence
  Description of Artificial Sequence: Synthetic oligonucleotide
  Antisense strand to SEQ ID NO: 1806673
aagccagccagaauuucag

SEQ ID NO: 1806675 - RNA, 19 nt, Artificial Sequence
  Description of Artificial Sequence: Synthetic oligonucleotide
  Sense strand starting at position 324 of SEQ ID NO: 1563254
gcagacagauuagcagaaa

SEQ ID NO: 1806676 - RNA, 19 nt, Artificial Sequence
  Description of Artificial Sequence: Synthetic oligonucleotide
  Antisense strand to SEQ ID NO: 1806675
uuucugcuaaucugucugc

SEQ ID NO: 1806677 - RNA, 19 nt, Artificial Sequence
  Description of Artificial Sequence: Synthetic oligonucleotide
  Sense strand starting at position 634 of SEQ ID NO: 1563254
ccuaaaucuugggcagagu

SEQ ID NO: 1806678 - RNA, 19 nt, Artificial Sequence
  Description of Artificial Sequence: Synthetic oligonucleotide
  Antisense strand to SEQ ID NO: 1806677
acucugcccaagauuuagg

SEQ ID NO: 1806679 - RNA, 19 nt, Artificial Sequence
  Description of Artificial Sequence: Synthetic oligonucleotide
  Sense strand starting at position 635 of SEQ ID NO: 1563254
cuaaaucuugggcagagua

SEQ ID NO: 1806680 - RNA, 19 nt, Artificial Sequence
  Description of Artificial Sequence: Synthetic oligonucleotide
  Antisense strand to SEQ ID NO: 1806679
uacucugcccaagauuuag

SEQ ID NO: 1806681 - RNA, 19 nt, Artificial Sequence
  Description of Artificial Sequence: Synthetic oligonucleotide
  Sense strand starting at position 655 of SEQ ID NO: 1563254
acacaugguuugccuacaa

SEQ ID NO: 1806682 - RNA, 19 nt, Artificial Sequence
  Description of Artificial Sequence: Synthetic oligonucleotide
  Antisense strand to SEQ ID NO: 1806681
uuguaggcaaaccaugugu

SEQ ID NO: 1806683 - RNA, 19 nt, Artificial Sequence
  Description of Artificial Sequence: Synthetic oligonucleotide
  Sense strand starting at position 659 of SEQ ID NO: 1563254
augguuugccuacaauaaa

SEQ ID NO: 1806684 - RNA, 19 nt, Artificial Sequence
  Description of Artificial Sequence: Synthetic oligonucleotide
  Antisense strand to SEQ ID NO: 1806683
uuuauuguaggcaaaccau

SEQ ID NO: 1806685 - RNA, 19 nt, Artificial Sequence
  Description of Artificial Sequence: Synthetic oligonucleotide
  Sense strand starting at position 795 of SEQ ID NO: 1563254
ucagaaaugguaugccuaa

SEQ ID NO: 1806686 - RNA, 19 nt, Artificial Sequence
  Description of Artificial Sequence: Synthetic oligonucleotide
  Antisense strand to SEQ ID NO: 1806685
uuaggcauaccauuucuga

SEQ ID NO: 1806687 - RNA, 19 nt, Artificial Sequence
  Description of Artificial Sequence: Synthetic oligonucleotide
  Sense strand starting at position 796 of SEQ ID NO: 1563254
cagaaaugguaugccuaaa

SEQ ID NO: 1806688 - RNA, 19 nt, Artificial Sequence
  Description of Artificial Sequence: Synthetic oligonucleotide
  Antisense strand to SEQ ID NO: 1806687
uuuaggcauaccauuucug

SEQ ID NO: 1806689 - RNA, 19 nt, Artificial Sequence
  Description of Artificial Sequence: Synthetic oligonucleotide
  Sense strand starting at position 954 of SEQ ID NO: 1563254
ggccuuagugccuuguuua

SEQ ID NO: 1806690 - RNA, 19 nt, Artificial Sequence
  Description of Artificial Sequence: Synthetic oligonucleotide
  Antisense strand to SEQ ID NO: 1806689
uaaacaaggcacuaaggcc

SEQ ID NO: 1806691 - RNA, 19 nt, Artificial Sequence
  Description of Artificial Sequence: Synthetic oligonucleotide
  Sense strand starting at position 969 of SEQ ID NO: 1563254
uuuaucuggguguacagaa

SEQ ID NO: 1806692 - RNA, 19 nt, Artificial Sequence
  Description of Artificial Sequence: Synthetic oligonucleotide
  Antisense strand to SEQ ID NO: 1806691
uucuguacacccagauaaa

SEQ ID NO: 1806693 - RNA, 19 nt, Artificial Sequence
  Description of Artificial Sequence: Synthetic oligonucleotide
  Sense strand starting at position 997 of SEQ ID NO: 1563254
guugcucaucuaugauuug

SEQ ID NO: 1806694 - RNA, 19 nt, Artificial Sequence
  Description of Artificial Sequence: Synthetic oligonucleotide
  Antisense strand to SEQ ID NO: 1806693
caaaucauagaugagcaac

SEQ ID NO: 1806695 - RNA, 19 nt, Artificial Sequence
  Description of Artificial Sequence: Synthetic oligonucleotide
  Sense strand starting at position 1058 of SEQ ID NO: 1563254
aucugcugaugauugaaau

SEQ ID NO: 1806696 - RNA, 19 nt, Artificial Sequence
  Description of Artificial Sequence: Synthetic oligonucleotide
  Antisense strand to SEQ ID NO: 1806695
auuucaaucaucagcagau

SEQ ID NO: 1806697 - RNA, 19 nt, Artificial Sequence
  Description of Artificial Sequence: Synthetic oligonucleotide
  Sense strand starting at position 1059 of SEQ ID NO: 1563254
ucugcugaugauugaaaug

SEQ ID NO: 1806698 - RNA, 19 nt, Artificial Sequence
  Description of Artificial Sequence: Synthetic oligonucleotide
  Antisense strand to SEQ ID NO: 1806697
cauuucaaucaucagcaga

SEQ ID NO: 1806699 - RNA, 19 nt, Artificial Sequence
  Description of Artificial Sequence: Synthetic oligonucleotide
  Sense strand starting at position 1081 of SEQ ID NO: 1563254
uguugugaaauaugaugua

SEQ ID NO: 1806700 - RNA, 19 nt, Artificial Sequence
  Description of Artificial Sequence: Synthetic oligonucleotide
  Antisense strand to SEQ ID NO: 1806699
uacaucauauuucacaaca

SEQ ID NO: 1806701 - RNA, 19 nt, Artificial Sequence
  Description of Artificial Sequence: Synthetic oligonucleotide
  Sense strand starting at position 1190 of SEQ ID NO: 1563254
aaaugacgccucuaaaugu

SEQ ID NO: 1806702 - RNA, 19 nt, Artificial Sequence
  Description of Artificial Sequence: Synthetic oligonucleotide
  Antisense strand to SEQ ID NO: 1806701
acauuuagaggcgucauuu

SEQ ID NO: 1806703 - RNA, 19 nt, Artificial Sequence
  Description of Artificial Sequence: Synthetic oligonucleotide
  Sense strand starting at position 1207 of SEQ ID NO: 1563254
guuaauaaaugagcacaua

SEQ ID NO: 1806704 - RNA, 19 nt, Artificial Sequence
  Description of Artificial Sequence: Synthetic oligonucleotide
  Antisense strand to SEQ ID NO: 1806703
uaugugcucauuuauuaac

SEQ ID NO: 1806705 - RNA, 19 nt, Artificial Sequence
  Description of Artificial Sequence: Synthetic oligonucleotide
  Sense strand starting at position 1306 of SEQ ID NO: 1563254
gccauuuaguuagucaagu

SEQ ID NO: 1806706 - RNA, 19 nt, Artificial Sequence
  Description of Artificial Sequence: Synthetic oligonucleotide
  Antisense strand to SEQ ID NO: 1806705
acuugacuaacuaaauggc

SEQ ID NO: 1806707 - RNA, 19 nt, Artificial Sequence
  Description of Artificial Sequence: Synthetic oligonucleotide
  Sense strand starting at position 1307 of SEQ ID NO: 1563254
ccauuuaguuagucaaguu

SEQ ID NO: 1806708 - RNA, 19 nt, Artificial Sequence
  Description of Artificial Sequence: Synthetic oligonucleotide
  Antisense strand to SEQ ID NO: 1806707
aacuugacuaacuaaaugg

SEQ ID NO: 1806709 - RNA, 19 nt, Artificial Sequence
  Description of Artificial Sequence: Synthetic oligonucleotide
  Sense strand starting at position 1437 of SEQ ID NO: 1563254
gcaacaaagcuauauugua

SEQ ID NO: 1806710 - RNA, 19 nt, Artificial Sequence
  Description of Artificial Sequence: Synthetic oligonucleotide
  Antisense strand to SEQ ID NO: 1806709
uacaauauagcuuuguugc

SEQ ID NO: 1806711 - RNA, 19 nt, Artificial Sequence
  Description of Artificial Sequence: Synthetic oligonucleotide
  Sense strand starting at position 1444 of SEQ ID NO: 1563254
agcuauauuguagggaaau

SEQ ID NO: 1806712 - RNA, 19 nt, Artificial Sequence
  Description of Artificial Sequence: Synthetic oligonucleotide
  Antisense strand to SEQ ID NO: 1806711
auuucccuacaauauagcu

SEQ ID NO: 1806713 - RNA, 19 nt, Artificial Sequence
  Description of Artificial Sequence: Synthetic oligonucleotide
  Sense strand starting at position 1457 of SEQ ID NO: 1563254
ggaaaucauuauguugaua

SEQ ID NO: 1806714 - RNA, 19 nt, Artificial Sequence
  Description of Artificial Sequence: Synthetic oligonucleotide
  Antisense strand to SEQ ID NO: 1806713
uaucaacauaaugauuucc

SEQ ID NO: 1806715 - RNA, 19 nt, Artificial Sequence
  Description of Artificial Sequence: Synthetic oligonucleotide
  Sense strand starting at position 1513 of SEQ ID NO: 1563254
uuggguuauuuccugucca

SEQ ID NO: 1806716 - RNA, 19 nt, Artificial Sequence
  Description of Artificial Sequence: Synthetic oligonucleotide
  Antisense strand to SEQ ID NO: 1806715
uggacaggaaauaacccaa

SEQ ID NO: 1806717 - RNA, 19 nt, Artificial Sequence
  Description of Artificial Sequence: Synthetic oligonucleotide
  Sense strand starting at position 1517 of SEQ ID NO: 1563254
guuauuuccuguccaauug

SEQ ID NO: 1806718 - RNA, 19 nt, Artificial Sequence
  Description of Artificial Sequence: Synthetic oligonucleotide
  Antisense strand to SEQ ID NO: 1806717
caauuggacaggaaauaac

SEQ ID NO: 1806719 - RNA, 19 nt, Artificial Sequence
  Description of Artificial Sequence: Synthetic oligonucleotide
  Sense strand starting at position 1578 of SEQ ID NO: 1563254
gggauagguucugcuauua

SEQ ID NO: 1806720 - RNA, 19 nt, Artificial Sequence
  Description of Artificial Sequence: Synthetic oligonucleotide
  Antisense strand to SEQ ID NO: 1806719
uaauagcagaaccuauccc

SEQ ID NO: 1806721 - RNA, 19 nt, Artificial Sequence
  Description of Artificial Sequence: Synthetic oligonucleotide
  Sense strand starting at position 1669 of SEQ ID NO: 1563254
agucuagcuccagaguaua

SEQ ID NO: 1806722 - RNA, 19 nt, Artificial Sequence
  Description of Artificial Sequence: Synthetic oligonucleotide
  Antisense strand to SEQ ID NO: 1806721
uauacucuggagcuagacu

SEQ ID NO: 1806723 - RNA, 19 nt, Artificial Sequence
  Description of Artificial Sequence: Synthetic oligonucleotide
  Sense strand starting at position 1672 of SEQ ID NO: 1563254
cuagcuccagaguauaaau

SEQ ID NO: 1806724 - RNA, 19 nt, Artificial Sequence
  Description of Artificial Sequence: Synthetic oligonucleotide
  Antisense strand to SEQ ID NO: 1806723
auuuauacucuggagcuag

SEQ ID NO: 1806725 - RNA, 19 nt, Artificial Sequence
  Description of Artificial Sequence: Synthetic oligonucleotide
  Sense strand starting at position 1725 of SEQ ID NO: 1563254
gcacuuacauuuggaauuu

SEQ ID NO: 1806726 - RNA, 19 nt, Artificial Sequence
  Description of Artificial Sequence: Synthetic oligonucleotide
  Antisense strand to SEQ ID NO: 1806725
aaauuccaaauguaagugc

SEQ ID NO: 1806727 - RNA, 19 nt, Artificial Sequence
  Description of Artificial Sequence: Synthetic oligonucleotide
  Sense strand starting at position 1861 of SEQ ID NO: 1563254
uuagauaucuuaccaguuu

SEQ ID NO: 1806728 - RNA, 19 nt, Artificial Sequence
  Description of Artificial Sequence: Synthetic oligonucleotide
  Antisense strand to SEQ ID NO: 1806727
aaacugguaagauaucuaa

SEQ ID NO: 1806729 - RNA, 19 nt, Artificial Sequence
  Description of Artificial Sequence: Synthetic oligonucleotide
  Sense strand starting at position 2043 of SEQ ID NO: 1563254
gaagccuuacugugggaau

SEQ ID NO: 1806730 - RNA, 19 nt, Artificial Sequence
  Description of Artificial Sequence: Synthetic oligonucleotide
  Antisense strand to SEQ ID NO: 1806729
auucccacaguaaggcuuc

SEQ ID NO: 1806731 - RNA, 19 nt, Artificial Sequence
  Description of Artificial Sequence: Synthetic oligonucleotide
  Sense strand starting at position 2129 of SEQ ID NO: 1563254
agucauuggcuuuaaaugu

SEQ ID NO: 1806732 - RNA, 19 nt, Artificial Sequence
  Description of Artificial Sequence: Synthetic oligonucleotide
  Antisense strand to SEQ ID NO: 1806731
acauuuaaagccaaugacu

SEQ ID NO: 1806733 - RNA, 19 nt, Artificial Sequence
  Description of Artificial Sequence: Synthetic oligonucleotide
  Sense strand starting at position 2203 of SEQ ID NO: 1563254
ugugccuaauuauuaaaga

SEQ ID NO: 1806734 - RNA, 19 nt, Artificial Sequence
  Description of Artificial Sequence: Synthetic oligonucleotide
  Antisense strand to SEQ ID NO: 1806733
ucuuuaauaauuaggcaca

SEQ ID NO: 1806735 - RNA, 19 nt, Artificial Sequence
  Description of Artificial Sequence: Synthetic oligonucleotide
  Sense strand starting at position 2331 of SEQ ID NO: 1563254
ugugacaccugauuaaaca

SEQ ID NO: 1806736 - RNA, 19 nt, Artificial Sequence
  Description of Artificial Sequence: Synthetic oligonucleotide
  Antisense strand to SEQ ID NO: 1806735
uguuuaaucaggugucaca

SEQ ID NO: 1806737 - RNA, 19 nt, Artificial Sequence
  Description of Artificial Sequence: Synthetic oligonucleotide
  Sense strand starting at position 2479 of SEQ ID NO: 1563254
cauauacauguagguagau

SEQ ID NO: 1806738 - RNA, 19 nt, Artificial Sequence
  Description of Artificial Sequence: Synthetic oligonucleotide
  Antisense strand to SEQ ID NO: 1806737
aucuaccuacauguauaug

SEQ ID NO: 1806739 - RNA, 19 nt, Artificial Sequence
  Description of Artificial Sequence: Synthetic oligonucleotide
  Sense strand starting at position 2480 of SEQ ID NO: 1563254
auauacauguagguagaua

SEQ ID NO: 1806740 - RNA, 19 nt, Artificial Sequence
  Description of Artificial Sequence: Synthetic oligonucleotide
  Antisense strand to SEQ ID NO: 1806739
uaucuaccuacauguauau

SEQ ID NO: 1806741 - RNA, 19 nt, Artificial Sequence
  Description of Artificial Sequence: Synthetic oligonucleotide
  Sense strand starting at position 2515 of SEQ ID NO: 1563254
cuauuaagcgcauauauac

SEQ ID NO: 1806742 - RNA, 19 nt, Artificial Sequence
  Description of Artificial Sequence: Synthetic oligonucleotide
  Antisense strand to SEQ ID NO: 1806741
guauauaugcgcuuaauag

SEQ ID NO: 1806743 - RNA, 19 nt, Artificial Sequence
  Description of Artificial Sequence: Synthetic oligonucleotide
  Sense strand starting at position 2756 of SEQ ID NO: 1563254
cuuacauaucuauggcaga

SEQ ID NO: 1806744 - RNA, 19 nt, Artificial Sequence
  Description of Artificial Sequence: Synthetic oligonucleotide
  Antisense strand to SEQ ID NO: 1806743
ucugccauagauauguaag

SEQ ID NO: 1806745 - RNA, 19 nt, Artificial Sequence
  Description of Artificial Sequence: Synthetic oligonucleotide
  Sense strand starting at position 2884 of SEQ ID NO: 1563254
auacgcuaccuugaauaaa

SEQ ID NO: 1806746 - RNA, 19 nt, Artificial Sequence
  Description of Artificial Sequence: Synthetic oligonucleotide
  Antisense strand to SEQ ID NO: 1806745
uuuauucaagguagcguau

SEQ ID NO: 1806747 - RNA, 19 nt, Artificial Sequence
  Description of Artificial Sequence: Synthetic oligonucleotide
  Sense strand starting at position 2965 of SEQ ID NO: 1563254
cuuaucuuugcauaaguga

SEQ ID NO: 1806748 - RNA, 19 nt, Artificial Sequence
  Description of Artificial Sequence: Synthetic oligonucleotide
  Antisense strand to SEQ ID NO: 1806747
ucacuuaugcaaagauaag

SEQ ID NO: 1806749 - RNA, 19 nt, Artificial Sequence
  Description of Artificial Sequence: Synthetic oligonucleotide
  Sense strand starting at position 2968 of SEQ ID NO: 1563254
aucuuugcauaagugauua

SEQ ID NO: 1806750 - RNA, 19 nt, Artificial Sequence
  Description of Artificial Sequence: Synthetic oligonucleotide
  Antisense strand to SEQ ID NO: 1806749
uaaucacuuaugcaaagau

SEQ ID NO: 1806751 - RNA, 19 nt, Artificial Sequence
  Description of Artificial Sequence: Synthetic oligonucleotide
  Sense strand starting at position 2973 of SEQ ID NO: 1563254
ugcauaagugauuaaugcu

SEQ ID NO: 1806752 - RNA, 19 nt, Artificial Sequence
  Description of Artificial Sequence: Synthetic oligonucleotide
  Antisense strand to SEQ ID NO: 1806751
agcauuaaucacuuaugca

SEQ ID NO: 1806753 - RNA, 19 nt, Artificial Sequence
  Description of Artificial Sequence: Synthetic oligonucleotide
  Sense strand starting at position 3018 of SEQ ID NO: 1563254
uggacacugcauuacauua

SEQ ID NO: 1806754 - RNA, 19 nt, Artificial Sequence
  Description of Artificial Sequence: Synthetic oligonucleotide
  Antisense strand to SEQ ID NO: 1806753
uaauguaaugcagugucca

SEQ ID NO: 1806755 - RNA, 19 nt, Artificial Sequence
  Description of Artificial Sequence: Synthetic oligonucleotide
  Sense strand starting at position 22 of SEQ ID NO: 1563255
uuggcaucugaauauugua

SEQ ID NO: 1806756 - RNA, 19 nt, Artificial Sequence
  Description of Artificial Sequence: Synthetic oligonucleotide
  Antisense strand to SEQ ID NO: 1806755
uacaauauucagaugccaa

SEQ ID NO: 1806757 - RNA, 19 nt, Artificial Sequence
  Description of Artificial Sequence: Synthetic oligonucleotide
  Sense strand starting at position 378 of SEQ ID NO: 1563255
agcuaauauaagggaggua

SEQ ID NO: 1806758 - RNA, 19 nt, Artificial Sequence
  Description of Artificial Sequence: Synthetic oligonucleotide
  Antisense strand to SEQ ID NO: 1806757
uaccucccuuauauuagcu

SEQ ID NO: 1806759 - RNA, 19 nt, Artificial Sequence
  Description of Artificial Sequence: Synthetic oligonucleotide
  Sense strand starting at position 442 of SEQ ID NO: 1563255
gggacuaggugagccauua

SEQ ID NO: 1806760 - RNA, 19 nt, Artificial Sequence
  Description of Artificial Sequence: Synthetic oligonucleotide
  Antisense strand to SEQ ID NO: 1806759
uaauggcucaccuaguccc

SEQ ID NO: 1806761 - RNA, 19 nt, Artificial Sequence
  Description of Artificial Sequence: Synthetic oligonucleotide
  Sense strand starting at position 571 of SEQ ID NO: 1563255
auaguuaugguccaagcaa

SEQ ID NO: 1806762 - RNA, 19 nt, Artificial Sequence
  Description of Artificial Sequence: Synthetic oligonucleotide
  Antisense strand to SEQ ID NO: 1806761
uugcuuggaccauaacuau

SEQ ID NO: 1806763 - RNA, 19 nt, Artificial Sequence
  Description of Artificial Sequence: Synthetic oligonucleotide
  Sense strand starting at position 608 of SEQ ID NO: 1563255
ucuuuaaaucccggagaau

SEQ ID NO: 1806764 - RNA, 19 nt, Artificial Sequence
  Description of Artificial Sequence: Synthetic oligonucleotide
  Antisense strand to SEQ ID NO: 1806763
auucuccgggauuuaaaga

SEQ ID NO: 1806765 - RNA, 19 nt, Artificial Sequence
  Description of Artificial Sequence: Synthetic oligonucleotide
  Sense strand starting at position 617 of SEQ ID NO: 1563255
cccggagaaucaucaacau

SEQ ID NO: 1806766 - RNA, 19 nt, Artificial Sequence
  Description of Artificial Sequence: Synthetic oligonucleotide
  Antisense strand to SEQ ID NO: 1806765
auguugaugauucuccggg

SEQ ID NO: 1806767 - RNA, 19 nt, Artificial Sequence
  Description of Artificial Sequence: Synthetic oligonucleotide
  Sense strand starting at position 899 of SEQ ID NO: 1563255
gaaaucaaggcgcagaaau

SEQ ID NO: 1806768 - RNA, 19 nt, Artificial Sequence
  Description of Artificial Sequence: Synthetic oligonucleotide
  Antisense strand to SEQ ID NO: 1806767
auuucugcgccuugauuuc

SEQ ID NO: 1806769 - RNA, 19 nt, Artificial Sequence
  Description of Artificial Sequence: Synthetic oligonucleotide
  Sense strand starting at position 1039 of SEQ ID NO: 1563255
ccucuaaucgagugauaua

SEQ ID NO: 1806770 - RNA, 19 nt, Artificial Sequence
  Description of Artificial Sequence: Synthetic oligonucleotide
  Antisense strand to SEQ ID NO: 1806769
uauaucacucgauuagagg

SEQ ID NO: 1806771 - RNA, 19 nt, Artificial Sequence
  Description of Artificial Sequence: Synthetic oligonucleotide
  Sense strand starting at position 1087 of SEQ ID NO: 1563255
ggaugaauacgugggugaa

SEQ ID NO: 1806772 - RNA, 19 nt, Artificial Sequence
  Description of Artificial Sequence: Synthetic oligonucleotide
  Antisense strand to SEQ ID NO: 1806771
uucacccacguauucaucc

SEQ ID NO: 1806773 - RNA, 19 nt, Artificial Sequence
  Description of Artificial Sequence: Synthetic oligonucleotide
  Sense strand starting at position 1088 of SEQ ID NO: 1563255
gaugaauacgugggugaau

SEQ ID NO: 1806774 - RNA, 19 nt, Artificial Sequence
  Description of Artificial Sequence: Synthetic oligonucleotide
  Antisense strand to SEQ ID NO: 1806773
auucacccacguauucauc

SEQ ID NO: 1806775 - RNA, 19 nt, Artificial Sequence
  Description of Artificial Sequence: Synthetic oligonucleotide
  Sense strand starting at position 1090 of SEQ ID NO: 1563255
ugaauacgugggugaauga

SEQ ID NO: 1806776 - RNA, 19 nt, Artificial Sequence
  Description of Artificial Sequence: Synthetic oligonucleotide
  Antisense strand to SEQ ID NO: 1806775
ucauucacccacguauuca

SEQ ID NO: 1806777 - RNA, 19 nt, Artificial Sequence
  Description of Artificial Sequence: Synthetic oligonucleotide
  Sense strand starting at position 2105 of SEQ ID NO: 1563255
ggugaacuccaaggaguua

SEQ ID NO: 1806778 - RNA, 19 nt, Artificial Sequence
  Description of Artificial Sequence: Synthetic oligonucleotide
  Antisense strand to SEQ ID NO: 1806777
uaacuccuuggaguucacc

SEQ ID NO: 1806779 - RNA, 19 nt, Artificial Sequence
  Description of Artificial Sequence: Synthetic oligonucleotide
  Sense strand starting at position 2138 of SEQ ID NO: 1563255
gcgggugcucgccuuaaua

SEQ ID NO: 1806780 - RNA, 19 nt, Artificial Sequence
  Description of Artificial Sequence: Synthetic oligonucleotide
  Antisense strand to SEQ ID NO: 1806779
uauuaaggcgagcacccgc

SEQ ID NO: 1806781 - RNA, 19 nt, Artificial Sequence
  Description of Artificial Sequence: Synthetic oligonucleotide
  Sense strand starting at position 2159 of SEQ ID NO: 1563255
gcucucugagcgucagcua

SEQ ID NO: 1806782 - RNA, 19 nt, Artificial Sequence
  Description of Artificial Sequence: Synthetic oligonucleotide
  Antisense strand to SEQ ID NO: 1806781
uagcugacgcucagagagc

SEQ ID NO: 1806783 - RNA, 19 nt, Artificial Sequence
  Description of Artificial Sequence: Synthetic oligonucleotide
  Sense strand starting at position 2166 of SEQ ID NO: 1563255
gagcgucagcuacuuguau

SEQ ID NO: 1806784 - RNA, 19 nt, Artificial Sequence
  Description of Artificial Sequence: Synthetic oligonucleotide
  Antisense strand to SEQ ID NO: 1806783
auacaaguagcugacgcuc

SEQ ID NO: 1806785 - RNA, 19 nt, Artificial Sequence
  Description of Artificial Sequence: Synthetic oligonucleotide
  Sense strand starting at position 2216 of SEQ ID NO: 1563255
auuaaugcugggcauuauu

SEQ ID NO: 1806786 - RNA, 19 nt, Artificial Sequence
  Description of Artificial Sequence: Synthetic oligonucleotide
  Antisense strand to SEQ ID NO: 1806785
aauaaugcccagcauuaau

SEQ ID NO: 1806787 - RNA, 19 nt, Artificial Sequence
  Description of Artificial Sequence: Synthetic oligonucleotide
  Sense strand starting at position 2225 of SEQ ID NO: 1563255
gggcauuauuaacccaacu

SEQ ID NO: 1806788 - RNA, 19 nt, Artificial Sequence
  Description of Artificial Sequence: Synthetic oligonucleotide
  Antisense strand to SEQ ID NO: 1806787
aguuggguuaauaaugccc

SEQ ID NO: 1806789 - RNA, 19 nt, Artificial Sequence
  Description of Artificial Sequence: Synthetic oligonucleotide
  Sense strand starting at position 2280 of SEQ ID NO: 1563255
agguuagaacuuuguccaa

SEQ ID NO: 1806790 - RNA, 19 nt, Artificial Sequence
  Description of Artificial Sequence: Synthetic oligonucleotide
  Antisense strand to SEQ ID NO: 1806789
uuggacaaaguucuaaccu

SEQ ID NO: 1806791 - RNA, 19 nt, Artificial Sequence
  Description of Artificial Sequence: Synthetic oligonucleotide
  Sense strand starting at position 2452 of SEQ ID NO: 1563255
auacuuaacggaggacuua

SEQ ID NO: 1806792 - RNA, 19 nt, Artificial Sequence
  Description of Artificial Sequence: Synthetic oligonucleotide
  Antisense strand to SEQ ID NO: 1806791
uaaguccuccguuaaguau

SEQ ID NO: 1806793 - RNA, 19 nt, Artificial Sequence
  Description of Artificial Sequence: Synthetic oligonucleotide
  Sense strand starting at position 2530 of SEQ ID NO: 1563255
cuaugagguauguaucaug

SEQ ID NO: 1806794 - RNA, 19 nt, Artificial Sequence
  Description of Artificial Sequence: Synthetic oligonucleotide
  Antisense strand to SEQ ID NO: 1806793
caugauacauaccucauag

SEQ ID NO: 1806795 - RNA, 19 nt, Artificial Sequence
  Description of Artificial Sequence: Synthetic oligonucleotide
  Sense strand starting at position 2567 of SEQ ID NO: 1563255
ugggaaaucuaggugcaga

SEQ ID NO: 1806796 - RNA, 19 nt, Artificial Sequence
  Description of Artificial Sequence: Synthetic oligonucleotide
  Antisense strand to SEQ ID NO: 1806795
ucugcaccuagauuuccca

SEQ ID NO: 1806797 - RNA, 19 nt, Artificial Sequence
  Description of Artificial Sequence: Synthetic oligonucleotide
  Sense strand starting at position 2568 of SEQ ID NO: 1563255
gggaaaucuaggugcagag

SEQ ID NO: 1806798 - RNA, 19 nt, Artificial Sequence
  Description of Artificial Sequence: Synthetic oligonucleotide
  Antisense strand to SEQ ID NO: 1806797
cucugcaccuagauuuccc

SEQ ID NO: 1806799 - RNA, 19 nt, Artificial Sequence
  Description of Artificial Sequence: Synthetic oligonucleotide
  Sense strand starting at position 2606 of SEQ ID NO: 1563255
gugucagggagcuacuaaa

SEQ ID NO: 1806800 - RNA, 19 nt, Artificial Sequence
  Description of Artificial Sequence: Synthetic oligonucleotide
  Antisense strand to SEQ ID NO: 1806799
uuuaguagcucccugacac

SEQ ID NO: 1806801 - RNA, 19 nt, Artificial Sequence
  Description of Artificial Sequence: Synthetic oligonucleotide
  Sense strand starting at position 2650 of SEQ ID NO: 1563255
ggucucuucugauuccaga

SEQ ID NO: 1806802 - RNA, 19 nt, Artificial Sequence
  Description of Artificial Sequence: Synthetic oligonucleotide
  Antisense strand to SEQ ID NO: 1806801
ucuggaaucagaagagacc

SEQ ID NO: 1806803 - RNA, 19 nt, Artificial Sequence
  Description of Artificial Sequence: Synthetic oligonucleotide
  Sense strand starting at position 2701 of SEQ ID NO: 1563255
ccugaaguuguuuggaaag

SEQ ID NO: 1806804 - RNA, 19 nt, Artificial Sequence
  Description of Artificial Sequence: Synthetic oligonucleotide
  Antisense strand to SEQ ID NO: 1806803
cuuuccaaacaacuucagg

SEQ ID NO: 1806805 - RNA, 19 nt, Artificial Sequence
  Description of Artificial Sequence: Synthetic oligonucleotide
  Sense strand starting at position 2767 of SEQ ID NO: 1563255
gaauaugcauguuugaauu

SEQ ID NO: 1806806 - RNA, 19 nt, Artificial Sequence
  Description of Artificial Sequence: Synthetic oligonucleotide
  Antisense strand to SEQ ID NO: 1806805
aauucaaacaugcauauuc

SEQ ID NO: 1806807 - RNA, 19 nt, Artificial Sequence
  Description of Artificial Sequence: Synthetic oligonucleotide
  Sense strand starting at position 2919 of SEQ ID NO: 1563255
uuaauccugagagguaagu

SEQ ID NO: 1806808 - RNA, 19 nt, Artificial Sequence
  Description of Artificial Sequence: Synthetic oligonucleotide
  Antisense strand to SEQ ID NO: 1806807
acuuaccucucaggauuaa

SEQ ID NO: 1806809 - RNA, 19 nt, Artificial Sequence
  Description of Artificial Sequence: Synthetic oligonucleotide
  Sense strand starting at position 2930 of SEQ ID NO: 1563255
agguaaguaucauuauauc

SEQ ID NO: 1806810 - RNA, 19 nt, Artificial Sequence
  Description of Artificial Sequence: Synthetic oligonucleotide
  Antisense strand to SEQ ID NO: 1806809
gauauaaugauacuuaccu

SEQ ID NO: 1806811 - RNA, 19 nt, Artificial Sequence
  Description of Artificial Sequence: Synthetic oligonucleotide
  Sense strand starting at position 2973 of SEQ ID NO: 1563255
gucucagaaguuuaaguaa

SEQ ID NO: 1806812 - RNA, 19 nt, Artificial Sequence
  Description of Artificial Sequence: Synthetic oligonucleotide
  Antisense strand to SEQ ID NO: 1806811
uuacuuaaacuucugagac

SEQ ID NO: 1806813 - RNA, 19 nt, Artificial Sequence
  Description of Artificial Sequence: Synthetic oligonucleotide
  Sense strand starting at position 3310 of SEQ ID NO: 1563255
uuaggaugagcacgacauu

SEQ ID NO: 1806814 - RNA, 19 nt, Artificial Sequence
  Description of Artificial Sequence: Synthetic oligonucleotide
  Antisense strand to SEQ ID NO: 1806813
aaugucgugcucauccuaa

SEQ ID NO: 1806815 - RNA, 19 nt, Artificial Sequence
  Description of Artificial Sequence: Synthetic oligonucleotide
  Sense strand starting at position 3313 of SEQ ID NO: 1563255
ggaugagcacgacauuauc

SEQ ID NO: 1806816 - RNA, 19 nt, Artificial Sequence
  Description of Artificial Sequence: Synthetic oligonucleotide
  Antisense strand to SEQ ID NO: 1806815
gauaaugucgugcucaucc

SEQ ID NO: 1806817 - RNA, 19 nt, Artificial Sequence
  Description of Artificial Sequence: Synthetic oligonucleotide
  Sense strand starting at position 3321 of SEQ ID NO: 1563255
acgacauuaucaguauaaa

SEQ ID NO: 1806818 - RNA, 19 nt, Artificial Sequence
  Description of Artificial Sequence: Synthetic oligonucleotide
  Antisense strand to SEQ ID NO: 1806817
uuuauacugauaaugucgu

SEQ ID NO: 1806819 - RNA, 19 nt, Artificial Sequence
  Description of Artificial Sequence: Synthetic oligonucleotide
  Sense strand starting at position 3353 of SEQ ID NO: 1563255
gugugugaaguaggaagaa

SEQ ID NO: 1806820 - RNA, 19 nt, Artificial Sequence
  Description of Artificial Sequence: Synthetic oligonucleotide
  Antisense strand to SEQ ID NO: 1806819
uucuuccuacuucacacac

SEQ ID NO: 1806821 - RNA, 19 nt, Artificial Sequence
  Description of Artificial Sequence: Synthetic oligonucleotide
  Sense strand starting at position 3365 of SEQ ID NO: 1563255
ggaagaaauuaguucugua

SEQ ID NO: 1806822 - RNA, 19 nt, Artificial Sequence
  Description of Artificial Sequence: Synthetic oligonucleotide
  Antisense strand to SEQ ID NO: 1806821
uacagaacuaauuucuucc

SEQ ID NO: 1806823 - RNA, 19 nt, Artificial Sequence
  Description of Artificial Sequence: Synthetic oligonucleotide
  Sense strand starting at position 3369 of SEQ ID NO: 1563255
gaaauuaguucuguaagag

SEQ ID NO: 1806824 - RNA, 19 nt, Artificial Sequence
  Description of Artificial Sequence: Synthetic oligonucleotide
  Antisense strand to SEQ ID NO: 1806823
cucuuacagaacuaauuuc

SEQ ID NO: 1806825 - RNA, 19 nt, Artificial Sequence
  Description of Artificial Sequence: Synthetic oligonucleotide
  Sense strand starting at position 3782 of SEQ ID NO: 1563255
aucuacuagccaggaauua

SEQ ID NO: 1806826 - RNA, 19 nt, Artificial Sequence
  Description of Artificial Sequence: Synthetic oligonucleotide
  Antisense strand to SEQ ID NO: 1806825
uaauuccuggcuaguagau

SEQ ID NO: 1806827 - RNA, 19 nt, Artificial Sequence
  Description of Artificial Sequence: Synthetic oligonucleotide
  Sense strand starting at position 3783 of SEQ ID NO: 1563255
ucuacuagccaggaauuau

SEQ ID NO: 1806828 - RNA, 19 nt, Artificial Sequence
  Description of Artificial Sequence: Synthetic oligonucleotide
  Antisense strand to SEQ ID NO: 1806827
auaauuccuggcuaguaga

SEQ ID NO: 1806829 - RNA, 19 nt, Artificial Sequence
  Description of Artificial Sequence: Synthetic oligonucleotide
  Sense strand starting at position 3832 of SEQ ID NO: 1563255
gccuucuggcaagacauau

SEQ ID NO: 1806830 - RNA, 19 nt, Artificial Sequence
  Description of Artificial Sequence: Synthetic oligonucleotide
  Antisense strand to SEQ ID NO: 1806829
auaugucuugccagaaggc

SEQ ID NO: 1806831 - RNA, 19 nt, Artificial Sequence
  Description of Artificial Sequence: Synthetic oligonucleotide
  Sense strand starting at position 3880 of SEQ ID NO: 1563255
augugucagaguuaagauc

SEQ ID NO: 1806832 - RNA, 19 nt, Artificial Sequence
  Description of Artificial Sequence: Synthetic oligonucleotide
  Antisense strand to SEQ ID NO: 1806831
gaucuuaacucugacacau

SEQ ID NO: 1806833 - RNA, 19 nt, Artificial Sequence
  Description of Artificial Sequence: Synthetic oligonucleotide
  Sense strand starting at position 3979 of SEQ ID NO: 1563255
auaucuuauccacgaaggu

SEQ ID NO: 1806834 - RNA, 19 nt, Artificial Sequence
  Description of Artificial Sequence: Synthetic oligonucleotide
  Antisense strand to SEQ ID NO: 1806833
accuucguggauaagauau

SEQ ID NO: 1806835 - RNA, 19 nt, Artificial Sequence
  Description of Artificial Sequence: Synthetic oligonucleotide
  Sense strand starting at position 100 of SEQ ID NO: 1563256
caggauggaugucuuccaa

SEQ ID NO: 1806836 - RNA, 19 nt, Artificial Sequence
  Description of Artificial Sequence: Synthetic oligonucleotide
  Antisense strand to SEQ ID NO: 1806835
uuggaagacauccauccug

SEQ ID NO: 1806837 - RNA, 19 nt, Artificial Sequence
  Description of Artificial Sequence: Synthetic oligonucleotide
  Sense strand starting at position 656 of SEQ ID NO: 1563256
cuacgaauaugggucaacu

SEQ ID NO: 1806838 - RNA, 19 nt, Artificial Sequence
  Description of Artificial Sequence: Synthetic oligonucleotide
  Antisense strand to SEQ ID NO: 1806837
aguugacccauauucguag

SEQ ID NO: 1806839 - RNA, 19 nt, Artificial Sequence
  Description of Artificial Sequence: Synthetic oligonucleotide
  Sense strand starting at position 664 of SEQ ID NO: 1563256
augggucaacucugaggau

SEQ ID NO: 1806840 - RNA, 19 nt, Artificial Sequence
  Description of Artificial Sequence: Synthetic oligonucleotide
  Antisense strand to SEQ ID NO: 1806839
auccucagaguugacccau

SEQ ID NO: 1806841 - RNA, 19 nt, Artificial Sequence
  Description of Artificial Sequence: Synthetic oligonucleotide
  Sense strand starting at position 739 of SEQ ID NO: 1563256
ugugauccugagcaaauua

SEQ ID NO: 1806842 - RNA, 19 nt, Artificial Sequence
  Description of Artificial Sequence: Synthetic oligonucleotide
  Antisense strand to SEQ ID NO: 1806841
uaauuugcucaggaucaca

SEQ ID NO: 1806843 - RNA, 19 nt, Artificial Sequence
  Description of Artificial Sequence: Synthetic oligonucleotide
  Sense strand starting at position 821 of SEQ ID NO: 1563256
gguugugaggauuauguuc

SEQ ID NO: 1806844 - RNA, 19 nt, Artificial Sequence
  Description of Artificial Sequence: Synthetic oligonucleotide
  Antisense strand to SEQ ID NO: 1806843
gaacauaauccucacaacc

SEQ ID NO: 1806845 - RNA, 19 nt, Artificial Sequence
  Description of Artificial Sequence: Synthetic oligonucleotide
  Sense strand starting at position 838 of SEQ ID NO: 1563256
ucggcuuguaaagugcuua

SEQ ID NO: 1806846 - RNA, 19 nt, Artificial Sequence
  Description of Artificial Sequence: Synthetic oligonucleotide
  Antisense strand to SEQ ID NO: 1806845
uaagcacuuuacaagccga

SEQ ID NO: 1806847 - RNA, 19 nt, Artificial Sequence
  Description of Artificial Sequence: Synthetic oligonucleotide
  Sense strand starting at position 854 of SEQ ID NO: 1563256
uuagcacagugauuaggaa

SEQ ID NO: 1806848 - RNA, 19 nt, Artificial Sequence
  Description of Artificial Sequence: Synthetic oligonucleotide
  Antisense strand to SEQ ID NO: 1806847
uuccuaaucacugugcuaa

SEQ ID NO: 1806849 - RNA, 19 nt, Artificial Sequence
  Description of Artificial Sequence: Synthetic oligonucleotide
  Sense strand starting at position 858 of SEQ ID NO: 1563256
cacagugauuaggaaauuu

SEQ ID NO: 1806850 - RNA, 19 nt, Artificial Sequence
  Description of Artificial Sequence: Synthetic oligonucleotide
  Antisense strand to SEQ ID NO: 1806849
aaauuuccuaaucacugug

SEQ ID NO: 1806851 - RNA, 19 nt, Artificial Sequence
  Description of Artificial Sequence: Synthetic oligonucleotide
  Sense strand starting at position 937 of SEQ ID NO: 1563256
uaaucauggcuguaugaga

SEQ ID NO: 1806852 - RNA, 19 nt, Artificial Sequence
  Description of Artificial Sequence: Synthetic oligonucleotide
  Antisense strand to SEQ ID NO: 1806851
ucucauacagccaugauua

SEQ ID NO: 1806853 - RNA, 19 nt, Artificial Sequence
  Description of Artificial Sequence: Synthetic oligonucleotide
  Sense strand starting at position 1118 of SEQ ID NO: 1563256
gccauauguguucugcuac

SEQ ID NO: 1806854 - RNA, 19 nt, Artificial Sequence
  Description of Artificial Sequence: Synthetic oligonucleotide
  Antisense strand to SEQ ID NO: 1806853
guagcagaacacauauggc

SEQ ID NO: 1806855 - RNA, 19 nt, Artificial Sequence
  Description of Artificial Sequence: Synthetic oligonucleotide
  Sense strand starting at position 1280 of SEQ ID NO: 1563256
uuaguuauugaugguagaa

SEQ ID NO: 1806856 - RNA, 19 nt, Artificial Sequence
  Description of Artificial Sequence: Synthetic oligonucleotide
  Antisense strand to SEQ ID NO: 1806855
uucuaccaucaauaacuaa

SEQ ID NO: 1806857 - RNA, 19 nt, Artificial Sequence
  Description of Artificial Sequence: Synthetic oligonucleotide
  Sense strand starting at position 1292 of SEQ ID NO: 1563256
gguagaaagcaagaugcuu

SEQ ID NO: 1806858 - RNA, 19 nt, Artificial Sequence
  Description of Artificial Sequence: Synthetic oligonucleotide
  Antisense strand to SEQ ID NO: 1806857
aagcaucuugcuuucuacc

SEQ ID NO: 1806859 - RNA, 19 nt, Artificial Sequence
  Description of Artificial Sequence: Synthetic oligonucleotide
  Sense strand starting at position 1377 of SEQ ID NO: 1563256
auagaauccguuuacuuuc

SEQ ID NO: 1806860 - RNA, 19 nt, Artificial Sequence
  Description of Artificial Sequence: Synthetic oligonucleotide
  Antisense strand to SEQ ID NO: 1806859
gaaaguaaacggauucuau

SEQ ID NO: 1806861 - RNA, 19 nt, Artificial Sequence
  Description of Artificial Sequence: Synthetic oligonucleotide
  Sense strand starting at position 1386 of SEQ ID NO: 1563256
guuuacuuucccuaguaaa

SEQ ID NO: 1806862 - RNA, 19 nt, Artificial Sequence
  Description of Artificial Sequence: Synthetic oligonucleotide
  Antisense strand to SEQ ID NO: 1806861
uuuacuagggaaaguaaac

SEQ ID NO: 1806863 - RNA, 19 nt, Artificial Sequence
  Description of Artificial Sequence: Synthetic oligonucleotide
  Sense strand starting at position 1412 of SEQ ID NO: 1563256
gcacaugggcaauaauuga

SEQ ID NO: 1806864 - RNA, 19 nt, Artificial Sequence
  Description of Artificial Sequence: Synthetic oligonucleotide
  Antisense strand to SEQ ID NO: 1806863
ucaauuauugcccaugugc

SEQ ID NO: 1806865 - RNA, 19 nt, Artificial Sequence
  Description of Artificial Sequence: Synthetic oligonucleotide
  Sense strand starting at position 1420 of SEQ ID NO: 1563256
gcaauaauugagcaucuuu

SEQ ID NO: 1806866 - RNA, 19 nt, Artificial Sequence
  Description of Artificial Sequence: Synthetic oligonucleotide
  Antisense strand to SEQ ID NO: 1806865
aaagaugcucaauuauugc

SEQ ID NO: 1806867 - RNA, 19 nt, Artificial Sequence
  Description of Artificial Sequence: Synthetic oligonucleotide
  Sense strand starting at position 1478 of SEQ ID NO: 1563256
guaugcuaagaucauacaa

SEQ ID NO: 1806868 - RNA, 19 nt, Artificial Sequence
  Description of Artificial Sequence: Synthetic oligonucleotide
  Antisense strand to SEQ ID NO: 1806867
uuguaugaucuuagcauac

SEQ ID NO: 1806869 - RNA, 19 nt, Artificial Sequence
  Description of Artificial Sequence: Synthetic oligonucleotide
  Sense strand starting at position 1885 of SEQ ID NO: 1563256
ccuaaacuuuguccaggaa

SEQ ID NO: 1806870 - RNA, 19 nt, Artificial Sequence
  Description of Artificial Sequence: Synthetic oligonucleotide
  Antisense strand to SEQ ID NO: 1806869
uuccuggacaaaguuuagg

SEQ ID NO: 1806871 - RNA, 19 nt, Artificial Sequence
  Description of Artificial Sequence: Synthetic oligonucleotide
  Sense strand starting at position 1888 of SEQ ID NO: 1563256
aaacuuuguccaggaagca

SEQ ID NO: 1806872 - RNA, 19 nt, Artificial Sequence
  Description of Artificial Sequence: Synthetic oligonucleotide
  Antisense strand to SEQ ID NO: 1806871
ugcuuccuggacaaaguuu

SEQ ID NO: 1806873 - RNA, 19 nt, Artificial Sequence
  Description of Artificial Sequence: Synthetic oligonucleotide
  Sense strand starting at position 1991 of SEQ ID NO: 1563256
gugacuauuacuuguggaa

SEQ ID NO: 1806874 - RNA, 19 nt, Artificial Sequence
  Description of Artificial Sequence: Synthetic oligonucleotide
  Antisense strand to SEQ ID NO: 1806873
uuccacaaguaauagucac

SEQ ID NO: 1806875 - RNA, 19 nt, Artificial Sequence
  Description of Artificial Sequence: Synthetic oligonucleotide
  Sense strand starting at position 2060 of SEQ ID NO: 1563256
gcauucuggguguuguagu

SEQ ID NO: 1806876 - RNA, 19 nt, Artificial Sequence
  Description of Artificial Sequence: Synthetic oligonucleotide
  Antisense strand to SEQ ID NO: 1806875
acuacaacacccagaaugc

SEQ ID NO: 1806877 - RNA, 19 nt, Artificial Sequence
  Description of Artificial Sequence: Synthetic oligonucleotide
  Sense strand starting at position 2100 of SEQ ID NO: 1563256
aggcgacuacaguauuaua

SEQ ID NO: 1806878 - RNA, 19 nt, Artificial Sequence
  Description of Artificial Sequence: Synthetic oligonucleotide
  Antisense strand to SEQ ID NO: 1806877
uauaauacuguagucgccu

SEQ ID NO: 1806879 - RNA, 19 nt, Artificial Sequence
  Description of Artificial Sequence: Synthetic oligonucleotide
  Sense strand starting at position 2465 of SEQ ID NO: 1563256
ccaugucuccucgaugaaa

SEQ ID NO: 1806880 - RNA, 19 nt, Artificial Sequence
  Description of Artificial Sequence: Synthetic oligonucleotide
  Antisense strand to SEQ ID NO: 1806879
uuucaucgaggagacaugg

SEQ ID NO: 1806881 - RNA, 19 nt, Artificial Sequence
  Description of Artificial Sequence: Synthetic oligonucleotide
  Sense strand starting at position 2562 of SEQ ID NO: 1563256
cagccacucgggcaauaaa

SEQ ID NO: 1806882 - RNA, 19 nt, Artificial Sequence
  Description of Artificial Sequence: Synthetic oligonucleotide
  Antisense strand to SEQ ID NO: 1806881
uuuauugcccgaguggcug

SEQ ID NO: 1806883 - RNA, 19 nt, Artificial Sequence
  Description of Artificial Sequence: Synthetic oligonucleotide
  Sense strand starting at position 2565 of SEQ ID NO: 1563256
ccacucgggcaauaaauua

SEQ ID NO: 1806884 - RNA, 19 nt, Artificial Sequence
  Description of Artificial Sequence: Synthetic oligonucleotide
  Antisense strand to SEQ ID NO: 1806883
uaauuuauugcccgagugg

SEQ ID NO: 1806885 - RNA, 19 nt, Artificial Sequence
  Description of Artificial Sequence: Synthetic oligonucleotide
  Sense strand starting at position 2690 of SEQ ID NO: 1563256
agauucuccuuaguuuaca

SEQ ID NO: 1806886 - RNA, 19 nt, Artificial Sequence
  Description of Artificial Sequence: Synthetic oligonucleotide
  Antisense strand to SEQ ID NO: 1806885
uguaaacuaaggagaaucu

SEQ ID NO: 1806887 - RNA, 19 nt, Artificial Sequence
  Description of Artificial Sequence: Synthetic oligonucleotide
  Sense strand starting at position 2779 of SEQ ID NO: 1563256
aagugauuguaucugauga

SEQ ID NO: 1806888 - RNA, 19 nt, Artificial Sequence
  Description of Artificial Sequence: Synthetic oligonucleotide
  Antisense strand to SEQ ID NO: 1806887
ucaucagauacaaucacuu

SEQ ID NO: 1806889 - RNA, 19 nt, Artificial Sequence
  Description of Artificial Sequence: Synthetic oligonucleotide
  Sense strand starting at position 2780 of SEQ ID NO: 1563256
agugauuguaucugaugag

SEQ ID NO: 1806890 - RNA, 19 nt, Artificial Sequence
  Description of Artificial Sequence: Synthetic oligonucleotide
  Antisense strand to SEQ ID NO: 1806889
cucaucagauacaaucacu

SEQ ID NO: 1806891 - RNA, 19 nt, Artificial Sequence
  Description of Artificial Sequence: Synthetic oligonucleotide
  Sense strand starting at position 3067 of SEQ ID NO: 1563256
ccaccuauccgcuaagaug

SEQ ID NO: 1806892 - RNA, 19 nt, Artificial Sequence
  Description of Artificial Sequence: Synthetic oligonucleotide
  Antisense strand to SEQ ID NO: 1806891
caucuuagcggauaggugg

SEQ ID NO: 1806893 - RNA, 19 nt, Artificial Sequence
  Description of Artificial Sequence: Synthetic oligonucleotide
  Sense strand starting at position 3150 of SEQ ID NO: 1563256
auggaaugaucuucccauu

SEQ ID NO: 1806894 - RNA, 19 nt, Artificial Sequence
  Description of Artificial Sequence: Synthetic oligonucleotide
  Antisense strand to SEQ ID NO: 1806893
aaugggaagaucauuccau

SEQ ID NO: 1806895 - RNA, 19 nt, Artificial Sequence
  Description of Artificial Sequence: Synthetic oligonucleotide
  Sense strand starting at position 3289 of SEQ ID NO: 1563256
uuaugacgauuccuauaga

SEQ ID NO: 1806896 - RNA, 19 nt, Artificial Sequence
  Description of Artificial Sequence: Synthetic oligonucleotide
  Antisense strand to SEQ ID NO: 1806895
ucuauaggaaucgucauaa

SEQ ID NO: 1806897 - RNA, 19 nt, Artificial Sequence
  Description of Artificial Sequence: Synthetic oligonucleotide
  Sense strand starting at position 3292 of SEQ ID NO: 1563256
ugacgauuccuauagagua

SEQ ID NO: 1806898 - RNA, 19 nt, Artificial Sequence
  Description of Artificial Sequence: Synthetic oligonucleotide
  Antisense strand to SEQ ID NO: 1806897
uacucuauaggaaucguca

SEQ ID NO: 1806899 - RNA, 19 nt, Artificial Sequence
  Description of Artificial Sequence: Synthetic oligonucleotide
  Sense strand starting at position 3575 of SEQ ID NO: 1563256
gucuuauauuuagaagaug

SEQ ID NO: 1806900 - RNA, 19 nt, Artificial Sequence
  Description of Artificial Sequence: Synthetic oligonucleotide
  Antisense strand to SEQ ID NO: 1806899
caucuucuaaauauaagac

SEQ ID NO: 1806901 - RNA, 19 nt, Artificial Sequence
  Description of Artificial Sequence: Synthetic oligonucleotide
  Sense strand starting at position 3759 of SEQ ID NO: 1563256
aagauauggucuuugauua

SEQ ID NO: 1806902 - RNA, 19 nt, Artificial Sequence
  Description of Artificial Sequence: Synthetic oligonucleotide
  Antisense strand to SEQ ID NO: 1806901
uaaucaaagaccauaucuu

SEQ ID NO: 1806903 - RNA, 19 nt, Artificial Sequence
  Description of Artificial Sequence: Synthetic oligonucleotide
  Sense strand starting at position 3760 of SEQ ID NO: 1563256
agauauggucuuugauuag

SEQ ID NO: 1806904 - RNA, 19 nt, Artificial Sequence
  Description of Artificial Sequence: Synthetic oligonucleotide
  Antisense strand to SEQ ID NO: 1806903
cuaaucaaagaccauaucu

SEQ ID NO: 1806905 - RNA, 19 nt, Artificial Sequence
  Description of Artificial Sequence: Synthetic oligonucleotide
  Sense strand starting at position 3764 of SEQ ID NO: 1563256
auggucuuugauuaguauu

SEQ ID NO: 1806906 - RNA, 19 nt, Artificial Sequence
  Description of Artificial Sequence: Synthetic oligonucleotide
  Antisense strand to SEQ ID NO: 1806905
aauacuaaucaaagaccau

SEQ ID NO: 1806907 - RNA, 19 nt, Artificial Sequence
  Description of Artificial Sequence: Synthetic oligonucleotide
  Sense strand starting at position 3835 of SEQ ID NO: 1563256
uuugucauuugccuuggua

SEQ ID NO: 1806908 - RNA, 19 nt, Artificial Sequence
  Description of Artificial Sequence: Synthetic oligonucleotide
  Antisense strand to SEQ ID NO: 1806907
uaccaaggcaaaugacaaa

SEQ ID NO: 1806909 - RNA, 19 nt, Artificial Sequence
  Description of Artificial Sequence: Synthetic oligonucleotide
  Sense strand starting at position 3837 of SEQ ID NO: 1563256
ugucauuugccuugguaug

SEQ ID NO: 1806910 - RNA, 19 nt, Artificial Sequence
  Description of Artificial Sequence: Synthetic oligonucleotide
  Antisense strand to SEQ ID NO: 1806909
cauaccaaggcaaaugaca

SEQ ID NO: 1806911 - RNA, 19 nt, Artificial Sequence
  Description of Artificial Sequence: Synthetic oligonucleotide
  Sense strand starting at position 3839 of SEQ ID NO: 1563256
ucauuugccuugguaugua

SEQ ID NO: 1806912 - RNA, 19 nt, Artificial Sequence
  Description of Artificial Sequence: Synthetic oligonucleotide
  Antisense strand to SEQ ID NO: 1806911
uacauaccaaggcaaauga

SEQ ID NO: 1806913 - RNA, 19 nt, Artificial Sequence
  Description of Artificial Sequence: Synthetic oligonucleotide
  Sense strand starting at position 3938 of SEQ ID NO: 1563256
auggauuucucagaguaaa

SEQ ID NO: 1806914 - RNA, 19 nt, Artificial Sequence
  Description of Artificial Sequence: Synthetic oligonucleotide
  Antisense strand to SEQ ID NO: 1806913
uuuacucugagaaauccau

SEQ ID NO: 1806915 - RNA, 19 nt, Artificial Sequence
  Description of Artificial Sequence: Synthetic oligonucleotide
  Sense strand starting at position 48 of SEQ ID NO: 1563257
cccagaucuccucacuguu

SEQ ID NO: 1806916 - RNA, 19 nt, Artificial Sequence
  Description of Artificial Sequence: Synthetic oligonucleotide
  Antisense strand to SEQ ID NO: 1806915
aacagugaggagaucuggg

SEQ ID NO: 1806917 - RNA, 19 nt, Artificial Sequence
  Description of Artificial Sequence: Synthetic oligonucleotide
  Sense strand starting at position 233 of SEQ ID NO: 1563257
cccaguuaacuggaguuau

SEQ ID NO: 1806918 - RNA, 19 nt, Artificial Sequence
  Description of Artificial Sequence: Synthetic oligonucleotide
  Antisense strand to SEQ ID NO: 1806917
auaacuccaguuaacuggg

SEQ ID NO: 1806919 - RNA, 19 nt, Artificial Sequence
  Description of Artificial Sequence: Synthetic oligonucleotide
  Sense strand starting at position 315 of SEQ ID NO: 1563257
uuuacagguuacuuagaca

SEQ ID NO: 1806920 - RNA, 19 nt, Artificial Sequence
  Description of Artificial Sequence: Synthetic oligonucleotide
  Antisense strand to SEQ ID NO: 1806919
ugucuaaguaaccuguaaa

SEQ ID NO: 1806921 - RNA, 19 nt, Artificial Sequence
  Description of Artificial Sequence: Synthetic oligonucleotide
  Sense strand starting at position 331 of SEQ ID NO: 1563257
acauguagccauugacaug

SEQ ID NO: 1806922 - RNA, 19 nt, Artificial Sequence
  Description of Artificial Sequence: Synthetic oligonucleotide
  Antisense strand to SEQ ID NO: 1806921
caugucaauggcuacaugu

SEQ ID NO: 1806923 - RNA, 19 nt, Artificial Sequence
  Description of Artificial Sequence: Synthetic oligonucleotide
  Sense strand starting at position 505 of SEQ ID NO: 1563257
aggugcuuccaugaaacaa

SEQ ID NO: 1806924 - RNA, 19 nt, Artificial Sequence
  Description of Artificial Sequence: Synthetic oligonucleotide
  Antisense strand to SEQ ID NO: 1806923
uuguuucauggaagcaccu

SEQ ID NO: 1806925 - RNA, 19 nt, Artificial Sequence
  Description of Artificial Sequence: Synthetic oligonucleotide
  Sense strand starting at position 630 of SEQ ID NO: 1563257
acaggucuccuggguagaa

SEQ ID NO: 1806926 - RNA, 19 nt, Artificial Sequence
  Description of Artificial Sequence: Synthetic oligonucleotide
  Antisense strand to SEQ ID NO: 1806925
uucuacccaggagaccugu

SEQ ID NO: 1806927 - RNA, 19 nt, Artificial Sequence
  Description of Artificial Sequence: Synthetic oligonucleotide
  Sense strand starting at position 632 of SEQ ID NO: 1563257
aggucuccuggguagaaca

SEQ ID NO: 1806928 - RNA, 19 nt, Artificial Sequence
  Description of Artificial Sequence: Synthetic oligonucleotide
  Antisense strand to SEQ ID NO: 1806927
uguucuacccaggagaccu

SEQ ID NO: 1806929 - RNA, 19 nt, Artificial Sequence
  Description of Artificial Sequence: Synthetic oligonucleotide
  Sense strand starting at position 736 of SEQ ID NO: 1563257
uccugagaggcuugacuga

SEQ ID NO: 1806930 - RNA, 19 nt, Artificial Sequence
  Description of Artificial Sequence: Synthetic oligonucleotide
  Antisense strand to SEQ ID NO: 1806929
ucagucaagccucucagga

SEQ ID NO: 1806931 - RNA, 19 nt, Artificial Sequence
  Description of Artificial Sequence: Synthetic oligonucleotide
  Sense strand starting at position 743 of SEQ ID NO: 1563257
aggcuugacugaccuugua

SEQ ID NO: 1806932 - RNA, 19 nt, Artificial Sequence
  Description of Artificial Sequence: Synthetic oligonucleotide
  Antisense strand to SEQ ID NO: 1806931
uacaaggucagucaagccu

SEQ ID NO: 1806933 - RNA, 19 nt, Artificial Sequence
  Description of Artificial Sequence: Synthetic oligonucleotide
  Sense strand starting at position 746 of SEQ ID NO: 1563257
cuugacugaccuuguaauc

SEQ ID NO: 1806934 - RNA, 19 nt, Artificial Sequence
  Description of Artificial Sequence: Synthetic oligonucleotide
  Antisense strand to SEQ ID NO: 1806933
gauuacaaggucagucaag

SEQ ID NO: 1806935 - RNA, 19 nt, Artificial Sequence
  Description of Artificial Sequence: Synthetic oligonucleotide
  Sense strand starting at position 770 of SEQ ID NO: 1563257
uugacuaucaucuguggga

SEQ ID NO: 1806936 - RNA, 19 nt, Artificial Sequence
  Description of Artificial Sequence: Synthetic oligonucleotide
  Antisense strand to SEQ ID NO: 1806935
ucccacagaugauagucaa

SEQ ID NO: 1806937 - RNA, 19 nt, Artificial Sequence
  Description of Artificial Sequence: Synthetic oligonucleotide
  Sense strand starting at position 772 of SEQ ID NO: 1563257
gacuaucaucugugggaca

SEQ ID NO: 1806938 - RNA, 19 nt, Artificial Sequence
  Description of Artificial Sequence: Synthetic oligonucleotide
  Antisense strand to SEQ ID NO: 1806937
ugucccacagaugauaguc

SEQ ID NO: 1806939 - RNA, 19 nt, Artificial Sequence
  Description of Artificial Sequence: Synthetic oligonucleotide
  Sense strand starting at position 954 of SEQ ID NO: 1563257
guaucucuuguuggaggaa

SEQ ID NO: 1806940 - RNA, 19 nt, Artificial Sequence
  Description of Artificial Sequence: Synthetic oligonucleotide
  Antisense strand to SEQ ID NO: 1806939
uuccuccaacaagagauac

SEQ ID NO: 1806941 - RNA, 19 nt, Artificial Sequence
  Description of Artificial Sequence: Synthetic oligonucleotide
  Sense strand starting at position 957 of SEQ ID NO: 1563257
ucucuuguuggaggaaaug

SEQ ID NO: 1806942 - RNA, 19 nt, Artificial Sequence
  Description of Artificial Sequence: Synthetic oligonucleotide
  Antisense strand to SEQ ID NO: 1806941
cauuuccuccaacaagaga

SEQ ID NO: 1806943 - RNA, 19 nt, Artificial Sequence
  Description of Artificial Sequence: Synthetic oligonucleotide
  Sense strand starting at position 984 of SEQ ID NO: 1563257
gcugcuuaugacugacaaa

SEQ ID NO: 1806944 - RNA, 19 nt, Artificial Sequence
  Description of Artificial Sequence: Synthetic oligonucleotide
  Antisense strand to SEQ ID NO: 1806943
uuugucagucauaagcagc

SEQ ID NO: 1806945 - RNA, 19 nt, Artificial Sequence
  Description of Artificial Sequence: Synthetic oligonucleotide
  Sense strand starting at position 1337 of SEQ ID NO: 1563257
gaauacaggcagugauuaa

SEQ ID NO: 1806946 - RNA, 19 nt, Artificial Sequence
  Description of Artificial Sequence: Synthetic oligonucleotide
  Antisense strand to SEQ ID NO: 1806945
uuaaucacugccuguauuc

SEQ ID NO: 1806947 - RNA, 19 nt, Artificial Sequence
  Description of Artificial Sequence: Synthetic oligonucleotide
  Sense strand starting at position 1482 of SEQ ID NO: 1563257
caacuugcuuuggucagaa

SEQ ID NO: 1806948 - RNA, 19 nt, Artificial Sequence
  Description of Artificial Sequence: Synthetic oligonucleotide
  Antisense strand to SEQ ID NO: 1806947
uucugaccaaagcaaguug

SEQ ID NO: 1806949 - RNA, 19 nt, Artificial Sequence
  Description of Artificial Sequence: Synthetic oligonucleotide
  Sense strand starting at position 2453 of SEQ ID NO: 1563257
uggcuaacagagugacaaa

SEQ ID NO: 1806950 - RNA, 19 nt, Artificial Sequence
  Description of Artificial Sequence: Synthetic oligonucleotide
  Antisense strand to SEQ ID NO: 1806949
uuugucacucuguuagcca

SEQ ID NO: 1806951 - RNA, 19 nt, Artificial Sequence
  Description of Artificial Sequence: Synthetic oligonucleotide
  Sense strand starting at position 2571 of SEQ ID NO: 1563257
auggaaagggccuguucua

SEQ ID NO: 1806952 - RNA, 19 nt, Artificial Sequence
  Description of Artificial Sequence: Synthetic oligonucleotide
  Antisense strand to SEQ ID NO: 1806951
uagaacaggcccuuuccau

SEQ ID NO: 1806953 - RNA, 19 nt, Artificial Sequence
  Description of Artificial Sequence: Synthetic oligonucleotide
  Sense strand starting at position 2590 of SEQ ID NO: 1563257
acuguuaagugucuugaag

SEQ ID NO: 1806954 - RNA, 19 nt, Artificial Sequence
  Description of Artificial Sequence: Synthetic oligonucleotide
  Antisense strand to SEQ ID NO: 1806953
cuucaagacacuuaacagu

SEQ ID NO: 1806955 - RNA, 19 nt, Artificial Sequence
  Description of Artificial Sequence: Synthetic oligonucleotide
  Sense strand starting at position 2647 of SEQ ID NO: 1563257
uuaaaugagucccuaagcu

SEQ ID NO: 1806956 - RNA, 19 nt, Artificial Sequence
  Description of Artificial Sequence: Synthetic oligonucleotide
  Antisense strand to SEQ ID NO: 1806955
agcuuagggacucauuuaa

SEQ ID NO: 1806957 - RNA, 19 nt, Artificial Sequence
  Description of Artificial Sequence: Synthetic oligonucleotide
  Sense strand starting at position 2691 of SEQ ID NO: 1563257
uggaaaucacaguagcacu

SEQ ID NO: 1806958 - RNA, 19 nt, Artificial Sequence
  Description of Artificial Sequence: Synthetic oligonucleotide
  Antisense strand to SEQ ID NO: 1806957
agugcuacugugauuucca

SEQ ID NO: 1806959 - RNA, 19 nt, Artificial Sequence
  Description of Artificial Sequence: Synthetic oligonucleotide
  Sense strand starting at position 2756 of SEQ ID NO: 1563257
acaagugauaguugcaaag

SEQ ID NO: 1806960 - RNA, 19 nt, Artificial Sequence
  Description of Artificial Sequence: Synthetic oligonucleotide
  Antisense strand to SEQ ID NO: 1806959
cuuugcaacuaucacuugu

SEQ ID NO: 1806961 - RNA, 19 nt, Artificial Sequence
  Description of Artificial Sequence: Synthetic oligonucleotide
  Sense strand starting at position 2766 of SEQ ID NO: 1563257
guugcaaagaauugucaga

SEQ ID NO: 1806962 - RNA, 19 nt, Artificial Sequence
  Description of Artificial Sequence: Synthetic oligonucleotide
  Antisense strand to SEQ ID NO: 1806961
ucugacaauucuuugcaac

SEQ ID NO: 1806963 - RNA, 19 nt, Artificial Sequence
  Description of Artificial Sequence: Synthetic oligonucleotide
  Sense strand starting at position 2895 of SEQ ID NO: 1563257
uccuaacaucuguauagua

SEQ ID NO: 1806964 - RNA, 19 nt, Artificial Sequence
  Description of Artificial Sequence: Synthetic oligonucleotide
  Antisense strand to SEQ ID NO: 1806963
uacuauacagauguuagga

SEQ ID NO: 1806965 - RNA, 19 nt, Artificial Sequence
  Description of Artificial Sequence: Synthetic oligonucleotide
  Sense strand starting at position 2897 of SEQ ID NO: 1563257
cuaacaucuguauaguacu

SEQ ID NO: 1806966 - RNA, 19 nt, Artificial Sequence
  Description of Artificial Sequence: Synthetic oligonucleotide
  Antisense strand to SEQ ID NO: 1806965
aguacuauacagauguuag

SEQ ID NO: 1806967 - RNA, 19 nt, Artificial Sequence
  Description of Artificial Sequence: Synthetic oligonucleotide
  Sense strand starting at position 2986 of SEQ ID NO: 1563257
ugaggucucaaguguuaga

SEQ ID NO: 1806968 - RNA, 19 nt, Artificial Sequence
  Description of Artificial Sequence: Synthetic oligonucleotide
  Antisense strand to SEQ ID NO: 1806967
ucuaacacuugagaccuca

SEQ ID NO: 1806969 - RNA, 19 nt, Artificial Sequence
  Description of Artificial Sequence: Synthetic oligonucleotide
  Sense strand starting at position 3079 of SEQ ID NO: 1563257
ggaugauguaucuaagguc

SEQ ID NO: 1806970 - RNA, 19 nt, Artificial Sequence
  Description of Artificial Sequence: Synthetic oligonucleotide
  Antisense strand to SEQ ID NO: 1806969
gaccuuagauacaucaucc

SEQ ID NO: 1806971 - RNA, 19 nt, Artificial Sequence
  Description of Artificial Sequence: Synthetic oligonucleotide
  Sense strand starting at position 3103 of SEQ ID NO: 1563257
gcuaguaaaugacaaauuu

SEQ ID NO: 1806972 - RNA, 19 nt, Artificial Sequence
  Description of Artificial Sequence: Synthetic oligonucleotide
  Antisense strand to SEQ ID NO: 1806971
aaauuugucauuuacuagc

SEQ ID NO: 1806973 - RNA, 19 nt, Artificial Sequence
  Description of Artificial Sequence: Synthetic oligonucleotide
  Sense strand starting at position 3112 of SEQ ID NO: 1563257
ugacaaauuugagauucca

SEQ ID NO: 1806974 - RNA, 19 nt, Artificial Sequence
  Description of Artificial Sequence: Synthetic oligonucleotide
  Antisense strand to SEQ ID NO: 1806973
uggaaucucaaauuuguca

SEQ ID NO: 1806975 - RNA, 19 nt, Artificial Sequence
  Description of Artificial Sequence: Synthetic oligonucleotide
  Sense strand starting at position 3292 of SEQ ID NO: 1563257
gaauaauugucccugaacg

SEQ ID NO: 1806976 - RNA, 19 nt, Artificial Sequence
  Description of Artificial Sequence: Synthetic oligonucleotide
  Antisense strand to SEQ ID NO: 1806975
cguucagggacaauuauuc

SEQ ID NO: 1806977 - RNA, 19 nt, Artificial Sequence
  Description of Artificial Sequence: Synthetic oligonucleotide
  Sense strand starting at position 3294 of SEQ ID NO: 1563257
auaauugucccugaacguu

SEQ ID NO: 1806978 - RNA, 19 nt, Artificial Sequence
  Description of Artificial Sequence: Synthetic oligonucleotide
  Antisense strand to SEQ ID NO: 1806977
aacguucagggacaauuau

SEQ ID NO: 1806979 - RNA, 19 nt, Artificial Sequence
  Description of Artificial Sequence: Synthetic oligonucleotide
  Sense strand starting at position 3521 of SEQ ID NO: 1563257
gcugauuuguugccuuaua

SEQ ID NO: 1806980 - RNA, 19 nt, Artificial Sequence
  Description of Artificial Sequence: Synthetic oligonucleotide
  Antisense strand to SEQ ID NO: 1806979
uauaaggcaacaaaucagc

SEQ ID NO: 1806981 - RNA, 19 nt, Artificial Sequence
  Description of Artificial Sequence: Synthetic oligonucleotide
  Sense strand starting at position 3522 of SEQ ID NO: 1563257
cugauuuguugccuuauaa

SEQ ID NO: 1806982 - RNA, 19 nt, Artificial Sequence
  Description of Artificial Sequence: Synthetic oligonucleotide
  Antisense strand to SEQ ID NO: 1806981
uuauaaggcaacaaaucag

SEQ ID NO: 1806983 - RNA, 19 nt, Artificial Sequence
  Description of Artificial Sequence: Synthetic oligonucleotide
  Sense strand starting at position 3579 of SEQ ID NO: 1563257
acuagauugugaguucuuc

SEQ ID NO: 1806984 - RNA, 19 nt, Artificial Sequence
  Description of Artificial Sequence: Synthetic oligonucleotide
  Antisense strand to SEQ ID NO: 1806983
gaagaacucacaaucuagu

SEQ ID NO: 1806985 - RNA, 19 nt, Artificial Sequence
  Description of Artificial Sequence: Synthetic oligonucleotide
  Sense strand starting at position 3669 of SEQ ID NO: 1563257
cuuacagaguauucuggaa

SEQ ID NO: 1806986 - RNA, 19 nt, Artificial Sequence
  Description of Artificial Sequence: Synthetic oligonucleotide
  Antisense strand to SEQ ID NO: 1806985
uuccagaauacucuguaag

SEQ ID NO: 1806987 - RNA, 19 nt, Artificial Sequence
  Description of Artificial Sequence: Synthetic oligonucleotide
  Sense strand starting at position 3874 of SEQ ID NO: 1563257
auugguucuauugaguuga

SEQ ID NO: 1806988 - RNA, 19 nt, Artificial Sequence
  Description of Artificial Sequence: Synthetic oligonucleotide
  Antisense strand to SEQ ID NO: 1806987
ucaacucaauagaaccaau

SEQ ID NO: 1806989 - RNA, 19 nt, Artificial Sequence
  Description of Artificial Sequence: Synthetic oligonucleotide
  Sense strand starting at position 3876 of SEQ ID NO: 1563257
ugguucuauugaguugauu

SEQ ID NO: 1806990 - RNA, 19 nt, Artificial Sequence
  Description of Artificial Sequence: Synthetic oligonucleotide
  Antisense strand to SEQ ID NO: 1806989
aaucaacucaauagaacca

SEQ ID NO: 1806991 - RNA, 19 nt, Artificial Sequence
  Description of Artificial Sequence: Synthetic oligonucleotide
  Sense strand starting at position 3897 of SEQ ID NO: 1563257
auugaacuugcuuaagauc

SEQ ID NO: 1806992 - RNA, 19 nt, Artificial Sequence
  Description of Artificial Sequence: Synthetic oligonucleotide
  Antisense strand to SEQ ID NO: 1806991
gaucuuaagcaaguucaau

SEQ ID NO: 1806993 - RNA, 19 nt, Artificial Sequence
  Description of Artificial Sequence: Synthetic oligonucleotide
  Sense strand starting at position 3950 of SEQ ID NO: 1563257
gcuggaauucucugacagg

SEQ ID NO: 1806994 - RNA, 19 nt, Artificial Sequence
  Description of Artificial Sequence: Synthetic oligonucleotide
  Antisense strand to SEQ ID NO: 1806993
ccugucagagaauuccagc

SEQ ID NO: 1806995 - RNA, 19 nt, Artificial Sequence
  Description of Artificial Sequence: Synthetic oligonucleotide
  Sense strand starting at position 258 of SEQ ID NO: 1563258
cccagaucuccucacuguu

SEQ ID NO: 1806996 - RNA, 19 nt, Artificial Sequence
  Description of Artificial Sequence: Synthetic oligonucleotide
  Antisense strand to SEQ ID NO: 1806995
aacagugaggagaucuggg

SEQ ID NO: 1806997 - RNA, 19 nt, Artificial Sequence
  Description of Artificial Sequence: Synthetic oligonucleotide
  Sense strand starting at position 443 of SEQ ID NO: 1563258
cccaguuaacuggaguuau

SEQ ID NO: 1806998 - RNA, 19 nt, Artificial Sequence
  Description of Artificial Sequence: Synthetic oligonucleotide
  Antisense strand to SEQ ID NO: 1806997
auaacuccaguuaacuggg

SEQ ID NO: 1806999 - RNA, 19 nt, Artificial Sequence
  Description of Artificial Sequence: Synthetic oligonucleotide
  Sense strand starting at position 525 of SEQ ID NO: 1563258
uuuacagguuacuuagaca

SEQ ID NO: 1807000 - RNA, 19 nt, Artificial Sequence
  Description of Artificial Sequence: Synthetic oligonucleotide
  Antisense strand to SEQ ID NO: 1806999
ugucuaaguaaccuguaaa

SEQ ID NO: 1807001 - RNA, 19 nt, Artificial Sequence
  Description of Artificial Sequence: Synthetic oligonucleotide
  Sense strand starting at position 541 of SEQ ID NO: 1563258
acauguagccauugacaug

SEQ ID NO: 1807002 - RNA, 19 nt, Artificial Sequence
  Description of Artificial Sequence: Synthetic oligonucleotide
  Antisense strand to SEQ ID NO: 1807001
caugucaauggcuacaugu

SEQ ID NO: 1807003 - RNA, 19 nt, Artificial Sequence
  Description of Artificial Sequence: Synthetic oligonucleotide
  Sense strand starting at position 715 of SEQ ID NO: 1563258
aggugcuuccaugaaacaa

SEQ ID NO: 1807004 - RNA, 19 nt, Artificial Sequence
  Description of Artificial Sequence: Synthetic oligonucleotide
  Antisense strand to SEQ ID NO: 1807003
uuguuucauggaagcaccu

SEQ ID NO: 1807005 - RNA, 19 nt, Artificial Sequence
  Description of Artificial Sequence: Synthetic oligonucleotide
  Sense strand starting at position 840 of SEQ ID NO: 1563258
acaggucuccuggguagaa

SEQ ID NO: 1807006 - RNA, 19 nt, Artificial Sequence
  Description of Artificial Sequence: Synthetic oligonucleotide
  Antisense strand to SEQ ID NO: 1807005
uucuacccaggagaccugu

SEQ ID NO: 1807007 - RNA, 19 nt, Artificial Sequence
  Description of Artificial Sequence: Synthetic oligonucleotide
  Sense strand starting at position 842 of SEQ ID NO: 1563258
aggucuccuggguagaaca

SEQ ID NO: 1807008 - RNA, 19 nt, Artificial Sequence
  Description of Artificial Sequence: Synthetic oligonucleotide
  Antisense strand to SEQ ID NO: 1807007
uguucuacccaggagaccu

SEQ ID NO: 1807009 - RNA, 19 nt, Artificial Sequence
  Description of Artificial Sequence: Synthetic oligonucleotide
  Sense strand starting at position 946 of SEQ ID NO: 1563258
uccugagaggcuugacuga

SEQ ID NO: 1807010 - RNA, 19 nt, Artificial Sequence
  Description of Artificial Sequence: Synthetic oligonucleotide
  Antisense strand to SEQ ID NO: 1807009
ucagucaagccucucagga

SEQ ID NO: 1807011 - RNA, 19 nt, Artificial Sequence
  Description of Artificial Sequence: Synthetic oligonucleotide
  Sense strand starting at position 953 of SEQ ID NO: 1563258
aggcuugacugaccuugua

SEQ ID NO: 1807012 - RNA, 19 nt, Artificial Sequence
  Description of Artificial Sequence: Synthetic oligonucleotide
  Antisense strand to SEQ ID NO: 1807011
uacaaggucagucaagccu

SEQ ID NO: 1807013 - RNA, 19 nt, Artificial Sequence
  Description of Artificial Sequence: Synthetic oligonucleotide
  Sense strand starting at position 956 of SEQ ID NO: 1563258
cuugacugaccuuguaauc

SEQ ID NO: 1807014 - RNA, 19 nt, Artificial Sequence
  Description of Artificial Sequence: Synthetic oligonucleotide
  Antisense strand to SEQ ID NO: 1807013
gauuacaaggucagucaag

SEQ ID NO: 1807015 - RNA, 19 nt, Artificial Sequence
  Description of Artificial Sequence: Synthetic oligonucleotide
  Sense strand starting at position 980 of SEQ ID NO: 1563258
uugacuaucaucuguggga

SEQ ID NO: 1807016 - RNA, 19 nt, Artificial Sequence
  Description of Artificial Sequence: Synthetic oligonucleotide
  Antisense strand to SEQ ID NO: 1807015
ucccacagaugauagucaa

SEQ ID NO: 1807017 - RNA, 19 nt, Artificial Sequence
  Description of Artificial Sequence: Synthetic oligonucleotide
  Sense strand starting at position 982 of SEQ ID NO: 1563258
gacuaucaucugugggaca

SEQ ID NO: 1807018 - RNA, 19 nt, Artificial Sequence
  Description of Artificial Sequence: Synthetic oligonucleotide
  Antisense strand to SEQ ID NO: 1807017
ugucccacagaugauaguc

SEQ ID NO: 1807019 - RNA, 19 nt, Artificial Sequence
  Description of Artificial Sequence: Synthetic oligonucleotide
  Sense strand starting at position 1164 of SEQ ID NO: 1563258
guaucucuuguuggaggaa

SEQ ID NO: 1807020 - RNA, 19 nt, Artificial Sequence
  Description of Artificial Sequence: Synthetic oligonucleotide
  Antisense strand to SEQ ID NO: 1807019
uuccuccaacaagagauac

SEQ ID NO: 1807021 - RNA, 19 nt, Artificial Sequence
  Description of Artificial Sequence: Synthetic oligonucleotide
  Sense strand starting at position 1167 of SEQ ID NO: 1563258
ucucuuguuggaggaaaug

SEQ ID NO: 1807022 - RNA, 19 nt, Artificial Sequence
  Description of Artificial Sequence: Synthetic oligonucleotide
  Antisense strand to SEQ ID NO: 1807021
cauuuccuccaacaagaga

SEQ ID NO: 1807023 - RNA, 19 nt, Artificial Sequence
  Description of Artificial Sequence: Synthetic oligonucleotide
  Sense strand starting at position 1193 of SEQ ID NO: 1563258
ugcugcuuaugacugacaa

SEQ ID NO: 1807024 - RNA, 19 nt, Artificial Sequence
  Description of Artificial Sequence: Synthetic oligonucleotide
  Antisense strand to SEQ ID NO: 1807023
uugucagucauaagcagca

SEQ ID NO: 1807025 - RNA, 19 nt, Artificial Sequence
  Description of Artificial Sequence: Synthetic oligonucleotide
  Sense strand starting at position 1194 of SEQ ID NO: 1563258
gcugcuuaugacugacaaa

SEQ ID NO: 1807026 - RNA, 19 nt, Artificial Sequence
  Description of Artificial Sequence: Synthetic oligonucleotide
  Antisense strand to SEQ ID NO: 1807025
uuugucagucauaagcagc

SEQ ID NO: 1807027 - RNA, 19 nt, Artificial Sequence
  Description of Artificial Sequence: Synthetic oligonucleotide
  Sense strand starting at position 1547 of SEQ ID NO: 1563258
gaauacaggcagugauuaa

SEQ ID NO: 1807028 - RNA, 19 nt, Artificial Sequence
  Description of Artificial Sequence: Synthetic oligonucleotide
  Antisense strand to SEQ ID NO: 1807027
uuaaucacugccuguauuc

SEQ ID NO: 1807029 - RNA, 19 nt, Artificial Sequence
  Description of Artificial Sequence: Synthetic oligonucleotide
  Sense strand starting at position 1692 of SEQ ID NO: 1563258
caacuugcuuuggucagaa

SEQ ID NO: 1807030 - RNA, 19 nt, Artificial Sequence
  Description of Artificial Sequence: Synthetic oligonucleotide
  Antisense strand to SEQ ID NO: 1807029
uucugaccaaagcaaguug

SEQ ID NO: 1807031 - RNA, 19 nt, Artificial Sequence
  Description of Artificial Sequence: Synthetic oligonucleotide
  Sense strand starting at position 2663 of SEQ ID NO: 1563258
uggcuaacagagugacaaa

SEQ ID NO: 1807032 - RNA, 19 nt, Artificial Sequence
  Description of Artificial Sequence: Synthetic oligonucleotide
  Antisense strand to SEQ ID NO: 1807031
uuugucacucuguuagcca

SEQ ID NO: 1807033 - RNA, 19 nt, Artificial Sequence
  Description of Artificial Sequence: Synthetic oligonucleotide
  Sense strand starting at position 2781 of SEQ ID NO: 1563258
auggaaagggccuguucua

SEQ ID NO: 1807034 - RNA, 19 nt, Artificial Sequence
  Description of Artificial Sequence: Synthetic oligonucleotide
  Antisense strand to SEQ ID NO: 1807033
uagaacaggcccuuuccau

SEQ ID NO: 1807035 - RNA, 19 nt, Artificial Sequence
  Description of Artificial Sequence: Synthetic oligonucleotide
  Sense strand starting at position 2800 of SEQ ID NO: 1563258
acuguuaagugucuugaag

SEQ ID NO: 1807036 - RNA, 19 nt, Artificial Sequence
  Description of Artificial Sequence: Synthetic oligonucleotide
  Antisense strand to SEQ ID NO: 1807035
cuucaagacacuuaacagu

SEQ ID NO: 1807037 - RNA, 19 nt, Artificial Sequence
  Description of Artificial Sequence: Synthetic oligonucleotide
  Sense strand starting at position 2857 of SEQ ID NO: 1563258
uuaaaugagucccuaagcu

SEQ ID NO: 1807038 - RNA, 19 nt, Artificial Sequence
  Description of Artificial Sequence: Synthetic oligonucleotide
  Antisense strand to SEQ ID NO: 1807037
agcuuagggacucauuuaa

SEQ ID NO: 1807039 - RNA, 19 nt, Artificial Sequence
  Description of Artificial Sequence: Synthetic oligonucleotide
  Sense strand starting at position 2901 of SEQ ID NO: 1563258
uggaaaucacaguagcacu

SEQ ID NO: 1807040 - RNA, 19 nt, Artificial Sequence
  Description of Artificial Sequence: Synthetic oligonucleotide
  Antisense strand to SEQ ID NO: 1807039
agugcuacugugauuucca

SEQ ID NO: 1807041 - RNA, 19 nt, Artificial Sequence
  Description of Artificial Sequence: Synthetic oligonucleotide
  Sense strand starting at position 2966 of SEQ ID NO: 1563258
acaagugauaguugcaaag

SEQ ID NO: 1807042 - RNA, 19 nt, Artificial Sequence
  Description of Artificial Sequence: Synthetic oligonucleotide
  Antisense strand to SEQ ID NO: 1807041
cuuugcaacuaucacuugu

SEQ ID NO: 1807043 - RNA, 19 nt, Artificial Sequence
  Description of Artificial Sequence: Synthetic oligonucleotide
  Sense strand starting at position 2976 of SEQ ID NO: 1563258
guugcaaagaauugucaga

SEQ ID NO: 1807044 - RNA, 19 nt, Artificial Sequence
  Description of Artificial Sequence: Synthetic oligonucleotide
  Antisense strand to SEQ ID NO: 1807043
ucugacaauucuuugcaac

SEQ ID NO: 1807045 - RNA, 19 nt, Artificial Sequence
  Description of Artificial Sequence: Synthetic oligonucleotide
  Sense strand starting at position 3104 of SEQ ID NO: 1563258
uuccuaacaucuguauagu

SEQ ID NO: 1807046 - RNA, 19 nt, Artificial Sequence
  Description of Artificial Sequence: Synthetic oligonucleotide
  Antisense strand to SEQ ID NO: 1807045
acuauacagauguuaggaa

SEQ ID NO: 1807047 - RNA, 19 nt, Artificial Sequence
  Description of Artificial Sequence: Synthetic oligonucleotide
  Sense strand starting at position 3105 of SEQ ID NO: 1563258
uccuaacaucuguauagua

SEQ ID NO: 1807048 - RNA, 19 nt, Artificial Sequence
  Description of Artificial Sequence: Synthetic oligonucleotide
  Antisense strand to SEQ ID NO: 1807047
uacuauacagauguuagga

SEQ ID NO: 1807049 - RNA, 19 nt, Artificial Sequence
  Description of Artificial Sequence: Synthetic oligonucleotide
  Sense strand starting at position 3107 of SEQ ID NO: 1563258
cuaacaucuguauaguacu

SEQ ID NO: 1807050 - RNA, 19 nt, Artificial Sequence
  Description of Artificial Sequence: Synthetic oligonucleotide
  Antisense strand to SEQ ID NO: 1807049
aguacuauacagauguuag

SEQ ID NO: 1807051 - RNA, 19 nt, Artificial Sequence
  Description of Artificial Sequence: Synthetic oligonucleotide
  Sense strand starting at position 3196 of SEQ ID NO: 1563258
ugaggucucaaguguuaga

SEQ ID NO: 1807052 - RNA, 19 nt, Artificial Sequence
  Description of Artificial Sequence: Synthetic oligonucleotide
  Antisense strand to SEQ ID NO: 1807051
ucuaacacuugagaccuca

SEQ ID NO: 1807053 - RNA, 19 nt, Artificial Sequence
  Description of Artificial Sequence: Synthetic oligonucleotide
  Sense strand starting at position 3289 of SEQ ID NO: 1563258
ggaugauguaucuaagguc

SEQ ID NO: 1807054 - RNA, 19 nt, Artificial Sequence
  Description of Artificial Sequence: Synthetic oligonucleotide
  Antisense strand to SEQ ID NO: 1807053
gaccuuagauacaucaucc

SEQ ID NO: 1807055 - RNA, 19 nt, Artificial Sequence
  Description of Artificial Sequence: Synthetic oligonucleotide
  Sense strand starting at position 3313 of SEQ ID NO: 1563258
gcuaguaaaugacaaauuu

SEQ ID NO: 1807056 - RNA, 19 nt, Artificial Sequence
  Description of Artificial Sequence: Synthetic oligonucleotide
  Antisense strand to SEQ ID NO: 1807055
aaauuugucauuuacuagc

SEQ ID NO: 1807057 - RNA, 19 nt, Artificial Sequence
  Description of Artificial Sequence: Synthetic oligonucleotide
  Sense strand starting at position 3322 of SEQ ID NO: 1563258
ugacaaauuugagauucca

SEQ ID NO: 1807058 - RNA, 19 nt, Artificial Sequence
  Description of Artificial Sequence: Synthetic oligonucleotide
  Antisense strand to SEQ ID NO: 1807057
uggaaucucaaauuuguca

SEQ ID NO: 1807059 - RNA, 19 nt, Artificial Sequence
  Description of Artificial Sequence: Synthetic oligonucleotide
  Sense strand starting at position 3417 of SEQ ID NO: 1563258
gagaaacuguggcuuguca

SEQ ID NO: 1807060 - RNA, 19 nt, Artificial Sequence
  Description of Artificial Sequence: Synthetic oligonucleotide
  Antisense strand to SEQ ID NO: 1807059
ugacaagccacaguuucuc

SEQ ID NO: 1807061 - RNA, 19 nt, Artificial Sequence
  Description of Artificial Sequence: Synthetic oligonucleotide
  Sense strand starting at position 3419 of SEQ ID NO: 1563258
gaaacuguggcuugucaaa

SEQ ID NO: 1807062 - RNA, 19 nt, Artificial Sequence
  Description of Artificial Sequence: Synthetic oligonucleotide
  Antisense strand to SEQ ID NO: 1807061
uuugacaagccacaguuuc

SEQ ID NO: 1807063 - RNA, 19 nt, Artificial Sequence
  Description of Artificial Sequence: Synthetic oligonucleotide
  Sense strand starting at position 3502 of SEQ ID NO: 1563258
gaauaauugucccugaacg

SEQ ID NO: 1807064 - RNA, 19 nt, Artificial Sequence
  Description of Artificial Sequence: Synthetic oligonucleotide
  Antisense strand to SEQ ID NO: 1807063
cguucagggacaauuauuc

SEQ ID NO: 1807065 - RNA, 19 nt, Artificial Sequence
  Description of Artificial Sequence: Synthetic oligonucleotide
  Sense strand starting at position 3504 of SEQ ID NO: 1563258
auaauugucccugaacguu

SEQ ID NO: 1807066 - RNA, 19 nt, Artificial Sequence
  Description of Artificial Sequence: Synthetic oligonucleotide
  Antisense strand to SEQ ID NO: 1807065
aacguucagggacaauuau

SEQ ID NO: 1807067 - RNA, 19 nt, Artificial Sequence
  Description of Artificial Sequence: Synthetic oligonucleotide
  Sense strand starting at position 3731 of SEQ ID NO: 1563258
gcugauuuguugccuuaua

SEQ ID NO: 1807068 - RNA, 19 nt, Artificial Sequence
  Description of Artificial Sequence: Synthetic oligonucleotide
  Antisense strand to SEQ ID NO: 1807067
uauaaggcaacaaaucagc

SEQ ID NO: 1807069 - RNA, 19 nt, Artificial Sequence
  Description of Artificial Sequence: Synthetic oligonucleotide
  Sense strand starting at position 3732 of SEQ ID NO: 1563258
cugauuuguugccuuauaa

SEQ ID NO: 1807070 - RNA, 19 nt, Artificial Sequence
  Description of Artificial Sequence: Synthetic oligonucleotide
  Antisense strand to SEQ ID NO: 1807069
uuauaaggcaacaaaucag

SEQ ID NO: 1807071 - RNA, 19 nt, Artificial Sequence
  Description of Artificial Sequence: Synthetic oligonucleotide
  Sense strand starting at position 3789 of SEQ ID NO: 1563258
acuagauugugaguucuuc

SEQ ID NO: 1807072 - RNA, 19 nt, Artificial Sequence
  Description of Artificial Sequence: Synthetic oligonucleotide
  Antisense strand to SEQ ID NO: 1807071
gaagaacucacaaucuagu

SEQ ID NO: 1807073 - RNA, 19 nt, Artificial Sequence
  Description of Artificial Sequence: Synthetic oligonucleotide
  Sense strand starting at position 3879 of SEQ ID NO: 1563258
cuuacagaguauucuggaa

SEQ ID NO: 1807074 - RNA, 19 nt, Artificial Sequence
  Description of Artificial Sequence: Synthetic oligonucleotide
  Antisense strand to SEQ ID NO: 1807073
uuccagaauacucuguaag

SEQ ID NO: 1807075 - RNA, 19 nt, Artificial Sequence
  Description of Artificial Sequence: Synthetic oligonucleotide
  Sense strand starting at position 23 of SEQ ID NO: 1563259
cucagucacgccuaaauau

SEQ ID NO: 1807076 - RNA, 19 nt, Artificial Sequence
  Description of Artificial Sequence: Synthetic oligonucleotide
  Antisense strand to SEQ ID NO: 1807075
auauuuaggcgugacugag

SEQ ID NO: 1807077 - RNA, 19 nt, Artificial Sequence
  Description of Artificial Sequence: Synthetic oligonucleotide
  Sense strand starting at position 86 of SEQ ID NO: 1563259
gcuggagauuccgaugaau

SEQ ID NO: 1807078 - RNA, 19 nt, Artificial Sequence
  Description of Artificial Sequence: Synthetic oligonucleotide
  Antisense strand to SEQ ID NO: 1807077
auucaucggaaucuccagc

SEQ ID NO: 1807079 - RNA, 19 nt, Artificial Sequence
  Description of Artificial Sequence: Synthetic oligonucleotide
  Sense strand starting at position 88 of SEQ ID NO: 1563259
uggagauuccgaugaaucu

SEQ ID NO: 1807080 - RNA, 19 nt, Artificial Sequence
  Description of Artificial Sequence: Synthetic oligonucleotide
  Antisense strand to SEQ ID NO: 1807079
agauucaucggaaucucca

SEQ ID NO: 1807081 - RNA, 19 nt, Artificial Sequence
  Description of Artificial Sequence: Synthetic oligonucleotide
  Sense strand starting at position 97 of SEQ ID NO: 1563259
cgaugaaucuaccaaauuc

SEQ ID NO: 1807082 - RNA, 19 nt, Artificial Sequence
  Description of Artificial Sequence: Synthetic oligonucleotide
  Antisense strand to SEQ ID NO: 1807081
gaauuugguagauucaucg

SEQ ID NO: 1807083 - RNA, 19 nt, Artificial Sequence
  Description of Artificial Sequence: Synthetic oligonucleotide
  Sense strand starting at position 141 of SEQ ID NO: 1563259
uggaccugaucugauagaa

SEQ ID NO: 1807084 - RNA, 19 nt, Artificial Sequence
  Description of Artificial Sequence: Synthetic oligonucleotide
  Antisense strand to SEQ ID NO: 1807083
uucuaucagaucaggucca

SEQ ID NO: 1807085 - RNA, 19 nt, Artificial Sequence
  Description of Artificial Sequence: Synthetic oligonucleotide
  Sense strand starting at position 2097 of SEQ ID NO: 1563259
ccaaacccuccguaaugaa

SEQ ID NO: 1807086 - RNA, 19 nt, Artificial Sequence
  Description of Artificial Sequence: Synthetic oligonucleotide
  Antisense strand to SEQ ID NO: 1807085
uucauuacggaggguuugg

SEQ ID NO: 1807087 - RNA, 19 nt, Artificial Sequence
  Description of Artificial Sequence: Synthetic oligonucleotide
  Sense strand starting at position 2238 of SEQ ID NO: 1563259
aucgcuauccuaggcagau

SEQ ID NO: 1807088 - RNA, 19 nt, Artificial Sequence
  Description of Artificial Sequence: Synthetic oligonucleotide
  Antisense strand to SEQ ID NO: 1807087
aucugccuaggauagcgau

SEQ ID NO: 1807089 - RNA, 19 nt, Artificial Sequence
  Description of Artificial Sequence: Synthetic oligonucleotide
  Sense strand starting at position 2239 of SEQ ID NO: 1563259
ucgcuauccuaggcagaua

SEQ ID NO: 1807090 - RNA, 19 nt, Artificial Sequence
  Description of Artificial Sequence: Synthetic oligonucleotide
  Antisense strand to SEQ ID NO: 1807089
uaucugccuaggauagcga

SEQ ID NO: 1807091 - RNA, 19 nt, Artificial Sequence
  Description of Artificial Sequence: Synthetic oligonucleotide
  Sense strand starting at position 2240 of SEQ ID NO: 1563259
cgcuauccuaggcagauaa

SEQ ID NO: 1807092 - RNA, 19 nt, Artificial Sequence
  Description of Artificial Sequence: Synthetic oligonucleotide
  Antisense strand to SEQ ID NO: 1807091
uuaucugccuaggauagcg

SEQ ID NO: 1807093 - RNA, 19 nt, Artificial Sequence
  Description of Artificial Sequence: Synthetic oligonucleotide
  Sense strand starting at position 2308 of SEQ ID NO: 1563259
uacugaguuccggacugaa

SEQ ID NO: 1807094 - RNA, 19 nt, Artificial Sequence
  Description of Artificial Sequence: Synthetic oligonucleotide
  Antisense strand to SEQ ID NO: 1807093
uucaguccggaacucagua

SEQ ID NO: 1807095 - RNA, 19 nt, Artificial Sequence
  Description of Artificial Sequence: Synthetic oligonucleotide
  Sense strand starting at position 2311 of SEQ ID NO: 1563259
ugaguuccggacugaaaga

SEQ ID NO: 1807096 - RNA, 19 nt, Artificial Sequence
  Description of Artificial Sequence: Synthetic oligonucleotide
  Antisense strand to SEQ ID NO: 1807095
ucuuucaguccggaacuca

SEQ ID NO: 1807097 - RNA, 19 nt, Artificial Sequence
  Description of Artificial Sequence: Synthetic oligonucleotide
  Sense strand starting at position 2332 of SEQ ID NO: 1563259
gaagauuguacguggcaga

SEQ ID NO: 1807098 - RNA, 19 nt, Artificial Sequence
  Description of Artificial Sequence: Synthetic oligonucleotide
  Antisense strand to SEQ ID NO: 1807097
ucugccacguacaaucuuc

SEQ ID NO: 1807099 - RNA, 19 nt, Artificial Sequence
  Description of Artificial Sequence: Synthetic oligonucleotide
  Sense strand starting at position 2402 of SEQ ID NO: 1563259
aagucuagccuuugugaaa

SEQ ID NO: 1807100 - RNA, 19 nt, Artificial Sequence
  Description of Artificial Sequence: Synthetic oligonucleotide
  Antisense strand to SEQ ID NO: 1807099
uuucacaaaggcuagacuu

SEQ ID NO: 1807101 - RNA, 19 nt, Artificial Sequence
  Description of Artificial Sequence: Synthetic oligonucleotide
  Sense strand starting at position 2403 of SEQ ID NO: 1563259
agucuagccuuugugaaau

SEQ ID NO: 1807102 - RNA, 19 nt, Artificial Sequence
  Description of Artificial Sequence: Synthetic oligonucleotide
  Antisense strand to SEQ ID NO: 1807101
auuucacaaaggcuagacu

SEQ ID NO: 1807103 - RNA, 19 nt, Artificial Sequence
  Description of Artificial Sequence: Synthetic oligonucleotide
  Sense strand starting at position 2415 of SEQ ID NO: 1563259
gugaaauucuaaguguugu

SEQ ID NO: 1807104 - RNA, 19 nt, Artificial Sequence
  Description of Artificial Sequence: Synthetic oligonucleotide
  Antisense strand to SEQ ID NO: 1807103
acaacacuuagaauuucac

SEQ ID NO: 1807105 - RNA, 19 nt, Artificial Sequence
  Description of Artificial Sequence: Synthetic oligonucleotide
  Sense strand starting at position 2416 of SEQ ID NO: 1563259
ugaaauucuaaguguugug

SEQ ID NO: 1807106 - RNA, 19 nt, Artificial Sequence
  Description of Artificial Sequence: Synthetic oligonucleotide
  Antisense strand to SEQ ID NO: 1807105
cacaacacuuagaauuuca

SEQ ID NO: 1807107 - RNA, 19 nt, Artificial Sequence
  Description of Artificial Sequence: Synthetic oligonucleotide
  Sense strand starting at position 2428 of SEQ ID NO: 1563259
uguuguguuccuuaggguu

SEQ ID NO: 1807108 - RNA, 19 nt, Artificial Sequence
  Description of Artificial Sequence: Synthetic oligonucleotide
  Antisense strand to SEQ ID NO: 1807107
aacccuaaggaacacaaca

SEQ ID NO: 1807109 - RNA, 19 nt, Artificial Sequence
  Description of Artificial Sequence: Synthetic oligonucleotide
  Sense strand starting at position 2491 of SEQ ID NO: 1563259
ccaguuuggucauuuguaa

SEQ ID NO: 1807110 - RNA, 19 nt, Artificial Sequence
  Description of Artificial Sequence: Synthetic oligonucleotide
  Antisense strand to SEQ ID NO: 1807109
uuacaaaugaccaaacugg

SEQ ID NO: 1807111 - RNA, 19 nt, Artificial Sequence
  Description of Artificial Sequence: Synthetic oligonucleotide
  Sense strand starting at position 2512 of SEQ ID NO: 1563259
ugugaauaauucuuaguac

SEQ ID NO: 1807112 - RNA, 19 nt, Artificial Sequence
  Description of Artificial Sequence: Synthetic oligonucleotide
  Antisense strand to SEQ ID NO: 1807111
guacuaagaauuauucaca

SEQ ID NO: 1807113 - RNA, 19 nt, Artificial Sequence
  Description of Artificial Sequence: Synthetic oligonucleotide
  Sense strand starting at position 2513 of SEQ ID NO: 1563259
gugaauaauucuuaguacc

SEQ ID NO: 1807114 - RNA, 19 nt, Artificial Sequence
  Description of Artificial Sequence: Synthetic oligonucleotide
  Antisense strand to SEQ ID NO: 1807113
gguacuaagaauuauucac

SEQ ID NO: 1807115 - RNA, 19 nt, Artificial Sequence
  Description of Artificial Sequence: Synthetic oligonucleotide
  Sense strand starting at position 2590 of SEQ ID NO: 1563259
uucugacaccuaugagcaa

SEQ ID NO: 1807116 - RNA, 19 nt, Artificial Sequence
  Description of Artificial Sequence: Synthetic oligonucleotide
  Antisense strand to SEQ ID NO: 1807115
uugcucauaggugucagaa

SEQ ID NO: 1807117 - RNA, 19 nt, Artificial Sequence
  Description of Artificial Sequence: Synthetic oligonucleotide
  Sense strand starting at position 2621 of SEQ ID NO: 1563259
gaaucaaagugguagaaug

SEQ ID NO: 1807118 - RNA, 19 nt, Artificial Sequence
  Description of Artificial Sequence: Synthetic oligonucleotide
  Antisense strand to SEQ ID NO: 1807117
cauucuaccacuuugauuc

SEQ ID NO: 1807119 - RNA, 19 nt, Artificial Sequence
  Description of Artificial Sequence: Synthetic oligonucleotide
  Sense strand starting at position 2632 of SEQ ID NO: 1563259
guagaauggugaccuuucu

SEQ ID NO: 1807120 - RNA, 19 nt, Artificial Sequence
  Description of Artificial Sequence: Synthetic oligonucleotide
  Antisense strand to SEQ ID NO: 1807119
agaaaggucaccauucuac

SEQ ID NO: 1807121 - RNA, 19 nt, Artificial Sequence
  Description of Artificial Sequence: Synthetic oligonucleotide
  Sense strand starting at position 2650 of SEQ ID NO: 1563259
ucaggagcucgguguuuaa

SEQ ID NO: 1807122 - RNA, 19 nt, Artificial Sequence
  Description of Artificial Sequence: Synthetic oligonucleotide
  Antisense strand to SEQ ID NO: 1807121
uuaaacaccgagcuccuga

SEQ ID NO: 1807123 - RNA, 19 nt, Artificial Sequence
  Description of Artificial Sequence: Synthetic oligonucleotide
  Sense strand starting at position 2796 of SEQ ID NO: 1563259
ucaucaggcuaaugaauaa

SEQ ID NO: 1807124 - RNA, 19 nt, Artificial Sequence
  Description of Artificial Sequence: Synthetic oligonucleotide
  Antisense strand to SEQ ID NO: 1807123
uuauucauuagccugauga

SEQ ID NO: 1807125 - RNA, 19 nt, Artificial Sequence
  Description of Artificial Sequence: Synthetic oligonucleotide
  Sense strand starting at position 2907 of SEQ ID NO: 1563259
guguucaaauuggaagagu

SEQ ID NO: 1807126 - RNA, 19 nt, Artificial Sequence
  Description of Artificial Sequence: Synthetic oligonucleotide
  Antisense strand to SEQ ID NO: 1807125
acucuuccaauuugaacac

SEQ ID NO: 1807127 - RNA, 19 nt, Artificial Sequence
  Description of Artificial Sequence: Synthetic oligonucleotide
  Sense strand starting at position 2916 of SEQ ID NO: 1563259
uuggaagagugagaacaua

SEQ ID NO: 1807128 - RNA, 19 nt, Artificial Sequence
  Description of Artificial Sequence: Synthetic oligonucleotide
  Antisense strand to SEQ ID NO: 1807127
uauguucucacucuuccaa

SEQ ID NO: 1807129 - RNA, 19 nt, Artificial Sequence
  Description of Artificial Sequence: Synthetic oligonucleotide
  Sense strand starting at position 2980 of SEQ ID NO: 1563259
cugugaaaccacugacuca

SEQ ID NO: 1807130 - RNA, 19 nt, Artificial Sequence
  Description of Artificial Sequence: Synthetic oligonucleotide
  Antisense strand to SEQ ID NO: 1807129
ugagucagugguuucacag

SEQ ID NO: 1807131 - RNA, 19 nt, Artificial Sequence
  Description of Artificial Sequence: Synthetic oligonucleotide
  Sense strand starting at position 3120 of SEQ ID NO: 1563259
gcugaaagaugccauacca

SEQ ID NO: 1807132 - RNA, 19 nt, Artificial Sequence
  Description of Artificial Sequence: Synthetic oligonucleotide
  Antisense strand to SEQ ID NO: 1807131
ugguauggcaucuuucagc

SEQ ID NO: 1807133 - RNA, 19 nt, Artificial Sequence
  Description of Artificial Sequence: Synthetic oligonucleotide
  Sense strand starting at position 3370 of SEQ ID NO: 1563259
accugaaaugguugcugaa

SEQ ID NO: 1807134 - RNA, 19 nt, Artificial Sequence
  Description of Artificial Sequence: Synthetic oligonucleotide
  Antisense strand to SEQ ID NO: 1807133
uucagcaaccauuucaggu

SEQ ID NO: 1807135 - RNA, 19 nt, Artificial Sequence
  Description of Artificial Sequence: Synthetic oligonucleotide
  Sense strand starting at position 3372 of SEQ ID NO: 1563259
cugaaaugguugcugaaau

SEQ ID NO: 1807136 - RNA, 19 nt, Artificial Sequence
  Description of Artificial Sequence: Synthetic oligonucleotide
  Antisense strand to SEQ ID NO: 1807135
auuucagcaaccauuucag

SEQ ID NO: 1807137 - RNA, 19 nt, Artificial Sequence
  Description of Artificial Sequence: Synthetic oligonucleotide
  Sense strand starting at position 3420 of SEQ ID NO: 1563259
ccaguuccauuaugaugau

SEQ ID NO: 1807138 - RNA, 19 nt, Artificial Sequence
  Description of Artificial Sequence: Synthetic oligonucleotide
  Antisense strand to SEQ ID NO: 1807137
aucaucauaauggaacugg

SEQ ID NO: 1807139 - RNA, 19 nt, Artificial Sequence
  Description of Artificial Sequence: Synthetic oligonucleotide
  Sense strand starting at position 3423 of SEQ ID NO: 1563259
guuccauuaugaugauuuc

SEQ ID NO: 1807140 - RNA, 19 nt, Artificial Sequence
  Description of Artificial Sequence: Synthetic oligonucleotide
  Antisense strand to SEQ ID NO: 1807139
gaaaucaucauaauggaac

SEQ ID NO: 1807141 - RNA, 19 nt, Artificial Sequence
  Description of Artificial Sequence: Synthetic oligonucleotide
  Sense strand starting at position 3446 of SEQ ID NO: 1563259
cuucucuagucuccucaga

SEQ ID NO: 1807142 - RNA, 19 nt, Artificial Sequence
  Description of Artificial Sequence: Synthetic oligonucleotide
  Antisense strand to SEQ ID NO: 1807141
ucugaggagacuagagaag

SEQ ID NO: 1807143 - RNA, 19 nt, Artificial Sequence
  Description of Artificial Sequence: Synthetic oligonucleotide
  Sense strand starting at position 3448 of SEQ ID NO: 1563259
ucucuagucuccucagacu

SEQ ID NO: 1807144 - RNA, 19 nt, Artificial Sequence
  Description of Artificial Sequence: Synthetic oligonucleotide
  Antisense strand to SEQ ID NO: 1807143
agucugaggagacuagaga

SEQ ID NO: 1807145 - RNA, 19 nt, Artificial Sequence
  Description of Artificial Sequence: Synthetic oligonucleotide
  Sense strand starting at position 3539 of SEQ ID NO: 1563259
guuagacgaucucucacuu

SEQ ID NO: 1807146 - RNA, 19 nt, Artificial Sequence
  Description of Artificial Sequence: Synthetic oligonucleotide
  Antisense strand to SEQ ID NO: 1807145
aagugagagaucgucuaac

SEQ ID NO: 1807147 - RNA, 19 nt, Artificial Sequence
  Description of Artificial Sequence: Synthetic oligonucleotide
  Sense strand starting at position 3592 of SEQ ID NO: 1563259
guacacaucucguuuauag

SEQ ID NO: 1807148 - RNA, 19 nt, Artificial Sequence
  Description of Artificial Sequence: Synthetic oligonucleotide
  Antisense strand to SEQ ID NO: 1807147
cuauaaacgagauguguac

SEQ ID NO: 1807149 - RNA, 19 nt, Artificial Sequence
  Description of Artificial Sequence: Synthetic oligonucleotide
  Sense strand starting at position 3594 of SEQ ID NO: 1563259
acacaucucguuuauagca

SEQ ID NO: 1807150 - RNA, 19 nt, Artificial Sequence
  Description of Artificial Sequence: Synthetic oligonucleotide
  Antisense strand to SEQ ID NO: 1807149
ugcuauaaacgagaugugu

SEQ ID NO: 1807151 - RNA, 19 nt, Artificial Sequence
  Description of Artificial Sequence: Synthetic oligonucleotide
  Sense strand starting at position 3602 of SEQ ID NO: 1563259
cguuuauagcaaggauaug

SEQ ID NO: 1807152 - RNA, 19 nt, Artificial Sequence
  Description of Artificial Sequence: Synthetic oligonucleotide
  Antisense strand to SEQ ID NO: 1807151
cauauccuugcuauaaacg

SEQ ID NO: 1807153 - RNA, 19 nt, Artificial Sequence
  Description of Artificial Sequence: Synthetic oligonucleotide
  Sense strand starting at position 3936 of SEQ ID NO: 1563259
cggccuugugcugggauua

SEQ ID NO: 1807154 - RNA, 19 nt, Artificial Sequence
  Description of Artificial Sequence: Synthetic oligonucleotide
  Antisense strand to SEQ ID NO: 1807153
uaaucccagcacaaggccg

SEQ ID NO: 1807155 - RNA, 19 nt, Artificial Sequence
  Description of Artificial Sequence: Synthetic oligonucleotide
  Sense strand starting at position 120 of SEQ ID NO: 1563260
gcgggacccuaucucuuua

SEQ ID NO: 1807156 - RNA, 19 nt, Artificial Sequence
  Description of Artificial Sequence: Synthetic oligonucleotide
  Antisense strand to SEQ ID NO: 1807155
uaaagagauagggucccgc

SEQ ID NO: 1807157 - RNA, 19 nt, Artificial Sequence
  Description of Artificial Sequence: Synthetic oligonucleotide
  Sense strand starting at position 122 of SEQ ID NO: 1563260
gggacccuaucucuuuaaa

SEQ ID NO: 1807158 - RNA, 19 nt, Artificial Sequence
  Description of Artificial Sequence: Synthetic oligonucleotide
  Antisense strand to SEQ ID NO: 1807157
uuuaaagagauaggguccc

SEQ ID NO: 1807159 - RNA, 19 nt, Artificial Sequence
  Description of Artificial Sequence: Synthetic oligonucleotide
  Sense strand starting at position 217 of SEQ ID NO: 1563260
uccaaagaaucuugaggac

SEQ ID NO: 1807160 - RNA, 19 nt, Artificial Sequence
  Description of Artificial Sequence: Synthetic oligonucleotide
  Antisense strand to SEQ ID NO: 1807159
guccucaagauucuuugga

SEQ ID NO: 1807161 - RNA, 19 nt, Artificial Sequence
  Description of Artificial Sequence: Synthetic oligonucleotide
  Sense strand starting at position 265 of SEQ ID NO: 1563260
aggcuagaauucuccguga

SEQ ID NO: 1807162 - RNA, 19 nt, Artificial Sequence
  Description of Artificial Sequence: Synthetic oligonucleotide
  Antisense strand to SEQ ID NO: 1807161
ucacggagaauucuagccu

SEQ ID NO: 1807163 - RNA, 19 nt, Artificial Sequence
  Description of Artificial Sequence: Synthetic oligonucleotide
  Sense strand starting at position 267 of SEQ ID NO: 1563260
gcuagaauucuccgugaca

SEQ ID NO: 1807164 - RNA, 19 nt, Artificial Sequence
  Description of Artificial Sequence: Synthetic oligonucleotide
  Antisense strand to SEQ ID NO: 1807163
ugucacggagaauucuagc

SEQ ID NO: 1807165 - RNA, 19 nt, Artificial Sequence
  Description of Artificial Sequence: Synthetic oligonucleotide
  Sense strand starting at position 268 of SEQ ID NO: 1563260
cuagaauucuccgugacac

SEQ ID NO: 1807166 - RNA, 19 nt, Artificial Sequence
  Description of Artificial Sequence: Synthetic oligonucleotide
  Antisense strand to SEQ ID NO: 1807165
gugucacggagaauucuag

SEQ ID NO: 1807167 - RNA, 19 nt, Artificial Sequence
  Description of Artificial Sequence: Synthetic oligonucleotide
  Sense strand starting at position 269 of SEQ ID NO: 1563260
uagaauucuccgugacacu

SEQ ID NO: 1807168 - RNA, 19 nt, Artificial Sequence
  Description of Artificial Sequence: Synthetic oligonucleotide
  Antisense strand to SEQ ID NO: 1807167
agugucacggagaauucua

SEQ ID NO: 1807169 - RNA, 19 nt, Artificial Sequence
  Description of Artificial Sequence: Synthetic oligonucleotide
  Sense strand starting at position 270 of SEQ ID NO: 1563260
agaauucuccgugacacuc

SEQ ID NO: 1807170 - RNA, 19 nt, Artificial Sequence
  Description of Artificial Sequence: Synthetic oligonucleotide
  Antisense strand to SEQ ID NO: 1807169
gagugucacggagaauucu

SEQ ID NO: 1807171 - RNA, 19 nt, Artificial Sequence
  Description of Artificial Sequence: Synthetic oligonucleotide
  Sense strand starting at position 296 of SEQ ID NO: 1563260
cgcagcggucauuaagaau

SEQ ID NO: 1807172 - RNA, 19 nt, Artificial Sequence
  Description of Artificial Sequence: Synthetic oligonucleotide
  Antisense strand to SEQ ID NO: 1807171
auucuuaaugaccgcugcg

SEQ ID NO: 1807173 - RNA, 19 nt, Artificial Sequence
  Description of Artificial Sequence: Synthetic oligonucleotide
  Sense strand starting at position 307 of SEQ ID NO: 1563260
uuaagaaucugcucagaca

SEQ ID NO: 1807174 - RNA, 19 nt, Artificial Sequence
  Description of Artificial Sequence: Synthetic oligonucleotide
  Antisense strand to SEQ ID NO: 1807173
ugucugagcagauucuuaa

SEQ ID NO: 1807175 - RNA, 19 nt, Artificial Sequence
  Description of Artificial Sequence: Synthetic oligonucleotide
  Sense strand starting at position 318 of SEQ ID NO: 1563260
cucagacacuucuagaaag

SEQ ID NO: 1807176 - RNA, 19 nt, Artificial Sequence
  Description of Artificial Sequence: Synthetic oligonucleotide
  Antisense strand to SEQ ID NO: 1807175
cuuucuagaagugucugag

SEQ ID NO: 1807177 - RNA, 19 nt, Artificial Sequence
  Description of Artificial Sequence: Synthetic oligonucleotide
  Sense strand starting at position 328 of SEQ ID NO: 1563260
ucuagaaaguggccacuua

SEQ ID NO: 1807178 - RNA, 19 nt, Artificial Sequence
  Description of Artificial Sequence: Synthetic oligonucleotide
  Antisense strand to SEQ ID NO: 1807177
uaaguggccacuuucuaga

SEQ ID NO: 1807179 - RNA, 19 nt, Artificial Sequence
  Description of Artificial Sequence: Synthetic oligonucleotide
  Sense strand starting at position 354 of SEQ ID NO: 1563260
ucuguaucaucuuugcauu

SEQ ID NO: 1807180 - RNA, 19 nt, Artificial Sequence
  Description of Artificial Sequence: Synthetic oligonucleotide
  Antisense strand to SEQ ID NO: 1807179
aaugcaaagaugauacaga

SEQ ID NO: 1807181 - RNA, 19 nt, Artificial Sequence
  Description of Artificial Sequence: Synthetic oligonucleotide
  Sense strand starting at position 468 of SEQ ID NO: 1563260
cccgcaucauugcuugauu

SEQ ID NO: 1807182 - RNA, 19 nt, Artificial Sequence
  Description of Artificial Sequence: Synthetic oligonucleotide
  Antisense strand to SEQ ID NO: 1807181
aaucaagcaaugaugcggg

SEQ ID NO: 1807183 - RNA, 19 nt, Artificial Sequence
  Description of Artificial Sequence: Synthetic oligonucleotide
  Sense strand starting at position 470 of SEQ ID NO: 1563260
cgcaucauugcuugauuga

SEQ ID NO: 1807184 - RNA, 19 nt, Artificial Sequence
  Description of Artificial Sequence: Synthetic oligonucleotide
  Antisense strand to SEQ ID NO: 1807183
ucaaucaagcaaugaugcg

SEQ ID NO: 1807185 - RNA, 19 nt, Artificial Sequence
  Description of Artificial Sequence: Synthetic oligonucleotide
  Sense strand starting at position 471 of SEQ ID NO: 1563260
gcaucauugcuugauugaa

SEQ ID NO: 1807186 - RNA, 19 nt, Artificial Sequence
  Description of Artificial Sequence: Synthetic oligonucleotide
  Antisense strand to SEQ ID NO: 1807185
uucaaucaagcaaugaugc

SEQ ID NO: 1807187 - RNA, 19 nt, Artificial Sequence
  Description of Artificial Sequence: Synthetic oligonucleotide
  Sense strand starting at position 953 of SEQ ID NO: 1563260
gcucaauaggcgcucagua

SEQ ID NO: 1807188 - RNA, 19 nt, Artificial Sequence
  Description of Artificial Sequence: Synthetic oligonucleotide
  Antisense strand to SEQ ID NO: 1807187
uacugagcgccuauugagc

SEQ ID NO: 1807189 - RNA, 19 nt, Artificial Sequence
  Description of Artificial Sequence: Synthetic oligonucleotide
  Sense strand starting at position 967 of SEQ ID NO: 1563260
caguaaguguuguugaaug

SEQ ID NO: 1807190 - RNA, 19 nt, Artificial Sequence
  Description of Artificial Sequence: Synthetic oligonucleotide
  Antisense strand to SEQ ID NO: 1807189
cauucaacaacacuuacug

SEQ ID NO: 1807191 - RNA, 19 nt, Artificial Sequence
  Description of Artificial Sequence: Synthetic oligonucleotide
  Sense strand starting at position 975 of SEQ ID NO: 1563260
guuguugaaugcgucugaa

SEQ ID NO: 1807192 - RNA, 19 nt, Artificial Sequence
  Description of Artificial Sequence: Synthetic oligonucleotide
  Antisense strand to SEQ ID NO: 1807191
uucagacgcauucaacaac

SEQ ID NO: 1807193 - RNA, 19 nt, Artificial Sequence
  Description of Artificial Sequence: Synthetic oligonucleotide
  Sense strand starting at position 978 of SEQ ID NO: 1563260
guugaaugcgucugaagaa

SEQ ID NO: 1807194 - RNA, 19 nt, Artificial Sequence
  Description of Artificial Sequence: Synthetic oligonucleotide
  Antisense strand to SEQ ID NO: 1807193
uucuucagacgcauucaac

SEQ ID NO: 1807195 - RNA, 19 nt, Artificial Sequence
  Description of Artificial Sequence: Synthetic oligonucleotide
  Sense strand starting at position 1124 of SEQ ID NO: 1563260
cgagcugaccacugcgaaa

SEQ ID NO: 1807196 - RNA, 19 nt, Artificial Sequence
  Description of Artificial Sequence: Synthetic oligonucleotide
  Antisense strand to SEQ ID NO: 1807195
uuucgcaguggucagcucg

SEQ ID NO: 1807197 - RNA, 19 nt, Artificial Sequence
  Description of Artificial Sequence: Synthetic oligonucleotide
  Sense strand starting at position 1395 of SEQ ID NO: 1563260
uuccaucucgauugcuauu

SEQ ID NO: 1807198 - RNA, 19 nt, Artificial Sequence
  Description of Artificial Sequence: Synthetic oligonucleotide
  Antisense strand to SEQ ID NO: 1807197
aauagcaaucgagauggaa

SEQ ID NO: 1807199 - RNA, 19 nt, Artificial Sequence
  Description of Artificial Sequence: Synthetic oligonucleotide
  Sense strand starting at position 2011 of SEQ ID NO: 1563260
ucgccagcccgcguuuaua

SEQ ID NO: 1807200 - RNA, 19 nt, Artificial Sequence
  Description of Artificial Sequence: Synthetic oligonucleotide
  Antisense strand to SEQ ID NO: 1807199
uauaaacgcgggcuggcga

SEQ ID NO: 1807201 - RNA, 19 nt, Artificial Sequence
  Description of Artificial Sequence: Synthetic oligonucleotide
  Sense strand starting at position 2117 of SEQ ID NO: 1563260
ugcccaaauucgcuaacuu

SEQ ID NO: 1807202 - RNA, 19 nt, Artificial Sequence
  Description of Artificial Sequence: Synthetic oligonucleotide
  Antisense strand to SEQ ID NO: 1807201
aaguuagcgaauuugggca

SEQ ID NO: 1807203 - RNA, 19 nt, Artificial Sequence
  Description of Artificial Sequence: Synthetic oligonucleotide
  Sense strand starting at position 2118 of SEQ ID NO: 1563260
gcccaaauucgcuaacuuc

SEQ ID NO: 1807204 - RNA, 19 nt, Artificial Sequence
  Description of Artificial Sequence: Synthetic oligonucleotide
  Antisense strand to SEQ ID NO: 1807203
gaaguuagcgaauuugggc

SEQ ID NO: 1807205 - RNA, 19 nt, Artificial Sequence
  Description of Artificial Sequence: Synthetic oligonucleotide
  Sense strand starting at position 2194 of SEQ ID NO: 1563260
aaguaaaucugagcuuugu

SEQ ID NO: 1807206 - RNA, 19 nt, Artificial Sequence
  Description of Artificial Sequence: Synthetic oligonucleotide
  Antisense strand to SEQ ID NO: 1807205
acaaagcucagauuuacuu

SEQ ID NO: 1807207 - RNA, 19 nt, Artificial Sequence
  Description of Artificial Sequence: Synthetic oligonucleotide
  Sense strand starting at position 2236 of SEQ ID NO: 1563260
agaugcgguccgggagauu

SEQ ID NO: 1807208 - RNA, 19 nt, Artificial Sequence
  Description of Artificial Sequence: Synthetic oligonucleotide
  Antisense strand to SEQ ID NO: 1807207
aaucucccggaccgcaucu

SEQ ID NO: 1807209 - RNA, 19 nt, Artificial Sequence
  Description of Artificial Sequence: Synthetic oligonucleotide
  Sense strand starting at position 2428 of SEQ ID NO: 1563260
gcagcuuuccaacagaaag

SEQ ID NO: 1807210 - RNA, 19 nt, Artificial Sequence
  Description of Artificial Sequence: Synthetic oligonucleotide
  Antisense strand to SEQ ID NO: 1807209
cuuucuguuggaaagcugc

SEQ ID NO: 1807211 - RNA, 19 nt, Artificial Sequence
  Description of Artificial Sequence: Synthetic oligonucleotide
  Sense strand starting at position 2554 of SEQ ID NO: 1563260
ccggcuuaccucugagaag

SEQ ID NO: 1807212 - RNA, 19 nt, Artificial Sequence
  Description of Artificial Sequence: Synthetic oligonucleotide
  Antisense strand to SEQ ID NO: 1807211
cuucucagagguaagccgg

SEQ ID NO: 1807213 - RNA, 19 nt, Artificial Sequence
  Description of Artificial Sequence: Synthetic oligonucleotide
  Sense strand starting at position 3026 of SEQ ID NO: 1563260
cgucuuuauaaccggcuua

SEQ ID NO: 1807214 - RNA, 19 nt, Artificial Sequence
  Description of Artificial Sequence: Synthetic oligonucleotide
  Antisense strand to SEQ ID NO: 1807213
uaagccgguuauaaagacg

SEQ ID NO: 1807215 - RNA, 19 nt, Artificial Sequence
  Description of Artificial Sequence: Synthetic oligonucleotide
  Sense strand starting at position 3283 of SEQ ID NO: 1563260
gcgucuguggcccuuuaaa

SEQ ID NO: 1807216 - RNA, 19 nt, Artificial Sequence
  Description of Artificial Sequence: Synthetic oligonucleotide
  Antisense strand to SEQ ID NO: 1807215
uuuaaagggccacagacgc

SEQ ID NO: 1807217 - RNA, 19 nt, Artificial Sequence
  Description of Artificial Sequence: Synthetic oligonucleotide
  Sense strand starting at position 3327 of SEQ ID NO: 1563260
cggaucgugugaaagcaaa

SEQ ID NO: 1807218 - RNA, 19 nt, Artificial Sequence
  Description of Artificial Sequence: Synthetic oligonucleotide
  Antisense strand to SEQ ID NO: 1807217
uuugcuuucacacgauccg

SEQ ID NO: 1807219 - RNA, 19 nt, Artificial Sequence
  Description of Artificial Sequence: Synthetic oligonucleotide
  Sense strand starting at position 3534 of SEQ ID NO: 1563260
cguggacuugcccaauaaa

SEQ ID NO: 1807220 - RNA, 19 nt, Artificial Sequence
  Description of Artificial Sequence: Synthetic oligonucleotide
  Antisense strand to SEQ ID NO: 1807219
uuuauugggcaaguccacg

SEQ ID NO: 1807221 - RNA, 19 nt, Artificial Sequence
  Description of Artificial Sequence: Synthetic oligonucleotide
  Sense strand starting at position 3537 of SEQ ID NO: 1563260
ggacuugcccaauaaauuc

SEQ ID NO: 1807222 - RNA, 19 nt, Artificial Sequence
  Description of Artificial Sequence: Synthetic oligonucleotide
  Antisense strand to SEQ ID NO: 1807221
gaauuuauugggcaagucc

SEQ ID NO: 1807223 - RNA, 19 nt, Artificial Sequence
  Description of Artificial Sequence: Synthetic oligonucleotide
  Sense strand starting at position 3770 of SEQ ID NO: 1563260
cuaucucauucguugaaga

SEQ ID NO: 1807224 - RNA, 19 nt, Artificial Sequence
  Description of Artificial Sequence: Synthetic oligonucleotide
  Antisense strand to SEQ ID NO: 1807223
ucuucaacgaaugagauag

SEQ ID NO: 1807225 - RNA, 19 nt, Artificial Sequence
  Description of Artificial Sequence: Synthetic oligonucleotide
  Sense strand starting at position 3771 of SEQ ID NO: 1563260
uaucucauucguugaagag

SEQ ID NO: 1807226 - RNA, 19 nt, Artificial Sequence
  Description of Artificial Sequence: Synthetic oligonucleotide
  Antisense strand to SEQ ID NO: 1807225
cucuucaacgaaugagaua

SEQ ID NO: 1807227 - RNA, 19 nt, Artificial Sequence
  Description of Artificial Sequence: Synthetic oligonucleotide
  Sense strand starting at position 3812 of SEQ ID NO: 1563260
cucuuaaagucgccagauu

SEQ ID NO: 1807228 - RNA, 19 nt, Artificial Sequence
  Description of Artificial Sequence: Synthetic oligonucleotide
  Antisense strand to SEQ ID NO: 1807227
aaucuggcgacuuuaagag

SEQ ID NO: 1807229 - RNA, 19 nt, Artificial Sequence
  Description of Artificial Sequence: Synthetic oligonucleotide
  Sense strand starting at position 3823 of SEQ ID NO: 1563260
gccagauucugggcagagu

SEQ ID NO: 1807230 - RNA, 19 nt, Artificial Sequence
  Description of Artificial Sequence: Synthetic oligonucleotide
  Antisense strand to SEQ ID NO: 1807229
acucugcccagaaucuggc

SEQ ID NO: 1807231 - RNA, 19 nt, Artificial Sequence
  Description of Artificial Sequence: Synthetic oligonucleotide
  Sense strand starting at position 3863 of SEQ ID NO: 1563260
agcgguggcucuucuagaa

SEQ ID NO: 1807232 - RNA, 19 nt, Artificial Sequence
  Description of Artificial Sequence: Synthetic oligonucleotide
  Antisense strand to SEQ ID NO: 1807231
uucuagaagagccaccgcu

SEQ ID NO: 1807233 - RNA, 19 nt, Artificial Sequence
  Description of Artificial Sequence: Synthetic oligonucleotide
  Sense strand starting at position 3946 of SEQ ID NO: 1563260
ggaugcgacccggagaaau

SEQ ID NO: 1807234 - RNA, 19 nt, Artificial Sequence
  Description of Artificial Sequence: Synthetic oligonucleotide
  Antisense strand to SEQ ID NO: 1807233
auuucuccgggucgcaucc

SEQ ID NO: 1807235 - RNA, 19 nt, Artificial Sequence
  Description of Artificial Sequence: Synthetic oligonucleotide
  Sense strand starting at position 738 of SEQ ID NO: 1563261
ucgccagcccgcguuuaua

SEQ ID NO: 1807236 - RNA, 19 nt, Artificial Sequence
  Description of Artificial Sequence: Synthetic oligonucleotide
  Antisense strand to SEQ ID NO: 1807235
uauaaacgcgggcuggcga

SEQ ID NO: 1807237 - RNA, 19 nt, Artificial Sequence
  Description of Artificial Sequence: Synthetic oligonucleotide
  Sense strand starting at position 845 of SEQ ID NO: 1563261
gcccaaauucgcuaacuuc

SEQ ID NO: 1807238 - RNA, 19 nt, Artificial Sequence
  Description of Artificial Sequence: Synthetic oligonucleotide
  Antisense strand to SEQ ID NO: 1807237
gaaguuagcgaauuugggc

SEQ ID NO: 1807239 - RNA, 19 nt, Artificial Sequence
  Description of Artificial Sequence: Synthetic oligonucleotide
  Sense strand starting at position 921 of SEQ ID NO: 1563261
aaguaaaucugagcuuugu

SEQ ID NO: 1807240 - RNA, 19 nt, Artificial Sequence
  Description of Artificial Sequence: Synthetic oligonucleotide
  Antisense strand to SEQ ID NO: 1807239
acaaagcucagauuuacuu

SEQ ID NO: 1807241 - RNA, 19 nt, Artificial Sequence
  Description of Artificial Sequence: Synthetic oligonucleotide
  Sense strand starting at position 963 of SEQ ID NO: 1563261
agaugcgguccgggagauu

SEQ ID NO: 1807242 - RNA, 19 nt, Artificial Sequence
  Description of Artificial Sequence: Synthetic oligonucleotide
  Antisense strand to SEQ ID NO: 1807241
aaucucccggaccgcaucu

SEQ ID NO: 1807243 - RNA, 19 nt, Artificial Sequence
  Description of Artificial Sequence: Synthetic oligonucleotide
  Sense strand starting at position 1155 of SEQ ID NO: 1563261
gcagcuuuccaacagaaag

SEQ ID NO: 1807244 - RNA, 19 nt, Artificial Sequence
  Description of Artificial Sequence: Synthetic oligonucleotide
  Antisense strand to SEQ ID NO: 1807243
cuuucuguuggaaagcugc

SEQ ID NO: 1807245 - RNA, 19 nt, Artificial Sequence
  Description of Artificial Sequence: Synthetic oligonucleotide
  Sense strand starting at position 1281 of SEQ ID NO: 1563261
ccggcuuaccucugagaag

SEQ ID NO: 1807246 - RNA, 19 nt, Artificial Sequence
  Description of Artificial Sequence: Synthetic oligonucleotide
  Antisense strand to SEQ ID NO: 1807245
cuucucagagguaagccgg

SEQ ID NO: 1807247 - RNA, 19 nt, Artificial Sequence
  Description of Artificial Sequence: Synthetic oligonucleotide
  Sense strand starting at position 2010 of SEQ ID NO: 1563261
gcgucuguggcccuuuaaa

SEQ ID NO: 1807248 - RNA, 19 nt, Artificial Sequence
  Description of Artificial Sequence: Synthetic oligonucleotide
  Antisense strand to SEQ ID NO: 1807247
uuuaaagggccacagacgc

SEQ ID NO: 1807249 - RNA, 19 nt, Artificial Sequence
  Description of Artificial Sequence: Synthetic oligonucleotide
  Sense strand starting at position 2054 of SEQ ID NO: 1563261
cggaucgugugaaagcaaa

SEQ ID NO: 1807250 - RNA, 19 nt, Artificial Sequence
  Description of Artificial Sequence: Synthetic oligonucleotide
  Antisense strand to SEQ ID NO: 1807249
uuugcuuucacacgauccg

SEQ ID NO: 1807251 - RNA, 19 nt, Artificial Sequence
  Description of Artificial Sequence: Synthetic oligonucleotide
  Sense strand starting at position 2261 of SEQ ID NO: 1563261
cguggacuugcccaauaaa

SEQ ID NO: 1807252 - RNA, 19 nt, Artificial Sequence
  Description of Artificial Sequence: Synthetic oligonucleotide
  Antisense strand to SEQ ID NO: 1807251
uuuauugggcaaguccacg

SEQ ID NO: 1807253 - RNA, 19 nt, Artificial Sequence
  Description of Artificial Sequence: Synthetic oligonucleotide
  Sense strand starting at position 2264 of SEQ ID NO: 1563261
ggacuugcccaauaaauuc

SEQ ID NO: 1807254 - RNA, 19 nt, Artificial Sequence
  Description of Artificial Sequence: Synthetic oligonucleotide
  Antisense strand to SEQ ID NO: 1807253
gaauuuauugggcaagucc

SEQ ID NO: 1807255 - RNA, 19 nt, Artificial Sequence
  Description of Artificial Sequence: Synthetic oligonucleotide
  Sense strand starting at position 2497 of SEQ ID NO: 1563261
cuaucucauucguugaaga

SEQ ID NO: 1807256 - RNA, 19 nt, Artificial Sequence
  Description of Artificial Sequence: Synthetic oligonucleotide
  Antisense strand to SEQ ID NO: 1807255
ucuucaacgaaugagauag

SEQ ID NO: 1807257 - RNA, 19 nt, Artificial Sequence
  Description of Artificial Sequence: Synthetic oligonucleotide
  Sense strand starting at position 2498 of SEQ ID NO: 1563261
uaucucauucguugaagag

SEQ ID NO: 1807258 - RNA, 19 nt, Artificial Sequence
  Description of Artificial Sequence: Synthetic oligonucleotide
  Antisense strand to SEQ ID NO: 1807257
cucuucaacgaaugagaua

SEQ ID NO: 1807259 - RNA, 19 nt, Artificial Sequence
  Description of Artificial Sequence: Synthetic oligonucleotide
  Sense strand starting at position 2539 of SEQ ID NO: 1563261
cucuuaaagucgccagauu

SEQ ID NO: 1807260 - RNA, 19 nt, Artificial Sequence
  Description of Artificial Sequence: Synthetic oligonucleotide
  Antisense strand to SEQ ID NO: 1807259
aaucuggcgacuuuaagag

SEQ ID NO: 1807261 - RNA, 19 nt, Artificial Sequence
  Description of Artificial Sequence: Synthetic oligonucleotide
  Sense strand starting at position 2550 of SEQ ID NO: 1563261
gccagauucugggcagagu

SEQ ID NO: 1807262 - RNA, 19 nt, Artificial Sequence
  Description of Artificial Sequence: Synthetic oligonucleotide
  Antisense strand to SEQ ID NO: 1807261
acucugcccagaaucuggc

SEQ ID NO: 1807263 - RNA, 19 nt, Artificial Sequence
  Description of Artificial Sequence: Synthetic oligonucleotide
  Sense strand starting at position 2673 of SEQ ID NO: 1563261
ggaugcgacccggagaaau

SEQ ID NO: 1807264 - RNA, 19 nt, Artificial Sequence
  Description of Artificial Sequence: Synthetic oligonucleotide
  Antisense strand to SEQ ID NO: 1807263
auuucuccgggucgcaucc

SEQ ID NO: 1807265 - RNA, 19 nt, Artificial Sequence
  Description of Artificial Sequence: Synthetic oligonucleotide
  Sense strand starting at position 2878 of SEQ ID NO: 1563261
uggaguucgucuuucuuag

SEQ ID NO: 1807266 - RNA, 19 nt, Artificial Sequence
  Description of Artificial Sequence: Synthetic oligonucleotide
  Antisense strand to SEQ ID NO: 1807265
cuaagaaagacgaacucca

SEQ ID NO: 1807267 - RNA, 19 nt, Artificial Sequence
  Description of Artificial Sequence: Synthetic oligonucleotide
  Sense strand starting at position 2885 of SEQ ID NO: 1563261
cgucuuucuuagguagaga

SEQ ID NO: 1807268 - RNA, 19 nt, Artificial Sequence
  Description of Artificial Sequence: Synthetic oligonucleotide
  Antisense strand to SEQ ID NO: 1807267
ucucuaccuaagaaagacg

SEQ ID NO: 1807269 - RNA, 19 nt, Artificial Sequence
  Description of Artificial Sequence: Synthetic oligonucleotide
  Sense strand starting at position 2886 of SEQ ID NO: 1563261
gucuuucuuagguagagau

SEQ ID NO: 1807270 - RNA, 19 nt, Artificial Sequence
  Description of Artificial Sequence: Synthetic oligonucleotide
  Antisense strand to SEQ ID NO: 1807269
aucucuaccuaagaaagac

SEQ ID NO: 1807271 - RNA, 19 nt, Artificial Sequence
  Description of Artificial Sequence: Synthetic oligonucleotide
  Sense strand starting at position 2888 of SEQ ID NO: 1563261
cuuucuuagguagagaugu

SEQ ID NO: 1807272 - RNA, 19 nt, Artificial Sequence
  Description of Artificial Sequence: Synthetic oligonucleotide
  Antisense strand to SEQ ID NO: 1807271
acaucucuaccuaagaaag

SEQ ID NO: 1807273 - RNA, 19 nt, Artificial Sequence
  Description of Artificial Sequence: Synthetic oligonucleotide
  Sense strand starting at position 2898 of SEQ ID NO: 1563261
uagagauguugucuuacaa

SEQ ID NO: 1807274 - RNA, 19 nt, Artificial Sequence
  Description of Artificial Sequence: Synthetic oligonucleotide
  Antisense strand to SEQ ID NO: 1807273
uuguaagacaacaucucua

SEQ ID NO: 1807275 - RNA, 19 nt, Artificial Sequence
  Description of Artificial Sequence: Synthetic oligonucleotide
  Sense strand starting at position 2963 of SEQ ID NO: 1563261
gauucuuuguggccaagaa

SEQ ID NO: 1807276 - RNA, 19 nt, Artificial Sequence
  Description of Artificial Sequence: Synthetic oligonucleotide
  Antisense strand to SEQ ID NO: 1807275
uucuuggccacaaagaauc

SEQ ID NO: 1807277 - RNA, 19 nt, Artificial Sequence
  Description of Artificial Sequence: Synthetic oligonucleotide
  Sense strand starting at position 2964 of SEQ ID NO: 1563261
auucuuuguggccaagaaa

SEQ ID NO: 1807278 - RNA, 19 nt, Artificial Sequence
  Description of Artificial Sequence: Synthetic oligonucleotide
  Antisense strand to SEQ ID NO: 1807277
uuucuuggccacaaagaau

SEQ ID NO: 1807279 - RNA, 19 nt, Artificial Sequence
  Description of Artificial Sequence: Synthetic oligonucleotide
  Sense strand starting at position 3080 of SEQ ID NO: 1563261
gcaacagcgacucaguuua

SEQ ID NO: 1807280 - RNA, 19 nt, Artificial Sequence
  Description of Artificial Sequence: Synthetic oligonucleotide
  Antisense strand to SEQ ID NO: 1807279
uaaacugagucgcuguugc

SEQ ID NO: 1807281 - RNA, 19 nt, Artificial Sequence
  Description of Artificial Sequence: Synthetic oligonucleotide
  Sense strand starting at position 3090 of SEQ ID NO: 1563261
cucaguuuacacuguuuau

SEQ ID NO: 1807282 - RNA, 19 nt, Artificial Sequence
  Description of Artificial Sequence: Synthetic oligonucleotide
  Antisense strand to SEQ ID NO: 1807281
auaaacaguguaaacugag

SEQ ID NO: 1807283 - RNA, 19 nt, Artificial Sequence
  Description of Artificial Sequence: Synthetic oligonucleotide
  Sense strand starting at position 3155 of SEQ ID NO: 1563261
agggaaugucacgaaguca

SEQ ID NO: 1807284 - RNA, 19 nt, Artificial Sequence
  Description of Artificial Sequence: Synthetic oligonucleotide
  Antisense strand to SEQ ID NO: 1807283
ugacuucgugacauucccu

SEQ ID NO: 1807285 - RNA, 19 nt, Artificial Sequence
  Description of Artificial Sequence: Synthetic oligonucleotide
  Sense strand starting at position 3184 of SEQ ID NO: 1563261
guauguguucugucuucuu

SEQ ID NO: 1807286 - RNA, 19 nt, Artificial Sequence
  Description of Artificial Sequence: Synthetic oligonucleotide
  Antisense strand to SEQ ID NO: 1807285
aagaagacagaacacauac

SEQ ID NO: 1807287 - RNA, 19 nt, Artificial Sequence
  Description of Artificial Sequence: Synthetic oligonucleotide
  Sense strand starting at position 3189 of SEQ ID NO: 1563261
uguucugucuucuuaauug

SEQ ID NO: 1807288 - RNA, 19 nt, Artificial Sequence
  Description of Artificial Sequence: Synthetic oligonucleotide
  Antisense strand to SEQ ID NO: 1807287
caauuaagaagacagaaca

SEQ ID NO: 1807289 - RNA, 19 nt, Artificial Sequence
  Description of Artificial Sequence: Synthetic oligonucleotide
  Sense strand starting at position 3193 of SEQ ID NO: 1563261
cugucuucuuaauuggauu

SEQ ID NO: 1807290 - RNA, 19 nt, Artificial Sequence
  Description of Artificial Sequence: Synthetic oligonucleotide
  Antisense strand to SEQ ID NO: 1807289
aauccaauuaagaagacag

SEQ ID NO: 1807291 - RNA, 19 nt, Artificial Sequence
  Description of Artificial Sequence: Synthetic oligonucleotide
  Sense strand starting at position 3196 of SEQ ID NO: 1563261
ucuucuuaauuggauuuga

SEQ ID NO: 1807292 - RNA, 19 nt, Artificial Sequence
  Description of Artificial Sequence: Synthetic oligonucleotide
  Antisense strand to SEQ ID NO: 1807291
ucaaauccaauuaagaaga

SEQ ID NO: 1807293 - RNA, 19 nt, Artificial Sequence
  Description of Artificial Sequence: Synthetic oligonucleotide
  Sense strand starting at position 3288 of SEQ ID NO: 1563261
caaaguucuguuuguugac

SEQ ID NO: 1807294 - RNA, 19 nt, Artificial Sequence
  Description of Artificial Sequence: Synthetic oligonucleotide
  Antisense strand to SEQ ID NO: 1807293
gucaacaaacagaacuuug

SEQ ID NO: 1807295 - RNA, 19 nt, Artificial Sequence
  Description of Artificial Sequence: Synthetic oligonucleotide
  Sense strand starting at position 3316 of SEQ ID NO: 1563261
ggcuuaccgacacaaagau

SEQ ID NO: 1807296 - RNA, 19 nt, Artificial Sequence
  Description of Artificial Sequence: Synthetic oligonucleotide
  Antisense strand to SEQ ID NO: 1807295
aucuuugugucgguaagcc

SEQ ID NO: 1807297 - RNA, 19 nt, Artificial Sequence
  Description of Artificial Sequence: Synthetic oligonucleotide
  Sense strand starting at position 3528 of SEQ ID NO: 1563261
ucacuuugcuugccagauu

SEQ ID NO: 1807298 - RNA, 19 nt, Artificial Sequence
  Description of Artificial Sequence: Synthetic oligonucleotide
  Antisense strand to SEQ ID NO: 1807297
aaucuggcaagcaaaguga

SEQ ID NO: 1807299 - RNA, 19 nt, Artificial Sequence
  Description of Artificial Sequence: Synthetic oligonucleotide
  Sense strand starting at position 3581 of SEQ ID NO: 1563261
gggaucugucggcacccua

SEQ ID NO: 1807300 - RNA, 19 nt, Artificial Sequence
  Description of Artificial Sequence: Synthetic oligonucleotide
  Antisense strand to SEQ ID NO: 1807299
uagggugccgacagauccc

SEQ ID NO: 1807301 - RNA, 19 nt, Artificial Sequence
  Description of Artificial Sequence: Synthetic oligonucleotide
  Sense strand starting at position 3609 of SEQ ID NO: 1563261
ugcaaaccgcgugugaaau

SEQ ID NO: 1807302 - RNA, 19 nt, Artificial Sequence
  Description of Artificial Sequence: Synthetic oligonucleotide
  Antisense strand to SEQ ID NO: 1807301
auuucacacgcgguuugca

SEQ ID NO: 1807303 - RNA, 19 nt, Artificial Sequence
  Description of Artificial Sequence: Synthetic oligonucleotide
  Sense strand starting at position 3645 of SEQ ID NO: 1563261
ugguguuugccugggauga

SEQ ID NO: 1807304 - RNA, 19 nt, Artificial Sequence
  Description of Artificial Sequence: Synthetic oligonucleotide
  Antisense strand to SEQ ID NO: 1807303
ucaucccaggcaaacacca

SEQ ID NO: 1807305 - RNA, 19 nt, Artificial Sequence
  Description of Artificial Sequence: Synthetic oligonucleotide
  Sense strand starting at position 3646 of SEQ ID NO: 1563261
gguguuugccugggaugaa

SEQ ID NO: 1807306 - RNA, 19 nt, Artificial Sequence
  Description of Artificial Sequence: Synthetic oligonucleotide
  Antisense strand to SEQ ID NO: 1807305
uucaucccaggcaaacacc

SEQ ID NO: 1807307 - RNA, 19 nt, Artificial Sequence
  Description of Artificial Sequence: Synthetic oligonucleotide
  Sense strand starting at position 3869 of SEQ ID NO: 1563261
ccaggccaauuguuagaaa

SEQ ID NO: 1807308 - RNA, 19 nt, Artificial Sequence
  Description of Artificial Sequence: Synthetic oligonucleotide
  Antisense strand to SEQ ID NO: 1807307
uuucuaacaauuggccugg

SEQ ID NO: 1807309 - RNA, 19 nt, Artificial Sequence
  Description of Artificial Sequence: Synthetic oligonucleotide
  Sense strand starting at position 3878 of SEQ ID NO: 1563261
uuguuagaaagaggcauau

SEQ ID NO: 1807310 - RNA, 19 nt, Artificial Sequence
  Description of Artificial Sequence: Synthetic oligonucleotide
  Antisense strand to SEQ ID NO: 1807309
auaugccucuuucuaacaa

SEQ ID NO: 1807311 - RNA, 19 nt, Artificial Sequence
  Description of Artificial Sequence: Synthetic oligonucleotide
  Sense strand starting at position 3880 of SEQ ID NO: 1563261
guuagaaagaggcauaugu

SEQ ID NO: 1807312 - RNA, 19 nt, Artificial Sequence
  Description of Artificial Sequence: Synthetic oligonucleotide
  Antisense strand to SEQ ID NO: 1807311
acauaugccucuuucuaac

SEQ ID NO: 1807313 - RNA, 19 nt, Artificial Sequence
  Description of Artificial Sequence: Synthetic oligonucleotide
  Sense strand starting at position 3913 of SEQ ID NO: 1563261
ggagugucuccggagcagu

SEQ ID NO: 1807314 - RNA, 19 nt, Artificial Sequence
  Description of Artificial Sequence: Synthetic oligonucleotide
  Antisense strand to SEQ ID NO: 1807313
acugcuccggagacacucc

SEQ ID NO: 1807315 - RNA, 19 nt, Artificial Sequence
  Description of Artificial Sequence: Synthetic oligonucleotide
  Sense strand starting at position 51 of SEQ ID NO: 1563262
cgagcugaccacugcgaaa

SEQ ID NO: 1807316 - RNA, 19 nt, Artificial Sequence
  Description of Artificial Sequence: Synthetic oligonucleotide
  Antisense strand to SEQ ID NO: 1807315
uuucgcaguggucagcucg

SEQ ID NO: 1807317 - RNA, 19 nt, Artificial Sequence
  Description of Artificial Sequence: Synthetic oligonucleotide
  Sense strand starting at position 322 of SEQ ID NO: 1563262
uuccaucucgauugcuauu

SEQ ID NO: 1807318 - RNA, 19 nt, Artificial Sequence
  Description of Artificial Sequence: Synthetic oligonucleotide
  Antisense strand to SEQ ID NO: 1807317
aauagcaaucgagauggaa

SEQ ID NO: 1807319 - RNA, 19 nt, Artificial Sequence
  Description of Artificial Sequence: Synthetic oligonucleotide
  Sense strand starting at position 938 of SEQ ID NO: 1563262
ucgccagcccgcguuuaua

SEQ ID NO: 1807320 - RNA, 19 nt, Artificial Sequence
  Description of Artificial Sequence: Synthetic oligonucleotide
  Antisense strand to SEQ ID NO: 1807319
uauaaacgcgggcuggcga

SEQ ID NO: 1807321 - RNA, 19 nt, Artificial Sequence
  Description of Artificial Sequence: Synthetic oligonucleotide
  Sense strand starting at position 1045 of SEQ ID NO: 1563262
gcccaaauucgcuaacuuc

SEQ ID NO: 1807322 - RNA, 19 nt, Artificial Sequence
  Description of Artificial Sequence: Synthetic oligonucleotide
  Antisense strand to SEQ ID NO: 1807321
gaaguuagcgaauuugggc

SEQ ID NO: 1807323 - RNA, 19 nt, Artificial Sequence
  Description of Artificial Sequence: Synthetic oligonucleotide
  Sense strand starting at position 1121 of SEQ ID NO: 1563262
aaguaaaucugagcuuugu

SEQ ID NO: 1807324 - RNA, 19 nt, Artificial Sequence
  Description of Artificial Sequence: Synthetic oligonucleotide
  Antisense strand to SEQ ID NO: 1807323
acaaagcucagauuuacuu

SEQ ID NO: 1807325 - RNA, 19 nt, Artificial Sequence
  Description of Artificial Sequence: Synthetic oligonucleotide
  Sense strand starting at position 1163 of SEQ ID NO: 1563262
agaugcgguccgggagauu

SEQ ID NO: 1807326 - RNA, 19 nt, Artificial Sequence
  Description of Artificial Sequence: Synthetic oligonucleotide
  Antisense strand to SEQ ID NO: 1807325
aaucucccggaccgcaucu

SEQ ID NO: 1807327 - RNA, 19 nt, Artificial Sequence
  Description of Artificial Sequence: Synthetic oligonucleotide
  Sense strand starting at position 1355 of SEQ ID NO: 1563262
gcagcuuuccaacagaaag

SEQ ID NO: 1807328 - RNA, 19 nt, Artificial Sequence
  Description of Artificial Sequence: Synthetic oligonucleotide
  Antisense strand to SEQ ID NO: 1807327
cuuucuguuggaaagcugc

SEQ ID NO: 1807329 - RNA, 19 nt, Artificial Sequence
  Description of Artificial Sequence: Synthetic oligonucleotide
  Sense strand starting at position 1481 of SEQ ID NO: 1563262
ccggcuuaccucugagaag

SEQ ID NO: 1807330 - RNA, 19 nt, Artificial Sequence
  Description of Artificial Sequence: Synthetic oligonucleotide
  Antisense strand to SEQ ID NO: 1807329
cuucucagagguaagccgg

SEQ ID NO: 1807331 - RNA, 19 nt, Artificial Sequence
  Description of Artificial Sequence: Synthetic oligonucleotide
  Sense strand starting at position 2210 of SEQ ID NO: 1563262
gcgucuguggcccuuuaaa

SEQ ID NO: 1807332 - RNA, 19 nt, Artificial Sequence
  Description of Artificial Sequence: Synthetic oligonucleotide
  Antisense strand to SEQ ID NO: 1807331
uuuaaagggccacagacgc

SEQ ID NO: 1807333 - RNA, 19 nt, Artificial Sequence
  Description of Artificial Sequence: Synthetic oligonucleotide
  Sense strand starting at position 2254 of SEQ ID NO: 1563262
cggaucgugugaaagcaaa

SEQ ID NO: 1807334 - RNA, 19 nt, Artificial Sequence
  Description of Artificial Sequence: Synthetic oligonucleotide
  Antisense strand to SEQ ID NO: 1807333
uuugcuuucacacgauccg

SEQ ID NO: 1807335 - RNA, 19 nt, Artificial Sequence
  Description of Artificial Sequence: Synthetic oligonucleotide
  Sense strand starting at position 2461 of SEQ ID NO: 1563262
cguggacuugcccaauaaa

SEQ ID NO: 1807336 - RNA, 19 nt, Artificial Sequence
  Description of Artificial Sequence: Synthetic oligonucleotide
  Antisense strand to SEQ ID NO: 1807335
uuuauugggcaaguccacg

SEQ ID NO: 1807337 - RNA, 19 nt, Artificial Sequence
  Description of Artificial Sequence: Synthetic oligonucleotide
  Sense strand starting at position 2464 of SEQ ID NO: 1563262
ggacuugcccaauaaauuc

SEQ ID NO: 1807338 - RNA, 19 nt, Artificial Sequence
  Description of Artificial Sequence: Synthetic oligonucleotide
  Antisense strand to SEQ ID NO: 1807337
gaauuuauugggcaagucc

SEQ ID NO: 1807339 - RNA, 19 nt, Artificial Sequence
  Description of Artificial Sequence: Synthetic oligonucleotide
  Sense strand starting at position 2697 of SEQ ID NO: 1563262
cuaucucauucguugaaga

SEQ ID NO: 1807340 - RNA, 19 nt, Artificial Sequence
  Description of Artificial Sequence: Synthetic oligonucleotide
  Antisense strand to SEQ ID NO: 1807339
ucuucaacgaaugagauag

SEQ ID NO: 1807341 - RNA, 19 nt, Artificial Sequence
  Description of Artificial Sequence: Synthetic oligonucleotide
  Sense strand starting at position 2698 of SEQ ID NO: 1563262
uaucucauucguugaagag

SEQ ID NO: 1807342 - RNA, 19 nt, Artificial Sequence
  Description of Artificial Sequence: Synthetic oligonucleotide
  Antisense strand to SEQ ID NO: 1807341
cucuucaacgaaugagaua

SEQ ID NO: 1807343 - RNA, 19 nt, Artificial Sequence
  Description of Artificial Sequence: Synthetic oligonucleotide
  Sense strand starting at position 2739 of SEQ ID NO: 1563262
cucuuaaagucgccagauu

SEQ ID NO: 1807344 - RNA, 19 nt, Artificial Sequence
  Description of Artificial Sequence: Synthetic oligonucleotide
  Antisense strand to SEQ ID NO: 1807343
aaucuggcgacuuuaagag

SEQ ID NO: 1807345 - RNA, 19 nt, Artificial Sequence
  Description of Artificial Sequence: Synthetic oligonucleotide
  Sense strand starting at position 2750 of SEQ ID NO: 1563262
gccagauucugggcagagu

SEQ ID NO: 1807346 - RNA, 19 nt, Artificial Sequence
  Description of Artificial Sequence: Synthetic oligonucleotide
  Antisense strand to SEQ ID NO: 1807345
acucugcccagaaucuggc

SEQ ID NO: 1807347 - RNA, 19 nt, Artificial Sequence
  Description of Artificial Sequence: Synthetic oligonucleotide
  Sense strand starting at position 2873 of SEQ ID NO: 1563262
ggaugcgacccggagaaau

SEQ ID NO: 1807348 - RNA, 19 nt, Artificial Sequence
  Description of Artificial Sequence: Synthetic oligonucleotide
  Antisense strand to SEQ ID NO: 1807347
auuucuccgggucgcaucc

SEQ ID NO: 1807349 - RNA, 19 nt, Artificial Sequence
  Description of Artificial Sequence: Synthetic oligonucleotide
  Sense strand starting at position 3078 of SEQ ID NO: 1563262
uggaguucgucuuucuuag

SEQ ID NO: 1807350 - RNA, 19 nt, Artificial Sequence
  Description of Artificial Sequence: Synthetic oligonucleotide
  Antisense strand to SEQ ID NO: 1807349
cuaagaaagacgaacucca

SEQ ID NO: 1807351 - RNA, 19 nt, Artificial Sequence
  Description of Artificial Sequence: Synthetic oligonucleotide
  Sense strand starting at position 3085 of SEQ ID NO: 1563262
cgucuuucuuagguagaga

SEQ ID NO: 1807352 - RNA, 19 nt, Artificial Sequence
  Description of Artificial Sequence: Synthetic oligonucleotide
  Antisense strand to SEQ ID NO: 1807351
ucucuaccuaagaaagacg

SEQ ID NO: 1807353 - RNA, 19 nt, Artificial Sequence
  Description of Artificial Sequence: Synthetic oligonucleotide
  Sense strand starting at position 3086 of SEQ ID NO: 1563262
gucuuucuuagguagagau

SEQ ID NO: 1807354 - RNA, 19 nt, Artificial Sequence
  Description of Artificial Sequence: Synthetic oligonucleotide
  Antisense strand to SEQ ID NO: 1807353
aucucuaccuaagaaagac

SEQ ID NO: 1807355 - RNA, 19 nt, Artificial Sequence
  Description of Artificial Sequence: Synthetic oligonucleotide
  Sense strand starting at position 3088 of SEQ ID NO: 1563262
cuuucuuagguagagaugu

SEQ ID NO: 1807356 - RNA, 19 nt, Artificial Sequence
  Description of Artificial Sequence: Synthetic oligonucleotide
  Antisense strand to SEQ ID NO: 1807355
acaucucuaccuaagaaag

SEQ ID NO: 1807357 - RNA, 19 nt, Artificial Sequence
  Description of Artificial Sequence: Synthetic oligonucleotide
  Sense strand starting at position 3098 of SEQ ID NO: 1563262
uagagauguugucuuacaa

SEQ ID NO: 1807358 - RNA, 19 nt, Artificial Sequence
  Description of Artificial Sequence: Synthetic oligonucleotide
  Antisense strand to SEQ ID NO: 1807357
uuguaagacaacaucucua

SEQ ID NO: 1807359 - RNA, 19 nt, Artificial Sequence
  Description of Artificial Sequence: Synthetic oligonucleotide
  Sense strand starting at position 3163 of SEQ ID NO: 1563262
gauucuuuguggccaagaa

SEQ ID NO: 1807360 - RNA, 19 nt, Artificial Sequence
  Description of Artificial Sequence: Synthetic oligonucleotide
  Antisense strand to SEQ ID NO: 1807359
uucuuggccacaaagaauc

SEQ ID NO: 1807361 - RNA, 19 nt, Artificial Sequence
  Description of Artificial Sequence: Synthetic oligonucleotide
  Sense strand starting at position 3164 of SEQ ID NO: 1563262
auucuuuguggccaagaaa

SEQ ID NO: 1807362 - RNA, 19 nt, Artificial Sequence
  Description of Artificial Sequence: Synthetic oligonucleotide
  Antisense strand to SEQ ID NO: 1807361
uuucuuggccacaaagaau

SEQ ID NO: 1807363 - RNA, 19 nt, Artificial Sequence
  Description of Artificial Sequence: Synthetic oligonucleotide
  Sense strand starting at position 3280 of SEQ ID NO: 1563262
gcaacagcgacucaguuua

SEQ ID NO: 1807364 - RNA, 19 nt, Artificial Sequence
  Description of Artificial Sequence: Synthetic oligonucleotide
  Antisense strand to SEQ ID NO: 1807363
uaaacugagucgcuguugc

SEQ ID NO: 1807365 - RNA, 19 nt, Artificial Sequence
  Description of Artificial Sequence: Synthetic oligonucleotide
  Sense strand starting at position 3290 of SEQ ID NO: 1563262
cucaguuuacacuguuuau

SEQ ID NO: 1807366 - RNA, 19 nt, Artificial Sequence
  Description of Artificial Sequence: Synthetic oligonucleotide
  Antisense strand to SEQ ID NO: 1807365
auaaacaguguaaacugag

SEQ ID NO: 1807367 - RNA, 19 nt, Artificial Sequence
  Description of Artificial Sequence: Synthetic oligonucleotide
  Sense strand starting at position 3355 of SEQ ID NO: 1563262
agggaaugucacgaaguca

SEQ ID NO: 1807368 - RNA, 19 nt, Artificial Sequence
  Description of Artificial Sequence: Synthetic oligonucleotide
  Antisense strand to SEQ ID NO: 1807367
ugacuucgugacauucccu

SEQ ID NO: 1807369 - RNA, 19 nt, Artificial Sequence
  Description of Artificial Sequence: Synthetic oligonucleotide
  Sense strand starting at position 3384 of SEQ ID NO: 1563262
guauguguucugucuucuu

SEQ ID NO: 1807370 - RNA, 19 nt, Artificial Sequence
  Description of Artificial Sequence: Synthetic oligonucleotide
  Antisense strand to SEQ ID NO: 1807369
aagaagacagaacacauac

SEQ ID NO: 1807371 - RNA, 19 nt, Artificial Sequence
  Description of Artificial Sequence: Synthetic oligonucleotide
  Sense strand starting at position 3389 of SEQ ID NO: 1563262
uguucugucuucuuaauug

SEQ ID NO: 1807372 - RNA, 19 nt, Artificial Sequence
  Description of Artificial Sequence: Synthetic oligonucleotide
  Antisense strand to SEQ ID NO: 1807371
caauuaagaagacagaaca

SEQ ID NO: 1807373 - RNA, 19 nt, Artificial Sequence
  Description of Artificial Sequence: Synthetic oligonucleotide
  Sense strand starting at position 3393 of SEQ ID NO: 1563262
cugucuucuuaauuggauu

SEQ ID NO: 1807374 - RNA, 19 nt, Artificial Sequence
  Description of Artificial Sequence: Synthetic oligonucleotide
  Antisense strand to SEQ ID NO: 1807373
aauccaauuaagaagacag

SEQ ID NO: 1807375 - RNA, 19 nt, Artificial Sequence
  Description of Artificial Sequence: Synthetic oligonucleotide
  Sense strand starting at position 3396 of SEQ ID NO: 1563262
ucuucuuaauuggauuuga

SEQ ID NO: 1807376 - RNA, 19 nt, Artificial Sequence
  Description of Artificial Sequence: Synthetic oligonucleotide
  Antisense strand to SEQ ID NO: 1807375
ucaaauccaauuaagaaga

SEQ ID NO: 1807377 - RNA, 19 nt, Artificial Sequence
  Description of Artificial Sequence: Synthetic oligonucleotide
  Sense strand starting at position 3488 of SEQ ID NO: 1563262
caaaguucuguuuguugac

SEQ ID NO: 1807378 - RNA, 19 nt, Artificial Sequence
  Description of Artificial Sequence: Synthetic oligonucleotide
  Antisense strand to SEQ ID NO: 1807377
gucaacaaacagaacuuug

SEQ ID NO: 1807379 - RNA, 19 nt, Artificial Sequence
  Description of Artificial Sequence: Synthetic oligonucleotide
  Sense strand starting at position 3516 of SEQ ID NO: 1563262
ggcuuaccgacacaaagau

SEQ ID NO: 1807380 - RNA, 19 nt, Artificial Sequence
  Description of Artificial Sequence: Synthetic oligonucleotide
  Antisense strand to SEQ ID NO: 1807379
aucuuugugucgguaagcc

SEQ ID NO: 1807381 - RNA, 19 nt, Artificial Sequence
  Description of Artificial Sequence: Synthetic oligonucleotide
  Sense strand starting at position 3726 of SEQ ID NO: 1563262
ucucacuuugcuugccaga

SEQ ID NO: 1807382 - RNA, 19 nt, Artificial Sequence
  Description of Artificial Sequence: Synthetic oligonucleotide
  Antisense strand to SEQ ID NO: 1807381
ucuggcaagcaaagugaga

SEQ ID NO: 1807383 - RNA, 19 nt, Artificial Sequence
  Description of Artificial Sequence: Synthetic oligonucleotide
  Sense strand starting at position 3728 of SEQ ID NO: 1563262
ucacuuugcuugccagauu

SEQ ID NO: 1807384 - RNA, 19 nt, Artificial Sequence
  Description of Artificial Sequence: Synthetic oligonucleotide
  Antisense strand to SEQ ID NO: 1807383
aaucuggcaagcaaaguga

SEQ ID NO: 1807385 - RNA, 19 nt, Artificial Sequence
  Description of Artificial Sequence: Synthetic oligonucleotide
  Sense strand starting at position 3755 of SEQ ID NO: 1563262
ugccuagucucccucugau

SEQ ID NO: 1807386 - RNA, 19 nt, Artificial Sequence
  Description of Artificial Sequence: Synthetic oligonucleotide
  Antisense strand to SEQ ID NO: 1807385
aucagagggagacuaggca

SEQ ID NO: 1807387 - RNA, 19 nt, Artificial Sequence
  Description of Artificial Sequence: Synthetic oligonucleotide
  Sense strand starting at position 3781 of SEQ ID NO: 1563262
gggaucugucggcacccua

SEQ ID NO: 1807388 - RNA, 19 nt, Artificial Sequence
  Description of Artificial Sequence: Synthetic oligonucleotide
  Antisense strand to SEQ ID NO: 1807387
uagggugccgacagauccc

SEQ ID NO: 1807389 - RNA, 19 nt, Artificial Sequence
  Description of Artificial Sequence: Synthetic oligonucleotide
  Sense strand starting at position 3809 of SEQ ID NO: 1563262
ugcaaaccgcgugugaaau

SEQ ID NO: 1807390 - RNA, 19 nt, Artificial Sequence
  Description of Artificial Sequence: Synthetic oligonucleotide
  Antisense strand to SEQ ID NO: 1807389
auuucacacgcgguuugca

SEQ ID NO: 1807391 - RNA, 19 nt, Artificial Sequence
  Description of Artificial Sequence: Synthetic oligonucleotide
  Sense strand starting at position 3845 of SEQ ID NO: 1563262
ugguguuugccugggauga

SEQ ID NO: 1807392 - RNA, 19 nt, Artificial Sequence
  Description of Artificial Sequence: Synthetic oligonucleotide
  Antisense strand to SEQ ID NO: 1807391
ucaucccaggcaaacacca

SEQ ID NO: 1807393 - RNA, 19 nt, Artificial Sequence
  Description of Artificial Sequence: Synthetic oligonucleotide
  Sense strand starting at position 3846 of SEQ ID NO: 1563262
gguguuugccugggaugaa

SEQ ID NO: 1807394 - RNA, 19 nt, Artificial Sequence
  Description of Artificial Sequence: Synthetic oligonucleotide
  Antisense strand to SEQ ID NO: 1807393
uucaucccaggcaaacacc

SEQ ID NO: 1807395 - RNA, 19 nt, Artificial Sequence
  Description of Artificial Sequence: Synthetic oligonucleotide
  Sense strand starting at position 27 of SEQ ID NO: 1563263
acuugauaguuaccucuua

SEQ ID NO: 1807396 - RNA, 19 nt, Artificial Sequence
  Description of Artificial Sequence: Synthetic oligonucleotide
  Antisense strand to SEQ ID NO: 1807395
uaagagguaacuaucaagu

SEQ ID NO: 1807397 - RNA, 19 nt, Artificial Sequence
  Description of Artificial Sequence: Synthetic oligonucleotide
  Sense strand starting at position 810 of SEQ ID NO: 1563263
uaucaaaugcaguggagaa

SEQ ID NO: 1807398 - RNA, 19 nt, Artificial Sequence
  Description of Artificial Sequence: Synthetic oligonucleotide
  Antisense strand to SEQ ID NO: 1807397
uucuccacugcauuugaua

SEQ ID NO: 1807399 - RNA, 19 nt, Artificial Sequence
  Description of Artificial Sequence: Synthetic oligonucleotide
  Sense strand starting at position 811 of SEQ ID NO: 1563263
aucaaaugcaguggagaaa

SEQ ID NO: 1807400 - RNA, 19 nt, Artificial Sequence
  Description of Artificial Sequence: Synthetic oligonucleotide
  Antisense strand to SEQ ID NO: 1807399
uuucuccacugcauuugau

SEQ ID NO: 1807401 - RNA, 19 nt, Artificial Sequence
  Description of Artificial Sequence: Synthetic oligonucleotide
  Sense strand starting at position 870 of SEQ ID NO: 1563263
uggacauacuuugccuaga

SEQ ID NO: 1807402 - RNA, 19 nt, Artificial Sequence
  Description of Artificial Sequence: Synthetic oligonucleotide
  Antisense strand to SEQ ID NO: 1807401
ucuaggcaaaguaugucca

SEQ ID NO: 1807403 - RNA, 19 nt, Artificial Sequence
  Description of Artificial Sequence: Synthetic oligonucleotide
  Sense strand starting at position 872 of SEQ ID NO: 1563263
gacauacuuugccuagagu

SEQ ID NO: 1807404 - RNA, 19 nt, Artificial Sequence
  Description of Artificial Sequence: Synthetic oligonucleotide
  Antisense strand to SEQ ID NO: 1807403
acucuaggcaaaguauguc

SEQ ID NO: 1807405 - RNA, 19 nt, Artificial Sequence
  Description of Artificial Sequence: Synthetic oligonucleotide
  Sense strand starting at position 873 of SEQ ID NO: 1563263
acauacuuugccuagaguu

SEQ ID NO: 1807406 - RNA, 19 nt, Artificial Sequence
  Description of Artificial Sequence: Synthetic oligonucleotide
  Antisense strand to SEQ ID NO: 1807405
aacucuaggcaaaguaugu

SEQ ID NO: 1807407 - RNA, 19 nt, Artificial Sequence
  Description of Artificial Sequence: Synthetic oligonucleotide
  Sense strand starting at position 905 of SEQ ID NO: 1563263
ccguauaucgaguauuaua

SEQ ID NO: 1807408 - RNA, 19 nt, Artificial Sequence
  Description of Artificial Sequence: Synthetic oligonucleotide
  Antisense strand to SEQ ID NO: 1807407
uauaauacucgauauacgg

SEQ ID NO: 1807409 - RNA, 19 nt, Artificial Sequence
  Description of Artificial Sequence: Synthetic oligonucleotide
  Sense strand starting at position 963 of SEQ ID NO: 1563263
auacuaauugcacggauga

SEQ ID NO: 1807410 - RNA, 19 nt, Artificial Sequence
  Description of Artificial Sequence: Synthetic oligonucleotide
  Antisense strand to SEQ ID NO: 1807409
ucauccgugcaauuaguau

SEQ ID NO: 1807411 - RNA, 19 nt, Artificial Sequence
  Description of Artificial Sequence: Synthetic oligonucleotide
  Sense strand starting at position 964 of SEQ ID NO: 1563263
uacuaauugcacggaugaa

SEQ ID NO: 1807412 - RNA, 19 nt, Artificial Sequence
  Description of Artificial Sequence: Synthetic oligonucleotide
  Antisense strand to SEQ ID NO: 1807411
uucauccgugcaauuagua

SEQ ID NO: 1807413 - RNA, 19 nt, Artificial Sequence
  Description of Artificial Sequence: Synthetic oligonucleotide
  Sense strand starting at position 1378 of SEQ ID NO: 1563263
uuaagcagugcacauauaa

SEQ ID NO: 1807414 - RNA, 19 nt, Artificial Sequence
  Description of Artificial Sequence: Synthetic oligonucleotide
  Antisense strand to SEQ ID NO: 1807413
uuauaugugcacugcuuaa

SEQ ID NO: 1807415 - RNA, 19 nt, Artificial Sequence
  Description of Artificial Sequence: Synthetic oligonucleotide
  Sense strand starting at position 1604 of SEQ ID NO: 1563263
aguuuauuccaucagcuuu

SEQ ID NO: 1807416 - RNA, 19 nt, Artificial Sequence
  Description of Artificial Sequence: Synthetic oligonucleotide
  Antisense strand to SEQ ID NO: 1807415
aaagcugauggaauaaacu

SEQ ID NO: 1807417 - RNA, 19 nt, Artificial Sequence
  Description of Artificial Sequence: Synthetic oligonucleotide
  Sense strand starting at position 1657 of SEQ ID NO: 1563263
cgugauucccuccaaauua

SEQ ID NO: 1807418 - RNA, 19 nt, Artificial Sequence
  Description of Artificial Sequence: Synthetic oligonucleotide
  Antisense strand to SEQ ID NO: 1807417
uaauuuggagggaaucacg

SEQ ID NO: 1807419 - RNA, 19 nt, Artificial Sequence
  Description of Artificial Sequence: Synthetic oligonucleotide
  Sense strand starting at position 1689 of SEQ ID NO: 1563263
ucagaagguuaaucucuaa

SEQ ID NO: 1807420 - RNA, 19 nt, Artificial Sequence
  Description of Artificial Sequence: Synthetic oligonucleotide
  Antisense strand to SEQ ID NO: 1807419
uuagagauuaaccuucuga

SEQ ID NO: 1807421 - RNA, 19 nt, Artificial Sequence
  Description of Artificial Sequence: Synthetic oligonucleotide
  Sense strand starting at position 1729 of SEQ ID NO: 1563263
ugacucucacagcgaucaa

SEQ ID NO: 1807422 - RNA, 19 nt, Artificial Sequence
  Description of Artificial Sequence: Synthetic oligonucleotide
  Antisense strand to SEQ ID NO: 1807421
uugaucgcugugagaguca

SEQ ID NO: 1807423 - RNA, 19 nt, Artificial Sequence
  Description of Artificial Sequence: Synthetic oligonucleotide
  Sense strand starting at position 1733 of SEQ ID NO: 1563263
ucucacagcgaucaauuau

SEQ ID NO: 1807424 - RNA, 19 nt, Artificial Sequence
  Description of Artificial Sequence: Synthetic oligonucleotide
  Antisense strand to SEQ ID NO: 1807423
auaauugaucgcugugaga

SEQ ID NO: 1807425 - RNA, 19 nt, Artificial Sequence
  Description of Artificial Sequence: Synthetic oligonucleotide
  Sense strand starting at position 1826 of SEQ ID NO: 1563263
cugagugauaagcagcuua

SEQ ID NO: 1807426 - RNA, 19 nt, Artificial Sequence
  Description of Artificial Sequence: Synthetic oligonucleotide
  Antisense strand to SEQ ID NO: 1807425
uaagcugcuuaucacucag

SEQ ID NO: 1807427 - RNA, 19 nt, Artificial Sequence
  Description of Artificial Sequence: Synthetic oligonucleotide
  Sense strand starting at position 2105 of SEQ ID NO: 1563263
agcauucguguccagagaa

SEQ ID NO: 1807428 - RNA, 19 nt, Artificial Sequence
  Description of Artificial Sequence: Synthetic oligonucleotide
  Antisense strand to SEQ ID NO: 1807427
uucucuggacacgaaugcu

SEQ ID NO: 1807429 - RNA, 19 nt, Artificial Sequence
  Description of Artificial Sequence: Synthetic oligonucleotide
  Sense strand starting at position 2175 of SEQ ID NO: 1563263
ggaauucugugaccggauu

SEQ ID NO: 1807430 - RNA, 19 nt, Artificial Sequence
  Description of Artificial Sequence: Synthetic oligonucleotide
  Antisense strand to SEQ ID NO: 1807429
aauccggucacagaauucc

SEQ ID NO: 1807431 - RNA, 19 nt, Artificial Sequence
  Description of Artificial Sequence: Synthetic oligonucleotide
  Sense strand starting at position 2208 of SEQ ID NO: 1563263
ggaggugguggguauacaa

SEQ ID NO: 1807432 - RNA, 19 nt, Artificial Sequence
  Description of Artificial Sequence: Synthetic oligonucleotide
  Antisense strand to SEQ ID NO: 1807431
uuguauacccaccaccucc

SEQ ID NO: 1807433 - RNA, 19 nt, Artificial Sequence
  Description of Artificial Sequence: Synthetic oligonucleotide
  Sense strand starting at position 2283 of SEQ ID NO: 1563263
uccggcuuggcugaaauga

SEQ ID NO: 1807434 - RNA, 19 nt, Artificial Sequence
  Description of Artificial Sequence: Synthetic oligonucleotide
  Antisense strand to SEQ ID NO: 1807433
ucauuucagccaagccgga

SEQ ID NO: 1807435 - RNA, 19 nt, Artificial Sequence
  Description of Artificial Sequence: Synthetic oligonucleotide
  Sense strand starting at position 2458 of SEQ ID NO: 1563263
gaaugagagagcugucuga

SEQ ID NO: 1807436 - RNA, 19 nt, Artificial Sequence
  Description of Artificial Sequence: Synthetic oligonucleotide
  Antisense strand to SEQ ID NO: 1807435
ucagacagcucucucauuc

SEQ ID NO: 1807437 - RNA, 19 nt, Artificial Sequence
  Description of Artificial Sequence: Synthetic oligonucleotide
  Sense strand starting at position 2462 of SEQ ID NO: 1563263
gagagagcugucugaacac

SEQ ID NO: 1807438 - RNA, 19 nt, Artificial Sequence
  Description of Artificial Sequence: Synthetic oligonucleotide
  Antisense strand to SEQ ID NO: 1807437
guguucagacagcucucuc

SEQ ID NO: 1807439 - RNA, 19 nt, Artificial Sequence
  Description of Artificial Sequence: Synthetic oligonucleotide
  Sense strand starting at position 2563 of SEQ ID NO: 1563263
gggaauguaaguugagcaa

SEQ ID NO: 1807440 - RNA, 19 nt, Artificial Sequence
  Description of Artificial Sequence: Synthetic oligonucleotide
  Antisense strand to SEQ ID NO: 1807439
uugcucaacuuacauuccc

SEQ ID NO: 1807441 - RNA, 19 nt, Artificial Sequence
  Description of Artificial Sequence: Synthetic oligonucleotide
  Sense strand starting at position 2566 of SEQ ID NO: 1563263
aauguaaguugagcaaucu

SEQ ID NO: 1807442 - RNA, 19 nt, Artificial Sequence
  Description of Artificial Sequence: Synthetic oligonucleotide
  Antisense strand to SEQ ID NO: 1807441
agauugcucaacuuacauu

SEQ ID NO: 1807443 - RNA, 19 nt, Artificial Sequence
  Description of Artificial Sequence: Synthetic oligonucleotide
  Sense strand starting at position 2567 of SEQ ID NO: 1563263
auguaaguugagcaaucuu

SEQ ID NO: 1807444 - RNA, 19 nt, Artificial Sequence
  Description of Artificial Sequence: Synthetic oligonucleotide
  Antisense strand to SEQ ID NO: 1807443
aagauugcucaacuuacau

SEQ ID NO: 1807445 - RNA, 19 nt, Artificial Sequence
  Description of Artificial Sequence: Synthetic oligonucleotide
  Sense strand starting at position 2685 of SEQ ID NO: 1563263
gcaacuugauguccaagaa

SEQ ID NO: 1807446 - RNA, 19 nt, Artificial Sequence
  Description of Artificial Sequence: Synthetic oligonucleotide
  Antisense strand to SEQ ID NO: 1807445
uucuuggacaucaaguugc

SEQ ID NO: 1807447 - RNA, 19 nt, Artificial Sequence
  Description of Artificial Sequence: Synthetic oligonucleotide
  Sense strand starting at position 2766 of SEQ ID NO: 1563263
gaaaguuugcugcaauauu

SEQ ID NO: 1807448 - RNA, 19 nt, Artificial Sequence
  Description of Artificial Sequence: Synthetic oligonucleotide
  Antisense strand to SEQ ID NO: 1807447
aauauugcagcaaacuuuc

SEQ ID NO: 1807449 - RNA, 19 nt, Artificial Sequence
  Description of Artificial Sequence: Synthetic oligonucleotide
  Sense strand starting at position 2854 of SEQ ID NO: 1563263
aucugugcaguggaagaau

SEQ ID NO: 1807450 - RNA, 19 nt, Artificial Sequence
  Description of Artificial Sequence: Synthetic oligonucleotide
  Antisense strand to SEQ ID NO: 1807449
auucuuccacugcacagau

SEQ ID NO: 1807451 - RNA, 19 nt, Artificial Sequence
  Description of Artificial Sequence: Synthetic oligonucleotide
  Sense strand starting at position 2857 of SEQ ID NO: 1563263
ugugcaguggaagaauuaa

SEQ ID NO: 1807452 - RNA, 19 nt, Artificial Sequence
  Description of Artificial Sequence: Synthetic oligonucleotide
  Antisense strand to SEQ ID NO: 1807451
uuaauucuuccacugcaca

SEQ ID NO: 1807453 - RNA, 19 nt, Artificial Sequence
  Description of Artificial Sequence: Synthetic oligonucleotide
  Sense strand starting at position 2875 of SEQ ID NO: 1563263
aaacuaauacggugguaca

SEQ ID NO: 1807454 - RNA, 19 nt, Artificial Sequence
  Description of Artificial Sequence: Synthetic oligonucleotide
  Antisense strand to SEQ ID NO: 1807453
uguaccaccguauuaguuu

SEQ ID NO: 1807455 - RNA, 19 nt, Artificial Sequence
  Description of Artificial Sequence: Synthetic oligonucleotide
  Sense strand starting at position 2909 of SEQ ID NO: 1563263
acaugugcagcggauuaaa

SEQ ID NO: 1807456 - RNA, 19 nt, Artificial Sequence
  Description of Artificial Sequence: Synthetic oligonucleotide
  Antisense strand to SEQ ID NO: 1807455
uuuaauccgcugcacaugu

SEQ ID NO: 1807457 - RNA, 19 nt, Artificial Sequence
  Description of Artificial Sequence: Synthetic oligonucleotide
  Sense strand starting at position 2963 of SEQ ID NO: 1563263
cugagugauccgucguuuc

SEQ ID NO: 1807458 - RNA, 19 nt, Artificial Sequence
  Description of Artificial Sequence: Synthetic oligonucleotide
  Antisense strand to SEQ ID NO: 1807457
gaaacgacggaucacucag

SEQ ID NO: 1807459 - RNA, 19 nt, Artificial Sequence
  Description of Artificial Sequence: Synthetic oligonucleotide
  Sense strand starting at position 3010 of SEQ ID NO: 1563263
acauauaccuuugcgaaca

SEQ ID NO: 1807460 - RNA, 19 nt, Artificial Sequence
  Description of Artificial Sequence: Synthetic oligonucleotide
  Antisense strand to SEQ ID NO: 1807459
uguucgcaaagguauaugu

SEQ ID NO: 1807461 - RNA, 19 nt, Artificial Sequence
  Description of Artificial Sequence: Synthetic oligonucleotide
  Sense strand starting at position 3068 of SEQ ID NO: 1563263
caugguaucucacugguua

SEQ ID NO: 1807462 - RNA, 19 nt, Artificial Sequence
  Description of Artificial Sequence: Synthetic oligonucleotide
  Antisense strand to SEQ ID NO: 1807461
uaaccagugagauaccaug

SEQ ID NO: 1807463 - RNA, 19 nt, Artificial Sequence
  Description of Artificial Sequence: Synthetic oligonucleotide
  Sense strand starting at position 3069 of SEQ ID NO: 1563263
augguaucucacugguuag

SEQ ID NO: 1807464 - RNA, 19 nt, Artificial Sequence
  Description of Artificial Sequence: Synthetic oligonucleotide
  Antisense strand to SEQ ID NO: 1807463
cuaaccagugagauaccau

SEQ ID NO: 1807465 - RNA, 19 nt, Artificial Sequence
  Description of Artificial Sequence: Synthetic oligonucleotide
  Sense strand starting at position 3325 of SEQ ID NO: 1563263
cuagauuauucugcucaug

SEQ ID NO: 1807466 - RNA, 19 nt, Artificial Sequence
  Description of Artificial Sequence: Synthetic oligonucleotide
  Antisense strand to SEQ ID NO: 1807465
caugagcagaauaaucuag

SEQ ID NO: 1807467 - RNA, 19 nt, Artificial Sequence
  Description of Artificial Sequence: Synthetic oligonucleotide
  Sense strand starting at position 3327 of SEQ ID NO: 1563263
agauuauucugcucaugaa

SEQ ID NO: 1807468 - RNA, 19 nt, Artificial Sequence
  Description of Artificial Sequence: Synthetic oligonucleotide
  Antisense strand to SEQ ID NO: 1807467
uucaugagcagaauaaucu

SEQ ID NO: 1807469 - RNA, 19 nt, Artificial Sequence
  Description of Artificial Sequence: Synthetic oligonucleotide
  Sense strand starting at position 3343 of SEQ ID NO: 1563263
gaagaucuuuaggaaagaa

SEQ ID NO: 1807470 - RNA, 19 nt, Artificial Sequence
  Description of Artificial Sequence: Synthetic oligonucleotide
  Antisense strand to SEQ ID NO: 1807469
uucuuuccuaaagaucuuc

SEQ ID NO: 1807471 - RNA, 19 nt, Artificial Sequence
  Description of Artificial Sequence: Synthetic oligonucleotide
  Sense strand starting at position 3464 of SEQ ID NO: 1563263
auagaaagcugguuauuac

SEQ ID NO: 1807472 - RNA, 19 nt, Artificial Sequence
  Description of Artificial Sequence: Synthetic oligonucleotide
  Antisense strand to SEQ ID NO: 1807471
guaauaaccagcuuucuau

SEQ ID NO: 1807473 - RNA, 19 nt, Artificial Sequence
  Description of Artificial Sequence: Synthetic oligonucleotide
  Sense strand starting at position 3467 of SEQ ID NO: 1563263
gaaagcugguuauuaccau

SEQ ID NO: 1807474 - RNA, 19 nt, Artificial Sequence
  Description of Artificial Sequence: Synthetic oligonucleotide
  Antisense strand to SEQ ID NO: 1807473
augguaauaaccagcuuuc

SEQ ID NO: 1807475 - RNA, 19 nt, Artificial Sequence
  Description of Artificial Sequence: Synthetic oligonucleotide
  Sense strand starting at position 143 of SEQ ID NO: 1563264
gggccucuucacgaguuaa

SEQ ID NO: 1807476 - RNA, 19 nt, Artificial Sequence
  Description of Artificial Sequence: Synthetic oligonucleotide
  Antisense strand to SEQ ID NO: 1807475
uuaacucgugaagaggccc

SEQ ID NO: 1807477 - RNA, 19 nt, Artificial Sequence
  Description of Artificial Sequence: Synthetic oligonucleotide
  Sense strand starting at position 155 of SEQ ID NO: 1563264
gaguuaaguuggcuggaau

SEQ ID NO: 1807478 - RNA, 19 nt, Artificial Sequence
  Description of Artificial Sequence: Synthetic oligonucleotide
  Antisense strand to SEQ ID NO: 1807477
auuccagccaacuuaacuc

SEQ ID NO: 1807479 - RNA, 19 nt, Artificial Sequence
  Description of Artificial Sequence: Synthetic oligonucleotide
  Sense strand starting at position 156 of SEQ ID NO: 1563264
aguuaaguuggcuggaaug

SEQ ID NO: 1807480 - RNA, 19 nt, Artificial Sequence
  Description of Artificial Sequence: Synthetic oligonucleotide
  Antisense strand to SEQ ID NO: 1807479
cauuccagccaacuuaacu

SEQ ID NO: 1807481 - RNA, 19 nt, Artificial Sequence
  Description of Artificial Sequence: Synthetic oligonucleotide
  Sense strand starting at position 158 of SEQ ID NO: 1563264
uuaaguuggcuggaaugua

SEQ ID NO: 1807482 - RNA, 19 nt, Artificial Sequence
  Description of Artificial Sequence: Synthetic oligonucleotide
  Antisense strand to SEQ ID NO: 1807481
uacauuccagccaacuuaa

SEQ ID NO: 1807483 - RNA, 19 nt, Artificial Sequence
  Description of Artificial Sequence: Synthetic oligonucleotide
  Sense strand starting at position 199 of SEQ ID NO: 1563264
aagacuugaucucugaugu

SEQ ID NO: 1807484 - RNA, 19 nt, Artificial Sequence
  Description of Artificial Sequence: Synthetic oligonucleotide
  Antisense strand to SEQ ID NO: 1807483
acaucagagaucaagucuu

SEQ ID NO: 1807485 - RNA, 19 nt, Artificial Sequence
  Description of Artificial Sequence: Synthetic oligonucleotide
  Sense strand starting at position 200 of SEQ ID NO: 1563264
agacuugaucucugaugua

SEQ ID NO: 1807486 - RNA, 19 nt, Artificial Sequence
  Description of Artificial Sequence: Synthetic oligonucleotide
  Antisense strand to SEQ ID NO: 1807485
uacaucagagaucaagucu

SEQ ID NO: 1807487 - RNA, 19 nt, Artificial Sequence
  Description of Artificial Sequence: Synthetic oligonucleotide
  Sense strand starting at position 244 of SEQ ID NO: 1563264
gucagcacagucuaagauu

SEQ ID NO: 1807488 - RNA, 19 nt, Artificial Sequence
  Description of Artificial Sequence: Synthetic oligonucleotide
  Antisense strand to SEQ ID NO: 1807487
aaucuuagacugugcugac

SEQ ID NO: 1807489 - RNA, 19 nt, Artificial Sequence
  Description of Artificial Sequence: Synthetic oligonucleotide
  Sense strand starting at position 275 of SEQ ID NO: 1563264
uuuaaagaacaguguauga

SEQ ID NO: 1807490 - RNA, 19 nt, Artificial Sequence
  Description of Artificial Sequence: Synthetic oligonucleotide
  Antisense strand to SEQ ID NO: 1807489
ucauacacuguucuuuaaa

SEQ ID NO: 1807491 - RNA, 19 nt, Artificial Sequence
  Description of Artificial Sequence: Synthetic oligonucleotide
  Sense strand starting at position 286 of SEQ ID NO: 1563264
guguaugauucagugauga

SEQ ID NO: 1807492 - RNA, 19 nt, Artificial Sequence
  Description of Artificial Sequence: Synthetic oligonucleotide
  Antisense strand to SEQ ID NO: 1807491
ucaucacugaaucauacac

SEQ ID NO: 1807493 - RNA, 19 nt, Artificial Sequence
  Description of Artificial Sequence: Synthetic oligonucleotide
  Sense strand starting at position 540 of SEQ ID NO: 1563264
uuugaugaacggugggaau

SEQ ID NO: 1807494 - RNA, 19 nt, Artificial Sequence
  Description of Artificial Sequence: Synthetic oligonucleotide
  Antisense strand to SEQ ID NO: 1807493
auucccaccguucaucaaa

SEQ ID NO: 1807495 - RNA, 19 nt, Artificial Sequence
  Description of Artificial Sequence: Synthetic oligonucleotide
  Sense strand starting at position 683 of SEQ ID NO: 1563264
ugaggaaucuaugcaaaug

SEQ ID NO: 1807496 - RNA, 19 nt, Artificial Sequence
  Description of Artificial Sequence: Synthetic oligonucleotide
  Antisense strand to SEQ ID NO: 1807495
cauuugcauagauuccuca

SEQ ID NO: 1807497 - RNA, 19 nt, Artificial Sequence
  Description of Artificial Sequence: Synthetic oligonucleotide
  Sense strand starting at position 783 of SEQ ID NO: 1563264
ggacaaggcuuccuccaga

SEQ ID NO: 1807498 - RNA, 19 nt, Artificial Sequence
  Description of Artificial Sequence: Synthetic oligonucleotide
  Antisense strand to SEQ ID NO: 1807497
ucuggaggaagccuugucc

SEQ ID NO: 1807499 - RNA, 19 nt, Artificial Sequence
  Description of Artificial Sequence: Synthetic oligonucleotide
  Sense strand starting at position 788 of SEQ ID NO: 1563264
aggcuuccuccagacuguu

SEQ ID NO: 1807500 - RNA, 19 nt, Artificial Sequence
  Description of Artificial Sequence: Synthetic oligonucleotide
  Antisense strand to SEQ ID NO: 1807499
aacagucuggaggaagccu

SEQ ID NO: 1807501 - RNA, 19 nt, Artificial Sequence
  Description of Artificial Sequence: Synthetic oligonucleotide
  Sense strand starting at position 794 of SEQ ID NO: 1563264
ccuccagacuguuugguaa

SEQ ID NO: 1807502 - RNA, 19 nt, Artificial Sequence
  Description of Artificial Sequence: Synthetic oligonucleotide
  Antisense strand to SEQ ID NO: 1807501
uuaccaaacagucuggagg

SEQ ID NO: 1807503 - RNA, 19 nt, Artificial Sequence
  Description of Artificial Sequence: Synthetic oligonucleotide
  Sense strand starting at position 797 of SEQ ID NO: 1563264
ccagacuguuugguaauga

SEQ ID NO: 1807504 - RNA, 19 nt, Artificial Sequence
  Description of Artificial Sequence: Synthetic oligonucleotide
  Antisense strand to SEQ ID NO: 1807503
ucauuaccaaacagucugg

SEQ ID NO: 1807505 - RNA, 19 nt, Artificial Sequence
  Description of Artificial Sequence: Synthetic oligonucleotide
  Sense strand starting at position 808 of SEQ ID NO: 1563264
gguaaugaaucccucugca

SEQ ID NO: 1807506 - RNA, 19 nt, Artificial Sequence
  Description of Artificial Sequence: Synthetic oligonucleotide
  Antisense strand to SEQ ID NO: 1807505
ugcagagggauucauuacc

SEQ ID NO: 1807507 - RNA, 19 nt, Artificial Sequence
  Description of Artificial Sequence: Synthetic oligonucleotide
  Sense strand starting at position 1019 of SEQ ID NO: 1563264
aggugcacauuugaaagaa

SEQ ID NO: 1807508 - RNA, 19 nt, Artificial Sequence
  Description of Artificial Sequence: Synthetic oligonucleotide
  Antisense strand to SEQ ID NO: 1807507
uucuuucaaaugugcaccu

SEQ ID NO: 1807509 - RNA, 19 nt, Artificial Sequence
  Description of Artificial Sequence: Synthetic oligonucleotide
  Sense strand starting at position 1148 of SEQ ID NO: 1563264
auucguaccugacuguaaa

SEQ ID NO: 1807510 - RNA, 19 nt, Artificial Sequence
  Description of Artificial Sequence: Synthetic oligonucleotide
  Antisense strand to SEQ ID NO: 1807509
uuuacagucagguacgaau

SEQ ID NO: 1807511 - RNA, 19 nt, Artificial Sequence
  Description of Artificial Sequence: Synthetic oligonucleotide
  Sense strand starting at position 1407 of SEQ ID NO: 1563264
agguuaaugcuccaguuga

SEQ ID NO: 1807512 - RNA, 19 nt, Artificial Sequence
  Description of Artificial Sequence: Synthetic oligonucleotide
  Antisense strand to SEQ ID NO: 1807511
ucaacuggagcauuaaccu

SEQ ID NO: 1807513 - RNA, 19 nt, Artificial Sequence
  Description of Artificial Sequence: Synthetic oligonucleotide
  Sense strand starting at position 1420 of SEQ ID NO: 1563264
aguugaauuugcucugguu

SEQ ID NO: 1807514 - RNA, 19 nt, Artificial Sequence
  Description of Artificial Sequence: Synthetic oligonucleotide
  Antisense strand to SEQ ID NO: 1807513
aaccagagcaaauucaacu

SEQ ID NO: 1807515 - RNA, 19 nt, Artificial Sequence
  Description of Artificial Sequence: Synthetic oligonucleotide
  Sense strand starting at position 1422 of SEQ ID NO: 1563264
uugaauuugcucugguuua

SEQ ID NO: 1807516 - RNA, 19 nt, Artificial Sequence
  Description of Artificial Sequence: Synthetic oligonucleotide
  Antisense strand to SEQ ID NO: 1807515
uaaaccagagcaaauucaa

SEQ ID NO: 1807517 - RNA, 19 nt, Artificial Sequence
  Description of Artificial Sequence: Synthetic oligonucleotide
  Sense strand starting at position 1427 of SEQ ID NO: 1563264
uuugcucugguuuaagagu

SEQ ID NO: 1807518 - RNA, 19 nt, Artificial Sequence
  Description of Artificial Sequence: Synthetic oligonucleotide
  Antisense strand to SEQ ID NO: 1807517
acucuuaaaccagagcaaa

SEQ ID NO: 1807519 - RNA, 19 nt, Artificial Sequence
  Description of Artificial Sequence: Synthetic oligonucleotide
  Sense strand starting at position 1499 of SEQ ID NO: 1563264
ucugauagcuaucuaauga

SEQ ID NO: 1807520 - RNA, 19 nt, Artificial Sequence
  Description of Artificial Sequence: Synthetic oligonucleotide
  Antisense strand to SEQ ID NO: 1807519
ucauuagauagcuaucaga

SEQ ID NO: 1807521 - RNA, 19 nt, Artificial Sequence
  Description of Artificial Sequence: Synthetic oligonucleotide
  Sense strand starting at position 1581 of SEQ ID NO: 1563264
cagcuucuagcaggaaaga

SEQ ID NO: 1807522 - RNA, 19 nt, Artificial Sequence
  Description of Artificial Sequence: Synthetic oligonucleotide
  Antisense strand to SEQ ID NO: 1807521
ucuuuccugcuagaagcug

SEQ ID NO: 1807523 - RNA, 19 nt, Artificial Sequence
  Description of Artificial Sequence: Synthetic oligonucleotide
  Sense strand starting at position 1606 of SEQ ID NO: 1563264
ccuauuacaucacuaggua

SEQ ID NO: 1807524 - RNA, 19 nt, Artificial Sequence
  Description of Artificial Sequence: Synthetic oligonucleotide
  Antisense strand to SEQ ID NO: 1807523
uaccuagugauguaauagg

SEQ ID NO: 1807525 - RNA, 19 nt, Artificial Sequence
  Description of Artificial Sequence: Synthetic oligonucleotide
  Sense strand starting at position 1652 of SEQ ID NO: 1563264
uagucugguuuccuuagaa

SEQ ID NO: 1807526 - RNA, 19 nt, Artificial Sequence
  Description of Artificial Sequence: Synthetic oligonucleotide
  Antisense strand to SEQ ID NO: 1807525
uucuaaggaaaccagacua

SEQ ID NO: 1807527 - RNA, 19 nt, Artificial Sequence
  Description of Artificial Sequence: Synthetic oligonucleotide
  Sense strand starting at position 1719 of SEQ ID NO: 1563264
acaacagacugcuugcaau

SEQ ID NO: 1807528 - RNA, 19 nt, Artificial Sequence
  Description of Artificial Sequence: Synthetic oligonucleotide
  Antisense strand to SEQ ID NO: 1807527
auugcaagcagucuguugu

SEQ ID NO: 1807529 - RNA, 19 nt, Artificial Sequence
  Description of Artificial Sequence: Synthetic oligonucleotide
  Sense strand starting at position 1997 of SEQ ID NO: 1563264
augugaugucacuguugga

SEQ ID NO: 1807530 - RNA, 19 nt, Artificial Sequence
  Description of Artificial Sequence: Synthetic oligonucleotide
  Antisense strand to SEQ ID NO: 1807529
uccaacagugacaucacau

SEQ ID NO: 1807531 - RNA, 19 nt, Artificial Sequence
  Description of Artificial Sequence: Synthetic oligonucleotide
  Sense strand starting at position 2321 of SEQ ID NO: 1563264
accuaaugcugagugaaag

SEQ ID NO: 1807532 - RNA, 19 nt, Artificial Sequence
  Description of Artificial Sequence: Synthetic oligonucleotide
  Antisense strand to SEQ ID NO: 1807531
cuuucacucagcauuaggu

SEQ ID NO: 1807533 - RNA, 19 nt, Artificial Sequence
  Description of Artificial Sequence: Synthetic oligonucleotide
  Sense strand starting at position 2574 of SEQ ID NO: 1563264
ggaggugguuuaccugagu

SEQ ID NO: 1807534 - RNA, 19 nt, Artificial Sequence
  Description of Artificial Sequence: Synthetic oligonucleotide
  Antisense strand to SEQ ID NO: 1807533
acucagguaaaccaccucc

SEQ ID NO: 1807535 - RNA, 19 nt, Artificial Sequence
  Description of Artificial Sequence: Synthetic oligonucleotide
  Sense strand starting at position 2738 of SEQ ID NO: 1563264
cccagaguauagucaagaa

SEQ ID NO: 1807536 - RNA, 19 nt, Artificial Sequence
  Description of Artificial Sequence: Synthetic oligonucleotide
  Antisense strand to SEQ ID NO: 1807535
uucuugacuauacucuggg

SEQ ID NO: 1807537 - RNA, 19 nt, Artificial Sequence
  Description of Artificial Sequence: Synthetic oligonucleotide
  Sense strand starting at position 2762 of SEQ ID NO: 1563264
guuguuucugaguaguaau

SEQ ID NO: 1807538 - RNA, 19 nt, Artificial Sequence
  Description of Artificial Sequence: Synthetic oligonucleotide
  Antisense strand to SEQ ID NO: 1807537
auuacuacucagaaacaac

SEQ ID NO: 1807539 - RNA, 19 nt, Artificial Sequence
  Description of Artificial Sequence: Synthetic oligonucleotide
  Sense strand starting at position 2888 of SEQ ID NO: 1563264
aaggguugugaaggcuauu

SEQ ID NO: 1807540 - RNA, 19 nt, Artificial Sequence
  Description of Artificial Sequence: Synthetic oligonucleotide
  Antisense strand to SEQ ID NO: 1807539
aauagccuucacaacccuu

SEQ ID NO: 1807541 - RNA, 19 nt, Artificial Sequence
  Description of Artificial Sequence: Synthetic oligonucleotide
  Sense strand starting at position 2937 of SEQ ID NO: 1563264
aggucaguccgguaaagaa

SEQ ID NO: 1807542 - RNA, 19 nt, Artificial Sequence
  Description of Artificial Sequence: Synthetic oligonucleotide
  Antisense strand to SEQ ID NO: 1807541
uucuuuaccggacugaccu

SEQ ID NO: 1807543 - RNA, 19 nt, Artificial Sequence
  Description of Artificial Sequence: Synthetic oligonucleotide
  Sense strand starting at position 3013 of SEQ ID NO: 1563264
aaggacagccacuguuaaa

SEQ ID NO: 1807544 - RNA, 19 nt, Artificial Sequence
  Description of Artificial Sequence: Synthetic oligonucleotide
  Antisense strand to SEQ ID NO: 1807543
uuuaacaguggcuguccuu

SEQ ID NO: 1807545 - RNA, 19 nt, Artificial Sequence
  Description of Artificial Sequence: Synthetic oligonucleotide
  Sense strand starting at position 3044 of SEQ ID NO: 1563264
cacagugugcuguaauaac

SEQ ID NO: 1807546 - RNA, 19 nt, Artificial Sequence
  Description of Artificial Sequence: Synthetic oligonucleotide
  Antisense strand to SEQ ID NO: 1807545
guuauuacagcacacugug

SEQ ID NO: 1807547 - RNA, 19 nt, Artificial Sequence
  Description of Artificial Sequence: Synthetic oligonucleotide
  Sense strand starting at position 3072 of SEQ ID NO: 1563264
uguguagagcuuugaaaua

SEQ ID NO: 1807548 - RNA, 19 nt, Artificial Sequence
  Description of Artificial Sequence: Synthetic oligonucleotide
  Antisense strand to SEQ ID NO: 1807547
uauuucaaagcucuacaca

SEQ ID NO: 1807549 - RNA, 19 nt, Artificial Sequence
  Description of Artificial Sequence: Synthetic oligonucleotide
  Sense strand starting at position 3106 of SEQ ID NO: 1563264
auucuuaagguucgauaca

SEQ ID NO: 1807550 - RNA, 19 nt, Artificial Sequence
  Description of Artificial Sequence: Synthetic oligonucleotide
  Antisense strand to SEQ ID NO: 1807549
uguaucgaaccuuaagaau

SEQ ID NO: 1807551 - RNA, 19 nt, Artificial Sequence
  Description of Artificial Sequence: Synthetic oligonucleotide
  Sense strand starting at position 3116 of SEQ ID NO: 1563264
uucgauacacccugaaaug

SEQ ID NO: 1807552 - RNA, 19 nt, Artificial Sequence
  Description of Artificial Sequence: Synthetic oligonucleotide
  Antisense strand to SEQ ID NO: 1807551
cauuucaggguguaucgaa

SEQ ID NO: 1807553 - RNA, 19 nt, Artificial Sequence
  Description of Artificial Sequence: Synthetic oligonucleotide
  Sense strand starting at position 3117 of SEQ ID NO: 1563264
ucgauacacccugaaaugu

SEQ ID NO: 1807554 - RNA, 19 nt, Artificial Sequence
  Description of Artificial Sequence: Synthetic oligonucleotide
  Antisense strand to SEQ ID NO: 1807553
acauuucaggguguaucga

SEQ ID NO: 1807555 - RNA, 19 nt, Artificial Sequence
  Description of Artificial Sequence: Synthetic oligonucleotide
  Sense strand starting at position 128 of SEQ ID NO: 1563265
ggacaauauuugcaaagau

SEQ ID NO: 1807556 - RNA, 19 nt, Artificial Sequence
  Description of Artificial Sequence: Synthetic oligonucleotide
  Antisense strand to SEQ ID NO: 1807555
aucuuugcaaauauugucc

SEQ ID NO: 1807557 - RNA, 19 nt, Artificial Sequence
  Description of Artificial Sequence: Synthetic oligonucleotide
  Sense strand starting at position 493 of SEQ ID NO: 1563265
aaaugagaggucugacgac

SEQ ID NO: 1807558 - RNA, 19 nt, Artificial Sequence
  Description of Artificial Sequence: Synthetic oligonucleotide
  Antisense strand to SEQ ID NO: 1807557
gucgucagaccucucauuu

SEQ ID NO: 1807559 - RNA, 19 nt, Artificial Sequence
  Description of Artificial Sequence: Synthetic oligonucleotide
  Sense strand starting at position 506 of SEQ ID NO: 1563265
gacgacuuaguuugacuua

SEQ ID NO: 1807560 - RNA, 19 nt, Artificial Sequence
  Description of Artificial Sequence: Synthetic oligonucleotide
  Antisense strand to SEQ ID NO: 1807559
uaagucaaacuaagucguc

SEQ ID NO: 1807561 - RNA, 19 nt, Artificial Sequence
  Description of Artificial Sequence: Synthetic oligonucleotide
  Sense strand starting at position 509 of SEQ ID NO: 1563265
gacuuaguuugacuuagag

SEQ ID NO: 1807562 - RNA, 19 nt, Artificial Sequence
  Description of Artificial Sequence: Synthetic oligonucleotide
  Antisense strand to SEQ ID NO: 1807561
cucuaagucaaacuaaguc

SEQ ID NO: 1807563 - RNA, 19 nt, Artificial Sequence
  Description of Artificial Sequence: Synthetic oligonucleotide
  Sense strand starting at position 515 of SEQ ID NO: 1563265
guuugacuuagaggcuuaa

SEQ ID NO: 1807564 - RNA, 19 nt, Artificial Sequence
  Description of Artificial Sequence: Synthetic oligonucleotide
  Antisense strand to SEQ ID NO: 1807563
uuaagccucuaagucaaac

SEQ ID NO: 1807565 - RNA, 19 nt, Artificial Sequence
  Description of Artificial Sequence: Synthetic oligonucleotide
  Sense strand starting at position 731 of SEQ ID NO: 1563265
ggcuaauacuagcuugaga

SEQ ID NO: 1807566 - RNA, 19 nt, Artificial Sequence
  Description of Artificial Sequence: Synthetic oligonucleotide
  Antisense strand to SEQ ID NO: 1807565
ucucaagcuaguauuagcc

SEQ ID NO: 1807567 - RNA, 19 nt, Artificial Sequence
  Description of Artificial Sequence: Synthetic oligonucleotide
  Sense strand starting at position 733 of SEQ ID NO: 1563265
cuaauacuagcuugagaau

SEQ ID NO: 1807568 - RNA, 19 nt, Artificial Sequence
  Description of Artificial Sequence: Synthetic oligonucleotide
  Antisense strand to SEQ ID NO: 1807567
auucucaagcuaguauuag

SEQ ID NO: 1807569 - RNA, 19 nt, Artificial Sequence
  Description of Artificial Sequence: Synthetic oligonucleotide
  Sense strand starting at position 751 of SEQ ID NO: 1563265
ucguguuggccuucuuuaa

SEQ ID NO: 1807570 - RNA, 19 nt, Artificial Sequence
  Description of Artificial Sequence: Synthetic oligonucleotide
  Antisense strand to SEQ ID NO: 1807569
uuaaagaaggccaacacga

SEQ ID NO: 1807571 - RNA, 19 nt, Artificial Sequence
  Description of Artificial Sequence: Synthetic oligonucleotide
  Sense strand starting at position 752 of SEQ ID NO: 1563265
cguguuggccuucuuuaau

SEQ ID NO: 1807572 - RNA, 19 nt, Artificial Sequence
  Description of Artificial Sequence: Synthetic oligonucleotide
  Antisense strand to SEQ ID NO: 1807571
auuaaagaaggccaacacg

SEQ ID NO: 1807573 - RNA, 19 nt, Artificial Sequence
  Description of Artificial Sequence: Synthetic oligonucleotide
  Sense strand starting at position 777 of SEQ ID NO: 1563265
aggguuaauguguacacca

SEQ ID NO: 1807574 - RNA, 19 nt, Artificial Sequence
  Description of Artificial Sequence: Synthetic oligonucleotide
  Antisense strand to SEQ ID NO: 1807573
ugguguacacauuaacccu

SEQ ID NO: 1807575 - RNA, 19 nt, Artificial Sequence
  Description of Artificial Sequence: Synthetic oligonucleotide
  Sense strand starting at position 818 of SEQ ID NO: 1563265
aagacagugcuuuggacaa

SEQ ID NO: 1807576 - RNA, 19 nt, Artificial Sequence
  Description of Artificial Sequence: Synthetic oligonucleotide
  Antisense strand to SEQ ID NO: 1807575
uuguccaaagcacugucuu

SEQ ID NO: 1807577 - RNA, 19 nt, Artificial Sequence
  Description of Artificial Sequence: Synthetic oligonucleotide
  Sense strand starting at position 1216 of SEQ ID NO: 1563265
uguuaaucaaaggaaacgu

SEQ ID NO: 1807578 - RNA, 19 nt, Artificial Sequence
  Description of Artificial Sequence: Synthetic oligonucleotide
  Antisense strand to SEQ ID NO: 1807577
acguuuccuuugauuaaca

SEQ ID NO: 1807579 - RNA, 19 nt, Artificial Sequence
  Description of Artificial Sequence: Synthetic oligonucleotide
  Sense strand starting at position 2294 of SEQ ID NO: 1563265
gggagaagguuuguccuua

SEQ ID NO: 1807580 - RNA, 19 nt, Artificial Sequence
  Description of Artificial Sequence: Synthetic oligonucleotide
  Antisense strand to SEQ ID NO: 1807579
uaaggacaaaccuucuccc

SEQ ID NO: 1807581 - RNA, 19 nt, Artificial Sequence
  Description of Artificial Sequence: Synthetic oligonucleotide
  Sense strand starting at position 2295 of SEQ ID NO: 1563265
ggagaagguuuguccuuag

SEQ ID NO: 1807582 - RNA, 19 nt, Artificial Sequence
  Description of Artificial Sequence: Synthetic oligonucleotide
  Antisense strand to SEQ ID NO: 1807581
cuaaggacaaaccuucucc

SEQ ID NO: 1807583 - RNA, 19 nt, Artificial Sequence
  Description of Artificial Sequence: Synthetic oligonucleotide
  Sense strand starting at position 2298 of SEQ ID NO: 1563265
gaagguuuguccuuagaau

SEQ ID NO: 1807584 - RNA, 19 nt, Artificial Sequence
  Description of Artificial Sequence: Synthetic oligonucleotide
  Antisense strand to SEQ ID NO: 1807583
auucuaaggacaaaccuuc

SEQ ID NO: 1807585 - RNA, 19 nt, Artificial Sequence
  Description of Artificial Sequence: Synthetic oligonucleotide
  Sense strand starting at position 2299 of SEQ ID NO: 1563265
aagguuuguccuuagaaug

SEQ ID NO: 1807586 - RNA, 19 nt, Artificial Sequence
  Description of Artificial Sequence: Synthetic oligonucleotide
  Antisense strand to SEQ ID NO: 1807585
cauucuaaggacaaaccuu

SEQ ID NO: 1807587 - RNA, 19 nt, Artificial Sequence
  Description of Artificial Sequence: Synthetic oligonucleotide
  Sense strand starting at position 2304 of SEQ ID NO: 1563265
uuguccuuagaaugaaacu

SEQ ID NO: 1807588 - RNA, 19 nt, Artificial Sequence
  Description of Artificial Sequence: Synthetic oligonucleotide
  Antisense strand to SEQ ID NO: 1807587
aguuucauucuaaggacaa

SEQ ID NO: 1807589 - RNA, 19 nt, Artificial Sequence
  Description of Artificial Sequence: Synthetic oligonucleotide
  Sense strand starting at position 2561 of SEQ ID NO: 1563265
uaggaauagugaucaaacg

SEQ ID NO: 1807590 - RNA, 19 nt, Artificial Sequence
  Description of Artificial Sequence: Synthetic oligonucleotide
  Antisense strand to SEQ ID NO: 1807589
cguuugaucacuauuccua

SEQ ID NO: 1807591 - RNA, 19 nt, Artificial Sequence
  Description of Artificial Sequence: Synthetic oligonucleotide
  Sense strand starting at position 2568 of SEQ ID NO: 1563265
agugaucaaacguagugau

SEQ ID NO: 1807592 - RNA, 19 nt, Artificial Sequence
  Description of Artificial Sequence: Synthetic oligonucleotide
  Antisense strand to SEQ ID NO: 1807591
aucacuacguuugaucacu

SEQ ID NO: 1807593 - RNA, 19 nt, Artificial Sequence
  Description of Artificial Sequence: Synthetic oligonucleotide
  Sense strand starting at position 2743 of SEQ ID NO: 1563265
ggucuaacuuacuccaaag

SEQ ID NO: 1807594 - RNA, 19 nt, Artificial Sequence
  Description of Artificial Sequence: Synthetic oligonucleotide
  Antisense strand to SEQ ID NO: 1807593
cuuuggaguaaguuagacc

SEQ ID NO: 1807595 - RNA, 19 nt, Artificial Sequence
  Description of Artificial Sequence: Synthetic oligonucleotide
  Sense strand starting at position 2762 of SEQ ID NO: 1563265
cccuuacccuagguuugaa

SEQ ID NO: 1807596 - RNA, 19 nt, Artificial Sequence
  Description of Artificial Sequence: Synthetic oligonucleotide
  Antisense strand to SEQ ID NO: 1807595
uucaaaccuaggguaaggg

SEQ ID NO: 1807597 - RNA, 19 nt, Artificial Sequence
  Description of Artificial Sequence: Synthetic oligonucleotide
  Sense strand starting at position 2765 of SEQ ID NO: 1563265
uuacccuagguuugaaaga

SEQ ID NO: 1807598 - RNA, 19 nt, Artificial Sequence
  Description of Artificial Sequence: Synthetic oligonucleotide
  Antisense strand to SEQ ID NO: 1807597
ucuuucaaaccuaggguaa

SEQ ID NO: 1807599 - RNA, 19 nt, Artificial Sequence
  Description of Artificial Sequence: Synthetic oligonucleotide
  Sense strand starting at position 2829 of SEQ ID NO: 1563265
ugcacugacucacuuaaga

SEQ ID NO: 1807600 - RNA, 19 nt, Artificial Sequence
  Description of Artificial Sequence: Synthetic oligonucleotide
  Antisense strand to SEQ ID NO: 1807599
ucuuaagugagucagugca

SEQ ID NO: 1807601 - RNA, 19 nt, Artificial Sequence
  Description of Artificial Sequence: Synthetic oligonucleotide
  Sense strand starting at position 2921 of SEQ ID NO: 1563265
gguacucuacugcagugaa

SEQ ID NO: 1807602 - RNA, 19 nt, Artificial Sequence
  Description of Artificial Sequence: Synthetic oligonucleotide
  Antisense strand to SEQ ID NO: 1807601
uucacugcaguagaguacc

SEQ ID NO: 1807603 - RNA, 19 nt, Artificial Sequence
  Description of Artificial Sequence: Synthetic oligonucleotide
  Sense strand starting at position 2924 of SEQ ID NO: 1563265
acucuacugcagugaacaa

SEQ ID NO: 1807604 - RNA, 19 nt, Artificial Sequence
  Description of Artificial Sequence: Synthetic oligonucleotide
  Antisense strand to SEQ ID NO: 1807603
uuguucacugcaguagagu

SEQ ID NO: 1807605 - RNA, 19 nt, Artificial Sequence
  Description of Artificial Sequence: Synthetic oligonucleotide
  Sense strand starting at position 2951 of SEQ ID NO: 1563265
gccuacuuuggacaagcua

SEQ ID NO: 1807606 - RNA, 19 nt, Artificial Sequence
  Description of Artificial Sequence: Synthetic oligonucleotide
  Antisense strand to SEQ ID NO: 1807605
uagcuuguccaaaguaggc

SEQ ID NO: 1807607 - RNA, 19 nt, Artificial Sequence
  Description of Artificial Sequence: Synthetic oligonucleotide
  Sense strand starting at position 2964 of SEQ ID NO: 1563265
aagcuaaguggucagggau

SEQ ID NO: 1807608 - RNA, 19 nt, Artificial Sequence
  Description of Artificial Sequence: Synthetic oligonucleotide
  Antisense strand to SEQ ID NO: 1807607
aucccugaccacuuagcuu

SEQ ID NO: 1807609 - RNA, 19 nt, Artificial Sequence
  Description of Artificial Sequence: Synthetic oligonucleotide
  Sense strand starting at position 3032 of SEQ ID NO: 1563265
uuuguaauccgacauaguc

SEQ ID NO: 1807610 - RNA, 19 nt, Artificial Sequence
  Description of Artificial Sequence: Synthetic oligonucleotide
  Antisense strand to SEQ ID NO: 1807609
gacuaugucggauuacaaa

SEQ ID NO: 1807611 - RNA, 19 nt, Artificial Sequence
  Description of Artificial Sequence: Synthetic oligonucleotide
  Sense strand starting at position 3142 of SEQ ID NO: 1563265
aguggaguuuaggugaauu

SEQ ID NO: 1807612 - RNA, 19 nt, Artificial Sequence
  Description of Artificial Sequence: Synthetic oligonucleotide
  Antisense strand to SEQ ID NO: 1807611
aauucaccuaaacuccacu

SEQ ID NO: 1807613 - RNA, 19 nt, Artificial Sequence
  Description of Artificial Sequence: Synthetic oligonucleotide
  Sense strand starting at position 3373 of SEQ ID NO: 1563265
uuauguccuccagaugcau

SEQ ID NO: 1807614 - RNA, 19 nt, Artificial Sequence
  Description of Artificial Sequence: Synthetic oligonucleotide
  Antisense strand to SEQ ID NO: 1807613
augcaucuggaggacauaa

SEQ ID NO: 1807615 - RNA, 19 nt, Artificial Sequence
  Description of Artificial Sequence: Synthetic oligonucleotide
  Sense strand starting at position 3485 of SEQ ID NO: 1563265
agugguggucacugaaaua

SEQ ID NO: 1807616 - RNA, 19 nt, Artificial Sequence
  Description of Artificial Sequence: Synthetic oligonucleotide
  Antisense strand to SEQ ID NO: 1807615
uauuucagugaccaccacu

SEQ ID NO: 1807617 - RNA, 19 nt, Artificial Sequence
  Description of Artificial Sequence: Synthetic oligonucleotide
  Sense strand starting at position 3591 of SEQ ID NO: 1563265
uuauuccggccugaugaau

SEQ ID NO: 1807618 - RNA, 19 nt, Artificial Sequence
  Description of Artificial Sequence: Synthetic oligonucleotide
  Antisense strand to SEQ ID NO: 1807617
auucaucaggccggaauaa

SEQ ID NO: 1807619 - RNA, 19 nt, Artificial Sequence
  Description of Artificial Sequence: Synthetic oligonucleotide
  Sense strand starting at position 3600 of SEQ ID NO: 1563265
ccugaugaauggccggauu

SEQ ID NO: 1807620 - RNA, 19 nt, Artificial Sequence
  Description of Artificial Sequence: Synthetic oligonucleotide
  Antisense strand to SEQ ID NO: 1807619
aauccggccauucaucagg

SEQ ID NO: 1807621 - RNA, 19 nt, Artificial Sequence
  Description of Artificial Sequence: Synthetic oligonucleotide
  Sense strand starting at position 3683 of SEQ ID NO: 1563265
gcacucaugguguauggga

SEQ ID NO: 1807622 - RNA, 19 nt, Artificial Sequence
  Description of Artificial Sequence: Synthetic oligonucleotide
  Antisense strand to SEQ ID NO: 1807621
ucccauacaccaugagugc

SEQ ID NO: 1807623 - RNA, 19 nt, Artificial Sequence
  Description of Artificial Sequence: Synthetic oligonucleotide
  Sense strand starting at position 3685 of SEQ ID NO: 1563265
acucaugguguaugggaua

SEQ ID NO: 1807624 - RNA, 19 nt, Artificial Sequence
  Description of Artificial Sequence: Synthetic oligonucleotide
  Antisense strand to SEQ ID NO: 1807623
uaucccauacaccaugagu

SEQ ID NO: 1807625 - RNA, 19 nt, Artificial Sequence
  Description of Artificial Sequence: Synthetic oligonucleotide
  Sense strand starting at position 3727 of SEQ ID NO: 1563265
aguacaggccucuaauaaa

SEQ ID NO: 1807626 - RNA, 19 nt, Artificial Sequence
  Description of Artificial Sequence: Synthetic oligonucleotide
  Antisense strand to SEQ ID NO: 1807625
uuuauuagaggccuguacu

SEQ ID NO: 1807627 - RNA, 19 nt, Artificial Sequence
  Description of Artificial Sequence: Synthetic oligonucleotide
  Sense strand starting at position 3746 of SEQ ID NO: 1563265
gguaaauccaaguggaggu

SEQ ID NO: 1807628 - RNA, 19 nt, Artificial Sequence
  Description of Artificial Sequence: Synthetic oligonucleotide
  Antisense strand to SEQ ID NO: 1807627
accuccacuuggauuuacc

SEQ ID NO: 1807629 - RNA, 19 nt, Artificial Sequence
  Description of Artificial Sequence: Synthetic oligonucleotide
  Sense strand starting at position 3792 of SEQ ID NO: 1563265
ggaaguuauaugugaggac

SEQ ID NO: 1807630 - RNA, 19 nt, Artificial Sequence
  Description of Artificial Sequence: Synthetic oligonucleotide
  Antisense strand to SEQ ID NO: 1807629
guccucacauauaacuucc

SEQ ID NO: 1807631 - RNA, 19 nt, Artificial Sequence
  Description of Artificial Sequence: Synthetic oligonucleotide
  Sense strand starting at position 3827 of SEQ ID NO: 1563265
gugguugaaguuuagggua

SEQ ID NO: 1807632 - RNA, 19 nt, Artificial Sequence
  Description of Artificial Sequence: Synthetic oligonucleotide
  Antisense strand to SEQ ID NO: 1807631
uacccuaaacuucaaccac

SEQ ID NO: 1807633 - RNA, 19 nt, Artificial Sequence
  Description of Artificial Sequence: Synthetic oligonucleotide
  Sense strand starting at position 3967 of SEQ ID NO: 1563265
gagguuucugagcaaggca

SEQ ID NO: 1807634 - RNA, 19 nt, Artificial Sequence
  Description of Artificial Sequence: Synthetic oligonucleotide
  Antisense strand to SEQ ID NO: 1807633
ugccuugcucagaaaccuc

SEQ ID NO: 1807635 - RNA, 19 nt, Artificial Sequence
  Description of Artificial Sequence: Synthetic oligonucleotide
  Sense strand starting at position 83 of SEQ ID NO: 1563266
guaaauuacagauggcaga

SEQ ID NO: 1807636 - RNA, 19 nt, Artificial Sequence
  Description of Artificial Sequence: Synthetic oligonucleotide
  Antisense strand to SEQ ID NO: 1807635
ucugccaucuguaauuuac

SEQ ID NO: 1807637 - RNA, 19 nt, Artificial Sequence
  Description of Artificial Sequence: Synthetic oligonucleotide
  Sense strand starting at position 143 of SEQ ID NO: 1563266
agaauauguguauauguuc

SEQ ID NO: 1807638 - RNA, 19 nt, Artificial Sequence
  Description of Artificial Sequence: Synthetic oligonucleotide
  Antisense strand to SEQ ID NO: 1807637
gaacauauacacauauucu

SEQ ID NO: 1807639 - RNA, 19 nt, Artificial Sequence
  Description of Artificial Sequence: Synthetic oligonucleotide
  Sense strand starting at position 282 of SEQ ID NO: 1563266
aaaccuguacuugggacaa

SEQ ID NO: 1807640 - RNA, 19 nt, Artificial Sequence
  Description of Artificial Sequence: Synthetic oligonucleotide
  Antisense strand to SEQ ID NO: 1807639
uugucccaaguacagguuu

SEQ ID NO: 1807641 - RNA, 19 nt, Artificial Sequence
  Description of Artificial Sequence: Synthetic oligonucleotide
  Sense strand starting at position 509 of SEQ ID NO: 1563266
auaccuauuguggguugaa

SEQ ID NO: 1807642 - RNA, 19 nt, Artificial Sequence
  Description of Artificial Sequence: Synthetic oligonucleotide
  Antisense strand to SEQ ID NO: 1807641
uucaacccacaauagguau

SEQ ID NO: 1807643 - RNA, 19 nt, Artificial Sequence
  Description of Artificial Sequence: Synthetic oligonucleotide
  Sense strand starting at position 510 of SEQ ID NO: 1563266
uaccuauuguggguugaag

SEQ ID NO: 1807644 - RNA, 19 nt, Artificial Sequence
  Description of Artificial Sequence: Synthetic oligonucleotide
  Antisense strand to SEQ ID NO: 1807643
cuucaacccacaauaggua

SEQ ID NO: 1807645 - RNA, 19 nt, Artificial Sequence
  Description of Artificial Sequence: Synthetic oligonucleotide
  Sense strand starting at position 512 of SEQ ID NO: 1563266
ccuauuguggguugaagaa

SEQ ID NO: 1807646 - RNA, 19 nt, Artificial Sequence
  Description of Artificial Sequence: Synthetic oligonucleotide
  Antisense strand to SEQ ID NO: 1807645
uucuucaacccacaauagg

SEQ ID NO: 1807647 - RNA, 19 nt, Artificial Sequence
  Description of Artificial Sequence: Synthetic oligonucleotide
  Sense strand starting at position 598 of SEQ ID NO: 1563266
ccacguggcccuuauacaa

SEQ ID NO: 1807648 - RNA, 19 nt, Artificial Sequence
  Description of Artificial Sequence: Synthetic oligonucleotide
  Antisense strand to SEQ ID NO: 1807647
uuguauaagggccacgugg

SEQ ID NO: 1807649 - RNA, 19 nt, Artificial Sequence
  Description of Artificial Sequence: Synthetic oligonucleotide
  Sense strand starting at position 667 of SEQ ID NO: 1563266
ggcaaaugaccuuggcaag

SEQ ID NO: 1807650 - RNA, 19 nt, Artificial Sequence
  Description of Artificial Sequence: Synthetic oligonucleotide
  Antisense strand to SEQ ID NO: 1807649
cuugccaaggucauuugcc

SEQ ID NO: 1807651 - RNA, 19 nt, Artificial Sequence
  Description of Artificial Sequence: Synthetic oligonucleotide
  Sense strand starting at position 679 of SEQ ID NO: 1563266
uggcaagucucucugagaa

SEQ ID NO: 1807652 - RNA, 19 nt, Artificial Sequence
  Description of Artificial Sequence: Synthetic oligonucleotide
  Antisense strand to SEQ ID NO: 1807651
uucucagagagacuugcca

SEQ ID NO: 1807653 - RNA, 19 nt, Artificial Sequence
  Description of Artificial Sequence: Synthetic oligonucleotide
  Sense strand starting at position 845 of SEQ ID NO: 1563266
uggaguugaaagcauaagu

SEQ ID NO: 1807654 - RNA, 19 nt, Artificial Sequence
  Description of Artificial Sequence: Synthetic oligonucleotide
  Antisense strand to SEQ ID NO: 1807653
acuuaugcuuucaacucca

SEQ ID NO: 1807655 - RNA, 19 nt, Artificial Sequence
  Description of Artificial Sequence: Synthetic oligonucleotide
  Sense strand starting at position 901 of SEQ ID NO: 1563266
caaggaguuuacuuuguau

SEQ ID NO: 1807656 - RNA, 19 nt, Artificial Sequence
  Description of Artificial Sequence: Synthetic oligonucleotide
  Antisense strand to SEQ ID NO: 1807655
auacaaaguaaacuccuug

SEQ ID NO: 1807657 - RNA, 19 nt, Artificial Sequence
  Description of Artificial Sequence: Synthetic oligonucleotide
  Sense strand starting at position 930 of SEQ ID NO: 1563266
acacuagggcucugagauu

SEQ ID NO: 1807658 - RNA, 19 nt, Artificial Sequence
  Description of Artificial Sequence: Synthetic oligonucleotide
  Antisense strand to SEQ ID NO: 1807657
aaucucagagcccuagugu

SEQ ID NO: 1807659 - RNA, 19 nt, Artificial Sequence
  Description of Artificial Sequence: Synthetic oligonucleotide
  Sense strand starting at position 1031 of SEQ ID NO: 1563266
gagauuauaugggaaagga

SEQ ID NO: 1807660 - RNA, 19 nt, Artificial Sequence
  Description of Artificial Sequence: Synthetic oligonucleotide
  Antisense strand to SEQ ID NO: 1807659
uccuuucccauauaaucuc

SEQ ID NO: 1807661 - RNA, 19 nt, Artificial Sequence
  Description of Artificial Sequence: Synthetic oligonucleotide
  Sense strand starting at position 1139 of SEQ ID NO: 1563266
cuuugcgacuauuuacuau

SEQ ID NO: 1807662 - RNA, 19 nt, Artificial Sequence
  Description of Artificial Sequence: Synthetic oligonucleotide
  Antisense strand to SEQ ID NO: 1807661
auaguaaauagucgcaaag

SEQ ID NO: 1807663 - RNA, 19 nt, Artificial Sequence
  Description of Artificial Sequence: Synthetic oligonucleotide
  Sense strand starting at position 1615 of SEQ ID NO: 1563266
acuuguccucuguauugaa

SEQ ID NO: 1807664 - RNA, 19 nt, Artificial Sequence
  Description of Artificial Sequence: Synthetic oligonucleotide
  Antisense strand to SEQ ID NO: 1807663
uucaauacagaggacaagu

SEQ ID NO: 1807665 - RNA, 19 nt, Artificial Sequence
  Description of Artificial Sequence: Synthetic oligonucleotide
  Sense strand starting at position 1745 of SEQ ID NO: 1563266
gaaauacagucaccuggua

SEQ ID NO: 1807666 - RNA, 19 nt, Artificial Sequence
  Description of Artificial Sequence: Synthetic oligonucleotide
  Antisense strand to SEQ ID NO: 1807665
uaccaggugacuguauuuc

SEQ ID NO: 1807667 - RNA, 19 nt, Artificial Sequence
  Description of Artificial Sequence: Synthetic oligonucleotide
  Sense strand starting at position 2084 of SEQ ID NO: 1563266
gggccucuucacgaguuaa

SEQ ID NO: 1807668 - RNA, 19 nt, Artificial Sequence
  Description of Artificial Sequence: Synthetic oligonucleotide
  Antisense strand to SEQ ID NO: 1807667
uuaacucgugaagaggccc

SEQ ID NO: 1807669 - RNA, 19 nt, Artificial Sequence
  Description of Artificial Sequence: Synthetic oligonucleotide
  Sense strand starting at position 2096 of SEQ ID NO: 1563266
gaguuaaguuggcuggaau

SEQ ID NO: 1807670 - RNA, 19 nt, Artificial Sequence
  Description of Artificial Sequence: Synthetic oligonucleotide
  Antisense strand to SEQ ID NO: 1807669
auuccagccaacuuaacuc

SEQ ID NO: 1807671 - RNA, 19 nt, Artificial Sequence
  Description of Artificial Sequence: Synthetic oligonucleotide
  Sense strand starting at position 2097 of SEQ ID NO: 1563266
aguuaaguuggcuggaaug

SEQ ID NO: 1807672 - RNA, 19 nt, Artificial Sequence
  Description of Artificial Sequence: Synthetic oligonucleotide
  Antisense strand to SEQ ID NO: 1807671
cauuccagccaacuuaacu

SEQ ID NO: 1807673 - RNA, 19 nt, Artificial Sequence
  Description of Artificial Sequence: Synthetic oligonucleotide
  Sense strand starting at position 2099 of SEQ ID NO: 1563266
uuaaguuggcuggaaugua

SEQ ID NO: 1807674 - RNA, 19 nt, Artificial Sequence
  Description of Artificial Sequence: Synthetic oligonucleotide
  Antisense strand to SEQ ID NO: 1807673
uacauuccagccaacuuaa

SEQ ID NO: 1807675 - RNA, 19 nt, Artificial Sequence
  Description of Artificial Sequence: Synthetic oligonucleotide
  Sense strand starting at position 2140 of SEQ ID NO: 1563266
aagacuugaucucugaugu

SEQ ID NO: 1807676 - RNA, 19 nt, Artificial Sequence
  Description of Artificial Sequence: Synthetic oligonucleotide
  Antisense strand to SEQ ID NO: 1807675
acaucagagaucaagucuu

SEQ ID NO: 1807677 - RNA, 19 nt, Artificial Sequence
  Description of Artificial Sequence: Synthetic oligonucleotide
  Sense strand starting at position 2141 of SEQ ID NO: 1563266
agacuugaucucugaugua

SEQ ID NO: 1807678 - RNA, 19 nt, Artificial Sequence
  Description of Artificial Sequence: Synthetic oligonucleotide
  Antisense strand to SEQ ID NO: 1807677
uacaucagagaucaagucu

SEQ ID NO: 1807679 - RNA, 19 nt, Artificial Sequence
  Description of Artificial Sequence: Synthetic oligonucleotide
  Sense strand starting at position 2185 of SEQ ID NO: 1563266
gucagcacagucuaagauu

SEQ ID NO: 1807680 - RNA, 19 nt, Artificial Sequence
  Description of Artificial Sequence: Synthetic oligonucleotide
  Antisense strand to SEQ ID NO: 1807679
aaucuuagacugugcugac

SEQ ID NO: 1807681 - RNA, 19 nt, Artificial Sequence
  Description of Artificial Sequence: Synthetic oligonucleotide
  Sense strand starting at position 2216 of SEQ ID NO: 1563266
uuuaaagaacaguguauga

SEQ ID NO: 1807682 - RNA, 19 nt, Artificial Sequence
  Description of Artificial Sequence: Synthetic oligonucleotide
  Antisense strand to SEQ ID NO: 1807681
ucauacacuguucuuuaaa

SEQ ID NO: 1807683 - RNA, 19 nt, Artificial Sequence
  Description of Artificial Sequence: Synthetic oligonucleotide
  Sense strand starting at position 2227 of SEQ ID NO: 1563266
guguaugauucagugauga

SEQ ID NO: 1807684 - RNA, 19 nt, Artificial Sequence
  Description of Artificial Sequence: Synthetic oligonucleotide
  Antisense strand to SEQ ID NO: 1807683
ucaucacugaaucauacac

SEQ ID NO: 1807685 - RNA, 19 nt, Artificial Sequence
  Description of Artificial Sequence: Synthetic oligonucleotide
  Sense strand starting at position 2481 of SEQ ID NO: 1563266
uuugaugaacggugggaau

SEQ ID NO: 1807686 - RNA, 19 nt, Artificial Sequence
  Description of Artificial Sequence: Synthetic oligonucleotide
  Antisense strand to SEQ ID NO: 1807685
auucccaccguucaucaaa

SEQ ID NO: 1807687 - RNA, 19 nt, Artificial Sequence
  Description of Artificial Sequence: Synthetic oligonucleotide
  Sense strand starting at position 2624 of SEQ ID NO: 1563266
ugaggaaucuaugcaaaug

SEQ ID NO: 1807688 - RNA, 19 nt, Artificial Sequence
  Description of Artificial Sequence: Synthetic oligonucleotide
  Antisense strand to SEQ ID NO: 1807687
cauuugcauagauuccuca

SEQ ID NO: 1807689 - RNA, 19 nt, Artificial Sequence
  Description of Artificial Sequence: Synthetic oligonucleotide
  Sense strand starting at position 2724 of SEQ ID NO: 1563266
ggacaaggcuuccuccaga

SEQ ID NO: 1807690 - RNA, 19 nt, Artificial Sequence
  Description of Artificial Sequence: Synthetic oligonucleotide
  Antisense strand to SEQ ID NO: 1807689
ucuggaggaagccuugucc

SEQ ID NO: 1807691 - RNA, 19 nt, Artificial Sequence
  Description of Artificial Sequence: Synthetic oligonucleotide
  Sense strand starting at position 2729 of SEQ ID NO: 1563266
aggcuuccuccagacuguu

SEQ ID NO: 1807692 - RNA, 19 nt, Artificial Sequence
  Description of Artificial Sequence: Synthetic oligonucleotide
  Antisense strand to SEQ ID NO: 1807691
aacagucuggaggaagccu

SEQ ID NO: 1807693 - RNA, 19 nt, Artificial Sequence
  Description of Artificial Sequence: Synthetic oligonucleotide
  Sense strand starting at position 2738 of SEQ ID NO: 1563266
ccagacuguuugguaauga

SEQ ID NO: 1807694 - RNA, 19 nt, Artificial Sequence
  Description of Artificial Sequence: Synthetic oligonucleotide
  Antisense strand to SEQ ID NO: 1807693
ucauuaccaaacagucugg

SEQ ID NO: 1807695 - RNA, 19 nt, Artificial Sequence
  Description of Artificial Sequence: Synthetic oligonucleotide
  Sense strand starting at position 2749 of SEQ ID NO: 1563266
gguaaugaaucccucugca

SEQ ID NO: 1807696 - RNA, 19 nt, Artificial Sequence
  Description of Artificial Sequence: Synthetic oligonucleotide
  Antisense strand to SEQ ID NO: 1807695
ugcagagggauucauuacc

SEQ ID NO: 1807697 - RNA, 19 nt, Artificial Sequence
  Description of Artificial Sequence: Synthetic oligonucleotide
  Sense strand starting at position 2960 of SEQ ID NO: 1563266
aggugcacauuugaaagaa

SEQ ID NO: 1807698 - RNA, 19 nt, Artificial Sequence
  Description of Artificial Sequence: Synthetic oligonucleotide
  Antisense strand to SEQ ID NO: 1807697
uucuuucaaaugugcaccu

SEQ ID NO: 1807699 - RNA, 19 nt, Artificial Sequence
  Description of Artificial Sequence: Synthetic oligonucleotide
  Sense strand starting at position 3348 of SEQ ID NO: 1563266
agguuaaugcuccaguuga

SEQ ID NO: 1807700 - RNA, 19 nt, Artificial Sequence
  Description of Artificial Sequence: Synthetic oligonucleotide
  Antisense strand to SEQ ID NO: 1807699
ucaacuggagcauuaaccu

SEQ ID NO: 1807701 - RNA, 19 nt, Artificial Sequence
  Description of Artificial Sequence: Synthetic oligonucleotide
  Sense strand starting at position 3361 of SEQ ID NO: 1563266
aguugaauuugcucugguu

SEQ ID NO: 1807702 - RNA, 19 nt, Artificial Sequence
  Description of Artificial Sequence: Synthetic oligonucleotide
  Antisense strand to SEQ ID NO: 1807701
aaccagagcaaauucaacu

SEQ ID NO: 1807703 - RNA, 19 nt, Artificial Sequence
  Description of Artificial Sequence: Synthetic oligonucleotide
  Sense strand starting at position 3363 of SEQ ID NO: 1563266
uugaauuugcucugguuua

SEQ ID NO: 1807704 - RNA, 19 nt, Artificial Sequence
  Description of Artificial Sequence: Synthetic oligonucleotide
  Antisense strand to SEQ ID NO: 1807703
uaaaccagagcaaauucaa

SEQ ID NO: 1807705 - RNA, 19 nt, Artificial Sequence
  Description of Artificial Sequence: Synthetic oligonucleotide
  Sense strand starting at position 3440 of SEQ ID NO: 1563266
ucugauagcuaucuaauga

SEQ ID NO: 1807706 - RNA, 19 nt, Artificial Sequence
  Description of Artificial Sequence: Synthetic oligonucleotide
  Antisense strand to SEQ ID NO: 1807705
ucauuagauagcuaucaga

SEQ ID NO: 1807707 - RNA, 19 nt, Artificial Sequence
  Description of Artificial Sequence: Synthetic oligonucleotide
  Sense strand starting at position 3522 of SEQ ID NO: 1563266
cagcuucuagcaggaaaga

SEQ ID NO: 1807708 - RNA, 19 nt, Artificial Sequence
  Description of Artificial Sequence: Synthetic oligonucleotide
  Antisense strand to SEQ ID NO: 1807707
ucuuuccugcuagaagcug

SEQ ID NO: 1807709 - RNA, 19 nt, Artificial Sequence
  Description of Artificial Sequence: Synthetic oligonucleotide
  Sense strand starting at position 3547 of SEQ ID NO: 1563266
ccuauuacaucacuaggua

SEQ ID NO: 1807710 - RNA, 19 nt, Artificial Sequence
  Description of Artificial Sequence: Synthetic oligonucleotide
  Antisense strand to SEQ ID NO: 1807709
uaccuagugauguaauagg

SEQ ID NO: 1807711 - RNA, 19 nt, Artificial Sequence
  Description of Artificial Sequence: Synthetic oligonucleotide
  Sense strand starting at position 3593 of SEQ ID NO: 1563266
uagucugguuuccuuagaa

SEQ ID NO: 1807712 - RNA, 19 nt, Artificial Sequence
  Description of Artificial Sequence: Synthetic oligonucleotide
  Antisense strand to SEQ ID NO: 1807711
uucuaaggaaaccagacua

SEQ ID NO: 1807713 - RNA, 19 nt, Artificial Sequence
  Description of Artificial Sequence: Synthetic oligonucleotide
  Sense strand starting at position 3660 of SEQ ID NO: 1563266
acaacagacugcuugcaau

SEQ ID NO: 1807714 - RNA, 19 nt, Artificial Sequence
  Description of Artificial Sequence: Synthetic oligonucleotide
  Antisense strand to SEQ ID NO: 1807713
auugcaagcagucuguugu

SEQ ID NO: 1807715 - RNA, 19 nt, Artificial Sequence
  Description of Artificial Sequence: Synthetic oligonucleotide
  Sense strand starting at position 124 of SEQ ID NO: 1563267
gcagaucugagauagcauc

SEQ ID NO: 1807716 - RNA, 19 nt, Artificial Sequence
  Description of Artificial Sequence: Synthetic oligonucleotide
  Antisense strand to SEQ ID NO: 1807715
gaugcuaucucagaucugc

SEQ ID NO: 1807717 - RNA, 19 nt, Artificial Sequence
  Description of Artificial Sequence: Synthetic oligonucleotide
  Sense strand starting at position 132 of SEQ ID NO: 1563267
gagauagcauccucacagu

SEQ ID NO: 1807718 - RNA, 19 nt, Artificial Sequence
  Description of Artificial Sequence: Synthetic oligonucleotide
  Antisense strand to SEQ ID NO: 1807717
acugugaggaugcuaucuc

SEQ ID NO: 1807719 - RNA, 19 nt, Artificial Sequence
  Description of Artificial Sequence: Synthetic oligonucleotide
  Sense strand starting at position 329 of SEQ ID NO: 1563267
acccgaucucccugaaucu

SEQ ID NO: 1807720 - RNA, 19 nt, Artificial Sequence
  Description of Artificial Sequence: Synthetic oligonucleotide
  Antisense strand to SEQ ID NO: 1807719
agauucagggagaucgggu

SEQ ID NO: 1807721 - RNA, 19 nt, Artificial Sequence
  Description of Artificial Sequence: Synthetic oligonucleotide
  Sense strand starting at position 330 of SEQ ID NO: 1563267
cccgaucucccugaaucuu

SEQ ID NO: 1807722 - RNA, 19 nt, Artificial Sequence
  Description of Artificial Sequence: Synthetic oligonucleotide
  Antisense strand to SEQ ID NO: 1807721
aagauucagggagaucggg

SEQ ID NO: 1807723 - RNA, 19 nt, Artificial Sequence
  Description of Artificial Sequence: Synthetic oligonucleotide
  Sense strand starting at position 502 of SEQ ID NO: 1563267
gggucccagagaugucuaa

SEQ ID NO: 1807724 - RNA, 19 nt, Artificial Sequence
  Description of Artificial Sequence: Synthetic oligonucleotide
  Antisense strand to SEQ ID NO: 1807723
uuagacaucucugggaccc

SEQ ID NO: 1807725 - RNA, 19 nt, Artificial Sequence
  Description of Artificial Sequence: Synthetic oligonucleotide
  Sense strand starting at position 506 of SEQ ID NO: 1563267
cccagagaugucuaagguc

SEQ ID NO: 1807726 - RNA, 19 nt, Artificial Sequence
  Description of Artificial Sequence: Synthetic oligonucleotide
  Antisense strand to SEQ ID NO: 1807725
gaccuuagacaucucuggg

SEQ ID NO: 1807727 - RNA, 19 nt, Artificial Sequence
  Description of Artificial Sequence: Synthetic oligonucleotide
  Sense strand starting at position 549 of SEQ ID NO: 1563267
cuuucugaccucuaguaca

SEQ ID NO: 1807728 - RNA, 19 nt, Artificial Sequence
  Description of Artificial Sequence: Synthetic oligonucleotide
  Antisense strand to SEQ ID NO: 1807727
uguacuagaggucagaaag

SEQ ID NO: 1807729 - RNA, 19 nt, Artificial Sequence
  Description of Artificial Sequence: Synthetic oligonucleotide
  Sense strand starting at position 570 of SEQ ID NO: 1563267
ggaggaaguuaucuagcca

SEQ ID NO: 1807730 - RNA, 19 nt, Artificial Sequence
  Description of Artificial Sequence: Synthetic oligonucleotide
  Antisense strand to SEQ ID NO: 1807729
uggcuagauaacuuccucc

SEQ ID NO: 1807731 - RNA, 19 nt, Artificial Sequence
  Description of Artificial Sequence: Synthetic oligonucleotide
  Sense strand starting at position 756 of SEQ ID NO: 1563267
ggucuugugaagcaggaga

SEQ ID NO: 1807732 - RNA, 19 nt, Artificial Sequence
  Description of Artificial Sequence: Synthetic oligonucleotide
  Antisense strand to SEQ ID NO: 1807731
ucuccugcuucacaagacc

SEQ ID NO: 1807733 - RNA, 19 nt, Artificial Sequence
  Description of Artificial Sequence: Synthetic oligonucleotide
  Sense strand starting at position 779 of SEQ ID NO: 1563267
aggaauugcuaucuaugau

SEQ ID NO: 1807734 - RNA, 19 nt, Artificial Sequence
  Description of Artificial Sequence: Synthetic oligonucleotide
  Antisense strand to SEQ ID NO: 1807733
aucauagauagcaauuccu

SEQ ID NO: 1807735 - RNA, 19 nt, Artificial Sequence
  Description of Artificial Sequence: Synthetic oligonucleotide
  Sense strand starting at position 875 of SEQ ID NO: 1563267
guuaacgaugcccaagaau

SEQ ID NO: 1807736 - RNA, 19 nt, Artificial Sequence
  Description of Artificial Sequence: Synthetic oligonucleotide
  Antisense strand to SEQ ID NO: 1807735
auucuugggcaucguuaac

SEQ ID NO: 1807737 - RNA, 19 nt, Artificial Sequence
  Description of Artificial Sequence: Synthetic oligonucleotide
  Sense strand starting at position 902 of SEQ ID NO: 1563267
auggaugggucagugaaau

SEQ ID NO: 1807738 - RNA, 19 nt, Artificial Sequence
  Description of Artificial Sequence: Synthetic oligonucleotide
  Antisense strand to SEQ ID NO: 1807737
auuucacugacccauccau

SEQ ID NO: 1807739 - RNA, 19 nt, Artificial Sequence
  Description of Artificial Sequence: Synthetic oligonucleotide
  Sense strand starting at position 914 of SEQ ID NO: 1563267
gugaaauaauccucagugg

SEQ ID NO: 1807740 - RNA, 19 nt, Artificial Sequence
  Description of Artificial Sequence: Synthetic oligonucleotide
  Antisense strand to SEQ ID NO: 1807739
ccacugaggauuauuucac

SEQ ID NO: 1807741 - RNA, 19 nt, Artificial Sequence
  Description of Artificial Sequence: Synthetic oligonucleotide
  Sense strand starting at position 943 of SEQ ID NO: 1563267
ggccauagggcuggagaau

SEQ ID NO: 1807742 - RNA, 19 nt, Artificial Sequence
  Description of Artificial Sequence: Synthetic oligonucleotide
  Antisense strand to SEQ ID NO: 1807741
auucuccagcccuauggcc

SEQ ID NO: 1807743 - RNA, 19 nt, Artificial Sequence
  Description of Artificial Sequence: Synthetic oligonucleotide
  Sense strand starting at position 944 of SEQ ID NO: 1563267
gccauagggcuggagaauu

SEQ ID NO: 1807744 - RNA, 19 nt, Artificial Sequence
  Description of Artificial Sequence: Synthetic oligonucleotide
  Antisense strand to SEQ ID NO: 1807743
aauucuccagcccuauggc

SEQ ID NO: 1807745 - RNA, 19 nt, Artificial Sequence
  Description of Artificial Sequence: Synthetic oligonucleotide
  Sense strand starting at position 952 of SEQ ID NO: 1563267
gcuggagaauucuuggcua

SEQ ID NO: 1807746 - RNA, 19 nt, Artificial Sequence
  Description of Artificial Sequence: Synthetic oligonucleotide
  Antisense strand to SEQ ID NO: 1807745
uagccaagaauucuccagc

SEQ ID NO: 1807747 - RNA, 19 nt, Artificial Sequence
  Description of Artificial Sequence: Synthetic oligonucleotide
  Sense strand starting at position 954 of SEQ ID NO: 1563267
uggagaauucuuggcuaga

SEQ ID NO: 1807748 - RNA, 19 nt, Artificial Sequence
  Description of Artificial Sequence: Synthetic oligonucleotide
  Antisense strand to SEQ ID NO: 1807747
ucuagccaagaauucucca

SEQ ID NO: 1807749 - RNA, 19 nt, Artificial Sequence
  Description of Artificial Sequence: Synthetic oligonucleotide
  Sense strand starting at position 955 of SEQ ID NO: 1563267
ggagaauucuuggcuagaa

SEQ ID NO: 1807750 - RNA, 19 nt, Artificial Sequence
  Description of Artificial Sequence: Synthetic oligonucleotide
  Antisense strand to SEQ ID NO: 1807749
uucuagccaagaauucucc

SEQ ID NO: 1807751 - RNA, 19 nt, Artificial Sequence
  Description of Artificial Sequence: Synthetic oligonucleotide
  Sense strand starting at position 956 of SEQ ID NO: 1563267
gagaauucuuggcuagaag

SEQ ID NO: 1807752 - RNA, 19 nt, Artificial Sequence
  Description of Artificial Sequence: Synthetic oligonucleotide
  Antisense strand to SEQ ID NO: 1807751
cuucuagccaagaauucuc

SEQ ID NO: 1807753 - RNA, 19 nt, Artificial Sequence
  Description of Artificial Sequence: Synthetic oligonucleotide
  Sense strand starting at position 996 of SEQ ID NO: 1563267
uggagucagagccauaagu

SEQ ID NO: 1807754 - RNA, 19 nt, Artificial Sequence
  Description of Artificial Sequence: Synthetic oligonucleotide
  Antisense strand to SEQ ID NO: 1807753
acuuauggcucugacucca

SEQ ID NO: 1807755 - RNA, 19 nt, Artificial Sequence
  Description of Artificial Sequence: Synthetic oligonucleotide
  Sense strand starting at position 998 of SEQ ID NO: 1563267
gagucagagccauaaguga

SEQ ID NO: 1807756 - RNA, 19 nt, Artificial Sequence
  Description of Artificial Sequence: Synthetic oligonucleotide
  Antisense strand to SEQ ID NO: 1807755
ucacuuauggcucugacuc

SEQ ID NO: 1807757 - RNA, 19 nt, Artificial Sequence
  Description of Artificial Sequence: Synthetic oligonucleotide
  Sense strand starting at position 1099 of SEQ ID NO: 1563267
gcagaagguucuguuacaa

SEQ ID NO: 1807758 - RNA, 19 nt, Artificial Sequence
  Description of Artificial Sequence: Synthetic oligonucleotide
  Antisense strand to SEQ ID NO: 1807757
uuguaacagaaccuucugc

SEQ ID NO: 1807759 - RNA, 19 nt, Artificial Sequence
  Description of Artificial Sequence: Synthetic oligonucleotide
  Sense strand starting at position 1573 of SEQ ID NO: 1563267
aucaguuagccggaaguau

SEQ ID NO: 1807760 - RNA, 19 nt, Artificial Sequence
  Description of Artificial Sequence: Synthetic oligonucleotide
  Antisense strand to SEQ ID NO: 1807759
auacuuccggcuaacugau

SEQ ID NO: 1807761 - RNA, 19 nt, Artificial Sequence
  Description of Artificial Sequence: Synthetic oligonucleotide
  Sense strand starting at position 1585 of SEQ ID NO: 1563267
gaaguauuaguccagcaga

SEQ ID NO: 1807762 - RNA, 19 nt, Artificial Sequence
  Description of Artificial Sequence: Synthetic oligonucleotide
  Antisense strand to SEQ ID NO: 1807761
ucugcuggacuaauacuuc

SEQ ID NO: 1807763 - RNA, 19 nt, Artificial Sequence
  Description of Artificial Sequence: Synthetic oligonucleotide
  Sense strand starting at position 1588 of SEQ ID NO: 1563267
guauuaguccagcagauag

SEQ ID NO: 1807764 - RNA, 19 nt, Artificial Sequence
  Description of Artificial Sequence: Synthetic oligonucleotide
  Antisense strand to SEQ ID NO: 1807763
cuaucugcuggacuaauac

SEQ ID NO: 1807765 - RNA, 19 nt, Artificial Sequence
  Description of Artificial Sequence: Synthetic oligonucleotide
  Sense strand starting at position 2039 of SEQ ID NO: 1563267
guguguuggcaugagauga

SEQ ID NO: 1807766 - RNA, 19 nt, Artificial Sequence
  Description of Artificial Sequence: Synthetic oligonucleotide
  Antisense strand to SEQ ID NO: 1807765
ucaucucaugccaacacac

SEQ ID NO: 1807767 - RNA, 19 nt, Artificial Sequence
  Description of Artificial Sequence: Synthetic oligonucleotide
  Sense strand starting at position 2043 of SEQ ID NO: 1563267
guuggcaugagaugaauca

SEQ ID NO: 1807768 - RNA, 19 nt, Artificial Sequence
  Description of Artificial Sequence: Synthetic oligonucleotide
  Antisense strand to SEQ ID NO: 1807767
ugauucaucucaugccaac

SEQ ID NO: 1807769 - RNA, 19 nt, Artificial Sequence
  Description of Artificial Sequence: Synthetic oligonucleotide
  Sense strand starting at position 2103 of SEQ ID NO: 1563267
cugugcugauuucuuaacu

SEQ ID NO: 1807770 - RNA, 19 nt, Artificial Sequence
  Description of Artificial Sequence: Synthetic oligonucleotide
  Antisense strand to SEQ ID NO: 1807769
aguuaagaaaucagcacag

SEQ ID NO: 1807771 - RNA, 19 nt, Artificial Sequence
  Description of Artificial Sequence: Synthetic oligonucleotide
  Sense strand starting at position 2348 of SEQ ID NO: 1563267
guaaguugggaguagggau

SEQ ID NO: 1807772 - RNA, 19 nt, Artificial Sequence
  Description of Artificial Sequence: Synthetic oligonucleotide
  Antisense strand to SEQ ID NO: 1807771
aucccuacucccaacuuac

SEQ ID NO: 1807773 - RNA, 19 nt, Artificial Sequence
  Description of Artificial Sequence: Synthetic oligonucleotide
  Sense strand starting at position 2690 of SEQ ID NO: 1563267
uggcuucucuacucagaaa

SEQ ID NO: 1807774 - RNA, 19 nt, Artificial Sequence
  Description of Artificial Sequence: Synthetic oligonucleotide
  Antisense strand to SEQ ID NO: 1807773
uuucugaguagagaagcca

SEQ ID NO: 1807775 - RNA, 19 nt, Artificial Sequence
  Description of Artificial Sequence: Synthetic oligonucleotide
  Sense strand starting at position 2904 of SEQ ID NO: 1563267
ccuuaacccugucuggaau

SEQ ID NO: 1807776 - RNA, 19 nt, Artificial Sequence
  Description of Artificial Sequence: Synthetic oligonucleotide
  Antisense strand to SEQ ID NO: 1807775
auuccagacaggguuaagg

SEQ ID NO: 1807777 - RNA, 19 nt, Artificial Sequence
  Description of Artificial Sequence: Synthetic oligonucleotide
  Sense strand starting at position 3155 of SEQ ID NO: 1563267
gugcucaggaaauguugaa

SEQ ID NO: 1807778 - RNA, 19 nt, Artificial Sequence
  Description of Artificial Sequence: Synthetic oligonucleotide
  Antisense strand to SEQ ID NO: 1807777
uucaacauuuccugagcac

SEQ ID NO: 1807779 - RNA, 19 nt, Artificial Sequence
  Description of Artificial Sequence: Synthetic oligonucleotide
  Sense strand starting at position 3199 of SEQ ID NO: 1563267
aaaguagcucuugguggaa

SEQ ID NO: 1807780 - RNA, 19 nt, Artificial Sequence
  Description of Artificial Sequence: Synthetic oligonucleotide
  Antisense strand to SEQ ID NO: 1807779
uuccaccaagagcuacuuu

SEQ ID NO: 1807781 - RNA, 19 nt, Artificial Sequence
  Description of Artificial Sequence: Synthetic oligonucleotide
  Sense strand starting at position 3367 of SEQ ID NO: 1563267
gggacuucccugcauugga

SEQ ID NO: 1807782 - RNA, 19 nt, Artificial Sequence
  Description of Artificial Sequence: Synthetic oligonucleotide
  Antisense strand to SEQ ID NO: 1807781
uccaaugcagggaaguccc

SEQ ID NO: 1807783 - RNA, 19 nt, Artificial Sequence
  Description of Artificial Sequence: Synthetic oligonucleotide
  Sense strand starting at position 3382 of SEQ ID NO: 1563267
uggacacaaccuugaguaa

SEQ ID NO: 1807784 - RNA, 19 nt, Artificial Sequence
  Description of Artificial Sequence: Synthetic oligonucleotide
  Antisense strand to SEQ ID NO: 1807783
uuacucaagguugugucca

SEQ ID NO: 1807785 - RNA, 19 nt, Artificial Sequence
  Description of Artificial Sequence: Synthetic oligonucleotide
  Sense strand starting at position 3476 of SEQ ID NO: 1563267
uugaccuuugacugcauua

SEQ ID NO: 1807786 - RNA, 19 nt, Artificial Sequence
  Description of Artificial Sequence: Synthetic oligonucleotide
  Antisense strand to SEQ ID NO: 1807785
uaaugcagucaaaggucaa

SEQ ID NO: 1807787 - RNA, 19 nt, Artificial Sequence
  Description of Artificial Sequence: Synthetic oligonucleotide
  Sense strand starting at position 3516 of SEQ ID NO: 1563267
ucuguuuguaaguaaagug

SEQ ID NO: 1807788 - RNA, 19 nt, Artificial Sequence
  Description of Artificial Sequence: Synthetic oligonucleotide
  Antisense strand to SEQ ID NO: 1807787
cacuuuacuuacaaacaga

SEQ ID NO: 1807789 - RNA, 19 nt, Artificial Sequence
  Description of Artificial Sequence: Synthetic oligonucleotide
  Sense strand starting at position 3533 of SEQ ID NO: 1563267
uggaaucuaccaugugcua

SEQ ID NO: 1807790 - RNA, 19 nt, Artificial Sequence
  Description of Artificial Sequence: Synthetic oligonucleotide
  Antisense strand to SEQ ID NO: 1807789
uagcacaugguagauucca

SEQ ID NO: 1807791 - RNA, 19 nt, Artificial Sequence
  Description of Artificial Sequence: Synthetic oligonucleotide
  Sense strand starting at position 3785 of SEQ ID NO: 1563267
gccagagucagcuaaugac

SEQ ID NO: 1807792 - RNA, 19 nt, Artificial Sequence
  Description of Artificial Sequence: Synthetic oligonucleotide
  Antisense strand to SEQ ID NO: 1807791
gucauuagcugacucuggc

SEQ ID NO: 1807793 - RNA, 19 nt, Artificial Sequence
  Description of Artificial Sequence: Synthetic oligonucleotide
  Sense strand starting at position 3829 of SEQ ID NO: 1563267
gucaguuaucaccacuuga

SEQ ID NO: 1807794 - RNA, 19 nt, Artificial Sequence
  Description of Artificial Sequence: Synthetic oligonucleotide
  Antisense strand to SEQ ID NO: 1807793
ucaaguggugauaacugac

SEQ ID NO: 1807795 - RNA, 19 nt, Artificial Sequence
  Description of Artificial Sequence: Synthetic oligonucleotide
  Sense strand starting at position 274 of SEQ ID NO: 1563268
gggaguaagcugcauaaac

SEQ ID NO: 1807796 - RNA, 19 nt, Artificial Sequence
  Description of Artificial Sequence: Synthetic oligonucleotide
  Antisense strand to SEQ ID NO: 1807795
guuuaugcagcuuacuccc

SEQ ID NO: 1807797 - RNA, 19 nt, Artificial Sequence
  Description of Artificial Sequence: Synthetic oligonucleotide
  Sense strand starting at position 332 of SEQ ID NO: 1563268
ccugcagcuccauagacuu

SEQ ID NO: 1807798 - RNA, 19 nt, Artificial Sequence
  Description of Artificial Sequence: Synthetic oligonucleotide
  Antisense strand to SEQ ID NO: 1807797
aagucuauggagcugcagg

SEQ ID NO: 1807799 - RNA, 19 nt, Artificial Sequence
  Description of Artificial Sequence: Synthetic oligonucleotide
  Sense strand starting at position 422 of SEQ ID NO: 1563268
ggcaaacauggguacugua

SEQ ID NO: 1807800 - RNA, 19 nt, Artificial Sequence
  Description of Artificial Sequence: Synthetic oligonucleotide
  Antisense strand to SEQ ID NO: 1807799
uacaguacccauguuugcc

SEQ ID NO: 1807801 - RNA, 19 nt, Artificial Sequence
  Description of Artificial Sequence: Synthetic oligonucleotide
  Sense strand starting at position 936 of SEQ ID NO: 1563268
caugcuguggaguaguaga

SEQ ID NO: 1807802 - RNA, 19 nt, Artificial Sequence
  Description of Artificial Sequence: Synthetic oligonucleotide
  Antisense strand to SEQ ID NO: 1807801
ucuacuacuccacagcaug

SEQ ID NO: 1807803 - RNA, 19 nt, Artificial Sequence
  Description of Artificial Sequence: Synthetic oligonucleotide
  Sense strand starting at position 1172 of SEQ ID NO: 1563268
auaccuacaguuuauguaa

SEQ ID NO: 1807804 - RNA, 19 nt, Artificial Sequence
  Description of Artificial Sequence: Synthetic oligonucleotide
  Antisense strand to SEQ ID NO: 1807803
uuacauaaacuguagguau

SEQ ID NO: 1807805 - RNA, 19 nt, Artificial Sequence
  Description of Artificial Sequence: Synthetic oligonucleotide
  Sense strand starting at position 1208 of SEQ ID NO: 1563268
auaacauaucguggaccua

SEQ ID NO: 1807806 - RNA, 19 nt, Artificial Sequence
  Description of Artificial Sequence: Synthetic oligonucleotide
  Antisense strand to SEQ ID NO: 1807805
uagguccacgauauguuau

SEQ ID NO: 1807807 - RNA, 19 nt, Artificial Sequence
  Description of Artificial Sequence: Synthetic oligonucleotide
  Sense strand starting at position 1209 of SEQ ID NO: 1563268
uaacauaucguggaccuau

SEQ ID NO: 1807808 - RNA, 19 nt, Artificial Sequence
  Description of Artificial Sequence: Synthetic oligonucleotide
  Antisense strand to SEQ ID NO: 1807807
auagguccacgauauguua

SEQ ID NO: 1807809 - RNA, 19 nt, Artificial Sequence
  Description of Artificial Sequence: Synthetic oligonucleotide
  Sense strand starting at position 1392 of SEQ ID NO: 1563268
auagaauugcuaggugaaa

SEQ ID NO: 1807810 - RNA, 19 nt, Artificial Sequence
  Description of Artificial Sequence: Synthetic oligonucleotide
  Antisense strand to SEQ ID NO: 1807809
uuucaccuagcaauucuau

SEQ ID NO: 1807811 - RNA, 19 nt, Artificial Sequence
  Description of Artificial Sequence: Synthetic oligonucleotide
  Sense strand starting at position 1393 of SEQ ID NO: 1563268
uagaauugcuaggugaaag

SEQ ID NO: 1807812 - RNA, 19 nt, Artificial Sequence
  Description of Artificial Sequence: Synthetic oligonucleotide
  Antisense strand to SEQ ID NO: 1807811
cuuucaccuagcaauucua

SEQ ID NO: 1807813 - RNA, 19 nt, Artificial Sequence
  Description of Artificial Sequence: Synthetic oligonucleotide
  Sense strand starting at position 1394 of SEQ ID NO: 1563268
agaauugcuaggugaaaga

SEQ ID NO: 1807814 - RNA, 19 nt, Artificial Sequence
  Description of Artificial Sequence: Synthetic oligonucleotide
  Antisense strand to SEQ ID NO: 1807813
ucuuucaccuagcaauucu

SEQ ID NO: 1807815 - RNA, 19 nt, Artificial Sequence
  Description of Artificial Sequence: Synthetic oligonucleotide
  Sense strand starting at position 1478 of SEQ ID NO: 1563268
ugaggaaaccucggcccaa

SEQ ID NO: 1807816 - RNA, 19 nt, Artificial Sequence
  Description of Artificial Sequence: Synthetic oligonucleotide
  Antisense strand to SEQ ID NO: 1807815
uugggccgagguuuccuca

SEQ ID NO: 1807817 - RNA, 19 nt, Artificial Sequence
  Description of Artificial Sequence: Synthetic oligonucleotide
  Sense strand starting at position 1479 of SEQ ID NO: 1563268
gaggaaaccucggcccaau

SEQ ID NO: 1807818 - RNA, 19 nt, Artificial Sequence
  Description of Artificial Sequence: Synthetic oligonucleotide
  Antisense strand to SEQ ID NO: 1807817
auugggccgagguuuccuc

SEQ ID NO: 1807819 - RNA, 19 nt, Artificial Sequence
  Description of Artificial Sequence: Synthetic oligonucleotide
  Sense strand starting at position 1521 of SEQ ID NO: 1563268
ucccaaguugagcaguaau

SEQ ID NO: 1807820 - RNA, 19 nt, Artificial Sequence
  Description of Artificial Sequence: Synthetic oligonucleotide
  Antisense strand to SEQ ID NO: 1807819
auuacugcucaacuuggga

SEQ ID NO: 1807821 - RNA, 19 nt, Artificial Sequence
  Description of Artificial Sequence: Synthetic oligonucleotide
  Sense strand starting at position 1524 of SEQ ID NO: 1563268
caaguugagcaguaauagu

SEQ ID NO: 1807822 - RNA, 19 nt, Artificial Sequence
  Description of Artificial Sequence: Synthetic oligonucleotide
  Antisense strand to SEQ ID NO: 1807821
acuauuacugcucaacuug

SEQ ID NO: 1807823 - RNA, 19 nt, Artificial Sequence
  Description of Artificial Sequence: Synthetic oligonucleotide
  Sense strand starting at position 1538 of SEQ ID NO: 1563268
auaguuagacuuggaaucu

SEQ ID NO: 1807824 - RNA, 19 nt, Artificial Sequence
  Description of Artificial Sequence: Synthetic oligonucleotide
  Antisense strand to SEQ ID NO: 1807823
agauuccaagucuaacuau

SEQ ID NO: 1807825 - RNA, 19 nt, Artificial Sequence
  Description of Artificial Sequence: Synthetic oligonucleotide
  Sense strand starting at position 1547 of SEQ ID NO: 1563268
cuuggaaucuaggucugua

SEQ ID NO: 1807826 - RNA, 19 nt, Artificial Sequence
  Description of Artificial Sequence: Synthetic oligonucleotide
  Antisense strand to SEQ ID NO: 1807825
uacagaccuagauuccaag

SEQ ID NO: 1807827 - RNA, 19 nt, Artificial Sequence
  Description of Artificial Sequence: Synthetic oligonucleotide
  Sense strand starting at position 1550 of SEQ ID NO: 1563268
ggaaucuaggucuguagau

SEQ ID NO: 1807828 - RNA, 19 nt, Artificial Sequence
  Description of Artificial Sequence: Synthetic oligonucleotide
  Antisense strand to SEQ ID NO: 1807827
aucuacagaccuagauucc

SEQ ID NO: 1807829 - RNA, 19 nt, Artificial Sequence
  Description of Artificial Sequence: Synthetic oligonucleotide
  Sense strand starting at position 1551 of SEQ ID NO: 1563268
gaaucuaggucuguagaua

SEQ ID NO: 1807830 - RNA, 19 nt, Artificial Sequence
  Description of Artificial Sequence: Synthetic oligonucleotide
  Antisense strand to SEQ ID NO: 1807829
uaucuacagaccuagauuc

SEQ ID NO: 1807831 - RNA, 19 nt, Artificial Sequence
  Description of Artificial Sequence: Synthetic oligonucleotide
  Sense strand starting at position 1552 of SEQ ID NO: 1563268
aaucuaggucuguagauau

SEQ ID NO: 1807832 - RNA, 19 nt, Artificial Sequence
  Description of Artificial Sequence: Synthetic oligonucleotide
  Antisense strand to SEQ ID NO: 1807831
auaucuacagaccuagauu

SEQ ID NO: 1807833 - RNA, 19 nt, Artificial Sequence
  Description of Artificial Sequence: Synthetic oligonucleotide
  Sense strand starting at position 1565 of SEQ ID NO: 1563268
agauaucuagcuuggcaaa

SEQ ID NO: 1807834 - RNA, 19 nt, Artificial Sequence
  Description of Artificial Sequence: Synthetic oligonucleotide
  Antisense strand to SEQ ID NO: 1807833
uuugccaagcuagauaucu

SEQ ID NO: 1807835 - RNA, 19 nt, Artificial Sequence
  Description of Artificial Sequence: Synthetic oligonucleotide
  Sense strand starting at position 1763 of SEQ ID NO: 1563268
ccucauagucauuaugcuu

SEQ ID NO: 1807836 - RNA, 19 nt, Artificial Sequence
  Description of Artificial Sequence: Synthetic oligonucleotide
  Antisense strand to SEQ ID NO: 1807835
aagcauaaugacuaugagg

SEQ ID NO: 1807837 - RNA, 19 nt, Artificial Sequence
  Description of Artificial Sequence: Synthetic oligonucleotide
  Sense strand starting at position 1770 of SEQ ID NO: 1563268
gucauuaugcuugacucua

SEQ ID NO: 1807838 - RNA, 19 nt, Artificial Sequence
  Description of Artificial Sequence: Synthetic oligonucleotide
  Antisense strand to SEQ ID NO: 1807837
uagagucaagcauaaugac

SEQ ID NO: 1807839 - RNA, 19 nt, Artificial Sequence
  Description of Artificial Sequence: Synthetic oligonucleotide
  Sense strand starting at position 1820 of SEQ ID NO: 1563268
auuuguugccuagggugaa

SEQ ID NO: 1807840 - RNA, 19 nt, Artificial Sequence
  Description of Artificial Sequence: Synthetic oligonucleotide
  Antisense strand to SEQ ID NO: 1807839
uucacccuaggcaacaaau

SEQ ID NO: 1807841 - RNA, 19 nt, Artificial Sequence
  Description of Artificial Sequence: Synthetic oligonucleotide
  Sense strand starting at position 1832 of SEQ ID NO: 1563268
gggugaacucagugaagca

SEQ ID NO: 1807842 - RNA, 19 nt, Artificial Sequence
  Description of Artificial Sequence: Synthetic oligonucleotide
  Antisense strand to SEQ ID NO: 1807841
ugcuucacugaguucaccc

SEQ ID NO: 1807843 - RNA, 19 nt, Artificial Sequence
  Description of Artificial Sequence: Synthetic oligonucleotide
  Sense strand starting at position 1833 of SEQ ID NO: 1563268
ggugaacucagugaagcaa

SEQ ID NO: 1807844 - RNA, 19 nt, Artificial Sequence
  Description of Artificial Sequence: Synthetic oligonucleotide
  Antisense strand to SEQ ID NO: 1807843
uugcuucacugaguucacc

SEQ ID NO: 1807845 - RNA, 19 nt, Artificial Sequence
  Description of Artificial Sequence: Synthetic oligonucleotide
  Sense strand starting at position 2015 of SEQ ID NO: 1563268
gggagucuuugggcaugaa

SEQ ID NO: 1807846 - RNA, 19 nt, Artificial Sequence
  Description of Artificial Sequence: Synthetic oligonucleotide
  Antisense strand to SEQ ID NO: 1807845
uucaugcccaaagacuccc

SEQ ID NO: 1807847 - RNA, 19 nt, Artificial Sequence
  Description of Artificial Sequence: Synthetic oligonucleotide
  Sense strand starting at position 2016 of SEQ ID NO: 1563268
ggagucuuugggcaugaaa

SEQ ID NO: 1807848 - RNA, 19 nt, Artificial Sequence
  Description of Artificial Sequence: Synthetic oligonucleotide
  Antisense strand to SEQ ID NO: 1807847
uuucaugcccaaagacucc

SEQ ID NO: 1807849 - RNA, 19 nt, Artificial Sequence
  Description of Artificial Sequence: Synthetic oligonucleotide
  Sense strand starting at position 2198 of SEQ ID NO: 1563268
uugaaugcagaauguagua

SEQ ID NO: 1807850 - RNA, 19 nt, Artificial Sequence
  Description of Artificial Sequence: Synthetic oligonucleotide
  Antisense strand to SEQ ID NO: 1807849
uacuacauucugcauucaa

SEQ ID NO: 1807851 - RNA, 19 nt, Artificial Sequence
  Description of Artificial Sequence: Synthetic oligonucleotide
  Sense strand starting at position 2387 of SEQ ID NO: 1563268
uugucagauccugguggaa

SEQ ID NO: 1807852 - RNA, 19 nt, Artificial Sequence
  Description of Artificial Sequence: Synthetic oligonucleotide
  Antisense strand to SEQ ID NO: 1807851
uuccaccaggaucugacaa

SEQ ID NO: 1807853 - RNA, 19 nt, Artificial Sequence
  Description of Artificial Sequence: Synthetic oligonucleotide
  Sense strand starting at position 2440 of SEQ ID NO: 1563268
cuaggagguucuuuaguaa

SEQ ID NO: 1807854 - RNA, 19 nt, Artificial Sequence
  Description of Artificial Sequence: Synthetic oligonucleotide
  Antisense strand to SEQ ID NO: 1807853
uuacuaaagaaccuccuag

SEQ ID NO: 1807855 - RNA, 19 nt, Artificial Sequence
  Description of Artificial Sequence: Synthetic oligonucleotide
  Sense strand starting at position 2454 of SEQ ID NO: 1563268
aguaauccuucugccaaga

SEQ ID NO: 1807856 - RNA, 19 nt, Artificial Sequence
  Description of Artificial Sequence: Synthetic oligonucleotide
  Antisense strand to SEQ ID NO: 1807855
ucuuggcagaaggauuacu

SEQ ID NO: 1807857 - RNA, 19 nt, Artificial Sequence
  Description of Artificial Sequence: Synthetic oligonucleotide
  Sense strand starting at position 2538 of SEQ ID NO: 1563268
agaauagcagucugagaaa

SEQ ID NO: 1807858 - RNA, 19 nt, Artificial Sequence
  Description of Artificial Sequence: Synthetic oligonucleotide
  Antisense strand to SEQ ID NO: 1807857
uuucucagacugcuauucu

SEQ ID NO: 1807859 - RNA, 19 nt, Artificial Sequence
  Description of Artificial Sequence: Synthetic oligonucleotide
  Sense strand starting at position 2689 of SEQ ID NO: 1563268
gagagcucuguagaaagca

SEQ ID NO: 1807860 - RNA, 19 nt, Artificial Sequence
  Description of Artificial Sequence: Synthetic oligonucleotide
  Antisense strand to SEQ ID NO: 1807859
ugcuuucuacagagcucuc

SEQ ID NO: 1807861 - RNA, 19 nt, Artificial Sequence
  Description of Artificial Sequence: Synthetic oligonucleotide
  Sense strand starting at position 3168 of SEQ ID NO: 1563268
ucauuuauccucugugguu

SEQ ID NO: 1807862 - RNA, 19 nt, Artificial Sequence
  Description of Artificial Sequence: Synthetic oligonucleotide
  Antisense strand to SEQ ID NO: 1807861
aaccacagaggauaaauga

SEQ ID NO: 1807863 - RNA, 19 nt, Artificial Sequence
  Description of Artificial Sequence: Synthetic oligonucleotide
  Sense strand starting at position 3285 of SEQ ID NO: 1563268
agcugaaaguugucucaaa

SEQ ID NO: 1807864 - RNA, 19 nt, Artificial Sequence
  Description of Artificial Sequence: Synthetic oligonucleotide
  Antisense strand to SEQ ID NO: 1807863
uuugagacaacuuucagcu

SEQ ID NO: 1807865 - RNA, 19 nt, Artificial Sequence
  Description of Artificial Sequence: Synthetic oligonucleotide
  Sense strand starting at position 3611 of SEQ ID NO: 1563268
ugauuucccuuugaacuga

SEQ ID NO: 1807866 - RNA, 19 nt, Artificial Sequence
  Description of Artificial Sequence: Synthetic oligonucleotide
  Antisense strand to SEQ ID NO: 1807865
ucaguucaaagggaaauca

SEQ ID NO: 1807867 - RNA, 19 nt, Artificial Sequence
  Description of Artificial Sequence: Synthetic oligonucleotide
  Sense strand starting at position 3646 of SEQ ID NO: 1563268
gucuucucccuuugagaaa

SEQ ID NO: 1807868 - RNA, 19 nt, Artificial Sequence
  Description of Artificial Sequence: Synthetic oligonucleotide
  Antisense strand to SEQ ID NO: 1807867
uuucucaaagggagaagac

SEQ ID NO: 1807869 - RNA, 19 nt, Artificial Sequence
  Description of Artificial Sequence: Synthetic oligonucleotide
  Sense strand starting at position 3666 of SEQ ID NO: 1563268
ccaauuguuuaagccagaa

SEQ ID NO: 1807870 - RNA, 19 nt, Artificial Sequence
  Description of Artificial Sequence: Synthetic oligonucleotide
  Antisense strand to SEQ ID NO: 1807869
uucuggcuuaaacaauugg

SEQ ID NO: 1807871 - RNA, 19 nt, Artificial Sequence
  Description of Artificial Sequence: Synthetic oligonucleotide
  Sense strand starting at position 3685 of SEQ ID NO: 1563268
accucagaguuagccuuaa

SEQ ID NO: 1807872 - RNA, 19 nt, Artificial Sequence
  Description of Artificial Sequence: Synthetic oligonucleotide
  Antisense strand to SEQ ID NO: 1807871
uuaaggcuaacucugaggu

SEQ ID NO: 1807873 - RNA, 19 nt, Artificial Sequence
  Description of Artificial Sequence: Synthetic oligonucleotide
  Sense strand starting at position 3711 of SEQ ID NO: 1563268
uucucugacccucauugua

SEQ ID NO: 1807874 - RNA, 19 nt, Artificial Sequence
  Description of Artificial Sequence: Synthetic oligonucleotide
  Antisense strand to SEQ ID NO: 1807873
uacaaugagggucagagaa

SEQ ID NO: 1807875 - RNA, 19 nt, Artificial Sequence
  Description of Artificial Sequence: Synthetic oligonucleotide
  Sense strand starting at position 15 of SEQ ID NO: 1563269
auuacugaggcuuggaauc

SEQ ID NO: 1807876 - RNA, 19 nt, Artificial Sequence
  Description of Artificial Sequence: Synthetic oligonucleotide
  Antisense strand to SEQ ID NO: 1807875
gauuccaagccucaguaau

SEQ ID NO: 1807877 - RNA, 19 nt, Artificial Sequence
  Description of Artificial Sequence: Synthetic oligonucleotide
  Sense strand starting at position 133 of SEQ ID NO: 1563269
ucagcuuuccaccagaguu

SEQ ID NO: 1807878 - RNA, 19 nt, Artificial Sequence
  Description of Artificial Sequence: Synthetic oligonucleotide
  Antisense strand to SEQ ID NO: 1807877
aacucugguggaaagcuga

SEQ ID NO: 1807879 - RNA, 19 nt, Artificial Sequence
  Description of Artificial Sequence: Synthetic oligonucleotide
  Sense strand starting at position 217 of SEQ ID NO: 1563269
uugucugaugagcaguaga

SEQ ID NO: 1807880 - RNA, 19 nt, Artificial Sequence
  Description of Artificial Sequence: Synthetic oligonucleotide
  Antisense strand to SEQ ID NO: 1807879
ucuacugcucaucagacaa

SEQ ID NO: 1807881 - RNA, 19 nt, Artificial Sequence
  Description of Artificial Sequence: Synthetic oligonucleotide
  Sense strand starting at position 314 of SEQ ID NO: 1563269
gaggaaguccuauagcuuc

SEQ ID NO: 1807882 - RNA, 19 nt, Artificial Sequence
  Description of Artificial Sequence: Synthetic oligonucleotide
  Antisense strand to SEQ ID NO: 1807881
gaagcuauaggacuuccuc

SEQ ID NO: 1807883 - RNA, 19 nt, Artificial Sequence
  Description of Artificial Sequence: Synthetic oligonucleotide
  Sense strand starting at position 344 of SEQ ID NO: 1563269
guuugucaucuccaagauu

SEQ ID NO: 1807884 - RNA, 19 nt, Artificial Sequence
  Description of Artificial Sequence: Synthetic oligonucleotide
  Antisense strand to SEQ ID NO: 1807883
aaucuuggagaugacaaac

SEQ ID NO: 1807885 - RNA, 19 nt, Artificial Sequence
  Description of Artificial Sequence: Synthetic oligonucleotide
  Sense strand starting at position 454 of SEQ ID NO: 1563269
gaagccucucuuugaggga

SEQ ID NO: 1807886 - RNA, 19 nt, Artificial Sequence
  Description of Artificial Sequence: Synthetic oligonucleotide
  Antisense strand to SEQ ID NO: 1807885
ucccucaaagagaggcuuc

SEQ ID NO: 1807887 - RNA, 19 nt, Artificial Sequence
  Description of Artificial Sequence: Synthetic oligonucleotide
  Sense strand starting at position 522 of SEQ ID NO: 1563269
ggccuugucagcugaauuu

SEQ ID NO: 1807888 - RNA, 19 nt, Artificial Sequence
  Description of Artificial Sequence: Synthetic oligonucleotide
  Antisense strand to SEQ ID NO: 1807887
aaauucagcugacaaggcc

SEQ ID NO: 1807889 - RNA, 19 nt, Artificial Sequence
  Description of Artificial Sequence: Synthetic oligonucleotide
  Sense strand starting at position 1010 of SEQ ID NO: 1563269
aggcccuacuuucuugaaa

SEQ ID NO: 1807890 - RNA, 19 nt, Artificial Sequence
  Description of Artificial Sequence: Synthetic oligonucleotide
  Antisense strand to SEQ ID NO: 1807889
uuucaagaaaguagggccu

SEQ ID NO: 1807891 - RNA, 19 nt, Artificial Sequence
  Description of Artificial Sequence: Synthetic oligonucleotide
  Sense strand starting at position 1011 of SEQ ID NO: 1563269
ggcccuacuuucuugaaag

SEQ ID NO: 1807892 - RNA, 19 nt, Artificial Sequence
  Description of Artificial Sequence: Synthetic oligonucleotide
  Antisense strand to SEQ ID NO: 1807891
cuuucaagaaaguagggcc

SEQ ID NO: 1807893 - RNA, 19 nt, Artificial Sequence
  Description of Artificial Sequence: Synthetic oligonucleotide
  Sense strand starting at position 1023 of SEQ ID NO: 1563269
uugaaaguuuguccuuaga

SEQ ID NO: 1807894 - RNA, 19 nt, Artificial Sequence
  Description of Artificial Sequence: Synthetic oligonucleotide
  Antisense strand to SEQ ID NO: 1807893
ucuaaggacaaacuuucaa

SEQ ID NO: 1807895 - RNA, 19 nt, Artificial Sequence
  Description of Artificial Sequence: Synthetic oligonucleotide
  Sense strand starting at position 1026 of SEQ ID NO: 1563269
aaaguuuguccuuagagca

SEQ ID NO: 1807896 - RNA, 19 nt, Artificial Sequence
  Description of Artificial Sequence: Synthetic oligonucleotide
  Antisense strand to SEQ ID NO: 1807895
ugcucuaaggacaaacuuu

SEQ ID NO: 1807897 - RNA, 19 nt, Artificial Sequence
  Description of Artificial Sequence: Synthetic oligonucleotide
  Sense strand starting at position 1142 of SEQ ID NO: 1563269
uguccugaucaucaaagua

SEQ ID NO: 1807898 - RNA, 19 nt, Artificial Sequence
  Description of Artificial Sequence: Synthetic oligonucleotide
  Antisense strand to SEQ ID NO: 1807897
uacuuugaugaucaggaca

SEQ ID NO: 1807899 - RNA, 19 nt, Artificial Sequence
  Description of Artificial Sequence: Synthetic oligonucleotide
  Sense strand starting at position 1296 of SEQ ID NO: 1563269
agaguaauaccucagucga

SEQ ID NO: 1807900 - RNA, 19 nt, Artificial Sequence
  Description of Artificial Sequence: Synthetic oligonucleotide
  Antisense strand to SEQ ID NO: 1807899
ucgacugagguauuacucu

SEQ ID NO: 1807901 - RNA, 19 nt, Artificial Sequence
  Description of Artificial Sequence: Synthetic oligonucleotide
  Sense strand starting at position 1298 of SEQ ID NO: 1563269
aguaauaccucagucgaaa

SEQ ID NO: 1807902 - RNA, 19 nt, Artificial Sequence
  Description of Artificial Sequence: Synthetic oligonucleotide
  Antisense strand to SEQ ID NO: 1807901
uuucgacugagguauuacu

SEQ ID NO: 1807903 - RNA, 19 nt, Artificial Sequence
  Description of Artificial Sequence: Synthetic oligonucleotide
  Sense strand starting at position 1319 of SEQ ID NO: 1563269
aggaauuucuaaugacaga

SEQ ID NO: 1807904 - RNA, 19 nt, Artificial Sequence
  Description of Artificial Sequence: Synthetic oligonucleotide
  Antisense strand to SEQ ID NO: 1807903
ucugucauuagaaauuccu

SEQ ID NO: 1807905 - RNA, 19 nt, Artificial Sequence
  Description of Artificial Sequence: Synthetic oligonucleotide
  Sense strand starting at position 1631 of SEQ ID NO: 1563269
uugugauagcuuugaggga

SEQ ID NO: 1807906 - RNA, 19 nt, Artificial Sequence
  Description of Artificial Sequence: Synthetic oligonucleotide
  Antisense strand to SEQ ID NO: 1807905
ucccucaaagcuaucacaa

SEQ ID NO: 1807907 - RNA, 19 nt, Artificial Sequence
  Description of Artificial Sequence: Synthetic oligonucleotide
  Sense strand starting at position 1771 of SEQ ID NO: 1563269
ugcccaccucggugaauuu

SEQ ID NO: 1807908 - RNA, 19 nt, Artificial Sequence
  Description of Artificial Sequence: Synthetic oligonucleotide
  Antisense strand to SEQ ID NO: 1807907
aaauucaccgaggugggca

SEQ ID NO: 1807909 - RNA, 19 nt, Artificial Sequence
  Description of Artificial Sequence: Synthetic oligonucleotide
  Sense strand starting at position 1991 of SEQ ID NO: 1563269
gucagagacuuauuacaga

SEQ ID NO: 1807910 - RNA, 19 nt, Artificial Sequence
  Description of Artificial Sequence: Synthetic oligonucleotide
  Antisense strand to SEQ ID NO: 1807909
ucuguaauaagucucugac

SEQ ID NO: 1807911 - RNA, 19 nt, Artificial Sequence
  Description of Artificial Sequence: Synthetic oligonucleotide
  Sense strand starting at position 2290 of SEQ ID NO: 1563269
gggaguaagcugcauaaac

SEQ ID NO: 1807912 - RNA, 19 nt, Artificial Sequence
  Description of Artificial Sequence: Synthetic oligonucleotide
  Antisense strand to SEQ ID NO: 1807911
guuuaugcagcuuacuccc

SEQ ID NO: 1807913 - RNA, 19 nt, Artificial Sequence
  Description of Artificial Sequence: Synthetic oligonucleotide
  Sense strand starting at position 2438 of SEQ ID NO: 1563269
ggcaaacauggguacugua

SEQ ID NO: 1807914 - RNA, 19 nt, Artificial Sequence
  Description of Artificial Sequence: Synthetic oligonucleotide
  Antisense strand to SEQ ID NO: 1807913
uacaguacccauguuugcc

SEQ ID NO: 1807915 - RNA, 19 nt, Artificial Sequence
  Description of Artificial Sequence: Synthetic oligonucleotide
  Sense strand starting at position 2952 of SEQ ID NO: 1563269
caugcuguggaguaguaga

SEQ ID NO: 1807916 - RNA, 19 nt, Artificial Sequence
  Description of Artificial Sequence: Synthetic oligonucleotide
  Antisense strand to SEQ ID NO: 1807915
ucuacuacuccacagcaug

SEQ ID NO: 1807917 - RNA, 19 nt, Artificial Sequence
  Description of Artificial Sequence: Synthetic oligonucleotide
  Sense strand starting at position 3188 of SEQ ID NO: 1563269
auaccuacaguuuauguaa

SEQ ID NO: 1807918 - RNA, 19 nt, Artificial Sequence
  Description of Artificial Sequence: Synthetic oligonucleotide
  Antisense strand to SEQ ID NO: 1807917
uuacauaaacuguagguau

SEQ ID NO: 1807919 - RNA, 19 nt, Artificial Sequence
  Description of Artificial Sequence: Synthetic oligonucleotide
  Sense strand starting at position 3224 of SEQ ID NO: 1563269
auaacauaucguggaccua

SEQ ID NO: 1807920 - RNA, 19 nt, Artificial Sequence
  Description of Artificial Sequence: Synthetic oligonucleotide
  Antisense strand to SEQ ID NO: 1807919
uagguccacgauauguuau

SEQ ID NO: 1807921 - RNA, 19 nt, Artificial Sequence
  Description of Artificial Sequence: Synthetic oligonucleotide
  Sense strand starting at position 3225 of SEQ ID NO: 1563269
uaacauaucguggaccuau

SEQ ID NO: 1807922 - RNA, 19 nt, Artificial Sequence
  Description of Artificial Sequence: Synthetic oligonucleotide
  Antisense strand to SEQ ID NO: 1807921
auagguccacgauauguua

SEQ ID NO: 1807923 - RNA, 19 nt, Artificial Sequence
  Description of Artificial Sequence: Synthetic oligonucleotide
  Sense strand starting at position 3408 of SEQ ID NO: 1563269
auagaauugcuaggugaaa

SEQ ID NO: 1807924 - RNA, 19 nt, Artificial Sequence
  Description of Artificial Sequence: Synthetic oligonucleotide
  Antisense strand to SEQ ID NO: 1807923
uuucaccuagcaauucuau

SEQ ID NO: 1807925 - RNA, 19 nt, Artificial Sequence
  Description of Artificial Sequence: Synthetic oligonucleotide
  Sense strand starting at position 3409 of SEQ ID NO: 1563269
uagaauugcuaggugaaag

SEQ ID NO: 1807926 - RNA, 19 nt, Artificial Sequence
  Description of Artificial Sequence: Synthetic oligonucleotide
  Antisense strand to SEQ ID NO: 1807925
cuuucaccuagcaauucua

SEQ ID NO: 1807927 - RNA, 19 nt, Artificial Sequence
  Description of Artificial Sequence: Synthetic oligonucleotide
  Sense strand starting at position 3410 of SEQ ID NO: 1563269
agaauugcuaggugaaaga

SEQ ID NO: 1807928 - RNA, 19 nt, Artificial Sequence
  Description of Artificial Sequence: Synthetic oligonucleotide
  Antisense strand to SEQ ID NO: 1807927
ucuuucaccuagcaauucu

SEQ ID NO: 1807929 - RNA, 19 nt, Artificial Sequence
  Description of Artificial Sequence: Synthetic oligonucleotide
  Sense strand starting at position 3494 of SEQ ID NO: 1563269
ugaggaaaccucggcccaa

SEQ ID NO: 1807930 - RNA, 19 nt, Artificial Sequence
  Description of Artificial Sequence: Synthetic oligonucleotide
  Antisense strand to SEQ ID NO: 1807929
uugggccgagguuuccuca

SEQ ID NO: 1807931 - RNA, 19 nt, Artificial Sequence
  Description of Artificial Sequence: Synthetic oligonucleotide
  Sense strand starting at position 3495 of SEQ ID NO: 1563269
gaggaaaccucggcccaau

SEQ ID NO: 1807932 - RNA, 19 nt, Artificial Sequence
  Description of Artificial Sequence: Synthetic oligonucleotide
  Antisense strand to SEQ ID NO: 1807931
auugggccgagguuuccuc

SEQ ID NO: 1807933 - RNA, 19 nt, Artificial Sequence
  Description of Artificial Sequence: Synthetic oligonucleotide
  Sense strand starting at position 3537 of SEQ ID NO: 1563269
ucccaaguugagcaguaau

SEQ ID NO: 1807934 - RNA, 19 nt, Artificial Sequence
  Description of Artificial Sequence: Synthetic oligonucleotide
  Antisense strand to SEQ ID NO: 1807933
auuacugcucaacuuggga

SEQ ID NO: 1807935 - RNA, 19 nt, Artificial Sequence
  Description of Artificial Sequence: Synthetic oligonucleotide
  Sense strand starting at position 3540 of SEQ ID NO: 1563269
caaguugagcaguaauagu

SEQ ID NO: 1807936 - RNA, 19 nt, Artificial Sequence
  Description of Artificial Sequence: Synthetic oligonucleotide
  Antisense strand to SEQ ID NO: 1807935
acuauuacugcucaacuug

SEQ ID NO: 1807937 - RNA, 19 nt, Artificial Sequence
  Description of Artificial Sequence: Synthetic oligonucleotide
  Sense strand starting at position 3554 of SEQ ID NO: 1563269
auaguuagacuuggaaucu

SEQ ID NO: 1807938 - RNA, 19 nt, Artificial Sequence
  Description of Artificial Sequence: Synthetic oligonucleotide
  Antisense strand to SEQ ID NO: 1807937
agauuccaagucuaacuau

SEQ ID NO: 1807939 - RNA, 19 nt, Artificial Sequence
  Description of Artificial Sequence: Synthetic oligonucleotide
  Sense strand starting at position 3566 of SEQ ID NO: 1563269
ggaaucuaggucuguagau

SEQ ID NO: 1807940 - RNA, 19 nt, Artificial Sequence
  Description of Artificial Sequence: Synthetic oligonucleotide
  Antisense strand to SEQ ID NO: 1807939
aucuacagaccuagauucc

SEQ ID NO: 1807941 - RNA, 19 nt, Artificial Sequence
  Description of Artificial Sequence: Synthetic oligonucleotide
  Sense strand starting at position 3567 of SEQ ID NO: 1563269
gaaucuaggucuguagaua

SEQ ID NO: 1807942 - RNA, 19 nt, Artificial Sequence
  Description of Artificial Sequence: Synthetic oligonucleotide
  Antisense strand to SEQ ID NO: 1807941
uaucuacagaccuagauuc

SEQ ID NO: 1807943 - RNA, 19 nt, Artificial Sequence
  Description of Artificial Sequence: Synthetic oligonucleotide
  Sense strand starting at position 3568 of SEQ ID NO: 1563269
aaucuaggucuguagauau

SEQ ID NO: 1807944 - RNA, 19 nt, Artificial Sequence
  Description of Artificial Sequence: Synthetic oligonucleotide
  Antisense strand to SEQ ID NO: 1807943
auaucuacagaccuagauu

SEQ ID NO: 1807945 - RNA, 19 nt, Artificial Sequence
  Description of Artificial Sequence: Synthetic oligonucleotide
  Sense strand starting at position 3581 of SEQ ID NO: 1563269
agauaucuagcuuggcaaa

SEQ ID NO: 1807946 - RNA, 19 nt, Artificial Sequence
  Description of Artificial Sequence: Synthetic oligonucleotide
  Antisense strand to SEQ ID NO: 1807945
uuugccaagcuagauaucu

SEQ ID NO: 1807947 - RNA, 19 nt, Artificial Sequence
  Description of Artificial Sequence: Synthetic oligonucleotide
  Sense strand starting at position 3786 of SEQ ID NO: 1563269
gucauuaugcuugacucua

SEQ ID NO: 1807948 - RNA, 19 nt, Artificial Sequence
  Description of Artificial Sequence: Synthetic oligonucleotide
  Antisense strand to SEQ ID NO: 1807947
uagagucaagcauaaugac

SEQ ID NO: 1807949 - RNA, 19 nt, Artificial Sequence
  Description of Artificial Sequence: Synthetic oligonucleotide
  Sense strand starting at position 3836 of SEQ ID NO: 1563269
auuuguugccuagggugaa

SEQ ID NO: 1807950 - RNA, 19 nt, Artificial Sequence
  Description of Artificial Sequence: Synthetic oligonucleotide
  Antisense strand to SEQ ID NO: 1807949
uucacccuaggcaacaaau

SEQ ID NO: 1807951 - RNA, 19 nt, Artificial Sequence
  Description of Artificial Sequence: Synthetic oligonucleotide
  Sense strand starting at position 3848 of SEQ ID NO: 1563269
gggugaacucagugaagca

SEQ ID NO: 1807952 - RNA, 19 nt, Artificial Sequence
  Description of Artificial Sequence: Synthetic oligonucleotide
  Antisense strand to SEQ ID NO: 1807951
ugcuucacugaguucaccc

SEQ ID NO: 1807953 - RNA, 19 nt, Artificial Sequence
  Description of Artificial Sequence: Synthetic oligonucleotide
  Sense strand starting at position 3849 of SEQ ID NO: 1563269
ggugaacucagugaagcaa

SEQ ID NO: 1807954 - RNA, 19 nt, Artificial Sequence
  Description of Artificial Sequence: Synthetic oligonucleotide
  Antisense strand to SEQ ID NO: 1807953
uugcuucacugaguucacc

SEQ ID NO: 1807955 - RNA, 19 nt, Artificial Sequence
  Description of Artificial Sequence: Synthetic oligonucleotide
  Sense strand starting at position 14 of SEQ ID NO: 1563270
auuauugguuccuuugaaa

SEQ ID NO: 1807956 - RNA, 19 nt, Artificial Sequence
  Description of Artificial Sequence: Synthetic oligonucleotide
  Antisense strand to SEQ ID NO: 1807955
uuucaaaggaaccaauaau

SEQ ID NO: 1807957 - RNA, 19 nt, Artificial Sequence
  Description of Artificial Sequence: Synthetic oligonucleotide
  Sense strand starting at position 156 of SEQ ID NO: 1563270
ucaggagucuaauugaguu

SEQ ID NO: 1807958 - RNA, 19 nt, Artificial Sequence
  Description of Artificial Sequence: Synthetic oligonucleotide
  Antisense strand to SEQ ID NO: 1807957
aacucaauuagacuccuga

SEQ ID NO: 1807959 - RNA, 19 nt, Artificial Sequence
  Description of Artificial Sequence: Synthetic oligonucleotide
  Sense strand starting at position 160 of SEQ ID NO: 1563270
gagucuaauugaguugaau

SEQ ID NO: 1807960 - RNA, 19 nt, Artificial Sequence
  Description of Artificial Sequence: Synthetic oligonucleotide
  Antisense strand to SEQ ID NO: 1807959
auucaacucaauuagacuc

SEQ ID NO: 1807961 - RNA, 19 nt, Artificial Sequence
  Description of Artificial Sequence: Synthetic oligonucleotide
  Sense strand starting at position 162 of SEQ ID NO: 1563270
gucuaauugaguugaauga

SEQ ID NO: 1807962 - RNA, 19 nt, Artificial Sequence
  Description of Artificial Sequence: Synthetic oligonucleotide
  Antisense strand to SEQ ID NO: 1807961
ucauucaacucaauuagac

SEQ ID NO: 1807963 - RNA, 19 nt, Artificial Sequence
  Description of Artificial Sequence: Synthetic oligonucleotide
  Sense strand starting at position 196 of SEQ ID NO: 1563270
ggaacacuuuaguuaccca

SEQ ID NO: 1807964 - RNA, 19 nt, Artificial Sequence
  Description of Artificial Sequence: Synthetic oligonucleotide
  Antisense strand to SEQ ID NO: 1807963
uggguaacuaaaguguucc

SEQ ID NO: 1807965 - RNA, 19 nt, Artificial Sequence
  Description of Artificial Sequence: Synthetic oligonucleotide
  Sense strand starting at position 204 of SEQ ID NO: 1563270
uuaguuacccagugaagag

SEQ ID NO: 1807966 - RNA, 19 nt, Artificial Sequence
  Description of Artificial Sequence: Synthetic oligonucleotide
  Antisense strand to SEQ ID NO: 1807965
cucuucacuggguaacuaa

SEQ ID NO: 1807967 - RNA, 19 nt, Artificial Sequence
  Description of Artificial Sequence: Synthetic oligonucleotide
  Sense strand starting at position 287 of SEQ ID NO: 1563270
auccuaucugagcaguuau

SEQ ID NO: 1807968 - RNA, 19 nt, Artificial Sequence
  Description of Artificial Sequence: Synthetic oligonucleotide
  Antisense strand to SEQ ID NO: 1807967
auaacugcucagauaggau

SEQ ID NO: 1807969 - RNA, 19 nt, Artificial Sequence
  Description of Artificial Sequence: Synthetic oligonucleotide
  Sense strand starting at position 336 of SEQ ID NO: 1563270
gucgcucuuaugcccgaua

SEQ ID NO: 1807970 - RNA, 19 nt, Artificial Sequence
  Description of Artificial Sequence: Synthetic oligonucleotide
  Antisense strand to SEQ ID NO: 1807969
uaucgggcauaagagcgac

SEQ ID NO: 1807971 - RNA, 19 nt, Artificial Sequence
  Description of Artificial Sequence: Synthetic oligonucleotide
  Sense strand starting at position 439 of SEQ ID NO: 1563270
auguccuugguguauauau

SEQ ID NO: 1807972 - RNA, 19 nt, Artificial Sequence
  Description of Artificial Sequence: Synthetic oligonucleotide
  Antisense strand to SEQ ID NO: 1807971
auauauacaccaaggacau

SEQ ID NO: 1807973 - RNA, 19 nt, Artificial Sequence
  Description of Artificial Sequence: Synthetic oligonucleotide
  Sense strand starting at position 446 of SEQ ID NO: 1563270
ugguguauauaugugacaa

SEQ ID NO: 1807974 - RNA, 19 nt, Artificial Sequence
  Description of Artificial Sequence: Synthetic oligonucleotide
  Antisense strand to SEQ ID NO: 1807973
uugucacauauauacacca

SEQ ID NO: 1807975 - RNA, 19 nt, Artificial Sequence
  Description of Artificial Sequence: Synthetic oligonucleotide
  Sense strand starting at position 447 of SEQ ID NO: 1563270
gguguauauaugugacaag

SEQ ID NO: 1807976 - RNA, 19 nt, Artificial Sequence
  Description of Artificial Sequence: Synthetic oligonucleotide
  Antisense strand to SEQ ID NO: 1807975
cuugucacauauauacacc

SEQ ID NO: 1807977 - RNA, 19 nt, Artificial Sequence
  Description of Artificial Sequence: Synthetic oligonucleotide
  Sense strand starting at position 671 of SEQ ID NO: 1563270
guuguaaugaaguaguaau

SEQ ID NO: 1807978 - RNA, 19 nt, Artificial Sequence
  Description of Artificial Sequence: Synthetic oligonucleotide
  Antisense strand to SEQ ID NO: 1807977
auuacuacuucauuacaac

SEQ ID NO: 1807979 - RNA, 19 nt, Artificial Sequence
  Description of Artificial Sequence: Synthetic oligonucleotide
  Sense strand starting at position 780 of SEQ ID NO: 1563270
uagguaacauauguaaagu

SEQ ID NO: 1807980 - RNA, 19 nt, Artificial Sequence
  Description of Artificial Sequence: Synthetic oligonucleotide
  Antisense strand to SEQ ID NO: 1807979
acuuuacauauguuaccua

SEQ ID NO: 1807981 - RNA, 19 nt, Artificial Sequence
  Description of Artificial Sequence: Synthetic oligonucleotide
  Sense strand starting at position 819 of SEQ ID NO: 1563270
caauaugaguuuguuauug

SEQ ID NO: 1807982 - RNA, 19 nt, Artificial Sequence
  Description of Artificial Sequence: Synthetic oligonucleotide
  Antisense strand to SEQ ID NO: 1807981
caauaacaaacucauauug

SEQ ID NO: 1807983 - RNA, 19 nt, Artificial Sequence
  Description of Artificial Sequence: Synthetic oligonucleotide
  Sense strand starting at position 896 of SEQ ID NO: 1563270
guuaauguaagcgaggauu

SEQ ID NO: 1807984 - RNA, 19 nt, Artificial Sequence
  Description of Artificial Sequence: Synthetic oligonucleotide
  Antisense strand to SEQ ID NO: 1807983
aauccucgcuuacauuaac

SEQ ID NO: 1807985 - RNA, 19 nt, Artificial Sequence
  Description of Artificial Sequence: Synthetic oligonucleotide
  Sense strand starting at position 959 of SEQ ID NO: 1563270
uucuuucuugaugagcuaa

SEQ ID NO: 1807986 - RNA, 19 nt, Artificial Sequence
  Description of Artificial Sequence: Synthetic oligonucleotide
  Antisense strand to SEQ ID NO: 1807985
uuagcucaucaagaaagaa

SEQ ID NO: 1807987 - RNA, 19 nt, Artificial Sequence
  Description of Artificial Sequence: Synthetic oligonucleotide
  Sense strand starting at position 961 of SEQ ID NO: 1563270
cuuucuugaugagcuaauu

SEQ ID NO: 1807988 - RNA, 19 nt, Artificial Sequence
  Description of Artificial Sequence: Synthetic oligonucleotide
  Antisense strand to SEQ ID NO: 1807987
aauuagcucaucaagaaag

SEQ ID NO: 1807989 - RNA, 19 nt, Artificial Sequence
  Description of Artificial Sequence: Synthetic oligonucleotide
  Sense strand starting at position 1205 of SEQ ID NO: 1563270
gaaaguucugucuaggcua

SEQ ID NO: 1807990 - RNA, 19 nt, Artificial Sequence
  Description of Artificial Sequence: Synthetic oligonucleotide
  Antisense strand to SEQ ID NO: 1807989
uagccuagacagaacuuuc

SEQ ID NO: 1807991 - RNA, 19 nt, Artificial Sequence
  Description of Artificial Sequence: Synthetic oligonucleotide
  Sense strand starting at position 1432 of SEQ ID NO: 1563270
auaauuuagucgcucacua

SEQ ID NO: 1807992 - RNA, 19 nt, Artificial Sequence
  Description of Artificial Sequence: Synthetic oligonucleotide
  Antisense strand to SEQ ID NO: 1807991
uagugagcgacuaaauuau

SEQ ID NO: 1807993 - RNA, 19 nt, Artificial Sequence
  Description of Artificial Sequence: Synthetic oligonucleotide
  Sense strand starting at position 1543 of SEQ ID NO: 1563270
ggcauucuucuagaacuca

SEQ ID NO: 1807994 - RNA, 19 nt, Artificial Sequence
  Description of Artificial Sequence: Synthetic oligonucleotide
  Antisense strand to SEQ ID NO: 1807993
ugaguucuagaagaaugcc

SEQ ID NO: 1807995 - RNA, 19 nt, Artificial Sequence
  Description of Artificial Sequence: Synthetic oligonucleotide
  Sense strand starting at position 1781 of SEQ ID NO: 1563270
uccuguagaguccacaaua

SEQ ID NO: 1807996 - RNA, 19 nt, Artificial Sequence
  Description of Artificial Sequence: Synthetic oligonucleotide
  Antisense strand to SEQ ID NO: 1807995
uauuguggacucuacagga

SEQ ID NO: 1807997 - RNA, 19 nt, Artificial Sequence
  Description of Artificial Sequence: Synthetic oligonucleotide
  Sense strand starting at position 1969 of SEQ ID NO: 1563270
cuucuuccucgugaucuaa

SEQ ID NO: 1807998 - RNA, 19 nt, Artificial Sequence
  Description of Artificial Sequence: Synthetic oligonucleotide
  Antisense strand to SEQ ID NO: 1807997
uuagaucacgaggaagaag

SEQ ID NO: 1807999 - RNA, 19 nt, Artificial Sequence
  Description of Artificial Sequence: Synthetic oligonucleotide
  Sense strand starting at position 2047 of SEQ ID NO: 1563270
gguguuuccagagaggcuu

SEQ ID NO: 1808000 - RNA, 19 nt, Artificial Sequence
  Description of Artificial Sequence: Synthetic oligonucleotide
  Antisense strand to SEQ ID NO: 1807999
aagccucucuggaaacacc

SEQ ID NO: 1808001 - RNA, 19 nt, Artificial Sequence
  Description of Artificial Sequence: Synthetic oligonucleotide
  Sense strand starting at position 2277 of SEQ ID NO: 1563270
aaggauguuuauccaguga

SEQ ID NO: 1808002 - RNA, 19 nt, Artificial Sequence
  Description of Artificial Sequence: Synthetic oligonucleotide
  Antisense strand to SEQ ID NO: 1808001
ucacuggauaaacauccuu

SEQ ID NO: 1808003 - RNA, 19 nt, Artificial Sequence
  Description of Artificial Sequence: Synthetic oligonucleotide
  Sense strand starting at position 2499 of SEQ ID NO: 1563270
acagaucacuuccuuguuu

SEQ ID NO: 1808004 - RNA, 19 nt, Artificial Sequence
  Description of Artificial Sequence: Synthetic oligonucleotide
  Antisense strand to SEQ ID NO: 1808003
aaacaaggaagugaucugu

SEQ ID NO: 1808005 - RNA, 19 nt, Artificial Sequence
  Description of Artificial Sequence: Synthetic oligonucleotide
  Sense strand starting at position 2548 of SEQ ID NO: 1563270
cuguauuucugcuugucaa

SEQ ID NO: 1808006 - RNA, 19 nt, Artificial Sequence
  Description of Artificial Sequence: Synthetic oligonucleotide
  Antisense strand to SEQ ID NO: 1808005
uugacaagcagaaauacag

SEQ ID NO: 1808007 - RNA, 19 nt, Artificial Sequence
  Description of Artificial Sequence: Synthetic oligonucleotide
  Sense strand starting at position 2549 of SEQ ID NO: 1563270
uguauuucugcuugucaac

SEQ ID NO: 1808008 - RNA, 19 nt, Artificial Sequence
  Description of Artificial Sequence: Synthetic oligonucleotide
  Antisense strand to SEQ ID NO: 1808007
guugacaagcagaaauaca

SEQ ID NO: 1808009 - RNA, 19 nt, Artificial Sequence
  Description of Artificial Sequence: Synthetic oligonucleotide
  Sense strand starting at position 2596 of SEQ ID NO: 1563270
cugaaugucucugugagau

SEQ ID NO: 1808010 - RNA, 19 nt, Artificial Sequence
  Description of Artificial Sequence: Synthetic oligonucleotide
  Antisense strand to SEQ ID NO: 1808009
aucucacagagacauucag

SEQ ID NO: 1808011 - RNA, 19 nt, Artificial Sequence
  Description of Artificial Sequence: Synthetic oligonucleotide
  Sense strand starting at position 2634 of SEQ ID NO: 1563270
uucugacagcuguaucuga

SEQ ID NO: 1808012 - RNA, 19 nt, Artificial Sequence
  Description of Artificial Sequence: Synthetic oligonucleotide
  Antisense strand to SEQ ID NO: 1808011
ucagauacagcugucagaa

SEQ ID NO: 1808013 - RNA, 19 nt, Artificial Sequence
  Description of Artificial Sequence: Synthetic oligonucleotide
  Sense strand starting at position 2691 of SEQ ID NO: 1563270
aaccucuuuggugggaaga

SEQ ID NO: 1808014 - RNA, 19 nt, Artificial Sequence
  Description of Artificial Sequence: Synthetic oligonucleotide
  Antisense strand to SEQ ID NO: 1808013
ucuucccaccaaagagguu

SEQ ID NO: 1808015 - RNA, 19 nt, Artificial Sequence
  Description of Artificial Sequence: Synthetic oligonucleotide
  Sense strand starting at position 2826 of SEQ ID NO: 1563270
cauugcccuguguaaagau

SEQ ID NO: 1808016 - RNA, 19 nt, Artificial Sequence
  Description of Artificial Sequence: Synthetic oligonucleotide
  Antisense strand to SEQ ID NO: 1808015
aucuuuacacagggcaaug

SEQ ID NO: 1808017 - RNA, 19 nt, Artificial Sequence
  Description of Artificial Sequence: Synthetic oligonucleotide
  Sense strand starting at position 2836 of SEQ ID NO: 1563270
uguaaagauuuacaggaua

SEQ ID NO: 1808018 - RNA, 19 nt, Artificial Sequence
  Description of Artificial Sequence: Synthetic oligonucleotide
  Antisense strand to SEQ ID NO: 1808017
uauccuguaaaucuuuaca

SEQ ID NO: 1808019 - RNA, 19 nt, Artificial Sequence
  Description of Artificial Sequence: Synthetic oligonucleotide
  Sense strand starting at position 2903 of SEQ ID NO: 1563270
gaaggaguggcugauaugu

SEQ ID NO: 1808020 - RNA, 19 nt, Artificial Sequence
  Description of Artificial Sequence: Synthetic oligonucleotide
  Antisense strand to SEQ ID NO: 1808019
acauaucagccacuccuuc

SEQ ID NO: 1808021 - RNA, 19 nt, Artificial Sequence
  Description of Artificial Sequence: Synthetic oligonucleotide
  Sense strand starting at position 2909 of SEQ ID NO: 1563270
guggcugauauguagguga

SEQ ID NO: 1808022 - RNA, 19 nt, Artificial Sequence
  Description of Artificial Sequence: Synthetic oligonucleotide
  Antisense strand to SEQ ID NO: 1808021
ucaccuacauaucagccac

SEQ ID NO: 1808023 - RNA, 19 nt, Artificial Sequence
  Description of Artificial Sequence: Synthetic oligonucleotide
  Sense strand starting at position 2914 of SEQ ID NO: 1563270
ugauauguaggugaguguu

SEQ ID NO: 1808024 - RNA, 19 nt, Artificial Sequence
  Description of Artificial Sequence: Synthetic oligonucleotide
  Antisense strand to SEQ ID NO: 1808023
aacacucaccuacauauca

SEQ ID NO: 1808025 - RNA, 19 nt, Artificial Sequence
  Description of Artificial Sequence: Synthetic oligonucleotide
  Sense strand starting at position 2929 of SEQ ID NO: 1563270
uguucuucuggaugaggga

SEQ ID NO: 1808026 - RNA, 19 nt, Artificial Sequence
  Description of Artificial Sequence: Synthetic oligonucleotide
  Antisense strand to SEQ ID NO: 1808025
ucccucauccagaagaaca

SEQ ID NO: 1808027 - RNA, 19 nt, Artificial Sequence
  Description of Artificial Sequence: Synthetic oligonucleotide
  Sense strand starting at position 3406 of SEQ ID NO: 1563270
agaccaaaugguugcauga

SEQ ID NO: 1808028 - RNA, 19 nt, Artificial Sequence
  Description of Artificial Sequence: Synthetic oligonucleotide
  Antisense strand to SEQ ID NO: 1808027
ucaugcaaccauuuggucu

SEQ ID NO: 1808029 - RNA, 19 nt, Artificial Sequence
  Description of Artificial Sequence: Synthetic oligonucleotide
  Sense strand starting at position 3484 of SEQ ID NO: 1563270
ccuaaugaccucuguauga

SEQ ID NO: 1808030 - RNA, 19 nt, Artificial Sequence
  Description of Artificial Sequence: Synthetic oligonucleotide
  Antisense strand to SEQ ID NO: 1808029
ucauacagaggucauuagg

SEQ ID NO: 1808031 - RNA, 19 nt, Artificial Sequence
  Description of Artificial Sequence: Synthetic oligonucleotide
  Sense strand starting at position 3555 of SEQ ID NO: 1563270
gcucacaguguuuaaauau

SEQ ID NO: 1808032 - RNA, 19 nt, Artificial Sequence
  Description of Artificial Sequence: Synthetic oligonucleotide
  Antisense strand to SEQ ID NO: 1808031
auauuuaaacacugugagc

SEQ ID NO: 1808033 - RNA, 19 nt, Artificial Sequence
  Description of Artificial Sequence: Synthetic oligonucleotide
  Sense strand starting at position 3689 of SEQ ID NO: 1563270
gugacaucuuucuuaccca

SEQ ID NO: 1808034 - RNA, 19 nt, Artificial Sequence
  Description of Artificial Sequence: Synthetic oligonucleotide
  Antisense strand to SEQ ID NO: 1808033
uggguaagaaagaugucac

SEQ ID NO: 1808035 - RNA, 19 nt, Artificial Sequence
  Description of Artificial Sequence: Synthetic oligonucleotide
  Sense strand starting at position 15 of SEQ ID NO: 1563271
guccaauuacaaugaguga

SEQ ID NO: 1808036 - RNA, 19 nt, Artificial Sequence
  Description of Artificial Sequence: Synthetic oligonucleotide
  Antisense strand to SEQ ID NO: 1808035
ucacucauuguaauuggac

SEQ ID NO: 1808037 - RNA, 19 nt, Artificial Sequence
  Description of Artificial Sequence: Synthetic oligonucleotide
  Sense strand starting at position 248 of SEQ ID NO: 1563271
cuaugaggugggcagaauu

SEQ ID NO: 1808038 - RNA, 19 nt, Artificial Sequence
  Description of Artificial Sequence: Synthetic oligonucleotide
  Antisense strand to SEQ ID NO: 1808037
aauucugcccaccucauag

SEQ ID NO: 1808039 - RNA, 19 nt, Artificial Sequence
  Description of Artificial Sequence: Synthetic oligonucleotide
  Sense strand starting at position 256 of SEQ ID NO: 1563271
ugggcagaauuauuaucau

SEQ ID NO: 1808040 - RNA, 19 nt, Artificial Sequence
  Description of Artificial Sequence: Synthetic oligonucleotide
  Antisense strand to SEQ ID NO: 1808039
augauaauaauucugccca

SEQ ID NO: 1808041 - RNA, 19 nt, Artificial Sequence
  Description of Artificial Sequence: Synthetic oligonucleotide
  Sense strand starting at position 381 of SEQ ID NO: 1563271
auguaccaggcauauaaau

SEQ ID NO: 1808042 - RNA, 19 nt, Artificial Sequence
  Description of Artificial Sequence: Synthetic oligonucleotide
  Antisense strand to SEQ ID NO: 1808041
auuuauaugccugguacau

SEQ ID NO: 1808043 - RNA, 19 nt, Artificial Sequence
  Description of Artificial Sequence: Synthetic oligonucleotide
  Sense strand starting at position 506 of SEQ ID NO: 1563271
uagugaaccucauucugga

SEQ ID NO: 1808044 - RNA, 19 nt, Artificial Sequence
  Description of Artificial Sequence: Synthetic oligonucleotide
  Antisense strand to SEQ ID NO: 1808043
uccagaaugagguucacua

SEQ ID NO: 1808045 - RNA, 19 nt, Artificial Sequence
  Description of Artificial Sequence: Synthetic oligonucleotide
  Sense strand starting at position 721 of SEQ ID NO: 1563271
uuuagacagguccaaugua

SEQ ID NO: 1808046 - RNA, 19 nt, Artificial Sequence
  Description of Artificial Sequence: Synthetic oligonucleotide
  Antisense strand to SEQ ID NO: 1808045
uacauuggaccugucuaaa

SEQ ID NO: 1808047 - RNA, 19 nt, Artificial Sequence
  Description of Artificial Sequence: Synthetic oligonucleotide
  Sense strand starting at position 798 of SEQ ID NO: 1563271
ccaugugauccuuacagau

SEQ ID NO: 1808048 - RNA, 19 nt, Artificial Sequence
  Description of Artificial Sequence: Synthetic oligonucleotide
  Antisense strand to SEQ ID NO: 1808047
aucuguaaggaucacaugg

SEQ ID NO: 1808049 - RNA, 19 nt, Artificial Sequence
  Description of Artificial Sequence: Synthetic oligonucleotide
  Sense strand starting at position 808 of SEQ ID NO: 1563271
cuuacagaucguuagguaa

SEQ ID NO: 1808050 - RNA, 19 nt, Artificial Sequence
  Description of Artificial Sequence: Synthetic oligonucleotide
  Antisense strand to SEQ ID NO: 1808049
uuaccuaacgaucuguaag

SEQ ID NO: 1808051 - RNA, 19 nt, Artificial Sequence
  Description of Artificial Sequence: Synthetic oligonucleotide
  Sense strand starting at position 889 of SEQ ID NO: 1563271
ggagacuuggguuggaacu

SEQ ID NO: 1808052 - RNA, 19 nt, Artificial Sequence
  Description of Artificial Sequence: Synthetic oligonucleotide
  Antisense strand to SEQ ID NO: 1808051
aguuccaacccaagucucc

SEQ ID NO: 1808053 - RNA, 19 nt, Artificial Sequence
  Description of Artificial Sequence: Synthetic oligonucleotide
  Sense strand starting at position 941 of SEQ ID NO: 1563271
caaguagcaccuugggaau

SEQ ID NO: 1808054 - RNA, 19 nt, Artificial Sequence
  Description of Artificial Sequence: Synthetic oligonucleotide
  Antisense strand to SEQ ID NO: 1808053
auucccaaggugcuacuug

SEQ ID NO: 1808055 - RNA, 19 nt, Artificial Sequence
  Description of Artificial Sequence: Synthetic oligonucleotide
  Sense strand starting at position 1112 of SEQ ID NO: 1563271
cuagacuugugaguuggaa

SEQ ID NO: 1808056 - RNA, 19 nt, Artificial Sequence
  Description of Artificial Sequence: Synthetic oligonucleotide
  Antisense strand to SEQ ID NO: 1808055
uuccaacucacaagucuag

SEQ ID NO: 1808057 - RNA, 19 nt, Artificial Sequence
  Description of Artificial Sequence: Synthetic oligonucleotide
  Sense strand starting at position 1114 of SEQ ID NO: 1563271
agacuugugaguuggaaga

SEQ ID NO: 1808058 - RNA, 19 nt, Artificial Sequence
  Description of Artificial Sequence: Synthetic oligonucleotide
  Antisense strand to SEQ ID NO: 1808057
ucuuccaacucacaagucu

SEQ ID NO: 1808059 - RNA, 19 nt, Artificial Sequence
  Description of Artificial Sequence: Synthetic oligonucleotide
  Sense strand starting at position 1156 of SEQ ID NO: 1563271
uuugacauaccucgaaaua

SEQ ID NO: 1808060 - RNA, 19 nt, Artificial Sequence
  Description of Artificial Sequence: Synthetic oligonucleotide
  Antisense strand to SEQ ID NO: 1808059
uauuucgagguaugucaaa

SEQ ID NO: 1808061 - RNA, 19 nt, Artificial Sequence
  Description of Artificial Sequence: Synthetic oligonucleotide
  Sense strand starting at position 1202 of SEQ ID NO: 1563271
gucugauaucaucgagaca

SEQ ID NO: 1808062 - RNA, 19 nt, Artificial Sequence
  Description of Artificial Sequence: Synthetic oligonucleotide
  Antisense strand to SEQ ID NO: 1808061
ugucucgaugauaucagac

SEQ ID NO: 1808063 - RNA, 19 nt, Artificial Sequence
  Description of Artificial Sequence: Synthetic oligonucleotide
  Sense strand starting at position 1238 of SEQ ID NO: 1563271
uugcauucuggauaccuaa

SEQ ID NO: 1808064 - RNA, 19 nt, Artificial Sequence
  Description of Artificial Sequence: Synthetic oligonucleotide
  Antisense strand to SEQ ID NO: 1808063
uuagguauccagaaugcaa

SEQ ID NO: 1808065 - RNA, 19 nt, Artificial Sequence
  Description of Artificial Sequence: Synthetic oligonucleotide
  Sense strand starting at position 1332 of SEQ ID NO: 1563271
aaagccuuuguagaaagua

SEQ ID NO: 1808066 - RNA, 19 nt, Artificial Sequence
  Description of Artificial Sequence: Synthetic oligonucleotide
  Antisense strand to SEQ ID NO: 1808065
uacuuucuacaaaggcuuu

SEQ ID NO: 1808067 - RNA, 19 nt, Artificial Sequence
  Description of Artificial Sequence: Synthetic oligonucleotide
  Sense strand starting at position 1359 of SEQ ID NO: 1563271
caagcuuaagagugauacu

SEQ ID NO: 1808068 - RNA, 19 nt, Artificial Sequence
  Description of Artificial Sequence: Synthetic oligonucleotide
  Antisense strand to SEQ ID NO: 1808067
aguaucacucuuaagcuug

SEQ ID NO: 1808069 - RNA, 19 nt, Artificial Sequence
  Description of Artificial Sequence: Synthetic oligonucleotide
  Sense strand starting at position 1432 of SEQ ID NO: 1563271
uguuucuugggcuaauuaa

SEQ ID NO: 1808070 - RNA, 19 nt, Artificial Sequence
  Description of Artificial Sequence: Synthetic oligonucleotide
  Antisense strand to SEQ ID NO: 1808069
uuaauuagcccaagaaaca

SEQ ID NO: 1808071 - RNA, 19 nt, Artificial Sequence
  Description of Artificial Sequence: Synthetic oligonucleotide
  Sense strand starting at position 1611 of SEQ ID NO: 1563271
gggagaguuguacgagauu

SEQ ID NO: 1808072 - RNA, 19 nt, Artificial Sequence
  Description of Artificial Sequence: Synthetic oligonucleotide
  Antisense strand to SEQ ID NO: 1808071
aaucucguacaacucuccc

SEQ ID NO: 1808073 - RNA, 19 nt, Artificial Sequence
  Description of Artificial Sequence: Synthetic oligonucleotide
  Sense strand starting at position 1731 of SEQ ID NO: 1563271
cgcggagaugucgucuuaa

SEQ ID NO: 1808074 - RNA, 19 nt, Artificial Sequence
  Description of Artificial Sequence: Synthetic oligonucleotide
  Antisense strand to SEQ ID NO: 1808073
uuaagacgacaucuccgcg

SEQ ID NO: 1808075 - RNA, 19 nt, Artificial Sequence
  Description of Artificial Sequence: Synthetic oligonucleotide
  Sense strand starting at position 2388 of SEQ ID NO: 1563271
ucuguuagccuggauggaa

SEQ ID NO: 1808076 - RNA, 19 nt, Artificial Sequence
  Description of Artificial Sequence: Synthetic oligonucleotide
  Antisense strand to SEQ ID NO: 1808075
uuccauccaggcuaacaga

SEQ ID NO: 1808077 - RNA, 19 nt, Artificial Sequence
  Description of Artificial Sequence: Synthetic oligonucleotide
  Sense strand starting at position 2766 of SEQ ID NO: 1563271
gagucuucugucuagggag

SEQ ID NO: 1808078 - RNA, 19 nt, Artificial Sequence
  Description of Artificial Sequence: Synthetic oligonucleotide
  Antisense strand to SEQ ID NO: 1808077
cucccuagacagaagacuc

SEQ ID NO: 1808079 - RNA, 19 nt, Artificial Sequence
  Description of Artificial Sequence: Synthetic oligonucleotide
  Sense strand starting at position 2915 of SEQ ID NO: 1563271
cuguuuacagucuaaagua

SEQ ID NO: 1808080 - RNA, 19 nt, Artificial Sequence
  Description of Artificial Sequence: Synthetic oligonucleotide
  Antisense strand to SEQ ID NO: 1808079
uacuuuagacuguaaacag

SEQ ID NO: 1808081 - RNA, 19 nt, Artificial Sequence
  Description of Artificial Sequence: Synthetic oligonucleotide
  Sense strand starting at position 2923 of SEQ ID NO: 1563271
agucuaaaguaauucucca

SEQ ID NO: 1808082 - RNA, 19 nt, Artificial Sequence
  Description of Artificial Sequence: Synthetic oligonucleotide
  Antisense strand to SEQ ID NO: 1808081
uggagaauuacuuuagacu

SEQ ID NO: 1808083 - RNA, 19 nt, Artificial Sequence
  Description of Artificial Sequence: Synthetic oligonucleotide
  Sense strand starting at position 2958 of SEQ ID NO: 1563271
gcgugaacacaugaccuaa

SEQ ID NO: 1808084 - RNA, 19 nt, Artificial Sequence
  Description of Artificial Sequence: Synthetic oligonucleotide
  Antisense strand to SEQ ID NO: 1808083
uuaggucauguguucacgc

SEQ ID NO: 1808085 - RNA, 19 nt, Artificial Sequence
  Description of Artificial Sequence: Synthetic oligonucleotide
  Sense strand starting at position 2960 of SEQ ID NO: 1563271
gugaacacaugaccuaauu

SEQ ID NO: 1808086 - RNA, 19 nt, Artificial Sequence
  Description of Artificial Sequence: Synthetic oligonucleotide
  Antisense strand to SEQ ID NO: 1808085
aauuaggucauguguucac

SEQ ID NO: 1808087 - RNA, 19 nt, Artificial Sequence
  Description of Artificial Sequence: Synthetic oligonucleotide
  Sense strand starting at position 3011 of SEQ ID NO: 1563271
aacguaaugugaucaauaa

SEQ ID NO: 1808088 - RNA, 19 nt, Artificial Sequence
  Description of Artificial Sequence: Synthetic oligonucleotide
  Antisense strand to SEQ ID NO: 1808087
uuauugaucacauuacguu

SEQ ID NO: 1808089 - RNA, 19 nt, Artificial Sequence
  Description of Artificial Sequence: Synthetic oligonucleotide
  Sense strand starting at position 3012 of SEQ ID NO: 1563271
acguaaugugaucaauaau

SEQ ID NO: 1808090 - RNA, 19 nt, Artificial Sequence
  Description of Artificial Sequence: Synthetic oligonucleotide
  Antisense strand to SEQ ID NO: 1808089
auuauugaucacauuacgu

SEQ ID NO: 1808091 - RNA, 19 nt, Artificial Sequence
  Description of Artificial Sequence: Synthetic oligonucleotide
  Sense strand starting at position 3048 of SEQ ID NO: 1563271
acucuaguugaacgaugau

SEQ ID NO: 1808092 - RNA, 19 nt, Artificial Sequence
  Description of Artificial Sequence: Synthetic oligonucleotide
  Antisense strand to SEQ ID NO: 1808091
aucaucguucaacuagagu

SEQ ID NO: 1808093 - RNA, 19 nt, Artificial Sequence
  Description of Artificial Sequence: Synthetic oligonucleotide
  Sense strand starting at position 3051 of SEQ ID NO: 1563271
cuaguugaacgaugauaca

SEQ ID NO: 1808094 - RNA, 19 nt, Artificial Sequence
  Description of Artificial Sequence: Synthetic oligonucleotide
  Antisense strand to SEQ ID NO: 1808093
uguaucaucguucaacuag

SEQ ID NO: 1808095 - RNA, 19 nt, Artificial Sequence
  Description of Artificial Sequence: Synthetic oligonucleotide
  Sense strand starting at position 3135 of SEQ ID NO: 1563271
gcgacuuuggcaguauugu

SEQ ID NO: 1808096 - RNA, 19 nt, Artificial Sequence
  Description of Artificial Sequence: Synthetic oligonucleotide
  Antisense strand to SEQ ID NO: 1808095
acaauacugccaaagucgc

SEQ ID NO: 1808097 - RNA, 19 nt, Artificial Sequence
  Description of Artificial Sequence: Synthetic oligonucleotide
  Sense strand starting at position 3616 of SEQ ID NO: 1563271
cuuaaaugccagugagaua

SEQ ID NO: 1808098 - RNA, 19 nt, Artificial Sequence
  Description of Artificial Sequence: Synthetic oligonucleotide
  Antisense strand to SEQ ID NO: 1808097
uaucucacuggcauuuaag

SEQ ID NO: 1808099 - RNA, 19 nt, Artificial Sequence
  Description of Artificial Sequence: Synthetic oligonucleotide
  Sense strand starting at position 3621 of SEQ ID NO: 1563271
augccagugagauaucagu

SEQ ID NO: 1808100 - RNA, 19 nt, Artificial Sequence
  Description of Artificial Sequence: Synthetic oligonucleotide
  Antisense strand to SEQ ID NO: 1808099
acugauaucucacuggcau

SEQ ID NO: 1808101 - RNA, 19 nt, Artificial Sequence
  Description of Artificial Sequence: Synthetic oligonucleotide
  Sense strand starting at position 3704 of SEQ ID NO: 1563271
guaaauugacagugacauu

SEQ ID NO: 1808102 - RNA, 19 nt, Artificial Sequence
  Description of Artificial Sequence: Synthetic oligonucleotide
  Antisense strand to SEQ ID NO: 1808101
aaugucacugucaauuuac

SEQ ID NO: 1808103 - RNA, 19 nt, Artificial Sequence
  Description of Artificial Sequence: Synthetic oligonucleotide
  Sense strand starting at position 3735 of SEQ ID NO: 1563271
gauggaccucagugaucuc

SEQ ID NO: 1808104 - RNA, 19 nt, Artificial Sequence
  Description of Artificial Sequence: Synthetic oligonucleotide
  Antisense strand to SEQ ID NO: 1808103
gagaucacugagguccauc

SEQ ID NO: 1808105 - RNA, 19 nt, Artificial Sequence
  Description of Artificial Sequence: Synthetic oligonucleotide
  Sense strand starting at position 3738 of SEQ ID NO: 1563271
ggaccucagugaucucaga

SEQ ID NO: 1808106 - RNA, 19 nt, Artificial Sequence
  Description of Artificial Sequence: Synthetic oligonucleotide
  Antisense strand to SEQ ID NO: 1808105
ucugagaucacugaggucc

SEQ ID NO: 1808107 - RNA, 19 nt, Artificial Sequence
  Description of Artificial Sequence: Synthetic oligonucleotide
  Sense strand starting at position 3773 of SEQ ID NO: 1563271
aauacuugacguggugaaa

SEQ ID NO: 1808108 - RNA, 19 nt, Artificial Sequence
  Description of Artificial Sequence: Synthetic oligonucleotide
  Antisense strand to SEQ ID NO: 1808107
uuucaccacgucaaguauu

SEQ ID NO: 1808109 - RNA, 19 nt, Artificial Sequence
  Description of Artificial Sequence: Synthetic oligonucleotide
  Sense strand starting at position 3788 of SEQ ID NO: 1563271
gaaaccuuucgguaacauu

SEQ ID NO: 1808110 - RNA, 19 nt, Artificial Sequence
  Description of Artificial Sequence: Synthetic oligonucleotide
  Antisense strand to SEQ ID NO: 1808109
aauguuaccgaaagguuuc

SEQ ID NO: 1808111 - RNA, 19 nt, Artificial Sequence
  Description of Artificial Sequence: Synthetic oligonucleotide
  Sense strand starting at position 3856 of SEQ ID NO: 1563271
cuuaguucccaggauucca

SEQ ID NO: 1808112 - RNA, 19 nt, Artificial Sequence
  Description of Artificial Sequence: Synthetic oligonucleotide
  Antisense strand to SEQ ID NO: 1808111
uggaauccugggaacuaag

SEQ ID NO: 1808113 - RNA, 19 nt, Artificial Sequence
  Description of Artificial Sequence: Synthetic oligonucleotide
  Sense strand starting at position 3937 of SEQ ID NO: 1563271
gcuucuaacagauagagug

SEQ ID NO: 1808114 - RNA, 19 nt, Artificial Sequence
  Description of Artificial Sequence: Synthetic oligonucleotide
  Antisense strand to SEQ ID NO: 1808113
cacucuaucuguuagaagc

SEQ ID NO: 1808115 - RNA, 19 nt, Artificial Sequence
  Description of Artificial Sequence: Synthetic oligonucleotide
  Sense strand starting at position 16 of SEQ ID NO: 1563272
ccuucuguaccaggaaaca

SEQ ID NO: 1808116 - RNA, 19 nt, Artificial Sequence
  Description of Artificial Sequence: Synthetic oligonucleotide
  Antisense strand to SEQ ID NO: 1808115
uguuuccugguacagaagg

SEQ ID NO: 1808117 - RNA, 19 nt, Artificial Sequence
  Description of Artificial Sequence: Synthetic oligonucleotide
  Sense strand starting at position 95 of SEQ ID NO: 1563272
ugcugcuugcuggaaacaa

SEQ ID NO: 1808118 - RNA, 19 nt, Artificial Sequence
  Description of Artificial Sequence: Synthetic oligonucleotide
  Antisense strand to SEQ ID NO: 1808117
uuguuuccagcaagcagca

SEQ ID NO: 1808119 - RNA, 19 nt, Artificial Sequence
  Description of Artificial Sequence: Synthetic oligonucleotide
  Sense strand starting at position 127 of SEQ ID NO: 1563272
gugggucucauguauacac

SEQ ID NO: 1808120 - RNA, 19 nt, Artificial Sequence
  Description of Artificial Sequence: Synthetic oligonucleotide
  Antisense strand to SEQ ID NO: 1808119
guguauacaugagacccac

SEQ ID NO: 1808121 - RNA, 19 nt, Artificial Sequence
  Description of Artificial Sequence: Synthetic oligonucleotide
  Sense strand starting at position 483 of SEQ ID NO: 1563272
gcaugaucaccaggguuua

SEQ ID NO: 1808122 - RNA, 19 nt, Artificial Sequence
  Description of Artificial Sequence: Synthetic oligonucleotide
  Antisense strand to SEQ ID NO: 1808121
uaaacccuggugaucaugc

SEQ ID NO: 1808123 - RNA, 19 nt, Artificial Sequence
  Description of Artificial Sequence: Synthetic oligonucleotide
  Sense strand starting at position 732 of SEQ ID NO: 1563272
gaagauaaguguucuaugc

SEQ ID NO: 1808124 - RNA, 19 nt, Artificial Sequence
  Description of Artificial Sequence: Synthetic oligonucleotide
  Antisense strand to SEQ ID NO: 1808123
gcauagaacacuuaucuuc

SEQ ID NO: 1808125 - RNA, 19 nt, Artificial Sequence
  Description of Artificial Sequence: Synthetic oligonucleotide
  Sense strand starting at position 922 of SEQ ID NO: 1563272
agcucagucuuucuaagag

SEQ ID NO: 1808126 - RNA, 19 nt, Artificial Sequence
  Description of Artificial Sequence: Synthetic oligonucleotide
  Antisense strand to SEQ ID NO: 1808125
cucuuagaaagacugagcu

SEQ ID NO: 1808127 - RNA, 19 nt, Artificial Sequence
  Description of Artificial Sequence: Synthetic oligonucleotide
  Sense strand starting at position 931 of SEQ ID NO: 1563272
uuucuaagagacugagcaa

SEQ ID NO: 1808128 - RNA, 19 nt, Artificial Sequence
  Description of Artificial Sequence: Synthetic oligonucleotide
  Antisense strand to SEQ ID NO: 1808127
uugcucagucucuuagaaa

SEQ ID NO: 1808129 - RNA, 19 nt, Artificial Sequence
  Description of Artificial Sequence: Synthetic oligonucleotide
  Sense strand starting at position 995 of SEQ ID NO: 1563272
ugacaaagguucucugucu

SEQ ID NO: 1808130 - RNA, 19 nt, Artificial Sequence
  Description of Artificial Sequence: Synthetic oligonucleotide
  Antisense strand to SEQ ID NO: 1808129
agacagagaaccuuuguca

SEQ ID NO: 1808131 - RNA, 19 nt, Artificial Sequence
  Description of Artificial Sequence: Synthetic oligonucleotide
  Sense strand starting at position 996 of SEQ ID NO: 1563272
gacaaagguucucugucuu

SEQ ID NO: 1808132 - RNA, 19 nt, Artificial Sequence
  Description of Artificial Sequence: Synthetic oligonucleotide
  Antisense strand to SEQ ID NO: 1808131
aagacagagaaccuuuguc

SEQ ID NO: 1808133 - RNA, 19 nt, Artificial Sequence
  Description of Artificial Sequence: Synthetic oligonucleotide
  Sense strand starting at position 1126 of SEQ ID NO: 1563272
ggcugaagcccaugaaaca

SEQ ID NO: 1808134 - RNA, 19 nt, Artificial Sequence
  Description of Artificial Sequence: Synthetic oligonucleotide
  Antisense strand to SEQ ID NO: 1808133
uguuucaugggcuucagcc

SEQ ID NO: 1808135 - RNA, 19 nt, Artificial Sequence
  Description of Artificial Sequence: Synthetic oligonucleotide
  Sense strand starting at position 1127 of SEQ ID NO: 1563272
gcugaagcccaugaaacau

SEQ ID NO: 1808136 - RNA, 19 nt, Artificial Sequence
  Description of Artificial Sequence: Synthetic oligonucleotide
  Antisense strand to SEQ ID NO: 1808135
auguuucaugggcuucagc

SEQ ID NO: 1808137 - RNA, 19 nt, Artificial Sequence
  Description of Artificial Sequence: Synthetic oligonucleotide
  Sense strand starting at position 1479 of SEQ ID NO: 1563272
uuagaugagcagugggauu

SEQ ID NO: 1808138 - RNA, 19 nt, Artificial Sequence
  Description of Artificial Sequence: Synthetic oligonucleotide
  Antisense strand to SEQ ID NO: 1808137
aaucccacugcucaucuaa

SEQ ID NO: 1808139 - RNA, 19 nt, Artificial Sequence
  Description of Artificial Sequence: Synthetic oligonucleotide
  Sense strand starting at position 1500 of SEQ ID NO: 1563272
caaggagggugguuuaaca

SEQ ID NO: 1808140 - RNA, 19 nt, Artificial Sequence
  Description of Artificial Sequence: Synthetic oligonucleotide
  Antisense strand to SEQ ID NO: 1808139
uguuaaaccacccuccuug

SEQ ID NO: 1808141 - RNA, 19 nt, Artificial Sequence
  Description of Artificial Sequence: Synthetic oligonucleotide
  Sense strand starting at position 1520 of SEQ ID NO: 1563272
ccuagaguaaggcaugauu

SEQ ID NO: 1808142 - RNA, 19 nt, Artificial Sequence
  Description of Artificial Sequence: Synthetic oligonucleotide
  Antisense strand to SEQ ID NO: 1808141
aaucaugccuuacucuagg

SEQ ID NO: 1808143 - RNA, 19 nt, Artificial Sequence
  Description of Artificial Sequence: Synthetic oligonucleotide
  Sense strand starting at position 1522 of SEQ ID NO: 1563272
uagaguaaggcaugauuau

SEQ ID NO: 1808144 - RNA, 19 nt, Artificial Sequence
  Description of Artificial Sequence: Synthetic oligonucleotide
  Antisense strand to SEQ ID NO: 1808143
auaaucaugccuuacucua

SEQ ID NO: 1808145 - RNA, 19 nt, Artificial Sequence
  Description of Artificial Sequence: Synthetic oligonucleotide
  Sense strand starting at position 1637 of SEQ ID NO: 1563272
cagccuagucaaggaguuu

SEQ ID NO: 1808146 - RNA, 19 nt, Artificial Sequence
  Description of Artificial Sequence: Synthetic oligonucleotide
  Antisense strand to SEQ ID NO: 1808145
aaacuccuugacuaggcug

SEQ ID NO: 1808147 - RNA, 19 nt, Artificial Sequence
  Description of Artificial Sequence: Synthetic oligonucleotide
  Sense strand starting at position 1638 of SEQ ID NO: 1563272
agccuagucaaggaguuua

SEQ ID NO: 1808148 - RNA, 19 nt, Artificial Sequence
  Description of Artificial Sequence: Synthetic oligonucleotide
  Antisense strand to SEQ ID NO: 1808147
uaaacuccuugacuaggcu

SEQ ID NO: 1808149 - RNA, 19 nt, Artificial Sequence
  Description of Artificial Sequence: Synthetic oligonucleotide
  Sense strand starting at position 2034 of SEQ ID NO: 1563272
cucaguguucuuugaagag

SEQ ID NO: 1808150 - RNA, 19 nt, Artificial Sequence
  Description of Artificial Sequence: Synthetic oligonucleotide
  Antisense strand to SEQ ID NO: 1808149
cucuucaaagaacacugag

SEQ ID NO: 1808151 - RNA, 19 nt, Artificial Sequence
  Description of Artificial Sequence: Synthetic oligonucleotide
  Sense strand starting at position 2173 of SEQ ID NO: 1563272
guauguugaugacuugcaa

SEQ ID NO: 1808152 - RNA, 19 nt, Artificial Sequence
  Description of Artificial Sequence: Synthetic oligonucleotide
  Antisense strand to SEQ ID NO: 1808151
uugcaagucaucaacauac

SEQ ID NO: 1808153 - RNA, 19 nt, Artificial Sequence
  Description of Artificial Sequence: Synthetic oligonucleotide
  Sense strand starting at position 2215 of SEQ ID NO: 1563272
ucccauggauaguaauuua

SEQ ID NO: 1808154 - RNA, 19 nt, Artificial Sequence
  Description of Artificial Sequence: Synthetic oligonucleotide
  Antisense strand to SEQ ID NO: 1808153
uaaauuacuauccauggga

SEQ ID NO: 1808155 - RNA, 19 nt, Artificial Sequence
  Description of Artificial Sequence: Synthetic oligonucleotide
  Sense strand starting at position 2576 of SEQ ID NO: 1563272
aaaugaguagucuaugcau

SEQ ID NO: 1808156 - RNA, 19 nt, Artificial Sequence
  Description of Artificial Sequence: Synthetic oligonucleotide
  Antisense strand to SEQ ID NO: 1808155
augcauagacuacucauuu

SEQ ID NO: 1808157 - RNA, 19 nt, Artificial Sequence
  Description of Artificial Sequence: Synthetic oligonucleotide
  Sense strand starting at position 2589 of SEQ ID NO: 1563272
augcauggucccugcauuu

SEQ ID NO: 1808158 - RNA, 19 nt, Artificial Sequence
  Description of Artificial Sequence: Synthetic oligonucleotide
  Antisense strand to SEQ ID NO: 1808157
aaaugcagggaccaugcau

SEQ ID NO: 1808159 - RNA, 19 nt, Artificial Sequence
  Description of Artificial Sequence: Synthetic oligonucleotide
  Sense strand starting at position 2650 of SEQ ID NO: 1563272
gcauaagauucugcuauau

SEQ ID NO: 1808160 - RNA, 19 nt, Artificial Sequence
  Description of Artificial Sequence: Synthetic oligonucleotide
  Antisense strand to SEQ ID NO: 1808159
auauagcagaaucuuaugc

SEQ ID NO: 1808161 - RNA, 19 nt, Artificial Sequence
  Description of Artificial Sequence: Synthetic oligonucleotide
  Sense strand starting at position 2798 of SEQ ID NO: 1563272
gacuauaaacguuaggcaa

SEQ ID NO: 1808162 - RNA, 19 nt, Artificial Sequence
  Description of Artificial Sequence: Synthetic oligonucleotide
  Antisense strand to SEQ ID NO: 1808161
uugccuaacguuuauaguc

SEQ ID NO: 1808163 - RNA, 19 nt, Artificial Sequence
  Description of Artificial Sequence: Synthetic oligonucleotide
  Sense strand starting at position 2840 of SEQ ID NO: 1563272
acaggagccaaaugugaau

SEQ ID NO: 1808164 - RNA, 19 nt, Artificial Sequence
  Description of Artificial Sequence: Synthetic oligonucleotide
  Antisense strand to SEQ ID NO: 1808163
auucacauuuggcuccugu

SEQ ID NO: 1808165 - RNA, 19 nt, Artificial Sequence
  Description of Artificial Sequence: Synthetic oligonucleotide
  Sense strand starting at position 2871 of SEQ ID NO: 1563272
ccagauuacuccuuuguga

SEQ ID NO: 1808166 - RNA, 19 nt, Artificial Sequence
  Description of Artificial Sequence: Synthetic oligonucleotide
  Antisense strand to SEQ ID NO: 1808165
ucacaaaggaguaaucugg

SEQ ID NO: 1808167 - RNA, 19 nt, Artificial Sequence
  Description of Artificial Sequence: Synthetic oligonucleotide
  Sense strand starting at position 2873 of SEQ ID NO: 1563272
agauuacuccuuugugaga

SEQ ID NO: 1808168 - RNA, 19 nt, Artificial Sequence
  Description of Artificial Sequence: Synthetic oligonucleotide
  Antisense strand to SEQ ID NO: 1808167
ucucacaaaggaguaaucu

SEQ ID NO: 1808169 - RNA, 19 nt, Artificial Sequence
  Description of Artificial Sequence: Synthetic oligonucleotide
  Sense strand starting at position 2874 of SEQ ID NO: 1563272
gauuacuccuuugugagag

SEQ ID NO: 1808170 - RNA, 19 nt, Artificial Sequence
  Description of Artificial Sequence: Synthetic oligonucleotide
  Antisense strand to SEQ ID NO: 1808169
cucucacaaaggaguaauc

SEQ ID NO: 1808171 - RNA, 19 nt, Artificial Sequence
  Description of Artificial Sequence: Synthetic oligonucleotide
  Sense strand starting at position 2936 of SEQ ID NO: 1563272
ggaugacucccuggguuag

SEQ ID NO: 1808172 - RNA, 19 nt, Artificial Sequence
  Description of Artificial Sequence: Synthetic oligonucleotide
  Antisense strand to SEQ ID NO: 1808171
cuaacccagggagucaucc

SEQ ID NO: 1808173 - RNA, 19 nt, Artificial Sequence
  Description of Artificial Sequence: Synthetic oligonucleotide
  Sense strand starting at position 3053 of SEQ ID NO: 1563272
ugcaaagagucugucccaa

SEQ ID NO: 1808174 - RNA, 19 nt, Artificial Sequence
  Description of Artificial Sequence: Synthetic oligonucleotide
  Antisense strand to SEQ ID NO: 1808173
uugggacagacucuuugca

SEQ ID NO: 1808175 - RNA, 19 nt, Artificial Sequence
  Description of Artificial Sequence: Synthetic oligonucleotide
  Sense strand starting at position 3055 of SEQ ID NO: 1563272
caaagagucugucccaagu

SEQ ID NO: 1808176 - RNA, 19 nt, Artificial Sequence
  Description of Artificial Sequence: Synthetic oligonucleotide
  Antisense strand to SEQ ID NO: 1808175
acuugggacagacucuuug

SEQ ID NO: 1808177 - RNA, 19 nt, Artificial Sequence
  Description of Artificial Sequence: Synthetic oligonucleotide
  Sense strand starting at position 3080 of SEQ ID NO: 1563272
cugagugcuuauuugcaca

SEQ ID NO: 1808178 - RNA, 19 nt, Artificial Sequence
  Description of Artificial Sequence: Synthetic oligonucleotide
  Antisense strand to SEQ ID NO: 1808177
ugugcaaauaagcacucag

SEQ ID NO: 1808179 - RNA, 19 nt, Artificial Sequence
  Description of Artificial Sequence: Synthetic oligonucleotide
  Sense strand starting at position 3082 of SEQ ID NO: 1563272
gagugcuuauuugcacaca

SEQ ID NO: 1808180 - RNA, 19 nt, Artificial Sequence
  Description of Artificial Sequence: Synthetic oligonucleotide
  Antisense strand to SEQ ID NO: 1808179
ugugugcaaauaagcacuc

SEQ ID NO: 1808181 - RNA, 19 nt, Artificial Sequence
  Description of Artificial Sequence: Synthetic oligonucleotide
  Sense strand starting at position 3192 of SEQ ID NO: 1563272
gucucaugccaccagucaa

SEQ ID NO: 1808182 - RNA, 19 nt, Artificial Sequence
  Description of Artificial Sequence: Synthetic oligonucleotide
  Antisense strand to SEQ ID NO: 1808181
uugacugguggcaugagac

SEQ ID NO: 1808183 - RNA, 19 nt, Artificial Sequence
  Description of Artificial Sequence: Synthetic oligonucleotide
  Sense strand starting at position 3263 of SEQ ID NO: 1563272
ugccucacucaugaggaau

SEQ ID NO: 1808184 - RNA, 19 nt, Artificial Sequence
  Description of Artificial Sequence: Synthetic oligonucleotide
  Antisense strand to SEQ ID NO: 1808183
auuccucaugagugaggca

SEQ ID NO: 1808185 - RNA, 19 nt, Artificial Sequence
  Description of Artificial Sequence: Synthetic oligonucleotide
  Sense strand starting at position 3274 of SEQ ID NO: 1563272
ugaggaauaacugguccuu

SEQ ID NO: 1808186 - RNA, 19 nt, Artificial Sequence
  Description of Artificial Sequence: Synthetic oligonucleotide
  Antisense strand to SEQ ID NO: 1808185
aaggaccaguuauuccuca

SEQ ID NO: 1808187 - RNA, 19 nt, Artificial Sequence
  Description of Artificial Sequence: Synthetic oligonucleotide
  Sense strand starting at position 3384 of SEQ ID NO: 1563272
ccucaagaauguuucuaga

SEQ ID NO: 1808188 - RNA, 19 nt, Artificial Sequence
  Description of Artificial Sequence: Synthetic oligonucleotide
  Antisense strand to SEQ ID NO: 1808187
ucuagaaacauucuugagg

SEQ ID NO: 1808189 - RNA, 19 nt, Artificial Sequence
  Description of Artificial Sequence: Synthetic oligonucleotide
  Sense strand starting at position 3609 of SEQ ID NO: 1563272
uaagcagggccaugaaaua

SEQ ID NO: 1808190 - RNA, 19 nt, Artificial Sequence
  Description of Artificial Sequence: Synthetic oligonucleotide
  Antisense strand to SEQ ID NO: 1808189
uauuucauggcccugcuua

SEQ ID NO: 1808191 - RNA, 19 nt, Artificial Sequence
  Description of Artificial Sequence: Synthetic oligonucleotide
  Sense strand starting at position 3892 of SEQ ID NO: 1563272
caaggcaugugaguaucaa

SEQ ID NO: 1808192 - RNA, 19 nt, Artificial Sequence
  Description of Artificial Sequence: Synthetic oligonucleotide
  Antisense strand to SEQ ID NO: 1808191
uugauacucacaugccuug

SEQ ID NO: 1808193 - RNA, 19 nt, Artificial Sequence
  Description of Artificial Sequence: Synthetic oligonucleotide
  Sense strand starting at position 3893 of SEQ ID NO: 1563272
aaggcaugugaguaucaaa

SEQ ID NO: 1808194 - RNA, 19 nt, Artificial Sequence
  Description of Artificial Sequence: Synthetic oligonucleotide
  Antisense strand to SEQ ID NO: 1808193
uuugauacucacaugccuu

SEQ ID NO: 1808195 - RNA, 19 nt, Artificial Sequence
  Description of Artificial Sequence: Synthetic oligonucleotide
  Sense strand starting at position 185 of SEQ ID NO: 1563273
ucaguuucucccugucacu

SEQ ID NO: 1808196 - RNA, 19 nt, Artificial Sequence
  Description of Artificial Sequence: Synthetic oligonucleotide
  Antisense strand to SEQ ID NO: 1808195
agugacagggagaaacuga

SEQ ID NO: 1808197 - RNA, 19 nt, Artificial Sequence
  Description of Artificial Sequence: Synthetic oligonucleotide
  Sense strand starting at position 236 of SEQ ID NO: 1563273
cuaaauuaucuggagcuua

SEQ ID NO: 1808198 - RNA, 19 nt, Artificial Sequence
  Description of Artificial Sequence: Synthetic oligonucleotide
  Antisense strand to SEQ ID NO: 1808197
uaagcuccagauaauuuag

SEQ ID NO: 1808199 - RNA, 19 nt, Artificial Sequence
  Description of Artificial Sequence: Synthetic oligonucleotide
  Sense strand starting at position 253 of SEQ ID NO: 1563273
uagaaagucugacuguuaa

SEQ ID NO: 1808200 - RNA, 19 nt, Artificial Sequence
  Description of Artificial Sequence: Synthetic oligonucleotide
  Antisense strand to SEQ ID NO: 1808199
uuaacagucagacuuucua

SEQ ID NO: 1808201 - RNA, 19 nt, Artificial Sequence
  Description of Artificial Sequence: Synthetic oligonucleotide
  Sense strand starting at position 328 of SEQ ID NO: 1563273
gccuuuggucccugacuga

SEQ ID NO: 1808202 - RNA, 19 nt, Artificial Sequence
  Description of Artificial Sequence: Synthetic oligonucleotide
  Antisense strand to SEQ ID NO: 1808201
ucagucagggaccaaaggc

SEQ ID NO: 1808203 - RNA, 19 nt, Artificial Sequence
  Description of Artificial Sequence: Synthetic oligonucleotide
  Sense strand starting at position 351 of SEQ ID NO: 1563273
ccuagaguuugcucaggua

SEQ ID NO: 1808204 - RNA, 19 nt, Artificial Sequence
  Description of Artificial Sequence: Synthetic oligonucleotide
  Antisense strand to SEQ ID NO: 1808203
uaccugagcaaacucuagg

SEQ ID NO: 1808205 - RNA, 19 nt, Artificial Sequence
  Description of Artificial Sequence: Synthetic oligonucleotide
  Sense strand starting at position 364 of SEQ ID NO: 1563273
cagguaugaccucgagcaa

SEQ ID NO: 1808206 - RNA, 19 nt, Artificial Sequence
  Description of Artificial Sequence: Synthetic oligonucleotide
  Antisense strand to SEQ ID NO: 1808205
uugcucgaggucauaccug

SEQ ID NO: 1808207 - RNA, 19 nt, Artificial Sequence
  Description of Artificial Sequence: Synthetic oligonucleotide
  Sense strand starting at position 365 of SEQ ID NO: 1563273
agguaugaccucgagcaaa

SEQ ID NO: 1808208 - RNA, 19 nt, Artificial Sequence
  Description of Artificial Sequence: Synthetic oligonucleotide
  Antisense strand to SEQ ID NO: 1808207
uuugcucgaggucauaccu

SEQ ID NO: 1808209 - RNA, 19 nt, Artificial Sequence
  Description of Artificial Sequence: Synthetic oligonucleotide
  Sense strand starting at position 376 of SEQ ID NO: 1563273
cgagcaaagcgcuaacauu

SEQ ID NO: 1808210 - RNA, 19 nt, Artificial Sequence
  Description of Artificial Sequence: Synthetic oligonucleotide
  Antisense strand to SEQ ID NO: 1808209
aauguuagcgcuuugcucg

SEQ ID NO: 1808211 - RNA, 19 nt, Artificial Sequence
  Description of Artificial Sequence: Synthetic oligonucleotide
  Sense strand starting at position 384 of SEQ ID NO: 1563273
gcgcuaacauuucccaagu

SEQ ID NO: 1808212 - RNA, 19 nt, Artificial Sequence
  Description of Artificial Sequence: Synthetic oligonucleotide
  Antisense strand to SEQ ID NO: 1808211
acuugggaaauguuagcgc

SEQ ID NO: 1808213 - RNA, 19 nt, Artificial Sequence
  Description of Artificial Sequence: Synthetic oligonucleotide
  Sense strand starting at position 386 of SEQ ID NO: 1563273
gcuaacauuucccaagugu

SEQ ID NO: 1808214 - RNA, 19 nt, Artificial Sequence
  Description of Artificial Sequence: Synthetic oligonucleotide
  Antisense strand to SEQ ID NO: 1808213
acacuugggaaauguuagc

SEQ ID NO: 1808215 - RNA, 19 nt, Artificial Sequence
  Description of Artificial Sequence: Synthetic oligonucleotide
  Sense strand starting at position 469 of SEQ ID NO: 1563273
aagaguugggccugaggau

SEQ ID NO: 1808216 - RNA, 19 nt, Artificial Sequence
  Description of Artificial Sequence: Synthetic oligonucleotide
  Antisense strand to SEQ ID NO: 1808215
auccucaggcccaacucuu

SEQ ID NO: 1808217 - RNA, 19 nt, Artificial Sequence
  Description of Artificial Sequence: Synthetic oligonucleotide
  Sense strand starting at position 603 of SEQ ID NO: 1563273
gagggugagugucuauaac

SEQ ID NO: 1808218 - RNA, 19 nt, Artificial Sequence
  Description of Artificial Sequence: Synthetic oligonucleotide
  Antisense strand to SEQ ID NO: 1808217
guuauagacacucacccuc

SEQ ID NO: 1808219 - RNA, 19 nt, Artificial Sequence
  Description of Artificial Sequence: Synthetic oligonucleotide
  Sense strand starting at position 612 of SEQ ID NO: 1563273
ugucuauaacugugguuau

SEQ ID NO: 1808220 - RNA, 19 nt, Artificial Sequence
  Description of Artificial Sequence: Synthetic oligonucleotide
  Antisense strand to SEQ ID NO: 1808219
auaaccacaguuauagaca

SEQ ID NO: 1808221 - RNA, 19 nt, Artificial Sequence
  Description of Artificial Sequence: Synthetic oligonucleotide
  Sense strand starting at position 615 of SEQ ID NO: 1563273
cuauaacugugguuauuau

SEQ ID NO: 1808222 - RNA, 19 nt, Artificial Sequence
  Description of Artificial Sequence: Synthetic oligonucleotide
  Antisense strand to SEQ ID NO: 1808221
auaauaaccacaguuauag

SEQ ID NO: 1808223 - RNA, 19 nt, Artificial Sequence
  Description of Artificial Sequence: Synthetic oligonucleotide
  Sense strand starting at position 628 of SEQ ID NO: 1563273
uauuauaaaucgccaggga

SEQ ID NO: 1808224 - RNA, 19 nt, Artificial Sequence
  Description of Artificial Sequence: Synthetic oligonucleotide
  Antisense strand to SEQ ID NO: 1808223
ucccuggcgauuuauaaua

SEQ ID NO: 1808225 - RNA, 19 nt, Artificial Sequence
  Description of Artificial Sequence: Synthetic oligonucleotide
  Sense strand starting at position 631 of SEQ ID NO: 1563273
uauaaaucgccagggacaa

SEQ ID NO: 1808226 - RNA, 19 nt, Artificial Sequence
  Description of Artificial Sequence: Synthetic oligonucleotide
  Antisense strand to SEQ ID NO: 1808225
uugucccuggcgauuuaua

SEQ ID NO: 1808227 - RNA, 19 nt, Artificial Sequence
  Description of Artificial Sequence: Synthetic oligonucleotide
  Sense strand starting at position 632 of SEQ ID NO: 1563273
auaaaucgccagggacaaa

SEQ ID NO: 1808228 - RNA, 19 nt, Artificial Sequence
  Description of Artificial Sequence: Synthetic oligonucleotide
  Antisense strand to SEQ ID NO: 1808227
uuugucccuggcgauuuau

SEQ ID NO: 1808229 - RNA, 19 nt, Artificial Sequence
  Description of Artificial Sequence: Synthetic oligonucleotide
  Sense strand starting at position 893 of SEQ ID NO: 1563273
ugggcauccucagccaaau

SEQ ID NO: 1808230 - RNA, 19 nt, Artificial Sequence
  Description of Artificial Sequence: Synthetic oligonucleotide
  Antisense strand to SEQ ID NO: 1808229
auuuggcugaggaugccca

SEQ ID NO: 1808231 - RNA, 19 nt, Artificial Sequence
  Description of Artificial Sequence: Synthetic oligonucleotide
  Sense strand starting at position 1038 of SEQ ID NO: 1563273
gcgucagcuuucccaggaa

SEQ ID NO: 1808232 - RNA, 19 nt, Artificial Sequence
  Description of Artificial Sequence: Synthetic oligonucleotide
  Antisense strand to SEQ ID NO: 1808231
uuccugggaaagcugacgc

SEQ ID NO: 1808233 - RNA, 19 nt, Artificial Sequence
  Description of Artificial Sequence: Synthetic oligonucleotide
  Sense strand starting at position 1041 of SEQ ID NO: 1563273
ucagcuuucccaggaacaa

SEQ ID NO: 1808234 - RNA, 19 nt, Artificial Sequence
  Description of Artificial Sequence: Synthetic oligonucleotide
  Antisense strand to SEQ ID NO: 1808233
uuguuccugggaaagcuga

SEQ ID NO: 1808235 - RNA, 19 nt, Artificial Sequence
  Description of Artificial Sequence: Synthetic oligonucleotide
  Sense strand starting at position 1105 of SEQ ID NO: 1563273
cacccugagcugggagaua

SEQ ID NO: 1808236 - RNA, 19 nt, Artificial Sequence
  Description of Artificial Sequence: Synthetic oligonucleotide
  Antisense strand to SEQ ID NO: 1808235
uaucucccagcucagggug

SEQ ID NO: 1808237 - RNA, 19 nt, Artificial Sequence
  Description of Artificial Sequence: Synthetic oligonucleotide
  Sense strand starting at position 1339 of SEQ ID NO: 1563273
cgacgauccgccaguggaa

SEQ ID NO: 1808238 - RNA, 19 nt, Artificial Sequence
  Description of Artificial Sequence: Synthetic oligonucleotide
  Antisense strand to SEQ ID NO: 1808237
uuccacuggcggaucgucg

SEQ ID NO: 1808239 - RNA, 19 nt, Artificial Sequence
  Description of Artificial Sequence: Synthetic oligonucleotide
  Sense strand starting at position 2665 of SEQ ID NO: 1563273
gggcuagugcugucggauc

SEQ ID NO: 1808240 - RNA, 19 nt, Artificial Sequence
  Description of Artificial Sequence: Synthetic oligonucleotide
  Antisense strand to SEQ ID NO: 1808239
gauccgacagcacuagccc

SEQ ID NO: 1808241 - RNA, 19 nt, Artificial Sequence
  Description of Artificial Sequence: Synthetic oligonucleotide
  Sense strand starting at position 2749 of SEQ ID NO: 1563273
uguggugauccugagacag

SEQ ID NO: 1808242 - RNA, 19 nt, Artificial Sequence
  Description of Artificial Sequence: Synthetic oligonucleotide
  Antisense strand to SEQ ID NO: 1808241
cugucucaggaucaccaca

SEQ ID NO: 1808243 - RNA, 19 nt, Artificial Sequence
  Description of Artificial Sequence: Synthetic oligonucleotide
  Sense strand starting at position 2813 of SEQ ID NO: 1563273
ggccaacuccucuaaagua

SEQ ID NO: 1808244 - RNA, 19 nt, Artificial Sequence
  Description of Artificial Sequence: Synthetic oligonucleotide
  Antisense strand to SEQ ID NO: 1808243
uacuuuagaggaguuggcc

SEQ ID NO: 1808245 - RNA, 19 nt, Artificial Sequence
  Description of Artificial Sequence: Synthetic oligonucleotide
  Sense strand starting at position 2889 of SEQ ID NO: 1563273
gggcaacaaugggauuuaa

SEQ ID NO: 1808246 - RNA, 19 nt, Artificial Sequence
  Description of Artificial Sequence: Synthetic oligonucleotide
  Antisense strand to SEQ ID NO: 1808245
uuaaaucccauuguugccc

SEQ ID NO: 1808247 - RNA, 19 nt, Artificial Sequence
  Description of Artificial Sequence: Synthetic oligonucleotide
  Sense strand starting at position 2971 of SEQ ID NO: 1563273
cuacuaugcaacgguuagu

SEQ ID NO: 1808248 - RNA, 19 nt, Artificial Sequence
  Description of Artificial Sequence: Synthetic oligonucleotide
  Antisense strand to SEQ ID NO: 1808247
acuaaccguugcauaguag

SEQ ID NO: 1808249 - RNA, 19 nt, Artificial Sequence
  Description of Artificial Sequence: Synthetic oligonucleotide
  Sense strand starting at position 2974 of SEQ ID NO: 1563273
cuaugcaacgguuaguaaa

SEQ ID NO: 1808250 - RNA, 19 nt, Artificial Sequence
  Description of Artificial Sequence: Synthetic oligonucleotide
  Antisense strand to SEQ ID NO: 1808249
uuuacuaaccguugcauag

SEQ ID NO: 1808251 - RNA, 19 nt, Artificial Sequence
  Description of Artificial Sequence: Synthetic oligonucleotide
  Sense strand starting at position 3026 of SEQ ID NO: 1563273
gacaaauauuccuagagug

SEQ ID NO: 1808252 - RNA, 19 nt, Artificial Sequence
  Description of Artificial Sequence: Synthetic oligonucleotide
  Antisense strand to SEQ ID NO: 1808251
cacucuaggaauauuuguc

SEQ ID NO: 1808253 - RNA, 19 nt, Artificial Sequence
  Description of Artificial Sequence: Synthetic oligonucleotide
  Sense strand starting at position 3031 of SEQ ID NO: 1563273
auauuccuagaguguagau

SEQ ID NO: 1808254 - RNA, 19 nt, Artificial Sequence
  Description of Artificial Sequence: Synthetic oligonucleotide
  Antisense strand to SEQ ID NO: 1808253
aucuacacucuaggaauau

SEQ ID NO: 1808255 - RNA, 19 nt, Artificial Sequence
  Description of Artificial Sequence: Synthetic oligonucleotide
  Sense strand starting at position 3054 of SEQ ID NO: 1563273
acucucugccaccguuaua

SEQ ID NO: 1808256 - RNA, 19 nt, Artificial Sequence
  Description of Artificial Sequence: Synthetic oligonucleotide
  Antisense strand to SEQ ID NO: 1808255
uauaacgguggcagagagu

SEQ ID NO: 1808257 - RNA, 19 nt, Artificial Sequence
  Description of Artificial Sequence: Synthetic oligonucleotide
  Sense strand starting at position 3137 of SEQ ID NO: 1563273
caguaaugucaauagguuu

SEQ ID NO: 1808258 - RNA, 19 nt, Artificial Sequence
  Description of Artificial Sequence: Synthetic oligonucleotide
  Antisense strand to SEQ ID NO: 1808257
aaaccuauugacauuacug

SEQ ID NO: 1808259 - RNA, 19 nt, Artificial Sequence
  Description of Artificial Sequence: Synthetic oligonucleotide
  Sense strand starting at position 3218 of SEQ ID NO: 1563273
uucuuuaaccggcaugagu

SEQ ID NO: 1808260 - RNA, 19 nt, Artificial Sequence
  Description of Artificial Sequence: Synthetic oligonucleotide
  Antisense strand to SEQ ID NO: 1808259
acucaugccgguuaaagaa

SEQ ID NO: 1808261 - RNA, 19 nt, Artificial Sequence
  Description of Artificial Sequence: Synthetic oligonucleotide
  Sense strand starting at position 3329 of SEQ ID NO: 1563273
gcuagugauagcgaacaag

SEQ ID NO: 1808262 - RNA, 19 nt, Artificial Sequence
  Description of Artificial Sequence: Synthetic oligonucleotide
  Antisense strand to SEQ ID NO: 1808261
cuuguucgcuaucacuagc

SEQ ID NO: 1808263 - RNA, 19 nt, Artificial Sequence
  Description of Artificial Sequence: Synthetic oligonucleotide
  Sense strand starting at position 3332 of SEQ ID NO: 1563273
agugauagcgaacaaguaa

SEQ ID NO: 1808264 - RNA, 19 nt, Artificial Sequence
  Description of Artificial Sequence: Synthetic oligonucleotide
  Antisense strand to SEQ ID NO: 1808263
uuacuuguucgcuaucacu

SEQ ID NO: 1808265 - RNA, 19 nt, Artificial Sequence
  Description of Artificial Sequence: Synthetic oligonucleotide
  Sense strand starting at position 3505 of SEQ ID NO: 1563273
gugguugugacuuacaauu

SEQ ID NO: 1808266 - RNA, 19 nt, Artificial Sequence
  Description of Artificial Sequence: Synthetic oligonucleotide
  Antisense strand to SEQ ID NO: 1808265
aauuguaagucacaaccac

SEQ ID NO: 1808267 - RNA, 19 nt, Artificial Sequence
  Description of Artificial Sequence: Synthetic oligonucleotide
  Sense strand starting at position 3539 of SEQ ID NO: 1563273
aggugugaaagguauugua

SEQ ID NO: 1808268 - RNA, 19 nt, Artificial Sequence
  Description of Artificial Sequence: Synthetic oligonucleotide
  Antisense strand to SEQ ID NO: 1808267
uacaauaccuuucacaccu

SEQ ID NO: 1808269 - RNA, 19 nt, Artificial Sequence
  Description of Artificial Sequence: Synthetic oligonucleotide
  Sense strand starting at position 3568 of SEQ ID NO: 1563273
cuuacauuccaguagaguc

SEQ ID NO: 1808270 - RNA, 19 nt, Artificial Sequence
  Description of Artificial Sequence: Synthetic oligonucleotide
  Antisense strand to SEQ ID NO: 1808269
gacucuacuggaauguaag

SEQ ID NO: 1808271 - RNA, 19 nt, Artificial Sequence
  Description of Artificial Sequence: Synthetic oligonucleotide
  Sense strand starting at position 3627 of SEQ ID NO: 1563273
agugucaguaauugaagga

SEQ ID NO: 1808272 - RNA, 19 nt, Artificial Sequence
  Description of Artificial Sequence: Synthetic oligonucleotide
  Antisense strand to SEQ ID NO: 1808271
uccuucaauuacugacacu

SEQ ID NO: 1808273 - RNA, 19 nt, Artificial Sequence
  Description of Artificial Sequence: Synthetic oligonucleotide
  Sense strand starting at position 3631 of SEQ ID NO: 1563273
ucaguaauugaaggaguag

SEQ ID NO: 1808274 - RNA, 19 nt, Artificial Sequence
  Description of Artificial Sequence: Synthetic oligonucleotide
  Antisense strand to SEQ ID NO: 1808273
cuacuccuucaauuacuga

SEQ ID NO: 1808275 - RNA, 19 nt, Artificial Sequence
  Description of Artificial Sequence: Synthetic oligonucleotide
  Sense strand starting at position 208 of SEQ ID NO: 1563274
uuaagaugcucugcaucaa

SEQ ID NO: 1808276 - RNA, 19 nt, Artificial Sequence
  Description of Artificial Sequence: Synthetic oligonucleotide
  Antisense strand to SEQ ID NO: 1808275
uugaugcagagcaucuuaa

SEQ ID NO: 1808277 - RNA, 19 nt, Artificial Sequence
  Description of Artificial Sequence: Synthetic oligonucleotide
  Sense strand starting at position 248 of SEQ ID NO: 1563274
gucuacuuugauggaagaa

SEQ ID NO: 1808278 - RNA, 19 nt, Artificial Sequence
  Description of Artificial Sequence: Synthetic oligonucleotide
  Antisense strand to SEQ ID NO: 1808277
uucuuccaucaaaguagac

SEQ ID NO: 1808279 - RNA, 19 nt, Artificial Sequence
  Description of Artificial Sequence: Synthetic oligonucleotide
  Sense strand starting at position 336 of SEQ ID NO: 1563274
uugugcucagaguaauaug

SEQ ID NO: 1808280 - RNA, 19 nt, Artificial Sequence
  Description of Artificial Sequence: Synthetic oligonucleotide
  Antisense strand to SEQ ID NO: 1808279
cauauuacucugagcacaa

SEQ ID NO: 1808281 - RNA, 19 nt, Artificial Sequence
  Description of Artificial Sequence: Synthetic oligonucleotide
  Sense strand starting at position 423 of SEQ ID NO: 1563274
ugcuaagugcuauagggaa

SEQ ID NO: 1808282 - RNA, 19 nt, Artificial Sequence
  Description of Artificial Sequence: Synthetic oligonucleotide
  Antisense strand to SEQ ID NO: 1808281
uucccuauagcacuuagca

SEQ ID NO: 1808283 - RNA, 19 nt, Artificial Sequence
  Description of Artificial Sequence: Synthetic oligonucleotide
  Sense strand starting at position 468 of SEQ ID NO: 1563274
ccagaugagcuguaacaua

SEQ ID NO: 1808284 - RNA, 19 nt, Artificial Sequence
  Description of Artificial Sequence: Synthetic oligonucleotide
  Antisense strand to SEQ ID NO: 1808283
uauguuacagcucaucugg

SEQ ID NO: 1808285 - RNA, 19 nt, Artificial Sequence
  Description of Artificial Sequence: Synthetic oligonucleotide
  Sense strand starting at position 498 of SEQ ID NO: 1563274
caaagaauugacggucacu

SEQ ID NO: 1808286 - RNA, 19 nt, Artificial Sequence
  Description of Artificial Sequence: Synthetic oligonucleotide
  Antisense strand to SEQ ID NO: 1808285
agugaccgucaauucuuug

SEQ ID NO: 1808287 - RNA, 19 nt, Artificial Sequence
  Description of Artificial Sequence: Synthetic oligonucleotide
  Sense strand starting at position 511 of SEQ ID NO: 1563274
gucacucaaccaugugaag

SEQ ID NO: 1808288 - RNA, 19 nt, Artificial Sequence
  Description of Artificial Sequence: Synthetic oligonucleotide
  Antisense strand to SEQ ID NO: 1808287
cuucacaugguugagugac

SEQ ID NO: 1808289 - RNA, 19 nt, Artificial Sequence
  Description of Artificial Sequence: Synthetic oligonucleotide
  Sense strand starting at position 529 of SEQ ID NO: 1563274
ggccuaagccaugaucuca

SEQ ID NO: 1808290 - RNA, 19 nt, Artificial Sequence
  Description of Artificial Sequence: Synthetic oligonucleotide
  Antisense strand to SEQ ID NO: 1808289
ugagaucauggcuuaggcc

SEQ ID NO: 1808291 - RNA, 19 nt, Artificial Sequence
  Description of Artificial Sequence: Synthetic oligonucleotide
  Sense strand starting at position 892 of SEQ ID NO: 1563274
ugaauaggugaugggcaaa

SEQ ID NO: 1808292 - RNA, 19 nt, Artificial Sequence
  Description of Artificial Sequence: Synthetic oligonucleotide
  Antisense strand to SEQ ID NO: 1808291
uuugcccaucaccuauuca

SEQ ID NO: 1808293 - RNA, 19 nt, Artificial Sequence
  Description of Artificial Sequence: Synthetic oligonucleotide
  Sense strand starting at position 903 of SEQ ID NO: 1563274
ugggcaaauucucaauuug

SEQ ID NO: 1808294 - RNA, 19 nt, Artificial Sequence
  Description of Artificial Sequence: Synthetic oligonucleotide
  Antisense strand to SEQ ID NO: 1808293
caaauugagaauuugccca

SEQ ID NO: 1808295 - RNA, 19 nt, Artificial Sequence
  Description of Artificial Sequence: Synthetic oligonucleotide
  Sense strand starting at position 1094 of SEQ ID NO: 1563274
ggaggucaguggcuugaau

SEQ ID NO: 1808296 - RNA, 19 nt, Artificial Sequence
  Description of Artificial Sequence: Synthetic oligonucleotide
  Antisense strand to SEQ ID NO: 1808295
auucaagccacugaccucc

SEQ ID NO: 1808297 - RNA, 19 nt, Artificial Sequence
  Description of Artificial Sequence: Synthetic oligonucleotide
  Sense strand starting at position 1096 of SEQ ID NO: 1563274
aggucaguggcuugaauga

SEQ ID NO: 1808298 - RNA, 19 nt, Artificial Sequence
  Description of Artificial Sequence: Synthetic oligonucleotide
  Antisense strand to SEQ ID NO: 1808297
ucauucaagccacugaccu

SEQ ID NO: 1808299 - RNA, 19 nt, Artificial Sequence
  Description of Artificial Sequence: Synthetic oligonucleotide
  Sense strand starting at position 1105 of SEQ ID NO: 1563274
gcuugaaugaccugaggug

SEQ ID NO: 1808300 - RNA, 19 nt, Artificial Sequence
  Description of Artificial Sequence: Synthetic oligonucleotide
  Antisense strand to SEQ ID NO: 1808299
caccucaggucauucaagc

SEQ ID NO: 1808301 - RNA, 19 nt, Artificial Sequence
  Description of Artificial Sequence: Synthetic oligonucleotide
  Sense strand starting at position 1131 of SEQ ID NO: 1563274
guuccuguugcuuaaggaa

SEQ ID NO: 1808302 - RNA, 19 nt, Artificial Sequence
  Description of Artificial Sequence: Synthetic oligonucleotide
  Antisense strand to SEQ ID NO: 1808301
uuccuuaagcaacaggaac

SEQ ID NO: 1808303 - RNA, 19 nt, Artificial Sequence
  Description of Artificial Sequence: Synthetic oligonucleotide
  Sense strand starting at position 2111 of SEQ ID NO: 1563274
gggagugacgcucaguuau

SEQ ID NO: 1808304 - RNA, 19 nt, Artificial Sequence
  Description of Artificial Sequence: Synthetic oligonucleotide
  Antisense strand to SEQ ID NO: 1808303
auaacugagcgucacuccc

SEQ ID NO: 1808305 - RNA, 19 nt, Artificial Sequence
  Description of Artificial Sequence: Synthetic oligonucleotide
  Sense strand starting at position 2113 of SEQ ID NO: 1563274
gagugacgcucaguuauuu

SEQ ID NO: 1808306 - RNA, 19 nt, Artificial Sequence
  Description of Artificial Sequence: Synthetic oligonucleotide
  Antisense strand to SEQ ID NO: 1808305
aaauaacugagcgucacuc

SEQ ID NO: 1808307 - RNA, 19 nt, Artificial Sequence
  Description of Artificial Sequence: Synthetic oligonucleotide
  Sense strand starting at position 2525 of SEQ ID NO: 1563274
guguuauauacguauaaga

SEQ ID NO: 1808308 - RNA, 19 nt, Artificial Sequence
  Description of Artificial Sequence: Synthetic oligonucleotide
  Antisense strand to SEQ ID NO: 1808307
ucuuauacguauauaacac

SEQ ID NO: 1808309 - RNA, 19 nt, Artificial Sequence
  Description of Artificial Sequence: Synthetic oligonucleotide
  Sense strand starting at position 2527 of SEQ ID NO: 1563274
guuauauacguauaagauc

SEQ ID NO: 1808310 - RNA, 19 nt, Artificial Sequence
  Description of Artificial Sequence: Synthetic oligonucleotide
  Antisense strand to SEQ ID NO: 1808309
gaucuuauacguauauaac

SEQ ID NO: 1808311 - RNA, 19 nt, Artificial Sequence
  Description of Artificial Sequence: Synthetic oligonucleotide
  Sense strand starting at position 2536 of SEQ ID NO: 1563274
guauaagaucugggagcau

SEQ ID NO: 1808312 - RNA, 19 nt, Artificial Sequence
  Description of Artificial Sequence: Synthetic oligonucleotide
  Antisense strand to SEQ ID NO: 1808311
augcucccagaucuuauac

SEQ ID NO: 1808313 - RNA, 19 nt, Artificial Sequence
  Description of Artificial Sequence: Synthetic oligonucleotide
  Sense strand starting at position 2547 of SEQ ID NO: 1563274
gggagcauucagcagguau

SEQ ID NO: 1808314 - RNA, 19 nt, Artificial Sequence
  Description of Artificial Sequence: Synthetic oligonucleotide
  Antisense strand to SEQ ID NO: 1808313
auaccugcugaaugcuccc

SEQ ID NO: 1808315 - RNA, 19 nt, Artificial Sequence
  Description of Artificial Sequence: Synthetic oligonucleotide
  Sense strand starting at position 2560 of SEQ ID NO: 1563274
agguauugguaauuauucu

SEQ ID NO: 1808316 - RNA, 19 nt, Artificial Sequence
  Description of Artificial Sequence: Synthetic oligonucleotide
  Antisense strand to SEQ ID NO: 1808315
agaauaauuaccaauaccu

SEQ ID NO: 1808317 - RNA, 19 nt, Artificial Sequence
  Description of Artificial Sequence: Synthetic oligonucleotide
  Sense strand starting at position 2645 of SEQ ID NO: 1563274
cuccuauauugagcuaaug

SEQ ID NO: 1808318 - RNA, 19 nt, Artificial Sequence
  Description of Artificial Sequence: Synthetic oligonucleotide
  Antisense strand to SEQ ID NO: 1808317
cauuagcucaauauaggag

SEQ ID NO: 1808319 - RNA, 19 nt, Artificial Sequence
  Description of Artificial Sequence: Synthetic oligonucleotide
  Sense strand starting at position 2822 of SEQ ID NO: 1563274
acuugaauguuccuuugau

SEQ ID NO: 1808320 - RNA, 19 nt, Artificial Sequence
  Description of Artificial Sequence: Synthetic oligonucleotide
  Antisense strand to SEQ ID NO: 1808319
aucaaaggaacauucaagu

SEQ ID NO: 1808321 - RNA, 19 nt, Artificial Sequence
  Description of Artificial Sequence: Synthetic oligonucleotide
  Sense strand starting at position 2895 of SEQ ID NO: 1563274
ugcggacuccuuggagaau

SEQ ID NO: 1808322 - RNA, 19 nt, Artificial Sequence
  Description of Artificial Sequence: Synthetic oligonucleotide
  Antisense strand to SEQ ID NO: 1808321
auucuccaaggaguccgca

SEQ ID NO: 1808323 - RNA, 19 nt, Artificial Sequence
  Description of Artificial Sequence: Synthetic oligonucleotide
  Sense strand starting at position 2916 of SEQ ID NO: 1563274
ucaagaauuugaugaagaa

SEQ ID NO: 1808324 - RNA, 19 nt, Artificial Sequence
  Description of Artificial Sequence: Synthetic oligonucleotide
  Antisense strand to SEQ ID NO: 1808323
uucuucaucaaauucuuga

SEQ ID NO: 1808325 - RNA, 19 nt, Artificial Sequence
  Description of Artificial Sequence: Synthetic oligonucleotide
  Sense strand starting at position 3074 of SEQ ID NO: 1563274
uucccaauagccuagugua

SEQ ID NO: 1808326 - RNA, 19 nt, Artificial Sequence
  Description of Artificial Sequence: Synthetic oligonucleotide
  Antisense strand to SEQ ID NO: 1808325
uacacuaggcuauugggaa

SEQ ID NO: 1808327 - RNA, 19 nt, Artificial Sequence
  Description of Artificial Sequence: Synthetic oligonucleotide
  Sense strand starting at position 3105 of SEQ ID NO: 1563274
aucaguguuguaugcauuu

SEQ ID NO: 1808328 - RNA, 19 nt, Artificial Sequence
  Description of Artificial Sequence: Synthetic oligonucleotide
  Antisense strand to SEQ ID NO: 1808327
aaaugcauacaacacugau

SEQ ID NO: 1808329 - RNA, 19 nt, Artificial Sequence
  Description of Artificial Sequence: Synthetic oligonucleotide
  Sense strand starting at position 3111 of SEQ ID NO: 1563274
guuguaugcauuugggcau

SEQ ID NO: 1808330 - RNA, 19 nt, Artificial Sequence
  Description of Artificial Sequence: Synthetic oligonucleotide
  Antisense strand to SEQ ID NO: 1808329
augcccaaaugcauacaac

SEQ ID NO: 1808331 - RNA, 19 nt, Artificial Sequence
  Description of Artificial Sequence: Synthetic oligonucleotide
  Sense strand starting at position 3154 of SEQ ID NO: 1563274
aucugucuuaugugggaau

SEQ ID NO: 1808332 - RNA, 19 nt, Artificial Sequence
  Description of Artificial Sequence: Synthetic oligonucleotide
  Antisense strand to SEQ ID NO: 1808331
auucccacauaagacagau

SEQ ID NO: 1808333 - RNA, 19 nt, Artificial Sequence
  Description of Artificial Sequence: Synthetic oligonucleotide
  Sense strand starting at position 3156 of SEQ ID NO: 1563274
cugucuuaugugggaauag

SEQ ID NO: 1808334 - RNA, 19 nt, Artificial Sequence
  Description of Artificial Sequence: Synthetic oligonucleotide
  Antisense strand to SEQ ID NO: 1808333
cuauucccacauaagacag

SEQ ID NO: 1808335 - RNA, 19 nt, Artificial Sequence
  Description of Artificial Sequence: Synthetic oligonucleotide
  Sense strand starting at position 3185 of SEQ ID NO: 1563274
ucucuuuauguguaaccua

SEQ ID NO: 1808336 - RNA, 19 nt, Artificial Sequence
  Description of Artificial Sequence: Synthetic oligonucleotide
  Antisense strand to SEQ ID NO: 1808335
uagguuacacauaaagaga

SEQ ID NO: 1808337 - RNA, 19 nt, Artificial Sequence
  Description of Artificial Sequence: Synthetic oligonucleotide
  Sense strand starting at position 3196 of SEQ ID NO: 1563274
guaaccuaacaguaaaguu

SEQ ID NO: 1808338 - RNA, 19 nt, Artificial Sequence
  Description of Artificial Sequence: Synthetic oligonucleotide
  Antisense strand to SEQ ID NO: 1808337
aacuuuacuguuagguuac

SEQ ID NO: 1808339 - RNA, 19 nt, Artificial Sequence
  Description of Artificial Sequence: Synthetic oligonucleotide
  Sense strand starting at position 3212 of SEQ ID NO: 1563274
guugaaaguauaugaugca

SEQ ID NO: 1808340 - RNA, 19 nt, Artificial Sequence
  Description of Artificial Sequence: Synthetic oligonucleotide
  Antisense strand to SEQ ID NO: 1808339
ugcaucauauacuuucaac

SEQ ID NO: 1808341 - RNA, 19 nt, Artificial Sequence
  Description of Artificial Sequence: Synthetic oligonucleotide
  Sense strand starting at position 3306 of SEQ ID NO: 1563274
uggaaaggugccugaaagu

SEQ ID NO: 1808342 - RNA, 19 nt, Artificial Sequence
  Description of Artificial Sequence: Synthetic oligonucleotide
  Antisense strand to SEQ ID NO: 1808341
acuuucaggcaccuuucca

SEQ ID NO: 1808343 - RNA, 19 nt, Artificial Sequence
  Description of Artificial Sequence: Synthetic oligonucleotide
  Sense strand starting at position 3312 of SEQ ID NO: 1563274
ggugccugaaagugagaaa

SEQ ID NO: 1808344 - RNA, 19 nt, Artificial Sequence
  Description of Artificial Sequence: Synthetic oligonucleotide
  Antisense strand to SEQ ID NO: 1808343
uuucucacuuucaggcacc

SEQ ID NO: 1808345 - RNA, 19 nt, Artificial Sequence
  Description of Artificial Sequence: Synthetic oligonucleotide
  Sense strand starting at position 3415 of SEQ ID NO: 1563274
auggaacuaucuccugagu

SEQ ID NO: 1808346 - RNA, 19 nt, Artificial Sequence
  Description of Artificial Sequence: Synthetic oligonucleotide
  Antisense strand to SEQ ID NO: 1808345
acucaggagauaguuccau

SEQ ID NO: 1808347 - RNA, 19 nt, Artificial Sequence
  Description of Artificial Sequence: Synthetic oligonucleotide
  Sense strand starting at position 3418 of SEQ ID NO: 1563274
gaacuaucuccugagugcu

SEQ ID NO: 1808348 - RNA, 19 nt, Artificial Sequence
  Description of Artificial Sequence: Synthetic oligonucleotide
  Antisense strand to SEQ ID NO: 1808347
agcacucaggagauaguuc

SEQ ID NO: 1808349 - RNA, 19 nt, Artificial Sequence
  Description of Artificial Sequence: Synthetic oligonucleotide
  Sense strand starting at position 3477 of SEQ ID NO: 1563274
agcacuucuuaucuagaag

SEQ ID NO: 1808350 - RNA, 19 nt, Artificial Sequence
  Description of Artificial Sequence: Synthetic oligonucleotide
  Antisense strand to SEQ ID NO: 1808349
cuucuagauaagaagugcu

SEQ ID NO: 1808351 - RNA, 19 nt, Artificial Sequence
  Description of Artificial Sequence: Synthetic oligonucleotide
  Sense strand starting at position 3538 of SEQ ID NO: 1563274
cucuguucugaguaaggaa

SEQ ID NO: 1808352 - RNA, 19 nt, Artificial Sequence
  Description of Artificial Sequence: Synthetic oligonucleotide
  Antisense strand to SEQ ID NO: 1808351
uuccuuacucagaacagag

SEQ ID NO: 1808353 - RNA, 19 nt, Artificial Sequence
  Description of Artificial Sequence: Synthetic oligonucleotide
  Sense strand starting at position 3738 of SEQ ID NO: 1563274
ucugucacugcagagaaau

SEQ ID NO: 1808354 - RNA, 19 nt, Artificial Sequence
  Description of Artificial Sequence: Synthetic oligonucleotide
  Antisense strand to SEQ ID NO: 1808353
auuucucugcagugacaga

SEQ ID NO: 1808355 - RNA, 19 nt, Artificial Sequence
  Description of Artificial Sequence: Synthetic oligonucleotide
  Sense strand starting at position 117 of SEQ ID NO: 1563275
cuggaugaauuguuaacua

SEQ ID NO: 1808356 - RNA, 19 nt, Artificial Sequence
  Description of Artificial Sequence: Synthetic oligonucleotide
  Antisense strand to SEQ ID NO: 1808355
uaguuaacaauucauccag

SEQ ID NO: 1808357 - RNA, 19 nt, Artificial Sequence
  Description of Artificial Sequence: Synthetic oligonucleotide
  Sense strand starting at position 165 of SEQ ID NO: 1563275
guuauugagccucaaggua

SEQ ID NO: 1808358 - RNA, 19 nt, Artificial Sequence
  Description of Artificial Sequence: Synthetic oligonucleotide
  Antisense strand to SEQ ID NO: 1808357
uaccuugaggcucaauaac

SEQ ID NO: 1808359 - RNA, 19 nt, Artificial Sequence
  Description of Artificial Sequence: Synthetic oligonucleotide
  Sense strand starting at position 254 of SEQ ID NO: 1563275
gcuuacgaaguccagaauu

SEQ ID NO: 1808360 - RNA, 19 nt, Artificial Sequence
  Description of Artificial Sequence: Synthetic oligonucleotide
  Antisense strand to SEQ ID NO: 1808359
aauucuggacuucguaagc

SEQ ID NO: 1808361 - RNA, 19 nt, Artificial Sequence
  Description of Artificial Sequence: Synthetic oligonucleotide
  Sense strand starting at position 267 of SEQ ID NO: 1563275
agaauuuacuuacauagga

SEQ ID NO: 1808362 - RNA, 19 nt, Artificial Sequence
  Description of Artificial Sequence: Synthetic oligonucleotide
  Antisense strand to SEQ ID NO: 1808361
uccuauguaaguaaauucu

SEQ ID NO: 1808363 - RNA, 19 nt, Artificial Sequence
  Description of Artificial Sequence: Synthetic oligonucleotide
  Sense strand starting at position 455 of SEQ ID NO: 1563275
uacguauggcccuauaaua

SEQ ID NO: 1808364 - RNA, 19 nt, Artificial Sequence
  Description of Artificial Sequence: Synthetic oligonucleotide
  Antisense strand to SEQ ID NO: 1808363
uauuauagggccauacgua

SEQ ID NO: 1808365 - RNA, 19 nt, Artificial Sequence
  Description of Artificial Sequence: Synthetic oligonucleotide
  Sense strand starting at position 578 of SEQ ID NO: 1563275
agggaauggcuuuggguau

SEQ ID NO: 1808366 - RNA, 19 nt, Artificial Sequence
  Description of Artificial Sequence: Synthetic oligonucleotide
  Antisense strand to SEQ ID NO: 1808365
auacccaaagccauucccu

SEQ ID NO: 1808367 - RNA, 19 nt, Artificial Sequence
  Description of Artificial Sequence: Synthetic oligonucleotide
  Sense strand starting at position 582 of SEQ ID NO: 1563275
aauggcuuuggguaucauu

SEQ ID NO: 1808368 - RNA, 19 nt, Artificial Sequence
  Description of Artificial Sequence: Synthetic oligonucleotide
  Antisense strand to SEQ ID NO: 1808367
aaugauacccaaagccauu

SEQ ID NO: 1808369 - RNA, 19 nt, Artificial Sequence
  Description of Artificial Sequence: Synthetic oligonucleotide
  Sense strand starting at position 626 of SEQ ID NO: 1563275
gugaaauaguacucaacaa

SEQ ID NO: 1808370 - RNA, 19 nt, Artificial Sequence
  Description of Artificial Sequence: Synthetic oligonucleotide
  Antisense strand to SEQ ID NO: 1808369
uuguugaguacuauuucac

SEQ ID NO: 1808371 - RNA, 19 nt, Artificial Sequence
  Description of Artificial Sequence: Synthetic oligonucleotide
  Sense strand starting at position 688 of SEQ ID NO: 1563275
agcuuaaguagcuagugaa

SEQ ID NO: 1808372 - RNA, 19 nt, Artificial Sequence
  Description of Artificial Sequence: Synthetic oligonucleotide
  Antisense strand to SEQ ID NO: 1808371
uucacuagcuacuuaagcu

SEQ ID NO: 1808373 - RNA, 19 nt, Artificial Sequence
  Description of Artificial Sequence: Synthetic oligonucleotide
  Sense strand starting at position 751 of SEQ ID NO: 1563275
uugugaaauuauccuagua

SEQ ID NO: 1808374 - RNA, 19 nt, Artificial Sequence
  Description of Artificial Sequence: Synthetic oligonucleotide
  Antisense strand to SEQ ID NO: 1808373
uacuaggauaauuucacaa

SEQ ID NO: 1808375 - RNA, 19 nt, Artificial Sequence
  Description of Artificial Sequence: Synthetic oligonucleotide
  Sense strand starting at position 765 of SEQ ID NO: 1563275
uaguaauuccacuggagau

SEQ ID NO: 1808376 - RNA, 19 nt, Artificial Sequence
  Description of Artificial Sequence: Synthetic oligonucleotide
  Antisense strand to SEQ ID NO: 1808375
aucuccaguggaauuacua

SEQ ID NO: 1808377 - RNA, 19 nt, Artificial Sequence
  Description of Artificial Sequence: Synthetic oligonucleotide
  Sense strand starting at position 847 of SEQ ID NO: 1563275
ugcagucccuaguugauuu

SEQ ID NO: 1808378 - RNA, 19 nt, Artificial Sequence
  Description of Artificial Sequence: Synthetic oligonucleotide
  Antisense strand to SEQ ID NO: 1808377
aaaucaacuagggacugca

SEQ ID NO: 1808379 - RNA, 19 nt, Artificial Sequence
  Description of Artificial Sequence: Synthetic oligonucleotide
  Sense strand starting at position 854 of SEQ ID NO: 1563275
ccuaguugauuugauagau

SEQ ID NO: 1808380 - RNA, 19 nt, Artificial Sequence
  Description of Artificial Sequence: Synthetic oligonucleotide
  Antisense strand to SEQ ID NO: 1808379
aucuaucaaaucaacuagg

SEQ ID NO: 1808381 - RNA, 19 nt, Artificial Sequence
  Description of Artificial Sequence: Synthetic oligonucleotide
  Sense strand starting at position 1056 of SEQ ID NO: 1563275
gucaaacgacucuaagcau

SEQ ID NO: 1808382 - RNA, 19 nt, Artificial Sequence
  Description of Artificial Sequence: Synthetic oligonucleotide
  Antisense strand to SEQ ID NO: 1808381
augcuuagagucguuugac

SEQ ID NO: 1808383 - RNA, 19 nt, Artificial Sequence
  Description of Artificial Sequence: Synthetic oligonucleotide
  Sense strand starting at position 1059 of SEQ ID NO: 1563275
aaacgacucuaagcaugua

SEQ ID NO: 1808384 - RNA, 19 nt, Artificial Sequence
  Description of Artificial Sequence: Synthetic oligonucleotide
  Antisense strand to SEQ ID NO: 1808383
uacaugcuuagagucguuu

SEQ ID NO: 1808385 - RNA, 19 nt, Artificial Sequence
  Description of Artificial Sequence: Synthetic oligonucleotide
  Sense strand starting at position 1212 of SEQ ID NO: 1563275
ugaugcuagucaucuuaag

SEQ ID NO: 1808386 - RNA, 19 nt, Artificial Sequence
  Description of Artificial Sequence: Synthetic oligonucleotide
  Antisense strand to SEQ ID NO: 1808385
cuuaagaugacuagcauca

SEQ ID NO: 1808387 - RNA, 19 nt, Artificial Sequence
  Description of Artificial Sequence: Synthetic oligonucleotide
  Sense strand starting at position 1249 of SEQ ID NO: 1563275
cagaaaugugugcaucuug

SEQ ID NO: 1808388 - RNA, 19 nt, Artificial Sequence
  Description of Artificial Sequence: Synthetic oligonucleotide
  Antisense strand to SEQ ID NO: 1808387
caagaugcacacauuucug

SEQ ID NO: 1808389 - RNA, 19 nt, Artificial Sequence
  Description of Artificial Sequence: Synthetic oligonucleotide
  Sense strand starting at position 1308 of SEQ ID NO: 1563275
ggaagauaucuugguccca

SEQ ID NO: 1808390 - RNA, 19 nt, Artificial Sequence
  Description of Artificial Sequence: Synthetic oligonucleotide
  Antisense strand to SEQ ID NO: 1808389
ugggaccaagauaucuucc

SEQ ID NO: 1808391 - RNA, 19 nt, Artificial Sequence
  Description of Artificial Sequence: Synthetic oligonucleotide
  Sense strand starting at position 1309 of SEQ ID NO: 1563275
gaagauaucuuggucccaa

SEQ ID NO: 1808392 - RNA, 19 nt, Artificial Sequence
  Description of Artificial Sequence: Synthetic oligonucleotide
  Antisense strand to SEQ ID NO: 1808391
uugggaccaagauaucuuc

SEQ ID NO: 1808393 - RNA, 19 nt, Artificial Sequence
  Description of Artificial Sequence: Synthetic oligonucleotide
  Sense strand starting at position 1655 of SEQ ID NO: 1563275
cccaauuucucugcaguga

SEQ ID NO: 1808394 - RNA, 19 nt, Artificial Sequence
  Description of Artificial Sequence: Synthetic oligonucleotide
  Antisense strand to SEQ ID NO: 1808393
ucacugcagagaaauuggg

SEQ ID NO: 1808395 - RNA, 19 nt, Artificial Sequence
  Description of Artificial Sequence: Synthetic oligonucleotide
  Sense strand starting at position 2075 of SEQ ID NO: 1563275
gccgguagucuuucucacu

SEQ ID NO: 1808396 - RNA, 19 nt, Artificial Sequence
  Description of Artificial Sequence: Synthetic oligonucleotide
  Antisense strand to SEQ ID NO: 1808395
agugagaaagacuaccggc

SEQ ID NO: 1808397 - RNA, 19 nt, Artificial Sequence
  Description of Artificial Sequence: Synthetic oligonucleotide
  Sense strand starting at position 2151 of SEQ ID NO: 1563275
cuuagagaccuauacgcua

SEQ ID NO: 1808398 - RNA, 19 nt, Artificial Sequence
  Description of Artificial Sequence: Synthetic oligonucleotide
  Antisense strand to SEQ ID NO: 1808397
uagcguauaggucucuaag

SEQ ID NO: 1808399 - RNA, 19 nt, Artificial Sequence
  Description of Artificial Sequence: Synthetic oligonucleotide
  Sense strand starting at position 2178 of SEQ ID NO: 1563275
gcaacugugcaucauauac

SEQ ID NO: 1808400 - RNA, 19 nt, Artificial Sequence
  Description of Artificial Sequence: Synthetic oligonucleotide
  Antisense strand to SEQ ID NO: 1808399
guauaugaugcacaguugc

SEQ ID NO: 1808401 - RNA, 19 nt, Artificial Sequence
  Description of Artificial Sequence: Synthetic oligonucleotide
  Sense strand starting at position 2255 of SEQ ID NO: 1563275
gacagaugggcccgaaagu

SEQ ID NO: 1808402 - RNA, 19 nt, Artificial Sequence
  Description of Artificial Sequence: Synthetic oligonucleotide
  Antisense strand to SEQ ID NO: 1808401
acuuucgggcccaucuguc

SEQ ID NO: 1808403 - RNA, 19 nt, Artificial Sequence
  Description of Artificial Sequence: Synthetic oligonucleotide
  Sense strand starting at position 2318 of SEQ ID NO: 1563275
gauaguacacuaggcuauu

SEQ ID NO: 1808404 - RNA, 19 nt, Artificial Sequence
  Description of Artificial Sequence: Synthetic oligonucleotide
  Antisense strand to SEQ ID NO: 1808403
aauagccuaguguacuauc

SEQ ID NO: 1808405 - RNA, 19 nt, Artificial Sequence
  Description of Artificial Sequence: Synthetic oligonucleotide
  Sense strand starting at position 2343 of SEQ ID NO: 1563275
gggagacaguuucuggagu

SEQ ID NO: 1808406 - RNA, 19 nt, Artificial Sequence
  Description of Artificial Sequence: Synthetic oligonucleotide
  Antisense strand to SEQ ID NO: 1808405
acuccagaaacugucuccc

SEQ ID NO: 1808407 - RNA, 19 nt, Artificial Sequence
  Description of Artificial Sequence: Synthetic oligonucleotide
  Sense strand starting at position 2363 of SEQ ID NO: 1563275
guaaauccacucugagcua

SEQ ID NO: 1808408 - RNA, 19 nt, Artificial Sequence
  Description of Artificial Sequence: Synthetic oligonucleotide
  Antisense strand to SEQ ID NO: 1808407
uagcucagaguggauuuac

SEQ ID NO: 1808409 - RNA, 19 nt, Artificial Sequence
  Description of Artificial Sequence: Synthetic oligonucleotide
  Sense strand starting at position 2436 of SEQ ID NO: 1563275
acucuaaagugguuaauuc

SEQ ID NO: 1808410 - RNA, 19 nt, Artificial Sequence
  Description of Artificial Sequence: Synthetic oligonucleotide
  Antisense strand to SEQ ID NO: 1808409
gaauuaaccacuuuagagu

SEQ ID NO: 1808411 - RNA, 19 nt, Artificial Sequence
  Description of Artificial Sequence: Synthetic oligonucleotide
  Sense strand starting at position 2437 of SEQ ID NO: 1563275
cucuaaagugguuaauucu

SEQ ID NO: 1808412 - RNA, 19 nt, Artificial Sequence
  Description of Artificial Sequence: Synthetic oligonucleotide
  Antisense strand to SEQ ID NO: 1808411
agaauuaaccacuuuagag

SEQ ID NO: 1808413 - RNA, 19 nt, Artificial Sequence
  Description of Artificial Sequence: Synthetic oligonucleotide
  Sense strand starting at position 2445 of SEQ ID NO: 1563275
ugguuaauucuaggaagau

SEQ ID NO: 1808414 - RNA, 19 nt, Artificial Sequence
  Description of Artificial Sequence: Synthetic oligonucleotide
  Antisense strand to SEQ ID NO: 1808413
aucuuccuagaauuaacca

SEQ ID NO: 1808415 - RNA, 19 nt, Artificial Sequence
  Description of Artificial Sequence: Synthetic oligonucleotide
  Sense strand starting at position 2591 of SEQ ID NO: 1563275
agucuuuauaugggagaua

SEQ ID NO: 1808416 - RNA, 19 nt, Artificial Sequence
  Description of Artificial Sequence: Synthetic oligonucleotide
  Antisense strand to SEQ ID NO: 1808415
uaucucccauauaaagacu

SEQ ID NO: 1808417 - RNA, 19 nt, Artificial Sequence
  Description of Artificial Sequence: Synthetic oligonucleotide
  Sense strand starting at position 2758 of SEQ ID NO: 1563275
cucaauauaggaggcauua

SEQ ID NO: 1808418 - RNA, 19 nt, Artificial Sequence
  Description of Artificial Sequence: Synthetic oligonucleotide
  Antisense strand to SEQ ID NO: 1808417
uaaugccuccuauauugag

SEQ ID NO: 1808419 - RNA, 19 nt, Artificial Sequence
  Description of Artificial Sequence: Synthetic oligonucleotide
  Sense strand starting at position 3058 of SEQ ID NO: 1563275
uguuucuaaugaguaacaa

SEQ ID NO: 1808420 - RNA, 19 nt, Artificial Sequence
  Description of Artificial Sequence: Synthetic oligonucleotide
  Antisense strand to SEQ ID NO: 1808419
uuguuacucauuagaaaca

SEQ ID NO: 1808421 - RNA, 19 nt, Artificial Sequence
  Description of Artificial Sequence: Synthetic oligonucleotide
  Sense strand starting at position 3059 of SEQ ID NO: 1563275
guuucuaaugaguaacaau

SEQ ID NO: 1808422 - RNA, 19 nt, Artificial Sequence
  Description of Artificial Sequence: Synthetic oligonucleotide
  Antisense strand to SEQ ID NO: 1808421
auuguuacucauuagaaac

SEQ ID NO: 1808423 - RNA, 19 nt, Artificial Sequence
  Description of Artificial Sequence: Synthetic oligonucleotide
  Sense strand starting at position 3189 of SEQ ID NO: 1563275
aguaguaucaacggaaggu

SEQ ID NO: 1808424 - RNA, 19 nt, Artificial Sequence
  Description of Artificial Sequence: Synthetic oligonucleotide
  Antisense strand to SEQ ID NO: 1808423
accuuccguugauacuacu

SEQ ID NO: 1808425 - RNA, 19 nt, Artificial Sequence
  Description of Artificial Sequence: Synthetic oligonucleotide
  Sense strand starting at position 3252 of SEQ ID NO: 1563275
ucagucaacuagucuggaa

SEQ ID NO: 1808426 - RNA, 19 nt, Artificial Sequence
  Description of Artificial Sequence: Synthetic oligonucleotide
  Antisense strand to SEQ ID NO: 1808425
uuccagacuaguugacuga

SEQ ID NO: 1808427 - RNA, 19 nt, Artificial Sequence
  Description of Artificial Sequence: Synthetic oligonucleotide
  Sense strand starting at position 3254 of SEQ ID NO: 1563275
agucaacuagucuggaagu

SEQ ID NO: 1808428 - RNA, 19 nt, Artificial Sequence
  Description of Artificial Sequence: Synthetic oligonucleotide
  Antisense strand to SEQ ID NO: 1808427
acuuccagacuaguugacu

SEQ ID NO: 1808429 - RNA, 19 nt, Artificial Sequence
  Description of Artificial Sequence: Synthetic oligonucleotide
  Sense strand starting at position 3337 of SEQ ID NO: 1563275
cggagugauacucaaauuc

SEQ ID NO: 1808430 - RNA, 19 nt, Artificial Sequence
  Description of Artificial Sequence: Synthetic oligonucleotide
  Antisense strand to SEQ ID NO: 1808429
gaauuugaguaucacuccg

SEQ ID NO: 1808431 - RNA, 19 nt, Artificial Sequence
  Description of Artificial Sequence: Synthetic oligonucleotide
  Sense strand starting at position 3405 of SEQ ID NO: 1563275
aguagaucuguaggaauug

SEQ ID NO: 1808432 - RNA, 19 nt, Artificial Sequence
  Description of Artificial Sequence: Synthetic oligonucleotide
  Antisense strand to SEQ ID NO: 1808431
caauuccuacagaucuacu

SEQ ID NO: 1808433 - RNA, 19 nt, Artificial Sequence
  Description of Artificial Sequence: Synthetic oligonucleotide
  Sense strand starting at position 3410 of SEQ ID NO: 1563275
aucuguaggaauugaguga

SEQ ID NO: 1808434 - RNA, 19 nt, Artificial Sequence
  Description of Artificial Sequence: Synthetic oligonucleotide
  Antisense strand to SEQ ID NO: 1808433
ucacucaauuccuacagau

SEQ ID NO: 1808435 - RNA, 19 nt, Artificial Sequence
  Description of Artificial Sequence: Synthetic oligonucleotide
  Sense strand starting at position 142 of SEQ ID NO: 1563276
gauugaugcuagucaucuu

SEQ ID NO: 1808436 - RNA, 19 nt, Artificial Sequence
  Description of Artificial Sequence: Synthetic oligonucleotide
  Antisense strand to SEQ ID NO: 1808435
aagaugacuagcaucaauc

SEQ ID NO: 1808437 - RNA, 19 nt, Artificial Sequence
  Description of Artificial Sequence: Synthetic oligonucleotide
  Sense strand starting at position 145 of SEQ ID NO: 1563276
ugaugcuagucaucuuaag

SEQ ID NO: 1808438 - RNA, 19 nt, Artificial Sequence
  Description of Artificial Sequence: Synthetic oligonucleotide
  Antisense strand to SEQ ID NO: 1808437
cuuaagaugacuagcauca

SEQ ID NO: 1808439 - RNA, 19 nt, Artificial Sequence
  Description of Artificial Sequence: Synthetic oligonucleotide
  Sense strand starting at position 182 of SEQ ID NO: 1563276
cagaaaugugugcaucuug

SEQ ID NO: 1808440 - RNA, 19 nt, Artificial Sequence
  Description of Artificial Sequence: Synthetic oligonucleotide
  Antisense strand to SEQ ID NO: 1808439
caagaugcacacauuucug

SEQ ID NO: 1808441 - RNA, 19 nt, Artificial Sequence
  Description of Artificial Sequence: Synthetic oligonucleotide
  Sense strand starting at position 241 of SEQ ID NO: 1563276
ggaagauaucuugguccca

SEQ ID NO: 1808442 - RNA, 19 nt, Artificial Sequence
  Description of Artificial Sequence: Synthetic oligonucleotide
  Antisense strand to SEQ ID NO: 1808441
ugggaccaagauaucuucc

SEQ ID NO: 1808443 - RNA, 19 nt, Artificial Sequence
  Description of Artificial Sequence: Synthetic oligonucleotide
  Sense strand starting at position 242 of SEQ ID NO: 1563276
gaagauaucuuggucccaa

SEQ ID NO: 1808444 - RNA, 19 nt, Artificial Sequence
  Description of Artificial Sequence: Synthetic oligonucleotide
  Antisense strand to SEQ ID NO: 1808443
uugggaccaagauaucuuc

SEQ ID NO: 1808445 - RNA, 19 nt, Artificial Sequence
  Description of Artificial Sequence: Synthetic oligonucleotide
  Sense strand starting at position 345 of SEQ ID NO: 1563276
uggugaaacucucugcaac

SEQ ID NO: 1808446 - RNA, 19 nt, Artificial Sequence
  Description of Artificial Sequence: Synthetic oligonucleotide
  Antisense strand to SEQ ID NO: 1808445
guugcagagaguuucacca

SEQ ID NO: 1808447 - RNA, 19 nt, Artificial Sequence
  Description of Artificial Sequence: Synthetic oligonucleotide
  Sense strand starting at position 588 of SEQ ID NO: 1563276
cccaauuucucugcaguga

SEQ ID NO: 1808448 - RNA, 19 nt, Artificial Sequence
  Description of Artificial Sequence: Synthetic oligonucleotide
  Antisense strand to SEQ ID NO: 1808447
ucacugcagagaaauuggg

SEQ ID NO: 1808449 - RNA, 19 nt, Artificial Sequence
  Description of Artificial Sequence: Synthetic oligonucleotide
  Sense strand starting at position 633 of SEQ ID NO: 1563276
ggcaaaguaacccgaagua

SEQ ID NO: 1808450 - RNA, 19 nt, Artificial Sequence
  Description of Artificial Sequence: Synthetic oligonucleotide
  Antisense strand to SEQ ID NO: 1808449
uacuucggguuacuuugcc

SEQ ID NO: 1808451 - RNA, 19 nt, Artificial Sequence
  Description of Artificial Sequence: Synthetic oligonucleotide
  Sense strand starting at position 1008 of SEQ ID NO: 1563276
gccgguagucuuucucacu

SEQ ID NO: 1808452 - RNA, 19 nt, Artificial Sequence
  Description of Artificial Sequence: Synthetic oligonucleotide
  Antisense strand to SEQ ID NO: 1808451
agugagaaagacuaccggc

SEQ ID NO: 1808453 - RNA, 19 nt, Artificial Sequence
  Description of Artificial Sequence: Synthetic oligonucleotide
  Sense strand starting at position 1084 of SEQ ID NO: 1563276
cuuagagaccuauacgcua

SEQ ID NO: 1808454 - RNA, 19 nt, Artificial Sequence
  Description of Artificial Sequence: Synthetic oligonucleotide
  Antisense strand to SEQ ID NO: 1808453
uagcguauaggucucuaag

SEQ ID NO: 1808455 - RNA, 19 nt, Artificial Sequence
  Description of Artificial Sequence: Synthetic oligonucleotide
  Sense strand starting at position 1111 of SEQ ID NO: 1563276
gcaacugugcaucauauac

SEQ ID NO: 1808456 - RNA, 19 nt, Artificial Sequence
  Description of Artificial Sequence: Synthetic oligonucleotide
  Antisense strand to SEQ ID NO: 1808455
guauaugaugcacaguugc

SEQ ID NO: 1808457 - RNA, 19 nt, Artificial Sequence
  Description of Artificial Sequence: Synthetic oligonucleotide
  Sense strand starting at position 1188 of SEQ ID NO: 1563276
gacagaugggcccgaaagu

SEQ ID NO: 1808458 - RNA, 19 nt, Artificial Sequence
  Description of Artificial Sequence: Synthetic oligonucleotide
  Antisense strand to SEQ ID NO: 1808457
acuuucgggcccaucuguc

SEQ ID NO: 1808459 - RNA, 19 nt, Artificial Sequence
  Description of Artificial Sequence: Synthetic oligonucleotide
  Sense strand starting at position 1251 of SEQ ID NO: 1563276
gauaguacacuaggcuauu

SEQ ID NO: 1808460 - RNA, 19 nt, Artificial Sequence
  Description of Artificial Sequence: Synthetic oligonucleotide
  Antisense strand to SEQ ID NO: 1808459
aauagccuaguguacuauc

SEQ ID NO: 1808461 - RNA, 19 nt, Artificial Sequence
  Description of Artificial Sequence: Synthetic oligonucleotide
  Sense strand starting at position 1276 of SEQ ID NO: 1563276
gggagacaguuucuggagu

SEQ ID NO: 1808462 - RNA, 19 nt, Artificial Sequence
  Description of Artificial Sequence: Synthetic oligonucleotide
  Antisense strand to SEQ ID NO: 1808461
acuccagaaacugucuccc

SEQ ID NO: 1808463 - RNA, 19 nt, Artificial Sequence
  Description of Artificial Sequence: Synthetic oligonucleotide
  Sense strand starting at position 1283 of SEQ ID NO: 1563276
aguuucuggaguuguaaau

SEQ ID NO: 1808464 - RNA, 19 nt, Artificial Sequence
  Description of Artificial Sequence: Synthetic oligonucleotide
  Antisense strand to SEQ ID NO: 1808463
auuuacaacuccagaaacu

SEQ ID NO: 1808465 - RNA, 19 nt, Artificial Sequence
  Description of Artificial Sequence: Synthetic oligonucleotide
  Sense strand starting at position 1296 of SEQ ID NO: 1563276
guaaauccacucugagcua

SEQ ID NO: 1808466 - RNA, 19 nt, Artificial Sequence
  Description of Artificial Sequence: Synthetic oligonucleotide
  Antisense strand to SEQ ID NO: 1808465
uagcucagaguggauuuac

SEQ ID NO: 1808467 - RNA, 19 nt, Artificial Sequence
  Description of Artificial Sequence: Synthetic oligonucleotide
  Sense strand starting at position 1369 of SEQ ID NO: 1563276
acucuaaagugguuaauuc

SEQ ID NO: 1808468 - RNA, 19 nt, Artificial Sequence
  Description of Artificial Sequence: Synthetic oligonucleotide
  Antisense strand to SEQ ID NO: 1808467
gaauuaaccacuuuagagu

SEQ ID NO: 1808469 - RNA, 19 nt, Artificial Sequence
  Description of Artificial Sequence: Synthetic oligonucleotide
  Sense strand starting at position 1370 of SEQ ID NO: 1563276
cucuaaagugguuaauucu

SEQ ID NO: 1808470 - RNA, 19 nt, Artificial Sequence
  Description of Artificial Sequence: Synthetic oligonucleotide
  Antisense strand to SEQ ID NO: 1808469
agaauuaaccacuuuagag

SEQ ID NO: 1808471 - RNA, 19 nt, Artificial Sequence
  Description of Artificial Sequence: Synthetic oligonucleotide
  Sense strand starting at position 1378 of SEQ ID NO: 1563276
ugguuaauucuaggaagau

SEQ ID NO: 1808472 - RNA, 19 nt, Artificial Sequence
  Description of Artificial Sequence: Synthetic oligonucleotide
  Antisense strand to SEQ ID NO: 1808471
aucuuccuagaauuaacca

SEQ ID NO: 1808473 - RNA, 19 nt, Artificial Sequence
  Description of Artificial Sequence: Synthetic oligonucleotide
  Sense strand starting at position 1524 of SEQ ID NO: 1563276
agucuuuauaugggagaua

SEQ ID NO: 1808474 - RNA, 19 nt, Artificial Sequence
  Description of Artificial Sequence: Synthetic oligonucleotide
  Antisense strand to SEQ ID NO: 1808473
uaucucccauauaaagacu

SEQ ID NO: 1808475 - RNA, 19 nt, Artificial Sequence
  Description of Artificial Sequence: Synthetic oligonucleotide
  Sense strand starting at position 1691 of SEQ ID NO: 1563276
cucaauauaggaggcauua

SEQ ID NO: 1808476 - RNA, 19 nt, Artificial Sequence
  Description of Artificial Sequence: Synthetic oligonucleotide
  Antisense strand to SEQ ID NO: 1808475
uaaugccuccuauauugag

SEQ ID NO: 1808477 - RNA, 19 nt, Artificial Sequence
  Description of Artificial Sequence: Synthetic oligonucleotide
  Sense strand starting at position 1991 of SEQ ID NO: 1563276
uguuucuaaugaguaacaa

SEQ ID NO: 1808478 - RNA, 19 nt, Artificial Sequence
  Description of Artificial Sequence: Synthetic oligonucleotide
  Antisense strand to SEQ ID NO: 1808477
uuguuacucauuagaaaca

SEQ ID NO: 1808479 - RNA, 19 nt, Artificial Sequence
  Description of Artificial Sequence: Synthetic oligonucleotide
  Sense strand starting at position 1992 of SEQ ID NO: 1563276
guuucuaaugaguaacaau

SEQ ID NO: 1808480 - RNA, 19 nt, Artificial Sequence
  Description of Artificial Sequence: Synthetic oligonucleotide
  Antisense strand to SEQ ID NO: 1808479
auuguuacucauuagaaac

SEQ ID NO: 1808481 - RNA, 19 nt, Artificial Sequence
  Description of Artificial Sequence: Synthetic oligonucleotide
  Sense strand starting at position 2122 of SEQ ID NO: 1563276
aguaguaucaacggaaggu

SEQ ID NO: 1808482 - RNA, 19 nt, Artificial Sequence
  Description of Artificial Sequence: Synthetic oligonucleotide
  Antisense strand to SEQ ID NO: 1808481
accuuccguugauacuacu

SEQ ID NO: 1808483 - RNA, 19 nt, Artificial Sequence
  Description of Artificial Sequence: Synthetic oligonucleotide
  Sense strand starting at position 2185 of SEQ ID NO: 1563276
ucagucaacuagucuggaa

SEQ ID NO: 1808484 - RNA, 19 nt, Artificial Sequence
  Description of Artificial Sequence: Synthetic oligonucleotide
  Antisense strand to SEQ ID NO: 1808483
uuccagacuaguugacuga

SEQ ID NO: 1808485 - RNA, 19 nt, Artificial Sequence
  Description of Artificial Sequence: Synthetic oligonucleotide
  Sense strand starting at position 2187 of SEQ ID NO: 1563276
agucaacuagucuggaagu

SEQ ID NO: 1808486 - RNA, 19 nt, Artificial Sequence
  Description of Artificial Sequence: Synthetic oligonucleotide
  Antisense strand to SEQ ID NO: 1808485
acuuccagacuaguugacu

SEQ ID NO: 1808487 - RNA, 19 nt, Artificial Sequence
  Description of Artificial Sequence: Synthetic oligonucleotide
  Sense strand starting at position 2216 of SEQ ID NO: 1563276
caaauaacugagcgucacu

SEQ ID NO: 1808488 - RNA, 19 nt, Artificial Sequence
  Description of Artificial Sequence: Synthetic oligonucleotide
  Antisense strand to SEQ ID NO: 1808487
agugacgcucaguuauuug

SEQ ID NO: 1808489 - RNA, 19 nt, Artificial Sequence
  Description of Artificial Sequence: Synthetic oligonucleotide
  Sense strand starting at position 2270 of SEQ ID NO: 1563276
cggagugauacucaaauuc

SEQ ID NO: 1808490 - RNA, 19 nt, Artificial Sequence
  Description of Artificial Sequence: Synthetic oligonucleotide
  Antisense strand to SEQ ID NO: 1808489
gaauuugaguaucacuccg

SEQ ID NO: 1808491 - RNA, 19 nt, Artificial Sequence
  Description of Artificial Sequence: Synthetic oligonucleotide
  Sense strand starting at position 2338 of SEQ ID NO: 1563276
aguagaucuguaggaauug

SEQ ID NO: 1808492 - RNA, 19 nt, Artificial Sequence
  Description of Artificial Sequence: Synthetic oligonucleotide
  Antisense strand to SEQ ID NO: 1808491
caauuccuacagaucuacu

SEQ ID NO: 1808493 - RNA, 19 nt, Artificial Sequence
  Description of Artificial Sequence: Synthetic oligonucleotide
  Sense strand starting at position 2343 of SEQ ID NO: 1563276
aucuguaggaauugaguga

SEQ ID NO: 1808494 - RNA, 19 nt, Artificial Sequence
  Description of Artificial Sequence: Synthetic oligonucleotide
  Antisense strand to SEQ ID NO: 1808493
ucacucaauuccuacagau

SEQ ID NO: 1808495 - RNA, 19 nt, Artificial Sequence
  Description of Artificial Sequence: Synthetic oligonucleotide
  Sense strand starting at position 2802 of SEQ ID NO: 1563276
uggcguugacuagggaauu

SEQ ID NO: 1808496 - RNA, 19 nt, Artificial Sequence
  Description of Artificial Sequence: Synthetic oligonucleotide
  Antisense strand to SEQ ID NO: 1808495
aauucccuagucaacgcca

SEQ ID NO: 1808497 - RNA, 19 nt, Artificial Sequence
  Description of Artificial Sequence: Synthetic oligonucleotide
  Sense strand starting at position 2828 of SEQ ID NO: 1563276
gcuuucucauguuuaggaa

SEQ ID NO: 1808498 - RNA, 19 nt, Artificial Sequence
  Description of Artificial Sequence: Synthetic oligonucleotide
  Antisense strand to SEQ ID NO: 1808497
uuccuaaacaugagaaagc

SEQ ID NO: 1808499 - RNA, 19 nt, Artificial Sequence
  Description of Artificial Sequence: Synthetic oligonucleotide
  Sense strand starting at position 3481 of SEQ ID NO: 1563276
gagaaucaguguuccaguu

SEQ ID NO: 1808500 - RNA, 19 nt, Artificial Sequence
  Description of Artificial Sequence: Synthetic oligonucleotide
  Antisense strand to SEQ ID NO: 1808499
aacuggaacacugauucuc

SEQ ID NO: 1808501 - RNA, 19 nt, Artificial Sequence
  Description of Artificial Sequence: Synthetic oligonucleotide
  Sense strand starting at position 3488 of SEQ ID NO: 1563276
aguguuccaguuuaaagga

SEQ ID NO: 1808502 - RNA, 19 nt, Artificial Sequence
  Description of Artificial Sequence: Synthetic oligonucleotide
  Antisense strand to SEQ ID NO: 1808501
uccuuuaaacuggaacacu

SEQ ID NO: 1808503 - RNA, 19 nt, Artificial Sequence
  Description of Artificial Sequence: Synthetic oligonucleotide
  Sense strand starting at position 3726 of SEQ ID NO: 1563276
gaagaauaagugugugaca

SEQ ID NO: 1808504 - RNA, 19 nt, Artificial Sequence
  Description of Artificial Sequence: Synthetic oligonucleotide
  Antisense strand to SEQ ID NO: 1808503
ugucacacacuuauucuuc

SEQ ID NO: 1808505 - RNA, 19 nt, Artificial Sequence
  Description of Artificial Sequence: Synthetic oligonucleotide
  Sense strand starting at position 3727 of SEQ ID NO: 1563276
aagaauaagugugugacaa

SEQ ID NO: 1808506 - RNA, 19 nt, Artificial Sequence
  Description of Artificial Sequence: Synthetic oligonucleotide
  Antisense strand to SEQ ID NO: 1808505
uugucacacacuuauucuu

SEQ ID NO: 1808507 - RNA, 19 nt, Artificial Sequence
  Description of Artificial Sequence: Synthetic oligonucleotide
  Sense strand starting at position 3728 of SEQ ID NO: 1563276
agaauaagugugugacaaa

SEQ ID NO: 1808508 - RNA, 19 nt, Artificial Sequence
  Description of Artificial Sequence: Synthetic oligonucleotide
  Antisense strand to SEQ ID NO: 1808507
uuugucacacacuuauucu

SEQ ID NO: 1808509 - RNA, 19 nt, Artificial Sequence
  Description of Artificial Sequence: Synthetic oligonucleotide
  Sense strand starting at position 3765 of SEQ ID NO: 1563276
gugaucauuauggauaguu

SEQ ID NO: 1808510 - RNA, 19 nt, Artificial Sequence
  Description of Artificial Sequence: Synthetic oligonucleotide
  Antisense strand to SEQ ID NO: 1808509
aacuauccauaaugaucac

SEQ ID NO: 1808511 - RNA, 19 nt, Artificial Sequence
  Description of Artificial Sequence: Synthetic oligonucleotide
  Sense strand starting at position 3798 of SEQ ID NO: 1563276
auaugagaucauggcuuag

SEQ ID NO: 1808512 - RNA, 19 nt, Artificial Sequence
  Description of Artificial Sequence: Synthetic oligonucleotide
  Antisense strand to SEQ ID NO: 1808511
cuaagccaugaucucauau

SEQ ID NO: 1808513 - RNA, 19 nt, Artificial Sequence
  Description of Artificial Sequence: Synthetic oligonucleotide
  Sense strand starting at position 3829 of SEQ ID NO: 1563276
uugagugaccgucaauucu

SEQ ID NO: 1808514 - RNA, 19 nt, Artificial Sequence
  Description of Artificial Sequence: Synthetic oligonucleotide
  Antisense strand to SEQ ID NO: 1808513
agaauugacggucacucaa

SEQ ID NO: 1808515 - RNA, 19 nt, Artificial Sequence
  Description of Artificial Sequence: Synthetic oligonucleotide
  Sense strand starting at position 570 of SEQ ID NO: 1563277
agaccucuccucugugaca

SEQ ID NO: 1808516 - RNA, 19 nt, Artificial Sequence
  Description of Artificial Sequence: Synthetic oligonucleotide
  Antisense strand to SEQ ID NO: 1808515
ugucacagaggagaggucu

SEQ ID NO: 1808517 - RNA, 19 nt, Artificial Sequence
  Description of Artificial Sequence: Synthetic oligonucleotide
  Sense strand starting at position 582 of SEQ ID NO: 1563277
ugugacaacuguuuaauua

SEQ ID NO: 1808518 - RNA, 19 nt, Artificial Sequence
  Description of Artificial Sequence: Synthetic oligonucleotide
  Antisense strand to SEQ ID NO: 1808517
uaauuaaacaguugucaca

SEQ ID NO: 1808519 - RNA, 19 nt, Artificial Sequence
  Description of Artificial Sequence: Synthetic oligonucleotide
  Sense strand starting at position 583 of SEQ ID NO: 1563277
gugacaacuguuuaauuac

SEQ ID NO: 1808520 - RNA, 19 nt, Artificial Sequence
  Description of Artificial Sequence: Synthetic oligonucleotide
  Antisense strand to SEQ ID NO: 1808519
guaauuaaacaguugucac

SEQ ID NO: 1808521 - RNA, 19 nt, Artificial Sequence
  Description of Artificial Sequence: Synthetic oligonucleotide
  Sense strand starting at position 603 of SEQ ID NO: 1563277
acacauuggugaucucaua

SEQ ID NO: 1808522 - RNA, 19 nt, Artificial Sequence
  Description of Artificial Sequence: Synthetic oligonucleotide
  Antisense strand to SEQ ID NO: 1808521
uaugagaucaccaaugugu

SEQ ID NO: 1808523 - RNA, 19 nt, Artificial Sequence
  Description of Artificial Sequence: Synthetic oligonucleotide
  Sense strand starting at position 794 of SEQ ID NO: 1563277
ugcuuaagaguuuaggaca

SEQ ID NO: 1808524 - RNA, 19 nt, Artificial Sequence
  Description of Artificial Sequence: Synthetic oligonucleotide
  Antisense strand to SEQ ID NO: 1808523
uguccuaaacucuuaagca

SEQ ID NO: 1808525 - RNA, 19 nt, Artificial Sequence
  Description of Artificial Sequence: Synthetic oligonucleotide
  Sense strand starting at position 992 of SEQ ID NO: 1563277
cuacauaaugcuggucuca

SEQ ID NO: 1808526 - RNA, 19 nt, Artificial Sequence
  Description of Artificial Sequence: Synthetic oligonucleotide
  Antisense strand to SEQ ID NO: 1808525
ugagaccagcauuauguag

SEQ ID NO: 1808527 - RNA, 19 nt, Artificial Sequence
  Description of Artificial Sequence: Synthetic oligonucleotide
  Sense strand starting at position 994 of SEQ ID NO: 1563277
acauaaugcuggucucaaa

SEQ ID NO: 1808528 - RNA, 19 nt, Artificial Sequence
  Description of Artificial Sequence: Synthetic oligonucleotide
  Antisense strand to SEQ ID NO: 1808527
uuugagaccagcauuaugu

SEQ ID NO: 1808529 - RNA, 19 nt, Artificial Sequence
  Description of Artificial Sequence: Synthetic oligonucleotide
  Sense strand starting at position 1024 of SEQ ID NO: 1563277
cugcccaaccuuuggauaa

SEQ ID NO: 1808530 - RNA, 19 nt, Artificial Sequence
  Description of Artificial Sequence: Synthetic oligonucleotide
  Antisense strand to SEQ ID NO: 1808529
uuauccaaagguugggcag

SEQ ID NO: 1808531 - RNA, 19 nt, Artificial Sequence
  Description of Artificial Sequence: Synthetic oligonucleotide
  Sense strand starting at position 1445 of SEQ ID NO: 1563277
gcaauuaaaccaggugaag

SEQ ID NO: 1808532 - RNA, 19 nt, Artificial Sequence
  Description of Artificial Sequence: Synthetic oligonucleotide
  Antisense strand to SEQ ID NO: 1808531
cuucaccugguuuaauugc

SEQ ID NO: 1808533 - RNA, 19 nt, Artificial Sequence
  Description of Artificial Sequence: Synthetic oligonucleotide
  Sense strand starting at position 1469 of SEQ ID NO: 1563277
gauuuacaguuuccgucua

SEQ ID NO: 1808534 - RNA, 19 nt, Artificial Sequence
  Description of Artificial Sequence: Synthetic oligonucleotide
  Antisense strand to SEQ ID NO: 1808533
uagacggaaacuguaaauc

SEQ ID NO: 1808535 - RNA, 19 nt, Artificial Sequence
  Description of Artificial Sequence: Synthetic oligonucleotide
  Sense strand starting at position 1474 of SEQ ID NO: 1563277
acaguuuccgucuauuaca

SEQ ID NO: 1808536 - RNA, 19 nt, Artificial Sequence
  Description of Artificial Sequence: Synthetic oligonucleotide
  Antisense strand to SEQ ID NO: 1808535
uguaauagacggaaacugu

SEQ ID NO: 1808537 - RNA, 19 nt, Artificial Sequence
  Description of Artificial Sequence: Synthetic oligonucleotide
  Sense strand starting at position 1482 of SEQ ID NO: 1563277
cgucuauuacaguaauagg

SEQ ID NO: 1808538 - RNA, 19 nt, Artificial Sequence
  Description of Artificial Sequence: Synthetic oligonucleotide
  Antisense strand to SEQ ID NO: 1808537
ccuauuacuguaauagacg

SEQ ID NO: 1808539 - RNA, 19 nt, Artificial Sequence
  Description of Artificial Sequence: Synthetic oligonucleotide
  Sense strand starting at position 1578 of SEQ ID NO: 1563277
gaacgaggugucuaccaag

SEQ ID NO: 1808540 - RNA, 19 nt, Artificial Sequence
  Description of Artificial Sequence: Synthetic oligonucleotide
  Antisense strand to SEQ ID NO: 1808539
cuugguagacaccucguuc

SEQ ID NO: 1808541 - RNA, 19 nt, Artificial Sequence
  Description of Artificial Sequence: Synthetic oligonucleotide
  Sense strand starting at position 1644 of SEQ ID NO: 1563277
gcuagacuaucacuccgau

SEQ ID NO: 1808542 - RNA, 19 nt, Artificial Sequence
  Description of Artificial Sequence: Synthetic oligonucleotide
  Antisense strand to SEQ ID NO: 1808541
aucggagugauagucuagc

SEQ ID NO: 1808543 - RNA, 19 nt, Artificial Sequence
  Description of Artificial Sequence: Synthetic oligonucleotide
  Sense strand starting at position 1647 of SEQ ID NO: 1563277
agacuaucacuccgauaac

SEQ ID NO: 1808544 - RNA, 19 nt, Artificial Sequence
  Description of Artificial Sequence: Synthetic oligonucleotide
  Antisense strand to SEQ ID NO: 1808543
guuaucggagugauagucu

SEQ ID NO: 1808545 - RNA, 19 nt, Artificial Sequence
  Description of Artificial Sequence: Synthetic oligonucleotide
  Sense strand starting at position 1699 of SEQ ID NO: 1563277
gggugauaaagccaaugcu

SEQ ID NO: 1808546 - RNA, 19 nt, Artificial Sequence
  Description of Artificial Sequence: Synthetic oligonucleotide
  Antisense strand to SEQ ID NO: 1808545
agcauuggcuuuaucaccc

SEQ ID NO: 1808547 - RNA, 19 nt, Artificial Sequence
  Description of Artificial Sequence: Synthetic oligonucleotide
  Sense strand starting at position 1827 of SEQ ID NO: 1563277
uugauauaagguuguugua

SEQ ID NO: 1808548 - RNA, 19 nt, Artificial Sequence
  Description of Artificial Sequence: Synthetic oligonucleotide
  Antisense strand to SEQ ID NO: 1808547
uacaacaaccuuauaucaa

SEQ ID NO: 1808549 - RNA, 19 nt, Artificial Sequence
  Description of Artificial Sequence: Synthetic oligonucleotide
  Sense strand starting at position 1829 of SEQ ID NO: 1563277
gauauaagguuguuguaaa

SEQ ID NO: 1808550 - RNA, 19 nt, Artificial Sequence
  Description of Artificial Sequence: Synthetic oligonucleotide
  Antisense strand to SEQ ID NO: 1808549
uuuacaacaaccuuauauc

SEQ ID NO: 1808551 - RNA, 19 nt, Artificial Sequence
  Description of Artificial Sequence: Synthetic oligonucleotide
  Sense strand starting at position 2146 of SEQ ID NO: 1563277
gugggugguaucuaaugaa

SEQ ID NO: 1808552 - RNA, 19 nt, Artificial Sequence
  Description of Artificial Sequence: Synthetic oligonucleotide
  Antisense strand to SEQ ID NO: 1808551
uucauuagauaccacccac

SEQ ID NO: 1808553 - RNA, 19 nt, Artificial Sequence
  Description of Artificial Sequence: Synthetic oligonucleotide
  Sense strand starting at position 2189 of SEQ ID NO: 1563277
gguuuagagcucuauagag

SEQ ID NO: 1808554 - RNA, 19 nt, Artificial Sequence
  Description of Artificial Sequence: Synthetic oligonucleotide
  Antisense strand to SEQ ID NO: 1808553
cucuauagagcucuaaacc

SEQ ID NO: 1808555 - RNA, 19 nt, Artificial Sequence
  Description of Artificial Sequence: Synthetic oligonucleotide
  Sense strand starting at position 2217 of SEQ ID NO: 1563277
gagacagaucuucgaccga

SEQ ID NO: 1808556 - RNA, 19 nt, Artificial Sequence
  Description of Artificial Sequence: Synthetic oligonucleotide
  Antisense strand to SEQ ID NO: 1808555
ucggucgaagaucugucuc

SEQ ID NO: 1808557 - RNA, 19 nt, Artificial Sequence
  Description of Artificial Sequence: Synthetic oligonucleotide
  Sense strand starting at position 2222 of SEQ ID NO: 1563277
agaucuucgaccgaaucgu

SEQ ID NO: 1808558 - RNA, 19 nt, Artificial Sequence
  Description of Artificial Sequence: Synthetic oligonucleotide
  Antisense strand to SEQ ID NO: 1808557
acgauucggucgaagaucu

SEQ ID NO: 1808559 - RNA, 19 nt, Artificial Sequence
  Description of Artificial Sequence: Synthetic oligonucleotide
  Sense strand starting at position 2230 of SEQ ID NO: 1563277
gaccgaaucgucuaaggaa

SEQ ID NO: 1808560 - RNA, 19 nt, Artificial Sequence
  Description of Artificial Sequence: Synthetic oligonucleotide
  Antisense strand to SEQ ID NO: 1808559
uuccuuagacgauucgguc

SEQ ID NO: 1808561 - RNA, 19 nt, Artificial Sequence
  Description of Artificial Sequence: Synthetic oligonucleotide
  Sense strand starting at position 2285 of SEQ ID NO: 1563277
gguuuaguaucuccacacu

SEQ ID NO: 1808562 - RNA, 19 nt, Artificial Sequence
  Description of Artificial Sequence: Synthetic oligonucleotide
  Antisense strand to SEQ ID NO: 1808561
aguguggagauacuaaacc

SEQ ID NO: 1808563 - RNA, 19 nt, Artificial Sequence
  Description of Artificial Sequence: Synthetic oligonucleotide
  Sense strand starting at position 2406 of SEQ ID NO: 1563277
uaacgucaaguuuagagaa

SEQ ID NO: 1808564 - RNA, 19 nt, Artificial Sequence
  Description of Artificial Sequence: Synthetic oligonucleotide
  Antisense strand to SEQ ID NO: 1808563
uucucuaaacuugacguua

SEQ ID NO: 1808565 - RNA, 19 nt, Artificial Sequence
  Description of Artificial Sequence: Synthetic oligonucleotide
  Sense strand starting at position 2457 of SEQ ID NO: 1563277
uguagauaaauacgugaua

SEQ ID NO: 1808566 - RNA, 19 nt, Artificial Sequence
  Description of Artificial Sequence: Synthetic oligonucleotide
  Antisense strand to SEQ ID NO: 1808565
uaucacguauuuaucuaca

SEQ ID NO: 1808567 - RNA, 19 nt, Artificial Sequence
  Description of Artificial Sequence: Synthetic oligonucleotide
  Sense strand starting at position 2458 of SEQ ID NO: 1563277
guagauaaauacgugauaa

SEQ ID NO: 1808568 - RNA, 19 nt, Artificial Sequence
  Description of Artificial Sequence: Synthetic oligonucleotide
  Antisense strand to SEQ ID NO: 1808567
uuaucacguauuuaucuac

SEQ ID NO: 1808569 - RNA, 19 nt, Artificial Sequence
  Description of Artificial Sequence: Synthetic oligonucleotide
  Sense strand starting at position 3485 of SEQ ID NO: 1563277
agacuaguguacuuagaga

SEQ ID NO: 1808570 - RNA, 19 nt, Artificial Sequence
  Description of Artificial Sequence: Synthetic oligonucleotide
  Antisense strand to SEQ ID NO: 1808569
ucucuaaguacacuagucu

SEQ ID NO: 1808571 - RNA, 19 nt, Artificial Sequence
  Description of Artificial Sequence: Synthetic oligonucleotide
  Sense strand starting at position 3490 of SEQ ID NO: 1563277
aguguacuuagagaagugu

SEQ ID NO: 1808572 - RNA, 19 nt, Artificial Sequence
  Description of Artificial Sequence: Synthetic oligonucleotide
  Antisense strand to SEQ ID NO: 1808571
acacuucucuaaguacacu

SEQ ID NO: 1808573 - RNA, 19 nt, Artificial Sequence
  Description of Artificial Sequence: Synthetic oligonucleotide
  Sense strand starting at position 3499 of SEQ ID NO: 1563277
agagaagugucauucccuc

SEQ ID NO: 1808574 - RNA, 19 nt, Artificial Sequence
  Description of Artificial Sequence: Synthetic oligonucleotide
  Antisense strand to SEQ ID NO: 1808573
gagggaaugacacuucucu

SEQ ID NO: 1808575 - RNA, 19 nt, Artificial Sequence
  Description of Artificial Sequence: Synthetic oligonucleotide
  Sense strand starting at position 3611 of SEQ ID NO: 1563277
ggcaaauaccuguauguuu

SEQ ID NO: 1808576 - RNA, 19 nt, Artificial Sequence
  Description of Artificial Sequence: Synthetic oligonucleotide
  Antisense strand to SEQ ID NO: 1808575
aaacauacagguauuugcc

SEQ ID NO: 1808577 - RNA, 19 nt, Artificial Sequence
  Description of Artificial Sequence: Synthetic oligonucleotide
  Sense strand starting at position 3716 of SEQ ID NO: 1563277
aaaucugugguguauaugu

SEQ ID NO: 1808578 - RNA, 19 nt, Artificial Sequence
  Description of Artificial Sequence: Synthetic oligonucleotide
  Antisense strand to SEQ ID NO: 1808577
acauauacaccacagauuu

SEQ ID NO: 1808579 - RNA, 19 nt, Artificial Sequence
  Description of Artificial Sequence: Synthetic oligonucleotide
  Sense strand starting at position 3727 of SEQ ID NO: 1563277
guauaugugcuauaguaua

SEQ ID NO: 1808580 - RNA, 19 nt, Artificial Sequence
  Description of Artificial Sequence: Synthetic oligonucleotide
  Antisense strand to SEQ ID NO: 1808579
uauacuauagcacauauac

SEQ ID NO: 1808581 - RNA, 19 nt, Artificial Sequence
  Description of Artificial Sequence: Synthetic oligonucleotide
  Sense strand starting at position 3750 of SEQ ID NO: 1563277
gucaaucuccuauguugga

SEQ ID NO: 1808582 - RNA, 19 nt, Artificial Sequence
  Description of Artificial Sequence: Synthetic oligonucleotide
  Antisense strand to SEQ ID NO: 1808581
uccaacauaggagauugac

SEQ ID NO: 1808583 - RNA, 19 nt, Artificial Sequence
  Description of Artificial Sequence: Synthetic oligonucleotide
  Sense strand starting at position 3751 of SEQ ID NO: 1563277
ucaaucuccuauguuggaa

SEQ ID NO: 1808584 - RNA, 19 nt, Artificial Sequence
  Description of Artificial Sequence: Synthetic oligonucleotide
  Antisense strand to SEQ ID NO: 1808583
uuccaacauaggagauuga

SEQ ID NO: 1808585 - RNA, 19 nt, Artificial Sequence
  Description of Artificial Sequence: Synthetic oligonucleotide
  Sense strand starting at position 3754 of SEQ ID NO: 1563277
aucuccuauguuggaauau

SEQ ID NO: 1808586 - RNA, 19 nt, Artificial Sequence
  Description of Artificial Sequence: Synthetic oligonucleotide
  Antisense strand to SEQ ID NO: 1808585
auauuccaacauaggagau

SEQ ID NO: 1808587 - RNA, 19 nt, Artificial Sequence
  Description of Artificial Sequence: Synthetic oligonucleotide
  Sense strand starting at position 3814 of SEQ ID NO: 1563277
augaauaacuuugugcaca

SEQ ID NO: 1808588 - RNA, 19 nt, Artificial Sequence
  Description of Artificial Sequence: Synthetic oligonucleotide
  Antisense strand to SEQ ID NO: 1808587
ugugcacaaaguuauucau

SEQ ID NO: 1808589 - RNA, 19 nt, Artificial Sequence
  Description of Artificial Sequence: Synthetic oligonucleotide
  Sense strand starting at position 3870 of SEQ ID NO: 1563277
gguuacuagaagugggauu

SEQ ID NO: 1808590 - RNA, 19 nt, Artificial Sequence
  Description of Artificial Sequence: Synthetic oligonucleotide
  Antisense strand to SEQ ID NO: 1808589
aaucccacuucuaguaacc

SEQ ID NO: 1808591 - RNA, 19 nt, Artificial Sequence
  Description of Artificial Sequence: Synthetic oligonucleotide
  Sense strand starting at position 3899 of SEQ ID NO: 1563277
aggauaaauauauguguag

SEQ ID NO: 1808592 - RNA, 19 nt, Artificial Sequence
  Description of Artificial Sequence: Synthetic oligonucleotide
  Antisense strand to SEQ ID NO: 1808591
cuacacauauauuuauccu

SEQ ID NO: 1808593 - RNA, 19 nt, Artificial Sequence
  Description of Artificial Sequence: Synthetic oligonucleotide
  Sense strand starting at position 3900 of SEQ ID NO: 1563277
ggauaaauauauguguagu

SEQ ID NO: 1808594 - RNA, 19 nt, Artificial Sequence
  Description of Artificial Sequence: Synthetic oligonucleotide
  Antisense strand to SEQ ID NO: 1808593
acuacacauauauuuaucc

SEQ ID NO: 1808595 - RNA, 19 nt, Artificial Sequence
  Description of Artificial Sequence: Synthetic oligonucleotide
  Sense strand starting at position 65 of SEQ ID NO: 1563278
cugaaauagguuuguauau

SEQ ID NO: 1808596 - RNA, 19 nt, Artificial Sequence
  Description of Artificial Sequence: Synthetic oligonucleotide
  Antisense strand to SEQ ID NO: 1808595
auauacaaaccuauuucag

SEQ ID NO: 1808597 - RNA, 19 nt, Artificial Sequence
  Description of Artificial Sequence: Synthetic oligonucleotide
  Sense strand starting at position 85 of SEQ ID NO: 1563278
agaaauauccaguguuagg

SEQ ID NO: 1808598 - RNA, 19 nt, Artificial Sequence
  Description of Artificial Sequence: Synthetic oligonucleotide
  Antisense strand to SEQ ID NO: 1808597
ccuaacacuggauauuucu

SEQ ID NO: 1808599 - RNA, 19 nt, Artificial Sequence
  Description of Artificial Sequence: Synthetic oligonucleotide
  Sense strand starting at position 488 of SEQ ID NO: 1563278
gucacucaacuauguuaag

SEQ ID NO: 1808600 - RNA, 19 nt, Artificial Sequence
  Description of Artificial Sequence: Synthetic oligonucleotide
  Antisense strand to SEQ ID NO: 1808599
cuuaacauaguugagugac

SEQ ID NO: 1808601 - RNA, 19 nt, Artificial Sequence
  Description of Artificial Sequence: Synthetic oligonucleotide
  Sense strand starting at position 532 of SEQ ID NO: 1563278
gugauaucuaaaggcguau

SEQ ID NO: 1808602 - RNA, 19 nt, Artificial Sequence
  Description of Artificial Sequence: Synthetic oligonucleotide
  Antisense strand to SEQ ID NO: 1808601
auacgccuuuagauaucac

SEQ ID NO: 1808603 - RNA, 19 nt, Artificial Sequence
  Description of Artificial Sequence: Synthetic oligonucleotide
  Sense strand starting at position 546 of SEQ ID NO: 1563278
cguauugcccucugaaaug

SEQ ID NO: 1808604 - RNA, 19 nt, Artificial Sequence
  Description of Artificial Sequence: Synthetic oligonucleotide
  Antisense strand to SEQ ID NO: 1808603
cauuucagagggcaauacg

SEQ ID NO: 1808605 - RNA, 19 nt, Artificial Sequence
  Description of Artificial Sequence: Synthetic oligonucleotide
  Sense strand starting at position 614 of SEQ ID NO: 1563278
auuaaacguucccuggaau

SEQ ID NO: 1808606 - RNA, 19 nt, Artificial Sequence
  Description of Artificial Sequence: Synthetic oligonucleotide
  Antisense strand to SEQ ID NO: 1808605
auuccagggaacguuuaau

SEQ ID NO: 1808607 - RNA, 19 nt, Artificial Sequence
  Description of Artificial Sequence: Synthetic oligonucleotide
  Sense strand starting at position 615 of SEQ ID NO: 1563278
uuaaacguucccuggaauu

SEQ ID NO: 1808608 - RNA, 19 nt, Artificial Sequence
  Description of Artificial Sequence: Synthetic oligonucleotide
  Antisense strand to SEQ ID NO: 1808607
aauuccagggaacguuuaa

SEQ ID NO: 1808609 - RNA, 19 nt, Artificial Sequence
  Description of Artificial Sequence: Synthetic oligonucleotide
  Sense strand starting at position 634 of SEQ ID NO: 1563278
gcacaagaaggcuauaugu

SEQ ID NO: 1808610 - RNA, 19 nt, Artificial Sequence
  Description of Artificial Sequence: Synthetic oligonucleotide
  Antisense strand to SEQ ID NO: 1808609
acauauagccuucuugugc

SEQ ID NO: 1808611 - RNA, 19 nt, Artificial Sequence
  Description of Artificial Sequence: Synthetic oligonucleotide
  Sense strand starting at position 643 of SEQ ID NO: 1563278
ggcuauauguauucuguua

SEQ ID NO: 1808612 - RNA, 19 nt, Artificial Sequence
  Description of Artificial Sequence: Synthetic oligonucleotide
  Antisense strand to SEQ ID NO: 1808611
uaacagaauacauauagcc

SEQ ID NO: 1808613 - RNA, 19 nt, Artificial Sequence
  Description of Artificial Sequence: Synthetic oligonucleotide
  Sense strand starting at position 690 of SEQ ID NO: 1563278
uggacauauguuuggaaau

SEQ ID NO: 1808614 - RNA, 19 nt, Artificial Sequence
  Description of Artificial Sequence: Synthetic oligonucleotide
  Antisense strand to SEQ ID NO: 1808613
auuuccaaacauaugucca

SEQ ID NO: 1808615 - RNA, 19 nt, Artificial Sequence
  Description of Artificial Sequence: Synthetic oligonucleotide
  Sense strand starting at position 691 of SEQ ID NO: 1563278
ggacauauguuuggaaaua

SEQ ID NO: 1808616 - RNA, 19 nt, Artificial Sequence
  Description of Artificial Sequence: Synthetic oligonucleotide
  Antisense strand to SEQ ID NO: 1808615
uauuuccaaacauaugucc

SEQ ID NO: 1808617 - RNA, 19 nt, Artificial Sequence
  Description of Artificial Sequence: Synthetic oligonucleotide
  Sense strand starting at position 692 of SEQ ID NO: 1563278
gacauauguuuggaaauag

SEQ ID NO: 1808618 - RNA, 19 nt, Artificial Sequence
  Description of Artificial Sequence: Synthetic oligonucleotide
  Antisense strand to SEQ ID NO: 1808617
cuauuuccaaacauauguc

SEQ ID NO: 1808619 - RNA, 19 nt, Artificial Sequence
  Description of Artificial Sequence: Synthetic oligonucleotide
  Sense strand starting at position 758 of SEQ ID NO: 1563278
cagccaaaugacuguguuu

SEQ ID NO: 1808620 - RNA, 19 nt, Artificial Sequence
  Description of Artificial Sequence: Synthetic oligonucleotide
  Antisense strand to SEQ ID NO: 1808619
aaacacagucauuuggcug

SEQ ID NO: 1808621 - RNA, 19 nt, Artificial Sequence
  Description of Artificial Sequence: Synthetic oligonucleotide
  Sense strand starting at position 760 of SEQ ID NO: 1563278
gccaaaugacuguguuuac

SEQ ID NO: 1808622 - RNA, 19 nt, Artificial Sequence
  Description of Artificial Sequence: Synthetic oligonucleotide
  Antisense strand to SEQ ID NO: 1808621
guaaacacagucauuuggc

SEQ ID NO: 1808623 - RNA, 19 nt, Artificial Sequence
  Description of Artificial Sequence: Synthetic oligonucleotide
  Sense strand starting at position 820 of SEQ ID NO: 1563278
aguauuuaguguucuauac

SEQ ID NO: 1808624 - RNA, 19 nt, Artificial Sequence
  Description of Artificial Sequence: Synthetic oligonucleotide
  Antisense strand to SEQ ID NO: 1808623
guauagaacacuaaauacu

SEQ ID NO: 1808625 - RNA, 19 nt, Artificial Sequence
  Description of Artificial Sequence: Synthetic oligonucleotide
  Sense strand starting at position 1030 of SEQ ID NO: 1563278
uguagauguauaugccuga

SEQ ID NO: 1808626 - RNA, 19 nt, Artificial Sequence
  Description of Artificial Sequence: Synthetic oligonucleotide
  Antisense strand to SEQ ID NO: 1808625
ucaggcauauacaucuaca

SEQ ID NO: 1808627 - RNA, 19 nt, Artificial Sequence
  Description of Artificial Sequence: Synthetic oligonucleotide
  Sense strand starting at position 1031 of SEQ ID NO: 1563278
guagauguauaugccugau

SEQ ID NO: 1808628 - RNA, 19 nt, Artificial Sequence
  Description of Artificial Sequence: Synthetic oligonucleotide
  Antisense strand to SEQ ID NO: 1808627
aucaggcauauacaucuac

SEQ ID NO: 1808629 - RNA, 19 nt, Artificial Sequence
  Description of Artificial Sequence: Synthetic oligonucleotide
  Sense strand starting at position 1033 of SEQ ID NO: 1563278
agauguauaugccugauag

SEQ ID NO: 1808630 - RNA, 19 nt, Artificial Sequence
  Description of Artificial Sequence: Synthetic oligonucleotide
  Antisense strand to SEQ ID NO: 1808629
cuaucaggcauauacaucu

SEQ ID NO: 1808631 - RNA, 19 nt, Artificial Sequence
  Description of Artificial Sequence: Synthetic oligonucleotide
  Sense strand starting at position 1034 of SEQ ID NO: 1563278
gauguauaugccugauagc

SEQ ID NO: 1808632 - RNA, 19 nt, Artificial Sequence
  Description of Artificial Sequence: Synthetic oligonucleotide
  Antisense strand to SEQ ID NO: 1808631
gcuaucaggcauauacauc

SEQ ID NO: 1808633 - RNA, 19 nt, Artificial Sequence
  Description of Artificial Sequence: Synthetic oligonucleotide
  Sense strand starting at position 1035 of SEQ ID NO: 1563278
auguauaugccugauagcu

SEQ ID NO: 1808634 - RNA, 19 nt, Artificial Sequence
  Description of Artificial Sequence: Synthetic oligonucleotide
  Antisense strand to SEQ ID NO: 1808633
agcuaucaggcauauacau

SEQ ID NO: 1808635 - RNA, 19 nt, Artificial Sequence
  Description of Artificial Sequence: Synthetic oligonucleotide
  Sense strand starting at position 1037 of SEQ ID NO: 1563278
guauaugccugauagcuuu

SEQ ID NO: 1808636 - RNA, 19 nt, Artificial Sequence
  Description of Artificial Sequence: Synthetic oligonucleotide
  Antisense strand to SEQ ID NO: 1808635
aaagcuaucaggcauauac

SEQ ID NO: 1808637 - RNA, 19 nt, Artificial Sequence
  Description of Artificial Sequence: Synthetic oligonucleotide
  Sense strand starting at position 1104 of SEQ ID NO: 1563278
uaaucagggcccugaagaa

SEQ ID NO: 1808638 - RNA, 19 nt, Artificial Sequence
  Description of Artificial Sequence: Synthetic oligonucleotide
  Antisense strand to SEQ ID NO: 1808637
uucuucagggcccugauua

SEQ ID NO: 1808639 - RNA, 19 nt, Artificial Sequence
  Description of Artificial Sequence: Synthetic oligonucleotide
  Sense strand starting at position 1198 of SEQ ID NO: 1563278
augaccuguugagaaucaa

SEQ ID NO: 1808640 - RNA, 19 nt, Artificial Sequence
  Description of Artificial Sequence: Synthetic oligonucleotide
  Antisense strand to SEQ ID NO: 1808639
uugauucucaacaggucau

SEQ ID NO: 1808641 - RNA, 19 nt, Artificial Sequence
  Description of Artificial Sequence: Synthetic oligonucleotide
  Sense strand starting at position 1335 of SEQ ID NO: 1563278
gcccacaugcucuggagaa

SEQ ID NO: 1808642 - RNA, 19 nt, Artificial Sequence
  Description of Artificial Sequence: Synthetic oligonucleotide
  Antisense strand to SEQ ID NO: 1808641
uucuccagagcaugugggc

SEQ ID NO: 1808643 - RNA, 19 nt, Artificial Sequence
  Description of Artificial Sequence: Synthetic oligonucleotide
  Sense strand starting at position 1336 of SEQ ID NO: 1563278
cccacaugcucuggagaaa

SEQ ID NO: 1808644 - RNA, 19 nt, Artificial Sequence
  Description of Artificial Sequence: Synthetic oligonucleotide
  Antisense strand to SEQ ID NO: 1808643
uuucuccagagcauguggg

SEQ ID NO: 1808645 - RNA, 19 nt, Artificial Sequence
  Description of Artificial Sequence: Synthetic oligonucleotide
  Sense strand starting at position 1426 of SEQ ID NO: 1563278
agacuucuuuauguaaaug

SEQ ID NO: 1808646 - RNA, 19 nt, Artificial Sequence
  Description of Artificial Sequence: Synthetic oligonucleotide
  Antisense strand to SEQ ID NO: 1808645
cauuuacauaaagaagucu

SEQ ID NO: 1808647 - RNA, 19 nt, Artificial Sequence
  Description of Artificial Sequence: Synthetic oligonucleotide
  Sense strand starting at position 1436 of SEQ ID NO: 1563278
auguaaaugucccaucuuu

SEQ ID NO: 1808648 - RNA, 19 nt, Artificial Sequence
  Description of Artificial Sequence: Synthetic oligonucleotide
  Antisense strand to SEQ ID NO: 1808647
aaagaugggacauuuacau

SEQ ID NO: 1808649 - RNA, 19 nt, Artificial Sequence
  Description of Artificial Sequence: Synthetic oligonucleotide
  Sense strand starting at position 1542 of SEQ ID NO: 1563278
acucaugacuggccagaaa

SEQ ID NO: 1808650 - RNA, 19 nt, Artificial Sequence
  Description of Artificial Sequence: Synthetic oligonucleotide
  Antisense strand to SEQ ID NO: 1808649
uuucuggccagucaugagu

SEQ ID NO: 1808651 - RNA, 19 nt, Artificial Sequence
  Description of Artificial Sequence: Synthetic oligonucleotide
  Sense strand starting at position 1591 of SEQ ID NO: 1563278
gggaccuuaucuucuguuu

SEQ ID NO: 1808652 - RNA, 19 nt, Artificial Sequence
  Description of Artificial Sequence: Synthetic oligonucleotide
  Antisense strand to SEQ ID NO: 1808651
aaacagaagauaagguccc

SEQ ID NO: 1808653 - RNA, 19 nt, Artificial Sequence
  Description of Artificial Sequence: Synthetic oligonucleotide
  Sense strand starting at position 1737 of SEQ ID NO: 1563278
agcgacaacucucagaaua

SEQ ID NO: 1808654 - RNA, 19 nt, Artificial Sequence
  Description of Artificial Sequence: Synthetic oligonucleotide
  Antisense strand to SEQ ID NO: 1808653
uauucugagaguugucgcu

SEQ ID NO: 1808655 - RNA, 19 nt, Artificial Sequence
  Description of Artificial Sequence: Synthetic oligonucleotide
  Sense strand starting at position 1739 of SEQ ID NO: 1563278
cgacaacucucagaauaag

SEQ ID NO: 1808656 - RNA, 19 nt, Artificial Sequence
  Description of Artificial Sequence: Synthetic oligonucleotide
  Antisense strand to SEQ ID NO: 1808655
cuuauucugagaguugucg

SEQ ID NO: 1808657 - RNA, 19 nt, Artificial Sequence
  Description of Artificial Sequence: Synthetic oligonucleotide
  Sense strand starting at position 2149 of SEQ ID NO: 1563278
ugggaacacccaugaguuu

SEQ ID NO: 1808658 - RNA, 19 nt, Artificial Sequence
  Description of Artificial Sequence: Synthetic oligonucleotide
  Antisense strand to SEQ ID NO: 1808657
aaacucauggguguuccca

SEQ ID NO: 1808659 - RNA, 19 nt, Artificial Sequence
  Description of Artificial Sequence: Synthetic oligonucleotide
  Sense strand starting at position 2164 of SEQ ID NO: 1563278
guuuauaacucuugccgua

SEQ ID NO: 1808660 - RNA, 19 nt, Artificial Sequence
  Description of Artificial Sequence: Synthetic oligonucleotide
  Antisense strand to SEQ ID NO: 1808659
uacggcaagaguuauaaac

SEQ ID NO: 1808661 - RNA, 19 nt, Artificial Sequence
  Description of Artificial Sequence: Synthetic oligonucleotide
  Sense strand starting at position 2240 of SEQ ID NO: 1563278
aggauugccagauguaaua

SEQ ID NO: 1808662 - RNA, 19 nt, Artificial Sequence
  Description of Artificial Sequence: Synthetic oligonucleotide
  Antisense strand to SEQ ID NO: 1808661
uauuacaucuggcaauccu

SEQ ID NO: 1808663 - RNA, 19 nt, Artificial Sequence
  Description of Artificial Sequence: Synthetic oligonucleotide
  Sense strand starting at position 2327 of SEQ ID NO: 1563278
auaacauauugagagguga

SEQ ID NO: 1808664 - RNA, 19 nt, Artificial Sequence
  Description of Artificial Sequence: Synthetic oligonucleotide
  Antisense strand to SEQ ID NO: 1808663
ucaccucucaauauguuau

SEQ ID NO: 1808665 - RNA, 19 nt, Artificial Sequence
  Description of Artificial Sequence: Synthetic oligonucleotide
  Sense strand starting at position 2951 of SEQ ID NO: 1563278
ggagaaccauuaugucuag

SEQ ID NO: 1808666 - RNA, 19 nt, Artificial Sequence
  Description of Artificial Sequence: Synthetic oligonucleotide
  Antisense strand to SEQ ID NO: 1808665
cuagacauaaugguucucc

SEQ ID NO: 1808667 - RNA, 19 nt, Artificial Sequence
  Description of Artificial Sequence: Synthetic oligonucleotide
  Sense strand starting at position 3585 of SEQ ID NO: 1563278
ggaagaaacuccgaacgua

SEQ ID NO: 1808668 - RNA, 19 nt, Artificial Sequence
  Description of Artificial Sequence: Synthetic oligonucleotide
  Antisense strand to SEQ ID NO: 1808667
uacguucggaguuucuucc

SEQ ID NO: 1808669 - RNA, 19 nt, Artificial Sequence
  Description of Artificial Sequence: Synthetic oligonucleotide
  Sense strand starting at position 3594 of SEQ ID NO: 1563278
uccgaacguauccgaacau

SEQ ID NO: 1808670 - RNA, 19 nt, Artificial Sequence
  Description of Artificial Sequence: Synthetic oligonucleotide
  Antisense strand to SEQ ID NO: 1808669
auguucggauacguucgga

SEQ ID NO: 1808671 - RNA, 19 nt, Artificial Sequence
  Description of Artificial Sequence: Synthetic oligonucleotide
  Sense strand starting at position 3724 of SEQ ID NO: 1563278
acaauauguuuagggauuu

SEQ ID NO: 1808672 - RNA, 19 nt, Artificial Sequence
  Description of Artificial Sequence: Synthetic oligonucleotide
  Antisense strand to SEQ ID NO: 1808671
aaaucccuaaacauauugu

SEQ ID NO: 1808673 - RNA, 19 nt, Artificial Sequence
  Description of Artificial Sequence: Synthetic oligonucleotide
  Sense strand starting at position 3887 of SEQ ID NO: 1563278
gcaacugcuccuggcuaaa

SEQ ID NO: 1808674 - RNA, 19 nt, Artificial Sequence
  Description of Artificial Sequence: Synthetic oligonucleotide
  Antisense strand to SEQ ID NO: 1808673
uuuagccaggagcaguugc

SEQ ID NO: 1808675 - RNA, 19 nt, Artificial Sequence
  Description of Artificial Sequence: Synthetic oligonucleotide
  Sense strand starting at position 232 of SEQ ID NO: 1563280
gccuauuaucucuacguuu

SEQ ID NO: 1808676 - RNA, 19 nt, Artificial Sequence
  Description of Artificial Sequence: Synthetic oligonucleotide
  Antisense strand to SEQ ID NO: 1808675
aaacguagagauaauaggc

SEQ ID NO: 1808677 - RNA, 19 nt, Artificial Sequence
  Description of Artificial Sequence: Synthetic oligonucleotide
  Sense strand starting at position 234 of SEQ ID NO: 1563280
cuauuaucucuacguuuga

SEQ ID NO: 1808678 - RNA, 19 nt, Artificial Sequence
  Description of Artificial Sequence: Synthetic oligonucleotide
  Antisense strand to SEQ ID NO: 1808677
ucaaacguagagauaauag

SEQ ID NO: 1808679 - RNA, 19 nt, Artificial Sequence
  Description of Artificial Sequence: Synthetic oligonucleotide
  Sense strand starting at position 292 of SEQ ID NO: 1563280
gaguaagugguaugaauau

SEQ ID NO: 1808680 - RNA, 19 nt, Artificial Sequence
  Description of Artificial Sequence: Synthetic oligonucleotide
  Antisense strand to SEQ ID NO: 1808679
auauucauaccacuuacuc

SEQ ID NO: 1808681 - RNA, 19 nt, Artificial Sequence
  Description of Artificial Sequence: Synthetic oligonucleotide
  Sense strand starting at position 318 of SEQ ID NO: 1563280
acauguaauguuuagugau

SEQ ID NO: 1808682 - RNA, 19 nt, Artificial Sequence
  Description of Artificial Sequence: Synthetic oligonucleotide
  Antisense strand to SEQ ID NO: 1808681
aucacuaaacauuacaugu

SEQ ID NO: 1808683 - RNA, 19 nt, Artificial Sequence
  Description of Artificial Sequence: Synthetic oligonucleotide
  Sense strand starting at position 403 of SEQ ID NO: 1563280
cagaaugaggugugcaaca

SEQ ID NO: 1808684 - RNA, 19 nt, Artificial Sequence
  Description of Artificial Sequence: Synthetic oligonucleotide
  Antisense strand to SEQ ID NO: 1808683
uguugcacaccucauucug

SEQ ID NO: 1808685 - RNA, 19 nt, Artificial Sequence
  Description of Artificial Sequence: Synthetic oligonucleotide
  Sense strand starting at position 405 of SEQ ID NO: 1563280
gaaugaggugugcaacaga

SEQ ID NO: 1808686 - RNA, 19 nt, Artificial Sequence
  Description of Artificial Sequence: Synthetic oligonucleotide
  Antisense strand to SEQ ID NO: 1808685
ucuguugcacaccucauuc

SEQ ID NO: 1808687 - RNA, 19 nt, Artificial Sequence
  Description of Artificial Sequence: Synthetic oligonucleotide
  Sense strand starting at position 408 of SEQ ID NO: 1563280
ugaggugugcaacagauua

SEQ ID NO: 1808688 - RNA, 19 nt, Artificial Sequence
  Description of Artificial Sequence: Synthetic oligonucleotide
  Antisense strand to SEQ ID NO: 1808687
uaaucuguugcacaccuca

SEQ ID NO: 1808689 - RNA, 19 nt, Artificial Sequence
  Description of Artificial Sequence: Synthetic oligonucleotide
  Sense strand starting at position 550 of SEQ ID NO: 1563280
uguauaagcugcuuauaga

SEQ ID NO: 1808690 - RNA, 19 nt, Artificial Sequence
  Description of Artificial Sequence: Synthetic oligonucleotide
  Antisense strand to SEQ ID NO: 1808689
ucuauaagcagcuuauaca

SEQ ID NO: 1808691 - RNA, 19 nt, Artificial Sequence
  Description of Artificial Sequence: Synthetic oligonucleotide
  Sense strand starting at position 551 of SEQ ID NO: 1563280
guauaagcugcuuauagag

SEQ ID NO: 1808692 - RNA, 19 nt, Artificial Sequence
  Description of Artificial Sequence: Synthetic oligonucleotide
  Antisense strand to SEQ ID NO: 1808691
cucuauaagcagcuuauac

SEQ ID NO: 1808693 - RNA, 19 nt, Artificial Sequence
  Description of Artificial Sequence: Synthetic oligonucleotide
  Sense strand starting at position 856 of SEQ ID NO: 1563280
gacugaagaccuuguugag

SEQ ID NO: 1808694 - RNA, 19 nt, Artificial Sequence
  Description of Artificial Sequence: Synthetic oligonucleotide
  Antisense strand to SEQ ID NO: 1808693
cucaacaaggucuucaguc

SEQ ID NO: 1808695 - RNA, 19 nt, Artificial Sequence
  Description of Artificial Sequence: Synthetic oligonucleotide
  Sense strand starting at position 1219 of SEQ ID NO: 1563280
guaagagugaacgaugcau

SEQ ID NO: 1808696 - RNA, 19 nt, Artificial Sequence
  Description of Artificial Sequence: Synthetic oligonucleotide
  Antisense strand to SEQ ID NO: 1808695
augcaucguucacucuuac

SEQ ID NO: 1808697 - RNA, 19 nt, Artificial Sequence
  Description of Artificial Sequence: Synthetic oligonucleotide
  Sense strand starting at position 1247 of SEQ ID NO: 1563280
agguguuaguucguagaaa

SEQ ID NO: 1808698 - RNA, 19 nt, Artificial Sequence
  Description of Artificial Sequence: Synthetic oligonucleotide
  Antisense strand to SEQ ID NO: 1808697
uuucuacgaacuaacaccu

SEQ ID NO: 1808699 - RNA, 19 nt, Artificial Sequence
  Description of Artificial Sequence: Synthetic oligonucleotide
  Sense strand starting at position 1393 of SEQ ID NO: 1563280
gugggaaagugucugucuu

SEQ ID NO: 1808700 - RNA, 19 nt, Artificial Sequence
  Description of Artificial Sequence: Synthetic oligonucleotide
  Antisense strand to SEQ ID NO: 1808699
aagacagacacuuucccac

SEQ ID NO: 1808701 - RNA, 19 nt, Artificial Sequence
  Description of Artificial Sequence: Synthetic oligonucleotide
  Sense strand starting at position 1394 of SEQ ID NO: 1563280
ugggaaagugucugucuuc

SEQ ID NO: 1808702 - RNA, 19 nt, Artificial Sequence
  Description of Artificial Sequence: Synthetic oligonucleotide
  Antisense strand to SEQ ID NO: 1808701
gaagacagacacuuuccca

SEQ ID NO: 1808703 - RNA, 19 nt, Artificial Sequence
  Description of Artificial Sequence: Synthetic oligonucleotide
  Sense strand starting at position 1395 of SEQ ID NO: 1563280
gggaaagugucugucuucu

SEQ ID NO: 1808704 - RNA, 19 nt, Artificial Sequence
  Description of Artificial Sequence: Synthetic oligonucleotide
  Antisense strand to SEQ ID NO: 1808703
agaagacagacacuuuccc

SEQ ID NO: 1808705 - RNA, 19 nt, Artificial Sequence
  Description of Artificial Sequence: Synthetic oligonucleotide
  Sense strand starting at position 1420 of SEQ ID NO: 1563280
ggucaauacgaucguggga

SEQ ID NO: 1808706 - RNA, 19 nt, Artificial Sequence
  Description of Artificial Sequence: Synthetic oligonucleotide
  Antisense strand to SEQ ID NO: 1808705
ucccacgaucguauugacc

SEQ ID NO: 1808707 - RNA, 19 nt, Artificial Sequence
  Description of Artificial Sequence: Synthetic oligonucleotide
  Sense strand starting at position 1663 of SEQ ID NO: 1563280
ugguaaacuuaggcaauaa

SEQ ID NO: 1808708 - RNA, 19 nt, Artificial Sequence
  Description of Artificial Sequence: Synthetic oligonucleotide
  Antisense strand to SEQ ID NO: 1808707
uuauugccuaaguuuacca

SEQ ID NO: 1808709 - RNA, 19 nt, Artificial Sequence
  Description of Artificial Sequence: Synthetic oligonucleotide
  Sense strand starting at position 2030 of SEQ ID NO: 1563280
cgcguuggaggucagagaa

SEQ ID NO: 1808710 - RNA, 19 nt, Artificial Sequence
  Description of Artificial Sequence: Synthetic oligonucleotide
  Antisense strand to SEQ ID NO: 1808709
uucucugaccuccaacgcg

SEQ ID NO: 1808711 - RNA, 19 nt, Artificial Sequence
  Description of Artificial Sequence: Synthetic oligonucleotide
  Sense strand starting at position 2784 of SEQ ID NO: 1563280
gcgggaauccuagggauac

SEQ ID NO: 1808712 - RNA, 19 nt, Artificial Sequence
  Description of Artificial Sequence: Synthetic oligonucleotide
  Antisense strand to SEQ ID NO: 1808711
guaucccuaggauucccgc

SEQ ID NO: 1808713 - RNA, 19 nt, Artificial Sequence
  Description of Artificial Sequence: Synthetic oligonucleotide
  Sense strand starting at position 2956 of SEQ ID NO: 1563280
gcgacuucagggugacaga

SEQ ID NO: 1808714 - RNA, 19 nt, Artificial Sequence
  Description of Artificial Sequence: Synthetic oligonucleotide
  Antisense strand to SEQ ID NO: 1808713
ucugucacccugaagucgc

SEQ ID NO: 1808715 - RNA, 19 nt, Artificial Sequence
  Description of Artificial Sequence: Synthetic oligonucleotide
  Sense strand starting at position 2957 of SEQ ID NO: 1563280
cgacuucagggugacagau

SEQ ID NO: 1808716 - RNA, 19 nt, Artificial Sequence
  Description of Artificial Sequence: Synthetic oligonucleotide
  Antisense strand to SEQ ID NO: 1808715
aucugucacccugaagucg

SEQ ID NO: 1808717 - RNA, 19 nt, Artificial Sequence
  Description of Artificial Sequence: Synthetic oligonucleotide
  Sense strand starting at position 3111 of SEQ ID NO: 1563280
cuggcugucccuuauucuu

SEQ ID NO: 1808718 - RNA, 19 nt, Artificial Sequence
  Description of Artificial Sequence: Synthetic oligonucleotide
  Antisense strand to SEQ ID NO: 1808717
aagaauaagggacagccag

SEQ ID NO: 1808719 - RNA, 19 nt, Artificial Sequence
  Description of Artificial Sequence: Synthetic oligonucleotide
  Sense strand starting at position 3159 of SEQ ID NO: 1563280
uccaauuggcaaugucauu

SEQ ID NO: 1808720 - RNA, 19 nt, Artificial Sequence
  Description of Artificial Sequence: Synthetic oligonucleotide
  Antisense strand to SEQ ID NO: 1808719
aaugacauugccaauugga

SEQ ID NO: 1808721 - RNA, 19 nt, Artificial Sequence
  Description of Artificial Sequence: Synthetic oligonucleotide
  Sense strand starting at position 3164 of SEQ ID NO: 1563280
uuggcaaugucauuuguac

SEQ ID NO: 1808722 - RNA, 19 nt, Artificial Sequence
  Description of Artificial Sequence: Synthetic oligonucleotide
  Antisense strand to SEQ ID NO: 1808721
guacaaaugacauugccaa

SEQ ID NO: 1808723 - RNA, 19 nt, Artificial Sequence
  Description of Artificial Sequence: Synthetic oligonucleotide
  Sense strand starting at position 3516 of SEQ ID NO: 1563280
aggugagaagccugaggua

SEQ ID NO: 1808724 - RNA, 19 nt, Artificial Sequence
  Description of Artificial Sequence: Synthetic oligonucleotide
  Antisense strand to SEQ ID NO: 1808723
uaccucaggcuucucaccu

SEQ ID NO: 1808725 - RNA, 19 nt, Artificial Sequence
  Description of Artificial Sequence: Synthetic oligonucleotide
  Sense strand starting at position 3597 of SEQ ID NO: 1563280
cugcuauucccucagagag

SEQ ID NO: 1808726 - RNA, 19 nt, Artificial Sequence
  Description of Artificial Sequence: Synthetic oligonucleotide
  Antisense strand to SEQ ID NO: 1808725
cucucugagggaauagcag

SEQ ID NO: 1808727 - RNA, 19 nt, Artificial Sequence
  Description of Artificial Sequence: Synthetic oligonucleotide
  Sense strand starting at position 3660 of SEQ ID NO: 1563280
cuuugaugucagggaaagg

SEQ ID NO: 1808728 - RNA, 19 nt, Artificial Sequence
  Description of Artificial Sequence: Synthetic oligonucleotide
  Antisense strand to SEQ ID NO: 1808727
ccuuucccugacaucaaag

SEQ ID NO: 1808729 - RNA, 19 nt, Artificial Sequence
  Description of Artificial Sequence: Synthetic oligonucleotide
  Sense strand starting at position 3808 of SEQ ID NO: 1563280
cucauuguccuuuguggga

SEQ ID NO: 1808730 - RNA, 19 nt, Artificial Sequence
  Description of Artificial Sequence: Synthetic oligonucleotide
  Antisense strand to SEQ ID NO: 1808729
ucccacaaaggacaaugag

SEQ ID NO: 1808731 - RNA, 19 nt, Artificial Sequence
  Description of Artificial Sequence: Synthetic oligonucleotide
  Sense strand starting at position 3824 of SEQ ID NO: 1563280
ggaggaucugguuauguau

SEQ ID NO: 1808732 - RNA, 19 nt, Artificial Sequence
  Description of Artificial Sequence: Synthetic oligonucleotide
  Antisense strand to SEQ ID NO: 1808731
auacauaaccagauccucc

SEQ ID NO: 1808733 - RNA, 19 nt, Artificial Sequence
  Description of Artificial Sequence: Synthetic oligonucleotide
  Sense strand starting at position 3833 of SEQ ID NO: 1563280
gguuauguauggccagaug

SEQ ID NO: 1808734 - RNA, 19 nt, Artificial Sequence
  Description of Artificial Sequence: Synthetic oligonucleotide
  Antisense strand to SEQ ID NO: 1808733
caucuggccauacauaacc

SEQ ID NO: 1808735 - RNA, 19 nt, Artificial Sequence
  Description of Artificial Sequence: Synthetic oligonucleotide
  Sense strand starting at position 3874 of SEQ ID NO: 1563280
uaccguaucagggauguga

SEQ ID NO: 1808736 - RNA, 19 nt, Artificial Sequence
  Description of Artificial Sequence: Synthetic oligonucleotide
  Antisense strand to SEQ ID NO: 1808735
ucacaucccugauacggua

SEQ ID NO: 1808737 - RNA, 19 nt, Artificial Sequence
  Description of Artificial Sequence: Synthetic oligonucleotide
  Sense strand starting at position 3876 of SEQ ID NO: 1563280
ccguaucagggaugugaau

SEQ ID NO: 1808738 - RNA, 19 nt, Artificial Sequence
  Description of Artificial Sequence: Synthetic oligonucleotide
  Antisense strand to SEQ ID NO: 1808737
auucacaucccugauacgg

SEQ ID NO: 1808739 - RNA, 19 nt, Artificial Sequence
  Description of Artificial Sequence: Synthetic oligonucleotide
  Sense strand starting at position 3878 of SEQ ID NO: 1563280
guaucagggaugugaauuc

SEQ ID NO: 1808740 - RNA, 19 nt, Artificial Sequence
  Description of Artificial Sequence: Synthetic oligonucleotide
  Antisense strand to SEQ ID NO: 1808739
gaauucacaucccugauac

SEQ ID NO: 1808741 - RNA, 19 nt, Artificial Sequence
  Description of Artificial Sequence: Synthetic oligonucleotide
  Sense strand starting at position 3885 of SEQ ID NO: 1563280
ggaugugaauucuugccau

SEQ ID NO: 1808742 - RNA, 19 nt, Artificial Sequence
  Description of Artificial Sequence: Synthetic oligonucleotide
  Antisense strand to SEQ ID NO: 1808741
auggcaagaauucacaucc

SEQ ID NO: 1808743 - RNA, 19 nt, Artificial Sequence
  Description of Artificial Sequence: Synthetic oligonucleotide
  Sense strand starting at position 3888 of SEQ ID NO: 1563280
ugugaauucuugccaugag

SEQ ID NO: 1808744 - RNA, 19 nt, Artificial Sequence
  Description of Artificial Sequence: Synthetic oligonucleotide
  Antisense strand to SEQ ID NO: 1808743
cucauggcaagaauucaca

SEQ ID NO: 1808745 - RNA, 19 nt, Artificial Sequence
  Description of Artificial Sequence: Synthetic oligonucleotide
  Sense strand starting at position 3891 of SEQ ID NO: 1563280
gaauucuugccaugagagu

SEQ ID NO: 1808746 - RNA, 19 nt, Artificial Sequence
  Description of Artificial Sequence: Synthetic oligonucleotide
  Antisense strand to SEQ ID NO: 1808745
acucucauggcaagaauuc

SEQ ID NO: 1808747 - RNA, 19 nt, Artificial Sequence
  Description of Artificial Sequence: Synthetic oligonucleotide
  Sense strand starting at position 3902 of SEQ ID NO: 1563280
augagaguuucuuuggcca

SEQ ID NO: 1808748 - RNA, 19 nt, Artificial Sequence
  Description of Artificial Sequence: Synthetic oligonucleotide
  Antisense strand to SEQ ID NO: 1808747
uggccaaagaaacucucau

SEQ ID NO: 1808749 - RNA, 19 nt, Artificial Sequence
  Description of Artificial Sequence: Synthetic oligonucleotide
  Sense strand starting at position 3906 of SEQ ID NO: 1563280
gaguuucuuuggccagcaa

SEQ ID NO: 1808750 - RNA, 19 nt, Artificial Sequence
  Description of Artificial Sequence: Synthetic oligonucleotide
  Antisense strand to SEQ ID NO: 1808749
uugcuggccaaagaaacuc

SEQ ID NO: 1808751 - RNA, 19 nt, Artificial Sequence
  Description of Artificial Sequence: Synthetic oligonucleotide
  Sense strand starting at position 3907 of SEQ ID NO: 1563280
aguuucuuuggccagcaaa

SEQ ID NO: 1808752 - RNA, 19 nt, Artificial Sequence
  Description of Artificial Sequence: Synthetic oligonucleotide
  Antisense strand to SEQ ID NO: 1808751
uuugcuggccaaagaaacu

SEQ ID NO: 1808753 - RNA, 19 nt, Artificial Sequence
  Description of Artificial Sequence: Synthetic oligonucleotide
  Sense strand starting at position 3929 of SEQ ID NO: 1563280
gcgguauuaggcccugcaa

SEQ ID NO: 1808754 - RNA, 19 nt, Artificial Sequence
  Description of Artificial Sequence: Synthetic oligonucleotide
  Antisense strand to SEQ ID NO: 1808753
uugcagggccuaauaccgc

SEQ ID NO: 1808755 - RNA, 19 nt, Artificial Sequence
  Description of Artificial Sequence: Synthetic oligonucleotide
  Sense strand starting at position 430 of SEQ ID NO: 1563281
uuuguuucucaguacuuag

SEQ ID NO: 1808756 - RNA, 19 nt, Artificial Sequence
  Description of Artificial Sequence: Synthetic oligonucleotide
  Antisense strand to SEQ ID NO: 1808755
cuaaguacugagaaacaaa

SEQ ID NO: 1808757 - RNA, 19 nt, Artificial Sequence
  Description of Artificial Sequence: Synthetic oligonucleotide
  Sense strand starting at position 754 of SEQ ID NO: 1563281
cuauauaaccuauggguca

SEQ ID NO: 1808758 - RNA, 19 nt, Artificial Sequence
  Description of Artificial Sequence: Synthetic oligonucleotide
  Antisense strand to SEQ ID NO: 1808757
ugacccauagguuauauag

SEQ ID NO: 1808759 - RNA, 19 nt, Artificial Sequence
  Description of Artificial Sequence: Synthetic oligonucleotide
  Sense strand starting at position 804 of SEQ ID NO: 1563281
cauuaaguugaaugaaagu

SEQ ID NO: 1808760 - RNA, 19 nt, Artificial Sequence
  Description of Artificial Sequence: Synthetic oligonucleotide
  Antisense strand to SEQ ID NO: 1808759
acuuucauucaacuuaaug

SEQ ID NO: 1808761 - RNA, 19 nt, Artificial Sequence
  Description of Artificial Sequence: Synthetic oligonucleotide
  Sense strand starting at position 856 of SEQ ID NO: 1563281
aaguguguccuugagggaa

SEQ ID NO: 1808762 - RNA, 19 nt, Artificial Sequence
  Description of Artificial Sequence: Synthetic oligonucleotide
  Antisense strand to SEQ ID NO: 1808761
uucccucaaggacacacuu

SEQ ID NO: 1808763 - RNA, 19 nt, Artificial Sequence
  Description of Artificial Sequence: Synthetic oligonucleotide
  Sense strand starting at position 859 of SEQ ID NO: 1563281
uguguccuugagggaaaua

SEQ ID NO: 1808764 - RNA, 19 nt, Artificial Sequence
  Description of Artificial Sequence: Synthetic oligonucleotide
  Antisense strand to SEQ ID NO: 1808763
uauuucccucaaggacaca

SEQ ID NO: 1808765 - RNA, 19 nt, Artificial Sequence
  Description of Artificial Sequence: Synthetic oligonucleotide
  Sense strand starting at position 860 of SEQ ID NO: 1563281
guguccuugagggaaauau

SEQ ID NO: 1808766 - RNA, 19 nt, Artificial Sequence
  Description of Artificial Sequence: Synthetic oligonucleotide
  Antisense strand to SEQ ID NO: 1808765
auauuucccucaaggacac

SEQ ID NO: 1808767 - RNA, 19 nt, Artificial Sequence
  Description of Artificial Sequence: Synthetic oligonucleotide
  Sense strand starting at position 959 of SEQ ID NO: 1563281
cgaagagcaaguugaauua

SEQ ID NO: 1808768 - RNA, 19 nt, Artificial Sequence
  Description of Artificial Sequence: Synthetic oligonucleotide
  Antisense strand to SEQ ID NO: 1808767
uaauucaacuugcucuucg

SEQ ID NO: 1808769 - RNA, 19 nt, Artificial Sequence
  Description of Artificial Sequence: Synthetic oligonucleotide
  Sense strand starting at position 1220 of SEQ ID NO: 1563281
ggaauuacuggcuguccga

SEQ ID NO: 1808770 - RNA, 19 nt, Artificial Sequence
  Description of Artificial Sequence: Synthetic oligonucleotide
  Antisense strand to SEQ ID NO: 1808769
ucggacagccaguaauucc

SEQ ID NO: 1808771 - RNA, 19 nt, Artificial Sequence
  Description of Artificial Sequence: Synthetic oligonucleotide
  Sense strand starting at position 1731 of SEQ ID NO: 1563281
agaccagugucucucaaca

SEQ ID NO: 1808772 - RNA, 19 nt, Artificial Sequence
  Description of Artificial Sequence: Synthetic oligonucleotide
  Antisense strand to SEQ ID NO: 1808771
uguugagagacacuggucu

SEQ ID NO: 1808773 - RNA, 19 nt, Artificial Sequence
  Description of Artificial Sequence: Synthetic oligonucleotide
  Sense strand starting at position 2180 of SEQ ID NO: 1563281
accugaaguuaugucuuaa

SEQ ID NO: 1808774 - RNA, 19 nt, Artificial Sequence
  Description of Artificial Sequence: Synthetic oligonucleotide
  Antisense strand to SEQ ID NO: 1808773
uuaagacauaacuucaggu

SEQ ID NO: 1808775 - RNA, 19 nt, Artificial Sequence
  Description of Artificial Sequence: Synthetic oligonucleotide
  Sense strand starting at position 2330 of SEQ ID NO: 1563281
gccuuauucguggcuugua

SEQ ID NO: 1808776 - RNA, 19 nt, Artificial Sequence
  Description of Artificial Sequence: Synthetic oligonucleotide
  Antisense strand to SEQ ID NO: 1808775
uacaagccacgaauaaggc

SEQ ID NO: 1808777 - RNA, 19 nt, Artificial Sequence
  Description of Artificial Sequence: Synthetic oligonucleotide
  Sense strand starting at position 2708 of SEQ ID NO: 1563281
gaaauagaccugcacgcau

SEQ ID NO: 1808778 - RNA, 19 nt, Artificial Sequence
  Description of Artificial Sequence: Synthetic oligonucleotide
  Antisense strand to SEQ ID NO: 1808777
augcgugcaggucuauuuc

SEQ ID NO: 1808779 - RNA, 19 nt, Artificial Sequence
  Description of Artificial Sequence: Synthetic oligonucleotide
  Sense strand starting at position 2940 of SEQ ID NO: 1563281
uaacuuugaguuuggugau

SEQ ID NO: 1808780 - RNA, 19 nt, Artificial Sequence
  Description of Artificial Sequence: Synthetic oligonucleotide
  Antisense strand to SEQ ID NO: 1808779
aucaccaaacucaaaguua

SEQ ID NO: 1808781 - RNA, 19 nt, Artificial Sequence
  Description of Artificial Sequence: Synthetic oligonucleotide
  Sense strand starting at position 3151 of SEQ ID NO: 1563281
cuuaaagcucaaugauaga

SEQ ID NO: 1808782 - RNA, 19 nt, Artificial Sequence
  Description of Artificial Sequence: Synthetic oligonucleotide
  Antisense strand to SEQ ID NO: 1808781
ucuaucauugagcuuuaag

SEQ ID NO: 1808783 - RNA, 19 nt, Artificial Sequence
  Description of Artificial Sequence: Synthetic oligonucleotide
  Sense strand starting at position 3256 of SEQ ID NO: 1563281
acccuuuggcauuagauaa

SEQ ID NO: 1808784 - RNA, 19 nt, Artificial Sequence
  Description of Artificial Sequence: Synthetic oligonucleotide
  Antisense strand to SEQ ID NO: 1808783
uuaucuaaugccaaagggu

SEQ ID NO: 1808785 - RNA, 19 nt, Artificial Sequence
  Description of Artificial Sequence: Synthetic oligonucleotide
  Sense strand starting at position 3263 of SEQ ID NO: 1563281
ggcauuagauaauugugua

SEQ ID NO: 1808786 - RNA, 19 nt, Artificial Sequence
  Description of Artificial Sequence: Synthetic oligonucleotide
  Antisense strand to SEQ ID NO: 1808785
uacacaauuaucuaaugcc

SEQ ID NO: 1808787 - RNA, 19 nt, Artificial Sequence
  Description of Artificial Sequence: Synthetic oligonucleotide
  Sense strand starting at position 3360 of SEQ ID NO: 1563281
aacaauugccagcgaagau

SEQ ID NO: 1808788 - RNA, 19 nt, Artificial Sequence
  Description of Artificial Sequence: Synthetic oligonucleotide
  Antisense strand to SEQ ID NO: 1808787
aucuucgcuggcaauuguu

SEQ ID NO: 1808789 - RNA, 19 nt, Artificial Sequence
  Description of Artificial Sequence: Synthetic oligonucleotide
  Sense strand starting at position 3786 of SEQ ID NO: 1563281
ggcuacauaguauaagauu

SEQ ID NO: 1808790 - RNA, 19 nt, Artificial Sequence
  Description of Artificial Sequence: Synthetic oligonucleotide
  Antisense strand to SEQ ID NO: 1808789
aaucuuauacuauguagcc

SEQ ID NO: 1808791 - RNA, 19 nt, Artificial Sequence
  Description of Artificial Sequence: Synthetic oligonucleotide
  Sense strand starting at position 3871 of SEQ ID NO: 1563281
ggguuuauccgacaagcac

SEQ ID NO: 1808792 - RNA, 19 nt, Artificial Sequence
  Description of Artificial Sequence: Synthetic oligonucleotide
  Antisense strand to SEQ ID NO: 1808791
gugcuugucggauaaaccc

SEQ ID NO: 1808793 - RNA, 19 nt, Artificial Sequence
  Description of Artificial Sequence: Synthetic oligonucleotide
  Sense strand starting at position 3890 of SEQ ID NO: 1563281
aagggaauuuaucagggca

SEQ ID NO: 1808794 - RNA, 19 nt, Artificial Sequence
  Description of Artificial Sequence: Synthetic oligonucleotide
  Antisense strand to SEQ ID NO: 1808793
ugcccugauaaauucccuu

SEQ ID NO: 1808795 - RNA, 19 nt, Artificial Sequence
  Description of Artificial Sequence: Synthetic oligonucleotide
  Sense strand starting at position 3909 of SEQ ID NO: 1563281
gugaaacugguaugcauaa

SEQ ID NO: 1808796 - RNA, 19 nt, Artificial Sequence
  Description of Artificial Sequence: Synthetic oligonucleotide
  Antisense strand to SEQ ID NO: 1808795
uuaugcauaccaguuucac

SEQ ID NO: 1808797 - RNA, 19 nt, Artificial Sequence
  Description of Artificial Sequence: Synthetic oligonucleotide
  Sense strand starting at position 3910 of SEQ ID NO: 1563281
ugaaacugguaugcauaau

SEQ ID NO: 1808798 - RNA, 19 nt, Artificial Sequence
  Description of Artificial Sequence: Synthetic oligonucleotide
  Antisense strand to SEQ ID NO: 1808797
auuaugcauaccaguuuca

SEQ ID NO: 1808799 - RNA, 19 nt, Artificial Sequence
  Description of Artificial Sequence: Synthetic oligonucleotide
  Sense strand starting at position 3949 of SEQ ID NO: 1563281
cuugcuuuggucugaauau

SEQ ID NO: 1808800 - RNA, 19 nt, Artificial Sequence
  Description of Artificial Sequence: Synthetic oligonucleotide
  Antisense strand to SEQ ID NO: 1808799
auauucagaccaaagcaag

SEQ ID NO: 1808801 - RNA, 19 nt, Artificial Sequence
  Description of Artificial Sequence: Synthetic oligonucleotide
  Sense strand starting at position 805 of SEQ ID NO: 1563282
cauuaaguugaaugaaagu

SEQ ID NO: 1808802 - RNA, 19 nt, Artificial Sequence
  Description of Artificial Sequence: Synthetic oligonucleotide
  Antisense strand to SEQ ID NO: 1808801
acuuucauucaacuuaaug

SEQ ID NO: 1808803 - RNA, 19 nt, Artificial Sequence
  Description of Artificial Sequence: Synthetic oligonucleotide
  Sense strand starting at position 960 of SEQ ID NO: 1563282
cgaagagcaaguugaauua

SEQ ID NO: 1808804 - RNA, 19 nt, Artificial Sequence
  Description of Artificial Sequence: Synthetic oligonucleotide
  Antisense strand to SEQ ID NO: 1808803
uaauucaacuugcucuucg

SEQ ID NO: 1808805 - RNA, 19 nt, Artificial Sequence
  Description of Artificial Sequence: Synthetic oligonucleotide
  Sense strand starting at position 2182 of SEQ ID NO: 1563282
accugaaguuaugucuuaa

SEQ ID NO: 1808806 - RNA, 19 nt, Artificial Sequence
  Description of Artificial Sequence: Synthetic oligonucleotide
  Antisense strand to SEQ ID NO: 1808805
uuaagacauaacuucaggu

SEQ ID NO: 1808807 - RNA, 19 nt, Artificial Sequence
  Description of Artificial Sequence: Synthetic oligonucleotide
  Sense strand starting at position 2730 of SEQ ID NO: 1563282
gaaauagaccugcacgcau

SEQ ID NO: 1808808 - RNA, 19 nt, Artificial Sequence
  Description of Artificial Sequence: Synthetic oligonucleotide
  Antisense strand to SEQ ID NO: 1808807
augcgugcaggucuauuuc

SEQ ID NO: 1808809 - RNA, 19 nt, Artificial Sequence
  Description of Artificial Sequence: Synthetic oligonucleotide
  Sense strand starting at position 3116 of SEQ ID NO: 1563282
aaacaucugcgguacacau

SEQ ID NO: 1808810 - RNA, 19 nt, Artificial Sequence
  Description of Artificial Sequence: Synthetic oligonucleotide
  Antisense strand to SEQ ID NO: 1808809
auguguaccgcagauguuu

SEQ ID NO: 1808811 - RNA, 19 nt, Artificial Sequence
  Description of Artificial Sequence: Synthetic oligonucleotide
  Sense strand starting at position 3124 of SEQ ID NO: 1563282
gcgguacacauaugugaua

SEQ ID NO: 1808812 - RNA, 19 nt, Artificial Sequence
  Description of Artificial Sequence: Synthetic oligonucleotide
  Antisense strand to SEQ ID NO: 1808811
uaucacauauguguaccgc

SEQ ID NO: 1808813 - RNA, 19 nt, Artificial Sequence
  Description of Artificial Sequence: Synthetic oligonucleotide
  Sense strand starting at position 3125 of SEQ ID NO: 1563282
cgguacacauaugugauaa

SEQ ID NO: 1808814 - RNA, 19 nt, Artificial Sequence
  Description of Artificial Sequence: Synthetic oligonucleotide
  Antisense strand to SEQ ID NO: 1808813
uuaucacauauguguaccg

SEQ ID NO: 1808815 - RNA, 19 nt, Artificial Sequence
  Description of Artificial Sequence: Synthetic oligonucleotide
  Sense strand starting at position 3154 of SEQ ID NO: 1563282
ucuacaauauaugcgaauu

SEQ ID NO: 1808816 - RNA, 19 nt, Artificial Sequence
  Description of Artificial Sequence: Synthetic oligonucleotide
  Antisense strand to SEQ ID NO: 1808815
aauucgcauauauuguaga

SEQ ID NO: 1808817 - RNA, 19 nt, Artificial Sequence
  Description of Artificial Sequence: Synthetic oligonucleotide
  Sense strand starting at position 3278 of SEQ ID NO: 1563282
acccuuuggcauuagauaa

SEQ ID NO: 1808818 - RNA, 19 nt, Artificial Sequence
  Description of Artificial Sequence: Synthetic oligonucleotide
  Antisense strand to SEQ ID NO: 1808817
uuaucuaaugccaaagggu

SEQ ID NO: 1808819 - RNA, 19 nt, Artificial Sequence
  Description of Artificial Sequence: Synthetic oligonucleotide
  Sense strand starting at position 3382 of SEQ ID NO: 1563282
aacaauugccagcgaagau

SEQ ID NO: 1808820 - RNA, 19 nt, Artificial Sequence
  Description of Artificial Sequence: Synthetic oligonucleotide
  Antisense strand to SEQ ID NO: 1808819
aucuucgcuggcaauuguu

SEQ ID NO: 1808821 - RNA, 19 nt, Artificial Sequence
  Description of Artificial Sequence: Synthetic oligonucleotide
  Sense strand starting at position 3800 of SEQ ID NO: 1563282
ggcuacauaguauaagauu

SEQ ID NO: 1808822 - RNA, 19 nt, Artificial Sequence
  Description of Artificial Sequence: Synthetic oligonucleotide
  Antisense strand to SEQ ID NO: 1808821
aaucuuauacuauguagcc

SEQ ID NO: 1808823 - RNA, 19 nt, Artificial Sequence
  Description of Artificial Sequence: Synthetic oligonucleotide
  Sense strand starting at position 3885 of SEQ ID NO: 1563282
ggguuuauccgacaagcac

SEQ ID NO: 1808824 - RNA, 19 nt, Artificial Sequence
  Description of Artificial Sequence: Synthetic oligonucleotide
  Antisense strand to SEQ ID NO: 1808823
gugcuugucggauaaaccc

SEQ ID NO: 1808825 - RNA, 19 nt, Artificial Sequence
  Description of Artificial Sequence: Synthetic oligonucleotide
  Sense strand starting at position 3904 of SEQ ID NO: 1563282
aagggaauuuaucagggca

SEQ ID NO: 1808826 - RNA, 19 nt, Artificial Sequence
  Description of Artificial Sequence: Synthetic oligonucleotide
  Antisense strand to SEQ ID NO: 1808825
ugcccugauaaauucccuu

SEQ ID NO: 1808827 - RNA, 19 nt, Artificial Sequence
  Description of Artificial Sequence: Synthetic oligonucleotide
  Sense strand starting at position 3923 of SEQ ID NO: 1563282
gugaaacugguaugcauaa

SEQ ID NO: 1808828 - RNA, 19 nt, Artificial Sequence
  Description of Artificial Sequence: Synthetic oligonucleotide
  Antisense strand to SEQ ID NO: 1808827
uuaugcauaccaguuucac

SEQ ID NO: 1808829 - RNA, 19 nt, Artificial Sequence
  Description of Artificial Sequence: Synthetic oligonucleotide
  Sense strand starting at position 3924 of SEQ ID NO: 1563282
ugaaacugguaugcauaau

SEQ ID NO: 1808830 - RNA, 19 nt, Artificial Sequence
  Description of Artificial Sequence: Synthetic oligonucleotide
  Antisense strand to SEQ ID NO: 1808829
auuaugcauaccaguuuca

SEQ ID NO: 1808831 - RNA, 19 nt, Artificial Sequence
  Description of Artificial Sequence: Synthetic oligonucleotide
  Sense strand starting at position 3963 of SEQ ID NO: 1563282
cuugcuuuggucugaauau

SEQ ID NO: 1808832 - RNA, 19 nt, Artificial Sequence
  Description of Artificial Sequence: Synthetic oligonucleotide
  Antisense strand to SEQ ID NO: 1808831
auauucagaccaaagcaag

SEQ ID NO: 1808833 - RNA, 19 nt, Artificial Sequence
  Description of Artificial Sequence: Synthetic oligonucleotide
  Sense strand starting at position 3974 of SEQ ID NO: 1563282
cugaauauuuguguugcca

SEQ ID NO: 1808834 - RNA, 19 nt, Artificial Sequence
  Description of Artificial Sequence: Synthetic oligonucleotide
  Antisense strand to SEQ ID NO: 1808833
uggcaacacaaauauucag

SEQ ID NO: 1808835 - RNA, 19 nt, Artificial Sequence
  Description of Artificial Sequence: Synthetic oligonucleotide
  Sense strand starting at position 159 of SEQ ID NO: 1563283
cuaccugccucuguuagua

SEQ ID NO: 1808836 - RNA, 19 nt, Artificial Sequence
  Description of Artificial Sequence: Synthetic oligonucleotide
  Antisense strand to SEQ ID NO: 1808835
uacuaacagaggcagguag

SEQ ID NO: 1808837 - RNA, 19 nt, Artificial Sequence
  Description of Artificial Sequence: Synthetic oligonucleotide
  Sense strand starting at position 220 of SEQ ID NO: 1563283
uuggaucacuucuacugaa

SEQ ID NO: 1808838 - RNA, 19 nt, Artificial Sequence
  Description of Artificial Sequence: Synthetic oligonucleotide
  Antisense strand to SEQ ID NO: 1808837
uucaguagaagugauccaa

SEQ ID NO: 1808839 - RNA, 19 nt, Artificial Sequence
  Description of Artificial Sequence: Synthetic oligonucleotide
  Sense strand starting at position 237 of SEQ ID NO: 1563283
aagggaugguuugacaaca

SEQ ID NO: 1808840 - RNA, 19 nt, Artificial Sequence
  Description of Artificial Sequence: Synthetic oligonucleotide
  Antisense strand to SEQ ID NO: 1808839
uguugucaaaccaucccuu

SEQ ID NO: 1808841 - RNA, 19 nt, Artificial Sequence
  Description of Artificial Sequence: Synthetic oligonucleotide
  Sense strand starting at position 350 of SEQ ID NO: 1563283
ugauuuguuucucaguacu

SEQ ID NO: 1808842 - RNA, 19 nt, Artificial Sequence
  Description of Artificial Sequence: Synthetic oligonucleotide
  Antisense strand to SEQ ID NO: 1808841
aguacugagaaacaaauca

SEQ ID NO: 1808843 - RNA, 19 nt, Artificial Sequence
  Description of Artificial Sequence: Synthetic oligonucleotide
  Sense strand starting at position 353 of SEQ ID NO: 1563283
uuuguuucucaguacuuag

SEQ ID NO: 1808844 - RNA, 19 nt, Artificial Sequence
  Description of Artificial Sequence: Synthetic oligonucleotide
  Antisense strand to SEQ ID NO: 1808843
cuaaguacugagaaacaaa

SEQ ID NO: 1808845 - RNA, 19 nt, Artificial Sequence
  Description of Artificial Sequence: Synthetic oligonucleotide
  Sense strand starting at position 585 of SEQ ID NO: 1563283
gccucuucuuaggccauaa

SEQ ID NO: 1808846 - RNA, 19 nt, Artificial Sequence
  Description of Artificial Sequence: Synthetic oligonucleotide
  Antisense strand to SEQ ID NO: 1808845
uuauggccuaagaagaggc

SEQ ID NO: 1808847 - RNA, 19 nt, Artificial Sequence
  Description of Artificial Sequence: Synthetic oligonucleotide
  Sense strand starting at position 677 of SEQ ID NO: 1563283
cuauauaaccuauggguca

SEQ ID NO: 1808848 - RNA, 19 nt, Artificial Sequence
  Description of Artificial Sequence: Synthetic oligonucleotide
  Antisense strand to SEQ ID NO: 1808847
ugacccauagguuauauag

SEQ ID NO: 1808849 - RNA, 19 nt, Artificial Sequence
  Description of Artificial Sequence: Synthetic oligonucleotide
  Sense strand starting at position 727 of SEQ ID NO: 1563283
cauuaaguugaaugaaagu

SEQ ID NO: 1808850 - RNA, 19 nt, Artificial Sequence
  Description of Artificial Sequence: Synthetic oligonucleotide
  Antisense strand to SEQ ID NO: 1808849
acuuucauucaacuuaaug

SEQ ID NO: 1808851 - RNA, 19 nt, Artificial Sequence
  Description of Artificial Sequence: Synthetic oligonucleotide
  Sense strand starting at position 775 of SEQ ID NO: 1563283
gcuaaaguguguccuugag

SEQ ID NO: 1808852 - RNA, 19 nt, Artificial Sequence
  Description of Artificial Sequence: Synthetic oligonucleotide
  Antisense strand to SEQ ID NO: 1808851
cucaaggacacacuuuagc

SEQ ID NO: 1808853 - RNA, 19 nt, Artificial Sequence
  Description of Artificial Sequence: Synthetic oligonucleotide
  Sense strand starting at position 779 of SEQ ID NO: 1563283
aaguguguccuugagggaa

SEQ ID NO: 1808854 - RNA, 19 nt, Artificial Sequence
  Description of Artificial Sequence: Synthetic oligonucleotide
  Antisense strand to SEQ ID NO: 1808853
uucccucaaggacacacuu

SEQ ID NO: 1808855 - RNA, 19 nt, Artificial Sequence
  Description of Artificial Sequence: Synthetic oligonucleotide
  Sense strand starting at position 782 of SEQ ID NO: 1563283
uguguccuugagggaaaua

SEQ ID NO: 1808856 - RNA, 19 nt, Artificial Sequence
  Description of Artificial Sequence: Synthetic oligonucleotide
  Antisense strand to SEQ ID NO: 1808855
uauuucccucaaggacaca

SEQ ID NO: 1808857 - RNA, 19 nt, Artificial Sequence
  Description of Artificial Sequence: Synthetic oligonucleotide
  Sense strand starting at position 783 of SEQ ID NO: 1563283
guguccuugagggaaauau

SEQ ID NO: 1808858 - RNA, 19 nt, Artificial Sequence
  Description of Artificial Sequence: Synthetic oligonucleotide
  Antisense strand to SEQ ID NO: 1808857
auauuucccucaaggacac

SEQ ID NO: 1808859 - RNA, 19 nt, Artificial Sequence
  Description of Artificial Sequence: Synthetic oligonucleotide
  Sense strand starting at position 882 of SEQ ID NO: 1563283
cgaagagcaaguugaauua

SEQ ID NO: 1808860 - RNA, 19 nt, Artificial Sequence
  Description of Artificial Sequence: Synthetic oligonucleotide
  Antisense strand to SEQ ID NO: 1808859
uaauucaacuugcucuucg

SEQ ID NO: 1808861 - RNA, 19 nt, Artificial Sequence
  Description of Artificial Sequence: Synthetic oligonucleotide
  Sense strand starting at position 1131 of SEQ ID NO: 1563283
uggccuugcccgggaauua

SEQ ID NO: 1808862 - RNA, 19 nt, Artificial Sequence
  Description of Artificial Sequence: Synthetic oligonucleotide
  Antisense strand to SEQ ID NO: 1808861
uaauucccgggcaaggcca

SEQ ID NO: 1808863 - RNA, 19 nt, Artificial Sequence
  Description of Artificial Sequence: Synthetic oligonucleotide
  Sense strand starting at position 1143 of SEQ ID NO: 1563283
ggaauuacuggcuguccga

SEQ ID NO: 1808864 - RNA, 19 nt, Artificial Sequence
  Description of Artificial Sequence: Synthetic oligonucleotide
  Antisense strand to SEQ ID NO: 1808863
ucggacagccaguaauucc

SEQ ID NO: 1808865 - RNA, 19 nt, Artificial Sequence
  Description of Artificial Sequence: Synthetic oligonucleotide
  Sense strand starting at position 1654 of SEQ ID NO: 1563283
agaccagugucucucaaca

SEQ ID NO: 1808866 - RNA, 19 nt, Artificial Sequence
  Description of Artificial Sequence: Synthetic oligonucleotide
  Antisense strand to SEQ ID NO: 1808865
uguugagagacacuggucu

SEQ ID NO: 1808867 - RNA, 19 nt, Artificial Sequence
  Description of Artificial Sequence: Synthetic oligonucleotide
  Sense strand starting at position 1984 of SEQ ID NO: 1563283
aguacuagccauugcacau

SEQ ID NO: 1808868 - RNA, 19 nt, Artificial Sequence
  Description of Artificial Sequence: Synthetic oligonucleotide
  Antisense strand to SEQ ID NO: 1808867
augugcaauggcuaguacu

SEQ ID NO: 1808869 - RNA, 19 nt, Artificial Sequence
  Description of Artificial Sequence: Synthetic oligonucleotide
  Sense strand starting at position 2103 of SEQ ID NO: 1563283
accugaaguuaugucuuaa

SEQ ID NO: 1808870 - RNA, 19 nt, Artificial Sequence
  Description of Artificial Sequence: Synthetic oligonucleotide
  Antisense strand to SEQ ID NO: 1808869
uuaagacauaacuucaggu

SEQ ID NO: 1808871 - RNA, 19 nt, Artificial Sequence
  Description of Artificial Sequence: Synthetic oligonucleotide
  Sense strand starting at position 2148 of SEQ ID NO: 1563283
gccauugagugaguagcua

SEQ ID NO: 1808872 - RNA, 19 nt, Artificial Sequence
  Description of Artificial Sequence: Synthetic oligonucleotide
  Antisense strand to SEQ ID NO: 1808871
uagcuacucacucaauggc

SEQ ID NO: 1808873 - RNA, 19 nt, Artificial Sequence
  Description of Artificial Sequence: Synthetic oligonucleotide
  Sense strand starting at position 2245 of SEQ ID NO: 1563283
uggugauggccuuauucgu

SEQ ID NO: 1808874 - RNA, 19 nt, Artificial Sequence
  Description of Artificial Sequence: Synthetic oligonucleotide
  Antisense strand to SEQ ID NO: 1808873
acgaauaaggccaucacca

SEQ ID NO: 1808875 - RNA, 19 nt, Artificial Sequence
  Description of Artificial Sequence: Synthetic oligonucleotide
  Sense strand starting at position 2253 of SEQ ID NO: 1563283
gccuuauucguggcuugua

SEQ ID NO: 1808876 - RNA, 19 nt, Artificial Sequence
  Description of Artificial Sequence: Synthetic oligonucleotide
  Antisense strand to SEQ ID NO: 1808875
uacaagccacgaauaaggc

SEQ ID NO: 1808877 - RNA, 19 nt, Artificial Sequence
  Description of Artificial Sequence: Synthetic oligonucleotide
  Sense strand starting at position 2256 of SEQ ID NO: 1563283
uuauucguggcuuguagau

SEQ ID NO: 1808878 - RNA, 19 nt, Artificial Sequence
  Description of Artificial Sequence: Synthetic oligonucleotide
  Antisense strand to SEQ ID NO: 1808877
aucuacaagccacgaauaa

SEQ ID NO: 1808879 - RNA, 19 nt, Artificial Sequence
  Description of Artificial Sequence: Synthetic oligonucleotide
  Sense strand starting at position 2445 of SEQ ID NO: 1563283
ccaaacuaauucuauggga

SEQ ID NO: 1808880 - RNA, 19 nt, Artificial Sequence
  Description of Artificial Sequence: Synthetic oligonucleotide
  Antisense strand to SEQ ID NO: 1808879
ucccauagaauuaguuugg

SEQ ID NO: 1808881 - RNA, 19 nt, Artificial Sequence
  Description of Artificial Sequence: Synthetic oligonucleotide
  Sense strand starting at position 2631 of SEQ ID NO: 1563283
gaaauagaccugcacgcau

SEQ ID NO: 1808882 - RNA, 19 nt, Artificial Sequence
  Description of Artificial Sequence: Synthetic oligonucleotide
  Antisense strand to SEQ ID NO: 1808881
augcgugcaggucuauuuc

SEQ ID NO: 1808883 - RNA, 19 nt, Artificial Sequence
  Description of Artificial Sequence: Synthetic oligonucleotide
  Sense strand starting at position 2863 of SEQ ID NO: 1563283
uaacuuugaguuuggugau

SEQ ID NO: 1808884 - RNA, 19 nt, Artificial Sequence
  Description of Artificial Sequence: Synthetic oligonucleotide
  Antisense strand to SEQ ID NO: 1808883
aucaccaaacucaaaguua

SEQ ID NO: 1808885 - RNA, 19 nt, Artificial Sequence
  Description of Artificial Sequence: Synthetic oligonucleotide
  Sense strand starting at position 3074 of SEQ ID NO: 1563283
cuuaaagcucaaugauaga

SEQ ID NO: 1808886 - RNA, 19 nt, Artificial Sequence
  Description of Artificial Sequence: Synthetic oligonucleotide
  Antisense strand to SEQ ID NO: 1808885
ucuaucauugagcuuuaag

SEQ ID NO: 1808887 - RNA, 19 nt, Artificial Sequence
  Description of Artificial Sequence: Synthetic oligonucleotide
  Sense strand starting at position 3179 of SEQ ID NO: 1563283
acccuuuggcauuagauaa

SEQ ID NO: 1808888 - RNA, 19 nt, Artificial Sequence
  Description of Artificial Sequence: Synthetic oligonucleotide
  Antisense strand to SEQ ID NO: 1808887
uuaucuaaugccaaagggu

SEQ ID NO: 1808889 - RNA, 19 nt, Artificial Sequence
  Description of Artificial Sequence: Synthetic oligonucleotide
  Sense strand starting at position 3186 of SEQ ID NO: 1563283
ggcauuagauaauugugua

SEQ ID NO: 1808890 - RNA, 19 nt, Artificial Sequence
  Description of Artificial Sequence: Synthetic oligonucleotide
  Antisense strand to SEQ ID NO: 1808889
uacacaauuaucuaaugcc

SEQ ID NO: 1808891 - RNA, 19 nt, Artificial Sequence
  Description of Artificial Sequence: Synthetic oligonucleotide
  Sense strand starting at position 3283 of SEQ ID NO: 1563283
aacaauugccagcgaagau

SEQ ID NO: 1808892 - RNA, 19 nt, Artificial Sequence
  Description of Artificial Sequence: Synthetic oligonucleotide
  Antisense strand to SEQ ID NO: 1808891
aucuucgcuggcaauuguu

SEQ ID NO: 1808893 - RNA, 19 nt, Artificial Sequence
  Description of Artificial Sequence: Synthetic oligonucleotide
  Sense strand starting at position 3707 of SEQ ID NO: 1563283
aaggcuacauaguauaaga

SEQ ID NO: 1808894 - RNA, 19 nt, Artificial Sequence
  Description of Artificial Sequence: Synthetic oligonucleotide
  Antisense strand to SEQ ID NO: 1808893
ucuuauacuauguagccuu

SEQ ID NO: 1808895 - RNA, 19 nt, Artificial Sequence
  Description of Artificial Sequence: Synthetic oligonucleotide
  Sense strand starting at position 3709 of SEQ ID NO: 1563283
ggcuacauaguauaagauu

SEQ ID NO: 1808896 - RNA, 19 nt, Artificial Sequence
  Description of Artificial Sequence: Synthetic oligonucleotide
  Antisense strand to SEQ ID NO: 1808895
aaucuuauacuauguagcc

SEQ ID NO: 1808897 - RNA, 19 nt, Artificial Sequence
  Description of Artificial Sequence: Synthetic oligonucleotide
  Sense strand starting at position 3794 of SEQ ID NO: 1563283
ggguuuauccgacaagcac

SEQ ID NO: 1808898 - RNA, 19 nt, Artificial Sequence
  Description of Artificial Sequence: Synthetic oligonucleotide
  Antisense strand to SEQ ID NO: 1808897
gugcuugucggauaaaccc

SEQ ID NO: 1808899 - RNA, 19 nt, Artificial Sequence
  Description of Artificial Sequence: Synthetic oligonucleotide
  Sense strand starting at position 3813 of SEQ ID NO: 1563283
aagggaauuuaucagggca

SEQ ID NO: 1808900 - RNA, 19 nt, Artificial Sequence
  Description of Artificial Sequence: Synthetic oligonucleotide
  Antisense strand to SEQ ID NO: 1808899
ugcccugauaaauucccuu

SEQ ID NO: 1808901 - RNA, 19 nt, Artificial Sequence
  Description of Artificial Sequence: Synthetic oligonucleotide
  Sense strand starting at position 3815 of SEQ ID NO: 1563283
gggaauuuaucagggcagu

SEQ ID NO: 1808902 - RNA, 19 nt, Artificial Sequence
  Description of Artificial Sequence: Synthetic oligonucleotide
  Antisense strand to SEQ ID NO: 1808901
acugcccugauaaauuccc

SEQ ID NO: 1808903 - RNA, 19 nt, Artificial Sequence
  Description of Artificial Sequence: Synthetic oligonucleotide
  Sense strand starting at position 3832 of SEQ ID NO: 1563283
gugaaacugguaugcauaa

SEQ ID NO: 1808904 - RNA, 19 nt, Artificial Sequence
  Description of Artificial Sequence: Synthetic oligonucleotide
  Antisense strand to SEQ ID NO: 1808903
uuaugcauaccaguuucac

SEQ ID NO: 1808905 - RNA, 19 nt, Artificial Sequence
  Description of Artificial Sequence: Synthetic oligonucleotide
  Sense strand starting at position 3833 of SEQ ID NO: 1563283
ugaaacugguaugcauaau

SEQ ID NO: 1808906 - RNA, 19 nt, Artificial Sequence
  Description of Artificial Sequence: Synthetic oligonucleotide
  Antisense strand to SEQ ID NO: 1808905
auuaugcauaccaguuuca

SEQ ID NO: 1808907 - RNA, 19 nt, Artificial Sequence
  Description of Artificial Sequence: Synthetic oligonucleotide
  Sense strand starting at position 3869 of SEQ ID NO: 1563283
gugcuugcuuuggucugaa

SEQ ID NO: 1808908 - RNA, 19 nt, Artificial Sequence
  Description of Artificial Sequence: Synthetic oligonucleotide
  Antisense strand to SEQ ID NO: 1808907
uucagaccaaagcaagcac

SEQ ID NO: 1808909 - RNA, 19 nt, Artificial Sequence
  Description of Artificial Sequence: Synthetic oligonucleotide
  Sense strand starting at position 3872 of SEQ ID NO: 1563283
cuugcuuuggucugaauau

SEQ ID NO: 1808910 - RNA, 19 nt, Artificial Sequence
  Description of Artificial Sequence: Synthetic oligonucleotide
  Antisense strand to SEQ ID NO: 1808909
auauucagaccaaagcaag

SEQ ID NO: 1808911 - RNA, 19 nt, Artificial Sequence
  Description of Artificial Sequence: Synthetic oligonucleotide
  Sense strand starting at position 3915 of SEQ ID NO: 1563283
cugaauuaccaaggugaug

SEQ ID NO: 1808912 - RNA, 19 nt, Artificial Sequence
  Description of Artificial Sequence: Synthetic oligonucleotide
  Antisense strand to SEQ ID NO: 1808911
caucaccuugguaauucag

SEQ ID NO: 1808913 - RNA, 19 nt, Artificial Sequence
  Description of Artificial Sequence: Synthetic oligonucleotide
  Sense strand starting at position 3967 of SEQ ID NO: 1563283
acuagaucaugagagcaga

SEQ ID NO: 1808914 - RNA, 19 nt, Artificial Sequence
  Description of Artificial Sequence: Synthetic oligonucleotide
  Antisense strand to SEQ ID NO: 1808913
ucugcucucaugaucuagu

SEQ ID NO: 1808915 - RNA, 19 nt, Artificial Sequence
  Description of Artificial Sequence: Synthetic oligonucleotide
  Sense strand starting at position 160 of SEQ ID NO: 1563284
cuaccugccucuguuagua

SEQ ID NO: 1808916 - RNA, 19 nt, Artificial Sequence
  Description of Artificial Sequence: Synthetic oligonucleotide
  Antisense strand to SEQ ID NO: 1808915
uacuaacagaggcagguag

SEQ ID NO: 1808917 - RNA, 19 nt, Artificial Sequence
  Description of Artificial Sequence: Synthetic oligonucleotide
  Sense strand starting at position 165 of SEQ ID NO: 1563284
ugccucuguuaguagggaa

SEQ ID NO: 1808918 - RNA, 19 nt, Artificial Sequence
  Description of Artificial Sequence: Synthetic oligonucleotide
  Antisense strand to SEQ ID NO: 1808917
uucccuacuaacagaggca

SEQ ID NO: 1808919 - RNA, 19 nt, Artificial Sequence
  Description of Artificial Sequence: Synthetic oligonucleotide
  Sense strand starting at position 238 of SEQ ID NO: 1563284
aagggaugguuugacaaca

SEQ ID NO: 1808920 - RNA, 19 nt, Artificial Sequence
  Description of Artificial Sequence: Synthetic oligonucleotide
  Antisense strand to SEQ ID NO: 1808919
uguugucaaaccaucccuu

SEQ ID NO: 1808921 - RNA, 19 nt, Artificial Sequence
  Description of Artificial Sequence: Synthetic oligonucleotide
  Sense strand starting at position 586 of SEQ ID NO: 1563284
gccucuucuuaggccauaa

SEQ ID NO: 1808922 - RNA, 19 nt, Artificial Sequence
  Description of Artificial Sequence: Synthetic oligonucleotide
  Antisense strand to SEQ ID NO: 1808921
uuauggccuaagaagaggc

SEQ ID NO: 1808923 - RNA, 19 nt, Artificial Sequence
  Description of Artificial Sequence: Synthetic oligonucleotide
  Sense strand starting at position 645 of SEQ ID NO: 1563284
acgcccaaauauuggaaau

SEQ ID NO: 1808924 - RNA, 19 nt, Artificial Sequence
  Description of Artificial Sequence: Synthetic oligonucleotide
  Antisense strand to SEQ ID NO: 1808923
auuuccaauauuugggcgu

SEQ ID NO: 1808925 - RNA, 19 nt, Artificial Sequence
  Description of Artificial Sequence: Synthetic oligonucleotide
  Sense strand starting at position 699 of SEQ ID NO: 1563284
gagggagucucaggagaau

SEQ ID NO: 1808926 - RNA, 19 nt, Artificial Sequence
  Description of Artificial Sequence: Synthetic oligonucleotide
  Antisense strand to SEQ ID NO: 1808925
auucuccugagacucccuc

SEQ ID NO: 1808927 - RNA, 19 nt, Artificial Sequence
  Description of Artificial Sequence: Synthetic oligonucleotide
  Sense strand starting at position 728 of SEQ ID NO: 1563284
cauuaaguugaaugaaagu

SEQ ID NO: 1808928 - RNA, 19 nt, Artificial Sequence
  Description of Artificial Sequence: Synthetic oligonucleotide
  Antisense strand to SEQ ID NO: 1808927
acuuucauucaacuuaaug

SEQ ID NO: 1808929 - RNA, 19 nt, Artificial Sequence
  Description of Artificial Sequence: Synthetic oligonucleotide
  Sense strand starting at position 883 of SEQ ID NO: 1563284
cgaagagcaaguugaauua

SEQ ID NO: 1808930 - RNA, 19 nt, Artificial Sequence
  Description of Artificial Sequence: Synthetic oligonucleotide
  Antisense strand to SEQ ID NO: 1808929
uaauucaacuugcucuucg

SEQ ID NO: 1808931 - RNA, 19 nt, Artificial Sequence
  Description of Artificial Sequence: Synthetic oligonucleotide
  Sense strand starting at position 1985 of SEQ ID NO: 1563284
aguacuagccauugcacau

SEQ ID NO: 1808932 - RNA, 19 nt, Artificial Sequence
  Description of Artificial Sequence: Synthetic oligonucleotide
  Antisense strand to SEQ ID NO: 1808931
augugcaauggcuaguacu

SEQ ID NO: 1808933 - RNA, 19 nt, Artificial Sequence
  Description of Artificial Sequence: Synthetic oligonucleotide
  Sense strand starting at position 2105 of SEQ ID NO: 1563284
accugaaguuaugucuuaa

SEQ ID NO: 1808934 - RNA, 19 nt, Artificial Sequence
  Description of Artificial Sequence: Synthetic oligonucleotide
  Antisense strand to SEQ ID NO: 1808933
uuaagacauaacuucaggu

SEQ ID NO: 1808935 - RNA, 19 nt, Artificial Sequence
  Description of Artificial Sequence: Synthetic oligonucleotide
  Sense strand starting at position 2109 of SEQ ID NO: 1563284
gaaguuaugucuuaaguca

SEQ ID NO: 1808936 - RNA, 19 nt, Artificial Sequence
  Description of Artificial Sequence: Synthetic oligonucleotide
  Antisense strand to SEQ ID NO: 1808935
ugacuuaagacauaacuuc

SEQ ID NO: 1808937 - RNA, 19 nt, Artificial Sequence
  Description of Artificial Sequence: Synthetic oligonucleotide
  Sense strand starting at position 2150 of SEQ ID NO: 1563284
gccauugagugaguagcua

SEQ ID NO: 1808938 - RNA, 19 nt, Artificial Sequence
  Description of Artificial Sequence: Synthetic oligonucleotide
  Antisense strand to SEQ ID NO: 1808937
uagcuacucacucaauggc

SEQ ID NO: 1808939 - RNA, 19 nt, Artificial Sequence
  Description of Artificial Sequence: Synthetic oligonucleotide
  Sense strand starting at position 2472 of SEQ ID NO: 1563284
cuaauucuaugggaucaag

SEQ ID NO: 1808940 - RNA, 19 nt, Artificial Sequence
  Description of Artificial Sequence: Synthetic oligonucleotide
  Antisense strand to SEQ ID NO: 1808939
cuugaucccauagaauuag

SEQ ID NO: 1808941 - RNA, 19 nt, Artificial Sequence
  Description of Artificial Sequence: Synthetic oligonucleotide
  Sense strand starting at position 2653 of SEQ ID NO: 1563284
gaaauagaccugcacgcau

SEQ ID NO: 1808942 - RNA, 19 nt, Artificial Sequence
  Description of Artificial Sequence: Synthetic oligonucleotide
  Antisense strand to SEQ ID NO: 1808941
augcgugcaggucuauuuc

SEQ ID NO: 1808943 - RNA, 19 nt, Artificial Sequence
  Description of Artificial Sequence: Synthetic oligonucleotide
  Sense strand starting at position 2667 of SEQ ID NO: 1563284
cgcauauagucaggugauu

SEQ ID NO: 1808944 - RNA, 19 nt, Artificial Sequence
  Description of Artificial Sequence: Synthetic oligonucleotide
  Antisense strand to SEQ ID NO: 1808943
aaucaccugacuauaugcg

SEQ ID NO: 1808945 - RNA, 19 nt, Artificial Sequence
  Description of Artificial Sequence: Synthetic oligonucleotide
  Sense strand starting at position 3039 of SEQ ID NO: 1563284
aaacaucugcgguacacau

SEQ ID NO: 1808946 - RNA, 19 nt, Artificial Sequence
  Description of Artificial Sequence: Synthetic oligonucleotide
  Antisense strand to SEQ ID NO: 1808945
auguguaccgcagauguuu

SEQ ID NO: 1808947 - RNA, 19 nt, Artificial Sequence
  Description of Artificial Sequence: Synthetic oligonucleotide
  Sense strand starting at position 3047 of SEQ ID NO: 1563284
gcgguacacauaugugaua

SEQ ID NO: 1808948 - RNA, 19 nt, Artificial Sequence
  Description of Artificial Sequence: Synthetic oligonucleotide
  Antisense strand to SEQ ID NO: 1808947
uaucacauauguguaccgc

SEQ ID NO: 1808949 - RNA, 19 nt, Artificial Sequence
  Description of Artificial Sequence: Synthetic oligonucleotide
  Sense strand starting at position 3048 of SEQ ID NO: 1563284
cgguacacauaugugauaa

SEQ ID NO: 1808950 - RNA, 19 nt, Artificial Sequence
  Description of Artificial Sequence: Synthetic oligonucleotide
  Antisense strand to SEQ ID NO: 1808949
uuaucacauauguguaccg

SEQ ID NO: 1808951 - RNA, 19 nt, Artificial Sequence
  Description of Artificial Sequence: Synthetic oligonucleotide
  Sense strand starting at position 3077 of SEQ ID NO: 1563284
ucuacaauauaugcgaauu

SEQ ID NO: 1808952 - RNA, 19 nt, Artificial Sequence
  Description of Artificial Sequence: Synthetic oligonucleotide
  Antisense strand to SEQ ID NO: 1808951
aauucgcauauauuguaga

SEQ ID NO: 1808953 - RNA, 19 nt, Artificial Sequence
  Description of Artificial Sequence: Synthetic oligonucleotide
  Sense strand starting at position 3201 of SEQ ID NO: 1563284
acccuuuggcauuagauaa

SEQ ID NO: 1808954 - RNA, 19 nt, Artificial Sequence
  Description of Artificial Sequence: Synthetic oligonucleotide
  Antisense strand to SEQ ID NO: 1808953
uuaucuaaugccaaagggu

SEQ ID NO: 1808955 - RNA, 19 nt, Artificial Sequence
  Description of Artificial Sequence: Synthetic oligonucleotide
  Sense strand starting at position 3305 of SEQ ID NO: 1563284
aacaauugccagcgaagau

SEQ ID NO: 1808956 - RNA, 19 nt, Artificial Sequence
  Description of Artificial Sequence: Synthetic oligonucleotide
  Antisense strand to SEQ ID NO: 1808955
aucuucgcuggcaauuguu

SEQ ID NO: 1808957 - RNA, 19 nt, Artificial Sequence
  Description of Artificial Sequence: Synthetic oligonucleotide
  Sense strand starting at position 3721 of SEQ ID NO: 1563284
aaggcuacauaguauaaga

SEQ ID NO: 1808958 - RNA, 19 nt, Artificial Sequence
  Description of Artificial Sequence: Synthetic oligonucleotide
  Antisense strand to SEQ ID NO: 1808957
ucuuauacuauguagccuu

SEQ ID NO: 1808959 - RNA, 19 nt, Artificial Sequence
  Description of Artificial Sequence: Synthetic oligonucleotide
  Sense strand starting at position 3723 of SEQ ID NO: 1563284
ggcuacauaguauaagauu

SEQ ID NO: 1808960 - RNA, 19 nt, Artificial Sequence
  Description of Artificial Sequence: Synthetic oligonucleotide
  Antisense strand to SEQ ID NO: 1808959
aaucuuauacuauguagcc

SEQ ID NO: 1808961 - RNA, 19 nt, Artificial Sequence
  Description of Artificial Sequence: Synthetic oligonucleotide
  Sense strand starting at position 3808 of SEQ ID NO: 1563284
ggguuuauccgacaagcac

SEQ ID NO: 1808962 - RNA, 19 nt, Artificial Sequence
  Description of Artificial Sequence: Synthetic oligonucleotide
  Antisense strand to SEQ ID NO: 1808961
gugcuugucggauaaaccc

SEQ ID NO: 1808963 - RNA, 19 nt, Artificial Sequence
  Description of Artificial Sequence: Synthetic oligonucleotide
  Sense strand starting at position 3827 of SEQ ID NO: 1563284
aagggaauuuaucagggca

SEQ ID NO: 1808964 - RNA, 19 nt, Artificial Sequence
  Description of Artificial Sequence: Synthetic oligonucleotide
  Antisense strand to SEQ ID NO: 1808963
ugcccugauaaauucccuu

SEQ ID NO: 1808965 - RNA, 19 nt, Artificial Sequence
  Description of Artificial Sequence: Synthetic oligonucleotide
  Sense strand starting at position 3829 of SEQ ID NO: 1563284
gggaauuuaucagggcagu

SEQ ID NO: 1808966 - RNA, 19 nt, Artificial Sequence
  Description of Artificial Sequence: Synthetic oligonucleotide
  Antisense strand to SEQ ID NO: 1808965
acugcccugauaaauuccc

SEQ ID NO: 1808967 - RNA, 19 nt, Artificial Sequence
  Description of Artificial Sequence: Synthetic oligonucleotide
  Sense strand starting at position 3844 of SEQ ID NO: 1563284
cagugaaacugguaugcau

SEQ ID NO: 1808968 - RNA, 19 nt, Artificial Sequence
  Description of Artificial Sequence: Synthetic oligonucleotide
  Antisense strand to SEQ ID NO: 1808967
augcauaccaguuucacug

SEQ ID NO: 1808969 - RNA, 19 nt, Artificial Sequence
  Description of Artificial Sequence: Synthetic oligonucleotide
  Sense strand starting at position 3846 of SEQ ID NO: 1563284
gugaaacugguaugcauaa

SEQ ID NO: 1808970 - RNA, 19 nt, Artificial Sequence
  Description of Artificial Sequence: Synthetic oligonucleotide
  Antisense strand to SEQ ID NO: 1808969
uuaugcauaccaguuucac

SEQ ID NO: 1808971 - RNA, 19 nt, Artificial Sequence
  Description of Artificial Sequence: Synthetic oligonucleotide
  Sense strand starting at position 3847 of SEQ ID NO: 1563284
ugaaacugguaugcauaau
